United States Patent Application Publication US 2007/0054278 A1 - sequence listing, part 133

SEQ ID NO: 366840 - DNA, 201 bp, Homo sapiens
ctaagcctttgtatcaactggtactcccaccagcaatgtgtgagaaactatatttggttttaatctgtattccctggttactagtgagcctgagcatcttttctgtctattaggtgtttgaatttaatctgtgaattgcctttttgtgttcttttttattcctttgattgttttggtggtggttatgataaaatgcacaag

SEQ ID NO: 366841 - DNA, 201 bp, Homo sapiens
taagcctttgtatcaactggtactcccaccagcaatgtgtgagaaactatatttggttttaatctgtattccctggttactagtgagcctgagcatcttttctgtctattaggtgtttgaatttaatctgtgaattgcctttttgtgttcttttttattcctttgattgttttggtggtggttatgataaaatgcacaagc

SEQ ID NO: 366842 - DNA, 201 bp, Homo sapiens
ccctcgtgtgcccctctgcccttaggatgcggaatttggtcagagccgttcatgtcagagctcagcagaatggcagctgaaccctgggagagcactgcctrttctgagaaaggcctgcaattgtgtcttcacgatgcttttccaagacagccaaggcaggtataattttcctcagcaagaaagaggaacctcggaggtgtg

SEQ ID NO: 366843 - DNA, 201 bp, Homo sapiens
ctccctttctatgtatggaggctgctaggataatgcagcgtctgctacataacaggccacacaaaggtcggtttccttctggtccccctgcttccctaccygggactctccctgttccttcctatgtgaggacatctgacaatctcttatgcaccgaagaatatatacgtcttaaaagaggaacacaagggctggacacgg

SEQ ID NO: 366844 - DNA, 201 bp, Homo sapiens
ctgctgagcctgccaatgcaacagccacggaagattaagcaggtgatgatgggaagtcaggcctgagggctaggatcctgggcgggaagtaggagggatgwtcctatgggcttaggaagccctggaaggatcccataacagaggcggcggtttgcattttccctccaggaacacacctgtcattaaagttgctgctgcaaa

SEQ ID NO: 366845 - DNA, 201 bp, Homo sapiens
ttggtaatatttctcccatgctgttactctccaaagctgcccgataattctagagtgggttccggggacgtgcccgctgtttggggcctagaaatgaactygggaggttgttttgcttgctgagagctggtctgggaatgccccttgaccgttccctgccctgctcctggcccactcccagactgctcctgtgcctggccc

SEQ ID NO: 366846 - DNA, 201 bp, Homo sapiens
gctgcatgggtggtgagcagtgggagggatgcgatggggggagtgggctcagctgtctgctgtgggtgtttcctcggggacctggctggcagggacctccyggccagcccagaactgccaacatgtctgccagcactgcccctccattcccagtcctggggggaggctctgtctgggcagcttgaggcctgacctactgtg

SEQ ID NO: 366847 - DNA, 201 bp, Homo sapiens
tgtgcagaggtgggtgtgggccatagcccagacctgttgaaccagttgtaggctctggaatcctctgtccccaggtagtgaccaggccctgacaggccggwatctgtccctcccatcaccctcccagttatgggtgcagatgaccctgaaattgctaaagcctcagggcttgagcccagaaagtgtgagcaggctggtggg

SEQ ID NO: 366848 - DNA, 201 bp, Homo sapiens
tggctcacacctgtaatcccagcactttgggaggccaaggcgagtggatcacctgaggtcaggagttcgagaccagcctggccagcatggtgaaacccccrtctctactaaaaatacaaaaaaattaactggccatggtggtgggcacctgtaatcccagctactcgggaggctgaggcaggagaatcgtttgaacccggg

SEQ ID NO: 366849 - DNA, 201 bp, Homo sapiens
gaacccgggaagtggaggttgcagtgagacgagatcgtgccattgcactccagcctgggcaatagggcgagagtctgtctcaaaaaaaaaaaaaaaaaaaraaaaaagaaagtgatcttcagagggatgaatcccttcctatattcagcttctatccagaatagtactttttctcttgcataactgggtatagatttcaga

SEQ ID NO: 366850 - DNA, 201 bp, Homo sapiens
aagcctttgtatcaactggtactcccaccagcaatgtgtgagaaactatatttggttttaatctgtattccctggttactagtgagcctgagcatcttttctgtctattaggtgtttgaatttaatctgtgaattgcctttttgtgttcttttttattcctttgattgttttggtggtggttatgataaaatgcacaagca

SEQ ID NO: 366851 - DNA, 201 bp, Homo sapiens
caactctaatgagccaggaagcctccccgtgcccaggcgtgctgtgatcacagtgttcaatgatggggtgaggctgcagcgtccagccagggactgtgccrcaggggccagaagatatctgacctactgtcactgcctcttccactctgttccacctgcactggagcgatgctatccgatgaacagatccatttattaatt

SEQ ID NO: 366852 - DNA, 201 bp, Homo sapiens
cacagtgccactgtcctgctcatgttcatgctcactgccacacactaacacatgtgcacacgggtatgtatgcaggcacacatgccacacaccacaaataygcacacatgcaggtgcacacacaacacgcatcaccacacatgggcatgcacagcatcccacacggcacccacatgcaggtacacgtgtgcacacacaaca

SEQ ID NO: 366853 - DNA, 201 bp, Homo sapiens
ggggtgaggctgcagcgtccagccagggactgtgccgcaggggccagaagatatctgacctactgtcactgcctcttccactctgttccacctgcactggrgcgatgctatccgatgaacagatccatttattaattcaacacgtttgtattgagagcctgctgggtgccgggcactattgtcaacatgggtaatacagca

SEQ ID NO: 366854 - DNA, 201 bp, Homo sapiens
gcacacgggtatgtatgcaggcacacatgccacacaccacaaatacgcacacatgcaggtgcacacacaacacgcatcaccacacatgggcatgcacagcwtcccacacggcacccacatgcaggtacacgtgtgcacacacaacacacaaacacatcacacgtctatacacagctccccacacatggccaacacgtttat

SEQ ID NO: 366855 - DNA, 201 bp, Homo sapiens
acaccacactacaaacatgcatatgcaagtacatgtaccacaacacacataaacatgcatcacaacacatgcacacaccaaagcacacaacacatcacagygcacacatgcctgcacatatgtgcacatgtcacaacatgcatacacacatcacagtacatgcacatcacacttcacactaaaaacatgatacagacatgt

SEQ ID NO: 366856 - DNA, 201 bp, Homo sapiens
gctgcagcgtccagccagggactgtgccgcaggggccagaagatatctgacctactgtcactgcctcttccactctgttccacctgcactggagcgatgcyatccgatgaacagatccatttattaattcaacacgtttgtattgagagcctgctgggtgccgggcactattgtcaacatgggtaatacagcagcaagcaa

SEQ ID NO: 366857 - DNA, 201 bp, Homo sapiens
gtacataccacaacacacactgcaacacatacacacattcgccatacacaccatcatgtgtacttacaggtacacacactatgacatacacacacaccatrtgctcacacacacaagtacacacactaccaacagatacacatgttcacacatgccatgacacatgtacacggtaacacacccacaccacacatgtacaca

SEQ ID NO: 366858 - DNA, 201 bp, Homo sapiens
cagcgtccagccagggactgtgccgcaggggccagaagatatctgacctactgtcactgcctcttccactctgttccacctgcactggagcgatgctatcygatgaacagatccatttattaattcaacacgtttgtattgagagcctgctgggtgccgggcactattgtcaacatgggtaatacagcagcaagcaaaaca

SEQ ID NO: 366859 - DNA, 201 bp, Homo sapiens
ctttctatgtatggaggctgctaggataatgcagcgtctgctacataacaggccacacaaaggtcggtttccttctggtccccctgcttccctacctgggrctctccctgttccttcctatgtgaggacatctgacaatctcttatgcaccgaagaatatatacgtcttaaaagaggaacacaagggctggacacggtggc

SEQ ID NO: 366860 - DNA, 201 bp, Homo sapiens
gtttccattttttgctattgtaacactgctaataaacatgcttgaatggggtgtcccgtacaagggagggttactcggggctgtgcccggaaatgcaatcrccagattgtaaggtatgcacgtgttcagcctgactacatattgtgaagtgctcttctaagcctttgtatcaactggtactcccaccagcaatgtgtgaga

SEQ ID NO: 366861 - DNA, 201 bp, Homo sapiens
ctggtttcagttctttggggtatataccccgaagcacagttgtgggatcctatcttgtctcttgttttctctttgcttccatgttttttctcattgtttcrtgggaatactgatattatatattcaagtatttgttgattacatgcactgtacctgacttgtttaaagcctgatgtcttgagtactgtgcacccctgtgcc

SEQ ID NO: 366862 - DNA, 201 bp, Homo sapiens
tatgattttcaagtggttggtgtcttgtgactggcagctgataaacgggtgatacagtgtttctatacaggagtctgcagtgccaggctgcaggggcggaygggagggggtcgtggtgggtagcctgtggagcctgagggtgggaacagagagacttcttttgctgtaggtggaagcctgtctggctcctttccctcaaag

SEQ ID NO: 366863 - DNA, 201 bp, Homo sapiens
gcctttgtatcaactggtactcccaccagcaatgtgtgagaaactatatttggttttaatctgtattccctggttactagtgagcctgagcatcttttctgtctattaggtgtttgaatttaatctgtgaattgcctttttgtgttcttttttattcctttgattgttttggtggtggttatgataaaatgcacaagcaca

SEQ ID NO: 366864 - DNA, 201 bp, Homo sapiens
aacagagagacttcttttgctgtaggtggaagcctgtctggctcctttccctcaaaggtcagacagcttgagagatgtttccatcctcccatgcatgaccytgaggcagttagctggtcagttactcactgtgctctctgccaactctaatgagccaggaagcctccccgtgcccaggcgtgctgtgatcacagtgttcaa

SEQ ID NO: 366865 - DNA, 201 bp, Homo sapiens
agccatcctgcttgccgctgctgctgacgctgctgtcacactgcgtgtccaggaaggagctgctgtcgctgagggagcctctctggaactcccgctcacamagctcgatggacgagctgcccatgcccagcacaaaccgctgcccgtagtcgtagaggcggccctggccgctcagggtgctgtagatgttggtgaaggaca

SEQ ID NO: 366866 - DNA, 201 bp, Homo sapiens
gcacgagaattgcttgaacccgggaggtggaggttacagtgagccaagatcacacaccattgtaccccagcctgaatgacaaagcaagactttgtctccaaaaaaaaaaaaaaaaaaaaaaaatagagaaaaggaaagctggatgaagagagatagccaagcccatgtctacggaaaagcattcttgactgagtgaacgaa

SEQ ID NO: 366867 - DNA, 201 bp, Homo sapiens
atactccacacacagtgggcatatgaattaatctgaataaccacagtgatgcttaacctgtgacacacgagaggcttgccatgtgtctctgctagttgcayggtataggtagtaggttccctcctactctctgggccgggatgtttcttctcccttgcaacctgctttcctcgtttctttttggagccctgtagaatcagc

SEQ ID NO: 366868 - DNA, 201 bp, Homo sapiens
tctcttcctactgttgtttgggaactggatgtccgagccagggactgtagacaggcccaggaggcctctagtgatgggaatcctcctcccaacccccagaytgaacaatgccccagtggctggctatgagggtgacgtgggctccaagaccaccatgcgtctcttctaccctgaatctgcccacttcgaccccaaagtaga

SEQ ID NO: 366869 - DNA, 201 bp, Homo sapiens
tgttccacctgcactggagcgatgctatccgatgaacagatccatttattaattcaacacgtttgtattgagagcctgctgggtgccgggcactattgtcracatgggtaatacagcagcaagcaaaacaagagaaacatctttgcaagcaggggagggggcctgcagtgttgggtgtgtggagttgttgctgggaagtag

SEQ ID NO: 366870 - DNA, 201 bp, Homo sapiens
cgcagcgcgggtcggggtggggctgccacagccctgcggagctgctttccggggtccctttccctggaccagattttcgcgggaagccggatcctctccgytcccttggagtgagcaagcgggacagttctgcggaaagtttccgcccccaatcccccagccctgcgcccggactgaagcggcggcccccacctccagcat

SEQ ID NO: 366871 - DNA, 201 bp, Homo sapiens
tgcttccatttcagtaattgtctttggaggtacgttgtttgctcaagcaacctcccttcaagatagtgcctttttctttctctctctctcttttttttggsggggggaggcagagttttactcttgtcgcccaggctggagcacagtggtgtgatctcggctcactgcaacctcggcctcctggattcaagcgattctcat

SEQ ID NO: 366872 - DNA, 201 bp, Homo sapiens
gcagtgttcgggtgcccagctgtgccctgtctgacctcatggccacccacaagctggcaccccccacaggcctcttggggaagcctgtactttccaccgcmggaggcgggtaccgcgtggaagccaggctcaggcggactcattctttttgaactttgggaacaggcctggtacaggctgagttctcacaagagacacaca

SEQ ID NO: 366873 - DNA, 201 bp, Homo sapiens
ctcccttcccaatgcagggccctctcctctggcgagcctgccttgatactccccggctcaacccctttaaccctgctggctcctaatgggactaatgggayttcaggtgtggacccttggaccctccgctgcacagttccagaaacttgttcatcaagtgccaggctgaccatggtgtccgtctcagtgcccagcagttgt

SEQ ID NO: 366874 - DNA, 201 bp, Homo sapiens
aaggttgcttgggttgttgcatttcggggttagagggtgtgggtgtccagagctgtgggtttttagtgttggctgagccctttacctgggacctacagcckggccacaaccccatctctgttcccctgtaccccacactgccctgtgataggatgtgataagatggtaggattgcctatactgaagccctgggtgccactg

SEQ ID NO: 366875 - DNA, 201 bp, Homo sapiens
aggaggctggagagggagatgagagagggcgaggacctgaacccagctcctggcagtgggaagggaaaaggaggagatggactcaacattgtgttggttgtttttttttttgagatggagtcttgctctgtcacccaggctggagtgcagtggggtgatcttggctcactgcaacctctgcctcccaggttcaagtgattc

SEQ ID NO: 366876 - DNA, 201 bp, Homo sapiens
cttgactgagtgaacgaaagtacaaagcctcagaggagggagcatgcctaggtagccccctagacctggtgaggctggtgcgtggggcagcctccatggaraggagttgggcaaggagggaggaggtgctggccagtagagcacgtgtgtctctgtgcgtcagagcaaggacccgggctctccccgtaagtgagaagagtc

SEQ ID NO: 366877 - DNA, 201 bp, Homo sapiens
tctgtgaattgcctttttgtgttcttttttattcctttgattgttttggtggtggttatgataaaatgcacaagcacaaggttctgttgacctgttgaccrtcttaaccctttttatgtgtatagttcagtggcattaagtacatttagaatgtgctaccatcccgccatccagctccagaaatcttttcgtctcgtcaaa

SEQ ID NO: 366878 - DNA, 201 bp, Homo sapiens
ggagcatgcctaggtagccccctagacctggtgaggctggtgcgtggggcagcctccatggagaggagttgggcaaggagggaggaggtgctggccagtaragcacgtgtgtctctgtgcgtcagagcaaggacccgggctctccccgtaagtgagaagagtccatggaggttttggggctgaggaggagttttacagatg

SEQ ID NO: 366879 - DNA, 201 bp, Homo sapiens
tttgaattggattgatttgggttggtttctcctcagattcctagtaagtttccttggaaaaacacagggcttgtctcagcggaactcagagccaaagcatktccatggaaggctcttaacacctctgggcctcagtgccttgtctgcaccctggagagctgggcagcagcattgaaggtgccttccgatcctgggatcccc

SEQ ID NO: 366880 - DNA, 201 bp, Homo sapiens
aggtctctggggtccctaggcccaagctggctgggacctcctctccccactgctttgtctacactaaaccctcaggacgggggagggcggagacactagcrgccagcacaggcctccctaccccctgctgggttccctccccagctagccaggaagtcccttccccccttcccagggccattctcatcatctccttccgta

SEQ ID NO: 366881 - DNA, 201 bp, Homo sapiens
aactgaccagctcccttcggccagggacatcttggttcctggcagagcaccaagaagagcagattgtcttcctacccgggggcacctttgcccagcaggtygggtgagctggcctcttggtgagaggctggtccccttggacatgagtggattcgatgcctgctttcccacccaggtactctactgtggctttgctcctgc

SEQ ID NO: 366882 - DNA, 201 bp, Homo sapiens
gacctggtgaggctggtgcgtggggcagcctccatggagaggagttgggcaaggagggaggaggtgctggccagtagagcacgtgtgtctctgtgcgtcaragcaaggacccgggctctccccgtaagtgagaagagtccatggaggttttggggctgaggaggagttttacagatgaccggtctgttcttggcacttgca

SEQ ID NO: 366883 - DNA, 201 bp, Homo sapiens
ctgaccttttcttctctgacttgctgtcatttgttgtatagatttggggtttgggccatcagagctaaagaccagattccatggctgtgtcttataacccrgggcccttcttaccttcaggttctgaaactctttctcctcttctttgaggacctccagctgtttcaggactgagtcttgctggaattcaccccggtccat

SEQ ID NO: 366884 - DNA, 201 bp, Homo sapiens
taacccagaatttctaggtgttgggacccaaatactcatttaaaaaattttttttgtttaagtacttcaggtgagtctcttcttcagccataatcaagaayatcaggcttgaccagtgcttctcaaacttggacagatagatgaatcgccagggtatcgtgtttaaatgcagattctgattttataggtctggaaggggcc

SEQ ID NO: 366885 - DNA, 201 bp, Homo sapiens
cactaagccgagaggaatcgctgtgggttggcagacactgtggagactgactcctggacaggctgtggaatgtgtggaagcaggtacagcccaggcccgcrctgaagttcggcagggaagccagaggagtccgcagcccgggagacctggcctacagcggagagagtcagtccatgccagtggtgggatgtggctgcaaaa

SEQ ID NO: 366886 - DNA, 201 bp, Homo sapiens
tggctgcaaaaaatggtcggattcatggaagtctggtgtccatctggcaggcgttagtggtcccacgaatacagctgtgtgccttgaacacatactgcagrgcttccagagagcaccagggctgtgggggctagagactgtgtctcgtgcggaagcgtggctgaggaggggcttgacaggctcttcgtcactgtgcggagc

SEQ ID NO: 366887 - DNA, 201 bp, Homo sapiens
ctctctgccaactctaatgagccaggaagcctccccgtgcccaggcgtgctgtgatcacagtgttcaatgatggggtgaggctgcagcgtccagccagggrctgtgccgcaggggccagaagatatctgacctactgtcactgcctcttccactctgttccacctgcactggagcgatgctatccgatgaacagatccatt

SEQ ID NO: 366888 - DNA, 201 bp, Homo sapiens
tatgggcttaggaagccctggaaggatcccataacagaggcggcggtttgcattttccctccaggaacacacctgtcattaaagttgctgctgcaaagggragtgcacactttagagaaccaaggggcatttactaagtggggagggatggggatggcctggatcaggtttaggggctggtgtgagaggatggttttggca

SEQ ID NO: 366889 - DNA, 201 bp, Homo sapiens
tcctacggccaccccaatgatgacggccatcggcacagactctgtgggagagaagcgggcacagctgatgacggatggggaatggcctactatccccccawgatctcaccccgttcctgcgggggcagcccctgccacatggggccctcctgggaaatgcctcagtggggcctgggcaggcacaggccgagtccaactggg

SEQ ID NO: 366890 - DNA, 201 bp, Homo sapiens
cctttctatgtatggaggctgctaggataatgcagcgtctgctacataacaggccacacaaaggtcggtttccttctggtccccctgcttccctacctggractctccctgttccttcctatgtgaggacatctgacaatctcttatgcaccgaagaatatatacgtcttaaaagaggaacacaagggctggacacggtgg

SEQ ID NO: 366891 - DNA, 201 bp, Homo sapiens
tttgggtttaatctgtgaattgcctttttgtgttctttgctttttttttttttatttctttgattgttttggtggttgttatggtaaaatgcacaagcacraggttgtatttaccatcttaactctttctgtgtgtatagtgcagtggcattaagcactttcagaatgtgctaccgtgctaccatcccaccatccatctcc

SEQ ID NO: 366892 - DNA, 201 bp, Homo sapiens
aaatactcatttaaaaaattttttttgtttaagtacttcaggtgagtctcttcttcagccataatcaagaatatcaggcttgaccagtgcttctcaaactyggacagatagatgaatcgccagggtatcgtgtttaaatgcagattctgattttataggtctggaaggggccaaagaatccacttgtctgggctctgggat

SEQ ID NO: 366893 - DNA, 201 bp, Homo sapiens
ttgtatttaccatcttaactctttctgtgtgtatagtgcagtggcattaagcactttcagaatgtgctaccgtgctaccatcccaccatccatctcccgarctctcttcatcttgccaaactgaaacatcctacccactagtcaagaactcctcatttccgcctccccccagccccttggcagccaccattctgctttctg

SEQ ID NO: 366894 - DNA, 201 bp, Homo sapiens
aggggccaaagaatccacttgtctgggctctgggatgcccatgggactgatctggccttttttgagcagtgggaataggctgacttctcagtttgacagcraggaaactgcaggtcagagagggaggtgtgatcgtccacggtaaccaacctgatatgcattcagtactttctgatgtactctactgtgtgccaagcagca

SEQ ID NO: 366895 - DNA, 201 bp, Homo sapiens
cttgagtctgtctcagtaggtggatctgcattcagtgcagggcagagcctgggtggcagtgcctctccttgcctccctggctgctacaaggtcctgtgtarcatctggtgtggacccagcagccaggaggagagctgagtgtgattggggtcgtggtggggccagtggcagtggatctctctctttgttgggctgggccag

SEQ ID NO: 366896 - DNA, 201 bp, Homo sapiens
ctgggtcaaaatgcagaaggagatggtgagaagaaccacaccagagaggctggagtaggccagcctggcttgggaccgagtcccgagtccctggctggacmctcggttttcccttccgtggcagggctcacctggatccttaatgccgcccttggaggagttaggaggatcctggatgagaaaactcaccctcaggatgat

SEQ ID NO: 366897 - DNA, 201 bp, Homo sapiens
ggcttgggaccgagtcccgagtccctggctggaccctcggttttcccttccgtggcagggctcacctggatccttaatgccgcccttggaggagttaggargatcctggatgagaaaactcaccctcaggatgattgccccagggagcagcttcctgctttctggtggaagggaggggcagacagtgggtgtgtcctgctc

SEQ ID NO: 366898 - DNA, 201 bp, Homo sapiens
gttgccataaggacgaggaaggccacaccagctcctacggccaccccaatgatgacggccatcggcacagactctgtgggagagaagcgggcacagctgaygacggatggggaatggcctactatccccccatgatctcaccccgttcctgcgggggcagcccctgccacatggggccctcctgggaaatgcctcagtggg

SEQ ID NO: 366899 - DNA, 201 bp, Homo sapiens
gctctctgtatctcacttaaactttatgtgagtgtattaatctttcattatttagcttctgaatttatatttcttcaatctccattccttttttttttttyccttgaaatggagactcgctctgtcacccaggctggagtgcagtggcacgatctcggctcactgcaacctctgcatcccgggttcaagcaattctcctgc

SEQ ID NO: 366900 - DNA, 201 bp, Homo sapiens
atgattgccccagggagcagcttcctgctttctggtggaagggaggggcagacagtgggtgtgtcctgctccagtgtctaggcaggagagtttgtgaagcygaccggacacctgtggctcttatttcctaggtggcccgaggcagccgggatgacagctctccccaggaatcctgctgcctgctgagaaacatggtcagca

SEQ ID NO: 366901 - DNA, 201 bp, Homo sapiens
ttatctaccatgtgtcaggcattaaatttagtgctggagatactatgggacataagaagtccctgcttgctgggagtgtgtggtctaattggtacttgggrcagtgtggtttaactgccacaaagttaataaagcagcatgatgtgacagagctggatgtgggggagtgaggaagcttctctggactgggtggtctgaacc

SEQ ID NO: 366902 - DNA, 201 bp, Homo sapiens
actcctctttctatggcagcctcaggtgccgccgctgtgtggtcgtggggaacgggcaccggctgcggaacagctcactgggagatgccatcaacaagtaygatgtggtcatcaggtgtgtgtgactgtctcttcctactgttgtttgggaactggatgtccgagccagggactgtagacaggcccaggaggcctctagtg

SEQ ID NO: 366903 - DNA, 201 bp, Homo sapiens
ccagatctctcaacatttgtaacacgaccaactcctgttctttttttttttttttttttgagacaggctagagtgcagggggacgatcatagcttactgcrgcctcgatctcctggactcagggggtcctcctgtctcagcctcccaagtatctaggactacaggtgtgtgccaccacacccggctaattttatttttatt

SEQ ID NO: 366904 - DNA, 201 bp, Homo sapiens
cctggcggtggggacgctgcccgagtcaggacctcacgctccttgatgtccgcctggcagtcctaaagaggctgtgaggggacagcatgaaccgggctccyggaagtcagcgccttaggctgccctccaagggtggtgctctgataagctgccccagcaactgggtataaaagcctgcaggcgtcaggtggcagcagccac

SEQ ID NO: 366905 - DNA, 201 bp, Homo sapiens
gtggcacgatctcggctcactgcaacctctgcatcccgggttcaagcaattctcctgcctcagcctcccgatttgctgggactacagacatgtgccaccaygctcggctaatttttgtattttttagtagagaccattttggtcaggcaggtctcgagctcctgaactcaatcaatctacctgccttggcctcccaaagtg

SEQ ID NO: 366906 - DNA, 201 bp, Homo sapiens
cttgatgtccgcctggcagtcctaaagaggctgtgaggggacagcatgaaccgggctcccggaagtcagcgccttaggctgccctccaagggtggtgctcygataagctgccccagcaactgggtataaaagcctgcaggcgtcaggtggcagcagccacaggcacccatgctccaggcgtgtctgtgacaggaaagcttt

SEQ ID NO: 366907 - DNA, 201 bp, Homo sapiens
aaactgctttatattggtggttttctttttctttctttcttttttttttttttttgagacagagtttcactcttgtcacccaggcaagagtacaatggcakgatctcagttcactgcaacctccgacccccgggttcaatggattctcctgcctcagcctcccgagtagctgggattacaggcgcctgccaccacgcccag

SEQ ID NO: 366908 - DNA, 201 bp, Homo sapiens
cagctggtgggctttaacccactttgtagcttcccaagtacttccacccatatcttggagcccctcggggaggccgtgtgggatggtgagagacaggcacyagcagacacaggtatggcgcttggctgtgctgtgtactgtgtggggcttggcaggtcaactgctcagatccttgtttttcttgcctgtgtggtgggataa

SEQ ID NO: 366909 - DNA, 201 bp, Homo sapiens
tttctttcttttttttttttttttgagacagagtttcactcttgtcacccaggcaagagtacaatggcaggatctcagttcactgcaacctccgacccccrggttcaatggattctcctgcctcagcctcccgagtagctgggattacaggcgcctgccaccacgcccagctaatttttgtatttttagtagagatggggt

SEQ ID NO: 366910 - DNA, 201 bp, Homo sapiens
aagtttttacttttattattttatttaagataggatcttgctctgtcacccaggctggagtatagtggcgcgatcatagctcgctgcaacctctcatctcstgggctcaagtgatcctcccaccttagttagcctcctgaggaactgggataatcacagtcataagccaccaagcccagctaagttgtttattttattttt

SEQ ID NO: 366911 - DNA, 201 bp, Homo sapiens
cttagctctctcagcctcctcagcgttggggtagggagaggaggtgccttaggcagggacgggcacctgccaccaagctggcctctgaccttttcttctcygacttgctgtcatttgttgtatagatttggggtttgggccatcagagctaaagaccagattccatggctgtgtcttataacccggggcccttcttacctt

SEQ ID NO: 366912 - DNA, 201 bp, Homo sapiens
gcgctctaagattttgctaaagactggcctggagcccaggaagagaagaagtcacttgtcttttctctccactaccctcgtgtgcccctctgcccttaggwtgcggaatttggtcagagccgttcatgtcagagctcagcagaatggcagctgaaccctgggagagcactgcctgttctgagaaaggcctgcaattgtgtc

SEQ ID NO: 366913 - DNA, 201 bp, Homo sapiens
aggctggggtcacacagcccaggaggggcacacccggcgaggtgctccgtcagcacaggctccctcctccctccctccccccagtacaccaggctctgacsggaccggtcccaccgcagagttcagcggcatcaagtccaaggacagaactgcaagagtatggacacaaaacaccaaacaaattgggggtgggctcccggc

SEQ ID NO: 366914 - DNA, 201 bp, Homo sapiens
gctgagaggaagggtccagaatggcctggccagtatctagtgtgaccactctgcctctgagctatatttggctgagtcaggtggctggtgagtcccacacktcctctggattgagtccacccacaggggagaggagtcagcctgtaggttttattgccaccacaatcagagctatcaactgcctttattgtctaggatgat

SEQ ID NO: 366915 - DNA, 201 bp, Homo sapiens
acgatcatagcttactgcggcctcgatctcctggactcagggggtcctcctgtctcagcctcccaagtatctaggactacaggtgtgtgccaccacacccrgctaattttatttttatttttatagagacggggcagagtctgcagtcacatgccttgcaagtagcagagacagggtttagtctcggtagccagtgcctag

SEQ ID NO: 366916 - DNA, 201 bp, Homo sapiens
attttccacttaaagcacatgtcagtgtggactggccccattgcaaatactcagtggcctgggactggggtgaccaagtgggatgtggtggggctggtgcmgtccaccattctcacagcaggcatctggggtcaggggaggcagggcactggctgtgctggaagcaggggattggctgtgctggtgggaagccagattcca

SEQ ID NO: 366917 - DNA, 201 bp, Homo sapiens
gtggcctgggactggggtgaccaagtgggatgtggtggggctggtgcagtccaccattctcacagcaggcatctggggtcaggggaggcagggcactggcygtgctggaagcaggggattggctgtgctggtgggaagccagattccagccccagacactggtacctttggctttagatccttggggtggggtgggtgcat

SEQ ID NO: 366918 - DNA, 201 bp, Homo sapiens
aagccagattccagccccagacactggtacctttggctttagatccttggggtggggtgggtgcattgcttctcctgggagggaggagcgcccgggagccyctgaccaggacctggggcaggtccacacaggccctggatttctcctgtatcctgggcctggccctgctctcttgactcccacctcgtcacagtggcttca

SEQ ID NO: 366919 - DNA, 201 bp, Homo sapiens
tcatccccacccggctttcacctctgtgcagctactcccgggatcagcccatcttcctgcggcttgaggattatttctgggtcaagacgccatctgcttaygagctgccctatgggaccaaggggagtggtaagttcctacccggctcgtgggaaccatgggctcaccctgaccacgttgcttcctattctctgccgtcca

SEQ ID NO: 366920 - DNA, 201 bp, Homo sapiens
gatgtaaaatacctattctggagaccggtacacagggcctgccctttaaatatttgccagattttgaataaatgattttattgtttactgaacatttcctkttattccatgttctgtgttgaatggctgcttttgtgactgctcaatgccaggccccgagtcttcttgcttggcgaggaagttgtgctccttgctctaagg

SEQ ID NO: 366921 - DNA, 201 bp, Homo sapiens
aagagagatagccaagcccatgtctacggaaaagcattcttgactgagtgaacgaaagtacaaagcctcagaggagggagcatgcctaggtagccccctaracctggtgaggctggtgcgtggggcagcctccatggagaggagttgggcaaggagggaggaggtgctggccagtagagcacgtgtgtctctgtgcgtcag

SEQ ID NO: 366922 - DNA, 201 bp, Homo sapiens
ggttgggcagtgatacggtttggctgtgtccccacccaaatctcatattgaattgtagctcccataattcccatgtgtcatgggagagacctggtgggagmtaattgaatcatggtggtgttctcccccaagttgttctcctggtagtaagtgtcaggtgagccgatggttttatgaggggtttcccttttcacgtggctg

SEQ ID NO: 366923 - DNA, 201 bp, Homo sapiens
atgtaaaatacctattctggagaccggtacacagggcctgccctttaaatatttgccagattttgaataaatgattttattgtttactgaacatttcctgytattccatgttctgtgttgaatggctgcttttgtgactgctcaatgccaggccccgagtcttcttgcttggcgaggaagttgtgctccttgctctaaggg

SEQ ID NO: 366924 - DNA, 201 bp, Homo sapiens
atcagcagcacgaaaacagactaacgcaggcagcctgtgttgggaggagttggcaaggagggaggaggtgctggccagtagagcacatgtgtctctgtgcrtcagagcaaggacccgggctctccccgtgagtgagaagagtccatggggttttggggctgaggaggagttttacagatgaccggtctgttcttggcactt

SEQ ID NO: 366925 - DNA, 201 bp, Homo sapiens
cttttgtgttcaactgtgccatataaagtaacgtcacgtaatcgcatcatattcacgggctccccacacgcgcaagggaggagattacatgagggttagcrtcactggggttctcttacgattctgccttatatattttacaggtggaattgagagatttctgaccaattctgggtttctagcttggacagccggtagggg

SEQ ID NO: 366926 - DNA, 201 bp, Homo sapiens
gtgggtggatcgcttgagcccaggagttcgagatcagcctgggcaacgtggtgaaaccccatctctttaaaaaaatagagcgccacccccataaagggtcrcacagttagtgcatgtcagagcacccaggtcttctgaatgaggtcaggttctccaaggaggagggcagaacacttcctttcctttgaatgagttgcttaa

SEQ ID NO: 366927 - DNA, 201 bp, Homo sapiens
agctgttcctttacatctggagccaggagggagagttggaactccccacttggggaatggaactggcagctgtattcctggctttctcggaaagagttgcrgccttgaggttttgagacaagccaggctgggacaggacagataaagaggggcagcagtttgggaggaacagaggaagatgacatggttctccacagagcg

SEQ ID NO: 366928 - DNA, 201 bp, Homo sapiens
tctagaggacacatccggtgagggtcttcttgctgcattgtctcatggtggatggaagaagggcaaggtggagagagagagcaggaaggggcctaattgtscttttataaggaacccactcctgtaataatggcattaaacccattcatgagaacagagcccttgacccattcatgagaacagagccctcatggcctactc

SEQ ID NO: 366929 - DNA, 201 bp, Homo sapiens
tgtgattctgtgtgcggacagtccttcctgctcacatactgagaagactgtgaatgcggggtgtgtgtatacccaaatagaccattgtttgcttggggggrtggggatagctttctccagggtgcccaacatcctacgcagattgaggcaatactggccaagggtcggagctgagaatggggctttgatgtggggctgttg

SEQ ID NO: 366930 - DNA, 201 bp, Homo sapiens
ggggttccctgcctggagtcccaaccctgcaggatggagaaaatgggcaccagttactgtgacccattccggctccatatggatttggtttgacaacaaakctccctctgtgtgttcccaagccccttacataaccaggggctgtgggcagaggaggaaaggaggaggaggtggagatggggaccaggagacaccaggatg

SEQ ID NO: 366931 - DNA, 201 bp, Homo sapiens
gctgggctcattccatgcagcagctctcaccggttggagtctcatgcttgcagctcccccaggttgctgttgcacactggtagctctgcagttctggggtrtcaggatggccttactcccacagctccactaggcttcctggggactctcagcagctcagactccacagttctgctgggcattgccctacaggggctccct

SEQ ID NO: 366932 - DNA, 201 bp, Homo sapiens
ttcccataattctgtactagatgtggttccaagaaatcagacctttctgacttaaaagtttaaggaggggtatgcgcgtggtgtgcgtgtgggtgtgtgtytgtctgtagttatagctggttttcctgtccagttcaatctcattgagtttatctctcttgttagagatttttgggatcctgtgcccaataaataagaaga

SEQ ID NO: 366933 - DNA, 201 bp, Homo sapiens
tgagaaatggaattttggttgactcctttttcttgttctaagaaatctcccaaggactgcaccatgtttgttttcatttccctggctcctttccattctgraaacttaaaatcggcttcatggcctcttgctttatagaatttgttcaaaaaggcttcgtcagaaatggatttgatgtgacatttttgctcttcacgtgaa

SEQ ID NO: 366934 - DNA, 201 bp, Homo sapiens
ctgggcagagggcgaggagcccaggattcccctttccgtgactttggaggaacgaggttcctgagggctggcacagccactccctgccccttagaggctcygggctgcctggtgacagcttcggggacctgcaagctgacagagtctccaggagccagagctggggtgggaggaacccactgggcctgagggaggtagagc

SEQ ID NO: 366935 - DNA, 201 bp, Homo sapiens
agagacatagcttcctctcaagagccttggaaggctgggagagtggtgttgggtggagagaatgagagcaggctcagatgttgaaacaaccctaggggatyggagttggaattgctgaactgagctagtccagagccatctatcattctgagtcttcccaaaacactatttacacagatcaccaactttcacacttaagga

SEQ ID NO: 366936 - DNA, 201 bp, Homo sapiens
ttaaggagtgtctccccgtttctcttcttactaagcatggagctggtggagtctggttggagatagccttcaggtctgtgctctttttctcagtgaatttrtgttgcactgatggagcccttgcatggcaggagagctagataaacttttaatttctgttaaaagtcaaataggaagctcttatctgaaaattctgcttaa

SEQ ID NO: 366937 - DNA, 201 bp, Homo sapiens
gcgtagactcagaaacatgacctttgcccttgaggagctctgggataactggggaagctgacatggaattgggggaatgcactataaaggaggcacatacaagtgttttgggagagcagaaggtgcacagctccgccaggggtggggaggacaagcccggaacatcttggagttgattgttatgggagaatgtgagattca

SEQ ID NO: 366938 - DNA, 201 bp, Homo sapiens
gtggtctagactctttccagcaggtcttgttctctgaacctctagaggagggaactttgccttcagaatattgctgagaggaagggtccagaatggcctgkccagtatctagtgtgaccactctgcctctgagctatatttggctgagtcaggtggctggtgagtcccacacgtcctctggattgagtccacccacagggg

SEQ ID NO: 366939 - DNA, 201 bp, Homo sapiens
ctctgtgtgtgtgtgtgtgtgtgtgtgtgtgtgtgtgtgtgtgtagcaggagcaaggggcagggtcagctgtgctgaggactaggaggtaaatggtctacscatatccaaggtgggaagaccaagagaaataagagaagtaaatgaacagatcctctaaagtcatcttttccttattccagcacaccaaggcattgtgcat

SEQ ID NO: 366940 - DNA, 201 bp, Homo sapiens; identical to SEQ ID NO: 79429

SEQ ID NO: 366941 - DNA, 201 bp, Homo sapiens; identical to SEQ ID NO: 79425

SEQ ID NO: 366942 - DNA, 201 bp, Homo sapiens
acagtggctcacccctgtaatcccagcactttgggaggccgagtttggcagatcacttgaggtcaggagttcgagaccagcctggacaacatggggaaacsccgttcctactaaaaatacaaaaattagctgggtatggtggtgcatgcctgaaatcccagctacttgggaggctgaggcacgagaattgcttgaacccgg

SEQ ID NO: 366943 - DNA, 201 bp, Homo sapiens
aaaaaaaatagagaaaaggaaagctggatgaagagagatagccaagcccatgtctacggaaaagcattcttgactgagtgaacgaaagtacaaagcctcaraggagggagcatgcctaggtagccccctagacctggtgaggctggtgcgtggggcagcctccatggagaggagttgggcaaggagggaggaggtgctggc

SEQ ID NO: 366944 - DNA, 201 bp, Homo sapiens
gggtgaacatctgtacatctgtccccataatgaaaatggcctcagcaaataacaaaaatattaccatttagcaatcaggcacttattaaaagcctggcccmataaacttaaaaaaaaaaaaaagatgtgctagacactttacgtcccttcatgtgagcttcacacaaccctgtaattaagcccatttataaatgaagaaat

SEQ ID NO: 366945 - DNA, 201 bp, Homo sapiens
ccaactgcagcatgggtgaacatctgtacatctgtccccataatgaaaatggcctcagcaaataacaaaaatattaccatttagcaatcaggcacttattwaaagcctggcccaataaacttaaaaaaaaaaaaaagatgtgctagacactttacgtcccttcatgtgagcttcacacaaccctgtaattaagcccattta

SEQ ID NO: 366946 - DNA, 201 bp, Homo sapiens
cctctctggcacccacggcgcccctgcttgcctctgtccgggtctcggaggcgcgaacaccatcccaagcctgcgaccgcgcggcatcacccccgcccttycccctcctccaccccgccctttctacccctcccgggagctcctgggagtcgggccgccgtgtgcgcaagcgtgtccagccccttccccgcccccaacccg

SEQ ID NO: 366947 - DNA, 201 bp, Homo sapiens
gttcccgggagcgagcgccttggctgcgctgggcatacccaccctggcgccattcacaggcagtgcctgccctggccctgtgctcaccccatcaggcctcstcttccgcctctctggcacccacggcgcccctgcttgcctctgtccgggtctcggaggcgcgaacaccatcccaagcctgcgaccgcgcggcatcacccc

SEQ ID NO: 366948 - DNA, 201 bp, Homo sapiens
cctttgttttgcatccttctgagtaaacctattcgtgtacagacatatctgggtatgcatgtaactgttttgtgaaagtgcatttggagatatggatatcrttgttttcacccatcctaagttttgatgctatggatactatgttttggagattagacgataccagcacgcataggtttgcagcctctttttcacagctcc

SEQ ID NO: 366949 - DNA, 201 bp, Homo sapiens; identical to SEQ ID NO: 79456

SEQ ID NO: 366950 - DNA, 201 bp, Homo sapiens
tggagcacagtcacctgcagaggaacaacttggaggcagactctccttactcagctcacttggagcagagcttcctgagttgggggttcttgacagataakccctccagcttcagcagaagcaggcttggagctgccacttctctgaacccccttgcacttactgtcagtcactcacaccttgcacttattcacatcctat

SEQ ID NO: 366951 - DNA, 201 bp, Homo sapiens
tagcatggagcacagtcacctgcagaggaacaacttggaggcagactctccttactcagctcacttggagcagagcttcctgagttgggggttcttgacakataagccctccagcttcagcagaagcaggcttggagctgccacttctctgaacccccttgcacttactgtcagtcactcacaccttgcacttattcacat

SEQ ID NO: 366952 - DNA, 201 bp, Homo sapiens
ctctttatcagtgactcccagagactgctgctaattttgatttgaaagctgcaaattgctggtatgtggttacagttcctaagaacaacttagataagagrttttcaaaagccgttttgaaaggggaagtgaaatttaagatttagttgtcattggtctacatctaagtgtttgtttctttagatgtgcacaccaaggagc

SEQ ID NO: 366953 - DNA, 201 bp, Homo sapiens
gtcttgccttcctaatggagctgtgcttgtcctcgcccggcctgccccagagcgcatgctagcacagtcttgccttcctaatggagctgtgcttgtcctcrcccggcctgccccagagcgcatgctagcagatggcctttaccatcagccacttccagcgacattctaggatgaatgtgtgtataaagctcatgtttgtca

SEQ ID NO: 366954 - DNA, 201 bp, Homo sapiens
ggcctgccccagagcgcatgctagcagatggcctttaccatcagccacttccagcgacattctaggatgaatgtgtgtataaagctcatgtttgtcactcrttagcgcttgacgctgggcaagttttctggcttctttaagcctcaacccacatctgtaaaatggtgatacttcgtagaattgtgagcattaaataagatt

SEQ ID NO: 366955 - DNA, 201 bp, Homo sapiens
atgtctatgctaggccagcatggtaccagcagcagaatgtgggctgtggacatacacttaacatttctgatcagtttttactccctcaggcttaggggctrcaaaggaagatagccaggtttctgggaaatttcgaagcacttggaaatatgatcgaagcagaaaattcctctgagtggaggagctgtgtaggctgtgtat

SEQ ID NO: 366956 - DNA, 201 bp, Homo sapiens
atttgggttctttaaagttccatttgaatcccactccctcaacgagcactctaacttgcccctgtttatccaccccatctgccatgaccacatcaaacttwcccacaagtgaggcccttcttagaacactatttgagttgtatattaaaatgttagggtgcctggtggtctagactctttccagcaggtcttgttctctga

SEQ ID NO: 366957 - DNA, 201 bp, Homo sapiens
ctttaaagttccatttgaatcccactccctcaacgagcactctaacttgcccctgtttatccaccccatctgccatgaccacatcaaactttcccacaagygaggcccttcttagaacactatttgagttgtatattaaaatgttagggtgcctggtggtctagactctttccagcaggtcttgttctctgaacctctaga

SEQ ID NO: 366958 - DNA, 201 bp, Homo sapiens
tggggagccggggtttctggggcagctcagtgctgggaagacgtcatccccttctccccagggctgtatgggagcacaggcacaggggtaggtagagcttstggtcagcgaggggtagagcccacagagagaccagagagtggaccgcagtttcatgaaagcagagttatagctgccacttgtgcctgtgggcagagcagg

SEQ ID NO: 366959 - DNA, 201 bp, Homo sapiens
cggggtttctggggcagctcagtgctgggaagacgtcatccccttctccccagggctgtatgggagcacaggcacaggggtaggtagagcttgtggtcagygaggggtagagcccacagagagaccagagagtggaccgcagtttcatgaaagcagagttatagctgccacttgtgcctgtgggcagagcaggtggtagag

SEQ ID NO: 366960 - DNA, 201 bp, Homo sapiens
cctgtggctttgtaggaacaaaagaacagaacaaacatgttggagtagtgtccctaacatttatttcaggtggtgactaggagggttgaggtgtagatatwcttcctctcttctcgtggagccttactgaagacaggatcgccgttcttgtgtttatcagctgagaagggcagtctcgccatcttaaagacctgccctcca

SEQ ID NO: 366961 - DNA, 201 bp, Homo sapiens
gtgaggctgcagcgtccagccagggactgtgccgcaggggccagaagatatctgacctactgtcactgcctcttccactctgttccacctgcactggagcratgctatccgatgaacagatccatttattaattcaacacgtttgtattgagagcctgctgggtgccgggcactattgtcaacatgggtaatacagcagca

SEQ ID NO: 366962 - DNA, 201 bp, Homo sapiens
tgcactggagcgatgctatccgatgaacagatccatttattaattcaacacgtttgtattgagagcctgctgggtgccgggcactattgtcaacatgggtratacagcagcaagcaaaacaagagaaacatctttgcaagcaggggagggggcctgcagtgttgggtgtgtggagttgttgctgggaagtagagaagctga

SEQ ID NO: 366963 - DNA, 201 bp, Homo sapiens
ccgttcttgtgtttatcagctgagaagggcagtctcgccatcttaaagacctgccctccagccccttcaaacgccacacttcccaggaagcactctctccrtaagtgttcagagaaccctgaccagagaagctcccgcacttcttatatgaactccgattgtgctgagggggaggggaggagtacacaaagcaggaggtgg

SEQ ID NO: 366964 - DNA, 201 bp, Homo sapiens
gcctgcgctaagccccagtgtccttcagcggcgtcaattaggcgcacgcgcagtttcctctccggaggggcgggcagggcaggggagggaggagctactgmtgtagctcgccccgccctggcgtcagggccgtgcaagcgttgtccgcatgggcgccgcgccgaccctcgcggccgtgggaacccgcccggaatctcgcag

SEQ ID NO: 366965 - DNA, 201 bp, Homo sapiens
ctggaggaaggccttgcaggttcctggatttgggtgccgggtgggctgagaggacagtccctgtcactgggactgggcacaggtgcagagaggctgagacrggcccagaggacagtgagtgtgtgttgtgtgggcgccgggccaggaagtgccctccatggggcagcaggctctgcagtaccctcggccaaatggccacag

SEQ ID NO: 366966 - DNA, 201 bp, Homo sapiens
ttcccagaggcttctgtatgagtgtcctgagtggccctggatggactactggctgtccctggcctcagaatcaccccaacccctgccacatttcggggagsgaggtgtgtgaatgatgtcctttattctacagactgaggaagtggtcagtgtagcttcacgtgagagcagcagcgtgcgatgcccaggccctagccaagt

SEQ ID NO: 366967 - DNA, 201 bp, Homo sapiens
tacaagagtgatgtcccttgctactgagaaccctgggaacagctcagctccatggtccagccatataaatctgataaaaataggagctgaaataccatccyggagttgctatttttaaaatcatctgagatgctggatggggtatatttcttcctcaaacacatcttgctgtttcctcctcttggtgggcaggatgctaac

SEQ ID NO: 366968 - DNA, 201 bp, Homo sapiens
aagtgtttgtcccccatctcccaaaatggcggggtgcaggggctccctgcccggagtcccaaccctgccaaggcagagggaatggggaacagctgcgctgrcccattccggctccatatggatttggtttgacaacaaagctccctctgtgtgttcccaagccccttacataaccaggggctgtgggcagaggaggaaagg

SEQ ID NO: 366969 - DNA, 201 bp, Homo sapiens
ccatcttcctgcggcttgaggattatttctgggtcaagacgccatctgcttacgagctgccctatgggaccaaggggagtggtaagttcctacccggctcrtgggaaccatgggctcaccctgaccacgttgcttcctattctctgccgtccacggccccagtgcccaagttctgagcctgactcgggtaccagggtcagg

SEQ ID NO: 366970 - DNA, 201 bp, Homo sapiens
aaagcagagttatagctgccacttgtgcctgtgggcagagcaggtggtagaggggcctccaggaaagggccggggacacgggtgtccagcactaagcacarcgcactcagccgcagcctctgtctgtctccccacccgcccacctctggcacacagcacctggggacccagatttgtgcttgatcagagcttcgaaggaag

SEQ ID NO: 366971 - DNA, 201 bp, Homo sapiens
gtgcctgtgggcagagcaggtggtagaggggcctccaggaaagggccggggacacgggtgtccagcactaagcacagcgcactcagccgcagcctctgtcygtctccccacccgcccacctctggcacacagcacctggggacccagatttgtgcttgatcagagcttcgaaggaaggcagtggcagaggcgctgggaggc

SEQ ID NO: 366972 - DNA, 201 bp, Homo sapiens
  misc_feature (1)...(201): n = A,T,C or G
tgcccagcacaaaccgctgcccgtagtcgtagaggcggccctggccgctcagggtgctgtagatgttggtgaaggacatgcctgtgggcacacgctgcttncccgcaggacgcaggtcgggctggcagctggagagggagatggtcggggttgagtggtgctctttgaaggtgttgacgctgtagtagccattggtggggt

SEQ ID NO: 366973 - DNA, 201 bp, Homo sapiens
agaccatgcggttcatttttccagtaaatgctctggcactgtctggactggagaccttctttcccatcagattcaacttctaagtctgccccttcttgcaratggggctgtcttggggccaggaggtgaagggaatgcgagaatgacgatatcctcaaggggtggcttagcccagagccctcagcaagtcccttctgctcc

SEQ ID NO: 366974 - DNA, 201 bp, Homo sapiens
ccggaaaatggagctggagaggttggtggttgcctggcactgaggagccctgatggcacaccaggaagttgggctttgtccagcagatgtggggagccacygagggattttaagtgggcaagtaacaggaccagatttgcattttagaaaggctgctttctcaaggctctcgagggtggattgagaaaagagacaaaagac

SEQ ID NO: 366975 - DNA, 201 bp, Homo sapiens
tgtggtagtggtgggggcagtggctgaggacccctctctttgctgggctgggacagagcttgaatggagaggggccgccttgtgcctgggaagggaggacsaggtgtcgctggcaccttccacgtcctgagtgcttgttctgtgcccagcccctgctgaggctgcggacattaaataccaggatatgttttgagactcagg

SEQ ID NO: 366976 - DNA, 201 bp, Homo sapiens
gaccacatcattgctggggtggtcttgagagccaaggctgcttagctcggagtgcagaaaatgcaaggggaacagctttcttcaaacatgtgcaggctgcygagtggcagaggagcagacccattctggtgattcattttttgcattacacttatataatgttagtgccagatggggccatcagagtcatatcctcattat

SEQ ID NO: 366977 - DNA, 201 bp, Homo sapiens
agccaccgaggggggaaggtgttggggagctctggatgagtgtcagcagacacaggagacacggagacaggagacaccaccctcagcactagcatggaccyggggagaaggcagcgggaggctggcagctttctgggttgccccagtgtgggctgcaggggcctctgtgagcaacctgtgccctgggttggtgctctgata

SEQ ID NO: 366978 - DNA, 201 bp, Homo sapiens
tttgcttccaggctcattcttgtggttgaaataattcggttcctgcgattgtagaactgaggtccccatttccttgctggctgtcagctggaggctggggsccacgctcagctcttggaggtggcccacatttcttgaccgtacagcctccatcttcaagccagcgacggcacaatagatcctttctgtgcttcaaatctc

SEQ ID NO: 366979 - DNA, 201 bp, Homo sapiens
tcagcccgatattaccagagtgggatggtcccagcgagcgggatgtggagggttaggatgttatcttagtctgttttgtgctgccattaccaccaagtagrtaatttataaggagcagaagtttatttggctcacagttctggaggctcggatgtccaagatctagaggacacatccggtgagggtcttcttgctgcattg

SEQ ID NO: 366980 - DNA, 201 bp, Homo sapiens
tcccgacttcatttccgaacctgtttggaaataaagcaagcgtctacagccagggcctggctggccagggtggggtgggactgggaattagctgcttgagsggggctgggtgaggggctcctttcccagtcatgtctctgggaccccccaacagatccaggctagcccagctgaacttggagttcattcaggctgacttag

SEQ ID NO: 366981 - DNA, 201 bp, Homo sapiens
tccagaatggcctggccagtatctagtgtgaccactctgcctctgagctatatttggctgagtcaggtggctggtgagtcccacacgtcctctggattgartccacccacaggggagaggagtcagcctgtaggttttattgccaccacaatcagagctatcaactgcctttattgtctaggatgattgaatcaaaggagg

SEQ ID NO: 366982 - DNA, 201 bp, Homo sapiens
tgcctctgagctatatttggctgagtcaggtggctggtgagtcccacacgtcctctggattgagtccacccacaggggagaggagtcagcctgtaggtttwattgccaccacaatcagagctatcaactgcctttattgtctaggatgattgaatcaaaggagggcagagaaccttgggttcccaacgcattctatgagct

SEQ ID NO: 366983 - DNA, 201 bp, Homo sapiens
cacgtcctctggattgagtccacccacaggggagaggagtcagcctgtaggttttattgccaccacaatcagagctatcaactgcctttattgtctaggawgattgaatcaaaggagggcagagaaccttgggttcccaacgcattctatgagctcttgggttcttcctgtggctttgtaggaacaaaagaacagaacaaa

SEQ ID NO: 366984 - DNA, 201 bp, Homo sapiens
gaccacatcaaactttcccacaagtgaggcccttcttagaacactatttgagttgtatattaaaatgttagggtgcctggtggtctagactctttccagcrggtcttgttctctgaacctctagaggagggaactttgccttcagaatattgctgagaggaagggtccagaatggcctggccagtatctagtgtgaccact

SEQ ID NO: 366985 - DNA, 201 bp, Homo sapiens
taaagggaggagaaagacctcaaaccctggcctctgaagatgctgctgggaggaggtatcaaggggtgggggtagggtggcagccatttgccctccggccrgagggagctggcgcccctggctggcagtgttgctggttaagctggcacatccctttgccaccccaggacttgcacacgaagccattggttacctaccaat

SEQ ID NO: 366986 - DNA, 201 bp, Homo sapiens
cgcctccgtgatggaagctttactgctacttctgcaggaggcaggctgtttctagttggagagctctgttagaaaattcttggctgggtgcggtggctcaygcctgtaatcccagcactttgggaggccgaggtgggcagatcacgaggtcaggagtttgacaccagcctggccaacatggtgaaaccccgtctctattaa

SEQ ID NO: 366987 - DNA, 201 bp, Homo sapiens
ccctggaggatacctgtgtatctgtctttcacaaaaggtgaaatgagctctttgtagtgtttcccgcccaggctgcattttagaatcacagaggaggtacrgcgctgatttgttttactattccctattcatgcctgggccccacccctaaccaattaaataaacatctcggagagtggggcctagactttatatgtttaa

SEQ ID NO: 366988 - DNA, 201 bp, Homo sapiens
tcctggaagtggccaattctggtgtcctctgcaaagtacccctcgtccctggacaaccagaacgtgccctgacctcttccctggcccgtccccacccgcgrtgtgtgatccttagacgtgagtctgcatccgccgctgcaggggtcgactggggtcagagttctgggacgaggactgggagtggtgggaggaggaagcaga

SEQ ID NO: 366989 - DNA, 201 bp, Homo sapiens
ctctgtctcaaaaaaaaaaaaaaaattataaaggtaagcagtacaaatgggaatatgagcataagtcactctcattccagacctctgacccccaggacttttctcttgagaggccatagcctttgttttgcatccttctgagtaaacctattcgtgtacagacatatctgggtatgcatgtaactgttttgtgaaagtgca

SEQ ID NO: 366990 - DNA, 201 bp, Homo sapiens
tctgtctcaaaaaaaaaaaaaaaattataaaggtaagcagtacaaatgggaatatgagcataagtcactctcattccagacctctgacccccaggacttttctcttgagaggccatagcctttgttttgcatccttctgagtaaacctattcgtgtacagacatatctgggtatgcatgtaactgttttgtgaaagtgcat

SEQ ID NO: 366991 - DNA, 201 bp, Homo sapiens
ctgtctcaaaaaaaaaaaaaaaattataaaggtaagcagtacaaatgggaatatgagcataagtcactctcattccagacctctgacccccaggacttttctcttgagaggccatagcctttgttttgcatccttctgagtaaacctattcgtgtacagacatatctgggtatgcatgtaactgttttgtgaaagtgcatt

SEQ ID NO: 366992 - DNA, 201 bp, Homo sapiens
tgtctcaaaaaaaaaaaaaaaattataaaggtaagcagtacaaatgggaatatgagcataagtcactctcattccagacctctgacccccaggacttttctcttgagaggccatagcctttgttttgcatccttctgagtaaacctattcgtgtacagacatatctgggtatgcatgtaactgttttgtgaaagtgcattt

SEQ ID NO: 366993 - DNA, 201 bp, Homo sapiens
gtctcaaaaaaaaaaaaaaaattataaaggtaagcagtacaaatgggaatatgagcataagtcactctcattccagacctctgacccccaggacttttctcttgagaggccatagcctttgttttgcatccttctgagtaaacctattcgtgtacagacatatctgggtatgcatgtaactgttttgtgaaagtgcatttg

SEQ ID NO: 366994 - DNA, 201 bp, Homo sapiens
agcagggcatggagcgagctgggattgagggtttcacagtgtggggagtagatggaaagagcagctgtgttggtggacatgggttaggtgaagccagggarggaagagaaggccttataatattagtcatgggcctaaccctacttctggcatcaagattaattctgttctcatccccacccggctttcacctctgtgcag

SEQ ID NO: 366995 - DNA, 201 bp, Homo sapiens; identical to SEQ ID NO: 79452

SEQ ID NO: 366996 - DNA, 201 bp, Homo sapiens
tagggaccggagagagatcacgtctcggaggggtctgggagggttggggtgagaacactcgggggagggcatggggatgggggcaccaaggggaagacacrgagggtaggcaacaggggaccaggaaggtttgggatgatgtgtggatgatattatgcaaattatgtgcaaagcattatgcaaagcagcacctattaggga

SEQ ID NO: 366997 - DNA, 201 bp, Homo sapiens
tctcacccacccggctgctttgcccagcgctgcctttgaggtacaggggtccatgtgcctcctgggtctgcaggtcatctgagcccagcccccgaccctarggatctggacaagcaagcctaaccccttagctttagcctgggtgccctctgtgggacttctgtctgagtaactggatgggcttgtcatcttaactgtgac

SEQ ID NO: 366998 - DNA, 201 bp, Homo sapiens
atgccagtgtatcccacgctccacccaggcatgacactttggtgtcagaccagggcccatggcagagggcagggcacagaagccagggcctctggaggctrctgggcagcttgtcactgccaccagcctgctcactgttgtggtcacctcccactgaagcatcgccctcaagggctgcccctctgagctgtgttcttccct

SEQ ID NO: 366999 - DNA, 201 bp, Homo sapiens
tggtgtcagaccagggcccatggcagagggcagggcacagaagccagggcctctggaggctactgggcagcttgtcactgccaccagcctgctcactgttrtggtcacctcccactgaagcatcgccctcaagggctgcccctctgagctgtgttcttccctttcttggttcctggtggaggctcgtgccccttgcttcag

SEQ ID NO: 367000 - DNA, 201 bp, Homo sapiens
aggaagagaagaagtcacttgtcttttctctccactaccctcgtgtgcccctctgcccttaggatgcggaatttggtcagagccgttcatgtcagagctcrgcagaatggcagctgaaccctgggagagcactgcctgttctgagaaaggcctgcaattgtgtcttcacgatgcttttccaagacagccaaggcaggtata

SEQ ID NO: 367001 - DNA, 201 bp, Homo sapiens
tggaaccgaggcacctggactccctggccagcatcctccatgttcagccacatgggctttgtcttccttccaagagccagcctggggaagggagctcccawgaagtgtggggccattgggaggggcagggagactttcctggggacagagaggtccctgggagtccctcagtttatttccttggctgtctccacaggggtc

SEQ ID NO: 367002 - DNA, 201 bp, Homo sapiens
ggtggctgtgaacgtgctggggtctgggtagactcagcctcccttgggggctgccacgactctggggtggggggagaggaatggaaatgcggggcagtgtsgggggagctggtgaatggagacagtagagaggtatggctgaggagacaccaagctggttttggttttctagcgaaggggagaatagatgaggccatcagc

SEQ ID NO: 367003 - DNA, 201 bp, Homo sapiens
gatacagagttcttgctctgtgtttggcccatacctaatgttgtgaagtggaaatactggggtgtgttttgaggctcagaacacctgtgataacttggtcrtgtgtgtgtgtgtgtgtgtgtgtgtgtgtgtgtgtatgtgtgtgtatgtgtatatataaaattattttccttaacaccactgacctgaaggcagttacac

SEQ ID NO: 367004 - DNA, 201 bp, Homo sapiens
tctcaacagtgggcgggggtagctgtctgcctcctggagctggcccttcctgggtcaaaatgcagaaggagatggtgagaagaaccacaccagagaggctrgagtaggccagcctggcttgggaccgagtcccgagtccctggctggaccctcggttttcccttccgtggcagggctcacctggatccttaatgccgccct

SEQ ID NO: 367005 - DNA, 201 bp, Homo sapiens
gctttttaattgtttttatccagaacatggatgcttcattttgaatctacatgtgaggaggctgtggaagagaactggggagtctcagccttagctctctyagcctcctcagcgttggggtagggagaggaggtgccttaggcagggacgggcacctgccaccaagctggcctctgaccttttcttctctgacttgctgtc

SEQ ID NO: 367006 - DNA, 201 bp, Homo sapiens
ccttgggttcaggcaattctccagcctcagcctcttgagcagctgggatcacaggcgcctgccaccatgcctggctaatttttgtatttttagtagagacrgggtttcaccatgttggccaggttggtctcgaactcgtgacctcaggtgatccacccgcctcagtctcccacagtgctgggattacaggcgtgagccacc

SEQ ID NO: 367007 - DNA, 201 bp, Homo sapiens
aggcccaagctggctgggacctcctctccccactgctttgtctacactaaaccctcaggacgggggagggcggagacactagcggccagcacaggcctccytaccccctgctgggttccctccccagctagccaggaagtcccttccccccttcccagggccattctcatcatctccttccgtacctgcttccagcccggc

SEQ ID NO: 367008 - DNA, 201 bp, Homo sapiens
atacagagttcttgctctgtgtttggcccatacctaatgttgtgaagtggaaatactggggtgtgttttgaggctcagaacacctgtgataacttggtcatgtgtgtgtgtgtgtgtgtgtgtgtgtgtgtgtgtatgtgtgtgtatgtgtatatataaaattattttccttaacaccactgacctgaaggcagttacacg

SEQ ID NO: 367009 - DNA, 201 bp, Homo sapiens
atcgtgtaagcgcctcgtatatcctggttcggggctgatgagagggactgagtttctcaagcttgctgctattgtcacgctggactgacccattcctggcygtggggctctcccaggcattgcaggatgtcagcagcaccctggcctctacacacccggtgccaggagtatcctccaagtgatgacaaccaaaatgtctcc

SEQ ID NO: 367010 - DNA, 201 bp, Homo sapiens
tacagagttcttgctctgtgtttggcccatacctaatgttgtgaagtggaaatactggggtgtgttttgaggctcagaacacctgtgataacttggtcatgtgtgtgtgtgtgtgtgtgtgtgtgtgtgtgtgtatgtgtgtgtatgtgtatatataaaattattttccttaacaccactgacctgaaggcagttacacgt

SEQ ID NO: 367011 - DNA, 201 bp, Homo sapiens
ctttcctctcaccttgtgctcctgaaggcctctgccatcgcttggaccccctcgcctcgctgaggaccactgggttggatttgagaaacagggcttcaccygcttctgtctctctcttctgaccccatcctcctaggtgcgaaagggtttctggaaacagcctcccctcatctgggatgtcaatcctaaacagattcggat

SEQ ID NO: 367012 - DNA, 201 bp, Homo sapiens
taatgttgtgaagtggaaatactggggtgtgttttgaggctcagaacacctgtgataacttggtcatgtgtgtgtgtgtgtgtgtgtgtgtgtgtgtgtgtatgtgtgtgtatgtgtatatataaaattattttccttaacaccactgacctgaaggcagttacacgtaatttacaaatgaggaatctgaggctttgagat

SEQ ID NO: 367013 - DNA, 201 bp, Homo sapiens
aatgttgtgaagtggaaatactggggtgtgttttgaggctcagaacacctgtgataacttggtcatgtgtgtgtgtgtgtgtgtgtgtgtgtgtgtgtgtatgtgtgtgtatgtgtatatataaaattattttccttaacaccactgacctgaaggcagttacacgtaatttacaaatgaggaatctgaggctttgagatt

SEQ ID NO: 367014 - DNA, 201 bp, Homo sapiens
cattcacccggccgtctttggattttatacagcaaaactccataatatttcctttacatgaatttcctttctttttcaggctgaataatattccattgtaygcatagatcacattttgttcattcatccattgatggatacttgggttgcttcccgattagctattgtgaataatgctgctatgaacatgggtgtacaaat

SEQ ID NO: 367015 - DNA, 201 bp, Homo sapiens
tgtggctgggaggagaggaggccggaagagaggtctgggcttgggtcccaaccactgattccagatctctcaacatttgtaacacgaccaactcctgttctttttttttttttttttttgagacaggctagagtgcagggggacgatcatagcttactgcggcctcgatctcctggactcagggggtcctcctgtctcagc

SEQ ID NO: 367016 - DNA, 201 bp, Homo sapiens
ggtgcccaccatcacacccggctaatttttgtatttttagtagagatgggggtctcaccatgttggccaagctggtctcgaactcctgacctcaaatgatycacctgcctcggcctcccaaagtgttgggattataggtgtgaactaccgtgctccgcctggccaacacttcttaatgggataatgtttcagataacatcc

SEQ ID NO: 367017 - DNA, 201 bp, Homo sapiens
gtggctgggaggagaggaggccggaagagaggtctgggcttgggtcccaaccactgattccagatctctcaacatttgtaacacgaccaactcctgttctttttttttttttttttttgagacaggctagagtgcagggggacgatcatagcttactgcggcctcgatctcctggactcagggggtcctcctgtctcagcc

SEQ ID NO: 367018 - DNA, 201 bp, Homo sapiens
gattttcaagtggttggtgtcttgtgactggcagctgataaacgggtgatacaatgtttctgtacaggagtctgcagtgccaggctgcaggggcggatggkggggggtgggtgggtagcctgtggagcccgagggtgggaacagagagtcttcttttgctgtaggtggaagcctgtctggctcctttccctctaaggtcag

SEQ ID NO: 367019 - DNA, 201 bp, Homo sapiens
ccccagccaggcccagcctccccatccttcatcagatgtggcctaagatccaaacgtgtcttggccaaagaaccaaaacgtgtcttgacacgcagccccaygcagccccagcagtggcctgggtgtggagggacaggctaaatctgggggatgtggcatgaagtcacttgcatctcagaccacaagacccagcaggcatcc

SEQ ID NO: 367020 - DNA, 201 bp, Homo sapiens
ggctggtcgccactgagccatgaggaaggggccaaggtgcctccttcctctgcccttcctctcccaggcacttggattcagctgagttttacttttttttwaattttttataaattcagcatttattttagattcagtggtacatgtgcaggtttgttacccgggtatattatgtgatgctgagatttgaggcataactga

SEQ ID NO: 367021 - DNA, 201 bp, Homo sapiens
cagactcttcagagggtgtcaccttccaaacatcttgctgatttttctgctggcagtgacgcctgcaccccacaaggcactgccattcagactctcgctgrccagcgtctgtccccccaagtctgcctcttcccctgtggattccttcaccacgtggccatggtgaggactcacggactcgctgctccacagcaatgagcc

SEQ ID NO: 367022 - DNA, 201 bp, Homo sapiens
atatataaagaaagaaactctgtacccgttaaatgactcccattctccacaacatcccagcccccacaagccaccatcctagtttctgtctctatgaattytactactctggatacctcatagaaattgaatcctgtgatatttgtccttttaagactggcttatttcacttagcatagtgtcctcaagattcgtccatgt

SEQ ID NO: 367023 - DNA, 201 bp, Homo sapiens
gggatagcattaggagatattgctaatgctaaatgatgagttaatgggtgcagcacaccaacatggcacatgtatacatatgtaacaaacctgcacattgkgcacatgtaccctagaacttaacgtataataaatatatatatatatatatatatatatatatatatatatatatatatataaagaaagaaactctgtacc

SEQ ID NO: 367024 - DNA, 201 bp, Homo sapiens; identical to SEQ ID NO: 79460

SEQ ID NO: 367025 - DNA, 201 bp, Homo sapiens
tattggcccaactatgtggcagacggtttgcctgatttttttttttctagttatcctgacagcctagtggtaggagcagtatttttattcccgttttacakatgggaaaatgaaggcccagagaggttacctcaccagaatcccgtagcagaggcagaaagaggctggcaggtgcacagggtcgtctggctgtggggttca

SEQ ID NO: 367026 - DNA, 201 bp, Homo sapiens
ccagttgcacccacactgcagctgaccgacacaggcccggcccagctctgccagcctgcctgggctgaagtacagcctccgggcgagctgctttcctcacrgtcagagagtttctgcgtggtagctgaagtattactctcctaactcatcgcctgtcgatattagcttcttctcccacacataaatctctctctcagaaca

SEQ ID NO: 367027 - DNA, 201 bp, Homo sapiens
ggccccgcctcccgacagtggtcaggctgccccccccccccgccccaggccacacccttttgtcacaactgcatgctggtgtgcccagtttccattgagcycaagccacagcaccgcctcgtgctggggagagaagaatgtgctggaaaggctgcccgaaggctggtcgccactgagccatgaggaaggggccaaggtgcc

SEQ ID NO: 367028 - DNA, 201 bp, Homo sapiens
gaatgagggcaagaagggcttcactgacccctcggtggagatctgagcctcaggatgcaggtatgggcatgacgagggtgggccacacactgggcagggckgcaccaggttgggccgaatcaactgtctcattcttttcctcttgggctttcactgtggaggacagggcagatgtgggcaggagtggagggcgtcgtcacc

SEQ ID NO: 367029 - DNA, 201 bp, Homo sapiens
tacaggcatgagtcactgtgcctgacccagttcaacattttatgttaattgtttcttcttcaggcaggggggttagctgacaccccagaggagggagggaycttaggggcagggcaggtgtaacagagggaggtgggggagccctggaagtaggaggtggtgaaaggaaagttctccaggagcctgagcctgcatcctggg

SEQ ID NO: 367030 - DNA, 201 bp, Homo sapiens
caggggcacgtcctccaagcaggaacagagggagccagggccacagcgccaggttccaggggccccgcctcccgacagtggtcaggctgccccccccccccgccccaggccacacccttttgtcacaactgcatgctggtgtgcccagtttccattgagctcaagccacagcaccgcctcgtgctggggagagaagaatgt

SEQ ID NO: 367031 - DNA, 201 bp, Homo sapiens
tgctgcccagaggagtgcaaggggatggctgctttctatctggacctgggacacttgagacagtcactcaaccccctcatgcctcagtttcttcatctgtraaacatgaacaaacctttgggattacaagggtttaaacattaaatgagataaccaacgtgcagtccttttggaagccataaatcagtactgcgtgtgagc

SEQ ID NO: 367032 - DNA, 201 bp, Homo sapiens
tcctgccgaacgccttcctccactcggccaagcagaagcacccccactcccatcacccatcatgacctgctgtgggatggctcctctctggggtcttccaygggcctggctcaccattgtccagcgtcccacaatcctttatcaggtttgcttccttcagctagccttctctccagctgccgctccctctccggctgtccg

SEQ ID NO: 367033 - DNA, 201 bp, Homo sapiens; identical to SEQ ID NO: 79461

SEQ ID NO: 367034 - DNA, 201 bp, Homo sapiens; identical to SEQ ID NO: 79457

SEQ ID NO: 367035 - DNA, 201 bp, Homo sapiens
cgggtgtgcagctgcagcacagaggcctgcccggagcacacagctaggaagaaacccgtatgtccccagaggccgggggccagctggccataggcaggagrgggcccgggagggagccagcagtggacccagggccaggagaggtgggacagaggcacggcaaggacccctgcctggccactgctgcccagaggagtgcaa

SEQ ID NO: 367036 - DNA, 201 bp, Homo sapiens
ggggaacatcacacaccggggcctgtcgtgggatagcgggagaggggagggatagcattaggagatattgctaatgctaaatgatgagttaatgggtgcarcacaccaacatggcacatgtatacatatgtaacaaacctgcacattgtgcacatgtaccctagaacttaacgtataataaatatatatatatatatatat

SEQ ID NO: 367037 - DNA, 201 bp, Homo sapiens; identical to SEQ ID NO: 79458

SEQ ID NO: 367038 - DNA, 201 bp, Homo sapiens
gcttctggctcggggctagggtgcaaatgtgaaaaccggcaagcaaaaggcagggcccagggcaggaagtcccacagtgtgtgcaccttgagtgagcagaycggggcaggggcagggccagggaaggcttcagagtgggagagggaatgccaaaggcacagagcccaggagagtctcccctcgccagcacctcacccagaa

SEQ ID NO: 367039 - DNA, 201 bp, Homo sapiens
aggggaacatcacacaccggggcctgtcgtgggatagcgggagaggggagggatagcattaggagatattgctaatgctaaatgatgagttaatgggtgcmgcacaccaacatggcacatgtatacatatgtaacaaacctgcacattgtgcacatgtaccctagaacttaacgtataataaatatatatatatatatata

SEQ ID NO: 367040 - DNA, 201 bp, Homo sapiens; identical to SEQ ID NO: 79459

SEQ ID NO: 367041 - DNA, 201 bp, Homo sapiens
cttcaaagtctccgacaagctgaaggagtatctggaatatacagctccacagaggcaccctaccagtgcacccacatacgtccaagtgcgcgcccactcaytggcctccgtcccccgccgaccaacacaccgcggcagaggcccgggaaactcctggagatcccgctgcccccggcctccccgcgcccgtccgcccacgca

SEQ ID NO: 367042 - DNA, 201 bp, Homo sapiens
gagttaccctgtttaattctgagaatgaccttatgaggtagggatccacagtgccccattttatagatgggaaaactgtggcatggagaacggaaatgacktggcaaaggtcttacagcctgtgggtggcacagttgggatttaaacctggtgtctctgcagtctgtgcttctgacccctgcaccctactgactttcataa

SEQ ID NO: 367043 - DNA, 201 bp, Homo sapiens
ctggcatctggtctggcctctggggctcccttcctgcatccagggctgcccaggcaccctgtggtgcccagccctgagtgtgaagcccctgggctgagtgyacctggcctggtcctgggggccaagcaactcagcaagtggagggactatgagggagggaagcatgtcccaggcaaacgtaccggtgtgaagggatgccag

SEQ ID NO: 367044 - DNA, 201 bp, Homo sapiens
gacctgggacacttgagacagtcactcaaccccctcatgcctcagtttcttcatctgtaaaacatgaacaaacctttgggattacaagggtttaaacattraatgagataaccaacgtgcagtccttttggaagccataaatcagtactgcgtgtgagctgttgtgtttagtaggtttaggagcagcagcccccgcaaacc

SEQ ID NO: 367045 - DNA, 201 bp, Homo sapiens
caggaaggggaacatcacacaccggggcctgtcgtgggatagcgggagaggggagggatagcattaggagatattgctaatgctaaatgatgagttaatgrgtgcagcacaccaacatggcacatgtatacatatgtaacaaacctgcacattgtgcacatgtaccctagaacttaacgtataataaatatatatatatat

SEQ ID NO: 367046 - DNA, 201 bp, Homo sapiens
ctccagcaggtaccaagtcagtcaccatgacctgtgccaggctccatgctgtggatggacacactcatccagcccatcacgagagacccttgctgcaaccrgcactcagcatcccaagcagtgcaaccttgggctgggcctcctctgtagagagggtcagatgaggcgagggtcacagccctcctagcttccagggtccag

SEQ ID NO: 367047 - DNA, 201 bp, Homo sapiens
cgaggggaagccctgggaagctggggtgaggggtgctgaagtgtacgctccctgagaagctggggtgaggggtactgaagtgtacgctccctgggaagccrttcgcttgcaagcaaagctccctagcaattctgtgggggacgggaaggaggaagaccctaagatttgccatgggaaggatatagagctgaggtgttacag

SEQ ID NO: 367048 - DNA, 201 bp, Homo sapiens
ctctctcagaacaagtgctccagcactgtgtctctgcggctccccaggcctgaggacagcgaggcggttgcaggctgtcagtggggcgtgcacactcttcygagtggcgtacctggagccttggaggggggcctcccgcaggcatacctggtgcctgtcaccccgtgattcccaggaaggtgcatgcttgagatcacacac

SEQ ID NO: 367049 - DNA, 201 bp, Homo sapiens
ctgctttcctcacggtcagagagtttctgcgtggtagctgaagtattactctcctaactcatcgcctgtcgatattagcttcttctcccacacataaatcyctctctcagaacaagtgctccagcactgtgtctctgcggctccccaggcctgaggacagcgaggcggttgcaggctgtcagtggggcgtgcacactcttc

SEQ ID NO: 367050 - DNA, 201 bp, Homo sapiens
cttacctttaccacccgacggtaagctaggacaggagggccacaccgtcattggtgcgtgagcccttccgatggaaggacagaatttggagagaagggacrcatggaaaacaagaatcccaatggccctgatttctcctcttgctaggactgctagatctacatataccttggcaactatgggcaaaacccacgagaataa

SEQ ID NO: 367051 - DNA, 201 bp, Homo sapiens
gcctgcctgggctgaagtacagcctccgggcgagctgctttcctcacggtcagagagtttctgcgtggtagctgaagtattactctcctaactcatcgccygtcgatattagcttcttctcccacacataaatctctctctcagaacaagtgctccagcactgtgtctctgcggctccccaggcctgaggacagcgaggcg

SEQ ID NO: 367052 - DNA, 201 bp, Homo sapiens
ttaagtcctctgtctaggtcagaaccctagacacccatcccgctttcttccacgttgctcttctcacagtttgaccccagactcctctaagcagccccctstgagcgactgcgtgtgtgctggtttcctcccccgaccctcagcaattgctgtgtgcctggtgccatttgcccatgagaactcctgaagagccacgagcag

SEQ ID NO: 367053 - DNA, 201 bp, Homo sapiens
tggctccaaacttcctctcaaggcctcagtttccaaaacttgactgcccataggatgaattaagtcctctgtctaggtcagaaccctagacacccatcccrctttcttccacgttgctcttctcacagtttgaccccagactcctctaagcagccccctctgagcgactgcgtgtgtgctggtttcctcccccgaccctca

SEQ ID NO: 367054 - DNA, 201 bp, Homo sapiens
ggcaggggtcaagtggccaagtggtgctctgtgcaccatcgtccggtcatggttagcacattcctgccgaacgccttcctccactcggccaagcagaagcrcccccactcccatcacccatcatgacctgctgtgggatggctcctctctggggtcttccatgggcctggctcaccattgtccagcgtcccacaatccttt

SEQ ID NO: 367055 - DNA, 201 bp, Homo sapiens
tgctggaaaggctgcccgaaggctggtcgccactgagccatgaggaaggggccaaggtgcctccttcctctgcccttcctctcccaggcacttggattcarctgagttttacttttttttaaattttttataaattcagcatttattttagattcagtggtacatgtgcaggtttgttacccgggtatattatgtgatgct

SEQ ID NO: 367056 - DNA, 201 bp, Homo sapiens
cccccccgccccaggccacacccttttgtcacaactgcatgctggtgtgcccagtttccattgagctcaagccacagcaccgcctcgtgctggggagagargaatgtgctggaaaggctgcccgaaggctggtcgccactgagccatgaggaaggggccaaggtgcctccttcctctgcccttcctctcccaggcacttgg

SEQ ID NO: 367057 - DNA, 201 bp, Homo sapiens
gggacatttccttccaaaagtgggcctggcttttagaatgggcctagggcaaggatggaaaggtagcaaggaaggagggcaaaggaggttggggagcgagsacctttcaataccagacttctcccccaatcccaggctgggctccagggttctgtacaaggactacttgccagtcccacaaatcccaaagatagcatgacc

SEQ ID NO: 367058 - DNA, 201 bp, Homo sapiens
gttttacagatgggaaaatgaaggcccagagaggttacctcaccagaatcccgtagcagaggcagaaagaggctggcaggtgcacagggtcgtctggctgyggggttcagaacctttctgcatcgcagggcccctccatgcatggctcttccaggacagaggagagcaaagaggtggtggcaggggggtggcagaaggcta

SEQ ID NO: 367059 - DNA, 201 bp, Homo sapiens
aggttgtgtgttaggtcacaatgggacatgccagacaacaagaggtgtagcagctccgtgtgagagatggggaagctgaggccaagggaaatcaaaggacrccgtcaggggcctcgtgctggtgttttctcctctgacgatcccagaccctctcctctccacctgcctcttctttggaggtgacgtggggctttcaggtcc

SEQ ID NO: 367060 - DNA, 201 bp, Homo sapiens
cagtctcccactggcaccagcaggagggggtgccaccgctcacttaatgtactggttcctgcccaggtggggggtttccgtgaactgtaatgcagggccckccatcgtctcctcaaaaacgatgacctgtggagagagggcccggctgggagggcagctgacgtctgtcctggagccaggggaggtgctgagaggtggcag

SEQ ID NO: 367061 - DNA, 201 bp, Homo sapiens
ctgctcctgtctaggggccacagagcaatttcacacaaggcagaggctgcatgccccagtgccctcccgggcagattgttggtactactggcaggcagatktgtggggctgggggctgccacccccggggtcggggcgcaacgctgagactcccagggcccctcacctcctctcttctccctcagacggctggacccagga

SEQ ID NO: 367062 - DNA, 201 bp, Homo sapiens
gggactttcagggacacccttcacccctgagcatctcacaatgctgagggctcctctccatcttctggccctgccccagccctcctggtcctggaatgcarggcagtggggaaggatgtggggtctggggaaacctggcactcaggagaagaagagaagtcatgcaccccctccccaggcccccaggcaaaaagacctttg

SEQ ID NO: 367063 - DNA, 201 bp, Homo sapiens
cagtgagacaagagacaaaggcacggaggcgcactggcggacagcagagggaggcacacaggcagaagtcagggcctccctgactgagtggtgagttgggrcaggctgggggcctccccctgttcccctacatcgacctcagcaattgtccacccctgcaggaggcccctcactagagcagttggacattctactgaggaa

SEQ ID NO: 367064 - DNA, 201 bp, Homo sapiens
gagaggtggacaaagtggctccaaacttcctctcaaggcctcagtttccaaaacttgactgcccataggatgaattaagtcctctgtctaggtcagaaccstagacacccatcccgctttcttccacgttgctcttctcacagtttgaccccagactcctctaagcagccccctctgagcgactgcgtgtgtgctggtttc

SEQ ID NO: 367065 - DNA, 201 bp, Homo sapiens
tggggacttggcattctgtctccccagagcatgccaagagcaagcgaatgaaagctgcagctgagtgaagttagggtcaccaggaggcctttaggacccaraattgcagacgccctgaagccaatgggaagggcgaagcccaggagcacacgcagtagccgtgccctaatgtatggggactgtccaagggcacaggtcctc

SEQ ID NO: 367066 - DNA, 201 bp, Homo sapiens
aaaggtggtagtgggtatgagctctagatcaggtagtttgcatatgaaaagtgtgtttgcaggcaaggtgtgtactgtcactaggaattagctagtcccgsgaggggcagtccctccccatatctgcaagtcccccaagatgtcgacgcatcttaaaatacagaaaaacttaaaaaacaaacatcattaatacacacacat

SEQ ID NO: 367067 - DNA, 201 bp, Homo sapiens
catgtggctgcacaggactgttgttctagggttttctaagatttgtcttctgtgcttatgtcgccctacctctgctggtagccactgcagagactgagacrtttcctcccagagtctgctcagttggtgaccattaatggccttactggaccaaacatcaagccttccctttcttcccatggggtgaagaccctttcccag

SEQ ID NO: 367068 - DNA, 201 bp, Homo sapiens
gggaggcacatcactccctaagttactagggctgtggggcatgtggctgcacaggactgttgttctagggttttctaagatttgtcttctgtgcttatgtygccctacctctgctggtagccactgcagagactgagacatttcctcccagagtctgctcagttggtgaccattaatggccttactggaccaaacatcaag

SEQ ID NO: 367069 - DNA, 201 bp, Homo sapiens
agagcccacctcagctcccaggacccctgctcttcactgtttgacctgacttgacttttctgggcctcagtttcttcatctgtgaagtaggttgctgagarcacctagaacagttcatggcacttaaatctcatcagtgtggctatttttattcaagtctttaaagccctctctggaagtaggccacaggatccacctaca

SEQ ID NO: 367070 - DNA, 201 bp, Homo sapiens
gtagaagctggagctgaaggactctggacatacaggaaggggacctttactgacagttgctagcccagtgcatgggcacctgcataggtggggtgcccaayggggcctagagcttgggctgtgtagcacgcactgttgaaaatgttggggtacggatgtcgtagggcctagcactgtgcaatgcctggatgtgtttgtgtg

SEQ ID NO: 367071 - DNA, 201 bp, Homo sapiens
gagcactcatgcacacacacatgcctacgcgtgcacacatgtgcgcacacacatgcagatgcacacacatgcacacatatatgcaggtgaacatgcacagrcatgcacatatacacatatgcacatgaacatgcatacgtatgcacacacacacacacacttgggaagtcttggggcttctcttttctgtagttctagact

SEQ ID NO: 367072 - DNA, 201 bp, Homo sapiens
ggagttataacctcccacagaacagccgtgctccagcacctccctgctgagcactcatgcacacacacatgcctacgcgtgcacacatgtgcgcacacacmtgcagatgcacacacatgcacacatatatgcaggtgaacatgcacagacatgcacatatacacatatgcacatgaacatgcatacgtatgcacacacaca

SEQ ID NO: 367073 - DNA, 201 bp, Homo sapiens
ttgctgtgtgcctggtgccatttgcccatgagaactcctgaagagccacgagcaggcctcctgggtccgttcagatgagctccacgctagcgtgccacacrccccacatgctgccgatgacagtggccggagggaggcagcagaagagctgatgcccggggtcctcccctttggtgtgacttgctggttctgtccccaccg

SEQ ID NO: 367074 - DNA, 201 bp, Homo sapiens
ctgagcaggtcgcaggctggggttggagggtctgacagtgtgtggactctgaattgaggaggaaaggcaggcgtcagagagatcaccataagggccattgygggtaaaaacttgacctggcccaggattaggggatggagccctaggccggggcagcagtggaaggagctgaggccccgctgatgcagggagaaggtggag

SEQ ID NO: 367075 - DNA, 201 bp, Homo sapiens
gtggctttggctcagagccctccaaggcgggaggcaggtgggagaaactggcagggaaaagggcgttaccaacctccagcttcagaaaggtgtcacaaggsgtggagctgatggacaagctacccaagaagaaagcaggtaatgtgggtgtttctgggagggaactccatttgtccaggccgaacctaaggacagaacaca

SEQ ID NO: 367076 - DNA, 201 bp, Homo sapiens
ggaggccagagggagggaccctgcccaccaagccaccaggggtggaaggtgagggctggcctgaggggcaggagctggccattggtagccaggctggtgcyggacaccccaggctacctggctgccagccttctcccagaagttggattgtgcaaccctgggctactcccttcttttcacagatgaggggacagacaccca

SEQ ID NO: 367077 - DNA, 201 bp, Homo sapiens
caatagcttctgtattgtgtttgcccgcagaggaccacagggtgtcactcagtcaccttggccagcgccacttagaatgcatctgtaccgagcctcacttmtgcctcctgccctcactgccctcactggaagcaccttccccacctgcccctcagaaaggcccccacaggacctgggggcctgggctttgcagaggtcctg

SEQ ID NO: 367078 - DNA, 201 bp, Homo sapiens
tgccatcttgggcggtacagatacagaacgttcccggcagcacggaaagttctagtgggcagagtgttgtggacctgagcctgcacaggtgttttgggcayggaaagttctagtgggcagagtgttgtggacctgagcctgcacaggtgttttgggcacggaaagttctagtgggcagagtgttgtggaccggagcctgca

SEQ ID NO: 367079 - DNA, 201 bp, Homo sapiens
gtgagggagggcccgacagtgagcagcgggacctccggctgcggggagtggaggggcttcccgagaagggggtgtgggtgcggaggcgcgcgcagggggawcccgggaagccgggctgggagcggggcaggcagcagagagccagggaaagggatggaactgcgggctaaagcatcccccacaagttagggggaagacagg

SEQ ID NO: 367080 - DNA, 201 bp, Homo sapiens
gcagcgaggaggagggaggaagaacccgctgacacgcccctccaccctgaccgaaggctccctgggacggcaggtgggcagggcgtcatggggaacaggarggggctggaagctcccacctggttgattccgctgctcaaccagggacctgggaggtaaagcgtcttctggggtccaatgttccagtaacgtccaaggttc

SEQ ID NO: 367081 - DNA, 201 bp, Homo sapiens
gtcaagaaccacccccacatgcacacacatgggagccttggccaacttccctgtccccttcctcccccagccaggcctagctgcatggattcttgtagaakctggagctgaaggactctggacatacaggaaggggacctttactgacagttgctagcccagtgcatgggcacctgcataggtggggtgcccaatggggcc

SEQ ID NO: 367082 - DNA, 201 bp, Homo sapiens
tcaaaggaagaacggctgaaaaacgccctgttgggtactatgctcatacctgggcagcgggattcatcatactccagatctcagcatcacatgcaatatgmcccataacaaacctgcacatgtgcccccaaatctaaaatgttgaaattatttttaatataataattcgtggtccatatatggttaaaaaaaagaaaaaag

SEQ ID NO: 367083 - DNA, 201 bp, Homo sapiens
agcagtggcctgggtgtggagggacaggctaaatctgggggatgtggcatgaagtcacttgcatctcagaccacaagacccagcaggcatcccgtgtgggkttctaggctctgtccctcactgggccagcaaagaggagtttacgggcggacacagacacacacggcctagaatgtccactaggggaactacgtgcctgtg

SEQ ID NO: 367084 - DNA, 201 bp, Homo sapiens
cttctcccccacatttccagagcccgttctctgagcggaggcctaggtcccagccttgcatcggcctgtctacctgtgaggggtagctgcagtttcttcawctgcaaaatgaagatactgcctggccccgagtgttgctaatggcactgctttgtgtatgagtgctgtgggaatggaggcagtagaagtgtccccatttca

SEQ ID NO: 367085 - DNA, 201 bp, Homo sapiens
ggggaccttgcagagggagggggaggaggggatgagggagtgtgggatctgccctgctgggtgtatttgctgcaggacacagggttagtgagaggcagtgrgggtgccttggaccctgccctgagtatagctcccttactactggtgggagggtggtaaagggaggggttaaaaaaagtcgttggaaagatgtactgaata

SEQ ID NO: 367086 - DNA, 201 bp, Homo sapiens
gaaaagcccagtaacaacaacaacagtagctcctattggtcaagggcctcccatgttaaaggtgcataatccccacagtaatgttatgagggagataggaycaacccatttcacagataaagaaactgaggcttagatcaaggttcacccccaaggcacctaggtggttaagtggtgaaggtgagatttgaatctggttca

SEQ ID NO: 367087 - DNA, 201 bp, Homo sapiens
gagcaggaagagagggggctttagtgtatagttgagggaccctgatggaaatgcagtcccattgccaagaaaatgtccttttcagtgtccatgggcattcyttttcccttcttctcttgctgggtggacagaagcccgaggatactggcagtattccctcagggtcctcggggtgggctgctttcccagctggagcagagg

SEQ ID NO: 367088 - DNA, 201 bp, Homo sapiens
ttttttctgagacatcttgttctgtcacccaggctggagtgcagtggcacaatcttggctcactgcagcctcaacctcctaggcccaagtgatcctcctgsctcagccttctgggtggcacaggtgcatgccaccaaacttggctagttttttaaattttttgtagggggggggtctgactatgtttctccagctagtctc

SEQ ID NO: 367089 - DNA, 201 bp, Homo sapiens
cacgtgtgtcctgggcctgttgtcaccctttccatcccctcagtgttgtctcctagtgtcggaaccccaacccccagctgagttcagctcttctctgccckggttatctcaaatggaaaatgagaacagaggtttgctcagccagattccttccctgcagtcatctgcagataaatgagatactctctgtgaaagaaggaa

SEQ ID NO: 367090 - DNA, 201 bp, Homo sapiens; identical to SEQ ID NO: 79492

SEQ ID NO: 367091 - DNA, 201 bp, Homo sapiens
gtctactgagctatctaaagaactggagaaccctgaaggatgcaggacactagggactctcaactggtcccccgagagcagatgaccaggaataaagaaaygtatctagagcaggtcaactgagcagtagcgtctggagtcagaggagcaggagctccaggcataatgcccagtggtacttgctacccttccatgcagtcc

SEQ ID NO: 367092 - DNA, 201 bp, Homo sapiens
tctgggacccagaaaccagattagtagggtgaccaatcatcctgatttgcttgggactgaggggctcgtgggactttgagttccaaaactggtaaagtccyggatacaagaggctcaggtgatgtatttgctggttagaaaggactagagccttgtctgtaattgaggttcagaggtctactgagctatctaaagaactgg

SEQ ID NO: 367093 - DNA, 201 bp, Homo sapiens
tttttttctaattctcagtttcttaatttgcttgtccaggccttaccaatagacttgcatgtggacatgagcaacactgttcctgaaggtcctgtgtgtgmtctgggcacataagcctcctaactgccatggagatttgggaaaaatgaagtagatgtccagctgtctctggtggggcccattctgggacccagaaaccag

SEQ ID NO: 367094 - DNA, 201 bp, Homo sapiens
caactaggattaaccaagatgaatttaacttgtgagcagttggaaagagttaacttactctttccaagcctctcatgctacctctctctctctctctctctttttttttttttttttttttttttttttggagacagggtctcattctgtcctccaggatgaagtgcaatggcatgatcatggctcactgcagccttgaac

SEQ ID NO: 367095 - DNA, 201 bp, Homo sapiens
cctgcctcagcctcctgagtagctgggactacaggtgtgcaccactatgcctagataaatttttatttttagtagagacgaagtctcgctgtgttgcccargctggtctccaactcctgacctcaagcatccttccatcttggcctcccaaagtgttaggattataggcatgagccaccatgcctggttgtgttacctcat

SEQ ID NO: 367096 - DNA, 201 bp, Homo sapiens
tgttccacagagtgaaacctcaataaattggccatctgattcctccttgaactgtataaataatagaatttgtaaggtaaattaagagcaccaagactgtrgtaggaagtattctattagcttaagaaaacagacagatctgaagcaaacccaagtacaactcctaaggagtcttgttccttaaagcagtagttctcaaac

SEQ ID NO: 367097 - DNA, 201 bp, Homo sapiens
gcttttgttccacagagtgaaacctcaataaattggccatctgattcctccttgaactgtataaataatagaatttgtaaggtaaattaagagcaccaagrctgtagtaggaagtattctattagcttaagaaaacagacagatctgaagcaaacccaagtacaactcctaaggagtcttgttccttaaagcagtagttct

SEQ ID NO: 367098 - DNA, 201 bp, Homo sapiens
gctagaaatgttagatgtgttggctaaatatgttgaccaggaagaattaggtttgccacatttaggttagaatcttcaactgattgtgggtccaagttcatttttttttttttttctaattctcagtttcttaatttgcttgtccaggccttaccaatagacttgcatgtggacatgagcaacactgttcctgaaggtcct

SEQ ID NO: 367099 - DNA, 201 bp, Homo sapiens
agctactcgggaggctgaggcaggagaatggcgtgaacccgggaagcggagcttgcagtgagtcgagattgcgccactgcagtccgcagtccggcctgggygacagagcgagactccgtctcaaaaaaaaaaaaaaaaagaaaagaaaccacagagccaggtgcagtattgcacacctgtaatcccagcgactctggaggc

SEQ ID NO: 367100 - DNA, 201 bp, Homo sapiens
ctggctaattttttttattttttatttttagtagagacggggtttcaccatgttggccaagctgatctcgaactcctgacctcaagtgatccaccctcctyggcctcccaaagtgctggaatcacaggcgtgagccaccgtgcccaaccagtgaggccacgtttcgaaaagaagaaagaaacgacaaactaaaatacatga

SEQ ID NO: 367101 - DNA, 201 bp, Homo sapiens
cagaagccacagaccagttaacaaatgggccctccatctgggccttccccagacagtggtaaccagctgtggggagaggtccacctgggtcctgcagaggstggtgttttgttagacacccctacgttggataggggagggtgagccagctagaagtgcttggggtctaggtaagctgggcacagggacaaccagtgaccc

SEQ ID NO: 367102 - DNA, 201 bp, Homo sapiens
gatctttttggacaactgagccaatacattcccttttttccttgaaccagtttacactgggtttctgatacttgcatctcccaaagtccagactattcccrtggtctcaatgctgtggcccctgctgatgtctcccaccttgtcttctgccatgttcacccacattctctatatcattgctgttctgaccttctgtcagtt

SEQ ID NO: 367103 - DNA, 201 bp, Homo sapiens
tccctccaggaatgtagccctccccctctctcttctacaaaactcagagggactcttcaggagccacatgctctcatcaagcagaaactttttaagaggtrgacaacaacccagagtggacacagagctggtgctcttccagtagaggtaagtcttggccagctctcagtgccctggctctgtaagcctccctcccaacaa

SEQ ID NO: 367104 - DNA, 201 bp, Homo sapiens
cactatctggagttagtgcagacacagattaagggctcagtcctataagactgcactgacttcaaatgtcagtctcatctgggccaggccacccatgcttytgacctaccagctataaatcaaggattcccaagatcccctcctcaagttcaataatttgatataagagctcacagaactcagaaaaacagtttacttaca

SEQ ID NO: 367105 - DNA, 201 bp, Homo sapiens
atacacttaatgaactattatttcattatatgttttcctctaaattagccttcttttttttttagacgggtctcactctgttgcccaggctggagtgcagygatgtgatcatggcttactgcagcctcaacctcccagtctcaagacatcctcctgcttcagcctcccaagtagttgggattacaggtgtgctccagcaca

SEQ ID NO: 367106 - DNA, 201 bp, Homo sapiens
attgcactccagcctgggcaataagagtgaaactctgtctcaaaaaaaaaaaaaaaaaaaaaaaaaaaaagttgatttgtaggaattctatcacttttggkgatgaatccttgttctgttacatatggtgaaaggagttttctccacatatcaggaccactacttgcttttgtttatgggatctttttccatgcagaagtt

SEQ ID NO: 367107 - DNA, 201 bp, Homo sapiens
cactccagcctgggcaataagagtgaaactctgtctcaaaaaaaaaaaaaaaaaaaaaaaaaaaaagttgatttgtaggaattctatcacttttggtgatraatccttgttctgttacatatggtgaaaggagttttctccacatatcaggaccactacttgcttttgtttatgggatctttttccatgcagaagtttaaa

SEQ ID NO: 367108 - DNA, 201 bp, Homo sapiens
ccctggggctgggattgaggtgagggaaccccttcatgtttctccccaaggcttctctccgggagtagtctttgaatggtgggtacccagaggtgctccartgtctgtatattaggacatctgaccctttccaggacacaccaggaccctgacaggcacgtgtgtcctgggcctgttgtcaccctttccatcccctcagtg

SEQ ID NO: 367109 - DNA, 201 bp, Homo sapiens
actgtgcccgtggagggatcgtggacgaaggcgccctgctccgggccctgcagtctggccagtgtgccggggctgcactggacgtgtttacggaagtaagkgcctggcagcctcagcgtcaggaggacgggagagatagggagcagagaggcccatggcagggaaagcctggcgttttacagaaagcctctagcttattgt

SEQ ID NO: 367110 - DNA, 201 bp, Homo sapiens
tgctgatctggactcaaaagctggaaatacttggtgggggtcctttagctctctggtgagtgaatagccctgagtcccagtgaaccaggtgttgatggctsttttgagactttggttcctgtcttcttagtttaaaagaatttaaacaagagacacggtgcagcattgaggagtttattgcaaaggaaaaagaatattttg

SEQ ID NO: 367111 - DNA, 201 bp, Homo sapiens
ccggagctgcctggacctcatcattccggagagtctaagtggcctcttctcgtgctcagctgcttacctcaaccacgtcattatcatacttttgagtctgratgaattttgtcttagggcggagagctcatcagttctaccggtcttggagaacaagattttctaaagggaaaggaagattcttgaacatattgtgaaaga

SEQ ID NO: 367112 - DNA, 201 bp, Homo sapiens
cttgcaggcagattccccaggcgacggcttcgatgaaggacggcaaatgggagcggaagaaggtgagcagcggccttgactcgccccacctgggctcaggscccggggtccactcatgttgctgacttcagcttctttccttttgcctgtttggttgcagttcatgggaacagagctgaatggaaagaccctgggaattct

SEQ ID NO: 367113 - DNA, 201 bp, Homo sapiens
tcggggttaagaaactctcaaggaagcataggtaattaggtgtcctcttcataatagtagaagacgtcataggttatggtgctggatgagataggtagatsaaaataattccttgagcttctggagtactcgatgtcatcagagttgcccagtaccccactcagttatccctacagaccctggaggattggcgatcgctta

SEQ ID NO: 367114 - DNA, 201 bp, Homo sapiens
cttgattccagcttctgccatatcctagctatgtgacttcagcaagttctctaaattctttaagtgtcagtttgcttgtctgtactatagggataattgtratatctgtcttaggattgttgtgaagcacagtgctggatgtaaagtacttgctcaaaaaatggtagctattgttactagtaaatctctccaagggatttt

SEQ ID NO: 367115 - DNA, 201 bp, Homo sapiens
gctgcagtaagccatgatctcgccactgcaatccagcctgggcaacagagctagaccctgtcccacccctccaccaacaaagatgtgtttcttacaatgarcctcagtcaaaaaagtttggaaaacgttggcttaaaataataaagcatcttgtttggaactcacatcttaaatatacctaatatgccggaaaatatttaa

SEQ ID NO: 367116 - DNA, 201 bp, Homo sapiens
gggagccctgtgatggacacctccccgggcttgggctctgcaggcccacacagaggacagagagatgtgccgaggtgcctgcgttatgggccctcttagtwggactttcctctgctgctgcaggccctcagccccggcagtggcagcatggtgctccagatctcctcccagcagctagctgctccaccccaccacccttct

SEQ ID NO: 367117 - DNA, 201 bp, Homo sapiens
tggattgccagtgacactatctgagcaagtttttgtccacacttgatctttttggacaactgagccaatacattcccttttttccttgaaccagtttacaytgggtttctgatacttgcatctcccaaagtccagactattcccatggtctcaatgctgtggcccctgctgatgtctcccaccttgtcttctgccatgttc

SEQ ID NO: 367118 - DNA, 201 bp, Homo sapiens
agcctcctaaagtagtgggattacaggcatgagccaccatgccagggccttctaatttagtcttgacatctctcttaggatagagactatataaactctakccctgggctgtagggaatttggtcatggctgcttacagtgtcctttcatgagatacttctttatcctggcagatgcttttgttgctgtctgatctgtgtc

SEQ ID NO: 367119 - DNA, 201 bp, Homo sapiens
ttacccctttttttctgctttaaaaaatctcagcgattctttcctgcctttctttttttttttttttttgagacggggtctcgctctgtcactcaggctgsagtgcagtgatgcgatctcggctcactgcaagctccgcctcccgagttcacaccattctcctgcctcagcctcccgagtagctgggactacaggcgcccg

SEQ ID NO: 367120 - DNA, 201 bp, Homo sapiens
tctttcctgcctttctttttttttttttttttgagacggggtctcgctctgtcactcaggctggagtgcagtgatgcgatctcggctcactgcaagctccrcctcccgagttcacaccattctcctgcctcagcctcccgagtagctgggactacaggcgcccgccaccacgcccggctaattttttatatttttagtaga

SEQ ID NO: 367121 - DNA, 201 bp, Homo sapiens
gaggctctctggactgagtgtagtggctaatgcctgtaatcccagcaccttgggaggccaaagtaggaggatcacttgagcccaggacttggagaccagcytgagcaacatagcaagaccccgtctctacaaaatttaaaaaattagctgagtgtagtggcgtgggtctgcggtcccagctacttgggaggctgaagtgag

SEQ ID NO: 367122 - DNA, 201 bp, Homo sapiens
tttgaatgtacatcctaatgtattatatactatattgtgaatatggattgtgttgaagctataattatgagggatttaatacattggggtctacattcaaccccgatgtacacatacttatatatatgtaaaatgtttagcccattaactttgccttgctgacagttgtgggaaagtttctagagttgtcagtcacaaggt

SEQ ID NO: 367123 - DNA, 201 bp, Homo sapiens
ctgtgccaaccaggagtttcttctatttccaggcctcctggcagaggcaggcgtgcggctgctgtcctaccagacttcactggtgtcagatggggagaccwggcacgtcatgggcatctcctccttgctgcccagcctggaagcgtggaagcagcatgtgactgaagccttccagttccacttctaaccttggagctcact

SEQ ID NO: 367124 - DNA, 201 bp, Homo sapiens
tttccagcccttggcttagggcgagagtacatcagagaactctggacagtggcgtggtcagttcatggagcaggagtgagagaacacagcctgcactcaargctttctcttggggaaggagtgggaatactgggtctgtgcccattgatgtcccccttttctttgatctttagcacccccaatgggaacagcctcagtgcc

SEQ ID NO: 367125 - DNA, 201 bp, Homo sapiens
aggctcacccacattatggagagcaatgtgcttactcaaaaattcacggatttaaatgttaatctcatccataaacacacgccaggttttaaatgttaatytcatccaataacatcttccaagttaacacaaaaaatgaaccatcacagactgtaagccccctttaagaccaaaaataatctgttgttcttatacccttat

SEQ ID NO: 367126 - DNA, 201 bp, Homo sapiens
gtggctcacatctataatcctgggaggcagaggcaggaagatccctggagcacagaagttcaagaccagtctgggcaacatggtgagaccctgtctctacaaaaaaaaaaaaaaaaccaaaaaaaaacaaaaaaaaaaaccttaaaaagttagctgggcgtggtggtgcacctctgtggtcccagctactcgggagaattg

SEQ ID NO: 367127 - DNA, 201 bp, Homo sapiens
aataagaatgtaatcagtgtttgttaatttaaattaatggcagtgttaaatgcagctgcagtggagtgggttaagattgaccttggtgtcaaaagccctgmactcaagtcccagctctaccactttctgactttgggcaagtcatcattgtatttgctcacatagttagcattactgggactcttcattcctttgtgtgga

SEQ ID NO: 367128 - DNA, 201 bp, Homo sapiens
tatatttgttaagggaatttttgcttctgtaaccccccaaatttcaagaacacaaaactctaaccatttatttctcagccatataccagtccagtatgggttttttttatcagcaatgttggggagagctctgccccacacattcattaagagacccaggggattggggcaccaccatcatcagcacatggttttcaaggt

SEQ ID NO: 367129 - DNA, 201 bp, Homo sapiens
gaaactctgtctcaaaaaaaaaaaaaaaaaaaaaaaaaaaaagttgatttgtaggaattctatcacttttggtgatgaatccttgttctgttacatatggkgaaaggagttttctccacatatcaggaccactacttgcttttgtttatgggatctttttccatgcagaagtttaaaatttgaatgtaactggatttgtca

SEQ ID NO: 367130 - DNA, 201 bp, Homo sapiens
tttatgcattttgtccattgttttagttgtttcaggtaggagggtaaacctggactctgttactctatttggctggaagtagaagtcctatgcagcttctytgtgcctcaattttctcattttggaaatagtgctcttaatatcagtctgttctacattaccaatttattgttattttatgaaatatataattcatacata

SEQ ID NO: 367131 - DNA, 201 bp, Homo sapiens
tgatcatggctcactgcagccttgaactcctgggctcaattgatcctcctgcctcagcctcctgagtagctgggactacaggtgtgcaccactatgcctarataaatttttatttttagtagagacgaagtctcgctgtgttgcccaggctggtctccaactcctgacctcaagcatccttccatcttggcctcccaaagt

SEQ ID NO: 367132 - DNA, 201 bp, Homo sapiens
tatgagaaaaaaaaatacatctggattagagatgaacagggccattgttctggccggcctcagggccagcagacgaagaagacttgtgacaacgatggcarggatcccatctcctcgcctggacactttctcctccccaccagaaatgagtaggttacagccgaggggagcagcagtgtctgaaaaagaccaccagcgttc

SEQ ID NO: 367133 - DNA, 201 bp, Homo sapiens
gaacttctgattctgctcccaatccctcgctcctttttcccctatcccctgtgccaaccaggagtttcttctatttccaggcctcctggcagaggcaggcrtgcggctgctgtcctaccagacttcactggtgtcagatggggagacctggcacgtcatgggcatctcctccttgctgcccagcctggaagcgtggaagca

SEQ ID NO: 367134 - DNA, 201 bp, Homo sapiens
ggtttaaaagaagctccccattgtcaactgctcaccatgacctcactcatcaaaggtgcatcaaaactaggaaacacgcacaccctattgggaaggaatgygttcgtttcatcagactgttcctagcagggaggacggtaggagagtgtgggtgcctatatgtagactctacaggattgggcaatgtgggtggagagcagg

SEQ ID NO: 367135 - DNA, 201 bp, Homo sapiens
ctgttttggtaccagtaccatgctgttttggttactgtagccttgtagtatagtttgaagtcaggtagagtgatgcctccagctttgttcttttggcttargattgtcttggcaatgcgggctcttttttggttccacagaaactttaaagtactttattccaattctgtgaagaaagttattggtagcttgatggggatg

SEQ ID NO: 367136 - DNA, 201 bp, Homo sapiens
cttgtatcattgtggcctagatgtgagacgtgaagtcaaaggagatcattttgatgctttaagatttaatgactgtcctgctggattttggatttgcaggkggcctgtagccactttgttttgtccaatttctcccatttagaatgggagcatttatgcaatgcctgtaccctcattgtatcttgaaagtaactaacttgt

SEQ ID NO: 367137 - DNA, 201 bp, Homo sapiens
ttcctaggtattttattctctctgaagcaattgtgaatgggagttcactcatgatttggctctctgtttctctgttattggtgtataggaatgcttgtgatttttttttttttttttttttttgagatggagtctcactctgtcacccaggctggatggagtgcagtagtgtgatctcggttcactgcaagctccgcctcc

SEQ ID NO: 367138 - DNA, 201 bp, Homo sapiens
taccccttctccttggagttgtgaagagaataatgtaaagcaactggtgtaatgcctagtacccagcaggtgctcaataaatggtttatgtgctggtgagkctggtactatggatatatggtatagagtagataaagttttaatataaaatccctgcattaggcatagaaaatataactaaggagaccaaaactgcaggtc

SEQ ID NO: 367139 - DNA, 201 bp, Homo sapiens
acggggtttcaccgtgttaaccaggatggtctcaatctcctgacctggtgatccgcctgccttggcctcccaaagtgctgggattacaggcgtgagccacygcgtccagcctggaatgcttgtgattttgcacattgattttgtatcctgagactttgctgaagttgcttatcagcttaagtagatttggggctgagatga

SEQ ID NO: 367140 - DNA, 201 bp, Homo sapiens
gcctgtgttatcatttctctgttgaaagcagctagacacaaaacatacataataacagctagcccttgttgggcactgttgcacacaaattgccttcacgyctatttggtctaccccctcacatgattcatttgaatgatcagtggtagagctatttcacttgttcacatgcttattagagtaatatgttcaaagttaatt

SEQ ID NO: 367141 - DNA, 201 bp, Homo sapiens
gtgtctgagcaagtctagatgaatttaattgctctcatttttcccctgcccctcttcctttggtctctcttttaggaaatgtttttctttcaacattcgtytcattcattatttactcattcggccaaccaacatttattgagtgccttccctgtatcagggacaggggcttacaaagtagaatttgatcccacctctgcc

SEQ ID NO: 367142 - DNA, 201 bp, Homo sapiens
tcaaaaaaccagctcctggattcgttgattttttgaagggttttttgtgtctctttcagttctgctctgatcttagttatttcttgccttctgctagcttytgaatgtgtttgctcttgcttctctagttcttttaattgtgatgttagggtgtcaattttagatcttttcttctttctcttgtgggcatttagtgctata

SEQ ID NO: 367143 - DNA, 201 bp, Homo sapiens
ggagaagaacagggttagtgatcagccagcactatctgctaaaaggaacctagcagggcctagaagggcctagaaggaacatggagtggcagaagttttgkcccagggacatggtaactatttctagatcccttccatgataaacaatcatgctgtacctatcatatgctagacattgagctataataactgaggctagca

SEQ ID NO: 367144 - DNA, 201 bp, Homo sapiens
ccaaggaagggtagaaaatgtgatctatctgtgcccacagggtagtgtgccctggagaagaacagggttagtgatcagccagcactatctgctaaaaggarcctagcagggcctagaagggcctagaaggaacatggagtggcagaagttttggcccagggacatggtaactatttctagatcccttccatgataaacaat

SEQ ID NO: 367145 - DNA, 201 bp, Homo sapiens
aacttatcttcttgcttcatttcattaatttgatcttccgtcagtgataccctttcttccacttgatcgaatcagctattgaagcttgtgcatgtgccatraagttctcgtgccatggttttcagctccatcaggtcatttaaggtcttctctacactgtttattctagttagccatgcgtctaacctttttccaaggttt

SEQ ID NO: 367146 - DNA, 201 bp, Homo sapiens
gctagtcatttacattaggtatttctcctaattctatccctcccccaggcccccaccccccaacaggccccggtgtgtgatgttccccaccctgtgtccargtgatctcattgttgaattcccacctatgagtgagaacatgtggtgtttggttttctgtccttgtgatagtttgctgagaatgatggtttctagcttcat

SEQ ID NO: 367147 - DNA, 201 bp, Homo sapiens
tgctattcctttctgttagttagttttccttctaacagtcagacccctcagctgcaggtctgttggagtttgctggaggtccactccagaccctgtttgcstgggtatcaccagcagatgctgcagaacagcaaatattattgcctaatccttcctctggaagctttgtcccagaggggcaccctattatatgaggtgtct

SEQ ID NO: 367148 - DNA, 201 bp, Homo sapiens
agaaggcaacctaaaaagagagaagagtaattccaagatcaggataaggaatggagaggagagtttgctgtctggaaaagcaataaaactagaagaacttggaaaagatgaaagattaatgcctccagtacaatcaacgcaaacaataaatggggactttgaatttataactaatttcatccatatatataatatttgtgt

SEQ ID NO: 367149 - DNA, 201 bp, Homo sapiens
tgggtacatatatatttaggacagttagctcttcttgttgaattgatccctttaccattatgtaatggctttctttgtctcttttgatctttgttggtttraagtctattttatcaggcagtaggattgtaacccctgcttttttttgctttccatttgcttggtagatccctttattttgagcctatgtgcgtctttaca

SEQ ID NO: 367150 - DNA, 201 bp, Homo sapiens
ggaaaagatgaaagattaatgcctccagtacaatcaacgcaaacaataaatggggactttgaatttataactaatttcatccatatatataatatttgtgwatatatatatatatgtttgtattctgaaatctcatgtgtactgagctatagaagtatcttggacttgatatgtgttgaggaagcctgactttagagcctg

SEQ ID NO: 367151 - DNA, 201 bp, Homo sapiens
  misc_feature (1)...(201): n = A,T,C or G
catctacttagaattaaatctaaacttcttcaccatggtggagtagtcaatgttggtgttccttgcctgtcctccaatccccatttcccttctttcagctncctgaattttcctctggggacccacttttcttacaattttagtgtatacttcagatagatgaattctttcctcagatctgaagtggttgctttattcagg

SEQ ID NO: 367152 - DNA, 201 bp, Homo sapiens; identical to SEQ ID NO: 79495

SEQ ID NO: 367153 - DNA, 201 bp, Homo sapiens
gcaatggaacagaacagggccctcagaaataatgccgcatatctacaactatctgatctttgacaaacctgacaaaaacaagcaatggggaaaggattccytatttaataaatggtgctgggaaaactggctagccatatgtagaaagctgaaactggatcccttccttacaccttatacaaaaattaattcaagatggat

SEQ ID NO: 367154 - DNA, 201 bp, Homo sapiens
ttcacttgcaagctctaggagccctgctgccttgcacggcttcccgttggcgccttcccctctggttccctgtttagatcaaagtctgtttcaaagcctgytgctcagccagtgggagctggcagaagggataggcagtagagctgccatgtcctcacccctctgctcccctccactcctgcatgccagtcatgccactga

SEQ ID NO: 367155 - DNA, 201 bp, Homo sapiens
atttatgatcatgccactgtgctccagcctgggtgacagagagagactctgtctctaaaacaacaacaataaaaaacaaacaaacaaaaatgacttacttwtgtcttactaaatttattcctatttctattttataattcctattttcttgatgctgctgtcactggaattattttctaatttcttcagatttttaataaa

SEQ ID NO: 367156 - DNA, 201 bp, Homo sapiens
tttgatttgcatctttctaagatggttgactttacaagttatctcaataaaagtggccagatgcctaactcagaaccagagcattttgaaccacaaaatgraattgaaattttggcccagaacaagctggttctgttatcaggcccctgggtggggcagggggcagccagccaggtcctagacataacttttgggggatat

SEQ ID NO: 367157 - DNA, 201 bp, Homo sapiens
agaaagcagctgtctgccttccccatcgcagccttgcaatttattgccattaccattaggtagcagtgacattccagagcttttcctgaaagggactcctkaatataagctctggcagagcgagggggtgggggagggagggggaccttgcagagagatggggaggagggggtgagaggtgtatgggctctgccctgctgg

SEQ ID NO: 367158 - DNA, 201 bp, Homo sapiens
aggctcctttgttctccacatgccgtgggagtgaaggagtgctgcttgggtgccagctggacgcagccgcagcaggtggggatgtggttggggacggccawgtagaaatttgcaccctgtaagctccccagaccctgccttgacagcctgccctacctactcccaaatgagccctctgtgctggctgacccccttgctttc

SEQ ID NO: 367159 - DNA, 201 bp, Homo sapiens
gcactcgaatccttttggctcctctcctgaaagatcctgtccccaacattggagcttcccctggtgaggaaggggaaaggacatggactttggattaggtrgttgtggttcgcaggttactagctgtgtgtccttggaaggtcactggccctctctgagcccctgtagcactcactgtgtactcccagcccagggcacaca

SEQ ID NO: 367160 - DNA, 201 bp, Homo sapiens
ggaccttgtgatctctattggtgttcccttcctctccccactccatatgagaaaaaaaaatacatctggattagagatgaacagggccattgttctggccrgcctcagggccagcagacgaagaagacttgtgacaacgatggcagggatcccatctcctcgcctggacactttctcctccccaccagaaatgagtaggtt

SEQ ID NO: 367161 - DNA, 201 bp, Homo sapiens
cactggtaggtgaaaggaggcagtgggggggaaggagaaacagggatagcttacacagcagtagggtctcagcctagaaggggcccccaggctggcagccrggttctcccagaacatctaggctgagtgtctctccccctggagaagtacagaagcctggcaccctggtttcacttcagctattaccttcagggatttttt

SEQ ID NO: 367162 - DNA, 201 bp, Homo sapiens
tcaagcatttatgtggtcaaggggaagaacaaggctcccaataaacagggtaggaagttgttctaggtccctttgaagctccatggattccctaaaccagsggacctaggcatcaaggactccttgtttctctactcaggcctgaaaccttccgggaccaagaaattacttttcccatggcgagacctgctttccctcctg

SEQ ID NO: 367163 - DNA, 201 bp, Homo sapiens
ctgattggatgaggctcacccacattatggagagcaatgtgcttactcaaaaattcacggatttaaatgttaatctcatccataaacacacgccaggtttyaaatgttaatctcatccaataacatcttccaagttaacacaaaaaatgaaccatcacagactgtaagccccctttaagaccaaaaataatctgttgttct

SEQ ID NO: 367164 - DNA, 201 bp, Homo sapiens
ggaattggaataaaggtgacccttgctatgttttagcaaagagactgcccctgccctagagatctgtggaattttgaacttaagagaaaagatttagggcrtctggtggaagaaatttctaagcattcaagaggtgacttgactgctgttaaaagcattcagttttatgtattcacaaagatatggtttggaattggaact

SEQ ID NO: 367165 - DNA, 201 bp, Homo sapiens
aaggcatgattgtattttgaaatgtgagaaggacatgagatttgggagcggctaggggcaggatgatatggtttggctttgtgccccgaccaacatctcaygttgatgtgtaatccccatgtgttggaggagtggcctggtgggagatgactgaatcatgggagtggacttcctctttgctattctcatgacagtgaatga

SEQ ID NO: 367166 - DNA, 201 bp, Homo sapiens
gaatcatgggagtggacttcctctttgctattctcatgacagtgaatgacttctcacaaaagctggttgtttaaaagtgtgtagcactttccccttcactytctctgtctccctcctgccaccatgttaagaaggtgtttctaattgtgttgtagtcctttgaatctttcaaaatataatctgaagtccttcaatctctaa

SEQ ID NO: 367167 - DNA, 201 bp, Homo sapiens
tatcttgtgaaatcccttagtttggagccaatattggctccaattacttttgaaacactccatgggccaaaaagcacttgtgtttatggccaacaattagtaacccatcaaagaggctctctggactgagtgtagtggctaatgcctgtaatcccagcaccttgggaggccaaagtaggaggatcacttgagcccaggact

SEQ ID NO: 367168 - DNA, 201 bp, Homo sapiens
gggaatcacctccctgctcaccatgatcatcgtcattgtgataatgaaaacatgaaaacactgtgaaatgtagcttctgtgttaaggtagagtgctctgtaaaaaaacttagtattagtcccctccttataattaacccatcaattgtttctcatctacttagaattaaatctaaacttcttcaccatggtggagtagtca

SEQ ID NO: 367169 - DNA, 201 bp, Homo sapiens
cacctccctgctcaccatgatcatcgtcattgtgataatgaaaacatgaaaacactgtgaaatgtagcttctgtgttaaggtagagtgctctgtaaaaaamcttagtattagtcccctccttataattaacccatcaattgtttctcatctacttagaattaaatctaaacttcttcaccatggtggagtagtcaatgttg

SEQ ID NO: 367170 - DNA, 201 bp, Homo sapiens
ttttttcaccaagctatatttgtaaaagtaagaaaattaaaaatgatccaaatgatcatccatagaagataccagattaaataaatcatgatacaatagaytgaaggatgtaatcggtccagatgttctgaaatggaaagatgaccaaaatctattgttaagatacaacaacaacaacaaaaatgtaagttgaaaagccag

SEQ ID NO: 367171 - DNA, 201 bp, Homo sapiens
cttctcacaaaagctggttgtttaaaagtgtgtagcactttccccttcactctctctgtctccctcctgccaccatgttaagaaggtgtttctaattgtgytgtagtcctttgaatctttcaaaatataatctgaagtccttcaatctctaaactattatattaagtttagaaacagcaacacaaaaaggcttgaatgtca

SEQ ID NO: 367172 - DNA, 201 bp, Homo sapiens
catccccatcaagttaccaatgactttcttcacagaattgggaaaaagtactttaaagttcatatggaaccaaaaaagagcccgcattgccaagtcaatgmtaagccaaaagaacaaagctggaggcatcacactacctgacttcaaactatgctacaaggctacagtaaccaaaacagcatggtactggtaccaaaacag

SEQ ID NO: 367173 - DNA, 201 bp, Homo sapiens
acagacagtttgggttttaaatattttttttcaccaagctatatttgtaaaagtaagaaaattaaaaatgatccaaatgatcatccatagaagataccagrttaaataaatcatgatacaatagattgaaggatgtaatcggtccagatgttctgaaatggaaagatgaccaaaatctattgttaagatacaacaacaaca

SEQ ID NO: 367174 - DNA, 201 bp, Homo sapiens
tggcaacaaaagccaaaattgacaaatgggatctaatgaaactaaagagcttctgcacagcaaaataaactaccatcagagtgaacaggcaacctacagamtgggagaaaatttttgcaatctactcatctgacaaagggctaatatctagaatctacaatgaactcaaacaaatttacaagaaaaaaacaaacaaaccca

SEQ ID NO: 367175 - DNA, 201 bp, Homo sapiens
tggatacttgttttccctctgctatgaaatatgcctttcttcttcccttacaagtggctacagacagtttgggttttaaatattttttttcaccaagctayatttgtaaaagtaagaaaattaaaaatgatccaaatgatcatccatagaagataccagattaaataaatcatgatacaatagattgaaggatgtaatcgg

SEQ ID NO: 367176 - DNA, 201 bp, Homo sapiens
aacttaaaatataataaaaaaaataataaataaataaataagtactgaaggatggggctgccttgccctccccagcaaaaaaaaaaaaaaaaaaaaaaaargttaattcttccgtgatttttgtgccgtttatgtttttagcttttacatttcacatgtaaattatttgaaatttgtcttggcataaaattcagatttgac

SEQ ID NO: 367177 - DNA, 201 bp, Homo sapiens
ctcctctaaagcagtgtttcagcccattggtaggtaggtggtggaggttaagtatatgcaaaatcacatctatgtttgggtgcaagagtacatttgattayagtttactaaagcacatttggttataggtagtagaagcatagtgactaagcccatgagatgttatcgtgtgtaagaaaaggcaagggctagctagggtca

SEQ ID NO: 367178 - DNA, 201 bp, Homo sapiens
acaacatcgtcctttagagtcacaggacactcatttgcaactggctcttcttcatcccctctccccccgccaataaatcacctccttagttgctgaatgakgcttgttggctgtgggaccacatccctgggctctgcattgcagcaagtatacacagtcacccaggagccctctgtcatcgcctgcgaatactagaagcat

SEQ ID NO: 367179 - DNA, 201 bp, Homo sapiens
ttttttattgtgctctttatcctttaaaaaagtggatttgtggtgcatgcctataatcccagctactcgggaggctgaagcaggagaatcgcttgaacccrggaggcggaggttgcagtgagccaagatcgcgccattgcactccagcctgggcaataagagtgaaactctgtctcaaaaaaaaaaaaaaaaaaaaaaaaa

SEQ ID NO: 367180 - DNA, 201 bp, Homo sapiens
tcattatttactcattcggccaaccaacatttattgagtgccttccctgtatcagggacaggggcttacaaagtagaatttgatcccacctctgccctcaktagctcagtgtctaatggaggtagtgatgttcattaagcgtcgccagatactgtgctaggtgctgtgcctgttctctctcgcttgttcctcacacacttg

SEQ ID NO: 367181 - DNA, 201 bp, Homo sapiens
accccatgcgcagttgcttgcacctctgtgacctggttcaggaatcggaaggtcagtgagttcatctgcatttcctgctcccacccagccccctctgcctmtattaatgctgtttgtggcaggtttttgtcagctctactttactgtgcttgtacagaggcacaacctttgctagcagactaatgactagaatccttgccc

SEQ ID NO: 367182 - DNA, 201 bp, Homo sapiens
ataatctcaaaatgtttcacgagcccaccccatgcgcagttgcttgcacctctgtgacctggttcaggaatcggaaggtcagtgagttcatctgcatttcstgctcccacccagccccctctgcctctattaatgctgtttgtggcaggtttttgtcagctctactttactgtgcttgtacagaggcacaacctttgctag

SEQ ID NO: 367183 - DNA, 201 bp, Homo sapiens
tgagcatgccaaacaaagcggttggtgtgttagaggcacagtctcctccactctaagtaaaaatcagcatgagtcctagcccacatttccctagtgagtayaccaaagatatctatgaactggcagtcatcagtgacttcctaaggttccggaaatgcatctcttactcaggagtaagcaatgatgtgcctgcggctttac

SEQ ID NO: 367184 - DNA, 201 bp, Homo sapiens
gggtggactttggggagtctgcatgctctccagctagtgttgcctgtggggagcaggtttgcaaggtttggggagcattttggcagctttggagagaacaytgaagaaggatggacccttaaggcccaagggagtgattggtagagcctctggagcaggactgggcctgagatgtgggctctggaacttgatgctagagag

SEQ ID NO: 367185 - DNA, 201 bp, Homo sapiens
tgatgctcatctgtaggagtctgactggggactcttagtttccctggcaccaaagaaggctggtttgagggaaaagtgaagagactacagcataaatcttyacaagggagatccatccagagagtccatgctcatgaaagaaacaatagtgctgtttctgtgcttgttcaggggctacaagaatgggtggactttggggag

SEQ ID NO: 367186 - DNA, 201 bp, Homo sapiens
ccaggaggtgtaacagtcaccttgccttctccacacaggtcaccacctcccacagccctgctgcaccaggggagcaaggcttcggggaatgcctcctggcygtggccctggcaggcgccccttaccaggctgtgggcttggtccaaggcactacgcctgtactgcaggggctcaatggagctgtcttcaggccagaagtgc

SEQ ID NO: 367187 - DNA, 201 bp, Homo sapiens
cagacttggagcaagtcatagttcagtttaaggggtcatgacgagcattttaaaaaacaaagtaggaaatatcagacagcaatgcagatagatagtaaggytgtaagtattgtttcatgaattttgtttcatttatgttgtgtagttgtatgtgtgtggcatgtgagtatgaaattacaacttaaaaatgtgtttcttggc

SEQ ID NO: 367188 - DNA, 201 bp, Homo sapiens
ttaaaggcgctgaaaactcttggcaggagaggaggagtgtttgttggctaacttgactgctgggcatttttggactgtttgggagggctcagctttcttgyctgtctttgcaacacatttggttcagaatgccaattaatctccttggtcagcccactgaagggtcctcatttctacactatgcctttttattctgcatga

SEQ ID NO: 367189 - DNA, 201 bp, Homo sapiens
gctagcattgcaaagtgcgggctgctccaactggtcctgcaggctgctcgcggatgccagcgcgggatgccagcgcggcgccccagcgccttagcgcgcarttgttctggcagcctcgcgccgcctctcccccaacccccaaccgcctccgcgcggggcgatcgggagaggggccccaaagtggcttctttgcggggaacc

SEQ ID NO: 367190 - DNA, 201 bp, Homo sapiens
ttccaggctggcattctttgcccagtaccacttaactttattcatgatccattttaggtaaacagtccctgtgccatgccggtatgcttagctattccaargacagatactctccaggatgggcagctcctatctcagtgtgttacctggaatgcttactgcccagagcagtgattctcaaactcaagagcctcgggttct

SEQ ID NO: 367191 - DNA, 201 bp, Homo sapiens; identical to SEQ ID NO: 79499

SEQ ID NO: 367192 - DNA, 201 bp, Homo sapiens
aggtggtgggcagggctggcacaggtgtggacaatgtggatctggaggccgcaacaaggaagggcatcttggttatgaagtaagtcatggaggctgcgggyggtttgggggtaggggggtgagtgcggagactgaccacacctagggagaaaaaactcacttgagagaaagctgagtccattggaagggcttccaggagga

SEQ ID NO: 367193 - DNA, 201 bp, Homo sapiens
gtgttgaggaagcctgactttagagcctggaatttttgggggtgcgggggtgggatggtaaagatttgcaggaaagtaccttttgcagcaagtacctctgytctccataggtctttctgattcatcttgaggaatgacagaaatggaatgggaagaaactttctacctagtgtcttcttagagatgctcattttgtcttga

SEQ ID NO: 367194 - DNA, 201 bp, Homo sapiens; identical to SEQ ID NO: 79501

SEQ ID NO: 367195 - DNA, 201 bp, Homo sapiens
ttctgtcacttagatggtatggcaaggccatccccaggcctctttgttcttaagacttttctcttcccttggggacttcattgtccttaagacctttcccytcccctgcactgcacttccccctgtagggtagaggttaattggtcacctgactgaagtcaatattcaacagcagaaatgttaaacgataacccatcccac

SEQ ID NO: 367196 - DNA, 201 bp, Homo sapiens
gatgccagtatcctgtttctgcctggcttggctgatatttaactaggctgctatggggggaaatcagaatacctccaggtgctcacctggtgttggcctcrgcactggggcagtcagcactgaggtggcttctgtttgattcctctaagccctgggtgcccatgtgacttgtatacacccaggtcataatcagtttagcat

SEQ ID NO: 367197 - DNA, 201 bp, Homo sapiens; identical to SEQ ID NO: 79504

SEQ ID NO: 367198 - DNA, 201 bp, Homo sapiens
acccagcagttccagcatcaatttttgaaaagattattctttctctcattgaattgtcttgactcccttattgaaaatcaattgaccataattataagggkttatatctggattctcgattctgaactattgatttataagtctatctttatgccagcaccacactgtcttaattactatagttctgtagtacattttaaa

SEQ ID NO: 367199 - DNA, 201 bp, Homo sapiens
aaaatacaaaaaaaaaaaaagaaggaaagaaaagccaggtatgttggcaccagcctgtagtctcagctactgagaaggttgagctggaaggattgcttgarccctgggaagtcaaggctgcagtgagctgtgatcatgccagtacactccagcctgggtgacagagcgaggccttgtcaaaaaaaaaaaaaaaaagccagg

SEQ ID NO: 367200 - DNA, 201 bp, Homo sapiens
ggtccgttttaataaatttttataaatggtatgaggaagggtccaactttgttcttttacacgtaggtacccagcagttccagcatcaatttttgaaaagmttattctttctctcattgaattgtcttgactcccttattgaaaatcaattgaccataattataaggggttatatctggattctcgattctgaactattga

SEQ ID NO: 367201 - DNA, 201 bp, Homo sapiens
cagccgggttctcccagaacatctaggctgagtgtctctccccctggagaagtacagaagcctggcaccctggtttcacttcagctattaccttcagggatttttttttttttttttttgagtaagggaaaagatctcaatgtggctttctgattaattacctcactttttttctggaggtggaaggaaaggattgggagc

SEQ ID NO: 367202 - DNA, 201 bp, Homo sapiens
agccgggttctcccagaacatctaggctgagtgtctctccccctggagaagtacagaagcctggcaccctggtttcacttcagctattaccttcagggatttttttttttttttttttgagtaagggaaaagatctcaatgtggctttctgattaattacctcactttttttctggaggtggaaggaaaggattgggagcc

SEQ ID NO: 367203 - DNA, 201 bp, Homo sapiens
ggtgcatcaaaactaggaaacacgcacaccctattgggaaggaatgcgttcgtttcatcagactgttcctagcagggaggacggtaggagagtgtgggtgcctatatgtagactctacaggattgggcaatgtgggtggagagcaggcgtggctgggcctcacagtagggactttgagcagatggcgggggctcctgaggt

SEQ ID NO: 367204 - DNA, 201 bp, Homo sapiens
aaagcggttggtgtgttagaggcacagtctcctccactctaagtaaaaatcagcatgagtcctagcccacatttccctagtgagtataccaaagatatctrtgaactggcagtcatcagtgacttcctaaggttccggaaatgcatctcttactcaggagtaagcaatgatgtgcctgcggctttacgagttctcacagaa

SEQ ID NO: 367205 - DNA, 201 bp, Homo sapiens
taatgttgccctaattgccacttcctctgtctcctccagaaaacacagatgtagactcagacttccatctggactaataggaggagacaggctgtgaagaktgtgtgtgtgtgtgtgtgtgtgtgtgtgtgtgtgtgtgtgtgttggtggtggtgggacaggaaggtggtgcggatgtttaaaaatgttgggaccacgcat

SEQ ID NO: 367206 - DNA, 201 bp, Homo sapiens
gagggaggagggcagcacaccaataggaattgagagccacctggtacaaaaaagcccaactagtatttaaaatggatgccgagacaacataaaatgacaakaattcactaccatcccttacaaactatgatttgtaaatattttctcccattacctaagctatctttttactttcttgatgatattctttgaaacacaaaa

SEQ ID NO: 367207 - DNA, 201 bp, Homo sapiens; identical to SEQ ID NO: 79502

SEQ ID NO: 367208 - DNA, 201 bp, Homo sapiens
agaatattttgaaagttaagtgcagagtagacagtacacctcgggagagagagaattcagggtgggctgctcataagagtgaggcagtgttggccgggcgyggtggctcacgcctgtaatccagcactttgggaggccgaggcaggcagatcatgaggtcaggagatcaagaccatcctggataacatggtgaaaccgcat

SEQ ID NO: 367209 - DNA, 201 bp, Homo sapiens
cgggcgtggtggcgggcgcctgtagtcccagctacttgggaggctgaggcaggagaatggcgtgaacccgggaggcggagcttgcagtgagccgagatcaygccactgcactccagcctgggcgacagagcgagactccgtcttaaaaaacagaaacaaaaacaaaaacgaatgaggcagtgttgattattgctggagaaa

SEQ ID NO: 367210 - DNA, 201 bp, Homo sapiens
agtatgcctagtttaaatgcaccaggtccccgctcttttataaactcataattctcattgcatcactaatttgaaattaatcacagctccttggtgtctcrgaaagcttcctattgcttttcactacgtaactttccaagtctgtgtgtttggtactctaggatgttaggccaccagaggaaagaggatgtatcttttttt

SEQ ID NO: 367211 - DNA, 201 bp, Homo sapiens
tgaagtggttgctttattcaggactgacaaatctgcatattcatcctcctgggcactgtgactaatccaaggacagatatgtggcccagggggatctgatraggataaggtctggacattttgtggcaattattagaaaaccagtgcaacacggtgaaaccccgtctctactaaaaatacaaaaattagccgggcatggtg

SEQ ID NO: 367212 - DNA, 201 bp, Homo sapiens
agcactttccccttcactctctctgtctccctcctgccaccatgttaagaaggtgtttctaattgtgttgtagtcctttgaatctttcaaaatataatctraagtccttcaatctctaaactattatattaagtttagaaacagcaacacaaaaaggcttgaatgtcatattaatgacagatagaaatcaaggatttgtgt

SEQ ID NO: 367213 - DNA, 201 bp, Homo sapiens
atcttcattccctcaaagaaaccttgattctcttcttcctccttcttccacaagtcttgattaagtccttttgttaaaaactctcaaagaaccaattctgyagtacatttatcctaggttataaatatattctcatttgtgtgattatttgattaatttcactttagtctatctctcaggctcattcgcattctaccagtt

SEQ ID NO: 367214 - DNA, 201 bp, Homo sapiens
atcctactcttgttacaaaggtaattgacactgaaatggtcaaaagacgttcagtagggatggccagtaagagaagtagaaggaccacacaatacaaatargataaaaggctcctcaatatgtaataatcgaatggctgtaaacacatccacacctggaatctctcttacatatcatagataaaatctcaccaccttattg

SEQ ID NO: 367215 - DNA, 201 bp, Homo sapiens
ggctccagtagtaggtaacaaaacgatgtccagggagatgcaggaggtaaataaccaggcatgtgggcagtgcagagcccccaaaaaagccaagcaggatrgcaggtggcattagagatggctggaagcaggaacctaaccagaggactgcagttcagggccaggattttaatctctggaattgagaagagcaagacagga

SEQ ID NO: 367216 - DNA, 201 bp, Homo sapiens
tgtcctcttgtcctctttcccatgaagaatttctcactggccacatttctccatgggctctggtatcctgcttgtcacttgaccttctctctccacctcargcatttcctgacattttatcagttctgtgttttcaggatttgctttcccatggactatttagagacagtcaaaatacccaaggggaataaaatcaagctt

SEQ ID NO: 367217 - DNA, 201 bp, Homo sapiens
ttgctctcccatctcagctctttgattctgagaccatcatccgctcattgcacctttgatcacaaaagctttgaacttctgattctgctcccaatccctckctcctttttcccctatcccctgtgccaaccaggagtttcttctatttccaggcctcctggcagaggcaggcgtgcggctgctgtcctaccagacttcact

SEQ ID NO: 367218 - DNA, 201 bp, Homo sapiens; identical to SEQ ID NO: 79494

SEQ ID NO: 367219 - DNA, 201 bp, Homo sapiens
caggaccagctttgtttaaaggaatcggtgaaatgctgtggtttaaaagaagctccccattgtcaactgctcaccatgacctcactcatcaaaggtgcatsaaaactaggaaacacgcacaccctattgggaaggaatgcgttcgtttcatcagactgttcctagcagggaggacggtaggagagtgtgggtgcctatatg

SEQ ID NO: 367220 - DNA, 201 bp, Homo sapiens
tctgaacctgtgtctatccttgcaggcagattccccaggcgacggcttcgatgaaggacggcaaatgggagcggaagaaggtgagcagcggccttgactcrccccacctgggctcagggcccggggtccactcatgttgctgacttcagcttctttccttttgcctgtttggttgcagttcatgggaacagagctgaatgg

SEQ ID NO: 367221 - DNA, 201 bp, Homo sapiens
ttcctaaggttccggaaatgcatctcttactcaggagtaagcaatgatgtgcctgcggctttacgagttctcacagaatgactttctggacccaaatgttytttctgcttcaggactgtgaaggccttattgttcgctctgccaccaaggtgaccgctgatgtcatcaacgcagctgagaaactccaggtggtgggcaggg

SEQ ID NO: 367222 - DNA, 201 bp, Homo sapiens
ctgggctcaattgatcctcctgcctcagcctcctgagtagctgggactacaggtgtgcaccactatgcctagataaatttttatttttagtagagacgaartctcgctgtgttgcccaggctggtctccaactcctgacctcaagcatccttccatcttggcctcccaaagtgttaggattataggcatgagccaccatgc

SEQ ID NO: 367223 - DNA, 201 bp, Homo sapiens
cagcctcaacctcctaggcccaagtgatcctcctgcctcagccttctgggtggcacaggtgcatgccaccaaacttggctagttttttaaattttttgtagggggggggtctgactatgtttctccagctagtctctgactcctggggtcaaatgatcctcctgcctcagcctcccaaagtgctgggattataggtgtgag

SEQ ID NO: 367224 - DNA, 201 bp, Homo sapiens
gggggaatttacctctgctctaactcctccctgcagtttccatctgagctctctggtattcactgatattcactggtaggtgaaaggaggcagtggggggraaggagaaacagggatagcttacacagcagtagggtctcagcctagaaggggcccccaggctggcagccgggttctcccagaacatctaggctgagtgtc

SEQ ID NO: 367225 - DNA, 201 bp, Homo sapiens
ccgattctagcctgccttggcggtggcggggttgggggggtcggggggcggggggaagctggcggagacccaaccagtctggtggctgctggggcagctgraggggaaggcagccctcgtaaggcagcaaacacgtacccgcccctcgtctgatgcaagactgctccgtgctttcgccgcccctctgcctcctgggagcct

SEQ ID NO: 367226 - DNA, 201 bp, Homo sapiens
gttggtcttaaatatttagatctggtgcccatctagggatggtgctatggaaaaataatagctggtaattattaagagtgtaatatattccagagactgarctaaaagtcttaagggtatttcctcatttgcttctcccatcaacccaattaggcagttattactttctttattgtacatatgaggacactgaagcttaga

SEQ ID NO: 367227 - DNA, 201 bp, Homo sapiens
tgtcttatgggcttaaattataccagtatgttctccattcacgtttttcccctgtgagattttattcatggcaatttgtttcagctgttgatatagagaamccagtttaacagcttcaaaaggtcaactgaaaaaggaaccagtcatcctgtgtactcattaaaaataaatggaagcattatggagagttattatatatct

SEQ ID NO: 367228 - DNA, 201 bp, Homo sapiens
ttgtccacacttgatctttttggacaactgagccaatacattcccttttttccttgaaccagtttacactgggtttctgatacttgcatctcccaaagtcsagactattcccatggtctcaatgctgtggcccctgctgatgtctcccaccttgtcttctgccatgttcacccacattctctatatcattgctgttctgac

SEQ ID NO: 367229 - DNA, 201 bp, Homo sapiens
tccccgaagtagactttcccttgtcgtgtagttagtactccagctgcactcacttcccagcttaacttcctgactcttctcaaccagaaatcttttctggktcacaactttaactatattagctctcttatttttcaaactttgtatccctttcctactgtaggactcactatgatagcttcagtttctcttggctgcttc

SEQ ID NO: 367230 - DNA, 201 bp, Homo sapiens
tatgtggctgaattttatattctttactaacttgtgacattcttgccacattttgcctttctggaaatgaagcaagccagaggaaaacagacaggtgagasagacatggattgccagtgacactatctgagcaagtttttgtccacacttgatctttttggacaactgagccaatacattcccttttttccttgaaccagt

SEQ ID NO: 367231 - DNA, 201 bp, Homo sapiens
ttcattgattcttagttttcactatcagagagttgccttttcaagttataggtgtgtcttatcctgtcttttcatgtgccccacaagggaatcacctcccygctcaccatgatcatcgtcattgtgataatgaaaacatgaaaacactgtgaaatgtagcttctgtgttaaggtagagtgctctgtaaaaaaacttagtat

SEQ ID NO: 367232 - DNA, 201 bp, Homo sapiens
aggtgactttcttggatggttaacttccttcatgattcattgattcttagttttcactatcagagagttgccttttcaagttataggtgtgtcttatcctktcttttcatgtgccccacaagggaatcacctccctgctcaccatgatcatcgtcattgtgataatgaaaacatgaaaacactgtgaaatgtagcttctgt

SEQ ID NO: 367233 - DNA, 201 bp, Homo sapiens
atcaactgggtatgttaccagtggaagatatcctggttatcggtggcaaattcatatgtgtctgcagcaacctcaattcttgcctcctcagaagaaagaaytcaactgaggggcataaggcagaaaaaagactgaggcaagtttcattgtaggagtggaagtttattaaaaagctttagagcaggaaaggaaagtgctttc

SEQ ID NO: 367234 - DNA, 201 bp, Homo sapiens
tgtgtttgattgaaagagatgtctacggcctgctcatttcagtgttaatctgtgcctcagagcaggtcacccactgaatgttttattcccattcccagcayggtgtggagggtgccagtgccttcactttgcatttcttctgtccagatgtctctggagggtcattcttaactgtcttgcttccagaacatgctctttgta

SEQ ID NO: 367235 - DNA, 201 bp, Homo sapiens
gcaccactatgcctagataaatttttatttttagtagagacgaagtctcgctgtgttgcccaggctggtctccaactcctgacctcaagcatccttccatyttggcctcccaaagtgttaggattataggcatgagccaccatgcctggttgtgttacctcatttggtcaacaactgcattgtgagataattttgctcctg

SEQ ID NO: 367236 - DNA, 201 bp, Homo sapiens
aaagggaggcgggcggggagcgctggggtccagatttagcctcctccccacctttggtttatcgctggttgggagtgaccagactcgactagaatccgatsccaaacgctcccagatgatttatagtcttagcaaatttttatctccttttgttgtgatatataattaatctacttcaaatctttatccaccgtgtttgaa

SEQ ID NO: 367237 - DNA, 201 bp, Homo sapiens
gggaaagtttctagagttgtcagtcacaaggtcttgtgagaatctgatctaagcaactcagccttccctcaagaaaaaagcactcataagcaaacaatttmccaaagtctgtgcatagacccttaggcatacctgaaccccaggtaagaactcctgctgtatcagtgaggggcaaggcaactgctcagagcctgtaggtct

SEQ ID NO: 367238 - DNA, 201 bp, Homo sapiens
agagcaggtcacccactgaatgttttattcccattcccagcacggtgtggagggtgccagtgccttcactttgcatttcttctgtccagatgtctctggarggtcattcttaactgtcttgcttccagaacatgctctttgtaaacccctgaaacatggcttggatcattccgtctcccacctcagcccctccggagctgc

SEQ ID NO: 367239 - DNA, 201 bp, Homo sapiens
tgcatttcttctgtccagatgtctctggagggtcattcttaactgtcttgcttccagaacatgctctttgtaaacccctgaaacatggcttggatcattcmgtctcccacctcagcccctccggagctgcctggacctcatcattccggagagtctaagtggcctcttctcgtgctcagctgcttacctcaaccacgtcat

SEQ ID NO: 367240 - DNA, 201 bp, Homo sapiens
gaacaattctgctttctaaccctctccattcctggaccttctttgcatttctaaagctttgataacatctagactactggagggaccattaatttggcctsaagctttaacagtacagaaaatgggtggaggtttccacatttcagacttccttttctcttttacccaccaagatttacaagtaaaaggaagcaatatgga

SEQ ID NO: 367241 - DNA, 201 bp, Homo sapiens
caggcaaacaccgctccttccgtttgtttgctactttgtctctcggtatgcagaacaattctgctttctaaccctctccattcctggaccttctttgcatktctaaagctttgataacatctagactactggagggaccattaatttggcctgaagctttaacagtacagaaaatgggtggaggtttccacatttcagact

SEQ ID NO: 367242 - DNA, 201 bp, Homo sapiens
gaaggatgtcatagcggtgccatttgcgtgagtcagtagccaacagtcaccctatgccttgagatttaaatgaagttcacctgggaatcctaaccctgtcrgatgtacattgccctccctgtgatttctgtgagttatggcagttttattttctcacagttctttctatcttgctcagagctctggttctgtctcaagccc

SEQ ID NO: 367243 - DNA, 201 bp, Homo sapiens
gtttaagtaaatttcttagtattttctatatgcaagatcatgtcatctgcaaatagaaagagttagttttactttttcctttccgatctggatgcattttrttttattttcttgcctacttgcccttccagcacactactgaatagaagtggtgagagcagacattcttgtcttattcctgaaagaggaagtacttgcttt

SEQ ID NO: 367244 - DNA, 201 bp, Homo sapiens
ttttataattcctattttcttgatgctgctgtcactggaattattttctaatttcttcagatttttaataaagcatgtagaagtacaattcattttgtgtrttaatctttttatttttatttctttccttttttttttaagagacataagctcgctatgttgcccaggctgctctcaaatttgtggcctcaagagatcatc

SEQ ID NO: 367245 - DNA, 201 bp, Homo sapiens
aacagttttctgaagtggtcatacaatttatattgccccaataatgtttgagagtttcagttgccttacaccttcttcaacactttcattttggctattcyagtgggtgtgaattatatataaaactttaagttttggccaagcgcagtgggtcacaccagtaatcctaacaatttgggaggccaaggcaggagaattgcc

SEQ ID NO: 367246 - DNA, 201 bp, Homo sapiens
atacctaagagtggaaatgctatgtcatagggcctatgtatgctcagctttggaagatactgcctaacagttttctgaagtggtcatacaatttatattgycccaataatgtttgagagtttcagttgccttacaccttcttcaacactttcattttggctattctagtgggtgtgaattatatataaaactttaagtttt

SEQ ID NO: 367247 - DNA, 201 bp, Homo sapiens
atttatccattctacttctgttgaacatttgtgttatttctagttcgaggcttttttgaatagtgctgccatggactttctactatgtgaaatttggtaamtatatggtgcatttctgctaggcatatacctaagagtggaaatgctatgtcatagggcctatgtatgctcagctttggaagatactgcctaacagttttc

SEQ ID NO: 367248 - DNA, 201 bp, Homo sapiens
taatcggtccagatgttctgaaatggaaagatgaccaaaatctattgttaagatacaacaacaacaacaaaaatgtaagttgaaaagccagttgcccgaamgtatgtgtaatatgaaaccatttggcaatgtctagatgcattattggttgtcacaactaggcggtggtggtggtggtggtgaggctactactggcctcta

SEQ ID NO: 367249 - DNA, 201 bp, Homo sapiens
cctgaaggatgcaggacactagggactctcaactggtcccccgagagcagatgaccaggaataaagaaatgtatctagagcaggtcaactgagcagtagcktctggagtcagaggagcaggagctccaggcataatgcccagtggtacttgctacccttccatgcagtccccctttggtcccaggctacctgtgagctctg

SEQ ID NO: 367250 - DNA, 201 bp, Homo sapiens
ccaaaatctattgttaagatacaacaacaacaacaaaaatgtaagttgaaaagccagttgcccgaaagtatgtgtaatatgaaaccatttggcaatgtctrgatgcattattggttgtcacaactaggcggtggtggtggtggtggtgaggctactactggcctctagtgggcagaggccagggttgctgcttatcattct

SEQ ID NO: 367251 - DNA, 201 bp, Homo sapiens
cttgatctcctgaccttgtgatccgcccgcctcggcctcccagagtgctgggattacaggcgtgagccactgcgcccggcctctttcctgtctttcagctstgctcctctcaattccccaataacacaatccctagtctcctaagagtgggccccaggatagtctgcaaactcatcaccttctaagggggactgctgtcac

SEQ ID NO: 367252 - DNA, 201 bp, Homo sapiens
caggaggtgtaacagtcaccttgccttctccacacaggtcaccacctcccacagccctgctgcaccaggggagcaaggcttcggggaatgcctcctggccrtggccctggcaggcgccccttaccaggctgtgggcttggtccaaggcactacgcctgtactgcaggggctcaatggagctgtcttcaggccagaagtgcc

SEQ ID NO: 367253 - DNA, 201 bp, Homo sapiens
tttcagtgctctagggcaagaggagaagggtcccatttaaagctgtttctgcagaaacacaggggcagaggtcatcagcacgccagtgctgtactgtaccygttctgtcacttagatggtatggcaaggccatccccaggcctctttgttcttaagacttttctcttcccttggggacttcattgtccttaagacctttcc

SEQ ID NO: 367254 - DNA, 201 bp, Homo sapiens
ggcggtggcggggttgggggggtcggggggcggggggaagctggcggagacccaaccagtctggtggctgctggggcagctggaggggaaggcagccctcstaaggcagcaaacacgtacccgcccctcgtctgatgcaagactgctccgtgctttcgccgcccctctgcctcctgggagccttcggaggaaagggaggcg

SEQ ID NO: 367255 - DNA, 201 bp, Homo sapiens
atgtctaaaatagagaaagtgctccttaaacattgtttctcaaatcttccttttttgcctccagagatgtgttgatgacccatgcccacaggacatatatygccctttgacctctaatgttgccctaattgccacttcctctgtctcctccagaaaacacagatgtagactcagacttccatctggactaataggaggaga

SEQ ID NO: 367256 - DNA, 201 bp, Homo sapiens
tcagttctatctataattgtttaccatttacttatactaaatctagtgtgagcactaatatattcttttagtgaacatttaacatagcagtattttatcawatttttattttgttttatttttggtgaagagcactttcacctcagcctatttttcacctgaacatgtttaaggaccattaagatcaacactactcacaga

SEQ ID NO: 367257 - DNA, 201 bp, Homo sapiens
cccactagaatgctataataaaaaaggacagtaacacctgggggaagtgaaataatgacgtggaaaaactaaaacactcacgcattgttgatgggacatgyagtcacgttggaaaccagtttggcagtatcttaaaatgttgaagatatatttaccatatgacctagcactatcacttctagctatctacccagaagaaaa

SEQ ID NO: 367258 - DNA, 201 bp, Homo sapiens; identical to SEQ ID NO: 79508

SEQ ID NO: 367259 - DNA, 201 bp, Homo sapiens
ttggcacagatactctgattaatatcttaattaccttactttctcatatcccctataccagtccattttatatcctcaagccaatgttgacttcctacatyacaattctgcttctgtttctctgtctctctttttttattaacagggtttggctgtgccaccaaggctggagtgcagaggtatgatctctgctcactgcca

SEQ ID NO: 367260 - DNA, 201 bp, Homo sapiens
gcatctccccacaagccactgttcgctcaatgactccaggaatggtcctggtgacaaagttttaccagtccactcaaaatgagaaaaataccagcaattgyatgtatattcaacagtatatttaagagtgtatattgcttatatacaactgtatatgggtgtctgtgtgtgtgatgtaaattcttctactgcccttttttg

SEQ ID NO: 367261 - DNA, 201 bp, Homo sapiens
acaagccactgttcgctcaatgactccaggaatggtcctggtgacaaagttttaccagtccactcaaaatgagaaaaataccagcaattgcatgtatattyaacagtatatttaagagtgtatattgcttatatacaactgtatatgggtgtctgtgtgtgtgatgtaaattcttctactgcccttttttgccaaagaacc

SEQ ID NO: 367262 - DNA, 201 bp, Homo sapiens
tggtgacaaagttttaccagtccactcaaaatgagaaaaataccagcaattgcatgtatattcaacagtatatttaagagtgtatattgcttatatacaaytgtatatgggtgtctgtgtgtgtgatgtaaattcttctactgcccttttttgccaaagaaccaggactgtccatattctcagagtatatcttcctgattt

SEQ ID NO: 367263 - DNA, 201 bp, Homo sapiens
ctgtttcctggagtgtgttgtctgctactttggattggccatgacaggctggagctgccttgtgacaggagcaggagggtttctgggttagagtatcatcygcctcttggtggaggagaaggagctgaaggagatcagggccttggacaaggccttcagaccggaattgaggaaggaattttctggtaagtaaacttgatt

SEQ ID NO: 367264 - DNA, 201 bp, Homo sapiens
tgatgtaaattcttctactgcccttttttgccaaagaaccaggactgtccatattctcagagtatatcttcctgattttttagtttttcaataatctgccwttaatggtattgatgtcacattataattttcaacatccttacttggcaaaatataaagtgataaccctaggtcctttgccaaaattaaactacacacaca

SEQ ID NO: 367265 - DNA, 201 bp, Homo sapiens
gtattgatgtcacattataattttcaacatccttacttggcaaaatataaagtgataaccctaggtcctttgccaaaattaaactacacacacacacacasacacaaaaacacacacacacatccaaacacccaaaagtctagaaattcttgctctccagaatccatatgtcagtttcttttcattttggtgtttttccta

SEQ ID NO: 367266 - DNA, 201 bp, Homo sapiens
caaggttataaagggactgggaattagatccaaaacctgaaatggtgcaaggcccagagcatttttatactacaaaaaaaggaaaagctgcttttgaaaawtgaattcagaagagaatctcccactcttagttgactcaagtgaggaccacgcaacctctctgtctacatgtgcttcttaagacatcaagggactctggtg

SEQ ID NO: 367267 - DNA, 201 bp, Homo sapiens
tcacatcgatagtcttaaaaaaaaagaaagaaaagaaaattaaatagtataaaatggcatagtgtgaaagattctggatgggctatccagagactggattstgtccctgacccagaacttgagaggcaaccactttggacaccagcccccttttcttctcatctagaaaatcccacatcagttatttttcttgtctgcaac

SEQ ID NO: 367268 - DNA, 201 bp, Homo sapiens
cagggccaagaataaaaaaaaataagaaaaaataataatcctttgcctaggaaattccttccttcttcaagggaaggcactccgaacacctccatgagctwcacttccacacagctcaggggaggcggcaaggtcctcccagtacaggtgttaccagcagagggcacactcctctccccagtcctccaccaggctccacag

SEQ ID NO: 367269 - DNA, 201 bp, Homo sapiens
gccagtctgtctgaagttggcagcaaaggggaagcagaggaagggagcaggaagtgcagaggtggaaatacaaccagagaaaattccactctcaggctgtyacccatgtcctccccagcagcctcttccctgcctcccccatagcatggccttcttggagttgcctggcaataggaaggggctgggagtagacaaaacatg

SEQ ID NO: 367270 - DNA, 201 bp, Homo sapiens
agtagttcacctagcagcttggggaatgagggagctatggctccatccacaaagtcccctttcctggtctctagatccctgtgaactcattaaggaaaagmcttttctcttggctttagacttcttcagctttgaaatggcaattcctttgagccagtctgtctgaagttggcagcaaaggggaagcagaggaagggagca

SEQ ID NO: 367271 - DNA, 201 bp, Homo sapiens
gggccaagaataaaaaaaaataagaaaaaataataatcctttgcctaggaaattccttccttcttcaagggaaggcactccgaacacctccatgagctacrcttccacacagctcaggggaggcggcaaggtcctcccagtacaggtgttaccagcagagggcacactcctctccccagtcctccaccaggctccacagga

SEQ ID NO: 367272 - DNA, 201 bp, Homo sapiens
ctctcaggctgtcacccatgtcctccccagcagcctcttccctgcctcccccatagcatggccttcttggagttgcctggcaataggaaggggctgggagyagacaaaacatggcagaggcattaggagaggaagtggtcccgcctgtatcccaggaaggaattgctccggtcttgaatttttcgctctgaattttactct

SEQ ID NO: 367273 - DNA, 201 bp, Homo sapiens
agagtcacagccagaattggaagcagctttcccagggaatgcacaatcaggaaaagagtgtgggtttccagcatctccccacaagccactgttcgctcaaygactccaggaatggtcctggtgacaaagttttaccagtccactcaaaatgagaaaaataccagcaattgcatgtatattcaacagtatatttaagagtgt

SEQ ID NO: 367274 - DNA, 201 bp, Homo sapiens
gggaatgcacaatcaggaaaagagtgtgggtttccagcatctccccacaagccactgttcgctcaatgactccaggaatggtcctggtgacaaagttttaycagtccactcaaaatgagaaaaataccagcaattgcatgtatattcaacagtatatttaagagtgtatattgcttatatacaactgtatatgggtgtctg

SEQ ID NO: 367275 - DNA, 201 bp, Homo sapiens
tctgtgtgtgtgatgtaaattcttctactgcccttttttgccaaagaaccaggactgtccatattctcagagtatatcttcctgattttttagtttttcawtaatctgcctttaatggtattgatgtcacattataattttcaacatccttacttggcaaaatataaagtgataaccctaggtcctttgccaaaattaaac

SEQ ID NO: 367276 - DNA, 201 bp, Homo sapiens
gtgcaatgtagatgagaccccaacatagatcctcttcacaggctcagagactcaggtcccaggactggacatatctgcactcctgccctctgacttcagcygctacttccaatatgaggggtctctgactacaccgccctgtgcccagggtgtcatctggactgtgtttaaccagacagtgatgctgagtgctaagcaggt

SEQ ID NO: 367277 - DNA, 201 bp, Homo sapiens
acactgtctctaaaaaaaaaaacaacagcaacaacaaaaagcaacaaccattacaattttatgttccctcagcattctcagagctgaggaatgggagaggwctatgggaacccccttcatgttccggccttcagccatggccctggatacatgcactcatctgtcttacaatgtcatcccccaggagggcccggaagaaaa

SEQ ID NO: 367278 - DNA, 201 bp, Homo sapiens
gaggctggatcttggagaatgtgagaagccagccagaggcatctgagggggagccggtaactgtcctgtcctgctcattatgccacttccttttaactgcmaagaaattttttaaaataaatatttataataaaatatgtgttagtcacctttgttccccaaatcagaaggatggtatttgaatttcctattactgttatt

SEQ ID NO: 367279 - DNA, 201 bp, Homo sapiens
cagccacactcactgattctttaatgccagccacacagcacaaagttcagagaaatgcctccatcatagcatgtcaatatgttcatactcttaggttcatratgttcttaacattaggttcataagcaaaataagaaaaaagaataataaataaaagaagtggcatgtcaggacctcacctgaaaagccaaacacagaatc

SEQ ID NO: 367280 - DNA, 201 bp, Homo sapiens
atgtcaggacctcacctgaaaagccaaacacagaatcatgaaggtgaatgcagaggtgacaccaacacaaaggtgtatatatggtttcctgtggggagtaygtacggaggcagcagtgagtgagactgcaaacgtcagaagggcacgggtcactgagagcctagtatcctagtaaagtgggctctctccctctctctccag

SEQ ID NO: 367281 - DNA, 201 bp, Homo sapiens
gatgagaccccaacatagatcctcttcacaggctcagagactcaggtcccaggactggacatatctgcactcctgccctctgacttcagccgctacttccratatgaggggtctctgactacaccgccctgtgcccagggtgtcatctggactgtgtttaaccagacagtgatgctgagtgctaagcaggtgggcctgggg

SEQ ID NO: 367282 - DNA, 201 bp, Homo sapiens
ccatagagagaatggaaaggagaggagagaagagagctgaggtggccacgctggcgtggggctcagagggaggtgatgtcattgagtgcgttgtccagttyctcgctaatggccttgtacttcatcttctgggcatagacttcatctggggggggtccagggaggggaccaggtgggagtgtgggaaagggagtggaggga

SEQ ID NO: 367283 - DNA, 201 bp, Homo sapiens
ctttctttcttcctctcttgcttcctcaggcctcttccagttgctccaaagccctgtacttttttttgagttacgtcttatgggaagggcctgcacttagygaagaagtggtctcagagttgagttaccttggcttctgggaggtgaaactgtatccctataccctgaagctttaagggggtgcaatgtagatgagacccc

SEQ ID NO: 367284 - DNA, 201 bp, Homo sapiens
agcgctccagctctccttccaggatcaccagcttcctggccacctgtggggagtgagaaagagagggtagatcagtggagaaggactgggcatgttgcagrctgggcagcgagcaggcagaggggcaaggctgtcacctcttcatatttgcggtctgaatcctcagcgatgtgcttggcctccttcagctgcatctcctgc

SEQ ID NO: 367285 - DNA, 201 bp, Homo sapiens
tgagcccaggagttcaagacaaggcggggcaacatagtgtgaccccatctctaccaaaaaaaccccaacaaaaccaaaaatagccgggcatggtggtatgygcctagtcccagctactcaaggaggctgaggtgggaagatcgcttgattccaggagtttgagactgcagtgagctatgatcccaccactgcctaccatct

SEQ ID NO: 367286 - DNA, 201 bp, Homo sapiens
agatcatggtggggattcccccattgtccccagaggctaattgattagaatgaagcttgagaaatctcccagcatccctctcgcaaaacaatccccccccyttttttaaagatagggtctcactctgttgcccaggctggggtgttgtggcacgatcatagctcactgcagcctcgaactcctaggctcaggcaatccttt

SEQ ID NO: 367287 - DNA, 201 bp, Homo sapiens
cagaacagaccccaaccccaatattagagaggcagatcatggtggggattcccccattgtccccagaggctaattgattagaatgaagcttgagaaatctsccagcatccctctcgcaaaacaatcccccccctttttttaaagatagggtctcactctgttgcccaggctggggtgttgtggcacgatcatagctcactg

SEQ ID NO: 367288 - DNA, 201 bp, Homo sapiens
aatcccaccacgttgggaggctgaggtgggagaatggtttgagcccaggagttcaagacaaggcggggcaacatagtgtgaccccatctctaccaaaaaaaccccaacaaaaccaaaaatagccgggcatggtggtatgtgcctagtcccagctactcaaggaggctgaggtgggaagatcgcttgattccaggagtttga

SEQ ID NO: 367289 - DNA, 201 bp, Homo sapiens
aaaaaaaacaacagcaacaacaaaaagcaacaaccattacaattttatgttccctcagcattctcagagctgaggaatgggagaggactatgggaacccccttcatgttccggccttcagccatggccctggatacatgcactcatctgtcttacaatgtcatcccccaggagggcccggaagaaaacagtgcctatgagc

SEQ ID NO: 367290 - DNA, 201 bp, Homo sapiens
ctcactgcagcctcgaactcctaggctcaggcaatcctttcaccttagcttctcaaagcactgggactgtaggcatgagccactgtgcctggccccaaacrgcccttttacttggcttttaggaagcaaaaacggtgcttatcttaccccttctcgtgtatccaccctcatcccttggctggcctcttctggagactgagg

SEQ ID NO: 367291 - DNA, 201 bp, Homo sapiens
atcctttcaccttagcttctcaaagcactgggactgtaggcatgagccactgtgcctggccccaaacggcccttttacttggcttttaggaagcaaaaacrgtgcttatcttaccccttctcgtgtatccaccctcatcccttggctggcctcttctggagactgaggcactaggggctgcctgagaactcggggcagggg

SEQ ID NO: 367292 - DNA, 201 bp, Homo sapiens
cttcctctcttgcttcctcaggcctcttccagttgctccaaagccctgtacttttttttgagttacgtcttatgggaagggcctgcacttagtgaagaagyggtctcagagttgagttaccttggcttctgggaggtgaaactgtatccctataccctgaagctttaagggggtgcaatgtagatgagaccccaacataga

SEQ ID NO: 367293 - DNA, 201 bp, Homo sapiens
tgcaggtcgtccgggctcggagcacactgtggaaggccaccgtttccctgccgaggtgagcgcggagctggccgagaaggggcaaaggagcggggcggagsggggccagagacgtggccctctcctaccctcgtgtccttttcagatccacgtggttcacctcagcaccgcctttgccagagttgacgaggccttggggcg

SEQ ID NO: 367294 - DNA, 201 bp, Homo sapiens
attcacgcactgtttgttcatttaacacccactgtgaaccaggcaccagcccccaacaaggattctgaagctgtaggtccttgcctctaaggagcccacarccagtgggggaggctgacatgacagacacataggaaggacatagtaaagatggtggtcacagaggaggtgacacttaaagccttcactggtagaaaagaa

SEQ ID NO: 367295 - DNA, 201 bp, Homo sapiens
tattagagaggcagatcatggtggggattcccccattgtccccagaggctaattgattagaatgaagcttgagaaatctcccagcatccctctcgcaaaasaatcccccccctttttttaaagatagggtctcactctgttgcccaggctggggtgttgtggcacgatcatagctcactgcagcctcgaactcctaggctc

SEQ ID NO: 367296 - DNA, 201 bp, Homo sapiens
cctggaactcctgggcttccagctcccgccgctcccagaactgcgcctgcgcaacaatggccacagtggtgagggggtctccccgccgagacttggggatrgggcggggcgcagggaagggaaccgtcgcggcagtgcctgcccgggggttgggctggccctaccgggcggggccggctcacttgcctctccctacgcagt

SEQ ID NO: 367297 - DNA, 201 bp, Homo sapiens
cacagggccagacaaacctgtgagactttggctccatctctgcaaaagggcgctctgtgagtcagcctgctcccctccaggcttgctcctcccccacccarctctcgtttccaatgcacgtacagcccgtacacaccgtgtgctgggacaccccacagtcagccgcatggctcccctgtgccccagcccctggctccctct

SEQ ID NO: 367298 - DNA, 201 bp, Homo sapiens; identical to SEQ ID NO: 79514

SEQ ID NO: 367299 - DNA, 201 bp, Homo sapiens
tggtgccttgggttccaagctgagtccatggccccgataaccttctgcctgtgcacacacctgcccctcactccacccccatcctagctttggtatggggkagagggcacagggccagacaaacctgtgagactttggctccatctctgcaaaagggcgctctgtgagtcagcctgctcccctccaggcttgctcctcccc

SEQ ID NO: 367300 - DNA, 201 bp, Homo sapiens; identical to SEQ ID NO: 79509

SEQ ID NO: 367301 - DNA, 201 bp, Homo sapiens
tattacactgaccctttcttcaggcacaagcttcccccacccttgtggagtcacttcatgcaaagcgcatgcaaatgagctgctcctgggccagttttctrattagcctttcctgttgtgtacacacagaaggggaaccaaagggggtgtgagctaccgcccagcagaggtagccgagactggagcctagaggctggatct

SEQ ID NO: 367302 - DNA, 201 bp, Homo sapiens
ctgcaggtcgtccgggctcggagcacactgtggaaggccaccgtttccctgccgaggtgagcgcggagctggccgagaaggggcaaaggagcggggcggascggggccagagacgtggccctctcctaccctcgtgtccttttcagatccacgtggttcacctcagcaccgcctttgccagagttgacgaggccttggggc

SEQ ID NO: 367303 - DNA, 201 bp, Homo sapiens
ccaagttcagaatttattaagcagcaaaggagggtggaaggggataggtaaaggatgaagccagtgccagagtgggtggtgggcatgatgggggctctccytaggctgctcccagcctggctgtgcaatgttggcaatttctgctcctcctgcctgctcccctccccatagagagaatggaaaggagaggagagaagagag

SEQ ID NO: 367304 - DNA, 201 bp, Homo sapiens
gacagaaggtaagacaaagactgcgccaggaaaggaagggccagacagacagacttgaggtagaaaacagacctgctgctgcagtgaaagccccatgttgstgatatccaacatttttccaagctccattccagaccttttgcaaccttcttgcccctgtcctgcacctcaccaccctacttcctttccagtcactctgtt

SEQ ID NO: 367305 - DNA, 201 bp, Homo sapiens
ccccaggcgacccgccctggccccgggtgtccccagcctgcgcgggccgcttccagtccccggtggatatccgcccccagctcgccgccttctgcccggcsctgcgccccctggaactcctgggcttccagctcccgccgctcccagaactgcgcctgcgcaacaatggccacagtggtgagggggtctccccgccgagac

SEQ ID NO: 367306 - DNA, 201 bp, Homo sapiens
agaaatatcttaatgtatttaattaacctacacaaccatattggtgggtgcctactgaatattagccctagatatggacctgaaatggccttattctcttktagtttgtttaagccaatggagccttactagaatgtgagctacaaaacagtagagctattctctattcaatgctgcatctgtagggcctagaacagcacc

SEQ ID NO: 367307 - DNA, 201 bp, Homo sapiens
aaatcagatctgggcatgcccacccagggcgggctgtggggtgggggaggctctgcattccaccgtgggccctgagcacacacctcgccgtgttgcaggtkaggatctctggcgctggcagaagcagaatccttcaggctttggcacgcaagcctgaggaccctcccctaccaaggaccaggaaaagcagcagctgcctgc

SEQ ID NO: 367308 - DNA, 201 bp, Homo sapiens
gggacaaagtgggggtgagacagctggggggagacctgaacctcagtccagccctacaggctccaggcctgcagggaaggagggtaacggggaggcagggyccagccccccagtgtggggaaacagctgagggaaggcccccctcaaaaggctccacctcctcaccagcactcctgcccagggacagggagcccacagcag

SEQ ID NO: 367309 - DNA, 201 bp, Homo sapiens
aaagggaagggacagaggagtggccctggggttaaagctggtgcctgggatctgggacgaactgacctgatctccacctccaggtggcgatcgggcgacgkgaggccctgaatgtctttggcaatgactatgacacagaggatggcacaggtgagcctaggaccagggggacctaggagtgggagccaggaaggagagtca

SEQ ID NO: 367310 - DNA, 201 bp, Homo sapiens
tggccctggggttaaagctggtgcctgggatctgggacgaactgacctgatctccacctccaggtggcgatcgggcgacgggaggccctgaatgtctttgscaatgactatgacacagaggatggcacaggtgagcctaggaccagggggacctaggagtgggagccaggaaggagagtcagggggaacagactccccatc

SEQ ID NO: 367311 - DNA, 201 bp, Homo sapiens
gggccggctcagctaagctccaactacctcctgtcttgcagatcccgtacaaggtggtggcacggcgggaaggtgatgtggcagcctgttacgccaacccmagcctggcccaagaggagctggggtggacagcagccttagggctggacaggatgtgtgagtgctggcctgacccctgcagttaggggccagggaggggct

SEQ ID NO: 367312 - DNA, 201 bp, Homo sapiens
tctgtctctttatactcagacacccccttgcctagccccgctccactcccgaagtccccaagactggacagcgccttcgcacctcactccccacccccatyccccccatcacggttccccctccccgctctccgggaccctcccgaggccgacctccccctacacgcccatcctccgcagccgccggctgggtacctccac

SEQ ID NO: 367313 - DNA, 201 bp, Homo sapiens
ggaaggcatgtaaacagcaacctcgggattccatttaaattctgcctctctggatctgcttcctgatatataaaatggtaataaccaccctgcctccttcrcagctttgttggtaggcttaaatgaggttgtgtgaacatggtttatacagtaaaatcacagcgtgaggtgttaatcacgcaaaaaaggacctaggaaaaa

SEQ ID NO: 367314 - DNA, 201 bp, Homo sapiens
gaaatggggagacaggaaggcttcccctaggtcctccaacttctgcccacccctcccccacccccaaggacctgggggaacccaggtagcagccaaacagkttactaccccgagcctgctggcctcaggatactccctgctcatcactgccacctccattttcccacaccccctccagccggtcctccagctgctcccaca

SEQ ID NO: 367315 - DNA, 201 bp, Homo sapiens
tccctgctcatcactgccacctccattttcccacaccccctccagccggtcctccagctgctcccacagtgtctggccgtgggtgaaaggggacccttacygcggccgtttcccgctcagctccagacacggtggcagcatcggtgagcaggggcacagacatggtgttaccacacatacaccacacggctccacggcggg

SEQ ID NO: 367316 - DNA, 201 bp, Homo sapiens
gagcaacctctggccatgtcacccctgcagtacagctttatggcggtcatccactttgcggggctcaaggccgtgggcgagtcggtgcagaagcctctggrttattacagagttaacctgaccgggaccatccagcttctggaggtgagaggcatgggacagggcacagacactaggagggtgtccagctggaccccagcc

SEQ ID NO: 367317 - DNA, 201 bp, Homo sapiens
cggctcagctaagctccaactacctcctgtcttgcagatcccgtacaaggtggtggcacggcgggaaggtgatgtggcagcctgttacgccaaccccagchtggcccaagaggagctggggtggacagcagccttagggctggacaggatgtgtgagtgctggcctgacccctgcagttaggggccagggaggggctaaat

SEQ ID NO: 367318 - DNA, 201 bp, Homo sapiens
agggcattgccaaggactaaaaccagtagagcaacctctggccatgtcacccctgcagtacagctttatggcggtcatccactttgcggggctcaaggccrtgggcgagtcggtgcagaagcctctggattattacagagttaacctgaccgggaccatccagcttctggaggtgagaggcatgggacagggcacagacac

SEQ ID NO: 367319 - DNA, 201 bp, Homo sapiens
cacttctgcttcttaaagacctggccagcagctgggccagggccggctcagctaagctccaactacctcctgtcttgcagatcccgtacaaggtggtggcmcggcgggaaggtgatgtggcagcctgttacgccaaccccagcctggcccaagaggagctggggtggacagcagccttagggctggacaggatgtgtgagt

SEQ ID NO: 367320 - DNA, 201 bp, Homo sapiens
aagggctccactgaccaggaggccgaggtctctaactcttatcttccacagggtccaagagttcatcaggacccccaagagtgagtgagggggcaaggctytggcacaaaacctcctcctcccaggcactcatttatattgctctgaaagagctttccaaagtatttaaaaataaaaacaagttttcttacactggggcag

SEQ ID NO: 367321 - DNA, 201 bp, Homo sapiens; identical to SEQ ID NO: 79527

SEQ ID NO: 367322 - DNA, 201 bp, Homo sapiens; identical to SEQ ID NO: 79518

SEQ ID NO: 367323 - DNA, 201 bp, Homo sapiens
atggcagagaaggtgctggtaacaggtggggctggctacattggcagccacacggtgctggagctgctggaggctggctacttgcctgtggtcatcgatarcttccataatgccttccgtggtgagcggggcagtggggctggggctacttgaggggatggcagaagcaaaaccctgggttccacctccaccaccgggcgg

SEQ ID NO: 367324 - DNA, 201 bp, Homo sapiens
ataggcatgaggagggctctgggttcagctgggacacgctgcctgtgcctctggcctcaccacctgacccacatcccacagacttggaacgcagtgctgcygcgctatttcaaccccacaggtgcccatgcctctggctgcattggtgaggatccccagggcatacccaacaacctcatgccttatgtctcccaggtaagg

SEQ ID NO: 367325 - DNA, 201 bp, Homo sapiens
tgcagacagagccaggtggctaaggccaggaaggaaggcccggccaggccttgccacctgcccccagaggcctgtgggaaaaggacaggtcaggaagggtrgggacaggggctcgaccggctcagatccaagatggtgccacgcttgcttgctgagtcccccatgagctggggtactgcactggggccagcgactagttag

SEQ ID NO: 367326 - DNA, 201 bp, Homo sapiens
ctgctgcagacagagccaggtggctaaggccaggaaggaaggcccggccaggccttgccacctgcccccagaggcctgtgggaaaaggacaggtcaggaarggtggggacaggggctcgaccggctcagatccaagatggtgccacgcttgcttgctgagtcccccatgagctggggtactgcactggggccagcgactag

SEQ ID NO: 367327 - DNA, 201 bp, Homo sapiens
tactgctgccaggggggcccgcctccagggaaatggataagaaagcagcctgcccctgctgcagacagagccaggtggctaaggccaggaaggaaggcccrgccaggccttgccacctgcccccagaggcctgtgggaaaaggacaggtcaggaagggtggggacaggggctcgaccggctcagatccaagatggtgccac

SEQ ID NO: 367328 - DNA, 201 bp, Homo sapiens
ctgcacttctgcttcttaaagacctggccagcagctgggccagggccggctcagctaagctccaactacctcctgtcttgcagatcccgtacaaggtggtkgcacggcgggaaggtgatgtggcagcctgttacgccaaccccagcctggcccaagaggagctggggtggacagcagccttagggctggacaggatgtgtg

SEQ ID NO: 367329 - DNA, 201 bp, Homo sapiens
gggaccccggggccatggccacattcatgactgagaagcagctgagtggaggcaggagacacgattatctgggcagaatcagttggggcaggggcctgggrgggccccatgggccaaaccctgaggtcacaggagggggcccaaagcggggctagtgagtgaggtcctgagtgagtgggtcagcggctgggcccctttctc

SEQ ID NO: 367330 - DNA, 201 bp, Homo sapiens
aggaagcaatttctttaattttatcggaatccaggacacaacaagaaaaacacccaaaaaccacatggagacagaagacgagacacaactcctcccccacygcctccctgctctagagtggggacaaagtgggggtgagacagctggggggagacctgaacctcagtccagccctacaggctccaggcctgcagggaagga

SEQ ID NO: 367331 - DNA, 201 bp, Homo sapiens
ggttctcacagatggtcactatccacccctggaatagaatcagccaggcctgagcgttgaggaagcaatttctttaattttatcggaatccaggacacaasaagaaaaacacccaaaaaccacatggagacagaagacgagacacaactcctcccccactgcctccctgctctagagtggggacaaagtgggggtgagaca

SEQ ID NO: 367332 - DNA, 201 bp, Homo sapiens
ggcctcagtgtctggggcttcctccccgtactacccgcagagtttgttcagggtggaggtgcgcacctggccaagtccacgtctacacggcccacccagartagcctaagttgggcgggattcctaactctgagccaggagtgaccgggctggccctggcatgggcagaggctgagcgggggttggggtggggccccctcc

SEQ ID NO: 367333 - DNA, 201 bp, Homo sapiens
ctgggatctgggacgaactgacctgatctccacctccaggtggcgatcgggcgacgggaggccctgaatgtctttggcaatgactatgacacagaggatgscacaggtgagcctaggaccagggggacctaggagtgggagccaggaaggagagtcagggggaacagactccccatccaacacactcccttctctgcaggt

SEQ ID NO: 367334 - DNA, 201 bp, Homo sapiens
ttaaagctggtgcctgggatctgggacgaactgacctgatctccacctccaggtggcgatcgggcgacgggaggccctgaatgtctttggcaatgactatkacacagaggatggcacaggtgagcctaggaccagggggacctaggagtgggagccaggaaggagagtcagggggaacagactccccatccaacacactcc

SEQ ID NO: 367335 - DNA, 201 bp, Homo sapiens
tctctggccctagtatctgtatctgtaaagtgccagtgataacacctgtctcaccgagatgctgggggaattcaggaaaatcatgcaaaagtgcctggtayggagcctggcacgcagagggctcttggtcaagtgggttggagctgcgtgagcccagaaggggatagaggcagcgtggaggaaggcggcagcgggcccggt

SEQ ID NO: 367336 - DNA, 201 bp, Homo sapiens
acactcttccccctcggccgcccccgccggaacttccgttcgagtcccgggaacccagccatcgcgctgccggaagtagcctggccgacagtacggaaccmggaagcggggacccggcttcgctggatagaagctgccatgttggaggcggcggggctactccctgtcattcagccgcgcagtcgctgggttctcacccgc

SEQ ID NO: 367337 - DNA, 201 bp, Homo sapiens
cgcctagagcaggaggtattagtcactgcgcccaggagccagtttacacctagcgaaggcggaggcattggacaagcctgggtctgagcagacagaacccyttcctgcgaccctggagtcccaatcgtgctgccattttccttctgcccaggactctccagtcctcagtcaccttggacaaagaagtgtggatcctcagat

SEQ ID NO: 367338 - DNA, 201 bp, Homo sapiens
gtctcccaggtaaggcaaaagggaagggacagaggagtggccctggggttaaagctggtgcctgggatctgggacgaactgacctgatctccacctccagktggcgatcgggcgacgggaggccctgaatgtctttggcaatgactatgacacagaggatggcacaggtgagcctaggaccagggggacctaggagtggga

SEQ ID NO: 367339 - DNA, 201 bp, Homo sapiens
aactacctcctgtcttgcagatcccgtacaaggtggtggcacggcgggaaggtgatgtggcagcctgttacgccaaccccagcctggcccaagaggagctkgggtggacagcagccttagggctggacaggatgtgtgagtgctggcctgacccctgcagttaggggccagggaggggctaaatcagatctgggcatgccc

SEQ ID NO: 367340 - DNA, 201 bp, Homo sapiens
tatcatgtagcaaagaaagcattctctagagtcagatttgggtctgaacttacctaccatacatgatcttagaaaagttatttaatgtctcttaagcctcygtttcctcatttctcagatggaaagagtaacatttatgttgcagagtctgattactcatgaaaagttactatatatcacaaccaatacagaaaagatact

SEQ ID NO: 367341 - DNA, 201 bp, Homo sapiens; identical to SEQ ID NO: 367307

SEQ ID NO: 367342 - DNA, 201 bp, Homo sapiens
aaattgggatctcagccaaaccaagggcccttctgagccatcagcagtcaaacaaacagtaaaagtattggagagactcagctctgcagaaggaattactygctaagagttctggagaacagaggttttgtgatgaaaaggttttctctaactgaactctctgtctgctcttggtgatgacttggcaatgtctcccttggt

SEQ ID NO: 367343 - DNA, 201 bp, Homo sapiens; identical to SEQ ID NO: 367309

SEQ ID NO: 367344 - DNA, 201 bp, Homo sapiens
tatgatgggattataaattaacacacatttacttacgggaaagcctgcatggcagaataatgtttctatgtaaataactccttttcaggtgagaagctgcrtccactgcaaaaaattatctatagtacttgaactaacaggtactgcattttgaggctgttttgttactaactttgctgccttggtgtttctctctccact

SEQ ID NO: 367345 - DNA, 201 bp, Homo sapiens; identical to SEQ ID NO: 367310

SEQ ID NO: 367346 - DNA, 201 bp, Homo sapiens; identical to SEQ ID NO: 367311

SEQ ID NO: 367347 - DNA, 201 bp, Homo sapiens; identical to SEQ ID NO: 367316

SEQ ID NO: 367348 - DNA, 201 bp, Homo sapiens; identical to SEQ ID NO: 367317

SEQ ID NO: 367349 - DNA, 201 bp, Homo sapiens
cagccagtttttttaaaaaaagccagatgaggaaccctggggcagagggaagagaaggcagggagcttagcaacctgttgggtggaggttgggagtggacrgtaggggcgagtgatgattccaggaggtcagaggaggcaactcatacagtcttttcttttcttaattggaaagcatcaagtgacatatagagtcatttaa

SEQ ID NO: 367350 - DNA, 201 bp, Homo sapiens
gtgagacttcgtcttaataaataaatatagatggatagatagatagatagatagatagatagatagatagatagatgatagatagataaaattctagttcyttgttttaaataaagtttgtacccactaaattgatactgtgaccaattagtggggtacaacatacagtttgaaaacagtgctctggccgggggcggtggc

SEQ ID NO: 367351 - DNA, 201 bp, Homo sapiens; identical to SEQ ID NO: 367319

SEQ ID NO: 367352 - DNA, 201 bp, Homo sapiens
gggattacaggcgtgagccaccacgcttggcctgaagcaggttttagattatttcagcaacactcaactgttatttatcgagcccctattatgtcccaggkccttagaaatacagcattgaataaaacaaagtccctgtctcatgaaacttatgttccagtgagatagttttagggtgatatactagcagaggctgaacat

SEQ ID NO: 367353 - DNA, 201 bp, Homo sapiens
caagtgatctgcctgccttggcctcccaaagtgctgggattacaggcatgagccaccgtgcctggcctttttttattttttttggaaatggagtcttcctstgtcgcccaaggtggagtacagtggcacgatcttggctcattgcaacttccacctccctggttcaagcaattctcctgcctcagcctcttgagtagctgg

SEQ ID NO: 367354 - DNA, 201 bp, Homo sapiens
gctttctgaagcaggactctctgttatagaaaccaccagctttgtgtctcctaagtgggttccccaggtgagccctagccctcaatgaaaggcctttctcyagggatgaaaagttttgcatttgcctttgaagcaagtagaagttgagaacataggtttccaagcccctggctttgagaggtctcaggtgattcatagcac

SEQ ID NO: 367355 - DNA, 201 bp, Homo sapiens; identical to SEQ ID NO: 367323

SEQ ID NO: 367356 - DNA, 201 bp, Homo sapiens
aaaaaaaccccacaaaagtgcacatctgatcacatccctcctggttaaaaagctttcagtgactaatcaagtgcagactttttaatgaggtttacaaaccytgcatgatttggtcccggctcttttctgtagccgtaccgttcaagttcccttctggcccctgcttcctcttcatggtacactccagcccaactggaactt

SEQ ID NO: 367357 - DNA, 201 bp, Homo sapiens; identical to SEQ ID NO: 367324

SEQ ID NO: 367358 - DNA, 201 bp, Homo sapiens
aggttgcagcagagagggagagacttactggagcacatcctgaagcaggtgggaatgggcctcacgccaaggtggaggggttggccttggctaggagctcrgggtccatctcaggcagcatgagggacagtgggtctgtaggcccagatgtaggcaggtgggtagatgtgatggtgggaatcaatggagacatctcttgat

SEQ ID NO: 367359 - DNA, 201 bp, Homo sapiens; identical to SEQ ID NO: 367328

SEQ ID NO: 367360 - DNA, 201 bp, Homo sapiens
ggaaacgcaacattgggacaggaaaacaaaaatgcctgtcctcacctaggtctgtgggggtggagctgcagtcaaggaccacgttctcacgtcctcctctmcccagcacttccttcccacctttccatgtcatttatagggaccatgctcttcttcccttcccagcacttccttcccacctttccatatcatttataggga

SEQ ID NO: 367361 - DNA, 201 bp, Homo sapiens
atcatttatagggaccatgctcttcccttcccagcacttccttccctcctttccttatcatttatagggaccacgctcttcccttcccagcacttccttcsctcctttttatgtcatttatagggaccatgctcttcccttcccagcacttccttccctcctttttatgtcatttatagggaccatgctcttcccttccca

SEQ ID NO: 367362 - DNA, 201 bp, Homo sapiens
aaagccagatgaggaaccctggggcagagggaagagaaggcagggagcttagcaacctgttgggtggaggttgggagtggacagtaggggcgagtgatgawtccaggaggtcagaggaggcaactcatacagtcttttcttttcttaattggaaagcatcaagtgacatatagagtcatttaatttttttttttgagacag

SEQ ID NO: 367363 - DNA, 201 bp, Homo sapiens
ccgagtgcagccctctaacacaggtttgagaattctgtgagtaatgctcccagtgtcatgatagagaaaatttccagtgctgctgaagcctaacagaatawttatcatgtcttgttttttccctagataaaatctgagctccttaaagtcaaggaaagtgccttcactgccttccctgagaataccagacacacaattaac

SEQ ID NO: 367364 - DNA, 201 bp, Homo sapiens
ctttccttatcatttatagggaccacgctcttcccttcccagcacttccttcgctcctttttatgtcatttatagggaccatgctcttcccttcccagcamttccttccctcctttttatgtcatttatagggaccatgctcttcccttcccagcacttccttccctcctttccttatcatttatagggaccatgctcttc

SEQ ID NO: 367365 - DNA, 201 bp, Homo sapiens
gaacaaaagttttgcaaagcagtacttggctttactacttttatacattgtattctaatatttttcttatttattattattatttatttagtttttagacrgagactcgttctgtcactcaggctgaagtgcagtggcgtgatctcggctcactgcaacctccgcctcccaggttcaagtgattctcctgtctcagcctcc

SEQ ID NO: 367366 - DNA, 201 bp, Homo sapiens
tatatacatttttatacatatggtccaagctacttgggaggctgaggtgggaggattgcttgagtctgagaggccaaggttgcagtaagccgagatcacamcactgcactctagccgaatgacagagtgagacccggtctcaaaaaaaaaaaaaaaaagaaaaaaaatataactagcatctcagacccatgatttcatgga

SEQ ID NO: 367367 - DNA, 201 bp, Homo sapiens; identical to SEQ ID NO: 367333

SEQ ID NO: 367368 - DNA, 201 bp, Homo sapiens
tcatctttatattcctagcgtctcacttggcctggcatggaagaggcgctcggaatcaaaacggagagaggctgggggtggagccagcttcggaagtcackgcggaggggcgggggcggggccgcgcccaccagacgagccatcggtcacgcggggcccagctggactgccgcgggggattctgggccaagatggcagcaa

SEQ ID NO: 367369 - DNA, 201 bp, Homo sapiens
gctctgcaatagcgaaaataatgggggtgggaggaatggcagctttgcaaagggtggtcagaggaagcctctctgcaactgaaagatgagagagagatgtragaacagccagtttttttaaaaaaagccagatgaggaaccctggggcagagggaagagaaggcagggagcttagcaacctgttgggtggaggttgggagt

SEQ ID NO: 367370 - DNA, 201 bp, Homo sapiens; identical to SEQ ID NO: 367337

SEQ ID NO: 367371 - DNA, 201 bp, Homo sapiens
acctgtgcgctcctgcatttagggctcctttgctctggtttcatcacgcaggatgtcacattttgtgcatattattctctagctctactacttttcattgkaaacaaacaatcattttctaacctgccgtcgtggaaggcagagtgcagaccgacccttcccggcaggtgggggctgagagccaagagcgctggaaccgct

SEQ ID NO: 367372 - DNA, 201 bp, Homo sapiens
aggtgccagacagacaggagctcacaggcagctggtgccccgctgtcaaggaaaaagcctgtttatcttcacctttacttttcagtatcacagttgtctgyccatgctgatgttttccctggtgttgagggcataccatgacttaccgcatcctctaacttgtttctcaaagggtgtgaatctccagaagcttctggaagc

SEQ ID NO: 367373 - DNA, 201 bp, Homo sapiens
ctgtagagagaagaaccagtttggagcctacagcaatccaggtgagagacatggcaaggaggcctggagggcagaggtgcgtgaccggatctcagcagttygtgttctgatctgtgaagctcgagacatctataggcaggtgtgttaacctgggtgcagttaactgggagtgagtggagatagagaagctgtctgaggaat

SEQ ID NO: 367374 - DNA, 201 bp, Homo sapiens; identical to SEQ ID NO: 79740

SEQ ID NO: 367375 - DNA, 201 bp, Homo sapiens
atccttatgtttctagatgggagtgagtgtcgtggactcttctgtggcaggacttggaggctgtccctacgcacagggggcatcaggaaacttggccacaraagacctggtctacatgctagagggcttgggcattcacacggtaagcccacccaccccctggtggcgacagccccgaactgaccagggggcctgaagctg

SEQ ID NO: 367376 - DNA, 201 bp, Homo sapiens; identical to SEQ ID NO: 367338

SEQ ID NO: 367377 - DNA, 201 bp, Homo sapiens
agagatgtcagggttagaggaaggccagatcgggggccttgtaggactttgactctttcagactgagctgggaagctaacagagagtcttgagcaggggcrgggagggagatgatctgaaatgttccgtttgagaggctcctcggctgggcacagtggctcacacctgtaatcccagcactttgggaggctgaggcaggtg

SEQ ID NO: 367378 - DNA, 201 bp, Homo sapiens
cttctcaggacacaggtcatggaggttcttcccaagctggcagaggccatttgtggaaagtggagagctacgtggtggccatctgccaactccagcatctytggaaaatctccacgctgaatgtgatttttgaaaacagcttatgtaattaaaggttgaatggcacatcataattccagcattcggttgtgcagctgtgtg

SEQ ID NO: 367379 - DNA, 201 bp, Homo sapiens
cctggtgttgagggcataccatgacttaccgcatcctctaacttgtttctcaaagggtgtgaatctccagaagcttctggaagctggaaactttatctgtyaagccctgaacagaaaaactagctccaaagtggctcaggctacctgtaaactctgagccccttgcccacctgaagccctggggatgatgtggaaataggg

SEQ ID NO: 367380 - DNA, 201 bp, Homo sapiens
cagacaggaagagtgacttcctctcctatgccttgccaggcaggtaaaggggaattctgcacagctgaggtgagtctgaggcaaaacttcatcctgatcaygctcaggacactcctgctcctctgtgcttctctgtttcatggcagtgatatctcagaatcccctttttgaaaatttatcagggaacaggttgagctgtgt

SEQ ID NO: 367381 - DNA, 201 bp, Homo sapiens
gtggggcccttgctctctgacttctcaggacacaggtcatggaggttcttcccaagctggcagaggccatttgtggaaagtggagagctacgtggtggccrtctgccaactccagcatctctggaaaatctccacgctgaatgtgatttttgaaaacagcttatgtaattaaaggttgaatggcacatcataattccagca

SEQ ID NO: 367382 - DNA, 201 bp, Homo sapiens
ttgcagtggttttagagatgtgcaaatgggcttccaaaaatttaaatagtgatgtacctctattaaaaaatataactattggccgggcacggtggctcacrcctgtaatcccagcactttgggaggctgagatgggcagatcacaaggtcaggagatcgagaccatcctggctaacatggtgcaaccccgtctctactaaa

SEQ ID NO: 367383 - DNA, 201 bp, Homo sapiens; identical to SEQ ID NO: 79758

SEQ ID NO: 367384 - DNA, 201 bp, Homo sapiens
gtgaaaccccatctctactaaaaatacaaaaattagctgggcgtggtagtggatagaaaccccgtctttactaaaaatacaaaaattagctgtaattccakctacttgggaggctgaggcaggagaatcacttgaatctgggaggcggaggttgtggtgagccgagatcacaccactgtactccggcctgggtgacagagc

SEQ ID NO: 367385 - DNA, 201 bp, Homo sapiens
taactttgctgccttggtgtttctctctccactatagaatatcgtatctactccagtgaaaatcaagctgatagacatgctttctgaagcaggactctctsttatagaaaccaccagctttgtgtctcctaagtgggttccccaggtgagccctagccctcaatgaaaggcctttctccagggatgaaaagttttgcattt

SEQ ID NO: 367386 - DNA, 201 bp, Homo sapiens
cccagcacttccttcccacctttccatatcatttatagggaccatgctcttcccttcccagcacttccttccctcctttccttatcatttatagggaccaygctcttcccttcccagcacttccttcgctcctttttatgtcatttatagggaccatgctcttcccttcccagcacttccttccctcctttttatgtcatt

SEQ ID NO: 367387 - DNA, 201 bp, Homo sapiens; identical to SEQ ID NO: 79745

SEQ ID NO: 367388 - DNA, 201 bp, Homo sapiens
ggcgtgaacccgggaggcggagcttgcagtgagctgagattgcgccaccgcactccagcctgggcaacagagggagactccatctaaaaaaaaaaaaaaatatatatatatatatatatatatatatggactattgattggccgggtatggtggctcatgactgtaatcccagcacttcgggaggccgaagcatgtggatc

SEQ ID NO: 367389 - DNA, 201 bp, Homo sapiens
actttgggaggctgaggccggagaacagcttgaggccagaagcttgagaccagcctgagcaacataaggagaccttgtctctacaaaaaaaaaaaaaaaaatcaattagctggctgtgatggcatgcacctgtagtcctagctactcgggagactgaggcacaggatggcttgagactaggagttcgaggctgcagtgagc

SEQ ID NO: 367390 - DNA, 201 bp, Homo sapiens
gaaatatttcttcttgtctcattattagtgaagatagatccattctttcatattggtctccctgggaattgtggcaatctcttcctcatactttttgtttyctcttttaaaccaaaggtcagcacctcatctatgggcactttaccaaagcgggtgaaaattgtggaagttggtccccgagatggactacaaaatgaaaag

SEQ ID NO: 367391 - DNA, 201 bp, Homo sapiens
cactttgggaggctgaggccggagaacagcttgaggccagaagcttgagaccagcctgagcaacataaggagaccttgtctctacaaaaaaaaaaaaaaaaatcaattagctggctgtgatggcatgcacctgtagtcctagctactcgggagactgaggcacaggatggcttgagactaggagttcgaggctgcagtgag

SEQ ID NO: 367392 - DNA, 201 bp, Homo sapiens
cactacaaaccatgacagagattgggcatcttacatgagggggagtcagaggaataacccaggtgccagacagacaggagctcacaggcagctggtgcccygctgtcaaggaaaaagcctgtttatcttcacctttacttttcagtatcacagttgtctgtccatgctgatgttttccctggtgttgagggcataccatga

SEQ ID NO: 367393 - DNA, 201 bp, Homo sapiens
gggtggatcacttgaggtcgggagttcgggaccagcctggccaacctggtgaaatcctgtctctactaaaatacaaaaaattagccaggtgtggtggtgcrcacctgtagtcccagctactcgggaggctgaggcaggagaatcacttgaacctgggaggtgaaggttgcagtgagccaagatcgcgccactgctctccag

SEQ ID NO: 367394 - DNA, 201 bp, Homo sapiens
ctcttcctcatactttttgtttcctcttttaaaccaaaggtcagcacctcatctatgggcactttaccaaagcgggtgaaaattgtggaagttggtccccragatggactacaaaatgaaaaggtaaagttggaaatgagccaaaaaaacagttttttcaagcatctgctttgagtattacgtgtgataggtgcaatggca

SEQ ID NO: 367395 - DNA, 201 bp, Homo sapiens
tcctcatactttttgtttcctcttttaaaccaaaggtcagcacctcatctatgggcactttaccaaagcgggtgaaaattgtggaagttggtccccgagakggactacaaaatgaaaaggtaaagttggaaatgagccaaaaaaacagttttttcaagcatctgctttgagtattacgtgtgataggtgcaatggcagttg

SEQ ID NO: 367396 - DNA, 201 bp, Homo sapiens
accgcactccagcctgggcaacacagtgagacttcgtcttaataaataaatatagatggatagatagatagatagatagatagatagatagatagatagatgatagatagataaaattctagttctttgttttaaataaagtttgtacccactaaattgatactgtgaccaattagtggggtacaacatacagtttgaaaa

SEQ ID NO: 367397 - DNA, 201 bp, Homo sapiens
ttcctcatactttttgtttcctcttttaaaccaaaggtcagcacctcatctatgggcactttaccaaagcgggtgaaaattgtggaagttggtccccgagrtggactacaaaatgaaaaggtaaagttggaaatgagccaaaaaaacagttttttcaagcatctgctttgagtattacgtgtgataggtgcaatggcagtt

SEQ ID NO: 367398 - DNA, 201 bp, Homo sapiens
caccgcactccagcctgggcaacacagtgagacttcgtcttaataaataaatatagatggatagatagatagatagatagatagatagatagatagatagatgatagatagataaaattctagttctttgttttaaataaagtttgtacccactaaattgatactgtgaccaattagtggggtacaacatacagtttgaaa

SEQ ID NO: 367399 - DNA, 201 bp, Homo sapiens
cttcctcatactttttgtttcctcttttaaaccaaaggtcagcacctcatctatgggcactttaccaaagcgggtgaaaattgtggaagttggtccccgasatggactacaaaatgaaaaggtaaagttggaaatgagccaaaaaaacagttttttcaagcatctgctttgagtattacgtgtgataggtgcaatggcagt

SEQ ID NO: 367400 - DNA, 201 bp, Homo sapiens
ccaccgcactccagcctgggcaacacagtgagacttcgtcttaataaataaatatagatggatagatagatagatagatagatagatagatagatagatagatgatagatagataaaattctagttctttgttttaaataaagtttgtacccactaaattgatactgtgaccaattagtggggtacaacatacagtttgaa

SEQ ID NO: 367401 - DNA, 201 bp, Homo sapiens
gccaccgcactccagcctgggcaacacagtgagacttcgtcttaataaataaatatagatggatagatagatagatagatagatagatagatagatagatagatgatagatagataaaattctagttctttgttttaaataaagtttgtacccactaaattgatactgtgaccaattagtggggtacaacatacagtttga

SEQ ID NO: 367402 - DNA, 201 bp, Homo sapiens
tgagtgcaggaggctgaggctacagtgagctatgattgcactattacactccagcctgggcaagagaatgagtgagaccccatctaaaaaaaaaaaaaaaaggctgggtgtggtggctcacgcctgtaattccagcactttgggaggccgaggagagcggatgacttgaggtcaggagtttgagaccagcctggccaacat

SEQ ID NO: 367403 - DNA, 201 bp, Homo sapiens
gttgttgttgttggatgatcctctttgttgtaatattttcttattttattcaaatttctaccttttcaggccaggtgcagtggttcatgcctgaaacccakcacttcaggaagttgaggcaggcaaatcgcttgagcccaggagttcatggcgaaaccccctccacaaaaaatacaaaaattagctgggtatgatggtgta

SEQ ID NO: 367404 - DNA, 201 bp, Homo sapiens
cttagtctctaagaaagcttgttggctaaaacaaggccagtcaggtgagttgtacatgttccagctgcttcctagcagggaattcctgggggacttcaggrggttgagatccttagcggatcacacagtgtgccttccgctttgcctcgttgtagtatatttatccagattaaatctgtaaaacaaagttgatttgaaaag

SEQ ID NO: 367405 - DNA, 201 bp, Homo sapiens; identical to SEQ ID NO: 367318

SEQ ID NO: 367406 - DNA, 201 bp, Homo sapiens
tgaggtgggtggatcacaaggtcaggagttcgaaaccagcctgaccaacatggtgaaacgctgtctctactaaaaatacaaaaattagccgggcgtggtgrtgggctcctgtaatcccagctactcaggaggctgaggcaggagaatcgcttgaacccaggaggtggaggttgcagtgagccgagatcatgccactgcact

SEQ ID NO: 367407 - DNA, 201 bp, Homo sapiens
atcgcttgaacccggaaggcggaggtcgcagtgagctgagattgtgccactgcactccactctgggcaatacagtgagactccatctcaaaaaaaaaaaawttttgtggaaagattaagttagagcagtgggagagaaactggagaaggcaggcaaggggaggacctagcgagaaggacctggagtatttttgtgtgttct

SEQ ID NO: 367408 - DNA, 201 bp, Homo sapiens
aaggcagggagcttagcaacctgttgggtggaggttgggagtggacagtaggggcgagtgatgattccaggaggtcagaggaggcaactcatacagtcttktcttttcttaattggaaagcatcaagtgacatatagagtcatttaatttttttttttgagacagggtctcgctctgttgcccaggctggagtgtagtggc

SEQ ID NO: 367409 - DNA, 201 bp, Homo sapiens
atgctagagggcttgggcattcacacggtaagcccacccaccccctggtggcgacagccccgaactgaccagggggcctgaagctgagaacaaaagtggaygggggtatttggggttgttaaggtgctgaggagtaaagagggaaagggttagccaggcgcagtggctcatgcctgtaatctcagcactttgggaggctga

SEQ ID NO: 367410 - DNA, 201 bp, Homo sapiens
catctcaaacaaaaaaagagaaaagtgctgaaaggagttcacctggatgttggcaggttgctgctggagccaaggaagtagtcatctttggagctgcctcrgagctcttcaccaagaagaacatcaattgttccatagaggagagttttcagaggtttgacgcaatcctgaaggcagcgcagtcagccaatatttctgtgc

SEQ ID NO: 367411 - DNA, 201 bp, Homo sapiens
gagttttcagaggtttgacgcaatcctgaaggcagcgcagtcagccaatatttctgtgcgggggtgagtcagagcacattggtatcctttcctctgtaccrttctggaatggggctagactctgactcaagtggtcctcctgccacaaacttcttatcctgggtgggggcagcctgagctccacacctagacatcttttcc

SEQ ID NO: 367412 - DNA, 201 bp, Homo sapiens
gtgaaaccccgtctctactaaaaatacaaaaaattagctgggcgtgatggcgggcgcctgtagtcccagctactcgggaggctgaggcaggagaatggcgygaacccggaaggcggagcttgcagtgaaccgagattgtgccactgcactccagcctggacgacagagacagactccgtctcaaaaaaaaaaaaaaaaaaa

SEQ ID NO: 367413 - DNA, 201 bp, Homo sapiens
ttattctttcagcaaacatttactgatgccagtatgccaggttccaagctggcaatggtggacacagtcatggtgaccctgcccagatgtgaagtgtacarctctgtgttggggagacagtcaagggagttacatggcaatcccactgcattatgacagatgccatgaagggaggaagcatggggctcaggaagcctagag

SEQ ID NO: 367414 - DNA, 201 bp, Homo sapiens
ttccttaggtcaccaagaagttctactcaatgggctgctacgagatctccctgggggacaccattggtgtgggcaccccagggatcatgaaagacatgctrtctgctgtcatgcaggaagtgcctctggctgccctggctgtccactgccatgacacctatggtcaagccctggccaacaccttgatggccctgcaggtaa

SEQ ID NO: 367415 - DNA, 201 bp, Homo sapiens
atcgcttgacccgtggaggttgcagtgagccaagatcgcgccactgcactccagcctgggcaacaagagcaaaactctatcttaaaaaaaaaaaaaaaaaagatatgtatatgtatgaaatatgatctgctgtcagcaagctggagaccaaaaaaagccagtgaggtgtagctccagttgaagcccaggggcctgagaatg

SEQ ID NO: 367416 - DNA, 201 bp, Homo sapiens
ctatgattgtgccactgcactccagcctgggtgacagagaaagaccctgtctcaaacacacacacacacacacacacacacacacacacacacacacacatttatccatttgtcattaattatggttaattaataggatatacatgtcaccaattttttgaaatttgctttatggaccagaatatcataaacattcataaa

SEQ ID NO: 367417 - DNA, 201 bp, Homo sapiens
gctatgattgtgccactgcactccagcctgggtgacagagaaagaccctgtctcaaacacacacacacacacacacacacacacacacacacacacacacatttatccatttgtcattaattatggttaattaataggatatacatgtcaccaattttttgaaatttgctttatggaccagaatatcataaacattcataa

SEQ ID NO: 367418 - DNA, 201 bp, Homo sapiens
agctatgattgtgccactgcactccagcctgggtgacagagaaagaccctgtctcaaacacacacacacacacacacacacacacacacacacacacacacatttatccatttgtcattaattatggttaattaataggatatacatgtcaccaattttttgaaatttgctttatggaccagaatatcataaacattcata

SEQ ID NO: 367419 - DNA, 201 bp, Homo sapiens
gccagggaaagcttcaccaaagagtacttccccacttcaggacaacgctcctgacttcttattgttttgtaatcttaaaaaaatctttaaaggggccgggygcagtggctcaagcctgtaatcccagcactttgggaggtcgaggcgggcggatcacgaggtcaggagatcgagaccatcctggcgaacacagtgaaaccc

SEQ ID NO: 367420 - DNA, 201 bp, Homo sapiens
gagctatgattgtgccactgcactccagcctgggtgacagagaaagaccctgtctcaaacacacacacacacacacacacacacacacacacacacacacacatttatccatttgtcattaattatggttaattaataggatatacatgtcaccaattttttgaaatttgctttatggaccagaatatcataaacattcat

SEQ ID NO: 367421 - DNA, 201 bp, Homo sapiens
ccccgtctctacaaaaattagccaggtgtggtggtgggcacctgtagtcccagctattggggaggctgagacaggagaatttcttgaacccaggaggtggyggttgcagtgagccaagatcacgccactgcattcctgcctggcgacagagcaagactccgtctcattaaaaaaaaaaaaattaaaaagaaaaaaaaaagt

SEQ ID NO: 367422 - DNA, 201 bp, Homo sapiens
atgctgtctcaaaaaacaaacaaatttctgtcttttattttgtcttttattttacttactttttgtctgttgtttttctcacacctttttcttttcttttytttttatttatttatttatttttgagatggagtcttgctctgtcacccaggctggagtgtagcagcatgatctcggctcactgcaacctctgcctcccag

SEQ ID NO: 367423 - DNA, 201 bp, Homo sapiens; identical to SEQ ID NO: 367334

SEQ ID NO: 367424 - DNA, 201 bp, Homo sapiens
ttctcaggacacaggtcatggaggttcttcccaagctggcagaggccatttgtggaaagtggagagctacgtggtggccatctgccaactccagcatctcyggaaaatctccacgctgaatgtgatttttgaaaacagcttatgtaattaaaggttgaatggcacatcataattccagcattcggttgtgcagctgtgtgt

SEQ ID NO: 367425 - DNA, 201 bp, Homo sapiens
gccaaaaagctcaggacactgacctcattcctcccctgtcttcccacaggtacgtctcctgtgctcttggctgcccttatgaagggaagatctccccagcwaaagtagctgaggtgtgtgcatgtgtcagggcggggggtttggtgagggttggccaccttgtctgcccctgagcgcataggttcctctccccaccctttc

SEQ ID NO: 367426 - DNA, 201 bp, Homo sapiens; identical to SEQ ID NO: 367339

SEQ ID NO: 367427 - DNA, 201 bp, Homo sapiens
aacaataactcccaatttctttccactcccagcccccaataactactattcaactttctttctctatgaatttgactataataaagtcctcattgtaatarttaggattctccagagaaacaaaaccaataaaagatgatatataggccggacccagtggctcacgcctgtaatcccaacacttttggaggctgctggagc

SEQ ID NO: 367428 - DNA, 201 bp, Homo sapiens
ggtgatagagtgagactcagtctcaaaaaaataaataaataaaacaaaaataaaaacaaacattaccatatgatccaggaatttcacttctagaaatataytgaaaataattgcaaacaaggaattaaacagatattcacataccaataatgttgctatgttgctcataaatatatattcttgtatatacagaatataaat

SEQ ID NO: 367429 - DNA, 201 bp, Homo sapiens
gccctgttcagcccttctgggtgatacagaactacatttgccacatctttattctcaactttcaacctcttcacataccccttcatttcttctgactcccytcatagcctttactaaaatgctcctctccctgccctattgaaaaatttctaagaatttatttttcattttctattaagattcctttgtaaatgatgttct

SEQ ID NO: 367430 - DNA, 201 bp, Homo sapiens
gttaatatcactatttataaaaagtggtctttgaaattcagggagattttaactggccaaagcccaaattcaaagaattgaatttcaaatgaaaacatttytttctcagttgtttgatcttacgaaattaaaatatattccactacgagtgcttaaagtcattaaccatttataaacaatgaaaatgaaaagatacaaatc

SEQ ID NO: 367431 - DNA, 201 bp, Homo sapiens
agagagaaaagagtaaaaagaaatgaacaaagtctccaagaaacatgcgactatgtgaaaagaccagatctacatttgattggtatacctaaacatgatgrggagaatggaaccaagctggaaaacactccagtatattatccaggagaacttccccaacctagcaagacaggccaacatgcaaattcaggaaatacagag

SEQ ID NO: 367432 - DNA, 201 bp, Homo sapiens
tcagcccttctgggtgatacagaactacatttgccacatctttattctcaactttcaacctcttcacataccccttcatttcttctgactcccctcatagsctttactaaaatgctcctctccctgccctattgaaaaatttctaagaatttatttttcattttctattaagattcctttgtaaatgatgttctgatctca

SEQ ID NO: 367433 - DNA, 201 bp, Homo sapiens
gtgagaagagaagtttagagagaaaagagtaaaaagaaatgaacaaagtctccaagaaacatgcgactatgtgaaaagaccagatctacatttgattggtrtacctaaacatgatggggagaatggaaccaagctggaaaacactccagtatattatccaggagaacttccccaacctagcaagacaggccaacatgcaaa

SEQ ID NO: 367434 - DNA, 201 bp, Homo sapiens
ggagcttattttttgaaaagatcaacaaaattgatagactgctagcaagactaataaagaagaaaagagagaagaatcaaatagatgcaatgaaaaatgawaaaggggatatcaccaccgatcccacagaaatacaaactaccatcagagaatactataaacacctctacacaaataaactagaaaatctagaagaactgg

SEQ ID NO: 367435 - DNA, 201 bp, Homo sapiens
aatcaggttttctaacaacttaaacaaaacttataaaatataaatattccactacaagttgtcaagtgttcctttaaaaatatttaagaatttcatgattycataaaatcatgctttgttttcacgatgatcagtaaaaatggaagtaatataacttctggttttgttatgaagttaattatttgctcatttcattttaag

SEQ ID NO: 367436 - DNA, 201 bp, Homo sapiens
actgggttcaaatattggatcttctgcttgctaggtttgagaccttggcaaattaaaatcttgagtgagtaccaggtacacgataaactcaaatgtccgtstttgctattattagtcctctgtggagtcctagaaattttctgacaccttcttattctccaaaatttcctttttctagacttcatgaggaaaacacacctc

SEQ ID NO: 367437 - DNA, 201 bp, Homo sapiens
ttaagaaactcactcaaaaccacacaaatacatggaaactgaacaacctgctcctgaatgactactgggtacataacgaaatgaaggcagaaataaacatrttctttgaaaccaatgagaacaaagacacaatgtaccagaatctctgggatacatttaaagcagtgtgtacagggaaatttatagcactaaatgcccaca

SEQ ID NO: 367438 - DNA, 201 bp, Homo sapiens
ggattaagaaactcactcaaaaccacacaaatacatggaaactgaacaacctgctcctgaatgactactgggtacataacgaaatgaaggcagaaataaasatattctttgaaaccaatgagaacaaagacacaatgtaccagaatctctgggatacatttaaagcagtgtgtacagggaaatttatagcactaaatgccc

SEQ ID NO: 367439 - DNA, 201 bp, Homo sapiens
tcagaaatgaagctaacaggaaataagggaccagaatgatactgcagttttgctatgctagtcaaatcataccaagataacctagatgttatttctgtgtwtgatagaaagttggggtctaattatgcttattttccctctattgtctcagaaccattttagtctagtttcagtctcagaaccatttagtcctcactctat

SEQ ID NO: 367440 - DNA, 201 bp, Homo sapiens
ggacactctggatgatttcatgtcatgttttccttgggcagagaaaaagcaagatgtgaaagtaatgtgatccatttgctattcctagtattaattatatrccacctgccagacattgtgttaggtgccttagaaagttccttaatatcaaaagaatatgtataattttaaaataccaaattatattttaaaagtttaaaa

SEQ ID NO: 367441 - DNA, 201 bp, Homo sapiens
ggaaaattccacatgtaagtacttaacacaaactttagcaaatgtgcaaaattattgaaaatactgtataaaattacctttggctatgtgtataaggtgtraatgaaacataaatgaatttggtttttagatttaggccccatcccctatatatctcattatgtatatgcaaacattccaaaatctgaaaaagtctggaat

SEQ ID NO: 367442 - DNA, 201 bp, Homo sapiens
cgcccaggctggagtgaagtgtcgcggtcttggctcactgcaacctctgcctcccaggttcaagcaattctcgtgccttagccacctgagtagctggaatyacaggctcacaccaccacatccagctaatttgtatatttttttgtagagacggggtttcaccatgttggccaggctggtctcaaactcctgacctcaagt

SEQ ID NO: 367443 - DNA, 201 bp, Homo sapiens
aaaacaacatctatcagcatagaaaaatatcttatacacgaaaatgtttaatagtagtaacctgattgctggagtgtgatatcagtaattttctgaacttytatcatataaacattctgcttttgtaataacaagattgttttgaatcttttagattaagaaactaatttcaattttggaatgctgatacagctacacttt

SEQ ID NO: 367444 - DNA, 201 bp, Homo sapiens
ttgcaatctactcatctgacaaagggctaatatccagaatctataaagaactcaaacatatttgcatgaaaaaagcaaacaaccccattaacaagtgggcraaagatatgaacagacacttctcaaaagaagacatttatgcagccaaaagacacatgaaaaaatgctcgtcatcactggccatcagagaaatgtaaatca

SEQ ID NO: 367445 - DNA, 201 bp, Homo sapiens
ccttccttacaccttatacaaaaattcattcaagatggattaaagacttcaatgttagacctaaaaccataaaaaccctacaagaaaacctaggcaatacmattcaggatataggcatgggcagggacttcatgtctaaaacaccaaaagcaatggcaacaaaagccagaattgacaaatgggatctaattaaactaaaga

SEQ ID NO: 367446 - DNA, 201 bp, Homo sapiens
cttaagatttttgataactgaaacaaatacatgatatatattcaatattcattaaatgactttagcatagcatactatagtacaaataagaatggaattarataagagaaaagtataaatataccacctgtatcagtttaactttccatgagttccctggacaattagacaattttattttatatcgcctcctgcttttcc

SEQ ID NO: 367447 - DNA, 201 bp, Homo sapiens; identical to SEQ ID NO: 79769

SEQ ID NO: 367448 - DNA, 201 bp, Homo sapiens
aatcatgagtgaactcccattcacaattgcttcaaagagaataaaatacctaggaatccaacttacaagggatgtgaaggacctctttaaggagaattacraaacactgctcaacaaaataaaagaggatacaaacaaatggaagaacattccatgctcatgggtaggaagaatcaatgttgtgaaaatggccatactgcc

SEQ ID NO: 367449 - DNA, 201 bp, Homo sapiens
caacaaaaaaagagaagtttagaccaatatccttgatgaacatcgattggaaaatcctcaataaaatactggcaaactgaatccagcaacacatcaaaaascttatccaccatgatcaagtgggcttcattcctgggatgcaaggctggttcaacatatgcaaatcaataaacgtaatccagcatataaacacaaccgatg

SEQ ID NO: 367450 - DNA, 201 bp, Homo sapiens
tgcttaagatttttgataactgaaacaaatacatgatatatattcaatattcattaaatgactttagcatagcatactatagtacaaataagaatggaatkaaataagagaaaagtataaatataccacctgtatcagtttaactttccatgagttccctggacaattagacaattttattttatatcgcctcctgctttt

SEQ ID NO: 367451 - DNA, 201 bp, Homo sapiens
taaagaagaaaagagagaagaatcaaatagatgcaataaaaaatgataaaggggatataaccacagatcccacagaaatacaaactaccatcagagaatastataaacacctctacacaaataaactagaaaatctagaagaaatggatacattcctcgacacatacaccctcccaaggctaaaccaggaagaagttgaat

SEQ ID NO: 367452 - DNA, 201 bp, Homo sapiens
cacaacgtaccagaatctctgggacacatttaaagtagtgtgtagagggaaatttatagcactaaatgcccacaagagaaagcaggaaagatctaaaatcracaccctaacatcacaattaaaagaactagaaaagcaagagcaaacacattcaaaagctagcagaaggcaagaaataactaagatcagagcagaactgaa

SEQ ID NO: 367453 - DNA, 201 bp, Homo sapiens
ctccaaagttgaccacatagttggaagtaaagcactcctcagcaaatgtaaaagaacagaaatcacaacaaactgtctctcagaccacagtgcaatcaaaytagaactcaggattaagaaactcactcaaaaccgctcaactacatgtaaactgaacaacctgctcctgaatgactactgggtacataacgaaatgaaggc

SEQ ID NO: 367454 - DNA, 201 bp, Homo sapiens
tgaagtcagctctgcaccaagtggacctaatagacatctacagaactctccaccccaaatcaacagaatatacattcttctcagcaccacaccacacttaytccaaagttgaccacatagttggaagtaaagcactcctcagcaaatgtaaaagaacagaaatcacaacaaactgtctctcagaccacagtgcaatcaaat

SEQ ID NO: 367455 - DNA, 201 bp, Homo sapiens
agcaaatggaaaacaaaaaaaaagcaggggttgcaatcctagtctctgataaaacagactttaaaccaacaaagatcaaaagagacaaagaaggccattayataatggtaaagagatcaattcaacaagaagagctaactatcctaaatatatatgcacccaatacaggagcacccagtttcataaaccaagtccttagag

SEQ ID NO: 367456 - DNA, 201 bp, Homo sapiens
tcaaaaaaaatttttttaatccataagctacagactgcacattcttcttagcagcacacaggatgggccatatgttaagccacaaaacacatctcaataartttttttaaatcaatttttaaaaatgaaaattatatcaagtattttctcagaccacagtggaataaaactagaaatcaatataaaaagacctttggaaac

SEQ ID NO: 367457 - DNA, 201 bp, Homo sapiens
tgatgtgtcgtatttaagagtaagagcttacgttggctaacattttgtattgaactgtagaatggtcaatacttaattcctcatttgtaagttttctatcyaacaaaattattccaaaagttctcttttttgaactaaaaatatttcggctgaagtctttattaagatgtttagtataggcattggatattgattagcctg

SEQ ID NO: 367458 - DNA, 201 bp, Homo sapiens
aggctgaggcagggagaatcgcttgaacccgggaggcggatgctgcagtgagccgagattgcgccactgcactccagcctgggcgacagagcaagactccrtctcaaaaaaaaaaaaagaaagaaaaaaaaaaagaaaaaaatttgccgggcgtggtggttggtgcctgtaatcccagctactctggtggctgcggcagga

SEQ ID NO: 367459 - DNA, 201 bp, Homo sapiens
ggaattatgggagctacaattcaagatgagattctggtggggatatagccaaaccataacaagcattctataaagtaaaaaaaagctacaagaaagaaagrgaaagaaaggaagtacccaagatagtactttaaaaacactgttatttcccatataaaagagcttatttcctaatgcatatattaatattaaaagttaaat

SEQ ID NO: 367460 - DNA, 201 bp, Homo sapiens
ttaagacaatgcacctctgagcaaataccgcattacaaggctttttatctaagtcttgctatctggtacatcaggtcctcctctcctgttctctttttttstttgtcttggctattttggtccttagcatttccatttgaaatctaggatccagtttatctgtagaatctctcgaagtttaaatatagacaatcattttgg

SEQ ID NO: 367461 - DNA, 201 bp, Homo sapiens
cagaaattattcgttacatatttgcttatttggacatacagtatgaagaccacagaatagaacaagctgactggcctgaaatcaaatcaagtaagtagcamaaataataaatgtaggaaaaatatgctttcagaaccttttgtttttcctcagggaaatgaaaaaaaaatcaaggttttcgaagctcatgtagctttaaat

SEQ ID NO: 367462 - DNA, 201 bp, Homo sapiens
cccaggaagcacagggggttgagggatttccctttcctagccaaaggaagccatgacagactgtatctggaaaattgggacactgccacccaaatactgcrtttttccaatggtcttagcaaatggcacaacaggagattatatcccacgcctggctcagtgggtcccatgcccacggagccttgctcactgcttgtgcag

SEQ ID NO: 367463 - DNA, 201 bp, Homo sapiens
ttcacgaccctagcaagtagaactgagtttcaaacccaggtcagtttaataccaggctcaagctatttgcactagacaatgccaaaacaacactactatgrtaacaggcatattaacaatgaattgccacagcctttggaagcatgagctccttaaaagtcattgcccttataaccattctttttcttagcagagacctct

SEQ ID NO: 367464 - DNA, 201 bp, Homo sapiens
tctgtattttcttaatatttccatagattttcagagttgaaaggaatcttaaagttcatgatggttaggatatagtttcaaatgttttaatagacaaagaygcaatgtaaaattttcttagaaaggacagaaatttcatttacacaaaaccccaagtgggtatcatgattttgctccatacagttgtcaaagattaggttt

SEQ ID NO: 367465 - DNA, 201 bp, Homo sapiens
taatgtctccagtaatctcaagagatgccataaagttttccaaaaaattctgaagaaaaatattgaggcatctctagagggctcttaaaataatccctccytttttctttttccagaattgcaccatgccaaactacaaactcacttattttaatatgagggggagagcagaaattattcgttacatatttgcttatttgg

SEQ ID NO: 367466 - DNA, 201 bp, Homo sapiens
ccatataaaagagcttatttcctaatgcatatattaatattaaaagttaaatcttctgcagtggatagctatgttcatatgagtttatatgtctaagtttytatccagggtatttattagtcgtttatgtgttctttgataaaccgtataggttatttttcaaacagaattctaaatgagctttttatctatctgctgaat

SEQ ID NO: 367467 - DNA, 201 bp, Homo sapiens
tgttctaagtagtgccaagagagagtcatgatctgatttcaaccaagtttccccgtatgtaattagatagtgatttataattttggttttgaaatatcctstaatgtctccagtaatctcaagagatgccataaagttttccaaaaaattctgaagaaaaatattgaggcatctctagagggctcttaaaataatccctcc

SEQ ID NO: 367468 - DNA, 201 bp, Homo sapiens
gtggagttctccaggttttctgcacagctgtcatcattggaattccctttgctgttattccagtgatgccattctatggagctggagtcctgttcctggakgctgccttctttctttgtttactccattgtttatttgggggcacatcctctagtattccaaaagttaaaatgaaggcttgatgacagcagatatgattat

SEQ ID NO: 367469 - DNA, 201 bp, Homo sapiens
ttgtttgtttttctattttgtcactgggatagctgaagtgcacagagtttaggtaatttttccagtttcacgaccctagcaagtagaactgagtttcaaayccaggtcagtttaataccaggctcaagctatttgcactagacaatgccaaaacaacactactatgataacaggcatattaacaatgaattgccacagcct

SEQ ID NO: 367470 - DNA, 201 bp, Homo sapiens
ggcaggaatgattggcagtagctctctcgttttagcaaggagcaccagcttcactccacaacatctggacacagaagccagggccagaaaaaatggttttkctaggaattaccatcaccgtcacttcctgaacctgggagcttctagataggcaaccagttatttccaggtcatcctcttcccactagactccaggaatat

SEQ ID NO: 367471 - DNA, 201 bp, Homo sapiens
ttctcactcataggtgggaactgaacaatgagaacacttggacacaggatggggaacatcacacactggggcctgttgcagggtgggggtagaggggaggsatagtattaggagatatacctaatgtaaatgatgagttaatgggtgcagcacaccaacatggcacatgtatacctatgtaacaaacctgcacattgtgca

SEQ ID NO: 367472 - DNA, 201 bp, Homo sapiens
tcatgttacttttcttctcattattcttaaagtgatattttctccttctcctaggagcagatgttcaatgagctgctcacgtataatgcgcctcatcttaygcaagacttggacacatatttaggggggagagaatggcttattggtaactctgtgagtatgttttatatcttaaaaaattcaagcaaataaaaggacaaa

SEQ ID NO: 367473 - DNA, 201 bp, Homo sapiens
tggagagaggacagggtgggcaggtagtcttcccctgaagtcaagtcatctctcctccgaagtccagccatctctctaaagtcaagtcaactctctccagytgggccgcttttctttcctctaccaactgagtctgaagtatttataggcacacgattgtggggcagggtgggctataggtagttttggaaaaggcaacat

SEQ ID NO: 367474 - DNA, 201 bp, Homo sapiens
ctgagcttgctctgatttttaatatctttctcaaaacatggctcatagaactaagaaaacagctgagcaagggttccaagtgacctcagtgtgaagcctamctttaccaggtgtgtgaccagggcaatttatataacctcttaacttcatcccttcatttataaaatgagatagttatcacctacttcataaggttgttgt

SEQ ID NO: 367475 - DNA, 201 bp, Homo sapiens
ggtgtagttaccctcttaatctgaatatttttataaataaagtttgaatttggttatttcactgtaatgttctaagtagtgccaagagagagtcatgatcygatttcaaccaagtttccccgtatgtaattagatagtgatttataattttggttttgaaatatcctctaatgtctccagtaatctcaagagatgccataa

SEQ ID NO: 367476 - DNA, 201 bp, Homo sapiens
tgatgggaaacctctgaggcacagaaagaaaaggaagcgaagcagctgatgtggctggaatcagcttggagccgggagggactccccattgtggggaaaargtaagagagatatccccagtggtccacatttactccgcagactcctgcaattctagccatgggagagcccccttgggccttatgggccctgagactagga

SEQ ID NO: 367477 - DNA, 201 bp, Homo sapiens
taatgttctaagtagtgccaagagagagtcatgatctgatttcaaccaagtttccccgtatgtaattagatagtgatttataattttggttttgaaatatyctctaatgtctccagtaatctcaagagatgccataaagttttccaaaaaattctgaagaaaaatattgaggcatctctagagggctcttaaaataatccc

SEQ ID NO: 367478 - DNA, 201 bp, Homo sapiens; identical to SEQ ID NO: 79768

SEQ ID NO: 367479 - DNA, 201 bp, Homo sapiens
cccaaagtgccgggattacagacgtgagccactgcacccggcctgatttttctcttttaatgtagtttattatacagatggatgttctgatataacatctkgtattcctgagacaaacagaaaatataattatgcaaataactacagaaatgtcatgtaaaaagtacagcttcattaatgagttacaactgttgaaagaat

SEQ ID NO: 367480 - DNA, 201 bp, Homo sapiens
caaagacaggttggcatggcactcacattcctcttgcatgtgcccagcccttggctgtccttacccagatgtcctcataaactctgagctgtgtcacaagrgcaaacaaaacaggcaaaatatcaaatattacacattaccagtgactaaaaggagggtaaaatcatcttaaagtgggaagttttttttgctccatgctct

SEQ ID NO: 367481 - DNA, 201 bp, Homo sapiens
cttttctgactgatgccaactgaggtgagcagatctgtggcaagcaccacatggttatcgactcactgcccttcaatgggattacaaattctgtgtaagcwgcagaaagactcataactaatgttttctttaaaactatgaacatactgaccacagagcactttatagaacaagggaaagaacataaagtcaaaataatga

SEQ ID NO: 367482 - DNA, 201 bp, Homo sapiens
gctactcaggaggctgaggcaggagaattacttgaacctgggaggtggaagttgcagtgagctgagatcgcaccactgcactccagcctcagtgacagacygagactccacctcaaaaaaaatttttttaatccataagctacagactgcacattcttcttagcagcacacaggatgggccatatgttaagccacaaaaca

SEQ ID NO: 367483 - DNA, 201 bp, Homo sapiens
tgtataaaattacctttggctatgtgtataaggtgtaaatgaaacataaatgaatttggtttttagatttaggccccatcccctatatatctcattatgtrtatgcaaacattccaaaatctgaaaaagtctggaattcaacacaattctgttcccaagcatgttggataagggatctcaacctgaaataacaatttttct

SEQ ID NO: 367484 - DNA, 201 bp, Homo sapiens
taagtacttaacacaaactttagcaaatgtgcaaaattattgaaaatactgtataaaattacctttggctatgtgtataaggtgtaaatgaaacataaatkaatttggtttttagatttaggccccatcccctatatatctcattatgtatatgcaaacattccaaaatctgaaaaagtctggaattcaacacaattctgt

SEQ ID NO: 367485 - DNA, 201 bp, Homo sapiens
tttgttccattatagtagaattccagtaattcagatgttggttggctcttttcctatttcccgtctcttggcttttctgcattacttttagaaagcatttmtcatcagtccttgagttctaaatttctgatattgtgcttctaaatttataaaaattcttaggctgttttccgctaagaatggggaagggacagctgtcta

SEQ ID NO: 367486 - DNA, 201 bp, Homo sapiens
caaactttttaatatagtaaattaaacatattgatgggcctctctctattccacagatttggctggaaacacagaaatggaacaatgtcatgttgatgctrttgtggacactctggatgatttcatgtcatgttttccttgggcagagaaaaagcaagatgtgaaagtaatgtgatccatttgctattcctagtattaatt

SEQ ID NO: 367487 - DNA, 201 bp, Homo sapiens
tctaacaacttaaacaaaacttataaaatataaatattccactacaagttgtcaagtgttcctttaaaaatatttaagaatttcatgattccataaaatcmtgctttgttttcacgatgatcagtaaaaatggaagtaatataacttctggttttgttatgaagttaattatttgctcatttcattttaagctctcccatt

SEQ ID NO: 367488 - DNA, 201 bp, Homo sapiens
agtcatcctttctgcttccttttcaccaagctcccaatattgtgatgtgaaaattttttggttaattatcctgtgattagtaggctatgcaaataatgcayagaactgtgcactgtagtatgcttttatattttctttctcacttttcttccttaaaattagtaattgctttcttttgcttcttttcacttttactgctga

SEQ ID NO: 367489 - DNA, 201 bp, Homo sapiens
tagataaccactaaatcacaaagataaataagcctttatctatcaatgaatacaaatgatttaaattccccaattaaaaagatacaaagtggctgaatcawaaacaaaatacaagccaactatctgctgcctacaattaactctgttcacctgaaaagacacacatagactaaaaatgaaggaatggaaaaaaatattcca

SEQ ID NO: 367490 - DNA, 201 bp, Homo sapiens
taacacctcaatgtcaatattagacagatcaatgagaaagaaggttaacaatgatgtccaggacttaaagccagctctgcacaagcagacctaacagacawctacagaactctccaccccaaatcaacagaatatacattcttctcagcaccacaccacacttattccaaaattgaccacatagttggaagtaaagcactc

SEQ ID NO: 367491 - DNA, 201 bp, Homo sapiens
gatctcaacctgaaataacaatttttctcttacatagtcatcctttctgcttccttttcaccaagctcccaatattgtgatgtgaaaattttttggttaawtatcctgtgattagtaggctatgcaaataatgcacagaactgtgcactgtagtatgcttttatattttctttctcacttttcttccttaaaattagtaat

SEQ ID NO: 367492 - DNA, 201 bp, Homo sapiens
agactttaacacctcaatgtcaatattagacagatcaatgagaaagaaggttaacaatgatgtccaggacttaaagccagctctgcacaagcagacctaayagacaactacagaactctccaccccaaatcaacagaatatacattcttctcagcaccacaccacacttattccaaaattgaccacatagttggaagtaaa

SEQ ID NO: 367493 - DNA, 201 bp, Homo sapiens
ttctttaggatttacacatttccatatttctataggataaataaatatgacttcctctgattgaccaattgtaaatgatttctcaggacttatgatagtayaggttaagcattcctaacctgaaagtctgaagtccaaaatgccccaaactccaaaacgttttaagtaccaagataacagcacaagtggaaaattccacat

SEQ ID NO: 367494 - DNA, 201 bp, Homo sapiens
ttgtaccccttcacattaactcctccccagatgcaacccttttaaaactttgtttagcagtttctttaggatttacacatttccatatttctataggatawataaatatgacttcctctgattgaccaattgtaaatgatttctcaggacttatgatagtacaggttaagcattcctaacctgaaagtctgaagtccaaaa

SEQ ID NO: 367495 - DNA, 201 bp, Homo sapiens
aggtgccttagaaagttccttaatatcaaaagaatatgtataattttaaaataccaaattatattttaaaagtttaaaataaagtacagcaattccctatygtaccccttcacattaactcctccccagatgcaacccttttaaaactttgtttagcagtttctttaggatttacacatttccatatttctataggataaa

SEQ ID NO: 367496 - DNA, 201 bp, Homo sapiens
ctctgagctgtgtcacaagggcaaacaaaacaggcaaaatatcaaatattacacattaccagtgactaaaaggagggtaaaatcatcttaaagtgggaagwtttttttgctccatgctctgaaggttggggtgtagttaccctcttaatctgaatatttttataaataaagtttgaatttggttatttcactgtaatgttc

SEQ ID NO: 367497 - DNA, 201 bp, Homo sapiens
cctctagtattccaaaagttaaaatgaaggcttgatgacagcagatatgattatgacagatggcatggatatgtctatcttgtgagtcacactgcttcgckctggtatggttgtcctagatacttggtcacagttgtcatcctgagatctttattattacccaggattttttttttttttttatgttttcctgggttcatt

SEQ ID NO: 367498 - DNA, 201 bp, Homo sapiens
ttattacccaggattttttttttttttttatgttttcctgggttcattctcctgttttctttccttgcttttgtggaacagtcctctaagagcttactggkcataggaaataaaagtttggggcttttggggccttatttgtttaaagatgtttttattttattctcaaacttgtttatagtttgactgggtgtagaattc

SEQ ID NO: 367499 - DNA, 201 bp, Homo sapiens
ggcctccactgtgagacaaaccccagccacatctccagcacacaagaacttccaaatgcctgaactgcagcggacaggcgttcctccagaacctcctcccmcaggagcttgctacaagtgccagaaatctgaccactaggccaaggaatgcctgcagcccaggattcctcctaagacatgtcccatctgtgcgggacccca

SEQ ID NO: 367500 - DNA, 201 bp, Homo sapiens
agattttggaatatttgcattatacttactggttgagcataccaaatctcaagaaccgatatctgagatgttcccctgagcatttcctttgggcatcatgygcatgctcaaaacgtcttggattttggagcattttggatttttggactagggaggctcaacctgtatgtaaggatgcttttgcaaattgtattctaaata

SEQ ID NO: 367501 - DNA, 201 bp, Homo sapiens
aatttacagcaagaacaaaggttaaacttctttaaataaacctttttaaaaaatagatttgactttggaaccatattttatataattatatattggcagcraaaacttaaaaagctatcctaaaaatcaaagcaaagtaaatgaacctaactatgcaaaagaggtgcatagagaacacacagaatacatatgtactctact

SEQ ID NO: 367502 - DNA, 201 bp, Homo sapiens
cgaaaacttaaaaagctatcctaaaaatcaaagcaaagtaaatgaacctaactatgcaaaagaggtgcatagagaacacacagaatacatatgtactctaytagagaagaactatttcaagaagtatcatttgtaaaacacactaatctgattatacatctaagacagatatctcttagcttagaacaacaaaaaatcata

SEQ ID NO: 367503 - DNA, 201 bp, Homo sapiens
caaaacttataaaatataaatattccactacaagttgtcaagtgttcctttaaaaatatttaagaatttcatgattccataaaatcatgctttgttttcaygatgatcagtaaaaatggaagtaatataacttctggttttgttatgaagttaattatttgctcatttcattttaagctctcccatttggaaaaatcccca

SEQ ID NO: 367504 - DNA, 201 bp, Homo sapiens
tgagtaaatgcttataaagcattcagcgcattttctgcctcgtaataagaaggtcacaaatgatagctgcttctgctaccactattaatgctatcattatycttattatctggaggcagattgtggaggacttttggaggccaaacagagacactaagatttgaagaggtaggaagtagggagccaaggaatgttattaag

SEQ ID NO: 367505 - DNA, 201 bp, Homo sapiens
cagaggctggcacacagaaccactatgtatgtgtaagccattactgttaatgcgctgtctctacatcctcagtgctaggctgcctggaaacactatcctgygacttttggttgttgaagcctacaccaaatctaccttcccagtggaatgcatgcttgcccaccttgaaatccctgatgcagatcaccttgtccagggagc

SEQ ID NO: 367506 - DNA, 201 bp, Homo sapiens; identical to SEQ ID NO: 79774

SEQ ID NO: 367507 - DNA, 201 bp, Homo sapiens
gagtccaggagttcgagaccagcctggacaacatggcaagacgtcgtgtctacaaaaagtacaaaaatgagctggatgtggtggcgtgcatctgtggtccyagacacttgggaagctgagatggagggatcacttgagccccaggagttcgaggctgcagtgagctgtaatcacaccactgtacatcagctgggcgacaga

SEQ ID NO: 367508 - DNA, 201 bp, Homo sapiens; identical to SEQ ID NO: 79775

SEQ ID NO: 367509 - DNA, 201 bp, Homo sapiens
gggaggccgaggcaggcggatcacgatgtcaggagatcgagaccatcctggctaacacggtgaaactccatctctactaaaaatacaaaaaaaaatagccrggcgtggtggtgggtgcctgtagtcccagctactcgggaggctgaggcaggagaatggtgtgaacctgggaggcggagcttgcagagagccgagatcgtg

SEQ ID NO: 367510 - DNA, 201 bp, Homo sapiens
gctgagatgagaatcacttgaacccaggaggtggagattgcagtgagctgagattgtgccactacactccaacctgcatgacagagtgagactctgtctcaaaaaaaaaaaaaaagaaaagagaagaaaaagaaagtcatttcaggtgaggatcaggaacctggctggggagacaaggtggggagcaagaggcattattca

SEQ ID NO: 367511 - DNA, 201 bp, Homo sapiens
ggcaggcggatcacgatgtcaggagatcgagaccatcctggctaacacggtgaaactccatctctactaaaaatacaaaaaaaaatagccgggcgtggtgrtgggtgcctgtagtcccagctactcgggaggctgaggcaggagaatggtgtgaacctgggaggcggagcttgcagagagccgagatcgtgccactgcact

SEQ ID NO: 367512 - DNA, 201 bp, Homo sapiens; identical to SEQ ID NO: 79776

SEQ ID NO: 367513 - DNA, 201 bp, Homo sapiens
tactaaaaatacaaaaaaaaatagccgggcgtggtggtgggtgcctgtagtcccagctactcgggaggctgaggcaggagaatggtgtgaacctgggaggyggagcttgcagagagccgagatcgtgccactgcactccagcctgggcgacagagcgagactctgtctcaaaaacaaacaaacaaaaaaaaacaaacccac

SEQ ID NO: 367514 - DNA, 201 bp, Homo sapiens
gccgtggggtttcaaagcatctggggatgcagacacttccatcttcctcctgcttcctgccaggagtgcaaatcagacacatttcccaaatccaaaaacawaccaccgggaaagcagtgaatttacacggtggaatttgtctcacttgagaggggcagaaatagctgccctgcacggtggaaatgtcgaaggtcatataag

SEQ ID NO: 367515 - DNA, 201 bp, Homo sapiens
tgcccctacagtcactttcctgtgggggctgccctgctcacccaggaggggagaatcttcaaaggtaaaggtgggcaccccagggtcccccagcccagcarcctgggtggtgggtcagaggaagatgtacaggaagaggcgcagaggcacaggcagtggcaagagcgcggctctgtcccttcttcccccagtctccgctgg

SEQ ID NO: 367516 - DNA, 201 bp, Homo sapiens
ctgccaccatgccaggctaatttttgtatttttagtagacagggtttcaccatattggccaggctgatctcaaactcctgaccttgtgatccgcccgcttyggcctcccaaagtgctgggattataggcttgagccaccatgcccagcctcatcatgtgtttttataggccaggcttgtggcttctttggcgatccaattc

SEQ ID NO: 367517 - DNA, 201 bp, Homo sapiens
tatgggtatccatggcccatcaggctgactctgaagcccgtgctcctcacggctgcctctctgtctttgtggttctgtaagttggacaaaattattttcarccatggaggaaacataatggtactttggcatgtggatgctgcttgtaccgtgggagtttctgcttttggagttgtgttttgggagaaagggggttgtttt

SEQ ID NO: 367518 - DNA, 201 bp, Homo sapiens
gctgcctgcccggggtaccaacatggcccagaagcgtcctgcctgcaccctgaagcctgagtgtgtccagcagctgctggtttgctcccaggaggccaagmagtcagcctactgcccctacagtcactttcctgtgggggctgccctgctcacccaggaggggagaatcttcaaaggtaaaggtgggcaccccagggtccc

SEQ ID NO: 367519 - DNA, 201 bp, Homo sapiens
tgcccctgttccagcaacacaacgtgatacagactcctgtcctacaagatataacagaaaggcagcattgaaacataaagcggggggaacctgagccaggygcggtggctcacgcctgtaatcccagcactttgggaggccaagatgggcagatcacgaggtcaggagatcgaaaccatcctggctaacacagtgaaaccc

SEQ ID NO: 367520 - DNA, 201 bp, Homo sapiens
atgggcagatcacgaggtcaggagatcgaaaccatcctggctaacacagtgaaaccccgtctctactaaaaatacaaaaaaattagctgagcgtggtggcrgatgcttgtagtcccagctacttgggaggctgaggcaggagaatggtgtgaacctgggaggcagagcttgcagtgagccgagatggcgccactgcactcc

SEQ ID NO: 367521 - DNA, 201 bp, Homo sapiens
atctgtgaaatggaggagactggtctgttacagggtcttaagaaacgatttctgtaaagttcctgacacagggtatgtaatacattcaaactattatatakttttgttttgttttgttttgttttgttttgtttgagaacaagtctctctgtgccgcccaggctggagtgtagtggcaagatttcggctcactgcaacctc

SEQ ID NO: 367522 - DNA, 201 bp, Homo sapiens
ttctgagtaagtaaagcccgaggtgcactcaaggagaagggctccagtatccgatagccttccctgtcaccgaggtgtgtcctggcttccttaaggcttcyggaggaataaatgacggttggcgggcgcctgtagtcccagctacttgggaggctgaggcaggaacatggcgtgaacccgggaggtggagctcgcagtgag

SEQ ID NO: 367523 - DNA, 201 bp, Homo sapiens
gaagggtacattttattccaagaataaaggaaactgaagtgtacacttttttttttttgagacggagtctcactctgtcacccaggctggagtgcagtggyagagtctcagctcactgcaacctccgcctcctgggttcaagcaattctcctgcctcagcctcccgagtagctgggactacaggcgccagctaccatgccc

SEQ ID NO: 367524 - DNA, 201 bp, Homo sapiens
actgaagtgtacacttttttttttttgagacggagtctcactctgtcacccaggctggagtgcagtggtagagtctcagctcactgcaacctccgcctccygggttcaagcaattctcctgcctcagcctcccgagtagctgggactacaggcgccagctaccatgcccggctaatttttgtatttttagtagagactggg

SEQ ID NO: 367525 - DNA, 201 bp, Homo sapiens
ggtaaggtgccaggtgctggggatatcacagtgaacagggatgacacaatccctgcccccatggcagtcccctcatattgcataggtgatgactgaaggckcgagcctcatccagtggaaggaaggaatggaggagataaacaggactgtggcccatttgcattgcagggaaagacctggtgtcaccagagaaagggttgt

SEQ ID NO: 367526 - DNA, 201 bp, Homo sapiens
atgctttccagcactggaactggtgttctgcttggaacagcaggaggtcagacagcctcatcgtgcctccagagccaggggacccccatgccagaatgctygggtcctttcttgttttaaaacccacaatagtcgggcatggtggctcacgcctgtaaccccagcactttgggaggccgaggcaggcggatcacgatgtca

SEQ ID NO: 367527 - DNA, 201 bp, Homo sapiens
gccatgttggccaggatggtctcgaactcctgacctcaggtgatccatccgcctcagcctcccaaagtgctgggattacaggcatgagccaccacgcccarcctgcacatactatttatttccttcgcctacgacacagagaaacccagggcttccgaatagcatctctgcctcttcatcacactgaacctatctcctcac

SEQ ID NO: 367528 - DNA, 201 bp, Homo sapiens
ctgtcacccagactggagtgcagtggcatgatctcggctcactgcaacctctacctcccaggttcaagcaattctctgcctcagcctcccaagtagcaggkattacaggcatctgccaccacgcccggctaatttttgtattcttagtagagacagggtttcaccatgttggccaggctggtcttgaactcctgactttgt

SEQ ID NO: 367529 - DNA, 201 bp, Homo sapiens
agcaactctcccatggccctaaccatgcctttgttacggcatttgtgtgaaattttatctccccctccagagggtaagctccaggaattgtccgattggtytttgttgctcctttcccatgcctgcctgacatagagaaggattttggtcgacatgtgtggaatgaagtgaaaaataacccccaaaaagcttaagaggccc

SEQ ID NO: 367530 - DNA, 201 bp, Homo sapiens
atttggggttcaaatcctgattctgccacttcactaactctgtggccttgggcaagtcgtttcacctttcatgatctacagcatgcaggtgataagagcgmctgcataccccggccccttacagggttgttgggggattaaatgaactaatccacttaaggtccttagcacagaggctggcacacagaaccactatgtatg

SEQ ID NO: 367531 - DNA, 201 bp, Homo sapiens
taccaaaggcagagtgtgtagatttggggttcaaatcctgattctgccacttcactaactctgtggccttgggcaagtcgtttcacctttcatgatctacmgcatgcaggtgataagagcgcctgcataccccggccccttacagggttgttgggggattaaatgaactaatccacttaaggtccttagcacagaggctgg

SEQ ID NO: 367532 - DNA, 201 bp, Homo sapiens
catttttccagcacccaactgctgtactctaggtattcagctcagtttccctgagcccaagatgcactcattatcgcactcatgatttgttaaattgagarcgtttgtggatttagaggatgaatgagaagtaccagctcccttgttaacatcagatgggtctgagcaacctcagagagaacccctctcaggtctttaagg

SEQ ID NO: 367533 - DNA, 201 bp, Homo sapiens
atcgacttttaaacaaaactaagtatcactagcaatgattagcaaatgtccttatttacacaaaacctgccatttttccagcacccaactgctgtactctrggtattcagctcagtttccctgagcccaagatgcactcattatcgcactcatgatttgttaaattgagagcgtttgtggatttagaggatgaatgagaag

SEQ ID NO: 367534 - DNA, 201 bp, Homo sapiens
aaagcccgaggtgcactcaaggagaagggctccagtatccgatagccttccctgtcaccgaggtgtgtcctggcttccttaaggcttccggaggaataaakgacgctgtgctgagaacattttgtgcagataggccaagatcaggatgtgaattgcactttatgaaaaaaaagagaaaaggagggaaataactcaatttca

SEQ ID NO: 367535 - DNA, 201 bp, Homo sapiens
catgcctgttggtctttagggacatctgggtgcataggtcacattctgtgaggtaattatctcttcactcatagtggagttaattcctgtggtagagctayagcacctttctggctaaaatacagaaagagagctacaccttttagcacctttctggctaaaatgcagaaatgcaggggtttagtgcaaggccagtgggga

SEQ ID NO: 367536 - DNA, 201 bp, Homo sapiens
tcccaggactttgggaggccaaggctgacagatcacatgaggccaggagtttgagaccagcctggccaacacagcaaaaccccatctctagtaaaaatagaaaaaaattacctgggcatggtggcacacacctgtaatcccaggctacttgggaggctgaggcacaagaattgcttgaacccaggaggcggaggttgaagt

SEQ ID NO: 367537 - DNA, 201 bp, Homo sapiens
ggaatgttcctaccctgccgactgccccagaccgcgctcaaatgtggcttaaatccagggtctttcaatgcttagaggactgggatgaggaaggaagttgratgggaggcaggaaggggaggccataaatcaaaaacatcaacagtcctggggtgcaggcagggagagcgttcgtgctttcccagcctcggatatgtctgg

SEQ ID NO: 367538 - DNA, 201 bp, Homo sapiens
tggcaagatttcggctcactgcaacctccgcctcccaggttcaagcgattctcatgcttcagcctcctgagtaattgagactacaggtgccggccagcacrcctggctaatttttgaatttttagtagagacagggtttcaccacgttgaccaagctggtctcgaacttctggcctcaagtgatctgcccacctcggcctc

SEQ ID NO: 367539 - DNA, 201 bp, Homo sapiens
ccactcaaatctcatcttgaattgtagctcccataattcccacatgtcatgggagggacctggtgggaggcaattgaatcatgggggcgggtctttcccaygctgttctcgtgatagtgaataagtctcatgagatctgatggttttataaatgggggttccctcacacaagtcctctcttgcctgttgccaggtaagaca

SEQ ID NO: 367540 - DNA, 201 bp, Homo sapiens
aacctccgcctcccaggttcaagcgattctcatgcttcagcctcctgagtaattgagactacaggtgccggccagcacgcctggctaatttttgaattttyagtagagacagggtttcaccacgttgaccaagctggtctcgaacttctggcctcaagtgatctgcccacctcggcctcccaaagtgctgggattataggc

SEQ ID NO: 367541 - DNA, 201 bp, Homo sapiens
acatccctttgctcttccttcctcttccgccatggttgtgaggcttccccagccatgtggaactgtgagtccattaaacctccttttttattttattttatttttttttttttttgagaccgagtctcgctctatggccaaggctggactgcagtggtgtgatcttggctcactgcaacctctgcctcccgggttccagag

SEQ ID NO: 367542 - DNA, 201 bp, Homo sapiens
catccctttgctcttccttcctcttccgccatggttgtgaggcttccccagccatgtggaactgtgagtccattaaacctccttttttattttattttatttttttttttttttgagaccgagtctcgctctatggccaaggctggactgcagtggtgtgatcttggctcactgcaacctctgcctcccgggttccagaga

SEQ ID NO: 367543 - DNA, 201 bp, Homo sapiens
acacgtaggcagtgtcttacaccacacctgctgagtccaaaccatgggaggctcctctcctagaccctgcatcctgaaagctgcgtacctgagagcctgckgtctggctgcagggacacacccaaggggaggagctgcaatcgtgtctggggccccagcccaggctggccggagctcctgtttccgctgctctgctgcctg

SEQ ID NO: 367544 - DNA, 201 bp, Homo sapiens
tgagaccgagtctcgctctatggccaaggctggactgcagtggtgtgatcttggctcactgcaacctctgcctcccgggttccagagattctcctgcctcaagccttctgagtagctgggattacatgtgcttgccaccacgcctggctaatttttgtatttttaggagagatgaagtttcaccatgttggccaggctcat

SEQ ID NO: 367545 - DNA, 201 bp, Homo sapiens
gaccgagtctcgctctatggccaaggctggactgcagtggtgtgatcttggctcactgcaacctctgcctcccgggttccagagattctcctgcctcaagccttctgagtagctgggattacatgtgcttgccaccacgcctggctaatttttgtatttttaggagagatgaagtttcaccatgttggccaggctcatctc

SEQ ID NO: 367546 - DNA, 201 bp, Homo sapiens
cttcatcatggaggcattgggtaaattaagacagtgccaggttcttgggaagggccactaccatgggccaaagaatctaccagtgccccaggtcgaattgycctaattgccctgtccttctccccaccttgtttggagtaaccagttccttcctgctttggaatggggcaaacttcttactcaacacacgcaacaggaagt

SEQ ID NO: 367547 - DNA, 201 bp, Homo sapiens
ccgagtctcgctctatggccaaggctggactgcagtggtgtgatcttggctcactgcaacctctgcctcccgggttccagagattctcctgcctcaagccttctgagtagctgggattacatgtgcttgccaccacgcctggctaatttttgtatttttaggagagatgaagtttcaccatgttggccaggctcatctcga

SEQ ID NO: 367548 - DNA, 201 bp, Homo sapiens
gcattgggtaaattaagacagtgccaggttcttgggaagggccactaccatgggccaaagaatctaccagtgccccaggtcgaattgccctaattgccctktccttctccccaccttgtttggagtaaccagttccttcctgctttggaatggggcaaacttcttactcaacacacgcaacaggaagtgtctctgccagac

SEQ ID NO: 367549 - DNA, 201 bp, Homo sapiens
tcactgctgcactcctagcaccaatgacagtgcccagcactgctcagtaaatatttgttggttgaaatgagacaatgcatataaaatgctttgcagaatgyctggcacattctaggcacacattatcttttttttttttattttattttatttttatttttatttatttatttttatttttttttgagatggagtcttgct

SEQ ID NO: 367550 - DNA, 201 bp, Homo sapiens
cgagtctcgctctatggccaaggctggactgcagtggtgtgatcttggctcactgcaacctctgcctcccgggttccagagattctcctgcctcaagccttctgagtagctgggattacatgtgcttgccaccacgcctggctaatttttgtatttttaggagagatgaagtttcaccatgttggccaggctcatctcgaa

SEQ ID NO: 367551 - DNA, 201 bp, Homo sapiens
gcctgcaaagcaggtaaataagcaaggcaactctcatacaagggccagtatgcccctgttccagcaacacaacgtgatacagactcctgtcctacaagatwtaacagaaaggcagcattgaaacataaagcggggggaacctgagccaggtgcggtggctcacgcctgtaatcccagcactttgggaggccaagatgggca

SEQ ID NO: 367552 - DNA, 201 bp, Homo sapiens
tgctaacagcctgtgaaaggaaggtgattaatgctatccatttaacccctgcaaccctgaaaggcagagaaggaaacaggtttggaaagtttcagagctcraaatcacagagctgggattggaacccagacttcccctgactccaaaagctgttgctctgtggggagtgaaggatctctgagtaccgtgttgaaattcaga

SEQ ID NO: 367553 - DNA, 201 bp, Homo sapiens
tgcttagaggactgggatgaggaaggaagttggatgggaggcaggaaggggaggccataaatcaaaaacatcaacagtcctggggtgcaggcagggagagsgttcgtgctttcccagcctcggatatgtctggcaccttactgaggcttccacaacactaagtccacacctcctgcccactgacctaagtgttaatgctcg

SEQ ID NO: 367554 - DNA, 201 bp, Homo sapiens
cacctgctgagtccaaaccatgggaggctcctctcctagaccctgcatcctgaaagctgcgtacctgagagcctgcggtctggctgcagggacacacccarggggaggagctgcaatcgtgtctggggccccagcccaggctggccggagctcctgtttccgctgctctgctgcctgcccggggtaccaacatggcccaga

SEQ ID NO: 367555 - DNA, 201 bp, Homo sapiens
catcacctccaccttccagtctgtggaaggagaaaagaatggaagtaacaggcaagcaacctccttaccaaaagtatgatccagaaatttcccacatcacyttgggccacatcccattggccagaactgcatcatgtggccacactgtgctgcaagggagtctgggaattacagtccctagctgagcggccatgctggaat

SEQ ID NO: 367556 - DNA, 201 bp, Homo sapiens
accactgtgaccacattcaccctcaccctgacaagggacctgcagctgtggcacccagtagtgtctaatgacatccgtcaactctggacatgaatgcctgygatcctgagaacgagttaaatgactaatcactcctaacatgccaatgtaaataatgaagggaccagaaaatatgtgaggaaaaatatacaagaagataat

SEQ ID NO: 367557 - DNA, 201 bp, Homo sapiens
ttgagtagtggggcatgtgagtgtgccccctgccacaaccatctttctttctcattaactggcctattacatgttttacacaaagtaaaggaagatttctstctctgaggcctttctgaacttccagagcagacacatgtgaccatcctgagagactgggtcttctgcaagtgtggaaatgtgctttaacggcatgtcagc

SEQ ID NO: 367558 - DNA, 201 bp, Homo sapiens
gagatgacattccaccattgtgatttgttccttccccaccccaactaaccaatcgatcttgtgacattccacccccccaccaccgacaatgagtctcacgrtctccccaccctgcaccgtgtgacccccgcccctgcccacaagaaaacaaccccctttaactgtaattttccattacctacccaaatcctataaaactgc

SEQ ID NO: 367559 - DNA, 201 bp, Homo sapiens
aactcctgagcatagtgaattttgtctgttttgttcactgctgcactcctagcaccaatgacagtgcccagcactgctcagtaaatatttgttggttgaartgagacaatgcatataaaatgctttgcagaatgcctggcacattctaggcacacattatcttttttttttttattttattttatttttatttttatttat

SEQ ID NO: 367560 - DNA, 201 bp, Homo sapiens
gagctccctcatactgtgtgttccttctgcaattttttttttttttgagaaggattttcattcttgttgcccaggctggggtgctatggcacggtcttggstcactgcaacctttgcctcccggattcaagcgattcttctgcctcagcctcctgagtagctgggagctacaggcgcccaccaccaagcctgggtaatttt

SEQ ID NO: 367561 - DNA, 201 bp, Homo sapiens
tgtgggaggctgaggtaagaggacctcttgaggtcaggaattcaagactagccaagtaaacagtgagattctgtctctaaaataaacaaataatataaatwaattaaataataaaataaactaaataaattaaattagcttggccttatgatgcttgcccgtggtcccagctacccaggaggctgaagcagacggatctct

SEQ ID NO: 367562 - DNA, 201 bp, Homo sapiens
gctccctcatactgtgtgttccttctgcaattttttttttttttgagaaggattttcattcttgttgcccaggctggggtgctatggcacggtcttggctyactgcaacctttgcctcccggattcaagcgattcttctgcctcagcctcctgagtagctgggagctacaggcgcccaccaccaagcctgggtaatttttg

SEQ ID NO: 367563 - DNA, 201 bp, Homo sapiens
taggctaatgcaggagacagatgataaacaaggagcaaaataaataaacaaacagtggcgtttctgagtcaagagggctatagaggaaaacaaaatgcagaaaaaaaaaaggagtccagtgacaaacgggcaaacaggggacactgcagattggggtcagcaaacaacagcccttgggccaaatccagcctgctgcttgta

SEQ ID NO: 367564 - DNA, 201 bp, Homo sapiens
aacttcttactcaacacacgcaacaggaagtgtctctgccagacataccactggactctgctctcttctcagggtgcaacatagaaaatgcctgctacccrctgggcatctgtgctgaacggaccgctatccagaaggccgtctcagaagggtacaaggatttcagggcaattgctatcgccaggtgagtgggaaagccag

SEQ ID NO: 367565 - DNA, 201 bp, Homo sapiens
ctctccatgtggggcctgcaggcaagtcatgagagaggtaagcagcttctcttgctgtctggaatgcaaatatcttccctgtcgcaggctatgggagccamgccaagttgcaggcatggcaggcatggcaggcgtggagacacagctactgtcctgtttgcttggttggctgacttctaaggcctccctacgcttgcatga

SEQ ID NO: 367566 - DNA, 201 bp, Homo sapiens
ttttataaaagtcctcttgatggaaggctgcaatttcttcaactctaaaaacaaaacggtaagccaggtatggtggctcagcctgtaatcccagcaattarggaggcagaggcaggaggatcgcttgggtccaggagttcgagacctgcctgggcaacatagcgagaccctgttctccacaaaaaaaaaaaaaaaggaata

SEQ ID NO: 367567 - DNA, 201 bp, Homo sapiens
aggagagatgaagtttcaccatgttggccaggctcatctcgaactcctgacctcaggagatccgcctgcctcggcctcccaaaagtgctgggagtacaggygtgcgccacaacacccggcctaaacctcttttctttataaattacccggtctcaagtatgtctttattagcagcttgagaacagactaatacactgagta

SEQ ID NO: 367568 - DNA, 201 bp, Homo sapiens
gaggcttccccagccatgtggaactgtgagtccattaaacctccttttttattttattttatttttttttttttttgagaccgagtctcgctctatggccmaggctggactgcagtggtgtgatcttggctcactgcaacctctgcctcccgggttccagagattctcctgcctcaagccttctgagtagctgggattaca

SEQ ID NO: 367569 - DNA, 201 bp, Homo sapiens
tttgccttttttttttttttgagctagaaaattcaaggaaattacttgaatttgttacaggctccaaatacagttattcctctgcgtcttaagcatctagmactgaagtggaaaattccactctttcaataatggttagccatcttagctcaggccatgctgtggtttgaaggtttgccccctccaaaatgcataagcgta

SEQ ID NO: 367570 - DNA, 201 bp, Homo sapiens
attgcacagcatttcaggatgcagtacgtgggcaaaggcttccttcctttttttttatttgccttttttttttttttgagctagaaaattcaaggaaattrcttgaatttgttacaggctccaaatacagttattcctctgcgtcttaagcatctagcactgaagtggaaaattccactctttcaataatggttagccatc

SEQ ID NO: 367571 - DNA, 201 bp, Homo sapiens
tcgtagtattatttggtcctatcttattattatggatttctaacttagcaccatcccaatctctctcatgtatgttttgaagtaagcaaaggcaatagcaraaacagaattggtttgcctggtcagaagacagcctgctttctgggctgagagaagcaaaacaaaattgcacagcatttcaggatgcagtacgtgggcaaa

SEQ ID NO: 367572 - DNA, 201 bp, Homo sapiens
agaaagaaagataaaagaaaagaaagaaagcaaagaaaatggtccacggaaacggagtcagctccgggccttgcacatggctgaggctcagccggtgttcrtgcagcgccgggtgggtgatgggcagggaagagaaggaccacctgtaaccctaggggcactgcacgaggtgtccctgggctcgtggggagtatgcatctg

SEQ ID NO: 367573 - DNA, 201 bp, Homo sapiens
gctggtctcgaacttctggcctcaagtgatctgcccacctcggcctcccaaagtgctgggattataggcatgagcaaccgcattcagcctcaaactattayattgttttaaagttatcattatttcttctgcaagctgcaaaactaccaaaggcagagtgtgtagatttggggttcaaatcctgattctgccacttcacta

SEQ ID NO: 367574 - DNA, 201 bp, Homo sapiens
gccgaccatttcctctgtgccaggctttgtgttaagtgctttacacgagtgatctcaatttattctcacaacaggactatgagggagattctatcattagygatttacaaatgaagccagtgagcctcaaagaggttcagtccctttccccaattctcagagccagttgggcaaagagtcccagggcagaatgaaacctaa

SEQ ID NO: 367575 - DNA, 201 bp, Homo sapiens
cacgcctgtaatcccagctattcgggaggctgaggcaggagaatcgcttgaacccaggaggtggaggtcgcagtgagccaagatcgtgccactgccctccrgcctggatgacagagcaagactccatctcaaaaaaaaaaaaaaaagactaaaataaaaaagactccttttatcctcttgttatctgggaagcttttccta

SEQ ID NO: 367576 - DNA, 201 bp, Homo sapiens
cgaccatttcctctgtgccaggctttgtgttaagtgctttacacgagtgatctcaatttattctcacaacaggactatgagggagattctatcattagcgwtttacaaatgaagccagtgagcctcaaagaggttcagtccctttccccaattctcagagccagttgggcaaagagtcccagggcagaatgaaacctaatg

SEQ ID NO: 367577 - DNA, 201 bp, Homo sapiens
cttccccttccagtagcgtggcaccaccttctgacccacccctcagtgtgtccaccagtgagagtggttcctaagggagagtgtgaagcacacgtaggcastgtcttacaccacacctgctgagtccaaaccatgggaggctcctctcctagaccctgcatcctgaaagctgcgtacctgagagcctgcggtctggctgca

SEQ ID NO: 367578 - DNA, 201 bp, Homo sapiens
tgctgagtccaaaccatgggaggctcctctcctagaccctgcatcctgaaagctgcgtacctgagagcctgcggtctggctgcagggacacacccaagggraggagctgcaatcgtgtctggggccccagcccaggctggccggagctcctgtttccgctgctctgctgcctgcccggggtaccaacatggcccagaagcg

SEQ ID NO: 367579 - DNA, 201 bp, Homo sapiens
atcatctcacagtctctgtggggcaggattctgggctgagccagcttctatggctcgaggtctcttacaaagtggcaatgaatatgtcaggaagggcttcrgtctcatcggaagatttgactgggggtggatccacttcaaagctcactcagtttctggcaggattcagttcactgtgggctgttgctgttactattcagt

SEQ ID NO: 367580 - DNA, 201 bp, Homo sapiens
aatcagcccttgattctttcgaaagcctccacatcctttccagatggcacagaaagggccctcctacaatcccccggcacccacactgacccctcctgccrtgcttatcacatggtgtcatcactgtccacttatgtatctgcctctcccttgggactttgtgctgcagagggcaggagctgtgtcttgaatctttgtgcc

SEQ ID NO: 367581 - DNA, 201 bp, Homo sapiens
aggatgtatggattcctataactaaaccgtgggaagacctggagtgtagccagacctcaggggcaactggcactggccagactcctttctttccatctctmttctctcatccattcttctgagtgtccatttcagcctctctcattggtctcttccataatgaatggaaacatggcggcccacactcagtgtctcaagaga

SEQ ID NO: 367582 - DNA, 201 bp, Homo sapiens
ccgtgcttatcacatggtgtcatcactgtccacttatgtatctgcctctcccttgggactttgtgctgcagagggcaggagctgtgtcttgaatctttgtrccattgactttctcgtgctgtgacgtagcacctgcctggctcagaacaggcactcaataactgttgagtgactgattggatgaatgaatgagatgagtac

SEQ ID NO: 367583 - DNA, 201 bp, Homo sapiens
tacaaaaagtacaaaaatgagctggatgtggtggcgtgcatctgtggtcccagacacttgggaagctgagatggagggatcacttgagccccaggagttcraggctgcagtgagctgtaatcacaccactgtacatcagctgggcgacagaatgagaccctgtctcaaaaaataaaaaacaaaataagaaataaagtaaag

SEQ ID NO: 367584 - DNA, 201 bp, Homo sapiens
agccaggcgtggtggcacatgcctagagtcccagctactcgggaggctgaggcagaaggatggcctgagccccggtggtggagattgcaatgagccgtgakcacgccactgcactccagcccagcccgggcaacagagcaagactctctcaaaaaaaaaaaaaaaaaaaaggccaggcacggtggctcatacctgtaatct

SEQ ID NO: 367585 - DNA, 201 bp, Homo sapiens
gcaacagagtgagactgtctcaaaaaagaaaaaggaattctagagccaccactggcacccacgctccatacagctgggtttggaatgagcgctgtcctcaygtatgaccacgtgcaggtaaagagctttgaaggtgccaagggccatgagtagcttgggaggtcatctaggttctcccagcactgtggagtcaaggagtcc

SEQ ID NO: 367586 - DNA, 201 bp, Homo sapiens
tgtggggcctgcaggcaagtcatgagagaggtaagcagcttctcttgctgtctggaatgcaaatatcttccctgtcgcaggctatgggagccacgccaagytgcaggcatggcaggcatggcaggcgtggagacacagctactgtcctgtttgcttggttggctgacttctaaggcctccctacgcttgcatgagtcactg

SEQ ID NO: 367587 - DNA, 201 bp, Homo sapiens
taagtccacacctcctgcccactgacctaagtgttaatgctcgtctttagatgaaactacggaggtctcgagaggtgacatgacttgcccaaggtcacacrgggcgctggtggtgaaaccctgggctggaggttccccaaagccctgctctcttccttccacccactgtgctcagtgctggccagggtggtgacgtgtttg

SEQ ID NO: 367588 - DNA, 201 bp, Homo sapiens; identical to SEQ ID NO: 79780

SEQ ID NO: 367589 - DNA, 201 bp, Homo sapiens
ccctttgctcttccttcctcttccgccatggttgtgaggcttccccagccatgtggaactgtgagtccattaaacctccttttttattttattttattttwttttttttttgagaccgagtctcgctctatggccaaggctggactgcagtggtgtgatcttggctcactgcaacctctgcctcccgggttccagagattc

SEQ ID NO: 367590 - DNA, 201 bp, Homo sapiens
ggtggtcggtggagaatcttggaggagaaaagccagctgggctttcggagtccagcagtgagcagcgccctgcggggcgggggcgggtaatggaacctgarcccatctgagtctgctctaatctgttcctaaactcttttctttgatttattgcttttgtagaaaagttcatgtgagcaaaaattcaagcttgtttttgct

SEQ ID NO: 367591 - DNA, 201 bp, Homo sapiens
tggaaagccaccacgtggccttctcagccttcaggacacagtggatctgtgaatcaggaactgcctgatggggtatgacccaaatcaggaacagaccgagwctcagggcctgaatcttagcaattgtcctcagtccttgggagagactaatttgagtttgattctttgcttccccagtgacatgcaagatgattttatctc

SEQ ID NO: 367592 - DNA, 201 bp, Homo sapiens
acagagaaacccagggcttccgaatagcatctctgcctcttcatcacactgaacctatctcctcacccttaaagtggccattctgacatcttgatgtcagscctctgagcccaagctaagcggtcttaacccctgtgacctgcacatatacatccagatggcctggagcaactgaagaaccacaagagatgacattccacc

SEQ ID NO: 367593 - DNA, 201 bp, Homo sapiens
agcccatctgagtctgctctaatctgttcctaaactcttttctttgatttattgcttttgtagaaaagttcatgtgagcaaaaattcaagcttgtttttgmtaagcttagaggcattctccttcagggcagtaggggacatggtgtggaggtaccccttggtattattccctgtctgttgaggttctgtcgggtgtgactt

SEQ ID NO: 367594 - DNA, 201 bp, Homo sapiens
ggtaagctccaggaattgtccgattggtctttgttgctcctttcccatgcctgcctgacatagagaaggattttggtcgacatgtgtggaatgaagtgaaraataacccccaaaaagcttaagaggccctggctgcaacagctgtcacccagtaattccaagagttcactcggcatcctgggcaggagtccccaccctctt

SEQ ID NO: 367595 - DNA, 201 bp, Homo sapiens
tctccccctccagagggtaagctccaggaattgtccgattggtctttgttgctcctttcccatgcctgcctgacatagagaaggattttggtcgacatgtstggaatgaagtgaaaaataacccccaaaaagcttaagaggccctggctgcaacagctgtcacccagtaattccaagagttcactcggcatcctgggcagg

SEQ ID NO: 367596 - DNA, 201 bp, Homo sapiens; identical to SEQ ID NO: 79792

SEQ ID NO: 367597 - DNA, 201 bp, Homo sapiens
atgcagactgctaggcaaatattctaaaatatcctgtggcaaaaagttcagggcttaaagagagtaagcatctggattttactgcagctttagatttatgrcagaacgggagtgtgtaaagtgaaaatttatttaaaattttttttcctatcaacttcactgtgttttctctttggaagcagttcatcgtgtctctcttct

SEQ ID NO: 367598 - DNA, 201 bp, Homo sapiens
taaaggatttcagcagattttgataggtgaacatgaccatctctcagaacgggccttcagtgatggaacccattgaagaaggtttggcagaagctgatacrctggctgaagagcacttattgtgaggggtctttttggcaaactaagcactcatctgctgtactgtccctctccttcccctaatccaaacagcttcaggtt

SEQ ID NO: 367599 - DNA, 201 bp, Homo sapiens
gggcccccaccaggcagccctgcagcaggattgggggtctcgttcctgatgagaggtcccaacccaggttatcctgtccattggtgatgctgtgagccatsccaatgtcctttatcataaattccttcctgtttgaatcaaccacagttggttttcttgcttacaactgaagctggagtgatacaacggaactgagatgag

SEQ ID NO: 367600 - DNA, 201 bp, Homo sapiens
tcacggttttcaggagcccctgatgagagtggagctgaaaaaagaagcagggtgagaggcctggctggggactgggcaaggccctggaaaacaaccagggygcggggctggaggaggcctggaggagtgagggggagaaacagccgcccctcatcctcatgctctctgaaggggctcaggcttgcgctcgatggggcacga

SEQ ID NO: 367601 - DNA, 201 bp, Homo sapiens
gtctgctttggctcccagtgtcagaactggaatgctgggagtaacccggctccgtctagccccagaggagctgccaccgaggcctgtcaggtgtggagagttttttccaacgactggcttcataggccccactggagaccgttttggcatttgagccccaggtcctgtgcatcttacgtcagccccagtgttgaggatgcc

SEQ ID NO: 367602 - DNA, 201 bp, Homo sapiens
ccgcttctccgtgggtcacaccctgagcaggtgctggggccaggctctttggggagtgtcctctgagcatccctgcttcaggcctggcgcctgtggagacrgtggcggggcgggggtggtgcgccggggatcagggtaagaggaccagagctgggtggaggtggccgaccttttgtgactggggccttcacggttttcagg

SEQ ID NO: 367603 - DNA, 201 bp, Homo sapiens
gagtgccctgccctctggtcaagtggtgaggcttgtcttccccacgtcccaggtactggcctcccagggaaggaagcaaggcgcctggatggggctgggayccaggccacaaagggaggggcctgcttcccgcttctccgtgggtcacaccctgagcaggtgctggggccaggctctttggggagtgtcctctgagcatcc

SEQ ID NO: 367604 - DNA, 201 bp, Homo sapiens
gggggtggtgcgccggggatcagggtaagaggaccagagctgggtggaggtggccgaccttttgtgactggggccttcacggttttcaggagcccctgatragagtggagctgaaaaaagaagcagggtgagaggcctggctggggactgggcaaggccctggaaaacaaccagggcgcggggctggaggaggcctggagg

SEQ ID NO: 367605 - DNA, 201 bp, Homo sapiens
tgctggcctccccttcccgtccctcccatacctctatggctgccggcgggagtttggtgaggtctttgctaggagtggaagcgtaaagattcttaggtctscattctttgtcccctgcaggatgcccccgaggagcaactaaaggcgccactgagtgccctgccctctggtcaagtggtgaggcttgtcttccccacgtcc

SEQ ID NO: 367606 - DNA, 201 bp, Homo sapiens
ttcaggtgacgcccagcttgggggggggggcccagagcctggtagccagctaaggggcaggacccccactcaccccatagtcgggcttcagcaggagtccytcccagcaggccagccaggcctcagcctgctccagcctctgccgaagcttctgcaggccccagctctcggcacagcgttgccagcgcagggcccaagcct

SEQ ID NO: 367607 - DNA, 201 bp, Homo sapiens
tgcagcccctctgcccctcaccaaaacctgcggggctgcttggagtggaaagcagggagcagtgttcagaggcaaagcagccttcccagccgctcctcgtsgggggcctgtatttattaatttatttccctgactgttgcctcacttccttggaactcctgcctccacagcccctccagtggcagggacaggtcttgggtc

SEQ ID NO: 367608 - DNA, 201 bp, Homo sapiens
ccctggtgctatgagtttctcgccattttggcagggaggagcattgagccttctctgggccttctcccacatgttctccctgtagggaaccatccccatcytcctcaagcctggcactgatgtcgagaccagcccaggtgccacaggcatctggtgagcagccgagaggcaatggtgccaatccccctggagcacccccgg

SEQ ID NO: 367609 - DNA, 201 bp, Homo sapiens
tggagcaatactcagaactgttgcttcgagccgtggaacggcgtatggaacgcaaactctgagttctggaagcctgtcccaagtgaatgaatgctccagcrattccaaactgcagcccctctgcccctcaccaaaacctgcggggctgcttggagtggaaagcagggagcagtgttcagaggcaaagcagccttcccagcc

SEQ ID NO: 367610 - DNA, 201 bp, Homo sapiens
caaggcggtgtttccacggcagccctagctggtgtctgggttgaaatctccacgcgcacacatgcacacacacgcatgtctctcatactcactgacatatrtgcactccttctgaccctttctaacttacttctggctctcttcccagggtgaggggcgcctggaagttgaatttcgcctgcagagtctgtgagtcagggg

SEQ ID NO: 367611 - DNA, 201 bp, Homo sapiens
tacctctatggctgccggcgggagtttggtgaggtctttgctaggagtggaagcgtaaagattcttaggtctccattctttgtcccctgcaggatgccccygaggagcaactaaaggcgccactgagtgccctgccctctggtcaagtggtgaggcttgtcttccccacgtcccaggtactggcctcccagggaaggaagc

SEQ ID NO: 367612 - DNA, 201 bp, Homo sapiens
tttgggaaggaggcaggggccttaggtcctatgcacgaagcccaggccacaaggcctgggcctcctggtcctcagctgccctaaagcaaaaccctgggtcrgggtgggggtgtgggtgcctaagggctctgcaccatgaggctgaggcgtggactcctcacagagtggtgcgagttctctccctacgaggtcggcttcccc

SEQ ID NO: 367613 - DNA, 201 bp, Homo sapiens
aggggcctgcttcccgcttctccgtgggtcacaccctgagcaggtgctggggccaggctctttggggagtgtcctctgagcatccctgcttcaggcctggygcctgtggagacagtggcggggcgggggtggtgcgccggggatcagggtaagaggaccagagctgggtggaggtggccgaccttttgtgactggggcctt

SEQ ID NO: 367614 - DNA, 201 bp, Homo sapiens
acaaggcctgggcctcctggtcctcagctgccctaaagcaaaaccctgggtcggggtgggggtgtgggtgcctaagggctctgcaccatgaggctgaggcrtggactcctcacagagtggtgcgagttctctccctacgaggtcggcttccccaagtacggggccttcatcccctctgagctctttggctccgagttcttt

SEQ ID NO: 367615 - DNA, 201 bp, Homo sapiens
ctgagcaggtgctggggccaggctctttggggagtgtcctctgagcatccctgcttcaggcctggcgcctgtggagacagtggcggggcgggggtggtgcsccggggatcagggtaagaggaccagagctgggtggaggtggccgaccttttgtgactggggccttcacggttttcaggagcccctgatgagagtggagct

SEQ ID NO: 367616 - DNA, 201 bp, Homo sapiens
catgtgggtggggggcctcgtggcccggccggcgccccgtccccttctgcatgtctgaggccaccggcaaccgccgccccactccagatttgcccccgccytgttttgaaagccccttatttataacttttatactttgtgcaggtcgcggcgcttcctgcctcatcctcggctgcatggggcgggggcgctgtttttaac

SEQ ID NO: 367617 - DNA, 201 bp, Homo sapiens
tcactgtttccggaacacaggactactaggctcatttgtttggggtggtcagagctgccatgccatatgcaccttgcccgccgccgctgtggggaaaacgygaagaggagaggcagctggggccacatgttccacagagctggcgggaactggggacaagtgggagccccaccccttccaagttggtggagtgggagctcc

SEQ ID NO: 367618 - DNA, 201 bp, Homo sapiens
ccctctggcctttgggtgccaacgagcatgggagggaggccaagaggggctgagggcagctcagtgctggcctgcaggcacccccttggcacaaacagctygggtgccgtgaatggtggcaagaggcagacaggttcctgggtggaaggtggcgggtcccggtgaagcccgaccttcaagccagggaaggcctgaagcctg

SEQ ID NO: 367619 - DNA, 201 bp, Homo sapiens
tcctgggtggaaggtggcgggtcccggtgaagcccgaccttcaagccagggaaggcctgaagcctgggggctgggctgccggttccatggaccggaatggraacttttggtgctttttccggcccacccatggctgcccatggaccaataggcatgtacctcctcccctgtgagacccataaaaagcccctgactcagcca

SEQ ID NO: 367620 - DNA, 201 bp, Homo sapiens
ccttgcaggaaaccagcacctgtgttggcacctgaagctgcctgccccaccgcagcccacatgcctagctgtgcgcagtggccaaaccccacactcattcrctcacacacccctcgctgccccactcgcccttggcaggtgtgggatccaggccggtagcatgagctgagcacagcctgcagggccgagtgggcccaatgg

SEQ ID NO: 367621 - DNA, 201 bp, Homo sapiens
cgtgacagtttatggctgcggtgagctattattgcgtcactgcacttcagcctgggcaacagagcaagactctgtctcttaatctcagcgagtacaacagsaagatgtactgagccccagaccaccccatctctcaaggtgactgcttggatgggctggcgtgactgggaaggcctttgccactttgctgtctcctggatt

SEQ ID NO: 367622 - DNA, 201 bp, Homo sapiens
tcagctgcccaagtcccgctgtccatgagagtcaccgcagcccctccctgggacaagcaagcagacctgagtcttgtagctctctggtccggacctctttgcccaggaccttgagagctattcctagctctcctatggttactgtcctcccccagttcaggggcagcaggtgggacctggtgccctggggataacccctgt

SEQ ID NO: 367623 - DNA, 201 bp, Homo sapiens
ccttccccaagatttcccaacctctgcctcttctccctgacccctttcttgggattcttctgtgctcacccaggttttggctctggcatcactggatggcrgctttccccagcctggccttcctaacttgctctctgccttctgccctgcaggaaagatgcccgatgctgtgaacttctggctgggggaggcggctgcagt

SEQ ID NO: 367624 - DNA, 201 bp, Homo sapiens
  misc_feature (1)...(201): n = A,T,C or G
tgggtcaggaaccaggccaacctgggtaagtgctccgggcccttcataagggtgccaaggggcagccagctggggctgcaccagggggcggggggttcacncctcttccccctccagggtcaccaccaaggtggggataaaggtgcaggagtccccatttcccccaccttgcctgtgtagacaaggagcaggtcccccttc

SEQ ID NO: 367625 - DNA, 201 bp, Homo sapiens
tgaagaggagtccagggcctggtgagcatcaggtccctggtaggcagagttccagaatgcccatcagagcccctggcatctccagcccactggctctgtgygtgcttctcttttgtcataggacgtcttggggtgcagggctctcagcatgatggtttgcctcctcccgtgcccctgccctccataccctgcccccgggcc

SEQ ID NO: 367626 - DNA, 201 bp, Homo sapiens
  misc_feature (1)...(201): n = A,T,C or G
caccaaagggcagagcctgaccacttttgaatttgggggtgagtggcccaagagctgagacctgtgcccttgcagttggtggaataaggggagaatgaggnctgtgtgcagattgcagatgtcacacccacctctcctgagccaggtcccgtgctttctggagaccggcaccctaccagggtccctcagccctttgggaag

SEQ ID NO: 367627 - DNA, 201 bp, Homo sapiens
tgtcctgttcttgggctctagggagggagaagggcagaagcctggctctgaagaacaggcacaaaagatctggggaggtggcaccttgctctgaaaagtcyctaagtctgaggcctttcactgctgagccaagcagggcctgtggtgttgacctttggaagggacagagcctgaagtcctggggggtctggggggctgctc

SEQ ID NO: 367628 - DNA, 201 bp, Homo sapiens
  misc_feature (1)...(201): n = A,T,C or G
ctcaacaccaaagggcagagcctgaccacttttgaatttgggggtgagtggcccaagagctgagacctgtgcccttgcagttggtggaataaggggagaangaggcctgtgtgcagattgcagatgtcacacccacctctcctgagccaggtcccgtgctttctggagaccggcaccctaccagggtccctcagccctttg

SEQ ID NO: 367629 - DNA, 201 bp, Homo sapiens
actaggggcccaggagcttggggcccagggagtcggccgccctccccgcatccttcccctgaagcccacctgcagtgctgcccagggctcgccaccagctctcagcctgctcttcggacggtgctgcaaacaggatctctgccccactggtcagcctggcacccacagtcacaggtcaaactccactgtccctttggggac

SEQ ID NO: 367630 - DNA, 201 bp, Homo sapiens
tgcacctcctcccagtctgacctctgctccacctggcagagtgggcaccctggcagcatgtgtgggcccatgctggcctccccttcccgtccctcccatamctctatggctgccggcgggagtttggtgaggtctttgctaggagtggaagcgtaaagattcttaggtctccattctttgtcccctgcaggatgcccccga

SEQ ID NO: 367631 - DNA, 201 bp, Homo sapiens
  misc_feature (1)...(201): n = A,T,C or G
ctgggacagcccctggctctcagctcttgtcttccccctttaagcattggacaattctccttggggcctgagctttccccttaggccttctcgggggaccntggtgggggatccatctccaccagaccatttcagcggggagagggaggtgccctccaggccacgcagcaagatgggttctgtgggcagagataccgtccc

SEQ ID NO: 367632 - DNA, 201 bp, Homo sapiens
cgtcccctgtgcctctccaaacctgtcttccccacaacgtgttccccatgccaggctgcactctctccacaggggtccggcggacacccgaggaggcggcrgctggggaggtgaacctgtcttcatcggactctccctaccactacacgaaggtgacctacagccaggaggacgtggacaagctgctgcacctgacacatt

SEQ ID NO: 367633 - DNA, 201 bp, Homo sapiens
  misc_feature (1)...(201): n = A,T,C or G
actgggacagcccctggctctcagctcttgtcttccccctttaagcattggacaattctccttggggcctgagctttccccttaggccttctcgggggacnatggtgggggatccatctccaccagaccatttcagcggggagagggaggtgccctccaggccacgcagcaagatgggttctgtgggcagagataccgtcc

SEQ ID NO: 367634 - DNA, 201 bp, Homo sapiens; identical to SEQ ID NO: 79794

SEQ ID NO: 367635 - DNA, 201 bp, Homo sapiens; identical to SEQ ID NO: 79796

SEQ ID NO: 367636 - DNA, 201 bp, Homo sapiens
ggtgatgacctggcctatgggcttggtcctgtcagcatctggtgcagctcactaaatacattcccaggccttgacttaatcatagatgaattgccaaagaytgttgtccttccttctgccccagggagggaggaccccttccccaagatttcccaacctctgcctcttctccctgacccctttcttgggattcttctgtgc

SEQ ID NO: 367637 - DNA, 201 bp, Homo sapiens
gtgcccctgccctcccctggaccagccagcctcctagaataagcgtgggagtggattccagagctgactgacaggcgctgcagcagcgaccacagtgacgsgtgagtgggtgggagttgcctcgactttcataacccaactctacgtctgtcagctggcctagcagccccagccctgggttagagacagcagaaaaaatgg

SEQ ID NO: 367638 - DNA, 201 bp, Homo sapiens
agctccctgtggtggagcatacacagggtactctggggtcgaggtgagaggtgatgtggtattcagtgcccgtcagccaactgtgggccttcacctctacytgcacttcccctctcacaccagctgcactcccgtggctgccagagcagggtggttttccccaatacctggagctcagaaaggcagagccatctggccctc

SEQ ID NO: 367639 - DNA, 201 bp, Homo sapiens
agatgctctatctgccggctctgtggttccaccacgtccagcagtcccagggctgcatcgcaggtgaagagttgcccaggccgcctggggagaggccctgycaaggtccagcagggcctctggggggaggcttgggaggctctaggtcagaagagggatcttcatgctcagatccccgttcttcccacagtgaatttctgg

SEQ ID NO: 367640 - DNA, 201 bp, Homo sapiens
gggcaggcccagctggtaaaggctggcgagtgccacagaggtatcaggagctctagtataggcttagggtgcctcatttcctggacaggtggctggttcargagtgggtgtggagcttaggtggagcagaggcggcgggtaggagggacttgggaccaattgggacatcacatccctggctctgggttagaaagctgacag

SEQ ID NO: 367641 - DNA, 201 bp, Homo sapiens
aggtggttgtgcgataaatgagttaatgtatgcaaagcccttggcccagagccggcgcagagcattgtgtaagtgctggcaggcgtcatgatggagatatsatgtctcctcttgttgattcaggattctgatgagatggaggatgggcctggggttcaggattaggccttgaggcactgctccagcctcctttgtggcccc

SEQ ID NO: 367642 - DNA, 201 bp, Homo sapiens
aagaacagcagtagccctgtctggaaccagagctttcacttcaggatccacaggcagctcaaggtgggccaggcatcagcgctgactctacccacatcctygccagccactgccgctgccctgctcacctttctgtcccctccctcctgcagccctgtcactcttttcccctccagaatgtcatggaactgaaagtctttg

SEQ ID NO: 367643 - DNA, 201 bp, Homo sapiens
acctggtgaccggagatgaccctgtgttgtcagtactgtttgatgcggggactctgcgggctggggagttccggcgcgagagcttctcactgagccctcargcaaggcggtgtttccacggcagccctagctggtgtctgggttgaaatctccacgcgcacacatgcacacacacgcatgtctctcatactcactgacata

SEQ ID NO: 367644 - DNA, 201 bp, Homo sapiens
gctctggttcctgtttccagcctcagagcacagagttcagcttgtggttcctgggtcctgtgagggtccgcaggaggcctctgtgggcactggcaccttcygcttccactgcccagcctgctgggagcaggagctgagtattcgcctgcaggtagtgtgcctcgctccctcgaggtggggcccccagaacttcctccctcc

SEQ ID NO: 367645 - DNA, 201 bp, Homo sapiens
gataaaggtgcaggagtccccatttcccccaccttgcctgtgtagacaaggagcaggtcccccttctgaagatagaagaaccaccctcaacagccggcagratagctgagtttttcaccgatcttctgacgtggcgtccactggcccaggccacacataatttcctgcgtggcctccatttccacaaagactactttcagc

SEQ ID NO: 367646 - DNA, 201 bp, Homo sapiens
  misc_feature (1)...(201): n = A,T,C or G
ctgagaaaactagaagggctgggagaatgaatgtgccagggagaaacgtgctcaaggggaccctgggaaggtccctgccaggccattgtcctagaaagccnggggcacgtggggtctagacggggtccttcagtgacagccctctggctttggctttggcttttcccagggccttggccaacctttatgaggacccagagt

SEQ ID NO: 367647 - DNA, 201 bp, Homo sapiens
  misc_feature (1)...(201): n = A,T,C or G
gagctggccgagcgtgcccgcttgggctacccaagctgcttcaccaacctgtgggccctcatcaacgaggcgctgctgcatgatgaggtgcgggggctgcngcctgggggcagagccagggcaagggctggagctggggctcggtgctggacagcagggtgggaaaggccctgggcacccaggccgctgtgggtttaggtt

SEQ ID NO: 367648 - DNA, 201 bp, Homo sapiens
ttgcctcgactttcataacccaactctacgtctgtcagctggcctagcagccccagccctgggttagagacagcagaaaaaatggctgtcctggtagcctyaggagccactgtgtccaggacaaggcctgtcccgtcagcaacacatcatctaaatcatatattgggctctgcaggactgggagcagatggttacactgga

SEQ ID NO: 367649 - DNA, 201 bp, Homo sapiens
gaccagagctcgtagctgcctgtccccaccctgcttcctctcacctggtgttagcagggacttggtacaggcagagtgttgcttgaggcacctggagcccrcatgggagctacctcatagggctggctttcctactctgtttcttggttctcagcctagcctgtctgaggagggagacagatatctggtatgaggcctgtt

SEQ ID NO: 367650 - DNA, 201 bp, Homo sapiens
ccgtgcgactgggcttcgggccctgtgcagaggagcaggccttcctgagcaggaggaagcaggtggtggccgcggccttgaggcaggccctgcagctggayggagacctgcaggaggatgaggtttgggggctgggctggatggggtgtccccgggcttgcttgggcctagctcctggtgctgaacactggagctgcttgt

SEQ ID NO: 367651 - DNA, 201 bp, Homo sapiens
agacatgaggccagtctgcaggccccttcaccaggcgcactgctgtctcgggagatcgaagctcaggatggtctgggctccctgcccccagctgatggccstccgtctcggcctcactcctatcagaaccccaccaccagttccatggccaagatatcccgcagtatctctgttggggagaacctgggcctggtggctgaa

SEQ ID NO: 367652 - DNA, 201 bp, Homo sapiens
gaggaagcaggtggtggccgcggccttgaggcaggccctgcagctggatggagacctgcaggaggatgaggtttgggggctgggctggatggggtgtcccygggcttgcttgggcctagctcctggtgctgaacactggagctgcttgtccccgatctagaccagagctcgtagctgcctgtccccaccctgcttcctctc

SEQ ID NO: 367653 - DNA, 201 bp, Homo sapiens
gacctgcaggaggatgaggtttgggggctgggctggatggggtgtccccgggcttgcttgggcctagctcctggtgctgaacactggagctgcttgtcccygatctagaccagagctcgtagctgcctgtccccaccctgcttcctctcacctggtgttagcagggacttggtacaggcagagtgttgcttgaggcacctg

SEQ ID NO: 367654 - DNA, 201 bp, Homo sapiens
tgcttgggcctagctcctggtgctgaacactggagctgcttgtccccgatctagaccagagctcgtagctgcctgtccccaccctgcttcctctcacctgrtgttagcagggacttggtacaggcagagtgttgcttgaggcacctggagcccgcatgggagctacctcatagggctggctttcctactctgtttcttggt

SEQ ID NO: 367655 - DNA, 201 bp, Homo sapiens
gcacggtgcgggccggtgagatgctctatctgccggctctgtggttccaccacgtccagcagtcccagggctgcatcgcaggtgaagagttgcccaggccrcctggggagaggccctgtcaaggtccagcagggcctctggggggaggcttgggaggctctaggtcagaagagggatcttcatgctcagatccccgttctt

SEQ ID NO: 367656 - DNA, 201 bp, Homo sapiens
atagccgagcccttccttttcctccattggtgtcatctggtagtttgtcttcccgggtaagaaggttgtaaatttcttaagatgatgattgtgtcatcccygatagccccagattagccaagccaagtgctgagcacattcctggtgctcagtaaatgtcactgttaaagggggcttcccagagccacacaacacccagaa

SEQ ID NO: 367657 - DNA, 201 bp, Homo sapiens
ccctgggtgagtggaggtggggtggtcgtggccctggacagggaagatatgggaaggaggggggtcagcctgtttgcccttaggtgatgacctggcctatrggcttggtcctgtcagcatctggtgcagctcactaaatacattcccaggccttgacttaatcatagatgaattgccaaagattgttgtccttccttctgc

SEQ ID NO: 367658 - DNA, 201 bp, Homo sapiens
cccagcgagctgccccagctgctgcctgatctggaatcccatgtgccctgggcctccgaagccctgggtgagtggaggtggggtggtcgtggccctggacmgggaagatatgggaaggaggggggtcagcctgtttgcccttaggtgatgacctggcctatgggcttggtcctgtcagcatctggtgcagctcactaaata

SEQ ID NO: 367659 - DNA, 201 bp, Homo sapiens
tctgccctgcaggaaagatgcccgatgctgtgaacttctggctgggggaggcggctgcagtgacttcttgtaggtgtaaggggaatacaaaggtggggaakgagcaggttggggcagagggagggaagacgaggccaggagtggagggatggccctgggtggaggttgggctgttctctaagatttcttttggcttctagg

SEQ ID NO: 367660 - DNA, 201 bp, Homo sapiens
tgctccaacctgcccagcgagctgccccagctgctgcctgatctggaatcccatgtgccctgggcctccgaagccctgggtgagtggaggtggggtggtcstggccctggacagggaagatatgggaaggaggggggtcagcctgtttgcccttaggtgatgacctggcctatgggcttggtcctgtcagcatctggtgca

SEQ ID NO: 367661 - DNA, 201 bp, Homo sapiens
tacagacatgagccaccacgtctagccctaaaatatatagcatgtcagatggtgatgaatgctaacgagaaaaaatacggaaagggatataaagatttgcrgcagggggacagattataaatttagaaagtatagtcagagaaggaagtcttatcaatgtgatatttgagtgaggacccaaaggaggtagctggaatgtgg

SEQ ID NO: 367662 - DNA, 201 bp, Homo sapiens
tgaggctgaggcgtggactcctcacagagtggtgcgagttctctccctacgaggtcggcttccccaagtacggggccttcatcccctctgagctctttggstccgagttctttatggggcagctgatgaagaggcttcctgagtcccgcatctgcttcttagaaggtgaggggcactggcaggctggggaagctgggccga

SEQ ID NO: 367663 - DNA, 201 bp, Homo sapiens
tgggaccgctgggtcaggaaccaggccaacctgggtaagtgctccgggcccttcataagggtgccaaggggcagccagctggggctgcaccagggggcggkgggttcacgcctcttccccctccagggtcaccaccaaggtggggataaaggtgcaggagtccccatttcccccaccttgcctgtgtagacaaggagcagg

SEQ ID NO: 367664 - DNA, 201 bp, Homo sapiens
accgatcttctgacgtggcgtccactggcccaggccacacataatttcctgcgtggcctccatttccacaaagactactttcagcatcctcacttctccayatggaaaggtacctgcttctctccaaagtcctcctgtggccacctgagccttgagtccccagtccagatacccctcacagtccactcccattctcctgct

SEQ ID NO: 367665 - DNA, 201 bp, Homo sapiens
cgcctcccagggctgctgccctctcctctccagtgttctgtctctccatgcgcggggtgttttgcactcccagttttgggctaactggcctttccccagcyctatctggctttgtgcttgttctctcctagtgccctggtgctatgagtttctcgccattttggcagggaggagcattgagccttctctgggccttctccc

SEQ ID NO: 367666 - DNA, 201 bp, Homo sapiens
gcttttctaagtcctggtgtctgtgcagcagcaactccacatctgacactgagtgctggggagaagcatgttcaggtgacgcccagcttgggggggggggsccagagcctggtagccagctaaggggcaggacccccactcaccccatagtcgggcttcagcaggagtccctcccagcaggccagccaggcctcagcctgc

SEQ ID NO: 367667 - DNA, 201 bp, Homo sapiens
ccaccatgggcagggcagggctggagagccaagtgttaatggaagtgcagagggaaggctgtgagacccgcacctgccccttcccagcctctctccctgcmtgcgcccagccttcctttcctgctggtttccatgcctgtgaggggccctgaggccctgggcaatcaggctgtatccccagcccaaccccaggcccaccct

SEQ ID NO: 367668 - DNA, 201 bp, Homo sapiens
ctggcctcgctcctgggccttcgcctgcagggtggcccaggcctcctgcaccttggccaggccccccggagctgcaggatgtagctggcccagtcggcagvcctccgtctgtagccgtgccacctccttctccatagcttccagctctctctgcaaccagagcatgagatcaggcctcagtccccccactgagccgatgcg

SEQ ID NO: 367669 - DNA, 201 bp, Homo sapiens
gctgtagcctggagggaggggccatggggggtggggcctggaggtgggtggggaggctctggcaacagatgggtgcagtgcgatgcctctctcccctcccyacacccagactctgagagcacggagcccctcagtgtggatggcatctcctcagaccttgaagagccagctgagggtgatgaagaagaggaagaagaggag

SEQ ID NO: 367670 - DNA, 201 bp, Homo sapiens
gctggggaacagctggcccaagggggagggaggcagcaagagcctgggaggccagttcccaggcctgaggtgtggctgtggcatccccagtgcaccagggsccctgatccccttgcccctgcccagggctggctggggtggaggagggtctggcaagttccaggctgtttgcaattcccccacacccttctcccttgggct

SEQ ID NO: 367671 - DNA, 201 bp, Homo sapiens
actaatttttgtatttttagtggagatggggtttccccacattggccaggctggtcctggcctcaagttatatgcctgcctcagcctcccaaagtgctttkaactccgtgggtaagggacagaacacgagacttggaggggggggatctatggtatggggcctgcctgggggcctgtctgcacctgggaccccaagcagcc

SEQ ID NO: 367672 - DNA, 201 bp, Homo sapiens
taccctctgcttgtctgtgtgtacctcattcttcctggatgcaggacaagaattgggacctgctgagtggcggggctaaaagagctgtaacatgaagaggrctgaaccatgcgtcttgctcgccacattgtgggtgtccagaaggaaagaagaactgcggccctttggggagtccagacccaggagcttcccaagctgggg

SEQ ID NO: 367673 - DNA, 201 bp, Homo sapiens
cagacaactgtctctgcccttgtggagttcacattctagcaagggtgaaagaatgataaacagtttatgtaggtgaaatacatatatatatatatatatatattttttttttttttttttttttttgagataaagtcttgctctgtcacccaggctggagtgcagtggcacgatgatagctcattgcagcctctacctctt

SEQ ID NO: 367674 - DNA, 201 bp, Homo sapiens
agacaactgtctctgcccttgtggagttcacattctagcaagggtgaaagaatgataaacagtttatgtaggtgaaatacatatatatatatatatatatwttttttttttttttttttttttttgagataaagtcttgctctgtcacccaggctggagtgcagtggcacgatgatagctcattgcagcctctacctcttg

SEQ ID NO: 367675 - DNA, 201 bp, Homo sapiens
gacaactgtctctgcccttgtggagttcacattctagcaagggtgaaagaatgataaacagtttatgtaggtgaaatacatatatatatatatatatatattttttttttttttttttttttttgagataaagtcttgctctgtcacccaggctggagtgcagtggcacgatgatagctcattgcagcctctacctcttgg

SEQ ID NO: 367676 - DNA, 201 bp, Homo sapiens
caactgtctctgcccttgtggagttcacattctagcaagggtgaaagaatgataaacagtttatgtaggtgaaatacatatatatatatatatatatattwtttttttttttttttttttttgagataaagtcttgctctgtcacccaggctggagtgcagtggcacgatgatagctcattgcagcctctacctcttggac

SEQ ID NO: 367677 - DNA, 201 bp, Homo sapiens
ccaagcatgtccacatggacacactctccccaggtgtcaaacttcagtcttgtgacacgggagtggcattgagggttggggagaagagggagggcagtagstattacaggtgaggcagacccagctttccattctctggggagggttgagagctgtctcacagtctcttccttccccggccagactgagggagctggccgt

SEQ ID NO: 367678 - DNA, 201 bp, Homo sapiens
tgttgcctcacttccttggaactcctgcctccacagcccctccagtggcagggacaggtcttgggtctttgtcatcttggtgctgtgagaggtaggagggmagcctgccccatctaggaatctgggaagggctggccctctcttagaagccatttgaaattactgcagggattagctccctgtggtggagcatacacaggg

SEQ ID NO: 367679 - DNA, 201 bp, Homo sapiens
gagggagctacccttcgccagaagtttgtgagaatgtggccgcccttttcctgccctctgccccatgtgggtggggggcctcgtggcccggccggcgcccygtccccttctgcatgtctgaggccaccggcaaccgccgccccactccagatttgcccccgccttgttttgaaagccccttatttataacttttatacttt

SEQ ID NO: 367680 - DNA, 201 bp, Homo sapiens
ctcagaggctcccagctgccgccctgaggccctggaagcaagtggctcctccatgctcctctgactcagttgcctggagtgtgagggccctgggctgaccstggtggatgaggccctccagcactgccctggacctggttgctccctggacttgacctgttagggtccttgtggaggcaggtggaaggccgaaaggaagca

SEQ ID NO: 367681 - DNA, 201 bp, Homo sapiens
cccagtggtagctattatggccactggtggtgggatccgggcaatgacttccctgtatgggcagctggctggcctgaaggagctgggcctcttggattgcrtctcctacatcaccggggcctcgggctccacctggtgagctgggggcaggctgatgctggaccctgtgtggcagggggtgctggtgccagggttctccta

SEQ ID NO: 367682 - DNA, 201 bp, Homo sapiens
gtgatcctctggcttcagcctctagcgtagctaggagtataggtgcatgccaccatgtccagttaatttttaatttttttgtagagatggggtctccctaygttgccaaggctggtcttgacctcccggcctcagcaatcctcctgcctctgcctcccaaagtgctgggattacagacatgagccaccacgtctagcccta

SEQ ID NO: 367683 - DNA, 201 bp, Homo sapiens
cccactgagttgctgaagacccaggtgaccaagaacaagctgggtgtgctggcccccagccagctgcagcggtaccggcaggagctggccgagcgtgcccrcttgggctacccaagctgcttcaccaacctgtgggccctcatcaacgaggcgctgctgcatgatgaggtgcgggggctgcagcctgggggcagagccagg

SEQ ID NO: 367684 - DNA, 201 bp, Homo sapiens
cactggtcagcctggcacccacagtcacaggtcaaactccactgtccctttggggacccccacgcctccagcccccgctgagccaggtggctgctgggggygatgccggagtccatgtctctccgctcaccttaaggagaatgtgtgtttcctgccgtggcggccccgcagcctctcacaccgggctcccgtgaggtcaag

SEQ ID NO: 367685 - DNA, 201 bp, Homo sapiens
ccccagccagctgcagcggtaccggcaggagctggccgagcgtgcccgcttgggctacccaagctgcttcaccaacctgtgggccctcatcaacgaggcgytgctgcatgatgaggtgcgggggctgcagcctgggggcagagccagggcaagggctggagctggggctcggtgctggacagcagggtgggaaaggccctg

SEQ ID NO: 367686 - DNA, 201 bp, Homo sapiens
ggggaggcggctgcagtgacttcttgtaggtgtaaggggaatacaaaggtggggaaggagcaggttggggcagagggagggaagacgaggccaggagtggrgggatggccctgggtggaggttgggctgttctctaagatttcttttggcttctaggactcgggcaccacagagggtttcccctgacagctgaggtcgggg

SEQ ID NO: 367687 - DNA, 201 bp, Homo sapiens
tggctggggtggaggagggtctggcaagttccaggctgtttgcaattcccccacacccttctcccttgggctccagagctgtacacgccggcaacctaccrgctaactgaagagggcacctttaaggtggtggatgaagaggccatggagaaggtgtctgtcctgttcttgggctctagggagggagaagggcagaagcct

SEQ ID NO: 367688 - DNA, 201 bp, Homo sapiens
ctaccagggtccctcagccctttgggaaggaggcaggggccttaggtcctatgcacgaagcccaggccacaaggcctgggcctcctggtcctcagctgccytaaagcaaaaccctgggtcggggtgggggtgtgggtgcctaagggctctgcaccatgaggctgaggcgtggactcctcacagagtggtgcgagttctctc

SEQ ID NO: 367689 - DNA, 201 bp, Homo sapiens
atgttgctgcaggacagtaagccctcacctgggcaaacatgaagctctggcctcctttcctcagccccttgttcttccctgtcctccaccctggaccccarccggctgctggagcccagaggccaccttctccctgcatcctgaatgatgcttagtcagaagcctgtgttggaacatccctcgtttacggggcgctggcct

SEQ ID NO: 367690 - DNA, 201 bp, Homo sapiens
ccgatcttctgacgtggcgtccactggcccaggccacacataatttcctgcgtggcctccatttccacaaagactactttcagcatcctcacttctccacmtggaaaggtacctgcttctctccaaagtcctcctgtggccacctgagccttgagtccccagtccagatacccctcacagtccactcccattctcctgctt

SEQ ID NO: 367691 - DNA, 201 bp, Homo sapiens
agctggaacaaaggtaccacctgaatagagggtgtgtggcaagggcaggcacgagacaggaaatcagactggaagagtaggttgggcctggtcatgcgtgycaaggcaggcagcattctctaaggagcagtggtaagccatcaaggcatttgttactaggggtgtgacaatatgagattgtattttcagaagatgactggg

SEQ ID NO: 367692 - DNA, 201 bp, Homo sapiens
ggcctgcagggaggggctggggaacagctggcccaagggggagggaggcagcaagagcctgggaggccagttcccaggcctgaggtgtggctgtggcatcyccagtgcaccagggcccctgatccccttgcccctgcccagggctggctggggtggaggagggtctggcaagttccaggctgtttgcaattcccccacacc

SEQ ID NO: 367693 - DNA, 201 bp, Homo sapiens
taagggggctctgggggctctttccagggctgaccgtggcgagtggctcgtcagcaatggcgttctggtggtgagtgtgccagtgctctgggaggcggtcyggggtccccgggactccctcatgccagcgacttgaggtacaggcccaccgctgcctcagcctggggaccctgggatttcagtttgttaagggaatacaat

SEQ ID NO: 367694 - DNA, 201 bp, Homo sapiens
tgtcctggtagccttaggagccactgtgtccaggacaaggcctgtcccgtcagcaacacatcatctaaatcatatattgggctctgcaggactgggagcasatggttacactggagaccacagccgtggctgccacccctcatggtatgagccctccaggcacacggctgtatatgcgtgtgcacatctaggcacatcctg

SEQ ID NO: 367695 - DNA, 201 bp, Homo sapiens; identical to SEQ ID NO: 79809

SEQ ID NO: 367696 - DNA, 201 bp, Homo sapiens
agctcctgggccggttctgccaggagcaggggatcccgttcccacccatctcgcccagccccgaagagcagctccagcctcgggagtgccacaccttctcygaccccacctgccccggagcccctgcggtgctgcactttcctctggtcagcgactccttccgggagtactcggcccctggtgagctgctgttcacctccc

SEQ ID NO: 367697 - DNA, 201 bp, Homo sapiens
tacctcatcaataccagctgcctgcccctcctgcagcccactcgggacgtggacctcatcctgtcattggactacaacctccacggagccttccaggttgrgaagggtgggcagcccaccagggaggcggtgggtggcccctgtcccctgaagagaggggctttggagtccagtgtctggttcagcttcctttaggagctg

SEQ ID NO: 367698 - DNA, 201 bp, Homo sapiens
caaccagggcgcggggctggaggaggcctggaggagtgagggggagaaacagccgcccctcatcctcatgctctctgaaggggctcaggcttgcgctcgakggggcacgaagtactgggaggagtactgggaggagtcttagcacctatggtcagaggggcgagtgaccggcccagtgccaggcacccggggagcacttga

SEQ ID NO: 367699 - DNA, 201 bp, Homo sapiens
ttagccaggctggtctcaaactcctgacctcaggtgatctgcccgcctcagtctctctaagttctgggattacaggcataagccaccgcaaccggttgccraatgattttctttaaaatatatatttttttatttgttaagggaatttttaagaatggtgaaattgaattgctgtgggtataaaactaaggaatccccaga

SEQ ID NO: 367700 - DNA, 201 bp, Homo sapiens
aattaacttgttcctgagatgtgggtgtttaaaaacaaattctgaatacggctgtcttatttttatccaagactatattcaactgcctaaataaaataacrgccactttggtttttttccatttaactagatttggccctagtcacatacaagtatttcaagtgatcctctcacctgaattacctgcataatttagatgac

SEQ ID NO: 367701 - DNA, 201 bp, Homo sapiens
actcttgaaacttaaatcaatccctaaattgtttttataaatctaattcaagttagattaaaaggatatgtagtcaaatttatttaatagctactgattayggaattaaaaggcaacttccgaacaacaaatatttatgttatctattagttcaggcatgtctaccctcagaggttaggatgatgtgttcaactcacatgc

SEQ ID NO: 367702 - DNA, 201 bp, Homo sapiens
ttatgagatttaagacaaaacgaggtcctatttctacaagagcagcatcttcttctatgatctttaataaaaaggaaacatttcattttggtttggttacrttattcccaaaaggtatactggctataacctcattataaatgtgcctgaaataattgataatccataaaatcaaggtgggggtgaaacttggtaaatggc

SEQ ID NO: 367703 - DNA, 201 bp, Homo sapiens
aagaaacgaaaagagccatacatcaggttgaagtatctgggattcccggacgaggtggagggcagcggaggaaaaacaccgagaggctgcgctgcaagggrcgcagggaaaagcaagcctggggcaggtctgagttccgagttcccgactgctccctcgtggtgtctgcgacccggtagcgggagcaagtgaggttgttgg

SEQ ID NO: 367704 - DNA, 201 bp, Homo sapiens; identical to SEQ ID NO: 79834

SEQ ID NO: 367705 - DNA, 201 bp, Homo sapiens
aatgttctggtatcccctttaacaactgtcctatttttctctccttttactattagttttctaaataagtaatctatacacactgcttctaaaataagtatgtcatttggccgggcatggtggctcatgcctgtaatccaagcactttgggaggccgaggtgggcagatcacctgaggtcaggagttcgagaccagcctga

SEQ ID NO: 367706 - DNA, 201 bp, Homo sapiens; identical to SEQ ID NO: 79835

SEQ ID NO: 367707 - DNA, 201 bp, Homo sapiens
aaatgttctggtatcccctttaacaactgtcctatttttctctccttttactattagttttctaaataagtaatctatacacactgcttctaaaataagtatgtcatttggccgggcatggtggctcatgcctgtaatccaagcactttgggaggccgaggtgggcagatcacctgaggtcaggagttcgagaccagcctg

SEQ ID NO: 367708 - DNA, 201 bp, Homo sapiens
gtcagagagacccagattaaaattctacctttgtctcttcctgggtgagttaacttcagtaaatcataaaacttcagttttcccacatgtaaaatgggttytggagccttgcctgctgaacaggtatcctcatacgtatactcaaattcatcaaagtcagaatctgtattacattagtgaaatggcatttttgaaatctga

SEQ ID NO: 367709 - DNA, 201 bp, Homo sapiens
tcaaataagatatccatataattgtgaaagggaatttgagatataaggatatctctattatggaaactgttaattgaaaattgtgaaattggaaattacaycaaaactccacaatgcacacatcaaaagtacaagtttgtatctctactaaaacttacaatttgttgatctagtttataacctataattaacttgttcctg

SEQ ID NO: 367710 - DNA, 201 bp, Homo sapiens
aatgaaatcggaaggtttcagtagacaaaataacttaatagtcataataacttgtcaatagtcataataaataacttaataaataaataatagtcttaagwtagagaacaaaacgtcattacttgaattttttttctctcccggtaacaaattcttttcccatcttgttttacagagataatggttagtaatgactaaagt

SEQ ID NO: 367711 - DNA, 201 bp, Homo sapiens
aacaagctatttctgaggtgtgtatgacaacctgaaaatgattccaaagaattatgttacattttgttctggttcccaattttcttgtagttttggaattstctacacacaactgtcatcagggaagatgtcatccctttttatgaggagatacatatatgtgagaaattgggcggaataaattattcttgagaaatttta

SEQ ID NO: 367712 - DNA, 201 bp, Homo sapiens
ctctttttgaaatatttcagaatattaaagcccctaaatacatatggaataaaaggaataaggtattctttttgtaactactttagaagaattacaggccyggctgtaaaagtgctgtggcagacacctgtaatcccagcactttgggaggccgaagtgggcagatcacttgaggtcaggagttcaagaccagcctggcca

SEQ ID NO: 367713 - DNA, 201 bp, Homo sapiens
aggaaaaccacacctggaagatgggaggcagaaatggagcttagggaaaaccaacctggatcttatcgccatgctcatataatacttagcaacgtgctaaycctgcagcaaatgttccaggagttcttgcaaattaaatcagcatgttaacacttataaattgtctacaaataacttctggtattaccaagtgaggaaaac

SEQ ID NO: 367714 - DNA, 201 bp, Homo sapiens
cggcacgcgcggctctctaggcctccttcagctctgtggtgacggtggccgaggtggagggccggtctgaagagtggcgggactggcttcacttcctccgyggttcctcggagccgcctcgctcctcttcagggactttgctgagaagggctctcgggcgtccagaccccaccgcaaaggtagggtttccgcactcgggga

SEQ ID NO: 367715 - DNA, 201 bp, Homo sapiens
attttcttaataacctttgcctttctctagtttacttattgtaagaatatattatatactatacatataacatacaaaatatgtgttaatcaactgttaakcttatcagtaaggctcccagttaacagtaggctattagcagttaagttttgggggaatccaaagttatacaaagatttttgactgcacaaggcattggca

SEQ ID NO: 367716 - DNA, 201 bp, Homo sapiens
actatggcagtatatgggcatactaatcactggagaaataatagcgagaaataaccaaggaaaagcactactctccaaaaacattaaaaaaaaaaaacaaytgaacaactagtaagaaagaacgctggatctgagcaccctgtaagtcgcttccccgtgggccgggtaaaggttttaaaacccgccgcctccaggaagacg

SEQ ID NO: 367717 - DNA, 201 bp, Homo sapiens
acctggatcttatcgccatgctcatataatacttagcaacgtgctaatcctgcagcaaatgttccaggagttcttgcaaattaaatcagcatgttaacacktataaattgtctacaaataacttctggtattaccaagtgaggaaaaccatgcaatagccttaagagcagtctaagatacagaaaagctgtaattcctagg

SEQ ID NO: 367718 - DNA, 201 bp, Homo sapiens
aagtgtcccctacccttttccttttacaattgattttcttcaaacccattgattagttgtcctgaactccagtgggagctttattatggtacttgttatcrtgtgttataagcatttgtgtacatgtctgtttcacccactagtatgaatttcttaaggaagtgttttctttatttggatcctaatgtggtttatttttgg

SEQ ID NO: 367719 - DNA, 201 bp, Homo sapiens
gtagagagccgtgttggccaggctggtcttggaactcgtgacctcaggtgatccccctgcctcagcctcccaaagtgctgggattacaggcttaagccacygcgcccggccatttgagctgtattaaatcaagttagacaactgggaaaagatgaagagagaaaaattaaagttatttatagtgcaaacccaaatgagatt

SEQ ID NO: 367720 - DNA, 201 bp, Homo sapiens
cacaatcttggctcactgcaacctccacctcccaggttcaagtgattctcctgtctcagcctcccaagcacctgggattacaggcacccaccaccatgccyagctaatttttgtatttttggtagagagccgtgttggccaggctggtcttggaactcgtgacctcaggtgatccccctgcctcagcctcccaaagtgctg

SEQ ID NO: 367721 - DNA, 201 bp, Homo sapiens
cgtgggccgggtaaaggttttaaaacccgccgcctccaggaagacggccacgtgcacaaggattagctgcaaactccgtgcccagtctggccgggagaatwgctaaaaccgacctaccgttaacacccgggctactctgaaattaagcaaggctgtagtcaagtaagtaacccaagaaaaggcgcacagagccgccgccgc

SEQ ID NO: 367722 - DNA, 201 bp, Homo sapiens
gctggcgtcgcgccgcacccccagcgcctcatagtgacacttcatcgcccgaccgggcgggcggccggcgctggggcccgggacggggtcggggcccgggmccgggccgaagcggcggcggcggcggcgctggcagtcctctccggcgggagtccgccgcccgcaccgggccagccagcgagcccggcggcggcggcggcg

SEQ ID NO: 367723 - DNA, 201 bp, Homo sapiens
gattgcaaaatagtaacattttataaattttggtgccacccaaaatggagtctgaatggccatttctttctggtatttttttttttttaatgtcagtcattgttgaagagctattttcaactacgtatgtgaaaatggaagcaactcttctgatgctactgtaatcaattcagaatattctggggaagaacagcagcccca

SEQ ID NO: 367724 - DNA, 201 bp, Homo sapiens
gtaacctattcagtttgtaataccttaatagccagttccacacaaatcacttttaatactggcaaaacactttttaccatgtgggttttatatatatataygtttaatggacttattttactttatatatgttgactgataattttttgagtacctactatggatttagcataatactagacactacagggttaaaaaatg

SEQ ID NO: 367725 - DNA, 201 bp, Homo sapiens
ccttgtttatggcctgtctccattagaatgtaagttccataatgacagggacattgctctgttgaacagtttctacagcacatagaataatgtggtattayagcagaggttcaaaaatttgtgctctaaagaaggctaatagtgaaaaaatgatcctaattcttctaagttttgaaaattttgctttaaaatgtaaattta

SEQ ID NO: 367726 - DNA, 201 bp, Homo sapiens
gctgcccccagtaaaataaaaaacccacgctaagcttcatcaggttacttcacacgccactgaccaaccaactcactactcagaattcatacacttccctkttttccagaggaagattctacacagtctcagttagttggtaaattggtaatggataaggattgagaagtctgagtttgggggagaatgaaacctttcccc

SEQ ID NO: 367727 - DNA, 201 bp, Homo sapiens
aaccagtaactaaaaaaaaaaaaaggtgggtttttttttttaacctattaaattgacagattctttcatgcatagtgaaactggtaaggggacaaggaaaygaaccctctaatagcctctagtgaggttatggtggtggagggaacaagcaaaaagcctagagttcataatctttaacctaagttgcacttctaggaaacc

SEQ ID NO: 367728 - DNA, 201 bp, Homo sapiens
cttttagactgtttatctatttttggatcaagtcctatgccaggtaaactatgatcagtataaagacataaaagtgttatacatagtggtcagaaaaatasaggaagttatttggaacataaacattggttcagaaagctaatgccaattcatttttcagtggccacagtcatgggttctaacatttcacaatgttaattg

SEQ ID NO: 367729 - DNA, 201 bp, Homo sapiens; identical to SEQ ID NO: 79843

SEQ ID NO: 367730 - DNA, 201 bp, Homo sapiens; identical to SEQ ID NO: 79844

SEQ ID NO: 367731 - DNA, 201 bp, Homo sapiens
tgagaagtctgagtttgggggagaatgaaacctttcccctcctgagaacagaattgggatggtgggcggggggaagggagggacaaaaaaaaaaaaaaaaacggaaagggaaagtatttttttccctccaacttaatttggagtattttctccctccaacttgatttggttttggatacagcctgtaggaatcacttactt

SEQ ID NO: 367732 - DNA, 201 bp, Homo sapiens
tgttctggtatcccctttaacaactgtcctatttttctctccttttactattagttttctaaataagtaatctatacacactgcttctaaaataagtatgtcatttggccgggcatggtggctcatgcctgtaatccaagcactttgggaggccgaggtgggcagatcacctgaggtcaggagttcgagaccagcctgacc

SEQ ID NO: 367733 - DNA, 201 bp, Homo sapiens
gccatcttgcctcgccgcccgcgctcttggcctcctttccggcgctgccgctcgctcctatttccgatctctatggttcggcggctctaagcgctcagctycgcggtcgtcctccaggtctgtgccgcctccttccggtctcggtggcgcggcacgcgcggctctctaggcctccttcagctctgtggtgacggtggccga

SEQ ID NO: 367734 - DNA, 201 bp, Homo sapiens
cgccatcttgcctcgccgcccgcgctcttggcctcctttccggcgctgccgctcgctcctatttccgatctctatggttcggcggctctaagcgctcagcyccgcggtcgtcctccaggtctgtgccgcctccttccggtctcggtggcgcggcacgcgcggctctctaggcctccttcagctctgtggtgacggtggccg

SEQ ID NO: 367735 - DNA, 201 bp, Homo sapiens
aataaattattcttgagaaattttatgtatcatttcgaggagaagctgaacccagaactataaagctaaggccaagtatgacttctttccattgcagggastttaactgcacttcgaatgtgttaccaaggttatggttaccctttgatgctgttcctggaagaaggaggagtggtgacagtctgcaaaatcaatacacag

SEQ ID NO: 367736 - DNA, 201 bp, Homo sapiens; identical to SEQ ID NO: 79838

SEQ ID NO: 367737 - DNA, 201 bp, Homo sapiens
ctccgtgcccagtctggccgggagaattgctaaaaccgacctaccgttaacacccgggctactctgaaattaagcaaggctgtagtcaagtaagtaacccmagaaaaggcgcacagagccgccgccgcaggtgtagcccggggacatcccctcctaccttgcaaacggggcctgggatccggtccctctcttcttcctcca

SEQ ID NO: 367738 - DNA, 201 bp, Homo sapiens
cacagagccgccgccgcaggtgtagcccggggacatcccctcctaccttgcaaacggggcctgggatccggtccctctcttcttcctccacctcctctgcygtggcgtgccgcttagctggcggctccgcatctatttcgtttctttttggcttcttcgcctgaactgcaaagcctccacgccgtttcctcttggttgccg

SEQ ID NO: 367739 - DNA, 201 bp, Homo sapiens
tatgatctttaataaaaaggaaacatttcattttggtttggttacgttattcccaaaaggtatactggctataacctcattataaatgtgcctgaaataaytgataatccataaaatcaaggtgggggtgaaacttggtaaatggcaaatcatcaatattttctgaaatctattagtacttataggaagttgtcatggaaa

SEQ ID NO: 367740 - DNA, 201 bp, Homo sapiens
ggattgcaaaatagtaacattttataaattttggtgccacccaaaatggagtctgaatggccatttctttctggtatttttttttttttaatgtcagtcattgttgaagagctattttcaactacgtatgtgaaaatggaagcaactcttctgatgctactgtaatcaattcagaatattctggggaagaacagcagcccc

SEQ ID NO: 367741 - DNA, 201 bp, Homo sapiens
agtctgagtttgggggagaatgaaacctttcccctcctgagaacagaattgggatggtgggcggggggaagggagggacaaaaaaaaaaaaaaaaacggamagggaaagtatttttttccctccaacttaatttggagtattttctccctccaacttgatttggttttggatacagcctgtaggaatcacttacttctttt

SEQ ID NO: 367742 - DNA, 201 bp, Homo sapiens
aggattgcaaaatagtaacattttataaattttggtgccacccaaaatggagtctgaatggccatttctttctggtatttttttttttttaatgtcagtcattgttgaagagctattttcaactacgtatgtgaaaatggaagcaactcttctgatgctactgtaatcaattcagaatattctggggaagaacagcagccc

SEQ ID NO: 367743 - DNA, 201 bp, Homo sapiens
gttgatataacagcgttttattttttcttctacagatacaagatttccttactgaaaccctctacaaaggcattagtcctatcttgtaaggtatctattcsgacagataacagaggcttcctttcattacagtatatgattagaaatgaagatggacaaatatgttttgtggaatattactgctgccctgatgaagaagtt

SEQ ID NO: 367744 - DNA, 201 bp, Homo sapiens
aaaggtatcaaaataataccataattattaaaatgcattaatacaccaatatatttcactgtaatgtggaatgtttacatgcatcagttaggtgtgggttktatttactaaccatgtatggttagctatgttgctaatatctattgcacagggttggcgtacccaagcggtttagtaaggttatccttctcttccccaata

SEQ ID NO: 367745 - DNA, 201 bp, Homo sapiens
aatattttccacatcagcttggtagtagcttttcaaaatattcagcccctatctccgtttgcttcgtgcaacagtggtgccagtagaaggtaataaagtcraagaccagctttcagtaaaactaaaaatagctgttacttagtacatgattactatggggccaggcactctgctaagcactttacatataatgcattatct

SEQ ID NO: 367746 - DNA, 201 bp, Homo sapiens
gcccaggagttcaaggctgcagtgagctatggtcatgccactgcactccagtctggcaggagagtgggaccctgtctcaacaaaaaataaaataaaaatamcaatatttattgaaatctgtatgtgagacagcttgatctgggcttgaattatttttttttctaacttggtacagagattgttggaaaatagctaatcctc

SEQ ID NO: 367747 - DNA, 201 bp, Homo sapiens
gtccccagtttctttataaaataaaatggtcctttctgactttgaacatgttatgacgagttcagtaaatcagatcagggtaagtgtttcagaaggttcaractattcctcccaaggcagttttggtgacctcaaacaggctatgactaaaaacacctccaaatacagttgacccttgaacaacatgggtttgaactgtgt

SEQ ID NO: 367748 - DNA, 201 bp, Homo sapiens
tggaggattatctggacactccgggcccgccccgccatcgcctgttttgttggaggcggggctggtggcgcgggctgcacaaaaccgactccccgcggatwtgtagctcctgtttggccgggagataccgtgtcagttgcgtgtcttcattcttcacaacttttcacgttattgtcctcttacggagacgaggaaaccgta

SEQ ID NO: 367749 - DNA, 201 bp, Homo sapiens
cagttgcgtgtcttcattcttcacaacttttcacgttattgtcctcttacggagacgaggaaaccgtagcttagataattttcctccagaattacaaagayagttaagtgacataggtggggttcggcctggtcagccgtgttcagcctcccagcccctttccacctctcagcgcaggtggagctcgccggacctcgccag

SEQ ID NO: 367750 - DNA, 201 bp, Homo sapiens
tgatgggtgcttgtaatcccagctactcaggagactgagggagcagaagcttgaacccgggaggtggaggttgcagtgagccaagattgtgccactgcagkccagcctgggcaacaagagcgagactctgtctcaaaacataaataaataaactcaattaaaaaaaaggtataattaaaaatcaagtaaagcttacctgaa

SEQ ID NO: 367751 - DNA, 201 bp, Homo sapiens
cttgggtgaaattatctatcatatttttgggcctagcatctaaaatggtctcacttctgattactggaaacctccctccttttttttttttttttttttgygatgcagtttcgctcttgttgcccaggctggagtgcaatggcacgatctcggctcgccgcaacctccacctcccaggttcaaatgattctcctgcttcag

SEQ ID NO: 367752 - DNA, 201 bp, Homo sapiens
gagaaacttctaagctttgagagagaaacttctattttactgtatcctttacagcactttctacaaattaggaacccaagtatctcatggatcttcaagttattccctttctataaagttaaatatataatggcttattaggaaatccatactctgtatcaactaacagtcatgaatagaagtaggtagagctcacttaag

SEQ ID NO: 367753 - DNA, 201 bp, Homo sapiens
actgtaatgtggaatgtttacatgcatcagttaggtgtgggttgtatttactaaccatgtatggttagctatgttgctaatatctattgcacagggttggsgtacccaagcggtttagtaaggttatccttctcttccccaatatgctgcccccagtaaaataaaaaacccacgctaagcttcatcaggttacttcacacg

SEQ ID NO: 367754 - DNA, 201 bp, Homo sapiens
cactcggggaccccgagactagtaagcgatgctgtcccgcgggcgggctggtgaatggggttgtctgggactcttggaggattatctggacactccgggcscgccccgccatcgcctgttttgttggaggcggggctggtggcgcgggctgcacaaaaccgactccccgcggatttgtagctcctgtttggccgggagata

SEQ ID NO: 367755 - DNA, 201 bp, Homo sapiens; identical to SEQ ID NO: 79841

SEQ ID NO: 367756 - DNA, 201 bp, Homo sapiens
gagaaattttatgtatcatttcgaggagaagctgaacccagaactataaagctaaggccaagtatgacttctttccattgcagggactttaactgcacttygaatgtgttaccaaggttatggttaccctttgatgctgttcctggaagaaggaggagtggtgacagtctgcaaaatcaatacacaggaacctgaggagac

SEQ ID NO: 367757 - DNA, 201 bp, Homo sapiens
gttaagaaagcagttaaaggatagtatttaactggtaggttttggttgatctgactatctgcacaattattccaaacactttgaaaggtatcaaaataatmccataattattaaaatgcattaatacaccaatatatttcactgtaatgtggaatgtttacatgcatcagttaggtgtgggttgtatttactaaccatgta

SEQ ID NO: 367758 - DNA, 201 bp, Homo sapiens
caaagtgtgtgcaagcaaatgcttttattcaggtatggaagtaggcgcctttaagcctgtgccatagatactctaaatgtaatttaatgaaatcggaaggwttcagtagacaaaataacttaatagtcataataacttgtcaatagtcataataaataacttaataaataaataatagtcttaagttagagaacaaaacgt

SEQ ID NO: 367759 - DNA, 201 bp, Homo sapiens
ttaagccaccgcgcccggccatttgagctgtattaaatcaagttagacaactgggaaaagatgaagagagaaaaattaaagttatttatagtgcaaacccmaatgagatttctctgtcgctaaattcacaagaaagtaaggaatattattcaagattgcaaattctttcgctagatatacacttgctcagagtctaaggat

SEQ ID NO: 367760 - DNA, 201 bp, Homo sapiens
gacttgggtaataatgctgtgtcagtgtgggttcatcagttgtcacaaatgtaccgctctggtgggagatgttgataagggagaagctaggcatgtgtgcrggtagggggtaaatgggaaatctctagctttcccttaattttttttatgaacctaaaactgctctaaaaatgcctttgggaaaaactttggggaccaaca

SEQ ID NO: 367761 - DNA, 201 bp, Homo sapiens; identical to SEQ ID NO: 79837

SEQ ID NO: 367762 - DNA, 201 bp, Homo sapiens
taaaattgctaaaagggcagaatgtggcactctcaacagtggggtaggcagtccttcagaacatagagacttccttctttccttccctgtcttcacattgmttgtcccttatccccacctgaaataaaatctattgggtcctgagaaatcggagtgtatagtattttttcttttcccaattatgtttgtaatttgctttca

SEQ ID NO: 367763 - DNA, 201 bp, Homo sapiens
aaaacagtatttcaggggatctcctcagtgatctctctcagcctgggtaacgagatggaccatggtatctttcatctccaggatgggaaacaatttggtgrtagggaggtaggagttgaaattttttcctggatatgttaaattttaagtacctgcgacactagggagtggctggatatgtagttatggtgctcaggagat

SEQ ID NO: 367764 - DNA, 201 bp, Homo sapiens
aagggtgtttgtattatggtatctttttcaagttagttcaggatgcagaagaagatgttttctacacgtggctcattcattcactaagtatctgttgatcrcctaccgtgtgcttattcatcttattaagcattgtgggaagaacagcttaaaaccaaggtgaagccaagaaaatgtgaaacagcaaaccattaagtacca

SEQ ID NO: 367765 - DNA, 201 bp, Homo sapiens
gcttcccaaatagctacgactacaggtgcatgcctccatgccctgctaatttttgtattttttgtagagatggggttttactatgttccctaggctaatcytgaactcctgagctcaagcaatccacccgcctcggcctcccaaagggctgggattacaggcgtgagctatcatgcctggcctaatgtattttttaaaagt

SEQ ID NO: 367766 - DNA, 201 bp, Homo sapiens
tcaaaattctacacttcctctgatatgcagcttacgggctaaatccttcatgattctttatcttattatactagggtaaaaataatctatatctcctgcayttccatagaatgtatcgaagtatggctcagattatagatactacctagctcaagggaagagtgagaacactaacatttactggaagtgtacaagtccagc

SEQ ID NO: 367767 - DNA, 201 bp, Homo sapiens
tcaactaattagcaaatgtagtcaatgcttaccacctattcaccataaataatatgcttataatatttatacatttaattttctttaaaggtatcaagttycgtgaaatcaaaagtttgcttcattctcaacccttaacatgaaacactaggagtctataacataaaaggtacaaagaacaaatccacttaaatgagttta

SEQ ID NO: 367768 - DNA, 201 bp, Homo sapiens
cctctggaagaaaagatgagaatccgttccttatttttccactttccctaaagaaaaagaaaatgttaaaagattttaaaatcttatactgaactgatctygttttgtgacagggtctcacactgttgcccaggctgaagtgctcacggctcactgcagtttcaagttcctgggctcaagtaagtgatcctcccaccccag

SEQ ID NO: 367769 - DNA, 201 bp, Homo sapiens
aaactgtttgctcatttgtttctataacttggctataacctcattataaatgtacctgaaagaattgataatccataaaaccaaggtgggggtgaaactamattgaataacacaactatatctactaaaaacaaccatgccagataagaaaattagacctcatacactgaatgagaaacttacagggtcaaaagacaaaag

SEQ ID NO: 367770 - DNA, 201 bp, Homo sapiens
ccatgcccggccatactgttcttgcctgtaaaataacccactgcttaaaaataaataaataacctggcatttagaaataggctctgactccaacttaaaaagtgctttgaattctatcccaggtccatttttcaataaaaacagttaaaaaaaaaaaaaaaaaggcccaaaaagcaacatgtggcagtccttagcacttag

SEQ ID NO: 367771 - DNA, 201 bp, Homo sapiens
accatgcccggccatactgttcttgcctgtaaaataacccactgcttaaaaataaataaataacctggcatttagaaataggctctgactccaacttaaaaagtgctttgaattctatcccaggtccatttttcaataaaaacagttaaaaaaaaaaaaaaaaaggcccaaaaagcaacatgtggcagtccttagcactta

SEQ ID NO: 367772 - DNA, 201 bp, Homo sapiens
aggttgtcattggtgataaagaggaggttaaataccagatttctgttaaataaaaacactttcaatctgttaattaaaatgcacagcattttataaaaatsaatagtagagtgctggacttactaggggatgtagggttctaacagtgaatgaattttaaaacagaaaatattagcaaattggataagtacttgattttat

SEQ ID NO: 367773 - DNA, 201 bp, Homo sapiens
  misc_feature (1)...(201): n = A,T,C or G
tttaccatgtgggttttatatatatatatgtttaatggacttattttactttatatatgttgactgataattttttgagtacctactatggatttagcatnatactagacactacagggttaaaaaatgggacataatccttctcctgaggaaatttcaatatgcttgttcagacaaaacaaacagaaatgaatgaagcac

SEQ ID NO: 367774 - DNA, 201 bp, Homo sapiens
catttcgaggagaagctgaacccagaactataaagctaaggccaagtatgacttctttccattgcagggactttaactgcacttcgaatgtgttaccaagrttatggttaccctttgatgctgttcctggaagaaggaggagtggtgacagtctgcaaaatcaatacacaggaacctgaggagaccctggactttgatttc

SEQ ID NO: 367775 - DNA, 201 bp, Homo sapiens
gtttaacttatttaatcttaacaatagtcctgtaaggtaggttctgttattattcccgttttatatatgtggaaacgaggcacaattttaagtgatttgcyaacagtcccacagctggtaagtggctgaattgggataagaacgctgaatatttgtttccagaatatatgctcttttttccactgcgatatgctattacta

SEQ ID NO: 367776 - DNA, 201 bp, Homo sapiens
ttaactggtaggttttggttgatctgactatctgcacaattattccaaacactttgaaaggtatcaaaataataccataattattaaaatgcattaatacmccaatatatttcactgtaatgtggaatgtttacatgcatcagttaggtgtgggttgtatttactaaccatgtatggttagctatgttgctaatatctatt

SEQ ID NO: 367777 - DNA, 201 bp, Homo sapiens
atgttctggtatcccctttaacaactgtcctatttttctctccttttactattagttttctaaataagtaatctatacacactgcttctaaaataagtatgtcatttggccgggcatggtggctcatgcctgtaatccaagcactttgggaggccgaggtgggcagatcacctgaggtcaggagttcgagaccagcctgac

SEQ ID NO: 367778 - DNA, 201 bp, Homo sapiens
ataagtacttgattttattcttagatttgctactttttatcctttacttgggagttctgagcagtgttcactgtgttgatataacagcgttttattttttsttctacagatacaagatttccttactgaaaccctctacaaaggcattagtcctatcttgtaaggtatctattcggacagataacagaggcttcctttcat

SEQ ID NO: 367779 - DNA, 201 bp, Homo sapiens; identical to SEQ ID NO: 79831

SEQ ID NO: 367780 - DNA, 201 bp, Homo sapiens
tctctctaagttctgggattacaggcataagccaccgcaaccggttgccgaatgattttctttaaaatatatatttttttatttgttaagggaatttttamgaatggtgaaattgaattgctgtgggtataaaactaaggaatccccagaagaatgattttatttcataggaaagcaacctggagattagctaggaaaaat

SEQ ID NO: 367781 - DNA, 201 bp, Homo sapiens
ttttattcttagatttgctactttttatcctttacttgggagttctgagcagtgttcactgtgttgatataacagcgttttattttttcttctacagatayaagatttccttactgaaaccctctacaaaggcattagtcctatcttgtaaggtatctattcggacagataacagaggcttcctttcattacagtatatga

SEQ ID NO: 367782 - DNA, 201 bp, Homo sapiens
taaaatttacaccaccattaacaaccctctttttctctcaatttgatttttaaattcgaggaaatataaagaatatctcccagttggaaaagttggaaggrtccttgtcatagtgagtacactgacgttacagtacagatgacagcaatccactgttacacacattgaaccttcaaggaatagcataccctgttctgcagc

SEQ ID NO: 367783 - DNA, 201 bp, Homo sapiens
tttttcatttttcatttgttgatttcccattcgatgatgtagtgcttccaccgagaattgatgaaatgcttcaaaataataaaagtatttgttaaattccmctttaataaaaataaggcatgtaacacagtcattttaacaggaagccacagggtttctgtggtgttaccaaagtcctagtaaaaattaattaaaattgct

SEQ ID NO: 367784 - DNA, 201 bp, Homo sapiens
acaggaggaaggcgggaccttggtgtgagaggcggggcctcggcggggcgagaggcggggccgcgcggaagggaggcagggccacgctggtgtcattgtgmggggcacagatggcggtcagtgtgagtggcagccgacctgagggctgaagggggagataggagctgggatgggagaggattctggaaaatatctgattat

SEQ ID NO: 367785 - DNA, 201 bp, Homo sapiens; identical to SEQ ID NO: 79862

SEQ ID NO: 367786 - DNA, 201 bp, Homo sapiens
tccaacccaagagaacaggctacattaagtgtgctacatttttagcaacacaaacttcaaaaagaaatcagaaattaactgatgaattctggtgatatttwatttagaaaaagataatcactgattttaagatcttaatttttctttcttgtaaatgctacactaattagacgtaagatagtattagataataaaagtatt

SEQ ID NO: 367787 - DNA, 201 bp, Homo sapiens
tctatataagtattcactacaagcatcgataccagcaaaaaaaagaggaaaaactgaaaatactgattacatagctatggtacacagaatactacagttarcagttagcaagtaaacatgtggaacaaacacatagaaaaacaatcagtgtgaagtcaaaaaagcaggtgatgaaacagcatgtgtcatttcattagatat

SEQ ID NO: 367788 - DNA, 201 bp, Homo sapiens
gacaatcctaccacagaaaaacaaacatgattagtccagtcaaaaaggataaaccagtaactaaaaaaaaaaaaaggtgggtttttttttttaacctattraattgacagattctttcatgcatagtgaaactggtaaggggacaaggaaatgaaccctctaatagcctctagtgaggttatggtggtggagggaacaagc

SEQ ID NO: 367789 - DNA, 201 bp, Homo sapiens
cacttatagaatcagtaaaagacaatcctaccacagaaaaacaaacatgattagtccagtcaaaaaggataaaccagtaactaaaaaaaaaaaaaggtggktttttttttttaacctattaaattgacagattctttcatgcatagtgaaactggtaaggggacaaggaaatgaaccctctaatagcctctagtgaggtta

SEQ ID NO: 367790 - DNA, 201 bp, Homo sapiens
cccaggaggagtcattagctttaacagaatttccctctcaggagtggacagctagtgttctaaacagaaacaccaaaagcagcggtttcaagtgcttttcrtatctgtatctcagtcacgtccagagatttcgataatcagcagagtaaatgtgtgaaatatatttttgaaattcatagcttgttgatcattataatagat

SEQ ID NO: 367791 - DNA, 201 bp, Homo sapiens
agctactcaggaggctgaggtgggaggatcacctgcactggggaggtcaaggctgcagtgaaatgagattgcgctgctgaattcagcctgggcaacagagygacaccctgtcttaagaaaagaaaaaaaaataaaggaaagttttataatctacaggccatttttgtagcaattgagcagttctacaaagtggttttgaag

SEQ ID NO: 367792 - DNA, 201 bp, Homo sapiens
gggtttcactatgttggctaggccggtctcgaactcctgacctcaggtgatccacccgcctcggcctcctacagtgctgggattacaggcatgagccaccrcacctggtccgtttccagtttttatctacagtttgaatctttcctcagtgcctctagtctcatatatacaaaatacctgcttaacactttcacttgcctg

SEQ ID NO: 367793 - DNA, 201 bp, Homo sapiens
cagtttttttttttttttttgagactgagtctggctctgtcacccaggctggagtgcaatgaggtgatctcagctcactgcagcctctgcctcctgggttsaagtgattctccagcctcagcctcccaagtagctggaactgcaggtgcatgccaccatgcccggctaatttttgtatttttagtagagatggggtttcac

SEQ ID NO: 367794 - DNA, 201 bp, Homo sapiens
gagaacctgttattgaggtgaagaaactcaatcataattagagtcataatgattacactgggtagagtctaagcagcaatttctaaaatccagtgactctytattatctctgtgacaaaatgttggaatttaaatattacttctggaaggccaggtaatttttagatgtgttggaacacttttattgccccatagcatagc

SEQ ID NO: 367795 - DNA, 201 bp, Homo sapiens
ctgagaggtttttttttttttttttttttttgcctcctaaggaaccgtttaggatgattcataaagcattttctgaaataaaaggcagaaccgtacaattytgattttaaaaaatcagggaattagagtacctcagtcttgcagctttaaaagagcagaagaaaaaaagcattgaacaaactttacattctcttgatgggt

SEQ ID NO: 367796 - DNA, 201 bp, Homo sapiens
tattttcattatttaaatgtactaaagtttaaatacttgtagcttttagacatgaattaaaaatagaactattttgaaactggtcatgaagactgagaggkttttttttttttttttttttttgcctcctaaggaaccgtttaggatgattcataaagcattttctgaaataaaaggcagaaccgtacaattctgatttta

SEQ ID NO: 367797 - DNA, 201 bp, Homo sapiens
ggtacttaataaatattgttgacttgatttggcttaggtttgtcactggaaaatgtaaaagccaatgcacatttatagattgatttaaattttggggagcrtttttgctatgctatgtacatttagagaaataatggctatttttgtctaacaggaattgtaggcatgcgtaagttgaatgtgcaagatggacctctgagg

SEQ ID NO: 367798 - DNA, 201 bp, Homo sapiens
gtcgacgaccgacagggtggtgaaaggtaagcggagcgccgcggtggcctgggtgcaccgtgtgccgcaggcgccagggcagcttgcctcgcctcgcctckcctcccctcccccgccccaggttctcctctgtccgctccagccgcggaccttctaggatattgtgcaacccgcgaaccccgcgaaccccccgcccccgcg

SEQ ID NO: 367799 - DNA, 201 bp, Homo sapiens
gtaagactaatcttatttaacatgcaaaccacttctgttgttatatagaaaattttatgtagtatctatggcctggatgtcactaccaacaaagccaatgscagtttgagtatatctcagtaatgttatctgataaattccttttattttcatgtaaattacctattgtttcataaaaggctgctttgtgcttgtatatgg

SEQ ID NO: 367800 - DNA, 201 bp, Homo sapiens
ctcctacagtgctgggattacaggcatgagccaccacacctggtccgtttccagtttttatctacagtttgaatctttcctcagtgcctctagtctcatawatacaaaatacctgcttaacactttcacttgcctgtctaaattaacttgtccacactcagactcttgctttcccttgttctttctgagcagtaatggtgg

SEQ ID NO: 367801 - DNA, 201 bp, Homo sapiens
taccatcttctacctttgatcattccattgctgtatcatccatctactttccttttaactaaccaggtaagactaatcttatttaacatgcaaaccacttytgttgttatatagaaaattttatgtagtatctatggcctggatgtcactaccaacaaagccaatggcagtttgagtatatctcagtaatgttatctgata

SEQ ID NO: 367802 - DNA, 201 bp, Homo sapiens
gtagctcagttttttttatttattagttatctttctgcctctttagagtgtacactgaaggaggggagagatgtttaactctttttttcattgccctattyccagtgtctaaaacaatacatcacatatattaagctcttggtaaatacttgtacacatattcggtaacgatttaaatgttgactaagctcctctttgatg

SEQ ID NO: 367803 - DNA, 201 bp, Homo sapiens
ataattaagaaactgaatatggcaaaataattgcagtgttaaatttatttcataacattgaatttaaaagtcgtagttaaaataactttttaatttatttwttttttttttttttttactaatagcttttaaagtttcattttttatgtttggtgccagaattaagaagtggccctttctctgtataaagcaaatggagtt

SEQ ID NO: 367804 - DNA, 201 bp, Homo sapiens
ccctagattataatctccattgcacttatcattcattgatacactttgtagctcagttttttttatttattagttatctttctgcctctttagagtgtacrctgaaggaggggagagatgtttaactctttttttcattgccctatttccagtgtctaaaacaatacatcacatatattaagctcttggtaaatacttgta

SEQ ID NO: 367805 - DNA, 201 bp, Homo sapiens
ttcacagatatattggtaaatgtatcagtaaataagagtgctcaataaataagagtttaaataaattgaatgaattttgaaagcttaagatatttggggarcagataagaatgattaattataggctgggcaagaatttttgagtgaaggtagatgaaacgtgattattctgttacttttcttagtaaaatccaagtatag

SEQ ID NO: 367806 - DNA, 201 bp, Homo sapiens
ttgcatactatattatctgaatattcataagtaaatgcaaatagaagagcaatttctgtcaaattgggacatttaaacaaatcaagtgttaactttgttaytaaatttttaaaatgcgttttttgatatttacctaaatgaattggaaatgtaggtccacgcaaaaacccgtacacaaatgtccacagcagctttattttt

SEQ ID NO: 367807 - DNA, 201 bp, Homo sapiens
agtatatgtgaaacttagaatctatggaagcaagtcatttcataggaggaatttggaagtctttctcttaccaaattataatatgaatgatttttgcttaraattgttcaactctactttgacataatttttgataataaaaattctattcactggaatttctgttaaaatactcatgtaaagtggctagaaacagaatag

SEQ ID NO: 367808 - DNA, 201 bp, Homo sapiens
gtgctgttatttggagaacagtttctgtgtgtgatgtgaactctctgaaagaccttgaggaggaggaggtgaacatagatgaagtggctggctgaggtggraggattgcttgagcccaggagtttgaatctgtactccagccttgggtgatatagcaagatcctgtctcaaatatatataacagaggtctaactaaaaatt

SEQ ID NO: 367809 - DNA, 201 bp, Homo sapiens
attgtaagttagaatttgtcctgatttaaaaactagattcagcttccctctgcattagaaaactaggtgatttcatggaaatagggctaaacctcctaagrctcattagagaagggaccacatgtgcttagaaaggagtctgaaatgaggaagggggacaaagactcgttttaagattttaaaagaaaggaaagtgaggaa

SEQ ID NO: 367810 - DNA, 201 bp, Homo sapiens
ttagcttattcatttattcaacaaatatttgttgagccctttttaaagtgtcagtcatttttctagtcactggtgatacaaaagtgagcatatttaataaaaatatcttcatgctcatgaagcttccattctagtgacagaaaaaagataaattataaatcaaatagtgattgtatggggaaaagtaaagctagaaaggaa

SEQ ID NO: 367811 - DNA, 201 bp, Homo sapiens
gccttgggtgatatagcaagatcctgtctcaaatatatataacagaggtctaactaaaaattattagaattgatttttacatgtagtttatggaacaattyttaaaaattcataaagtcacactgtatttaatctactttggggttcaaacttacaaaaaggacttttaggcaatgattttttggaatgtaaaatatacca

SEQ ID NO: 367812 - DNA, 201 bp, Homo sapiens
agcacgttattgttgcttttgcaatttaatttctgttggctgtattaaaatttaatgtttgtatacactaatacatttaacagttattcttcagcaatagrcatgagtttttctactcacaaaaaccctgtagatcacataataactgaccttttcctactgacctttaaataaagcaatcccttaatgtactgctcattt

SEQ ID NO: 367813 - DNA, 201 bp, Homo sapiens
tcccaagcttaacaggaaaaggagggtgaaaataatagtattagtgaaaactattgtctaaaagtgatgagagtacaggactactatgaatcaggaatccygagagattgtgccagttctgacaatgtcttcctgtaattcatgaagaggttattctaggtgatctcaaagcccttgttggttttcattctatgaatgcat

SEQ ID NO: 367814 - DNA, 201 bp, Homo sapiens
taaagaccttcctactagggcctatatctataaggtttttgtcatgtagaaagaagaataatattactttaatattagattcaaattttcagggatgtcarcattactatcatgaccatattgtgtaacagtttattttccataactattttctattaaaaggaaatacaggttttgtcatgctcatcatgtttcttactc

SEQ ID NO: 367815 - DNA, 201 bp, Homo sapiens
ctacaaactcagaacctcttaaaacaattttttgcttcttgcaaattgctgtctttatgcaatattcctcaaagatcttgtttgcagtgaagcatccttcraagcatgtgaaatgtatttttcattaccatctcacatgttatatgcccttaattccatttgtaggaactccttctaacatttaatgaaatcctcagcagc

SEQ ID NO: 367816 - DNA, 201 bp, Homo sapiens
cagatatcacagatttaggtcttggcagaggtgtttcagcacagatctgttcactagtgttaaagaccttcctactagggcctatatctataaggtttttstcatgtagaaagaagaataatattactttaatattagattcaaattttcagggatgtcagcattactatcatgaccatattgtgtaacagtttattttcc

SEQ ID NO: 367817 - DNA, 201 bp, Homo sapiens
agcaaagtagttcatcaataatgtaggcattagcgcattataaggtacagaacaggagacaaatttacattttagaaagttatttgttaactttcttcctrccttccttctttcctcctttgttttgctttcatatgttgacttaaaccccaacaaaaattttggggaaatgtctgcaccaattgtttttcattcaggagg

SEQ ID NO: 367818 - DNA, 201 bp, Homo sapiens
tttgacaatcatcgacacaggaagcttgcaaggttgtggtgacttcactttgctgtgaggaaattgaatctgagagaggctaagcagagtgtccaaactcmctcagttggggagcaacactaatgagagtcttactcaaaactgtgctatgtagtctagtataaattcttagcaatactagtagtctagtaatgaattcta

SEQ ID NO: 367819 - DNA, 201 bp, Homo sapiens
ttttctattataagagtcatccaacatgaaataaactgcttttgctgagtttgttgctgttgttgttattgctgcagcagctgctgccgttttgtttaatygcagattccatagagcataaccttctttcaggaatcatttttttagggattcctgtactggatagactactgaacaaaatcatcaaaatctctcctcccc

SEQ ID NO: 367820 - DNA, 201 bp, Homo sapiens
atgtttgggaaaaagactgcctttatggaaggagaaatgtggaatgtctgtcttcgtttgattattcttatttttaaaccatgtgcagtatcccttacatsaaaaagagatacaaagaaatgttttctattataagagtcatccaacatgaaataaactgcttttgctgagtttgttgctgttgttgttattgctgcagca

SEQ ID NO: 367821 - DNA, 201 bp, Homo sapiens
atattgtctcattgctttctaataatttagctcttgttaatatcaacaaagtaaataaatcataatgttttggcttgaacccaaagtagctttcaaatgtrttaatataccctaaggaaatatacaatgtaagtggtaaccaacaaatgggtcttcatattgttgttgctttggaatccttagaggtaaaaagtattttat

SEQ ID NO: 367822 - DNA, 201 bp, Homo sapiens
ataggccttcagattctcctgagatggtctgtcatgtccagctatggatgctgaagctgaatttcttatacttaattttttatagcatttgtgtaaactaycagttttggaggaatggttaaaattctgacacagtggcctgtgagagtattttgagttccattttgaaattatggctagcagatgctatgagtttggtta

SEQ ID NO: 367823 - DNA, 201 bp, Homo sapiens
atcagaggcttgtgtttctatgctgaatattttcaaaacaagaatgttgtcaagaagtaaaggtcaacatcagttctctctaaaggcttttaatttctatwtcttttggtgatgcactctaaatgtacacattaaaagtgttatataaaaatgaatgtgactttttaagttgtgtttctaatgcttaagtatgtataatta

SEQ ID NO: 367824 - DNA, 201 bp, Homo sapiens
tctcacttttgtcaacttccttcagtggtccattcctgtcaagttaaacatcattaagttatttatctttctgaacagtttcttctgctttaatttatttstgcttagctatattaacaataagatttgtgttttcaaaattttaagcaaaatttacacacaggctaattaaagtattcaatgcatattaaaagtcctatg

SEQ ID NO: 367825 - DNA, 201 bp, Homo sapiens
atcccagcaaaaggctggaccaggctatggggagagaagtgcaaaggaaaggacaaatacaaggaatttgggaaaacaggacgtgattaatgaatgtggartgtggtacaaatttgtcaggtatacttgcccaacatgtttcttacgttttggaaatgtgcaaccttataagggaaccagaaaactgtctttcagcagtcc

SEQ ID NO: 367826 - DNA, 201 bp, Homo sapiens
ttctatatataaaggtgattcatccacaggcagtaacatgtaaattccataatccctctgtatgctatcacaaatacattaaagaaacactttttttttcyaggtagagcatgtgagctgcattatcttaaagacgtttatgttgctttctatgtttattcccctctattacatgaccaggtctttctctactttgtaagt

SEQ ID NO: 367827 - DNA, 201 bp, Homo sapiens
atgtgagctgcattatcttaaagacgtttatgttgctttctatgtttattcccctctattacatgaccaggtctttctctactttgtaagtgaatgaccastggagtttcttagatggtttaattttgttattttgggatcagggtaaatgagttatgtttgttttgaagcagtgtttgtatatctgttgtttatcttgtg

SEQ ID NO: 367828 - DNA, 201 bp, Homo sapiens
agttgacagtggaaaacaatttagaattttagaaagttaccttaattgacagtaaggaacacaccttgtctgtcttttcttgtgagccttattgccctctrtgaaggaagtattaacaaaaacatttgtttgttgattataagattgaatgagatacaccacatcttttacagtaacagggacaagaatggcactgatgcc

SEQ ID NO: 367829 - DNA, 201 bp, Homo sapiens
gtgctcttctgcaccttcctccttcctttgtttttctgtcccttcccctgacagagagcctacaagggccacagggttaaccatgtgtgtaaagcttaatrcaaattttcttcttagcaaagtagccagcccactaactatgggagtaaggtggtcaggtggatagttagagctcacataagcttgacacacatttttctg

SEQ ID NO: 367830 - DNA, 201 bp, Homo sapiens
actgtttcaatttccatatagtagtatattttgtagattatgaatcatattattattattaagcattaatttagaaaacaaatattttcttgaaggaaacwccagttatttctaaataatacaatgtaacatttctcttcaaaagattactttaaaatatgatatatttatatgtaaggagtctacagtcaattcaaaatg

SEQ ID NO: 367831 - DNA, 201 bp, Homo sapiens
acctacctgatgcagttttatggaaattaagtaaagcaatacacataaagtgtttagctagagactgctatatagtaaatgctcaacagaagttagtgatratgttaccttgcttgtggaagatcttgtcaaaaaatcatttgttcttttgccattggcttgtgctttctctgtgaaaatgatacctctaaccccttttct

SEQ ID NO: 367832 - DNA, 201 bp, Homo sapiens
tgtatacacattagacctgattatttgagaaatcacaattgcagctatattttctgctgaactttgacgttgcaggagaaattgtattttctaaataataraaaataatagataatagaaaaaagagagctaataaaggaaggcttctcaggctgaatttcaatcatagttaaaataacaatactatatctgattttaatg

SEQ ID NO: 367833 - DNA, 201 bp, Homo sapiens
atatcagttttatttttcggttatttaattcacctttagtcactgactacacgcagacacagaaaagtttatgtagacatatatgtatttccgccaacatrataataccgtctgcatttaaagatcacagatttcttaattattcctggtgatgatgagggaagaaggagtggtgatggtatataaatcccaaaagagaag

SEQ ID NO: 367834 - DNA, 201 bp, Homo sapiens
tcaacatcctttaggatggtgtgtgtgtgtattttagtccaaggaatctaaaacaactttcagaatttgtaaattttcctgaacataatgatttcaatgtracactataaataaatctggcttataatgatgtactttataatcctgaccaggttacttttacgtcatgccagaaacacattttttaagctagcacttaga

SEQ ID NO: 367835 - DNA, 201 bp, Homo sapiens
tgccttactgttactcatccatttgctgctcttggatcacacatttttttttgaccttgccatttgtaaaatgtaattgaattgtgtgtgtgtgtggctayccttttcttttttaattctaggcactcatctttactattaattctgtaacaattgctatttttgactttagaacattgtcctaacttttttcagtgagaa

SEQ ID NO: 367836 - DNA, 201 bp, Homo sapiens
tgtgctttgccttccctggattcctcagactcctatttttatatcagattctactttggttgctggcatgactttaagctggcagggcaaagggctttctygaaggtgactgtctcctcaacctgtctgacttaaacggttgggtcaaggaaggaaaaaaatggtatgatgcagcaggaattgggttgttgaaaactgtat

SEQ ID NO: 367837 - DNA, 201 bp, Homo sapiens
gatggtggatttagcacatgtatcatcatatgtgtaagcagatacaaaagactggtgtaaatttctgatataataagaggtcttacttgctagacatgtgratagtatggcatagctcctaaaaactaatttttaaggagacgtatatatggtcttaatagatattattcagttcagtacctgaacctttttgccatcagc

SEQ ID NO: 367838 - DNA, 201 bp, Homo sapiens
attaatgtccttcacctgtgactctacaacaccaattcattcactttggtttttcagccagacatctggccattttagtgatttattgacttaactgattmatttggtaggggaggttaatactattgtgccttcagatatagccttaagtttctgtcaccaagaggtgatggcaatctaacctgttggcctcaggatgtg

SEQ ID NO: 367839 - DNA, 201 bp, Homo sapiens
atatgtctgataattggtcatacaaatctctgttgctaaattcttgactttgaagaatgtttgattttcttctgtgctattttctgctctaaatagtcatrtaattttacttttggaagagaattagagactactccagctactggccttacagattaggaggcttggagcagtcaggcactgccactcacagctggaaag

SEQ ID NO: 367840 - DNA, 201 bp, Homo sapiens
tttgctagctgcttcttggcaagttttgtaaacttttgttgacttttaactttatgtcactcatctcttaaaactgtagatcacttttgtcttgctaggtrcaatgttggtgtcacacagtcttcattacatgcatgtgggtggcacatttctgatgtcaggctagcttccttcctaacacttccttgcaccattctagca

SEQ ID NO: 367841 - DNA, 201 bp, Homo sapiens
aagtgcagaatacaaaactataagcaaaccatgattacacctatatgtatatatgtattctgatatacagatatgaaggaaatgtgcaaaataaaatgcarattttatctgtagagttatttttgttgtaacttttcttttgagtatattttaatgtagatatacatagttttaatgaaattggaattacatttataatgg

SEQ ID NO: 367842 - DNA, 201 bp, Homo sapiens
tccagtagaggtcaatgggagacagtgtgactatatttgttagatagaatacattattttcaggggcagtatgaccatgattttaaataaaaatttcagaygtaaaggtaagtcttttttggagcagattttgattttttgcttaattaatcaaggcctaatgctaaaactgttaagtattcatcatgctactgacaaata

SEQ ID NO: 367843 - DNA, 201 bp, Homo sapiens
atgcagaatccaatgccagcagctggctatatgtgtctgggctggcatggttgactctttcccaaggatggtcatctagtgggttcctcttcctgacatcscaggtacaattggccatgatgccctctgcatggtcaaactatatgtttcctaagagaccttgggcccacttctgtcaccttacatggatctgttaacatt

SEQ ID NO: 367844 - DNA, 201 bp, Homo sapiens
tctagcagcatgatcttagggcatgtaagcccattttaatgttagtcttaaacatctgacacacacacacacacacacacacacacacacacacacacacatacacggacattttgggattatagtgatattgttaaattgaatatataactggaatcaagtgacatttgaatgagacagattcacagaagtcataggctc

SEQ ID NO: 367845 - DNA, 201 bp, Homo sapiens
ttctagcagcatgatcttagggcatgtaagcccattttaatgttagtcttaaacatctgacacacacacacacacacacacacacacacacacacacacacatacacggacattttgggattatagtgatattgttaaattgaatatataactggaatcaagtgacatttgaatgagacagattcacagaagtcataggct

SEQ ID NO: 367846 - DNA, 201 bp, Homo sapiens
cctcaaggtacactcaattcagagaatatataccagacaaaatctcaggaaaggacatgagagttttcttaacaaagaggtacattgttatgctgttacaycttaaggatgaaaatgtttgattattgctattagagtgaatagtgtttccctaacattcttctcttacattttggctaaagaattatattaatttaaatg

SEQ ID NO: 367847 - DNA, 201 bp, Homo sapiens
gacgtagtcacagtggagattgaatctctttttgatgatgaaaaatttgtctagagttttttaagggaggtatgaattttgaagtagaatatagctttgartgatactcaaaactaaatttaatggccattcccaatttttaagcaagacatacattcaaccttaaagttttcaacttgattcctgtgctttgttaataac

SEQ ID NO: 367848 - DNA, 201 bp, Homo sapiens
gatagagagacaaatgtaaaatgttcctgagtatatcctaaatacaaataatgcgtattcagtaactaatgttgttgggctaaaaataaacaaatagtacrtttatggtaagcttgacacctttcacacagctgttaacattttctctcatctctgtgtaatgttctgtatgtttcatgaatgaagaggtacctcatccaa

SEQ ID NO: 367849 - DNA, 201 bp, Homo sapiens
agtggtgaatagaacatcagcacccctgttcaggggcagaaaagaatataaattgttagggatactggtaatccaccaattactttaactatctaatgacmatagtttaggcaaaagagagaggaaaatgatttaaaattattcattatcgtatttaaaaaatggaggaggaagagaaaggtgagaacagtaaagtagatt

SEQ ID NO: 367850 - DNA, 201 bp, Homo sapiens
catcttgtcctgggactcatgcttcttttttttttttttttttttgagacgggactcatgcttcttatgtttattgtattgtcatgataaggcatccttcrttcacatactactcatttcctgttaattacatacatacgaggtcctgtcttatgcatggtggaaaataaaaagattaattggacacagcgtttactttca

SEQ ID NO: 367851 - DNA, 201 bp, Homo sapiens
agtcagcagctggctaacagccttgcttctccactgtttcactttaccccaaatattaagtgtgggcctcttggtagactgaaactgatatgagagcaacygtctatcaaataagagagacagttaagaagtacttcaaaggaggcaagaggacaagagggcaaggcccaaaagtagttgggcctctgagccaggctgcaa

SEQ ID NO: 367852 - DNA, 201 bp, Homo sapiens
tagttaaaaaccattaccatggagttataaatgtgtgcagaagggctttctcctagactcctttcacctgtttcacagtggtatgccttagttttagtttygtttttttttaccaactgagggagaaaaatcacatataaatcagaaaaaaagataagacacaatgacaatgttattttaattgagtgaatgcttatattc

SEQ ID NO: 367853 - DNA, 201 bp, Homo sapiens
atgaagtaaccaaaatatcaaaaattaaagtagtgttgtgatagaacttctcaagactgcatgcagaggaagttgtggactgtcactcatttctgtgtccytgaatccttagactcaagaatatgtggtggaaggagcatgagaaaatctgtacatgggaaggataaagaatagatatacataaataagtatatttaaata

SEQ ID NO: 367854 - DNA, 201 bp, Homo sapiens
atctccctaatccagggtggaggtaactaaccaacccatttctttaatatttttccttttggaactttaatatatcttatccttattaaacaccccttcaytagaagaagacatcaaaactaaaagaatcaggagtaaacaataacatggaagtatttaacatggaaaattaacttggagcttagtgtatgatttggaaac

SEQ ID NO: 367855 - DNA, 201 bp, Homo sapiens
tcctttgttagtcatcataccaaactgattgttcgggaaaagagccccttggtaatcacagttgagatcgtttatttgtctttaaaattttttatttcctkttaatatacaggttagcaatctattatatttatcaagaagaatacacttgcttattaaacctattaaaaatgtaatagttggaaaaaatttaacctcagg

SEQ ID NO: 367856 - DNA, 201 bp, Homo sapiens
ctgtcctatattaagaataaagcaaagcaatgtaaatattttaaaagtcattttgtagaagataaaactgaaagctaatgttgactgaaagttctctgccrtgtacttaaaacccagtaataactgaaatgtcaggaaattgaaatattaatattttaccctcacaaaatattaactccttatgttcaatacttttttttt

SEQ ID NO: 367857 - DNA, 201 bp, Homo sapiens
agcaatgataaaacttactttacagcattaatgagagtgttaaacaaaataatatacttgaaactatctagttcagtgctttacttcatagatgggaaacrttaaatgcttattttcttttgtcctcaccatctctattagtctattggtgactgaatctgctacctaggaatacaaccctaacattacagtgcttctcag

SEQ ID NO: 367858 - DNA, 201 bp, Homo sapiens
gacatgtagatactttatttaaggagtttatgccctaattgggaaagatagaagcctgtgtaggatgaggtgattgggaagattatcatggaagatttcayggttgacgtataacttgtgaagactagtagaatttaactgtgtagaaacgaggaggcagagataggtggagagacaacatgagcaactgggttgggaaag

SEQ ID NO: 367859 - DNA, 201 bp, Homo sapiens
aacatgagcaactgggttgggaaagaaatgagtgacaatgggttaataggaaggagaagggaattgaaagccagggtagtgtatggaattgatgaatgatmatataatttccaaaattacttctttaatgtgtgttctgaagggaggaagggtcccttgttcaagtaagtgtgttaatatacacagtgagaatccaagaag

SEQ ID NO: 367860 - DNA, 201 bp, Homo sapiens
aggactctgggagcacagtaccaaaagtctgtccagtagaggtcaatgggagacagtgtgactatatttgttagatagaatacattattttcaggggcagwatgaccatgattttaaataaaaatttcagatgtaaaggtaagtcttttttggagcagattttgattttttgcttaattaatcaaggcctaatgctaaaac

SEQ ID NO: 367861 - DNA, 201 bp, Homo sapiens
acattaacccaatattggaccagtggtgagtaagtcaagccagagacttactctgtaagttactgaccgataacttcttttgtggaattcagaattaagcrtagtagatatgtaaactctcaaaagaagtgatcaatattttataattaaaaagccactaccatattttcctctagtccttccctcctactttttattaat

SEQ ID NO: 367862 - DNA, 201 bp, Homo sapiens
tgtacagtaatgttatgggggctaaataagtttatatataaacacatgtatgtatgccttactcatcttacagttttatcgttgtttctgattttattacytaaacgatgcctggcataaaataaatactctataaatattagctactactgttactatttactctagttagtataacaatcctcagatagatgtaatcct

SEQ ID NO: 367863 - DNA, 201 bp, Homo sapiens
gaagctgtgtagctttgcattcatttttaatttttttcttcgaaacaaatttctttaggatattctataaactacattaaatgggtcaatttttgcagaargcaaatataaataatatttacttatttgcatattttattttaattagatcattatctagtaatttcctttaactgtgatttttaaaattatatatatata

SEQ ID NO: 367864 - DNA, 201 bp, Homo sapiens
agaaggaaccttgaagatgaggatgcatcagcattttaaagatgttcaaactgaggtgaattacttgtccctggttacacagctggctaatgagggagctkatgcttgatgcttcatttgagcaacattctggggagtatttctggcataaaaccaatttacaaatgagattactctaaatctagtgctctatctacagca

SEQ ID NO: 367865 - DNA, 201 bp, Homo sapiens
gtcatttttatcccatcaaattggtgcacttaagaggacttccaattgccagtgcttctaagaatatcagatagttgacatttttatgtactcacgataasaaggtgaatgaaaaatgtactttttgtctcagtgatcctatcccacttctgggaatccatcctatagagaataccaatacatagagtacgagaatgtcta

SEQ ID NO: 367866 - DNA, 201 bp, Homo sapiens
  misc_feature (1)...(201): n = A,T,C or G
actgctggggtttaaactcaccaagttatacacataaatcactagataattatcttgggcaaggtgcttaatatttttgagcctcaggtttctcctgtacngtaatgttatgggggctaaataagtttatatataaacacatgtatgtatgccttactcatcttacagttttatcgttgtttctgattttattacctaaac

SEQ ID NO: 367867 - DNA, 201 bp, Homo sapiens
accatcataatcatccttgttgcctttacattgagtaggctgaggaggaagaggagagattcgtcttgctgtctcaagggtggcagagaaggagtaggtakaggaggtggcaggggaggcatgcatactctgtataacttaatgaaaaaaattcatgtataagtggacttgggaagttcaaacttacgttgttaaagggtc

SEQ ID NO: 367868 - DNA, 201 bp, Homo sapiens
  misc_feature (1)...(201): n = A,T,C or G
agccagcccaaatatcaacagctatttctgaatttttactaatgtgcacaaacgtaatttctctagtcctggcctgctcatgtatcaatgaaagcaacttnttgtaagactcaaagcaaaggaaggaaggggaaatccaattttgttgtattaagtgtagcaactttcacaatgaattaattaaataaatgttttccaagc

SEQ ID NO: 367869 - DNA, 201 bp, Homo sapiens
gtggaccatcataatcatccttgttgcctttacattgagtaggctgaggaggaagaggagagattcgtcttgctgtctcaagggtggcagagaaggagtakgtagaggaggtggcaggggaggcatgcatactctgtataacttaatgaaaaaaattcatgtataagtggacttgggaagttcaaacttacgttgttaaag

SEQ ID NO: 367870 - DNA, 201 bp, Homo sapiens
gaccttagtgttagtttggctagctagtgactaatcctttgacgttggatgattcactcatcctctctctggacttcacttccttttatttagtatgagasggtcagtcttgattgggagttttctagttttgctccagaaagcaccaggattgtgtaagcactccttagcagccatcatcgaggagaaaggaggcacact

SEQ ID NO: 367871 - DNA, 201 bp, Homo sapiens
tttctcctctttgccatatataatgtattttttatgattaaaattcataaagcatactcttagaatatactaatattagagacaaatataggccttaatawtaaatgattaaattaggtacatgtaaggcatgaaattatagcatctacttgatatgtggttataaaattataatactgaaataccccaaggcaaacaaat

SEQ ID NO: 367872 - DNA, 201 bp, Homo sapiens
taacagatctattctgtatgttgtgttttcatgtgttgatttagtgtgtttgtgtctgagctgtaggcgtctcttgtctaccacgggggagggcgtatagygtactcttaattgtgctgttagtcagtcctcattagcactatggtgaggaaattgtttctcacttgcttttattctgtggtgttgattaaaagcagcatg

SEQ ID NO: 367873 - DNA, 201 bp, Homo sapiens
aaaggctatatatgttcagtatagttgctgttttttttccctatgtatatttaatttgcctttggttgaatccatagatgtggaacccagagatatggagrgtcaactgtacttatttccacagccccagtctgtaactccctgtgctgtttcttagcctaatgcttttatacgtggttcagaatgggcaatatgttctat

SEQ ID NO: 367874 - DNA, 201 bp, Homo sapiens
aaaaagcaggagtggattcttccagtttgtaggttgataaaggtgagctgtaaaggaaaatggttttgtcctacatgttttcctctggttttgagtcattmttgttttggagccactgccatggtcatcatcaacctttctgttccctttaacccagtaatattccactgcaccagctactgccatattagtggtttacag

SEQ ID NO: 367875 - DNA, 201 bp, Homo sapiens
agacaggggtcttgctatgttgcccaggttgatcttgaactcctggtctcaagctattctcctgccttcttagcctcccaaaattacaggcatgagcaacygcacctggcccagatttcttaatgtaacatatttcgataatgacacatataagacaccctggaagtcctgcaaatccatgattcaggatatgggtggaga

SEQ ID NO: 367876 - DNA, 201 bp, Homo sapiens
ttaaaagaattatgactgtgtagcacagtacagttaacaacaatcctgaattgattttacctgaaaatactattttggtcatgtactgtaacatttgtacrgatacacttagcaatttgactaagtgtacatgtattaatgaattcatttttagtttaaaagcatggtcactggaatcagattttctagctttgagttgag

SEQ ID NO: 367877 - DNA, 201 bp, Homo sapiens
ggaggctgaagcaggaggattgcttgagtccaggagtttgagaccttcctgggcaacatagggagacgctgtctctacaaaaaattaaaaattagccagcygtggtagtgcgcacctgttcctagccacttaggaggctgaggtgggaggattgcttaagcctgggaggtcaaggttgcagcctggatgacagagcgagac

SEQ ID NO: 367878 - DNA, 201 bp, Homo sapiens
cagccgtggtagtgcgcacctgttcctagccacttaggaggctgaggtgggaggattgcttaagcctgggaggtcaaggttgcagcctggatgacagagcragactgtctcaaaaataaaaaagaaaaatagaaaaagaaaagaagaagaagaaaatcatcttgcttacattcctgtggaacatattgttgcctctgcatg

SEQ ID NO: 367879 - DNA, 201 bp, Homo sapiens
aatttggtacttcccagtagttgctactggagtggttttgtgtaatgatgtcctctggaggaactctattgcatatataaattttaaagggcgaaaagatyctcagagaactcacaatcttaactgttgttttgttcctgtgtgtactctcacttttagaaatgcgttcatctgctgtatttctgaacctaagtatgtgca

SEQ ID NO: 367880 - DNA, 201 bp, Homo sapiens
agattccaggttttagaattttttcttatggaagagaggcaaactggaatcccattcagtcacaatatttggttcagtcacaatatttgattagacttcarttgtcttggacagaagtaagactgttctccatattcttaaaaaatggaaatgtgcgtaaattattttctgtacattcactattttaaataattatttccc

SEQ ID NO: 367881 - DNA, 201 bp, Homo sapiens
aataacctctactttataaggaaattgatgctgagttgtcattatgcccaacatttataatacatatacagctaatttgaatgttataagtatagaaaaartatcaggtaagtctgtattcaaataggaatatcaaagtaaaataaccagtgattaaacattccagtggtagtacatgggaaccaagtgagaaaatatgta

SEQ ID NO: 367882 - DNA, 201 bp, Homo sapiens
ttttctcctctttgccatatataatgtattttttatgattaaaattcataaagcatactcttagaatatactaatattagagacaaatataggccttaatattaaatgattaaattaggtacatgtaaggcatgaaattatagcatctacttgatatgtggttataaaattataatactgaaataccccaaggcaaacaaa

SEQ ID NO: 367883 - DNA, 201 bp, Homo sapiens
gtggaagtggaccatcataatcatccttgttgcctttacattgagtaggctgaggaggaagaggagagattcgtcttgctgtctcaagggtggcagagaargagtaggtagaggaggtggcaggggaggcatgcatactctgtataacttaatgaaaaaaattcatgtataagtggacttgggaagttcaaacttacgttg

SEQ ID NO: 367884 - DNA, 201 bp, Homo sapiens
ctcccagacagcatgttttgtgtatctttgcatccagaatatccattctgtgcataaataaacacatatcccccatactgatatacttttttttaatctargagaatataagttaaacctaattgctcaatattagaacccaaataaaattcagtgaaaactccttagtacttacatatctctttactctttgttcagaag

SEQ ID NO: 367885 - DNA, 201 bp, Homo sapiens
ctgtggttaatttttagctctctctcccagacagcatgttttgtgtatctttgcatccagaatatccattctgtgcataaataaacacatatcccccatastgatatacttttttttaatctaggagaatataagttaaacctaattgctcaatattagaacccaaataaaattcagtgaaaactccttagtacttacata

SEQ ID NO: 367886 - DNA, 201 bp, Homo sapiens
ctaattttttgtatttttagtagagacggggtttcaccttgttagccaggatggtctcgatctcctgacctcatgatccacccgcctcggcctcccaaagygctgggattacaggcgtgagccaccgcgcccggcccgagtgaatatactttcacaccaagtataccagtagccctttttcttaagtaattgcctattgat

SEQ ID NO: 367887 - DNA, 201 bp, Homo sapiens
aaaaaagaaaaaacgaaaaggaaaaaagaaaaacgatgacaaggaagacattaccacatctctgttaggcattaaaaagactttatgttgagggagtataytcttctactcagtgagtttgtgtgtgatttgcatttgaatgcaaactaattatatttgctctaaagaaagtacgtatgttgtacttactgtatatacttt

SEQ ID NO: 367888 - DNA, 201 bp, Homo sapiens
aaatcatgccacaaagacagctagctcagcacctcacttgaccagagccaaacctgcctcttctgcttgctttcacttgtgcctaatctttgaagattgtmtgctcctaacgccattgaatttggcaaatgtagtaaaattggttgtaatttgataactagtttcagtttcactgagatatgaaggagaccagtggcttcc

SEQ ID NO: 367889 - DNA, 201 bp, Homo sapiens
agacagagtctcactctgtcgcccatgctggcgtgcattggtgcagtctcggctcactgcaacctctgcctcctcggttcaagtaattctgcttcagcctyctgagtagctgggactacaggcacatgcgaccccacctggctaatgtttttatttttattagagatagggttttgccatgttggtcaggctggtctcgaa

SEQ ID NO: 367890 - DNA, 201 bp, Homo sapiens
ctttcctgctgtgtgtgtttatttcagttctgaagctagcctgaaataacctctactttataaggaaattgatgctgagttgtcattatgcccaacatttmtaatacatatacagctaatttgaatgttataagtatagaaaaaatatcaggtaagtctgtattcaaataggaatatcaaagtaaaataaccagtgattaa

SEQ ID NO: 367891 - DNA, 201 bp, Homo sapiens
gagctccaatttcacacggaggcctcttaccatctcttgcttcatggtgaatacctctgcatgtgggaaaatttcttcctgctggaatcagcttaggttcrtattttctttttcttctttttttccctggtgatatttttgtggaccctgaacttcaaatatattttttttggttgttgtttatgaaaggtgtccagtacc

SEQ ID NO: 367892 - DNA, 201 bp, Homo sapiens
tttacctctgcatggaacacttttaatctgtctctcctgtgtgaaacttctctgaaacccttaccagctgtctgtgctgctacttgtctgttgtacgcacratggatcacaaatgttggcaacattttttcttcattaactgagaaatctctgaggggcagggtcttatccagttgatctctccagtgcttagtgcaatgc

SEQ ID NO: 367893 - DNA, 201 bp, Homo sapiens
ttatagccctcaaaagcaggagtcgtagcacagtttctgtactgtaattatttgattacttggttgtctttcacactaaataatgagtacctgaactacamggacattgtaatcccaagtatataacacaattcctagcgtatcataggccctgagaaatattggttggaaagaaatctttattcacatttatggataatt

SEQ ID NO: 367894 - DNA, 201 bp, Homo sapiens
aaattttaattgtaactggatatttctgtttacaagtctaatatttaaccatacttgagatggccatatgtatttttatttgaagggaattaatatctatwataaaagtgaaagactttcaaacacgcaagtgatgagtgtctgaaggagtagcgtaagtagaaccctagtaaatatgttcttacagttcttaggggctag

SEQ ID NO: 367895 - DNA, 201 bp, Homo sapiens
ctgaaaaagaaagctttgggtatccatagaattattttaagaaagtgttccctgaccttgtctcaaaggatttgaaaaatgtgaacatcttttataaaaaktaggccactaaatctgatttcctttatatgaaaatattcgtatgtattgtaacaactatataagtggcagttaaatatgttttcttcctaagtgtgatca

SEQ ID NO: 367896 - DNA, 201 bp, Homo sapiens
tgtgaactttcagttatctcagctaccagatagcgaataagccatacatttcttttagagggaagagtattttgtttcttgaaacagaaaagttactaaaygatgctgttatatattatttttgtacaataagtatgttttggagttgtaaatatgattatatatatgcagtcatccttaagattgacattcacgaaccat

SEQ ID NO: 367897 - DNA, 201 bp, Homo sapiens
ggtattgttagttaggtgtctttacatcaagatttctttgtcttagaccaatttaaaaggaaatatgaggctttggggtcctgaatgacattgggctacaycttagggactcttgagtctatctgagggtacatctttctgtaatgctggcataaggagctatgagacccattagcttattctgaccctaggatatatata

SEQ ID NO: 367898 - DNA, 201 bp, Homo sapiens
tgtgagaaataaatatctctcagtattagaatttcaattctaagaagtgatttattaatcatttttacttactaagccctatcgagtactttctgggaagyaatgtagtttatttgttacaggtattctggcatcagactgctggggtttaaactcaccaagttatacacataaatcactagataattatcttgggcaagg

SEQ ID NO: 367899 - DNA, 201 bp, Homo sapiens
taaattcttacctcaattttttaactgatttgtgagatttctttttctccattaacctgattcttattgaaaggaatgaactgctattatggaagtactgycaatttcatatcatctaatctgcccatttgaaattgatgatttagtcgtaaaggagtatttttagtttgctttaattaagtagcatggcttgtaatgtga

SEQ ID NO: 367900 - DNA, 201 bp, Homo sapiens
tgtgtgtcttcataactaccttgagtggaaagagataaaaaaaaggtaataaattggatggcttggacaaggttgtatgttcagaacctgagctttaccarcagaaaaattgcagcatcatactgagcgatggtatcatttttttggtatcatttttgtatccttctatcccccaggctgaagtgcagtggcacgatctca

SEQ ID NO: 367901 - DNA, 201 bp, Homo sapiens
taaaatgtagtttatataatttactatttctgttctttgcaagatacaagtatcactctttttgaaaacccttgaggtcttgtgtgattacattaataatwtctgtgagtcaagttgatcaatattaagatagaacataaccatcattattattggttactgagaattcgtggtatttcgatttaagccttagttttatag

SEQ ID NO: 367902 - DNA, 201 bp, Homo sapiens
gtttatcaaaatatggagtgtagtagaataaaagtagttcatctttatttttctttagctttctcatgcatctgttaaggagcagtaaaatgaacaaaagrtactgtgagaaatctggactgtggtagactctagatgaataatctgaaaatttttcacatacaaaatacttatatttagttttaaaaacaaacataatag

SEQ ID NO: 367903 - DNA, 201 bp, Homo sapiens
aattgagaagagcctgattaaggagttctgtggcaatagaaaatctctcttcaattcattgccaaagcatagaggcttctgtatatagtatttaaaagtaragctctaaagtaattatttccttggatcctaagaggactcgtgttagtgaaagcaaagtgggacttatttcgacccacaaagaagagctgatttagaggc

SEQ ID NO: 367904 - DNA, 201 bp, Homo sapiens
cgaatagctgagactacaggagtacaccaccatgcctggttaattttttatttttgtaaagatagggtttcgtcacattgcccaggctagtctcaaacccrtgggctcaagggatctgcccacctcggcctcctaaagtgttaggattacaggtgtgagccactgtgactggcccatgtgtgttataggacaagttgatac

SEQ ID NO: 367905 - DNA, 201 bp, Homo sapiens
gtacaccaccatgcctggttaattttttatttttgtaaagatagggtttcgtcacattgcccaggctagtctcaaacccgtgggctcaagggatctgcccrcctcggcctcctaaagtgttaggattacaggtgtgagccactgtgactggcccatgtgtgttataggacaagttgataccactgtcaagcctagtggagg

SEQ ID NO: 367906 - DNA, 201 bp, Homo sapiens
acaaggatgttgcgttattaatcttattctcagtgtttgtcagtgtctgctaaacatttgttagagttaatgattgagtgaataatgcagggattaattcrtgaatgctttgtgaaagcaatggagatatggatgtggactggtagagtggaggaccttcctctaattgaggcttggagtggagggcagaggaagtactcc

SEQ ID NO: 367907 - DNA, 201 bp, Homo sapiens
tcagtgtctgctaaacatttgttagagttaatgattgagtgaataatgcagggattaattcgtgaatgctttgtgaaagcaatggagatatggatgtggaytggtagagtggaggaccttcctctaattgaggcttggagtggagggcagaggaagtactccagagctggaacaaggacatagtgatgagcataccatgtg

SEQ ID NO: 367908 - DNA, 201 bp, Homo sapiens
tagatgtaatcctcacttcacaggtgaggtaactggagccgaagaaggttatttaacctgctcaaggtcataagctggtgagtgtgcagagtgcaaggttygcacccaggtttgtctgaccacaaaagcctcctgctcagccaccaaatctgccaagactgcttcaatatgacagcatagtgaaatagatgtggctggatt

SEQ ID NO: 367909 - DNA, 201 bp, Homo sapiens
cagggagttgggttatgtcagtctggccccatgccatgaggtggtattcattgattgcctccaagccctgttgttggtgctggagatgatgtttaagttgyaaccacatacctgtacccttattctggcactccctgtgttccttctttgttttatttttctcaatagcattaactgccttctaacatactatttgactct

SEQ ID NO: 367910 - DNA, 201 bp, Homo sapiens
actgacattttgttaccatcagttgagtttcatgtatctggttttcaatttgagtatagtgaaactttattaattcaatatcatgaatttaaatttattgkgaaaaaacaccagtgtttgttggctgaagtttacatcagcattggatgtgaagaaaggggtccgataaccaaaaagtataaacaacatagttccagcatt

SEQ ID NO: 367911 - DNA, 201 bp, Homo sapiens
tttttattattagttatttgagataatctattttgattattagctttctgtgaaataatatttccccttgagtatgtatacacgtactgaatgaatggaargtacgcgtatgctggatgtgaaacatattaacaagtgatttaatttgcaaaaattagataatatggagtttagaaaccattatttacttgaaattttgtt

SEQ ID NO: 367912 - DNA, 201 bp, Homo sapiens
ttatactttctggcttagtttctctactgcttaaaatggaagagcccactcaaccattccaaggctactttgccttgctttttttcaatactgtaccattrtaaatgacttttcattttaggtacacacactcacccataatttaaaaaattttattcacatactatgtggatagtagactcaaaataggaaaagttaatt

SEQ ID NO: 367913 - DNA, 201 bp, Homo sapiens
gttggctggaagcctgatggataacataaagttaattaacatatactgtgtatgttatatgtattatatataccatattcttacagtaaagtaagccatakaaaagaaaatgttacgaagaaaatcattaaggaagagaaaattactatgcattaagtggaagtggaccatcataatcatccttgttgcctttacattgag

SEQ ID NO: 367914 - DNA, 201 bp, Homo sapiens
atttaaagtatttttagaatgcatttataatctgggtttcaaatttaaatacaagttattttatatttatgagaagtaataagaaaaattcaatagatctytaaagaaaacaaaaacaagttaaatatttgttagatatctcttactgatttgatatctcctatttttaagtgtgtttgggtaatattaagaatgcaatct

SEQ ID NO: 367915 - DNA, 201 bp, Homo sapiens
ctagtcactggtgatacaaaagtgagcatatttaataaaaatatcttcatgctcatgaagcttccattctagtgacagaaaaaagataaattataaatcaratagtgattgtatggggaaaagtaaagctagaaaggaaaaggagttgtgctgggagatgttccatttaaaacagggtggttagggaaagtctcagaacag

SEQ ID NO: 367916 - DNA, 201 bp, Homo sapiens
aacttttgttgacttttaactttatgtcactcatctcttaaaactgtagatcacttttgtcttgctaggtacaatgttggtgtcacacagtcttcattacrtgcatgtgggtggcacatttctgatgtcaggctagcttccttcctaacacttccttgcaccattctagcagcatgatcttagggcatgtaagcccatttt

SEQ ID NO: 367917 - DNA, 201 bp, Homo sapiens
gtacaatgttggtgtcacacagtcttcattacatgcatgtgggtggcacatttctgatgtcaggctagcttccttcctaacacttccttgcaccattctarcagcatgatcttagggcatgtaagcccattttaatgttagtcttaaacatctgacacacacacacacacacacacacacacacacacacacacacataca

SEQ ID NO: 367918 - DNA, 201 bp, Homo sapiens
aaggcagaaaaataattttatacttgtgttaattgaaatagcgtctttcttgtcctggctgtagaatgatggtgggtcctttaagcagaggactttgtgcrcttgaatgggagcagaagacaggctgctcagggtgtctgaacttcacactcacatgcctagagttgggctgcatatctaaggaaattaacatgttgccac

SEQ ID NO: 367919 - DNA, 201 bp, Homo sapiens
actttgtgcacttgaatgggagcagaagacaggctgctcagggtgtctgaacttcacactcacatgcctagagttgggctgcatatctaaggaaattaacrtgttgccactgttttgatcagaggcttgtgtttctatgctgaatattttcaaaacaagaatgttgtcaagaagtaaaggtcaacatcagttctctctaaa

SEQ ID NO: 367920 - DNA, 201 bp, Homo sapiens
ggtgtccaggagtcatgtgagtaaacttttaagttttgaagtaacgttaactccaagacttgaaacccttgaaattggctagaaatcctatacaagatttscagaaagttaccgttatacttcctgattacgcttatggatacaaatataaagcaaacaataaccaaagacacataaaacaaaccctgattctagcagttt

SEQ ID NO: 367921 - DNA, 201 bp, Homo sapiens
catgtgagtaaacttttaagttttgaagtaacgttaactccaagacttgaaacccttgaaattggctagaaatcctatacaagatttccagaaagttaccrttatacttcctgattacgcttatggatacaaatataaagcaaacaataaccaaagacacataaaacaaaccctgattctagcagtttacgaaaagaggaa

SEQ ID NO: 367922 - DNA, 201 bp, Homo sapiens
tctagttcaactacaagactcgattttacattttatttagttttaattaatttaaatgtaaacttttaagatttaaaggaatcctgggagtaaccgaaacrtcggtcttgagaagaataggaagaaaccagggtggccttaggaactaagaactgctttggaagcagtagtggtgtgttcttcagagtcataccatgactt

SEQ ID NO: 367923 - DNA, 201 bp, Homo sapiens
catttttcctgttttgtcacttttaggaaattttgccaggtgctggatatgacaacaactagggtggagaaaggaaggagacaggtgtgcgcaagtacctrtatgtgtgcatgtctgtaactggaaactagggaagattgcaagaagcctggagtcctgaatagttcacagatatcacagatttaggtcttggcagaggtg

SEQ ID NO: 367924 - DNA, 201 bp, Homo sapiens
taattaatttaaatgtaaacttttaagatttaaaggaatcctgggagtaaccgaaacgtcggtcttgagaagaataggaagaaaccagggtggccttaggractaagaactgctttggaagcagtagtggtgtgttcttcagagtcataccatgacttagttattagtggtacccaacctggatttatcagataacaatgg

SEQ ID NO: 367925 - DNA, 201 bp, Homo sapiens
tctcccggaacacattcttctctggagtacttgcaaatcacatgctcttggttctcctcctgcatcataggctgttctctctcagtcatttttttttcctwtttcttctttgtttctccagtctctaaccatttaaccattggaatgcccccttctcttttctatataatgcatttgtggagtgagctcaagcattcttct

SEQ ID NO: 367926 - DNA, 201 bp, Homo sapiens
ggaatgcttatttaaagtagatcatgtttaattgcaaaagaactataaacatttgtacctgcagtactgcgtcgtgtccatcatataaaaaaataattatsctgaaccatggacatgtttgtggttgtaaatctgttctcttttctctgcttgaagtgatagtgtttcatgatatcagtattcttcaagcatttatattag

SEQ ID NO: 367927 - DNA, 201 bp, Homo sapiens
aattccattcaaaaccacaaggcatttttcttttaatgtagtttggtgtgtgtgtgtgtgtgtgtgtaaaataatgaataaaagttgtattacacttgtcrtgttcaagttgtcacttaggttgtattgaattctttttcgattggtccctaaaaaatgttttgtgttcttgtaccacctgcagcacctattgaagagata

SEQ ID NO: 367928 - DNA, 201 bp, Homo sapiens
ttctccttagtcccaggtaaagtgtaaagtaggatggttggccactctaatgtcaagctgaaaattcttcttactagtacactcttccaatcatgtgtctrgacagctattctttgtatctgtacattttcaaattctttctaatatgaagttttcagaaattaatttgttttatactttaggtgtagtgtcttatagttt

SEQ ID NO: 367929 - DNA, 201 bp, Homo sapiens
cagaagatagtttggacttacattttagagagagagggaaagttacaatatgctgctggcattcatcgtttagttagtaatttggctcatcagggctgaarcagagtttgcattttttgatgaaggatcatttaatataaaggcttatttagatgacctattgtcattccatagagatcttgggtatttccatatggacta

SEQ ID NO: 367930 - DNA, 201 bp, Homo sapiens
gaacgaaggttgctttttcaggggcagaagatagtttggacttacattttagagagagagggaaagttacaatatgctgctggcattcatcgtttagttartaatttggctcatcagggctgaaacagagtttgcattttttgatgaaggatcatttaatataaaggcttatttagatgacctattgtcattccatagaga

SEQ ID NO: 367931 - DNA, 201 bp, Homo sapiens
gccattggcttgtgctttctctgtgaaaatgatacctctaaccccttttcttttgtatcctttcttttaagaactcatttattccctgggacagtggaagyaattaagtgatttactttagtggaacttccttctagcttactccagatagaagtaaccagaaagtaggtgacaatgttaattagaaagataaattaatac

SEQ ID NO: 367932 - DNA, 201 bp, Homo sapiens
gtaaataaagagtagttaaagttaagtctggcaagatttattatagcctgtcatagacgatgaggagggcatctgtgtaatcttacagcagtggatctcartcttcttgacaaatttttgaagacagggaacaacattgctaaaagataacaataaaaatgaaaaatgctgactaagttggtacaattagacatgataaat

SEQ ID NO: 367933 - DNA, 201 bp, Homo sapiens
ctatataagatataacttactagctaaatgcataaattgttagtatgtgtcatgagtttattgtcgactgaaagctgcttttttaattatcaagttttggraaacatgtagaatcctgtaaagagaaatccagaagatttgagaagacaggtgggagtgctgttatttggagaacagtttctgtgtgtgatgtgaactctc

SEQ ID NO: 367934 - DNA, 201 bp, Homo sapiens
gtgggtagatctggggagtaagagggatgaataggtggagcacaggggacttttaggacctgaaaatatcaggtcctagccataatgctggatagatgtcrttatacatttgttgaaatccgtagaatgtgtaacacaaagaatgaacctcaatgtaaactgtgggctttagttaataataacgtatcaacgctggctcag

SEQ ID NO: 367935 - DNA, 201 bp, Homo sapiens
attttgttattgtgttcttcagtattgctattttgctcttttagccctctgacaactgtaagcaactttctatattaaaattcttttgttgaaatacctayattgatatctagtttcctgattataccttaatacatacaaaataaatcagaaactgaatgaaaaaatatgtatagggaaaacataataagctgcatcact

SEQ ID NO: 367936 - DNA, 201 bp, Homo sapiens
gggtgaaagaacatatccaggaaaaagcaaaatgccagaaatgaaagaatactgagtgagacacagtgttaagaaacactaagattttttaaaagccctaraaacataggcttggaaggcccaaagtggaaacactaagacagccgaacaccccagatctggacagtaatgacagtccatctttcagggtcctagagggag

SEQ ID NO: 367937 - DNA, 201 bp, Homo sapiens
cttgcactgatcaaattggagtagtgtcatctgttggcttcgctggaaacagaagcagtgtggatgctgacaactatggggcaccttttgaacatcctttrtttgggttgtttctattaattattaaaatttgggacatttattagaaattaacatattaatctattggtacacaaaatccagttttgataattaaactga

SEQ ID NO: 367938 - DNA, 201 bp, Homo sapiens
ctattttcatatttaccatctacttgcttttgtgtgggtgtgtgtggattcttcttgcttccaaattgtgataactaaatttcctaattgtccttaggtcytgtcctatacttaagtggaattgttttcttctggaattctctttcttctgttggtagacagaatttcaaaattcagtttcttgtttgttggcatgtttgt

SEQ ID NO: 367939 - DNA, 201 bp, Homo sapiens
tgtcattccatagagatcttgggtatttccatatggactagaatggtgcttggaagtaaaagattttctgggaaatcagatgtgctattttaaggaatgaytttatcaggtcatttaaattttgtgctagacttccaatatttttgttttgttttgattacgaagtgttctgtaagaccagaaaggaagccagcatgttaa

SEQ ID NO: 367940 - DNA, 201 bp, Homo sapiens
tctctgcttccaatttcattagtatcgtccctcttccctctacccaatgcatactgttccattcatgggtatcttttttgagaattttttcactcattcarttatttagcacacattagctgagcatttactgtagtatattctctctactaagtttttctcttttttttttttttttttttttttgagatggagtcttgc

SEQ ID NO: 367941 - DNA, 201 bp, Homo sapiens
aaaatggctgcttattttatcaaagttagatttcaaattagagttggatgagctgttttaaaagtccatgctaaatatgttggggactgccccggaaacakgttttcctcctctgtgtaaatcagccatgtttctgtggtgcgaggtgggtgggagccttgctttacttcctgcatctcagcaggctcaggaagggaagct

SEQ ID NO: 367942 - DNA, 201 bp, Homo sapiens
aaaaaacacacacacacacgtctttccttttgcaatgggtgaaaatttctagcaatcttgttccaaggtaatttattgtattttttaatggatgctttaawataaggataaataataccaaaggcattgttttaaaaatattttatattttatgacataaaataaaaatttatagctaagtttcttttagttttgctaatg

SEQ ID NO: 367943 - DNA, 201 bp, Homo sapiens
agacaagaaggcaggaagcctggatttgtatgtagctgtttctttgataaggacagagcttcacataagtttaccatcctttctacgtaacataacaatamtctattaaatatattcttatggcaacatatgaaatactcattattatgtcctttttacagatgttgaaactaagggtatgaggatatgaaagatacagcc

SEQ ID NO: 367944 - DNA, 201 bp, Homo sapiens
ggcttatttctgtcctgtggttctcattacttcaacagtcagtacctttggtatctacatatgttcttgcttataggtggacatgagatcttgttttactytttgccttcagaaatgatgaaagtttcttccagctagctaaacgcagtgtacacttcatctctgaacctcttgggaaaggaaagacagtgttagaatgta

SEQ ID NO: 367945 - DNA, 201 bp, Homo sapiens
ttttccattatgttttattttgagttactgttttgttgggctttgaatttttctatgattatatgcacgtcattttcctttactgaacattatgataggtrgtctttctatagcagacctatggctattctaaggtaaagtcagtgacagtgtgatgatatgtgtagctagatttcagggtattttgttttccatgcagag

SEQ ID NO: 367946 - DNA, 201 bp, Homo sapiens
acttgggcaaccctggcgaagttaatctttcacagcctcagtttcttcaagcgtaaaacacatagcaatgataaaacttactttacagcattaatgagagygttaaacaaaataatatacttgaaactatctagttcagtgctttacttcatagatgggaaacgttaaatgcttattttcttttgtcctcaccatctctat

SEQ ID NO: 367947 - DNA, 201 bp, Homo sapiens
gcaatgataaaacttactttacagcattaatgagagtgttaaacaaaataatatacttgaaactatctagttcagtgctttacttcatagatgggaaacgwtaaatgcttattttcttttgtcctcaccatctctattagtctattggtgactgaatctgctacctaggaatacaaccctaacattacagtgcttctcagg

SEQ ID NO: 367948 - DNA, 201 bp, Homo sapiens
tgcagttttatggaaattaagtaaagcaatacacataaagtgtttagctagagactgctatatagtaaatgctcaacagaagttagtgataatgttacctkgcttgtggaagatcttgtcaaaaaatcatttgttcttttgccattggcttgtgctttctctgtgaaaatgatacctctaaccccttttcttttgtatcct

SEQ ID NO: 367949 - DNA, 201 bp, Homo sapiens
ttagtgtttttaacactggacttatgaccagttgtaactacattttatagtaagaatggcaaccatttgttacataatcaagataagtaatttgttaagcmaaaacttttttagggagttaccttctttatctgtatatattagagtttgactaatgaagatttattttcagctgataaggtcagccaactatggtgacgt

SEQ ID NO: 367950 - DNA, 201 bp, Homo sapiens
agggggtgaggaaggggctgtactggcccaaccagaaaccaaaactacgaacccatgactgtattctgttcctgggacatgcctgcatggagtagtccaartccttgatgactttgtggaattgccaaactataggctagattacccactttgacttaatttctgtgagcgggaactgagcttctatcttatttaagtcat

SEQ ID NO: 367951 - DNA, 201 bp, Homo sapiens
gcacagcaggtgtttcttgtgtgcctcctgggcacacaagtgtctaggcactggggatatggcggacaagactgacaagttatccagcttagcagtggttrtatttcagtgggaagaatcagagaagaaacaagcatgcaaataaatcaattagataatgctaattgtggcataattactgtgaaggatgatagtggaggg

SEQ ID NO: 367952 - DNA, 201 bp, Homo sapiens
tttagattaggagaaaacgttgagaggagggaagcattgcattggctagttaaaactaatgtaggatgatgatcctgtgaaaagaataaaatcagccacartgaaaagtaaaaatatcccacaggcagacacctagaccagagagagtgggtgctcagctcttccaaaggacatcagcctacccttgctctgggaagccct

SEQ ID NO: 367953 - DNA, 201 bp, Homo sapiens
tgacttttgccaaaaatgacttcaaaaaaaggactttgagtttcttcttcttaagtaaaaatataaacatattagggcccaatttttcatcttattctgartcacataggtaatgcatcttacccagagaagataatactgataaaggaaagaagaggggaaaagaaagtgtcctcaaggcctaatattgcatgactaatc

SEQ ID NO: 367954 - DNA, 201 bp, Homo sapiens
tggattaaggtgagataatcctgggaacttggagaaatagtctggtcattatcataataatccagacggggtaactgaggaaccagactagatggttactmtggtaatggtgaggaaagcttggtggagtggaccttagcctctttgggtcacagactcttttgagaatctattaaattatggcctttcttctcagaaatt

SEQ ID NO: 367955 - DNA, 201 bp, Homo sapiens
aactgaaatgcctattaatactcaactcaccactccctggaatactggataaatctaatttagatgattcagcggacacaacgataatgttatatttaccyactcacttggaagagtgttactgtatacacattagacctgattatttgagaaatcacaattgcagctatattttctgctgaactttgacgttgcaggaga

SEQ ID NO: 367956 - DNA, 201 bp, Homo sapiens
aggccaggagttagaaacatagcaagaccctgtctctgcaaaaagttaaaaagttagctgggtatggtggtgggtgcctgtaatcccagctacttgggagkctgaagctgcaagatcacttgagcccaggagttggaggctgcagagagctatgatcatgccactgcactgtagcctgggtgacagagaccttgtctgtga

SEQ ID NO: 367957 - DNA, 201 bp, Homo sapiens
cccaaggataccaaaattcacagacactcaaatctattatataaaatggggtagtatttgcatgtaacctgtggatatccttgtatatatttgaaatcatytctagattacttataatccttaatacaatgtaaattctatgtaaatagtggtcataccatgtttagatataatgacaggaaaaaaggctatatatgttca

SEQ ID NO: 367958 - DNA, 201 bp, Homo sapiens
aggtgtggtggttcacacctgcactcccagtgctttgagagtgagaggacctcttgaggccaggagttagaaacatagcaagaccctgtctctgcaaaaarttaaaaagttagctgggtatggtggtgggtgcctgtaatcccagctacttgggaggctgaagctgcaagatcacttgagcccaggagttggaggctgcag

SEQ ID NO: 367959 - DNA, 201 bp, Homo sapiens
tagagacgaggtctcatcatgttggttaggcatattgattttaactcaggctatcaaatatagtccctgaaaaggaggaaattatttatttcaactaaaaaggttttaaaagtttaaaaaccatcttcttatgcaagttaacaatagtatcgatagtataaatattaatagtggagtaaatattggtgtataaactatggt

SEQ ID NO: 367960 - DNA, 201 bp, Homo sapiens
accagcctttgattagcaatataaatttaaagtttgtcttgggcaaacttactgaaaactcctttaggcactttcctcacatcaattaaaaaaaaaaaaaagagaggttaatagaacactagctactattttgtttcctttttaatgccacgtgatctgtataccttggaaggcagaaaaataattttatacttgtgttaa

SEQ ID NO: 367961 - DNA, 201 bp, Homo sapiens
ttttaaaataggggaatgtgtagcacactatttttctacaatattttttgttattaagttgtataagaatatcctatagaaacattccattgtatcacacrttagagaacagtgtctctcttggttaattctgactgcttgaccattcttagggagactgcaacaagaatcaaccaacacaacatgtggatatctttttta

SEQ ID NO: 367962 - DNA, 201 bp, Homo sapiens
tacacactgatcttttcatttgaaatactgtctcaagctttctaggacacggaatacagaattaaaatgttgaatcaatcataacgtgtcgttgataaatwcgtactttctttttaaaataggggaatgtgtagcacactatttttctacaatattttttgttattaagttgtataagaatatcctatagaaacattccat

SEQ ID NO: 367963 - DNA, 201 bp, Homo sapiens
agaaagactaaaataaatactttaacctatatagcttgtaatttgtttctaattaagatttcattatatatagcttgtaacttgttactaattaagatttkattatcatttgactagaaaatagatgtcagtggttttggatgtacatttggtctcctttgcaaaagtggcctaaagttttgttttcaaatcactttggat

SEQ ID NO: 367964 - DNA, 201 bp, Homo sapiens
ttctctttatttacacactgatcttttcatttgaaatactgtctcaagctttctaggacacggaatacagaattaaaatgttgaatcaatcataacgtgtygttgataaatacgtactttctttttaaaataggggaatgtgtagcacactatttttctacaatattttttgttattaagttgtataagaatatcctatag

SEQ ID NO: 367965 - DNA, 201 bp, Homo sapiens
ctcttgggacattgtttatattattcaactctctctctttctcatatatgtgtgtgtgtgtatacacacatatatagagttttaaaaagtgtgtgtgtgtrtatatatatataggttttttgtccctcttcaggcagtgcatagtgaagtggcatatatatagtagcactcaataaatatcgattagtttgctgctactat

SEQ ID NO: 367966 - DNA, 201 bp, Homo sapiens
caagtttggaatgaaggaatagctgtatgtcatgttttaggcaaggtttttagccagaagcattgtttctttctatatgaaggttatttctttctaagaamcatgaccaatcacctggaatccaagcccctccgccctccactggaggaaacattgacatattgtctgtgtatgtgtgtgtgggtgtgtatacacacacac

SEQ ID NO: 367967 - DNA, 201 bp, Homo sapiens
aacatgctagtcatgcagaggatataggtgtttaaacatgctagtcacaggatataggtgtttaggggaggcagcaggaattgggataaaatattgaatamctaaaggaagaacatgggggacatctttctttttctacttctgaaaagccaaaaaataaacttttatgaattttgatgttttagaaaatgtggccatgtg

SEQ ID NO: 367968 - DNA, 201 bp, Homo sapiens
ttttttcacttgttgtcttgaatgtgtttctcttttgcccaaaatagtaacttatataggcatacatatggcttttttttttttttttttttttttttttkggtgagagaaagcaaacaatctctggattcacattgactgcactgaccctaagtagaagaacagtgcaggattcccaggtttatggctagttaaggagtt

SEQ ID NO: 367969 - DNA, 201 bp, Homo sapiens
tttcacttgttgtcttgaatgtgtttctcttttgcccaaaatagtaacttatataggcatacatatggctttttttttttttttttttttttttttttggkgagagaaagcaaacaatctctggattcacattgactgcactgaccctaagtagaagaacagtgcaggattcccaggtttatggctagttaaggagttctt

SEQ ID NO: 367970 - DNA, 201 bp, Homo sapiens
aagggttgtttgttatttatttagtgggcaaaaaccaaaacatttaattcagataggcgtacccagctcataaattaaatttataatttctgtggcatttkttttctttttttttttttttttttttttagcatttctgttttgttgtctgtgccagaatctagcacttacaggaacattagttctcttagctcctttgat

SEQ ID NO: 367971 - DNA, 201 bp, Homo sapiens
attttatatttccaccagttagtataattgctaaagatgaaaccccttccccagagcagtagaatttatagtggaatttgatatgatgtttactattagtraaagtgatgacatataaatatatatgtttaaatattttagagatgagaatgtgtcttttattttgtgatgtagctgactttctctgaagaatagtggttt

SEQ ID NO: 367972 - DNA, 201 bp, Homo sapiens
gcctttacaatatgaagtgccattttatttttattactagtttaagagaacataagcatccacttgttgctaagtattcttttcccaacataaaaaggaarcccagacaaaaactaaatacaaattaaagatttcaataatgtaaataattatatatacttatatttgggttgttttaattggaatgtgccttaacgatat

SEQ ID NO: 367973 - DNA, 201 bp, Homo sapiens
cttctgcaccttcctccttcctttgtttttctgtcccttcccctgacagagagcctacaagggccacagggttaaccatgtgtgtaaagcttaatgcaaaytttcttcttagcaaagtagccagcccactaactatgggagtaaggtggtcaggtggatagttagagctcacataagcttgacacacatttttctgattat

SEQ ID NO: 367974 - DNA, 201 bp, Homo sapiens
cctacaatacaacaaaattcagccaaattcttatggatatagtggtaacataaatttttggtttctctcctgaattgtttttcttttaatcgtctagaccrgagctgaaggctacttccccctcagagagaattgtttggcctaaaagagatttaaacagtttgtattagtttccatcataggggattcagaagataaaat

SEQ ID NO: 367975 - DNA, 201 bp, Homo sapiens
tccaggagattaaagcctaacatctcaggtactttgcagtatattctgccattggatctctatgggagattttcaacaagagtcaggaggagtttttttttcttttctatgtagttttatataattgtgggaaaaaatgtcttgatgctctaaattacagacttttgtgttacttgttctaaggccacttttgttatttca

SEQ ID NO: 367976 - DNA, 201 bp, Homo sapiens
tggcacaggtcttcatgcaggattctaggtgaatagagaaagcaaataaatgtgacctttgtaaggctggtatgctttctatgaagccaaaaggtgcacaratacacaaatattagcccagtcttattttttgtcctagaaaacttttcactggctggcggcatctctgtgttcagtctttggcatcattactgctcatct

SEQ ID NO: 367977 - DNA, 201 bp, Homo sapiens
tctaaccccttttcttttgtatcctttcttttaagaactcatttattccctgggacagtggaagcaattaagtgatttactttagtggaacttccttctakcttactccagatagaagtaaccagaaagtaggtgacaatgttaattagaaagataaattaataccttttatgtggataatttacctgatgataatgactg

SEQ ID NO: 367978 - DNA, 201 bp, Homo sapiens
tgtgagtttttgaagtgctgtattttattaactggcattatatggattttgctcggtagccagcatgcagaagcataactggcagaagtggccttcccatrgggagtgcttgacttttaatggattattgtcacaaggtgtataggttgatttcctcaaaggtgagtgatggtttctttctcaggaagacaggtgatgata

SEQ ID NO: 367979 - DNA, 201 bp, Homo sapiens
ataggaagtgggtggctctgctcacaggcttgcatgggatcgggtttatggttttcttctgcagagggaggggtgattgatggctttttaaaaattaatayggcatttttatgtggccgtggctttccaccgactgcctcacttgggcagggttgtcttggagctccattgcagcaattccctccgcgcccccctccccct

SEQ ID NO: 367980 - DNA, 201 bp, Homo sapiens
taggcatacatatggctttttttttttttttttttttttttttttggtgagagaaagcaaacaatctctggattcacattgactgcactgaccctaagtaraagaacagtgcaggattcccaggtttatggctagttaaggagttcttccaatagctgtcaactctagaaatagagtaatctaattcttgatagaacagca

SEQ ID NO: 367981 - DNA, 201 bp, Homo sapiens
gcatacatatggctttttttttttttttttttttttttttttggtgagagaaagcaaacaatctctggattcacattgactgcactgaccctaagtagaaraacagtgcaggattcccaggtttatggctagttaaggagttcttccaatagctgtcaactctagaaatagagtaatctaattcttgatagaacagcagtc

SEQ ID NO: 367982 - DNA, 201 bp, Homo sapiens
gtcgcgattaccataagacatttcaagaggagttaaaaggaatccattttcacatcctcagccaccataagtcttattttcttaaaagtgatcagcctgaraaggcaccttggctggaggccttatcgcagcttctcctttcccgcctcctctttctcaaatgccctttttccattttaacagaaaggcacaggtctcctt

SEQ ID NO: 367983 - DNA, 201 bp, Homo sapiens
agcacatatttttgttttatcaacagtattgattgagttgattttatatttccaccagttagtataattgctaaagatgaaaccccttccccagagcagtwgaatttatagtggaatttgatatgatgtttactattagtaaaagtgatgacatataaatatatatgtttaaatattttagagatgagaatgtgtctttta

SEQ ID NO: 367984 - DNA, 201 bp, Homo sapiens
taactggtaggaaattgtttgtgtctttaaacatatttttagtgtctttaaacatatttttgtttgtgtctttaaacatatttttaggaacgtatggcatsatgcatatgtccttttctttgaatctgggaggtggaagaaagcttagtttgaacaagcttatctagtacctgacattgaacatccctgtatgccttgtga

SEQ ID NO: 367985 - DNA, 201 bp, Homo sapiens
attaatttagctaaatcaggaatttttttgattgaaaaattaaaattatttggatggaagacatctttgctaaactgttatttaaaacttatgtatgcttrcagagggacctcatctctgtgtccattttcatgtctctagctatataaatcctgacatcactgtctttctagtggataagaataagtgtgtagtgtaaat

SEQ ID NO: 367986 - DNA, 201 bp, Homo sapiens
agcttattcatttattcaacaaatatttgttgagccctttttaaagtgtcagtcatttttctagtcactggtgatacaaaagtgagcatatttaataaaaatatcttcatgctcatgaagcttccattctagtgacagaaaaaagataaattataaatcaaatagtgattgtatggggaaaagtaaagctagaaaggaaaa

SEQ ID NO: 367987 - DNA, 201 bp, Homo sapiens
tagcttattcatttattcaacaaatatttgttgagccctttttaaagtgtcagtcatttttctagtcactggtgatacaaaagtgagcatatttaataaaaatatcttcatgctcatgaagcttccattctagtgacagaaaaaagataaattataaatcaaatagtgattgtatggggaaaagtaaagctagaaaggaaa

SEQ ID NO: 367988 - DNA, 201 bp, Homo sapiens
atatataagttaaacaaatttgaattcatacttcacaccagtattgcacaaagcacttttgcaagtgtggtctcagttaatcctttcagtagcttctttartaggtattacttactgtctccattctacaggtgatgaaactggtttcttaaaaattttctcaaggacacacagctattaaggctattatgtgaagatagg

SEQ ID NO: 367989 - DNA, 201 bp, Homo sapiens
tgtcgacgaccgacagggtggtgaaaggtaagcggagcgccgcggtggcctgggtgcaccgtgtgccgcaggcgccagggcagcttgcctcgcctcgcctygcctcccctcccccgccccaggttctcctctgtccgctccagccgcggaccttctaggatattgtgcaacccgcgaaccccgcgaaccccccgcccccgc

SEQ ID NO: 367990 - DNA, 201 bp, Homo sapiens
ggtgctgattttggatggacacaaaacccatttttatctttaatatagcacaacaaaagatactaattatctcaataccttatgcttcatttcatcaagargttttattcaaattcagtaattgctctgtttggcaaaaaataaaatctgaaggaacattgaaactctgtttaataatattgacccatgataaaaatttta

SEQ ID NO: 367991 - DNA, 201 bp, Homo sapiens
attcagaatcagctagctcagatctttctgagagggagatgaggggtctccgaaaggaaagtggaatctatacccaggcgtctccaagtagcatatctgtytccaccacagcacatcaaagagctcactcccctacaaagttgaaccatattttacagcaaagatccatttctacgagcctgaggcttgtcttaagcatgg

SEQ ID NO: 367992 - DNA, 201 bp, Homo sapiens
aatagtaacacttccattaatatgagggctgtgtgaagaacacttaccaacttgagggttttatgttagatttagtgatgtctaggtgtcatgacaaatgyaaatgcttatttctagaaagggaccagtggtaaaattatgatgggaatagacatggcctttttgaggatagacctttagaggtttcggagttgacttact

SEQ ID NO: 367993 - DNA, 201 bp, Homo sapiens
gaagggagcaatggacaccagggcctacttgaaggtggtggggaggagggtgaggattgaaaaactacctattgggtactgtgcttattacctggatgacracataatctgtacaccaaccccctgcaacatgaatttatctgtataacaaacctacacatgtacccctaaaacaaaaataaaagttttttaaaaaaagaa

SEQ ID NO: 367994 - DNA, 201 bp, Homo sapiens
gggtggcaaacctctccctaaaagtagtgtagatgaaatctaggctcagttctgtagctattttctttaactagcactctaggaaccactctaggaaccartattacacttacatgaggacttgtgatgacctggacacctcttttgttttctacgatgagagtgagatgaaatggagggggagtgggtgatcgttcgaga

SEQ ID NO: 367995 - DNA, 201 bp, Homo sapiens
gataatatcttgcttgaacaacaaaataataaacatttgttctgataattagtattttctccaaaacttgggctgtatagtcaaacataattagttctcastcatttcataaattatcatataagctaagagagatgattactctttacaagtagtactacaaataaattgtcagcagcttttccctatagatattatcca

SEQ ID NO: 367996 - DNA, 201 bp, Homo sapiens
ctttcctttgtcccccctgtttatttggaaccagcgccaatatctcagagcaggtgtctttaccttagccagttaccttaggattagcaattactggaagrtaaaagatctgcagtggagggtggagcatctgttattgcagtgatcttggccttggatggagtctagggacttggagaaagactaattcatgaaggtgag

SEQ ID NO: 367997 - DNA, 201 bp, Homo sapiens
ttcaattacttaattttttaaaatttcacttttagaggattaacattaaaataatagactacttttatagttgcagaatttacttacttttggttgacaayaagatgttagaattgtttttattaattttaaaataaaatttttaagaatgtgataaatataataaaatattagagaggagggtctgtatcttagtttgat

SEQ ID NO: 367998 - DNA, 201 bp, Homo sapiens
atcgtatttaaaaaatggaggaggaagagaaaggtgagaacagtaaagtagatttgatgcttatttaatgcctcccttgtgaaaaaataacattaacacasaaccaacagtgattatggtaacaaaacaaagtaacaagctaaacatgcttatattttagtacacttttgaacaaagtatttaaatgtggcactacagaga

SEQ ID NO: 367999 - DNA, 201 bp, Homo sapiens
ttctcttaattttctttagtgaatgtgtttgtgtttgctacacatagcccctaattttaaatttcactttcactagttgaactcaggttcaattgctagayctgtatggactggtctagtatggactgtactcttgtttctcatccagtcatctctgagtctgtcaatgtaaagaaatttcttcatgtttatcccaacctt

SEQ ID NO: 368000 - DNA, 201 bp, Homo sapiens
gacctgttttatataatgcagaataataaagacaaagtccttgctggtttgaattttttatttttttgtgcatgtgtgtggaaggttttttttttttttttgtggactgacagctgtgagttataatgagcttcccaaatttatgtgtacctactctcagcccatggagagtagtaaattgctctctttcttatgacacat

SEQ ID NO: 368001 - DNA, 201 bp, Homo sapiens
tcaagctgtcttagctttggggctggacagttgaaattccattcaaaaccacaaggcatttttcttttaatgtagtttggtgtgtgtgtgtgtgtgtgtgtaaaataatgaataaaagttgtattacacttgtcgtgttcaagttgtcacttaggttgtattgaattctttttcgattggtccctaaaaaatgttttgtgt

SEQ ID NO: 368002 - DNA, 201 bp, Homo sapiens
ctcaagctgtcttagctttggggctggacagttgaaattccattcaaaaccacaaggcatttttcttttaatgtagtttggtgtgtgtgtgtgtgtgtgtgtaaaataatgaataaaagttgtattacacttgtcgtgttcaagttgtcacttaggttgtattgaattctttttcgattggtccctaaaaaatgttttgtg

SEQ ID NO: 368003 - DNA, 201 bp, Homo sapiens
actcaagctgtcttagctttggggctggacagttgaaattccattcaaaaccacaaggcatttttcttttaatgtagtttggtgtgtgtgtgtgtgtgtgtgtaaaataatgaataaaagttgtattacacttgtcgtgttcaagttgtcacttaggttgtattgaattctttttcgattggtccctaaaaaatgttttgt

SEQ ID NO: 368004 - DNA, 201 bp, Homo sapiens
gactcaagctgtcttagctttggggctggacagttgaaattccattcaaaaccacaaggcatttttcttttaatgtagtttggtgtgtgtgtgtgtgtgtgtgtaaaataatgaataaaagttgtattacacttgtcgtgttcaagttgtcacttaggttgtattgaattctttttcgattggtccctaaaaaatgttttg

SEQ ID NO: 368005 - DNA, 201 bp, Homo sapiens
ctggagactcaagctgtcttagctttggggctggacagttgaaattccattcaaaaccacaaggcatttttcttttaatgtagtttggtgtgtgtgtgtgwgtgtgtgtaaaataatgaataaaagttgtattacacttgtcgtgttcaagttgtcacttaggttgtattgaattctttttcgattggtccctaaaaaatg

SEQ ID NO: 368006 - DNA, 201 bp, Homo sapiens
tgtcatctgagttatagacaagaaggcaggaagcctggatttgtatgtagctgtttctttgataaggacagagcttcacataagtttaccatcctttctaygtaacataacaatactctattaaatatattcttatggcaacatatgaaatactcattattatgtcctttttacagatgttgaaactaagggtatgaggat

SEQ ID NO: 368007 - DNA, 201 bp, Homo sapiens
tttatggggcacttgctaagtgccaggttcatgccccatgttatgcacatttgacaatcatcgacacaggaagcttgcaaggttgtggtgacttcactttsctgtgaggaaattgaatctgagagaggctaagcagagtgtccaaactccctcagttggggagcaacactaatgagagtcttactcaaaactgtgctatgt

SEQ ID NO: 368008 - DNA, 201 bp, Homo sapiens
caatatactttacaattctaaggtgcacttttttaatattttagctactatgaaatttgcctggttctcaagtggctgttggtcaaacactagtcatgatrtatttatagttgtcattgcccgctcatgcacgaactcagttatagctgtttatattgtctctttgagttataagcattgttggaaccacgtatgttgagt

SEQ ID NO: 368009 - DNA, 201 bp, Homo sapiens
gatttaaagtatttttagaatgcatttataatctgggtttcaaatttaaatacaagttattttatatttatgagaagtaataagaaaaattcaatagatckctaaagaaaacaaaaacaagttaaatatttgttagatatctcttactgatttgatatctcctatttttaagtgtgtttgggtaatattaagaatgcaatc

SEQ ID NO: 368010 - DNA, 201 bp, Homo sapiens
cacatgttcttaatgttggccaacttgcacatataactttgggtgcattaatcatggtcctatcatttttgggtgactacagaatgatgtactacaagtgyagattataactatctgcactaacagtatggaggtgacttcatataaataatattttacatgtaggttttgagtatgtttgtatttgaatgtagacctgag

SEQ ID NO: 368011 - DNA, 201 bp, Homo sapiens
ttttcaaagtccagcttcaggtgatttcaaatatacaacagtgtgttagtgtaggtttaggcagaaaccagcctgctgctgctgtctttctccttggagckctagcaatgacattttgaaatggaaatacagatgtcataaagctattgtagaagtaatagcttttaaaggagattttcagactaataaaaatttctcacc

SEQ ID NO: 368012 - DNA, 201 bp, Homo sapiens
gagctacatgtataattttaaattttctaagagacacttacaaattttaaaagaaacaggtgaaattatttttaataatgtatttcataacttcagctttscaaaatattttcatttcaacatgtaatcaatataaaattgttaataacatattttgccctcttttttttactaagtcttttacttctgatgtttatttta

SEQ ID NO: 368013 - DNA, 201 bp, Homo sapiens
ggcaggtttttcaaagtccagcttcaggtgatttcaaatatacaacagtgtgttagtgtaggtttaggcagaaaccagcctgctgctgctgtctttctccytggagctctagcaatgacattttgaaatggaaatacagatgtcataaagctattgtagaagtaatagcttttaaaggagattttcagactaataaaaatt

SEQ ID NO: 368014 - DNA, 201 bp, Homo sapiens
agaattattttcttcttcttccttccacctctttcttcaaaattctcatcaaatagtatttattgtataacacataaaaataacaaaatattattacctcrcaaatcttgtctgaaattttactttttttttttcctagttagaagaattttggcatgcaagtgctgaattattttatatatttgggctatctaaggagac

SEQ ID NO: 368015 - DNA, 201 bp, Homo sapiens
atttatcaagaagaatacacttgcttattaaacctattaaaaatgtaatagttggaaaaaatttaacctcagggaagaaaaaaattgaggctaatgaatakaatggaaaaattattttaaagtcacttctaagtagctaattatgttaatttaatatttagggggtaaaagttacagttttaatctacgagattcacctaa

SEQ ID NO: 368016 - DNA, 201 bp, Homo sapiens
ctaaacgcagtgtacacttcatctctgaacctcttgggaaaggaaagacagtgttagaatgtacttttattatatatttattattattatagttgtaattsgttagtatacacctttagttcacctgtcacttgcatgttgcttttaatctctacaagttttttgttttctgttattcaggaaaagcactagagcatccct

SEQ ID NO: 368017 - DNA, 201 bp, Homo sapiens
agttatgcctcagaataggcagatagatactgcctattcatatttgaacttctgtcctgtgaagagctagccccagaagggatcttttgcttttgattatktagcctatatttaagaggtttcttttctcttgaattgttatccccagctacttgttcagagatgtttgtaaatgaagggagtgagtgggaggaaaagctt

SEQ ID NO: 368018 - DNA, 201 bp, Homo sapiens
caggcatattttagagatattgtggctttatacaggcatattttggagatattgtcggtttggagatattccagactgccacaatagagcgaatatcacargaaagctagtcacacaaattttttggtttcacaatgcatgttaaagttatgtttacactatactgtagtctgttaagtgtgcaatagcattatgtttaaa

SEQ ID NO: 368019 - DNA, 201 bp, Homo sapiens
tttgggaggctgaggtgggaggacttgagcctaggaatttgagaccagcctggacatcatagtgagacctcatctctacaaaaaaaaaaaaaaaaaaaaamaaaaaaaaaaaaaaaactgggcatggtagtgcatgcctgtagtcccagctgctgctcaggaggctgaggtgggaggatcgcttgagcccaggaggttgag

SEQ ID NO: 368020 - DNA, 201 bp, Homo sapiens
tctcaatactggtgataaatggttccaaatatagttttttcttctttttaatatctctctctctttttccaatctcttgggcattttcttctatcctttcmcaatttttttcgttactatctcacttttctttttgccctatttgccttaaaaacaactgctactcacaaagcactgtctaccttttgatttcctcctttt

SEQ ID NO: 368021 - DNA, 201 bp, Homo sapiens
actggcacgttaccacttgatttgtaacattttaagaattttacttccaaaaaggatattccactaaggaaaagaaaacataattgggcttgctggaaaamgaagtccagattatatcattcgtttccttttttccttttccttcaccctcttcctacccaccgacccccagatctagtaatgcctgatgtgtttatcttt

SEQ ID NO: 368022 - DNA, 201 bp, Homo sapiens
tttttacaatcttattagaataatataacgctttaaaaaataatggaaatacaggtttacctggtttcaagtaatgtctaccctttttccttacccatttktactataatcccaaaggactatttaattttacaaattatctgccaaattaaaagattaggatagccatgctctccttacatttctgatgttaataaatta

SEQ ID NO: 368023 - DNA, 201 bp, Homo sapiens
ataattggcctggttattagtggtaagtctttgtatcttgctctacttatttggtctttttatgtcaaaaatgttgacaacattttgaaaattttgggtgkgtacaaagtatctgtgtgcactaatcagccttctgttgaacacatggaaatgaattatgattttccaatgaattccaccctctcttgaggtttgctaact

SEQ ID NO: 368024 - DNA, 201 bp, Homo sapiens
ggcatgagccaccgtgcccggcctgagagtaaacatttctatatggaaatgaatctgttgaacctcattcagataaacaaatgaatatttggccagaacawtgattattcaaccattatattcaaatcttgactgaaggtccatggtcacggtctgtgtgccattgatgaagtagcactttataaaaagctgtcaatgtta

SEQ ID NO: 368025 - DNA, 201 bp, Homo sapiens
aatagagccatagtatattaaaagattttgaaaatataaagttgattgatttcagtaacttccaaactatttgttaacaacgtggttttttttgttagttwgtttttctggcggggtggggggggcgtagtttttgtgtttgtttgtttgtttatttgttttaagaaagggtctcattctgttgcccgggctggagttcag

SEQ ID NO: 368026 - DNA, 201 bp, Homo sapiens
tcagaacagtaacttttgtaggaagacctaaagggggtgagggagcagctgagtacttccatggggttaagtgttctaaccacatcaaatcccaaatctcygaggcaggggtgtgtctgctgggaatttcggagaggagagttgggttgactggtgcagagtgaaataggtgggaaagcagaagagggcaaaagaggcatt

SEQ ID NO: 368027 - DNA, 201 bp, Homo sapiens
tcaaattttcagggatgtcagcattactatcatgaccatattgtgtaacagtttattttccataactattttctattaaaaggaaatacaggttttgtcaygctcatcatgtttcttactccccacactgaaacacaaatgttcatctttattgagaaactgataacttgattgcctctgtttcacatattgatatttgct

SEQ ID NO: 368028 - DNA, 201 bp, Homo sapiens
agttaatactaccaataattttcttatactttcaagtatccataaagcagggttatacctggacctatatgtgatgaatatatggtcttcagaggatctgsaaactaaaattccatgtaatatttttgtgtatagatgcacatagttaaaaaccattaccatggagttataaatgtgtgcagaagggctttctcctagact

SEQ ID NO: 368029 - DNA, 201 bp, Homo sapiens
ctcttctcccattcttccttgaaccctctccaaagcttttcctcattcactgcttcagagccttcttttgtcaaagtctccaataacctcagtgttgtcargttgaatagcaggctcatctaatttgacttagcatagcatttaacacagctgatcacactgtctctcccggaacacattcttctctggagtacttgcaaa

SEQ ID NO: 368030 - DNA, 201 bp, Homo sapiens
agtgttcataagacaatgaaaggtttgggttcatttaggatttttttcccctaaaaattcattatgttttattttggagaagtcagaaggaccaggaagcygcctagtcccctgactccctgcatctgtccgtctggagagggagtaaaggagtgtggacttgccctcacaaagcggatttagcgtgtggatttagatagg

SEQ ID NO: 368031 - DNA, 201 bp, Homo sapiens
atcaaataagagagacagttaagaagtacttcaaaggaggcaagaggacaagagggcaaggcccaaaagtagttgggcctctgagccaggctgcaaatgtrtaaagaagttaatactaccaataattttcttatactttcaagtatccataaagcagggttatacctggacctatatgtgatgaatatatggtcttcagag

SEQ ID NO: 368032 - DNA, 201 bp, Homo sapiens
ttttttgagacgggactcatgcttcttatgtttattgtattgtcatgataaggcatccttcgttcacatactactcatttcctgttaattacatacatacraggtcctgtcttatgcatggtggaaaataaaaagattaattggacacagcgtttactttcaagaatgtagtagtttagggagagaatcaagctaaggtca

SEQ ID NO: 368033 - DNA, 201 bp, Homo sapiens
tggtttatggaaggagattggcgagaaaaatgtttctttttaaagggaaggttggaatgaatgctttcatatgtgtgtccagatttgctttgcaaatacartatcccacattgaaataccactgtactataaatattgctataacagtcttatggagatgtaattgtggaatcaggggaagagaactaaattaagagtcag

SEQ ID NO: 368034 - DNA, 201 bp, Homo sapiens
aaatagtaagattttgccttttgtacattttatatatttgcaaattttcaaaaattacgttttgctttacaataaataattccattttccattgaaagaamtaatcaatgttgatcaaataagcaggaatgtatttgcatgtttatgccttataattgtgagacagtaacttacctttgtaaattgatagcaaactgcatg

SEQ ID NO: 368035 - DNA, 201 bp, Homo sapiens
aagtcttgcttctttgagagacacttttaggaagggagagggccaagtttattccgttaacatcaagtgcttctcctgagagaggagtcatccagtggagwtgctgtatgtctgtttcataatgcacacggcacatgaaagatacatgggatgatgtttatgctgcttgccagatacttctagttgtccagtgaatgaacc

SEQ ID NO: 368036 - DNA, 201 bp, Homo sapiens
ttgtgatatcttaatgaaaaaattaacaaatggtgtggttgtttcacttccttgaaaatacatcgtttaggttcatgtttcaaaagagccaattttaagcratactgaaggagacaatcttattgataaaaacataaatatttaatagagccatagtatattaaaagattttgaaaatataaagttgattgatttcagtaa

SEQ ID NO: 368037 - DNA, 201 bp, Homo sapiens
  misc_feature (1)...(201): n = A,T,C or G
cttgatacagtattttaaaaagttacatatcccactagtattttcacggaccatcttccagtcaaggtgtcaccatggcaatgaccctcagatgtttcctnttaaatagtggaatcccttcagtagtggcttaagtgactcagatttgagaagcagaaatcctagatacctggaactatcccagagtgatagtggatcact

SEQ ID NO: 368038 - DNA, 201 bp, Homo sapiens
caaaacgatgtattatttcttttaaaaataagtgtacctaaagtcattgcactttagtgaagaattccctaaccccaattaattttgtgatatcttaatgraaaaattaacaaatggtgtggttgtttcacttccttgaaaatacatcgtttaggttcatgtttcaaaagagccaattttaagcaatactgaaggagacaa

SEQ ID NO: 368039 - DNA, 201 bp, Homo sapiens
aatcttaccgcaggctttgttccctttccctatctcactattcttggccaactgagcatctcaccttccccagacttacacttcatgtccttagactttawattcttttagattaagaaggatacctccattgtcacccacaggctccccttaaatactttacaatatgtataattttgtgtttaggtttgcacacatatt

SEQ ID NO: 368040 - DNA, 201 bp, Homo sapiens
gatagatagcccttgatcatattttaattcagccactctaaaaatattatattagttggtttgtgatgaggatggatatttggtggttattattgcattgyttgttgttgagttttggctaatgtaataattagacctttcttctttcagctgttccatttcctccaagtcaccggcttacagcaaaagaagtgtttgata

SEQ ID NO: 368041 - DNA, 201 bp, Homo sapiens
gttttaagagaaattatttttggtcacgttttggaaacaaagataatacctttagaattgtccacattgatgatagagagacaaatgtaaaatgttcctgmgtatatcctaaatacaaataatgcgtattcagtaactaatgttgttgggctaaaaataaacaaatagtacatttatggtaagcttgacacctttcacaca

SEQ ID NO: 368042 - DNA, 201 bp, Homo sapiens
gtccttgttcacacagtagccacatgaaatatgggacaagagctgttcctgtacatgtcctgattccagagagggatgaaataaatgtgtctggacttgcraagacattgcatctgttgtggttgattgactggtgtggagcttgttaagagggaaaattaaagtgcccagcattttgtatgcgtttacttatggtatgga

SEQ ID NO: 368043 - DNA, 201 bp, Homo sapiens
gaccatcaataagtttatgataattttgtatttatacttcagatttagtgttcttgattaaagtcaagacttttttgataactggttgtgtattgttttgratgctttactactactggaattgtgctttattttgagaatcatttatgtatatatttgtttttgcagcagatagtttttggacacctacttatttcaggg

SEQ ID NO: 368044 - DNA, 201 bp, Homo sapiens
agttcacttgtctggtttctcctaaaagacatttgatttcacagatgtttaatttcttttgggaaaggaaactggacttcattgtcaagcttgagagaagwgccaggcttaccatttctcctttctttctgagttttagcaaaggaagtctcaagctcttcaggtaaagagatgaggaccaggaaatgggtggtggtaaag

SEQ ID NO: 368045 - DNA, 201 bp, Homo sapiens
gacattgaacatccctgtatgccttgtgatagagtaatagattgagacacatatttacaacaattgataaaggttttattggttgtgaaggtgctatgcayacgtatgaatgacctgtcacggatctcacagatacttcctttttatgcagtagctatagccactttaaaagatacagatgttatatagtaaaaatactac

SEQ ID NO: 368046 - DNA, 201 bp, Homo sapiens
aatgactttagaggataaaaggtaaattcaagacccttttcaaacaaacaaatgaaaaacctgtaggattttgtagcaaattgcaaagtaatggtaaaagygtacagtatatggtgactgaattcaattcttgtttgtactcttcgggataaaaagatgagaaatcagaaataagcccttgatgctctgtttgaggagatt

SEQ ID NO: 368047 - DNA, 201 bp, Homo sapiens
cagttgttttatactcagagtaatatgtggaggctattttcttgtttatataaagaaagactaaaataaatactttaacctatatagcttgtaatttgttyctaattaagatttcattatatatagcttgtaacttgttactaattaagatttgattatcatttgactagaaaatagatgtcagtggttttggatgtacat

SEQ ID NO: 368048 - DNA, 201 bp, Homo sapiens
ataatccttaatacaatgtaaattctatgtaaatagtggtcataccatgtttagatataatgacaggaaaaaaggctatatatgttcagtatagttgctgktttttttccctatgtatatttaatttgcctttggttgaatccatagatgtggaacccagagatatggagggtcaactgtacttatttccacagccccagt

SEQ ID NO: 368049 - DNA, 201 bp, Homo sapiens
attttttgatgaaggatcatttaatataaaggcttatttagatgacctattgtcattccatagagatcttgggtatttccatatggactagaatggtgctwggaagtaaaagattttctgggaaatcagatgtgctattttaaggaatgactttatcaggtcatttaaattttgtgctagacttccaatatttttgttttg

SEQ ID NO: 368050 - DNA, 201 bp, Homo sapiens
ggatattacatattatattttcagttgattcccatgtgttttttgtttgtttgtttttgagacggagtctcactctgtcgcccaggctggagtgcagtggygtgatctctgctagtgagcagaacctctgccttctgggttcaagccattttcctgcctcagcctcctgagtagctgggattacacgcgcccaccaccatg

SEQ ID NO: 368051 - DNA, 201 bp, Homo sapiens
tatgttaaaaaaaattttaaaaaaagatccggagagccaagatagagggaaatgtgggtgcttatatgcattttttttcctttcagtcatttctttctttwtcacaaaagaaattaaaagttaatgtcgcccctcattgtgccttccagagaagagagtgagagtgtgctgacgctgaaaggcttgaccccaactggcatg

SEQ ID NO: 368052 - DNA, 201 bp, Homo sapiens
ggcttcttgtcgtgattctgatccaaaattttgtctttgcttctaggacatacttttttctttcttgagcatggcgatccccagggtaattacagtctagyggtaagggagttcagaagaggttgggtgactgattattgtttgttttgtttatcatttggtgtgacagtaataattgggtcccccttggctatgtaggga

SEQ ID NO: 368053 - DNA, 201 bp, Homo sapiens
atgattgagtgaataatgcagggattaattcgtgaatgctttgtgaaagcaatggagatatggatgtggactggtagagtggaggaccttcctctaattgwggcttggagtggagggcagaggaagtactccagagctggaacaaggacatagtgatgagcataccatgtgttgggaaggcaatcctcagattacataata

SEQ ID NO: 368054 - DNA, 201 bp, Homo sapiens
  misc_feature (1)...(201): n = A,T,C or G
tgattcaatcatgacagatgcaatgtctttgcaaattgactggatttagaaggcttgatacagtattttaaaaagttacatatcccactagtattttcacngaccatcttccagtcaaggtgtcaccatggcaatgaccctcagatgtttcctattaaatagtggaatcccttcagtagtggcttaagtgactcagatttg

SEQ ID NO: 368055 - DNA, 201 bp, Homo sapiens
agaatcatacatcctatattgcttatgaagaatatttttgaaatgacatgcagacatttgttttcatttcaaacaaaggatcgtttgtgtttccctttccrttttctcgaagtaatatgcatgtttgctttggtctttgttaataagcataatctgattctttcttacaaagcattataatcaggctgcaagtttcagaac

SEQ ID NO: 368056 - DNA, 201 bp, Homo sapiens
aaaaactgtagatgttttccttggtctacccaggtaatactcatattttcaatctcatctatgctatattcatttttatactcatgtttccaatcttatcsatattccatcttctcactgaagtgttcctaataatttcagacttcattgattttattctctttctgagtcagtaacatgtatggactataatgaacagtc

SEQ ID NO: 368057 - DNA, 201 bp, Homo sapiens
gtgtgtgtgtgattacttttcacttaacatatcctatatcttacatttatattaacctgttagtagttctacatttaatcctgattatttcttgagttaawttttaagccagtgagtgattttaaattatgtgataataaaatatagtgtatttctagtctgctagttgtgacctccatatatgaaacttgaatgaaggca

SEQ ID NO: 368058 - DNA, 201 bp, Homo sapiens
ctatatttttcttcttttgtttcttgagtacaaaagtgatggtagaccttgtggccagtacataggctatctttacagtgatccacatcattctatgtctwttcatatacacttcttatttgtatagcagcatctggaataggaaaattatgtgcataaataaaatacatcaatcttacattcaaaattgtactttaaatg

SEQ ID NO: 368059 - DNA, 201 bp, Homo sapiens
agtacctgacattgaacatccctgtatgccttgtgatagagtaatagattgagacacatatttacaacaattgataaaggttttattggttgtgaaggtgstatgcatacgtatgaatgacctgtcacggatctcacagatacttcctttttatgcagtagctatagccactttaaaagatacagatgttatatagtaaaa

SEQ ID NO: 368060 - DNA, 201 bp, Homo sapiens
gatattgatgcgccagtcactggtaagtcctgaggagggaggttgcccacttgtatacacattttgttgtttatagcatgaaatcaaaagtcctagttacyagtgagtcttcaaataccttacccatcataatcttttactgttgaatctatacattagagtagtaagtatattatacatatatacacatattttcatgtg

SEQ ID NO: 368061 - DNA, 201 bp, Homo sapiens
atcaggcaattcaactgttctcctcatccatactggcttccaaatttcatggatgtttttacttggtcccttccatttgttggggaaaaaggtatgttgtrgaatcctgagatgttcttcttaaaatagtttaggaaggaaggaaaggagattaaacactcagaaagagaagaactttggcccagccaataaaattcacaa

SEQ ID NO: 368062 - DNA, 201 bp, Homo sapiens
ccattttcatggatgggtataacaatttaatattatttatctgtattctagaatataagtcagagagaattagatttaaaaaggtagtttgggggccttgrgtgttcaaagccttgtgtgatgaactaagaaagttgcatttaattcacttgtgaatgtggagctaatgaagatttagtgaatattttgaggaggatagtg

SEQ ID NO: 368063 - DNA, 201 bp, Homo sapiens
gtgatctgcccacctcggcctcccagtgctgggattacaggtattcgacactgtgcccagcctagtttttagctactcttaacagctgtatttctcaatamatttttcatttgtgtctactggtaagatttggattcactttgactggtagcctgtcatgcagacactaaaaagaagggaaaaggaggcctttgtccccct

SEQ ID NO: 368064 - DNA, 201 bp, Homo sapiens
ttggactgttaaaatctctattatggaagtataaattatttctttctaataattacaaatataaatattctcaaaaatcatgagctattgaacagtttgtkttgaagaatatcagaaaagcaattgtagaagtttctatattttctgcctttgtctttataaaggaaagttgcttttacatagtttccatttatgtaatga

SEQ ID NO: 368065 - DNA, 201 bp, Homo sapiens
tgccacttttattagtgtcatcagatatcaaattttaagaccaaagtattcttggctgaaaggggagcttgaatcagttcctgacagacattggattaacwattttgtgtaaatattttccaatttgttacacaattacatattaattattcatatattgtgcagttatatattaccctgagtaaggtttaagtccataag

SEQ ID NO: 368066 - DNA, 201 bp, Homo sapiens
taggccagcatcagctgggcaaactgctaatctctctggtttgcctgtttcctgcagtgggggatttgtccctggggcagcagaggattccctcagtgcckgggcctgccatttagcatgtcaggcagttgccaggagaaccctctggctttgttcctggatgtgagagtggactggtggccaagtttaaggtcatggcag

SEQ ID NO: 368067 - DNA, 201 bp, Homo sapiens
atagtccagcagaaatttactgaacaatcagaataagtgagatatttaaatgaataagaaatcactaacatacattttgtttcataagttagtcatgatcycatggagggacacagacaaatatcaagtatttgcagcaagatatgtgttataatgcatttgtaaaggatacaatttctttcttatggtatatatttgcct

SEQ ID NO: 368068 - DNA, 201 bp, Homo sapiens
tctcttatttgagagtaaaagtccattgtaattaacttgagtaaacatttaaatgactgataatcttggttatctctggctggcatatgagtacagattgrgaatgtcttaacgctaggtttgaaagtggggggaagatgggagcgcctacatctgtggcaaccctgtcacttgtcaaaaaccaaagattttattttcttt

SEQ ID NO: 368069 - DNA, 201 bp, Homo sapiens
tctgggatttgtgcaacagaagaaatggctatatatgagagataaatatgtgaagcccctgaatagcttttgaaaacgcaaagcgatttgaagattactgkcactgttggctcattttagcaataaggaaactgagctattgagaagtgaagtgaaatgcccacacctatgtagtcggtgagtggcagatccttgactgat

SEQ ID NO: 368070 - DNA, 201 bp, Homo sapiens
ggcaaggatgcactgaggttgctggcaaagagaaactgggatgtgcggagtgaggaaggggacaggctgtggttgatcactctgtcgcacgggaatctatyggcctccttgtattcctaggtgtagtgggggaggaaccatcctatgaatcctggaaggctgaggcaacagagcagaaccacttggattaagtagtatctc

SEQ ID NO: 368071 - DNA, 201 bp, Homo sapiens
acttggctttctcagagcattatgggttgtaattgttttttttgatgagtcccatgtttttgggggggttttgtttttttgttttgttttgttttaagacrgtctcgctcttgcgctctggctggagtgcagtggcacgatctctgctcactgcaacctccacctcctgggttcgagcaattctcatgtctcagcctccca

SEQ ID NO: 368072 - DNA, 201 bp, Homo sapiens
aatggttatttcataatcattctatgtaaatctacccaattaacagattttgcaacggcttttaattgtatagagccaggaccctaaaaaaaaaaaaaaaacttaaatcccattatttttagaaatagcaagttatacagaactgataggaccttataggggacaagagggagaggagaaatcaaaacaattgattcattt

SEQ ID NO: 368073 - DNA, 201 bp, Homo sapiens
aagagaatggaatttggagtttaacttgaggcaaatcatttctcacctgtctttcttctgaattcagatcaaaatgctaaattgcacgtataattaaaggrgggacaagaaagactaagaaaatggctgtgtgctgttgtttcagttttgaatattgtctcattgctttctaataatttagctcttgttaatatcaacaaa

SEQ ID NO: 368074 - DNA, 201 bp, Homo sapiens
caacatgtttagttaagagaatggaatttggagtttaacttgaggcaaatcatttctcacctgtctttcttctgaattcagatcaaaatgctaaattgcasgtataattaaaggggggacaagaaagactaagaaaatggctgtgtgctgttgtttcagttttgaatattgtctcattgctttctaataatttagctcttg

SEQ ID NO: 368075 - DNA, 201 bp, Homo sapiens
gaactgggtaaaaatcaaacccataggtaggcatttaataactgtctctttctttaggcctgtttcagtttatgttgatctcaaaggatatttagcatatmtgtgccattaccgtgattgcttttcagctttaggataaaagtcagagtctgactgatgctccccagggttgccacaggtggttgggcatgtctgcactac

SEQ ID NO: 368076 - DNA, 201 bp, Homo sapiens
gtttgtaaattatttctgagtcagcattttttgaagcctcttcttacagatttctctaaggttgcaaagtcatcacataagagtcagcagtaaaaaaaaaaggcatttacttcttctggtatataacatttgcatgctctacttgccttttagcagcttataatcagatgctgaaaacatattcacctatagaactgggta

SEQ ID NO: 368077 - DNA, 201 bp, Homo sapiens
cttatatcctagcagaaattggtattaaacagattacacaattgcatatatttgtggtaagtattacagaggaaaactagagacatatttatgtatcttayacctatgcctgttttttaccaagtaaattaattagtaaattaatgaatggtgagaataaattcttctacaaagtcatgactgagcatgggcactctagag

SEQ ID NO: 368078 - DNA, 201 bp, Homo sapiens
ataatccttatatcctagcagaaattggtattaaacagattacacaattgcatatatttgtggtaagtattacagaggaaaactagagacatatttatgtmtcttacacctatgcctgttttttaccaagtaaattaattagtaaattaatgaatggtgagaataaattcttctacaaagtcatgactgagcatgggcact

SEQ ID NO: 368079 - DNA, 201 bp, Homo sapiens
tgaatgctgtcatgcattaggcattgtgctatatatggcagtgacatagtaaatgagagacatgctcattttctcataatccttatatcctagcagaaatyggtattaaacagattacacaattgcatatatttgtggtaagtattacagaggaaaactagagacatatttatgtatcttacacctatgcctgttttttac

SEQ ID NO: 368080 - DNA, 201 bp, Homo sapiens
tcttaaattgtgtaaattgtgcataatttgggcagtttaaattcagatatatcttgtcttaaaaagtcttattttgaagtagtctctcaaataatatcttycatgtgttaataatttacatctttaaaaagatacctatctgattcactcactagtagtgtgtatatatatatgattgaaatacttgtaaagagtgcctgt

SEQ ID NO: 368081 - DNA, 201 bp, Homo sapiens
tggaaaatgggaggatggttacattagatttttgatcctaaaaataattatgagtcatcaaagtgccagtaaagcaataattgtgtaagacattcaaaacstcttaggtcagagaaagaattaagtctctgagaaggctagttgaagggtaggtgataggacttatttgaaaacataattctggtttctctttttacatcc

SEQ ID NO: 368082 - DNA, 201 bp, Homo sapiens
cataacattgaatttaaaagtcgtagttaaaataactttttaatttatttattttttttttttttttactaatagcttttaaagtttcattttttatgttkggtgccagaattaagaagtggccctttctctgtataaagcaaatggagttttatatgctagattcaatgttgtgaactgggaaaaacatatctggtttta

SEQ ID NO: 368083 - DNA, 201 bp, Homo sapiens
taggttttttgaatagaatgatttagaactcatgttctgctctctgggcagaggggataggccagcatcagctgggcaaactgctaatctctctggtttgyctgtttcctgcagtgggggatttgtccctggggcagcagaggattccctcagtgccggggcctgccatttagcatgtcaggcagttgccaggagaaccct

SEQ ID NO: 368084 - DNA, 201 bp, Homo sapiens
tgttggtagacagaatttcaaaattcagtttcttgtttgttggcatgtttgtttgctttcaattagacaattcgattttgagataactttactgagaaagmaaaagggagtaatcaacagtgacatcaaactgttttagtgcttttggaataagattaaaccaaatgtttaaattttgttgaaaagcagaatttagtgaga

SEQ ID NO: 368085 - DNA, 201 bp, Homo sapiens
tgagacgtctgcagataaatagccagaatgtatataaaaattctcttgctatacaaaacgttatgaaaattataaagtatgaattaataaatgacaaaaayaggaaatactagatataaaagattaatatgttactttcagaaaatcttaattatgttttggaattttgtagtatgtgcctttatgttaataatagggtcc

SEQ ID NO: 368086 - DNA, 201 bp, Homo sapiens
gatccaatttaatgaaatgtttattatacatttacctggtacaggtggtatatatcacatacatgtgaataagacctggtctttgccctccaagggctcakaatataacaggaaaaaatggaaacagatatctaaccaagcataagtacattaaattgttgactaaattaaaggatataacctaggtgtattcaagcaaat

SEQ ID NO: 368087 - DNA, 201 bp, Homo sapiens
gtggtgttagtgtcatgcctgtcactcagaaagagtgaaacgctgcaaccacagcacagatatgcccaatgagtagtaaatttttgttgttattgctgtawctgttactattgtgaccggtattgttgttatgtatctgttacatcaactgttgattctagtgtatggtttttggtgattagaagtatagacaccttataa

SEQ ID NO: 368088 - DNA, 201 bp, Homo sapiens
tcctagtgtttgtgaaaacagaagttgacctcatatggtgagagctatgggaaaacttgggtgtaacaacaacaaaaattaagcaaagggaaaaaaaatcmacagtaagggcaggagagtatgtttcaatcctttaacattttaactctgaaaaccagttatttaatgctaaaattcagtttttaacgggtttttaatggg

SEQ ID NO: 368089 - DNA, 201 bp, Homo sapiens
agaaggggaaagtcaattggaagaggaggataggaacctacccctctctgctcagtgattttccagttagcttcttactcacctcccctctggatatctcraaagtttttctttggcactatggggacctctcaaaaatcacatcctagtattggtggccaaaagcttaaattttcaaatttgatttacagataaatcctc

SEQ ID NO: 368090 - DNA, 201 bp, Homo sapiens
cagagcattatgggttgtaattgttttttttgatgagtcccatgtttttgggggggttttgtttttttgttttgttttgttttaagacggtctcgctcttkcgctctggctggagtgcagtggcacgatctctgctcactgcaacctccacctcctgggttcgagcaattctcatgtctcagcctcccaagtagctgggat

SEQ ID NO: 368091 - DNA, 201 bp, Homo sapiens
cttaatgggtatgaagtttcttttgggggtaatgagaatgttctaaaattgattatggtgatggttgtacaactctgtgaatatattcaagaccattgatwgaatcctaacactttaggttaattctgtgccaagtttatatctcaaaaaagctgttatcaaaagagatgcagtagtagccttgtgagaatggttaaacta

SEQ ID NO: 368092 - DNA, 201 bp, Homo sapiens
attgattatggtgatggttgtacaactctgtgaatatattcaagaccattgattgaatcctaacactttaggttaattctgtgccaagtttatatctcaamaaagctgttatcaaaagagatgcagtagtagccttgtgagaatggttaaactagaaatattttgagagtagagccctcaatttttgctgatataatggat

SEQ ID NO: 368093 - DNA, 201 bp, Homo sapiens
gagagtagagccctcaatttttgctgatataatggatatagaattaggatgaaaagagttaaagagtgatcccttactcttaagtaactaaaagatggaaytgctaatttctgagttgaagacagattgtggaagcagcaggttatggggagaagttcaggaattctgtttgagtcacgtgagacaccttcgtaaaaattt

SEQ ID NO: 368094 - DNA, 201 bp, Homo sapiens
gcattctctatggctcacttttaacatacagaatgcacaacaaacactttgtattgagatgcctgattacaaaatcaaaatggttttctttatctatctakcttcgatactcaaaagaaacagaacctccctaattggataatgtaaactttatggtagcaatcgtttatggaacattactggtatataaataaattaaaa

SEQ ID NO: 368095 - DNA, 201 bp, Homo sapiens
tggaaatgtgcgtaaattattttctgtacattcactattttaaataattatttccctttcactcttatgctgagctgtatattgtgaccacatggatgaaagtctacctcttttcttcttcacaaggtttccgacagtgagattttgtgagtgatttggtttatttcaagaatggtggaattatcacaataatgtatattt

SEQ ID NO: 368096 - DNA, 201 bp, Homo sapiens
taagcaggctgatgggtatgactgtgtgctggggcatcgcagtcagctgtgtcattagagccctgatttattcattcatttaagctctgtcttggtcttcrgttcttcttctcagctggcagaagggctgaaaccccaatcagtttgatcagtcatgtccaacataatagctccctcattctctggaatgtggtctttact

SEQ ID NO: 368097 - DNA, 201 bp, Homo sapiens
cagtttgatcagtcatgtccaacataatagctccctcattctctggaatgtggtctttactccacctttcccccattccctcattcacatgttaatctacrtattcagcctagctacaggacaactcatttaggttgcctacatgcacaataggtttgactactttgagccactccgttgtcaaaaacaactttttaatca

SEQ ID NO: 368098 - DNA, 201 bp, Homo sapiens
aatgaggaagggggacaaagactcgttttaagattttaaaagaaaggaaagtgaggaaaacattttggggacatttagtcacaagggaactgtgactaactctgttagtcacagtgctgaatacttttttacatgttttcataattaaggtcctaaataacctcacaatttggtaattaatgtagcaccaactatattcta

SEQ ID NO: 368099 - DNA, 201 bp, Homo sapiens
aaatgaggaagggggacaaagactcgttttaagattttaaaagaaaggaaagtgaggaaaacattttggggacatttagtcacaagggaactgtgactaactctgttagtcacagtgctgaatacttttttacatgttttcataattaaggtcctaaataacctcacaatttggtaattaatgtagcaccaactatattct

SEQ ID NO: 368100 - DNA, 201 bp, Homo sapiens
gaaatgaggaagggggacaaagactcgttttaagattttaaaagaaaggaaagtgaggaaaacattttggggacatttagtcacaagggaactgtgactaactctgttagtcacagtgctgaatacttttttacatgttttcataattaaggtcctaaataacctcacaatttggtaattaatgtagcaccaactatattc

SEQ ID NO: 368101 - DNA, 201 bp, Homo sapiens
tgaaatgaggaagggggacaaagactcgttttaagattttaaaagaaaggaaagtgaggaaaacattttggggacatttagtcacaagggaactgtgactaactctgttagtcacagtgctgaatacttttttacatgttttcataattaaggtcctaaataacctcacaatttggtaattaatgtagcaccaactatatt

SEQ ID NO: 368102 - DNA, 201 bp, Homo sapiens
agccaggggtcatagaaataattatctgctgactaagagtgaccagggaatgctagttttgaagatgaggaaaggatttgtcagaggtggtttatgtgtgrttggattgaatctgaggaattaggacaagaggggcaatagtaacacttccattaatatgagggctgtgtgaagaacacttaccaacttgagggttttatg

SEQ ID NO: 368103 - DNA, 201 bp, Homo sapiens; identical to SEQ ID NO: 79935

SEQ ID NO: 368104 - DNA, 201 bp, Homo sapiens
cactatggtgacagtagatcataattttttatagttttttgggggataaactgagttgtttttgttttaaagctaacacttgttaggttcttttggttttktttttttttttttttttgccgttcactatcataaacactgtactttttaactcttagtgttcacataaccctgtgaaaaaagtactgttatcagttccat

SEQ ID NO: 368105 - DNA, 201 bp, Homo sapiens
accttatcttgatttttttttttagtttctcttaccttgtcactcactccacatgcttccaaagttaagtggagacaggagtttataatttctttttttttcatgtcatcattgagttgcttgtcaagaagttctttctgggattctgagatggcatggaaatgccccggttaattccttttctagctccttttagctcct

SEQ ID NO: 368106 - DNA, 201 bp, Homo sapiens
tttggtaacttgattagtaacatcttaattgaaatttgataatttagaagcccatctgccgaacttactccttaaaattaacatatgttgaaatatctacwctaatgttgtcagtacaagtgttggatagtgtatcgcaaacatatttttgcaaatttctgattccttttagtttctggattgcctcccagttttaaacat

SEQ ID NO: 368107 - DNA, 201 bp, Homo sapiens
gaccttatcttgatttttttttttagtttctcttaccttgtcactcactccacatgcttccaaagttaagtggagacaggagtttataatttctttttttttcatgtcatcattgagttgcttgtcaagaagttctttctgggattctgagatggcatggaaatgccccggttaattccttttctagctccttttagctcc

SEQ ID NO: 368108 - DNA, 201 bp, Homo sapiens
tgaccttatcttgatttttttttttagtttctcttaccttgtcactcactccacatgcttccaaagttaagtggagacaggagtttataatttctttttttttcatgtcatcattgagttgcttgtcaagaagttctttctgggattctgagatggcatggaaatgccccggttaattccttttctagctccttttagctc

SEQ ID NO: 368109 - DNA, 201 bp, Homo sapiens
catctcttaatacgatcagattgagtattaagtttcaacatgtgaattttggggggagcacaaatatccagatgttaagatttctgtaagtaggactgttrtatttaatgaaaaaattataaaaccaagagctgttgttttgaatcatgttttgaaaaaatacaaatgaaatatgttgttcttctgcgaagtgatttttat

SEQ ID NO: 368110 - DNA, 201 bp, Homo sapiens
tacctagtgaccttatcttgatttttttttttagtttctcttaccttgtcactcactccacatgcttccaaagttaagtggagacaggagtttataatttctttttttttcatgtcatcattgagttgcttgtcaagaagttctttctgggattctgagatggcatggaaatgccccggttaattccttttctagctcctt

SEQ ID NO: 368111 - DNA, 201 bp, Homo sapiens
ccatctcttaatacgatcagattgagtattaagtttcaacatgtgaattttggggggagcacaaatatccagatgttaagatttctgtaagtaggactgtygtatttaatgaaaaaattataaaaccaagagctgttgttttgaatcatgttttgaaaaaatacaaatgaaatatgttgttcttctgcgaagtgattttta

SEQ ID NO: 368112 - DNA, 201 bp, Homo sapiens
cctggtgcctaacacggtgtgttaataaataatttattgaaagaagtggtttgaaattgaataagttttaaagaatcagacctcatgtatagtagctgacrtgggctatcaaaagagatcattaaaaaggaaaatgattattcttaattaaagagagaaatcaacattattgtctcacaccaacatcatatattcataata

SEQ ID NO: 368113 - DNA, 201 bp, Homo sapiens
tcatattttcctgttttcctttcacttagcagagaacattccactcatttgtaatgcaaaagcagaccgggagcttaggttttttgaatagaatgatttaraactcatgttctgctctctgggcagaggggataggccagcatcagctgggcaaactgctaatctctctggtttgcctgtttcctgcagtgggggatttgt

SEQ ID NO: 368114 - DNA, 201 bp, Homo sapiens
aagattttgccttttgtacattttatatatttgcaaattttcaaaaattacgttttgctttacaataaataattccattttccattgaaagaactaatcartgttgatcaaataagcaggaatgtatttgcatgtttatgccttataattgtgagacagtaacttacctttgtaaattgatagcaaactgcatgtgtctct

SEQ ID NO: 368115 - DNA, 201 bp, Homo sapiens
ggccccaaatcagtgaggcaacacattttggtgatccaatttaatgaaatgtttattatacatttacctggtacaggtggtatatatcacatacatgtgartaagacctggtctttgccctccaagggctcagaatataacaggaaaaaatggaaacagatatctaaccaagcataagtacattaaattgttgactaaatt

SEQ ID NO: 368116 - DNA, 201 bp, Homo sapiens
ttatctgagtaattgtctgattttagaagtttgtgcattctgttaatgaactacacatagctggctagctggtttgtacttgaacttaccatccacttatrgttccataaccctggattatcaacaggaggaagcagatatatacttgtagtatatatctgtggttaacctctaacaaaacctctaaacaaaatctttctc

SEQ ID NO: 368117 - DNA, 201 bp, Homo sapiens
cgaggaacattaacccaatattggaccagtggtgagtaagtcaagccagagacttactctgtaagttactgaccgataacttcttttgtggaattcagaawtaagcgtagtagatatgtaaactctcaaaagaagtgatcaatattttataattaaaaagccactaccatattttcctctagtccttccctcctacttttt

SEQ ID NO: 368118 - DNA, 201 bp, Homo sapiens
ttcaaaggaggcaagaggacaagagggcaaggcccaaaagtagttgggcctctgagccaggctgcaaatgtgtaaagaagttaatactaccaataattttyttatactttcaagtatccataaagcagggttatacctggacctatatgtgatgaatatatggtcttcagaggatctggaaactaaaattccatgtaatat

SEQ ID NO: 368119 - DNA, 201 bp, Homo sapiens
agcaagggttaaaagcacagccccaaagcaggggcctgatgtgagccctggcttcccctgcttatttgctgtgcgatcttggcaaagtcatttcatttctytgtgcctgggttttggaatataaaaagtagaataatagtacccaaatcacaagactgttgtgaaaattcagtgaagtaaatctgcgtaagaattgactac

SEQ ID NO: 368120 - DNA, 201 bp, Homo sapiens
gttctcatgcctttcccattgaaattcccttgttattttttcccagaacttaggcagtttcaagttgtcaaacgcctaatctggtctataagtagaagtcygtaaaacctagatagcagacgcgttttaacagtgactttctaaaggcattgctctcacctttcatttataatacaggcaagtaataaagacaggatgaaa

SEQ ID NO: 368121 - DNA, 201 bp, Homo sapiens
gtcccagcaaaggacataaattcatccttttttatggctgcacagtatatatgtgccacattttctttatccagtctaacattgatggacatttggattgkccccaagtctttgctattgtgaatagtgctgaaataaacatacgtgtgcatgtgtctttatagtagaatgatttattattctttgggtatatacccagta

SEQ ID NO: 368122 - DNA, 201 bp, Homo sapiens
cactctgtcgcacgggaatctatcggcctccttgtattcctaggtgtagtgggggaggaaccatcctatgaatcctggaaggctgaggcaacagagcagawccacttggattaagtagtatctcacattcctgggggtcaggacaccaagcaaagcagagatgggcatgagctgtgcggggagcgggcctctgaaattgga

SEQ ID NO: 368123 - DNA, 201 bp, Homo sapiens
caacttactagagtgatgatgtgaaagaaatggtgattctggtatcatggtgtttattttctttcttataactgcagagaaaatatcctgactaaaaaaawttcatttttttggattcctttcttttacaaattgtgctgaggcaactatggcatagaaataaacatttgacattaaaataagcagttgatgtgagtattg

SEQ ID NO: 368124 - DNA, 201 bp, Homo sapiens; identical to SEQ ID NO: 79939

SEQ ID NO: 368125 - DNA, 201 bp, Homo sapiens
tgaagaagctaaaaatattttcctcttaaatattattctgatttagacatagaatagtgttctttttgatataaagggggcatctaaaagtatttcatatrtattagtgattgctaatttcttttaaaattattggtcttcaaatgaatatttgaatttgactgttaagaaagagataagctcttttgagtatcagactac

SEQ ID NO: 368126 - DNA, 201 bp, Homo sapiens
  misc_feature (1)...(201): n = A,T,C or G
taaatagtttttgctcagtatttggcacaggtcttcatgcaggattctaggtgaatagagaaagcaaataaatgtgacctttgtaaggctggtatgctttntatgaagccaaaaggtgcacaaatacacaaatattagcccagtcttattttttgtcctagaaaacttttcactggctggcggcatctctgtgttcagtct

SEQ ID NO: 368127 - DNA, 201 bp, Homo sapiens
ccttcgtaaaaatttggagtagataattctacatactaaactctctccctgtgtgtgtgtgtgtgtgtgtgtgtgtgtgtgtgtttgtgtgtgtgtgtgtstctctatgtatgtatatatacacgcaaatatatgtatgtttgtgtatatgtgtatatatacaatttgtattttaaagacttttttctggttatgtaggat

SEQ ID NO: 368128 - DNA, 201 bp, Homo sapiens
aatttctctagtcctggcctgctcatgtatcaatgaaagcaacttgttgtaagactcaaagcaaaggaaggaaggggaaatccaattttgttgtattaagygtagcaactttcacaatgaattaattaaataaatgttttccaagctgattggattctttggtctaaatagtttttgctcagtatttggcacaggtcttca

SEQ ID NO: 368129 - DNA, 201 bp, Homo sapiens
gagtcacgtgagacaccttcgtaaaaatttggagtagataattctacatactaaactctctccctgtgtgtgtgtgtgtgtgtgtgtgtgtgtgtgtgtttgtgtgtgtgtgtgtgtctctatgtatgtatatatacacgcaaatatatgtatgtttgtgtatatgtgtatatatacaatttgtattttaaagactttttt

SEQ ID NO: 368130 - DNA, 201 bp, Homo sapiens
ctcctgagtagctgggactgcaggcatgtgccaccacacccagctaatttttgtattttcagtagagacagggttttaccatattggccaggatggtctcratctcttgacctcgtgatccgcccacctcggcctcgcaaagtgttgggattaccagcgtgagccaccgcacccggctgaggaataattcatttaattagt

SEQ ID NO: 368131 - DNA, 201 bp, Homo sapiens
tgagtcacgtgagacaccttcgtaaaaatttggagtagataattctacatactaaactctctccctgtgtgtgtgtgtgtgtgtgtgtgtgtgtgtgtgtttgtgtgtgtgtgtgtgtctctatgtatgtatatatacacgcaaatatatgtatgtttgtgtatatgtgtatatatacaatttgtattttaaagacttttt

SEQ ID NO: 368132 - DNA, 201 bp, Homo sapiens
tttgagtcacgtgagacaccttcgtaaaaatttggagtagataattctacatactaaactctctccctgtgtgtgtgtgtgtgtgtgtgtgtgtgtgtgtgtttgtgtgtgtgtgtgtgtctctatgtatgtatatatacacgcaaatatatgtatgtttgtgtatatgtgtatatatacaatttgtattttaaagacttt

SEQ ID NO: 368133 - DNA, 201 bp, Homo sapiens
tgtttgagtcacgtgagacaccttcgtaaaaatttggagtagataattctacatactaaactctctccctgtgtgtgtgtgtgtgtgtgtgtgtgtgtgtgtgtttgtgtgtgtgtgtgtgtctctatgtatgtatatatacacgcaaatatatgtatgtttgtgtatatgtgtatatatacaatttgtattttaaagact

SEQ ID NO: 368134 - DNA, 201 bp, Homo sapiens
gaagagttttgtaggtaaaaagctaataatttacttggctttctcagagcattatgggttgtaattgttttttttgatgagtcccatgtttttgggggggktttgtttttttgttttgttttgttttaagacggtctcgctcttgcgctctggctggagtgcagtggcacgatctctgctcactgcaacctccacctcctg

SEQ ID NO: 368135 - DNA, 201 bp, Homo sapiens
agataaggaaactgaagcccaagaaagttaaatgatgtcccaacatcagtcttatgactgagatgttagcctgagtgtgacccccacaaagatgtgatttyccaaaaagatcttcctactgttggtacaaaattaaaattttgaagattaaaaagaatacttcagattaccagaagagttttgtaggtaaaaagctaataa

SEQ ID NO: 368136 - DNA, 201 bp, Homo sapiens
gactgccataaaccccggaggcggggcttgcagtgagccgagattgcgccactgcactccagcctgggcagcagagcaagactccatctcaaaaaaaaaaagaaagaaagaaaaagaaatgtagacgagagtaaacaacacagagacaagagtacagcaatgtaagctgatggtcttgctaaaggatagcgtgaaaagtga

SEQ ID NO: 368137 - DNA, 201 bp, Homo sapiens
tttgaagaactgtatagtttatacttagatactcatcacttaactttctatagctaataattgactatatttgctttatcacatgtctgtctctactcatycagcaatctaaccatttctttcttttttggtatctggcaaagtaagttttatttaactctgttgcatacatgctaatatctaaacttcttgtttgcatgt

SEQ ID NO: 368138 - DNA, 201 bp, Homo sapiens
accatctactttctgaagttgcctgtgcatgggtcactggccagaacctagtgcttgttttctctacttctccttcttgggcaaaactttactacatctcmcacgaagtaacaaaacaccgtgcctgaattgtgaatagcaaaagacctttgaatgacttctttcagataagctcattagatgccagtgcctcagccattc

SEQ ID NO: 368139 - DNA, 201 bp, Homo sapiens
tttttattaccaaaaaagtgctggtagaaatttctgtatttaccaaattttgatttgatttagagactttttcattattgttctatatcatcaaaccagartgacctggttaataattcacagtttgttttttataaagtgcctaaaacatatttatcctttgaaaaagtaatattccctatgggaaaatattattttgaa

SEQ ID NO: 368140 - DNA, 201 bp, Homo sapiens
tgtggtatagtaggaatagggagcttaccttctgccgaagtattaacctgtaccagttattctagctgtcttctgtgagagtactattctgtacaagttastacaactttatcaaattttttatctttacaaccactttgtatgggagatgatattgtccttattcttaagaacttgaggcttagataggtataattactt

SEQ ID NO: 368141 - DNA, 201 bp, Homo sapiens
acccaagcttcttcaatgttagccccccaaaataaggactaaatctcttatttgagagtaaaagtccattgtaattaacttgagtaaacatttaaatgacwgataatcttggttatctctggctggcatatgagtacagattgagaatgtcttaacgctaggtttgaaagtggggggaagatgggagcgcctacatctgtg

SEQ ID NO: 368142 - DNA, 201 bp, Homo sapiens
cattttacagatgaggacactcaggcatagtaggattaaataaattacccaactgtccagtcctggtaggtattaggaaaaggatttgaatacatgtaatyggagtcttagagccttggggcaagcccaactttgtaacccaagcttcttcaatgttagccccccaaaataaggactaaatctcttatttgagagtaaaag

SEQ ID NO: 368143 - DNA, 201 bp, Homo sapiens
cctcgctaattataggcatgtgcttaatcagtgtcagtgattgtggatttctatgtagtcagagcttatcaaaataagactttcataacaaaatttggccstttgcctttgatcactgattatttcagtgagatctcccaggtgattttggtggctagttacatcattaaatctatatgaatgactccttagaacacattg

SEQ ID NO: 368144 - DNA, 201 bp, Homo sapiens
gttggatcacagtaattccatccttattatttttttaaatttttagaaagattttctgaatattagcaaattttgtgtattttaaaattgaaagtatttgmtttattgagaaaacatttaaattctgatgtgtctttttattcttttgtgtctgtcttacccaaatcctgctttctctttttattttttcctgtttgcgta

SEQ ID NO: 368145 - DNA, 201 bp, Homo sapiens
ccttacctcctaatgcttatgacctgatgaaaataagttagacattttataatggaaattataaatttatttactcatattcatttcctgaggctctgtayatatttggtacaatgggggtatttaaaaagacaagtgtctgtcctttagcattccaaagagttagaggacaaaactgtaaaattctggtatgtaatattt

SEQ ID NO: 368146 - DNA, 201 bp, Homo sapiens; identical to SEQ ID NO: 79940

SEQ ID NO: 368147 - DNA, 201 bp, Homo sapiens; identical to SEQ ID NO: 79934

SEQ ID NO: 368148 - DNA, 201 bp, Homo sapiens; identical to SEQ ID NO: 79936

SEQ ID NO: 368149 - DNA, 201 bp, Homo sapiens
cctctgttctattctggctttcaaatgccaatttagttatatgtcttaagagaagtggagaagccaagtatttgtgatctgaagctttgcagtaggaccaragcacctcacagccatttggcccatggacagtacttcccagaacatttcaaatgtttgcctcagctgctctactttactatgcgtctgttgcaaaccaac

SEQ ID NO: 368150 - DNA, 201 bp, Homo sapiens
aaatgtaaatagcatggtttatagtataaaaataatgcagtactaatttcctctgtacaacacttttatgtaatcctattgtaatctattaagtaaatttytgattaaactgcaactgtttaattttttaagcatttttgaaaatcaaatttaatgatatttctgtcaatacatttttaaaattagtattctgaaaaatac

SEQ ID NO: 368151 - DNA, 201 bp, Homo sapiens
aaacatcactatgcaccccataattatgtacaattattatattaatttaaaaaataaagtaaaaattaaagcaatctaacttaaactattttgtacaactrttgggagttctattgaagttttactttttaaaaataaattcattcaaatatttgaggagattattatgtcaaacttagctgtgccacttttattagtgtc

SEQ ID NO: 368152 - DNA, 201 bp, Homo sapiens
tgtaaaataaaatataaatataacacaaatataatatgctttaatttgttctgttaaatatactgtaaaataaaatataaatataacaatatataagtatmctgtaaaataaaaatattctatgaaatgaagaaatagattttgcagtattatttggccatgaaagtcaatgcatatgaaacaatatcattctattatttt

SEQ ID NO: 368153 - DNA, 201 bp, Homo sapiens
tcaaacatttataatttatgagagacagcagggaatgaaagaaagggaatgaatttggtgtcagaaaaagctgagtttaaataatgagtgagatctgtcasttactggttgcatgatcttgagcaagtttctccatttctcaaccacaattcctttgtaacataagggcagtcacacctgcttctcagatttgttgtgcgg

SEQ ID NO: 368154 - DNA, 201 bp, Homo sapiens
agctggaaagaaaattggagagagatgaaggataggaaaacgagtaggaagaaggacaggaagagagagagaggtagaggacatttcaccctgagctgtakctggggagaagaggatgggttctgcacagtgcttgtttcttgtattgtcagaattctaagtttccaaagattagtattttgctctctgtcttctattttt

SEQ ID NO: 368155 - DNA, 201 bp, Homo sapiens
cctcccatctgcatctgctttaggtaagtaaaactacattcaaaataaaggcagagaccttgttttattcatatctttgttcttcctggtgcctaacacgktgtgttaataaataatttattgaaagaagtggtttgaaattgaataagttttaaagaatcagacctcatgtatagtagctgacatgggctatcaaaagag

SEQ ID NO: 368156 - DNA, 201 bp, Homo sapiens
gattcagtgaaatgcaggttttatgatacatatctacatttctttctcttcaggaggcagtaatgtgtagtggccatgtattcagacctcagttgtacatrgattatgccaaattcctgaaccattctttggtgtcgtcttttacctgcaaaatgaaaacatatctcatggcatttttagggttacattaaaaaatgtgtg

SEQ ID NO: 368157 - DNA, 201 bp, Homo sapiens
taaggtcaaacaggaggaatacacataaaaaccagaaactaacagcaattatgatgataatattccaaaaaaaatctgagtgaagaagaagaagaagaagagtaatagcaaacccttgtgataataagtgccaggtgtgtagtatgtgctgctattaaagtaaatgatgttcaattatttaatttataattctggtttcat

SEQ ID NO: 368158 - DNA, 201 bp, Homo sapiens
cttaacatctgtcccaatgcctgtctgtattaggtacttaatgattgtttcattcaatttgattttgtttaataccaataaaatgttaattgaatctcagtctatcaccttaaaagttgataggtcttagagatacttttatgcaattatttttttaaagaaaaattaaggctgctttccaatttttcctggttttattgt

SEQ ID NO: 368159 - DNA, 201 bp, Homo sapiens
ttggataatatagcttgcagttccccttttgtggatgtaagtaaagactgagagggctgtgctgtgacagagtgtgcagatagttcctcctaaccacagcygtcccctacttaccttttctaaattccaaatgagttttaattcgaaagaaaataaattttgttttcatgaacatattttgcgctatcagtatatcaatta

SEQ ID NO: 368160 - DNA, 201 bp, Homo sapiens
ctctaatgtcatttgtttggttattaagtttccatgtctaagattgaaatggtttatatttaaattaaattatataaaaatttatatgctatggatgctaygtgttcataattttgaattgtgatttaattctcataaaacttcacatattagcacctcaataatttttgctcagaaatgcagaattattatagttaaata

SEQ ID NO: 368161 - DNA, 201 bp, Homo sapiens
ctctttcttatgttttaaacattaaaggccaactccttcaaaggtggaccttagcttaatctcaaccactgctttgccttcttcatgagataagctggtartatttattaaatatatatcaaaggtaggtgaaagctagacattaaattgcctgtattattgatataaaatatccattccacttgagactctgaattgagg

SEQ ID NO: 368162 - DNA, 201 bp, Homo sapiens
attggaaaatcaaaaccagtatctactgggacagcaccaactaaactttctggtggaggttatctttgtagagtttgtatttacttccagatcttttctawtgaaatggctctttcacagtcatttatttgccattgactgttgttccctggcaattaattaagaagagggggatagagttcacttctattaggttccctg

SEQ ID NO: 368163 - DNA, 201 bp, Homo sapiens
taaaaggtaaagtttgagtggatatttggataccatttggcgaataagagattctcagataatcaagcatgaaacacattattcatttgaaattctctttyttatgttttaaacattaaaggccaactccttcaaaggtggaccttagcttaatctcaaccactgctttgccttcttcatgagataagctggtaatattta

SEQ ID NO: 368164 - DNA, 201 bp, Homo sapiens
attttaaaaggtaaagtttgagtggatatttggataccatttggcgaataagagattctcagataatcaagcatgaaacacattattcatttgaaattctmtttcttatgttttaaacattaaaggccaactccttcaaaggtggaccttagcttaatctcaaccactgctttgccttcttcatgagataagctggtaata

SEQ ID NO: 368165 - DNA, 201 bp, Homo sapiens
gcagaacagaagcctttgaagacacatgttggtcaacacctgattctgggtaccagatgggcatgtttccatgcagagactgggccatcctctccagtttytaagatacactcatgttcatcagttagatgttttatttattgaattgactggggacaactaggaagtggaggccccatgattatctcctctttttctccc

SEQ ID NO: 368166 - DNA, 201 bp, Homo sapiens
aatctgattctttcttacaaagcattataatcaggctgcaagtttcagaactcagctttgctcacagacatttgtagaaattcattatcctctttaaaatyctagttacatatttttcatttaattttaaaaggtaaagtttgagtggatatttggataccatttggcgaataagagattctcagataatcaagcatgaaa

SEQ ID NO: 368167 - DNA, 201 bp, Homo sapiens
attcttaattaaagagagaaatcaacattattgtctcacaccaacatcatatattcataataatcatagaaaaacattctatatttcaaaatttttatttsagtgttttatttgctaaagggatatttaaggttgaaaagcatgtcatccttaaacagcttttgtttatacaattatatcagttttatttttcggttattt

SEQ ID NO: 368168 - DNA, 201 bp, Homo sapiens
gagtgaatgaatgtactcacaaatgtagaggaaggcattagctacaagagagcttcttgctgttaagaagatgcgggtgagtggaagagagaatgattgcytccaagcctgagcaataattggactttgtcactgtgtcatttttaaaaatacctgtatctcgtccctgacatcctgatctttcacttttaaggaggtccc

SEQ ID NO: 368169 - DNA, 201 bp, Homo sapiens
agtttagtgaatgtcctctggcggaatgagtgaatgaatgtactcacaaatgtagaggaaggcattagctacaagagagcttcttgctgttaagaagatgygggtgagtggaagagagaatgattgcttccaagcctgagcaataattggactttgtcactgtgtcatttttaaaaatacctgtatctcgtccctgacatc

SEQ ID NO: 368170 - DNA, 201 bp, Homo sapiens
tttctggtgtttctactgtgtatctcatgctcaagagagggaagaagctatatgattggagtctaccaaagggatgcattagtagtaaagatccttgttayttacagccattttgttagtatttaagattaccaagtgcagacattctaaaatggaatccacctgtacctacttcatgcttatagtgctgtgggttcttag

SEQ ID NO: 368171 - DNA, 201 bp, Homo sapiens
gatctatcttaagtttaatcaggccagcaagtgcatgtgtggcagagacccactgcttttatctgcctgacaatatattagcctccttcccttctgtgctyctgtgattcttgcctgacagttatgcagagccacttaaaccttcactgttgcctaaaacaccttggaaaatcattttttaaaaattcagctcttgccctt

SEQ ID NO: 368172 - DNA, 201 bp, Homo sapiens
cctcagaatatggatttatttgctcagctctaagaataaaaaaattatttataaactatgttttaaaacatattttttcaaaaatggaagaatatgtttckggtgtttctactgtgtatctcatgctcaagagagggaagaagctatatgattggagtctaccaaagggatgcattagtagtaaagatccttgttatttac

SEQ ID NO: 368173 - DNA, 201 bp, Homo sapiens
taataagctttatccttgcctatttaaaaatttggtaacaaaaatgtgctaattaagtttttaagatggatatttttaaaattattatgctcatatcttawatgtacacacatatataaaatatataaaagttttaagaagtgttttactatttatgttagtttttacagctccaattatagctgtggaagtccccagagc

SEQ ID NO: 368174 - DNA, 201 bp, Homo sapiens
catacaggcaagtaaataggaccaaatgtgtaagtctttgcactaagtgaaagatattgttgagtaattttatgtgaaaatgtatattttatattacattrgttttgtatcttctattcagggtgacagctgtatcagagttcttttcaagctattatttgtatagctcttatagtgaaaccttaccctaaggtgttcagt

SEQ ID NO: 368175 - DNA, 201 bp, Homo sapiens
agcacttgacttctaaatcgtagtattgacacagtcttgctgaacagttttgaaatgctgatacattaaaaatctagttttcatttgcagtttgtaaattkattgtttcacaatttttaacaacatactcctctgtccccagacaacctaattttcgtaaactttaacatgaaattatatgatattataaaatttttgctc

SEQ ID NO: 368176 - DNA, 201 bp, Homo sapiens
taccctgatctgattactgtgcattatatgtgtcaaaacatcactatgcaccccataattatgtacaattattatattaatttaaaaaataaagtaaaaawtaaagcaatctaacttaaactattttgtacaactgttgggagttctattgaagttttactttttaaaaataaattcattcaaatatttgaggagattatt

SEQ ID NO: 368177 - DNA, 201 bp, Homo sapiens
ccatttctttgagtggatcaactaagaaattcattgtcaaatgttgcacagggggtcacgtttatattccacaaagtgtcaaagatgcagaaatcagttcwatacctgatacatttcctttatttatttatttatttatttatttatttatttatttatttattttgatggagtcttgctctgtcgcccaggctgaagtgc

SEQ ID NO: 368178 - DNA, 201 bp, Homo sapiens
ctaaggtcaaacaggaggaatacacataaaaaccagaaactaacagcaattatgatgataatattccaaaaaaaatctgagtgaagaagaagaagaagaagagtaatagcaaacccttgtgataataagtgccaggtgtgtagtatgtgctgctattaaagtaaatgatgttcaattatttaatttataattctggtttca

SEQ ID NO: 368179 - DNA, 201 bp, Homo sapiens
actaaggtcaaacaggaggaatacacataaaaaccagaaactaacagcaattatgatgataatattccaaaaaaaatctgagtgaagaagaagaagaagaagagtaatagcaaacccttgtgataataagtgccaggtgtgtagtatgtgctgctattaaagtaaatgatgttcaattatttaatttataattctggtttc

SEQ ID NO: 368180 - DNA, 201 bp, Homo sapiens
ggtttttttgtatattttgtagagatctggtttcaccacgttgtgcaggctggtctcgaattcataggctcaagcgatctgcccacctccacctcccaaartgctaggattataggcgtgagccactgtgcctggcctgtcccttgttaatctttacagcgtcatatcttttcattccacacctaaacttcaagtttatag

SEQ ID NO: 368181 - DNA, 201 bp, Homo sapiens
cctcaacaccaatacagttttctctttctttctttctttctttctttctttctttctttctttctttctttctttctttctttctttctttctttctctttctttctttctttctttctttctttctttctttctttctttctttctttctttctttctgtctctctctccctctctttctttctttttctttctttctct

SEQ ID NO: 368182 - DNA, 201 bp, Homo sapiens
gctcctcaacaccaatacagttttctctttctttctttctttctttctttctttctttctttctttctttctttctttctttctttctttctttctttctctttctttctttctttctttctttctttctttctttctttctttctttctttctttctttctgtctctctctccctctctttctttctttttctttctttc

SEQ ID NO: 368183 - DNA, 201 bp, Homo sapiens
tgaaaacgggaaactgtaattttcacttgcaagtagcgcatgtaaataacatggagacattacgttgtttcctttttaaaaagctaacgacaacagtagcrtatctctttcttactggtgaaataagaaattaggaagattttgtaagagatgttttagtggataggcttctgaatatggatttgcagtgaattagggcag

SEQ ID NO: 368184 - DNA, 201 bp, Homo sapiens
gtgctcctcaacaccaatacagttttctctttctttctttctttctttctttctttctttctttctttctttctttctttctttctttctttctttctttytctttctttctttctttctttctttctttctttctttctttctttctttctttctttctttctgtctctctctccctctctttctttctttttctttctt

SEQ ID NO: 368185 - DNA, 201 bp, Homo sapiens
atgtgctcctcaacaccaatacagttttctctttctttctttctttctttctttctttctttctttctttctttctttctttctttctttctttctttctytctctttctttctttctttctttctttctttctttctttctttctttctttctttctttctttctgtctctctctccctctctttctttctttttctttc

SEQ ID NO: 368186 - DNA, 201 bp, Homo sapiens
aaaatgtgctcctcaacaccaatacagttttctctttctttctttctttctttctttctttctttctttctttctttctttctttctttctttctttctttctttctctttctttctttctttctttctttctttctttctttctttctttctttctttctttctttctgtctctctctccctctctttctttctttttct

SEQ ID NO: 368187 - DNA, 201 bp, Homo sapiens
taaaatgtgctcctcaacaccaatacagttttctctttctttctttctttctttctttctttctttctttctttctttctttctttctttctttctttctttctttctctttctttctttctttctttctttctttctttctttctttctttctttctttctttctttctgtctctctctccctctctttctttctttttc

SEQ ID NO: 368188 - DNA, 201 bp, Homo sapiens
ctttcttccgcttggtcaatttggctgttgcttcttctatgtgcttcattaagttctcgtgctctgtttttcagctccatcaggtcatttatgttcttctytaaactggttattctagttagcaattcctctaaccttgtatcaatgttcttagcttccttacattgggttaaaacatgcttctttagctcaggaggagtt

SEQ ID NO: 368189 - DNA, 201 bp, Homo sapiens
atatctggcttgcacttcacagggagtaaagcaaactgatgtcattggttccccatttatgtgttttatttgcagctcaccagttggtgtactcactgaaraaatcattaagttttttgtacaaatgccttacctatcgctgtagcacaccaaagattactttttaaaaaaatcaaatatcattcccactttgagaattcc

SEQ ID NO: 368190 - DNA, 201 bp, Homo sapiens
tggttgattgactggtgtggagcttgttaagagggaaaattaaagtgcccagcattttgtatgcgtttacttatggtatggatcagtggatctcaatctgraattcatatttgtgtaacctgggattaggtaaaaataggccaatgccctggccctaccctaaaccagttaaatcagaatctctagacatagggcatgggc

SEQ ID NO: 368191 - DNA, 201 bp, Homo sapiens
caaaatttaccttacgtatggatgcaaattatctcccaagagtggttcttttttgaggaaaggaatgcagtttgttgtagctttattataaaattgttcaytttccatttgctggattaaaaaatgcatgtttgatttttaaaccaaaattgacaagttcactttaaagataaatgaaacaattgaaaatgaaatttgaga

SEQ ID NO: 368192 - DNA, 201 bp, Homo sapiens
tgattgataatcctgactgatctttttagcaattctagtatataaacaacactcatcatttttaattgacaaaaatttaactaaatttgaaattaggattrctaatgaatcacaatttattatgaaccagcagctattttatgttttccaaacacctgtgttaattttctatgatcactcagtttatatgccatatatacc

SEQ ID NO: 368193 - DNA, 201 bp, Homo sapiens
attgcaagtttagcaattaaaaatgtctttttaattgaatcatacttcaataaatgtatattaatagcattcttataaactaggaaaatgttcctttaaasgaaatatttgaactgctttctgaaatcccatgtgatagtgttttaggatgttagcagtggggcactgttgtactgatgtaacattatttttattgttaca

SEQ ID NO: 368194 - DNA, 201 bp, Homo sapiens
acctgttaattaaaatgaaataaaatatcctagtttatgtacttagctattatttagagttttagaacgtttttctgttctgacatattaactttatatamaatataactgtagggaaatcaagcgttatttgtaaaatatatttcagatttgtgacatgactaataagagatttaggatttttaaagacacttatgtctt

SEQ ID NO: 368195 - DNA, 201 bp, Homo sapiens
taactgattaaaaaaagtaactgattaaggtcatgtctttaattgcttatctatccccattcagtgtctaatatgatgcttattgcagtcattagtaaatcattaatgagctaatgctgtctgtaaacattcatgtaatctaggtgtttctactatgagtcttaagaatttcatttttaagcatttttatatctacacaaa

SEQ ID NO: 368196 - DNA, 201 bp, Homo sapiens
gtatttagtgtgctaagaatggctccattcctctcctgtggaataaaggacatggattttgtggtgaggtttctcaccattgctctaggtgtggaactgcrctgtggttgttgagaacaatgggaaccaaagctctgaataaatggagtattatcatgtatcaagggacttcaaaacaaaatacaactccattgttcgagt

SEQ ID NO: 368197 - DNA, 201 bp, Homo sapiens
gttactcattatttttaaattatttcatataggcttatcttcccaacaagttcaaaaaaataatgactattttttttaattctccattacacctatggcayagcaggtacttaataactacctgttaattaaaatgaaataaaatatcctagtttatgtacttagctattatttagagttttagaacgtttttctgttctg

SEQ ID NO: 368198 - DNA, 201 bp, Homo sapiens
gatgctttactcagctttgcttttccttttttgtaataactagttttctgaagttctgtaatttttctttactttgtatttgttttgtgttctatgtgttytcttttaataatatttaaaaatatttcactttctttagatacctgttcatcagtcactaacaaaatctaattttggtgggctcttgatgacttacttaac

SEQ ID NO: 368199 - DNA, 201 bp, Homo sapiens
cagccaaccttcttttccttaatttctgatttcctgtaagaattactgtctatacctatagtattccaaagccttttgtaagcagcagaatctaccctgtrtcacatctgtaacataagtacgtgtgcacatatgcacacatgtacctgtgtacacacacacacatacaaagagctcttacatggaaatccaaggtataaa

SEQ ID NO: 368200 - DNA, 201 bp, Homo sapiens
ccattttctaaatgaagaagtgaaattaaatcaaaattctcatagggaaaggatgagtcaaatttgctggtgaaaacttttaaacccagggcaagatactktaaactgtatgtaattagcgtgcatgcatatgtgtttggggactccatttctttgagtggatcaactaagaaattcattgtcaaatgttgcacagggggt

SEQ ID NO: 368201 - DNA, 201 bp, Homo sapiens
caagtgtttctttaattataaagacaccagttatattggattaaggcccatcccaatcaagcgtgacctgattacatctgcaaagatcctatttctaagtrtagtcacatttgtggctaccaggggttaggtcatcaacatatttttggtggggggtagagcacagtttaacccataatatctagaacagagacattcaaa

SEQ ID NO: 368202 - DNA, 201 bp, Homo sapiens
catataatgtatgatggatgatcagaccaaggtaattagcatatccatcatcacaaacatttatcatttctttgtgttgggaacacccaatatccttttcrctatttgaaaatacataaaatattaattctagtcatcctgtagtggtatagaacactataactcattcctcctatctagctgcaattttgagaaggattt

SEQ ID NO: 368203 - DNA, 201 bp, Homo sapiens
ttaatacaatgtaaattctatgtaaatagtggtcataccatgtttagatataatgacaggaaaaaaggctatatatgttcagtatagttgctgtttttttyccctatgtatatttaatttgcctttggttgaatccatagatgtggaacccagagatatggagggtcaactgtacttatttccacagccccagtctgtaac

SEQ ID NO: 368204 - DNA, 201 bp, Homo sapiens
gctgttgaccttcagatggagtttctgtgtggacattgtttttgttgatgttgatgctattcctttctgtttgttagttttccttctaacagtcaggcccmtctgctgcaggtctgctggagtttgctggaggtccactccagaccctgtttgcctggttatcactagcagaggctgcagaacaacagattgctgcttgtt

SEQ ID NO: 368205 - DNA, 201 bp, Homo sapiens
taagttgagaatgaggtctgattggttaaaaggttaggggactgtatgaagcacattaaaggttaatgttcagtttaagtttgtgtctgtctgaatctgtbttaaagattgtacaggtaaaaaaatagacatagcaaatgttttactgtttgtacaaagaataattagtctatatttaaaaatggcattatttcatttttc

SEQ ID NO: 368206 - DNA, 201 bp, Homo sapiens
acaccaatgggtcttgactctgtatcccatttgccagtctgtgcctttttattttatttatttatttatttatttatttatttatttatttattttgagayggagtctcacttttgtcacccagcctggagtacaatggcgcgatcttggttcactacaacctccaactcttgggttcaagcagttctcctgcctcagcct

SEQ ID NO: 368207 - DNA, 201 bp, Homo sapiens
ttctatttgattcatctctcttttattttttattagtctgtctagtggtctattttcttaatcttttcaaaaaaccagctcctggaatcactgattttttkgaaggtttttttgtgtctctatgtcctttggttctgctctgatcttagttatttcttgtcttctgctagcttttgaatttgtttgctcttgcttctctag

SEQ ID NO: 368208 - DNA, 201 bp, Homo sapiens
actctggaaaacaggctctattgcattatttcatatggctaacaaattataacctacaatacaacaaaattcagccaaattcttatggatatagtggtaayataaatttttggtttctctcctgaattgtttttcttttaatcgtctagaccagagctgaaggctacttccccctcagagagaattgtttggcctaaaaga

SEQ ID NO: 368209 - DNA, 201 bp, Homo sapiens
ttgtgtctcttccagcgtttagtgtcaggatgatgctggcctcataagatgagatagggaggagtccctctttttctcttgtttggaatattttcacatgraatggtaccagctcatctttgtacctctggtagaattcggctgtgaatacatctggtcctgggctttttttggttggtaggctattaattactgcctcaa

SEQ ID NO: 368210 - DNA, 201 bp, Homo sapiens
gatatttgtcctttatgtgttaggaatacccaagccaagatgtgtgactgccaatttttgatcctaatagcttttctgactaaacctgttttatagctacyatgatcaacatcttctggataccaagtgtttatatgggtagcttgacttgagagattgaaatgtttaatgagtggacattaaccttactaatttgtatct

SEQ ID NO: 368211 - DNA, 201 bp, Homo sapiens
tgccagttttcaaagggaatgcttccagctttttcccattcagtatgatattggctgtgggtttgccataaacagctcttattactttgagatacgttctrtcaatacctagtttattgagtgtttttagcatgaaggagtgttgaattttatcgaaggccttttttgcatctattgaaataatcatgtggtttttgtcct

SEQ ID NO: 368212 - DNA, 201 bp, Homo sapiens
tagttctgcttgaagaggtccttcacatcccatataagttggattcctaggtaattaattctctttgtagcagttgtgaatgggagtttgctcatgatttrtttctctgtctattattggtgtataggaaaacatgtgatttttgcacattgattttgtatcctgagactttgctgaagttgcttatcagcttaaggactt

SEQ ID NO: 368213 - DNA, 201 bp, Homo sapiens
aacatacaagcagaagagcacatatcatacatcaaacaaggaagtccagcaacaaaatccttgttataatactggagtgctcctttaaaaacattgcttcrtgaacacttttttttttttgaggcggagtctcgttctgtcacccaggctccagtgcactggcgcgatcttggttcactgcaacctctgcctcccgggttc

SEQ ID NO: 368214 - DNA, 201 bp, Homo sapiens
tgcttccatgctaatttttggttggtgtctttaattgtattatgtattatttttatccaaacagataatttgtggtagaccacaataacttcttctttttwttttttttttaccttgtttcctcctctaaatggtgtgaaatgcttgacgattggagtgccttttcctatcatcctccattgacatgctaatgttaagttt

SEQ ID NO: 368215 - DNA, 201 bp, Homo sapiens
cttgtatatactgatttcctttctttttggcatatacccaacaatgggattgttagatcatatggtaactctatttttagttttttggggaacttccaaartgttctccatagtggttgtactaatttacattctcaccaacagcagacaaagtttccttttaagattttttttcctgaaaacattatatatagagcagtg

SEQ ID NO: 368216 - DNA, 201 bp, Homo sapiens
aaataaaaattaatctaatatacccttaagtagtaatgaggcatgtagttagtgcactgaagtagttatgtgcttcccaaagtgggaacttaaaacaaaaaggaatcttttaagcttaacaattccttatgttagtcatataattatcccttttctcagaagcctggggccaaatggatctgttcctaggagaaaggaact

SEQ ID NO: 368217 - DNA, 201 bp, Homo sapiens
ataaacacaaaccaactaaagaatgctgtattttggtaatcaaaatatatttttatgaagtatttagtaccaaggttgtggtggatttggatggagagcargctttgtgtgttttgagaagttgtgctatttgaatagggatgattaggatgtgtggccaaggaggtaaaacaaggtagttgttaatcataaggaatactt

SEQ ID NO: 368218 - DNA, 201 bp, Homo sapiens
cttgcagaataaacattattgcatttagaaaattatgtggtgagatgtgaatcatataccagtaaatcactagacaaatgtttttttaaggctttctatgyccatcactctgggtagggaatagtgaactcaaaagtaaagagcatgattcagggaaatctggagaactggatgtgtactttgggttcttcccttaattac

SEQ ID NO: 368219 - DNA, 201 bp, Homo sapiens
ccagttgttccttgtaacattttggtctcttttaaggctgggagcaattaaattaagcaggcagaagagccagataagatattcaaggagcaaactgtgcwtgcagaataaacattattgcatttagaaaattatgtggtgagatgtgaatcatataccagtaaatcactagacaaatgtttttttaaggctttctatgtc

SEQ ID NO: 368220 - DNA, 201 bp, Homo sapiens
ctttgatgctgttgaccttcagatggagtttctgtgtggacattgtttttgttgatgttgatgctattcctttctgtttgttagttttccttctaacagtsaggcccctctgctgcaggtctgctggagtttgctggaggtccactccagaccctgtttgcctggttatcactagcagaggctgcagaacaacagattgct

SEQ ID NO: 368221 - DNA, 201 bp, Homo sapiens
gagaaatcatttataatgctgcgtaatttattgattatgaaatatctttcctttgcattcatatgtaggtcagccaaaaaaattcatctcaaaaagcaccrtaatttttagattcttctattagatattaaatcttggaataaacatttaagatttagggactttctcttttaattaagcgagatagttgtttaatacaag

SEQ ID NO: 368222 - DNA, 201 bp, Homo sapiens
aaagtaatttagcaatcttctactgtagataatatcagaaaatccccactgtaatatgcctggtaacctgtactccattaagcaaatacttgttgagcccytcttttatgtaactacagaggtacatatttaaatagacacctctcttacagtcaaggaaaattatactaatcaaacaacaatatactttacaattctaag

SEQ ID NO: 368223 - DNA, 201 bp, Homo sapiens
taaagagcatcttttacttacgtaattttttgaacatttttattttcaccgatcattgaattgtgatattcatatttgaacgtgactttaggaaggaaatktttttagtagcttctttgtcaaaatggtttctgatatgatttgccataaatatatgtggtgattttatttaactgtaagaagtaggttatggggctggcc

SEQ ID NO: 368224 - DNA, 201 bp, Homo sapiens
gaatagatgtcttatttctgttttagagatgagaactctgatgttcattggagcttagttacttacccaaaaattatgcacttaaggaaagaaaagccaakattcaaatcagttatgtaaatatcaaagctcaagcccataaccattccaaccatttctccaaagggattgatgagacaaggctgcagacgtgagagagaa

SEQ ID NO: 368225 - DNA, 201 bp, Homo sapiens
aaattttagaagtttctaagagctagcaccattgagttgattgatgctcctaaagagcatcttttacttacgtaattttttgaacatttttattttcaccratcattgaattgtgatattcatatttgaacgtgactttaggaaggaaatgtttttagtagcttctttgtcaaaatggtttctgatatgatttgccataaa

SEQ ID NO: 368226 - DNA, 201 bp, Homo sapiens
ggttttcataatattttgacattatttatatcacttcaatttcatatatttgtcatattataaaattattaacaatgaaaagttacaaatgtaaccttatrcatatgtagtatcatagtcataagtttacatctgtgaccttgtatgtaaccatatgtaaaatactcatgtattatatcagtatacaatgaatagtagagc

SEQ ID NO: 368227 - DNA, 201 bp, Homo sapiens
ccagacacttgtgcagtagtcacactgtacaaccgactgcactggaccttgtcttaggctgattcgtgatttaaatatgttcccctaaacctgtagatttsgggatgtatctgggatttgtgcaacagaagaaatggctatatatgagagataaatatgtgaagcccctgaatagcttttgaaaacgcaaagcgatttgaa

SEQ ID NO: 368228 - DNA, 201 bp, Homo sapiens
ttgtcttctgaatgtctgcataaatttgtatgaacattagtaggagttaaaagaatcctgggcttgaccctatcactggtcagccaaaatacctttaatgrgttgtccttttttttttttttttttttgagacggagtctcactctgtcacccaggcttggagtgcagtggtgggatctcagctccctgcaagctccgcct

SEQ ID NO: 368229 - DNA, 201 bp, Homo sapiens
ggataaggatttcaggccctcagtttctgcctcatccagacacttgtgcagtagtcacactgtacaaccgactgcactggaccttgtcttaggctgattcrtgatttaaatatgttcccctaaacctgtagatttggggatgtatctgggatttgtgcaacagaagaaatggctatatatgagagataaatatgtgaagcc

SEQ ID NO: 368230 - DNA, 201 bp, Homo sapiens
tgagtaataagactatttcatttctttccttttccaaccttgacaaacaagtcttttattatgatatgtgtcccttgagcgtcactcggggcctctgtctrgcctgtgtctaccccatgcaggaatgtagaaaaggtccacagtttgactcatttttggggataaggatttcaggccctcagtttctgcctcatccagaca

SEQ ID NO: 368231 - DNA, 201 bp, Homo sapiens
caacatcctttttcctggttggtaggagtctcttcagacattagatgatttttaaaaagttaactctatagactctgactctattcagagagcaaactaatatagcatttttattgtgctaatagcaaatctctattaagaattcatatatgtacctttgttacgttttgtaatatgttttcaataaaaatcttgatgtaa

SEQ ID NO: 368232 - DNA, 201 bp, Homo sapiens
agctttaggtaggaataaagaccttctgagaccataaggaaagaaaaagtatgaagatagaaagggtgacgtgacataggaagtagagaaccagaaaacaragaatgtggatcccagcccactttctctcttacttgtgtggtagaaattaaactatgtgctgaaagtgaaggctaaggagaaacctggagatggtataga

SEQ ID NO: 368233 - DNA, 201 bp, Homo sapiens
agtgatgaaataggaaactttgaagcacaagaccataaaattgtagcatatcagactttgacaataaagccccagtcacacccttccattttcccccattktatgccctgctgcaaagtaagattttaactttgatttcataacacctagctcagtgtcttgacacataataggcactttaacaaaagctttttagtgaat

SEQ ID NO: 368234 - DNA, 201 bp, Homo sapiens
tgtagaccaatgaaaactggcagctggatttggtgtttaggttatcaatctgtatttctgccttggatgaatcatataagctttgtatcctgggtttaccytgcttcaaaatgagtgagttaaattagacaccctaaagctcttttaaactctgaaattttaggggcatcttgacagtgattttgaagtgttttggaagct

SEQ ID NO: 368235 - DNA, 201 bp, Homo sapiens
cattcatgacatttttgaaaaatactgagtcttctaatttattttaaataattgaacaacatggcaaccttttacagtaaaaagtataaaggaaattaagmcagaatttaatggcatgctctaaagaacaagtgggaaattattggccataaaagaaaaactttgaactctaaatccatcattttatcaatttttgacaat

SEQ ID NO: 368236 - DNA, 201 bp, Homo sapiens
gccatcagccaatttttagtctttctttcattggacctcctgagaagttgacactccctctttctttcaatactttcttcccttggttatcaggataccaygctcacctgctttttccttagtttgtggtcctttttacttagtctccttggaggttcttctccctcttagagtgtcccacaatttagtccttagacttcc

SEQ ID NO: 368237 - DNA, 201 bp, Homo sapiens
ttctgagagatttgccagctttactctttttaacaaacatacaaaaggtgtcatggtaacatgtttgagagaacctttgactcttatctttcactaaagcyttacactccttgtcctttcctgggtctgatggtacatttaccatctgagataaaagacatgctcaggcaccaggtctcttgggatcttaaagcactatcg

SEQ ID NO: 368238 - DNA, 201 bp, Homo sapiens
gaaaataaaaaaagattacaactgtcataccagtctatatcattatattctaatagtgataccaatcattacataaagtggcttattctcaaagcagtttratacatgttctctcactagcaaagtgaggcaaataggatgttagcttcatttaatgaatgagaaacgtgaaacttagaagtgttgttagtaaagagcaag

SEQ ID NO: 368239 - DNA, 201 bp, Homo sapiens
gtgtgtaaacatcctggcagcgtctcataaagaatttttaagtgcacaatgatagccattattgttattattctcttctttttttttttttttttttttttagttaatctgtatactagtggactcagacattagagccaagtttgccactaattaaatttggaaacttgagcaaaatacttagcttttctgtcgtacttc

SEQ ID NO: 368240 - DNA, 201 bp, Homo sapiens
gtgaattagaagcaagatgggtacataattctctctgtagatgaaatagctgaagccagtaatgttaagagcttgtctaaggccgcagatagaagtgtcaraaatgggatttggaccaatctctctggttctatgctcaggttgtgggaatatagcatgaatttctagacatactcatgttgaggattttttcccttacaa

SEQ ID NO: 368241 - DNA, 201 bp, Homo sapiens
aaaataaaaattaatctaatatacccttaagtagtaatgaggcatgtagttagtgcactgaagtagttatgtgcttcccaaagtgggaacttaaaacaaaaaggaatcttttaagcttaacaattccttatgttagtcatataattatcccttttctcagaagcctggggccaaatggatctgttcctaggagaaaggaac

SEQ ID NO: 368242 - DNA, 201 bp, Homo sapiens
ttttgaccaagttgatgaatattaaagtttgaggaaactaaagaaatcacgttggtcattttcctgcttcttcagatgaaaaaatgggggcaaaaaggatragttatttccctaaagtgagccaaactgtgttggtaaggactagaatgacttatatcagtggtcgttgtcaatggattttccatggggaagtaaatgtac

SEQ ID NO: 368243 - DNA, 201 bp, Homo sapiens
ggtcacgtttatattccacaaagtgtcaaagatgcagaaatcagttctatacctgatacatttcctttatttatttatttatttatttatttatttatttatttatttattttgatggagtcttgctctgtcgcccaggctgaagtgcagtggcgtgatcacggctcactgcaacatctgcttcccaggttcaagcaattc

SEQ ID NO: 368244 - DNA, 201 bp, Homo sapiens
actaagaaattcattgtcaaatgttgcacagggggtcacgtttatattccacaaagtgtcaaagatgcagaaatcagttctatacctgatacatttcctttatttatttatttatttatttatttatttatttatttatttattttgatggagtcttgctctgtcgcccaggctgaagtgcagtggcgtgatcacggctca

SEQ ID NO: 368245 - DNA, 201 bp, Homo sapiens
gaacctaagtatgtgcagaactatagcaataaaattatgtacaaaccagttgatcctgtgttccagtaactatctacctcacctccccccccgctcccccmaaaaaaaaccaaaaaaattaaaaactagtcactgtaggctctttttattttaaacccccttaatcaaatgatgctagattatatttgcttaagatctgcc

SEQ ID NO: 368246 - DNA, 201 bp, Homo sapiens
atatggtgaaaccctgtctctactaatagtacaaaaattagctgagcatggtggcatgcacttgtagtcccagctacttgggaggctgaggcaggagaatmgcttgaacccgggaggcagaggttgcagtgagtagagcctgcgccactgcgcgatcactctgtcactcaggctgcataggttctctgtccagcctgggcg

SEQ ID NO: 368247 - DNA, 201 bp, Homo sapiens
gaatccttgtagttaaagctcagaaagttttgatagccagtggcacaaagggggccagatgtccacgggggtgattgtttaaagggatggtagggaaaatrtaaagtgaatgtgtagaatgaaggggtgcttatgaccagggtgaacttctaatttattgtgtaaatcaggatgctttgaagataaaagttgtaacagaca

SEQ ID NO: 368248 - DNA, 201 bp, Homo sapiens
agtacctttggtatctacatatgttcttgcttataggtggacatgagatcttgttttactttttgccttcagaaatgatgaaagtttcttccagctagctraacgcagtgtacacttcatctctgaacctcttgggaaaggaaagacagtgttagaatgtacttttattatatatttattattattatagttgtaattggt

SEQ ID NO: 368249 - DNA, 201 bp, Homo sapiens
aactaagaaattcattgtcaaatgttgcacagggggtcacgtttatattccacaaagtgtcaaagatgcagaaatcagttctatacctgatacatttcctttatttatttatttatttatttatttatttatttatttatttattttgatggagtcttgctctgtcgcccaggctgaagtgcagtggcgtgatcacggctc

SEQ ID NO: 368250 - DNA, 201 bp, Homo sapiens
ttgctaattaaaaataccactctatgttgagtaaacttttactaacctgagagactaatgatttataacattgtgtagaaggaaatcaaagaacattatarccaaaagcaacaatatgagccatgctagacaatgctctcttgttacagagagtattgataccaaggcttagatgttttgctatttcaagtcacgaaatta

SEQ ID NO: 368251 - DNA, 201 bp, Homo sapiens
tcaactaagaaattcattgtcaaatgttgcacagggggtcacgtttatattccacaaagtgtcaaagatgcagaaatcagttctatacctgatacatttcctttatttatttatttatttatttatttatttatttatttatttattttgatggagtcttgctctgtcgcccaggctgaagtgcagtggcgtgatcacggc

SEQ ID NO: 368252 - DNA, 201 bp, Homo sapiens
tgtatcctaacacctactgctgtgcttccataacccagcccagggcttacgcaagtgtgaagagtagaaagagaagagagggaagcagaataaaaataagratgaacacaccttgtccagatggttatttaagcctggaagaaagggtgggaataagaaaggatgagagaatattctcttgtcctcattaaagcctacatc

SEQ ID NO: 368253 - DNA, 201 bp, Homo sapiens
attgagtaaagactcaaaataatttgagacatgaacatattttctcatctatgttagttctcctttatttatttatttttgagacggagtcttgctctgtygcctaggctggagtgcagtggcgcaatcttgcaatctcagctcactataacctccgcctcctgggttcaagtgattctcccacctcagcctcccaagtag

SEQ ID NO: 368254 - DNA, 201 bp, Homo sapiens
tcatttcataggaggaatttggaagtctttctcttaccaaattataatatgaatgatttttgcttagaattgttcaactctactttgacataatttttgayaataaaaattctattcactggaatttctgttaaaatactcatgtaaagtggctagaaacagaatagttggactttctcatgatttaattcaaataggaca

SEQ ID NO: 368255 - DNA, 201 bp, Homo sapiens
tttctatcacaaaatttaacactttacacaatgtacacttggaattagttcttcctaccacttggtaactaatgaaaagtatatgtgaaacttagaatctrtggaagcaagtcatttcataggaggaatttggaagtctttctcttaccaaattataatatgaatgatttttgcttagaattgttcaactctactttgaca

SEQ ID NO: 368256 - DNA, 201 bp, Homo sapiens
agactttttttaggctttattcatttaatggttacatttcttagattattagcttattcatttattcaacaaatatttgttgagccctttttaaagtgtcmgtcatttttctagtcactggtgatacaaaagtgagcatatttaataaaaatatcttcatgctcatgaagcttccattctagtgacagaaaaaagataaat

SEQ ID NO: 368257 - DNA, 201 bp, Homo sapiens
tggacagggtgtactgacagcttttagaggtaactcataaaaagaaaaatctttttcaaatatccaaaagcattatagatgtattattttacttacaaacrcttctgctagttattctcaattactcttacctatttcttatcaagtttcataaggatttatgttaatacatctcaacctagatcaaagtactatatgatt

SEQ ID NO: 368258 - DNA, 201 bp, Homo sapiens
taggtgactctaaccattcttcaataagaaaagaaagcttttgaaatgaagagtcatttgttatcactttaaaattacctgagtgttatgcatccaaatamatgcattattaaaagaatgaagttagaataccttgtacatttttctaaaataaataattcatttctccctttaaaatgtattccctaaagcacttttgct

SEQ ID NO: 368259 - DNA, 201 bp, Homo sapiens
ttgcaaggactgtttctctgcctctttcttcattgtgtcatactgtgcttgccccatggtaggttatcttaaatatttgcagattgactggttgattggtygataaggagaaagagttgtacaaggacttaatggcatgatagagaaatctgtttctagtaaaatttactcaagttatgttattgcattttatattatttt

SEQ ID NO: 368260 - DNA, 201 bp, Homo sapiens
ctgcatccatggattcaaacaacctcagattgaaaataattcaagaaaaagttgcatctatactgaacacatacagactttttttccttgtcatttttccrtaaataatacagtttaacaactatctacatagcattgacattgtgttcagtattgttaagtagtctggagattaaagtatactcagaggtcctagattca

SEQ ID NO: 368261 - DNA, 201 bp, Homo sapiens
aattcagttataccgtgaactgaattgatgaatttactgagttagaacttttttcgtttttttgacagctgttgaaaggatctttatagagactccttcasgtagcaaaacttttttatgtatcagtagtctgcagcctctgacttagaccatttgtgttacaaatatgcactacgtattgcacagaagcctgggttattg

SEQ ID NO: 368262 - DNA, 201 bp, Homo sapiens
tccagccttctcttggtcctttccccttaatctccagactctagatttactagatacctaacatttaatggaatttgttaagctcccctttgacccagatraaccttactcaccctttgggtctcaaattaaatgtcactcctatgggaaatctttatcgacagaagtataccatctaatgctttcgcgttttttttcctt

SEQ ID NO: 368263 - DNA, 201 bp, Homo sapiens
ttcactggtacatgttattcctgcacagttaccaacattaccaagactaaccctgtgcttacttcacttctagtaagttccctttactcaccatctcaatyacttacatgaaaggatttgttttgtcagttactttattttaaaataattagttctaatcaatgtgctgtgctcaccaccaattgctttttaaactctgtt

SEQ ID NO: 368264 - DNA, 201 bp, Homo sapiens
tacttgtaaaggatgtgccaggtttcaaggacttcccagtagccatagtatgaatacaagaaacacagttgtgcatttggaacttcaattcagttataccrtgaactgaattgatgaatttactgagttagaacttttttcgtttttttgacagctgttgaaaggatctttatagagactccttcacgtagcaaaactttt

SEQ ID NO: 368265 - DNA, 201 bp, Homo sapiens
atatgtgtactgttgaaatgaatgttattaagaaagatgaaataaacatagtaatttattttttgctgatagttgaacttagcaagttctattgttaagggatgtttatttggtataatgtcatgctttctttaggttccatgttgagaaaagcctgaattcttttctttaaaataatgcctgcctcattcagacccacac

SEQ ID NO: 368266 - DNA, 201 bp, Homo sapiens
ttttctttctaagcagacccctgaattccccctttaccactctttaagttttaagtcagtcctgcagagaaattttgtcctaccaggtgcagggaggaagrtggtcaggaatgcctaacctgctcttaccagctagaaaagatgagctttatctctcacttttgtcaacttccttcagtggtccattcctgtcaagttaaa

SEQ ID NO: 368267 - DNA, 201 bp, Homo sapiens
tatgtttatatttagtaaacagaaaaaataatatttcttggtatatagtagtgtactctggataatgatagtcattgttataggaattgtgttttttttttgtgcttaattcaacagtcattcctggtaagatatatcaaagatttgctgatgtattcagtacttacttcatatttgcccttctgatgtaaatcagaaaca

SEQ ID NO: 368268 - DNA, 201 bp, Homo sapiens
agaaattttgtcctaccaggtgcagggaggaagatggtcaggaatgcctaacctgctcttaccagctagaaaagatgagctttatctctcacttttgtcarcttccttcagtggtccattcctgtcaagttaaacatcattaagttatttatctttctgaacagtttcttctgctttaatttatttctgcttagctatatt

SEQ ID NO: 368269 - DNA, 201 bp, Homo sapiens
ctgcttttagattccagattatacttatttgaggaaagttaaaaattgacaaaactattcgcataacagaggaacctccactttatttttactaaaataarttttaaaacacttttgttttccctttatattctaagttatgtaaatttcatttctttgaaatatattattttatttgagctttgttatgttacctttgta

SEQ ID NO: 368270 - DNA, 201 bp, Homo sapiens
caatgaatattagctgctgcctttgttattcgtattcatattattgtagatattttctgatgaatttgatactcgttcaccatttacttcaacacatttcragttaaaagatatttcctgctttgagaataaaattatttcaagttaaaataaaaattaatctaatatacccttaagtagtaatgaggcatgtagttagtg

SEQ ID NO: 368271 - DNA, 201 bp, Homo sapiens
ggatggtagggaaaatgtaaagtgaatgtgtagaatgaaggggtgcttatgaccagggtgaacttctaatttattgtgtaaatcaggatgctttgaagatraaagttgtaacagacataaactgggactgcccacgcaaaccctacctatatataacattgccgacacacctcagaattatgggtaggcctggttggcctt

SEQ ID NO: 368272 - DNA, 201 bp, Homo sapiens
aaaaacctagacctgccgtgtggcacctagttttaactactctcatgatttctcatctgacatttaattataatatgataccgaggcccaaagtcctaaaygtggaaactgaaaggagagcccccttaactcatcttcatttgaacctcaacaacaaaaaattaaaaaggaaaaacagttgctcccttcttaagtactgcc

SEQ ID NO: 368273 - DNA, 201 bp, Homo sapiens
tttataaaattgatgtgtttttgtcacgataaaggggttgagccaaatcagattttatggctcttaattgcttccttggtaaatattaaaaaacaaaggcrgggggagcaatatcctctgtaaggcatgagctgaatatgtgaccgtttcttgaaaaatcaatggaaagttcctaatctactgtaaagtctttcattttca

SEQ ID NO: 368274 - DNA, 201 bp, Homo sapiens
agaagggagcaatggacaccagggcctacttgaaggtggtggggaggagggtgaggattgaaaaactacctattgggtactgtgcttattacctggatgaygacataatctgtacaccaaccccctgcaacatgaatttatctgtataacaaacctacacatgtacccctaaaacaaaaataaaagttttttaaaaaaaga

SEQ ID NO: 368275 - DNA, 201 bp, Homo sapiens
ttatgggcaccagtgataggcaatcacagtagaggccacagttgaggtcactgaggccccaaaaacctagacctgccgtgtggcacctagttttaactackctcatgatttctcatctgacatttaattataatatgataccgaggcccaaagtcctaaacgtggaaactgaaaggagagcccccttaactcatcttcatt

SEQ ID NO: 368276 - DNA, 201 bp, Homo sapiens
atatgtgaccgtttcttgaaaaatcaatggaaagttcctaatctactgtaaagtctttcattttcacccagttagaattctgcttatagtcagcttctgcractcaaccaaggagtcattaaacagacggaacacaacatcttagagaacaaaagtgcatggaatccaattagagtttggaagtgaaagtgacttataatt

SEQ ID NO: 368277 - DNA, 201 bp, Homo sapiens
aagactaggggcattatgaggatttctgaatcagttttacttaataaaaatacagctgttcatttagatcattattaaccattaataaagctgtctttctkttgacaccagaaagaaggccagtctagttcactcaagtgacaaaacttctggtaaaaaatctgtcacagtctaaacctgtttcttttgggtggaagtgtt

SEQ ID NO: 368278 - DNA, 201 bp, Homo sapiens
atggaaaaatagtggtatcagatggaaaaaaatgcattccttattcaataaattaaatcttttaaagtattcaatcaatggaggaaaaactgcaaaaaaaagaatctcagtggtgagaacactcatctttaggacaaaaacataaacataggttgcattaatttactttttattgattgcaatagtacactgtggtcataa

SEQ ID NO: 368279 - DNA, 201 bp, Homo sapiens
agaatgacttatatcagtggtcgttgtcaatggattttccatggggaagtaaatgtacgtacttgagaattttgttagcgacttcatcattgcagtcactrtaaaggtttgtacttagcacacttctaaattgtatggcacatgcagttcaagatagaagtgtggaatgtagcaggcgtgcaccaaccatacttttatatt

SEQ ID NO: 368280 - DNA, 201 bp, Homo sapiens
attaaatactgtcataaatgttatacatacttacttgtaattatatattgtaattgtatattgtaattatatattgtaattatatattggcaccacaaccrtgactataatttatataatgctatgatgctattataaacccttaataattaggcatctttattataatattatttggtgctaaaatggaaaaatagtggt

SEQ ID NO: 368281 - DNA, 201 bp, Homo sapiens
ccatctgcttttctacaaaatcgttaaggaatatcaagcagctttatggctgtttttctattggtcttccagttgttcatgtacatttttttggtgagacrtctgcagataaatagccagaatgtatataaaaattctcttgctatacaaaacgttatgaaaattataaagtatgaattaataaatgacaaaaacaggaaa

SEQ ID NO: 368282 - DNA, 201 bp, Homo sapiens
agtacataccatgtgccaagcttttttcttccttacattgcttgcttcattgtttaaaaaaaaaaaaaaaaaaaaaaatctgtaagttctgagtctccttrtagatgaggcagcagaggccttttacaaatacctctcttgttccagttacacaagtcataatttactgagcacgatggtaaaatcctttaaaaatgtagt

SEQ ID NO: 368283 - DNA, 201 bp, Homo sapiens
ttatgaaggagggaaggctggaagagagtgttgcattgagaataataacagagggtgcatcaattcttcgacaggaaaaaaatttgctggatattgatgcrccagtcactggtaagtcctgaggagggaggttgcccacttgtatacacattttgttgtttatagcatgaaatcaaaagtcctagttaccagtgagtcttc

SEQ ID NO: 368284 - DNA, 201 bp, Homo sapiens
tcaagctttctaggacacggaatacagaattaaaatgttgaatcaatcataacgtgtcgttgataaatacgtactttctttttaaaataggggaatgtgtmgcacactatttttctacaatattttttgttattaagttgtataagaatatcctatagaaacattccattgtatcacacgttagagaacagtgtctctctt

SEQ ID NO: 368285 - DNA, 201 bp, Homo sapiens
cctgacctcaagtgatctgcccactttggcctcccaaagtgttggaatcacaagcataagccactgtgcctggccaagaggtggtatcttaatgtttagtrttgccttacaatatagagaggcagcatggcttaggggccagaacacctaacaaatagctacagacttcaggtaacttattcagttttcatgatttttaaa

SEQ ID NO: 368286 - DNA, 201 bp, Homo sapiens
aaactatggttataaattcttgcacaatacaaatctcatcttggactcaatttattgaacatttttagtaattttgtcagtctggagttcacttttgttastagtataaattgcattttccagagatagcgtatgttaatattaatctgcctggacacatttccctacacttctttgtcagattaggtgtcatctccttta

SEQ ID NO: 368287 - DNA, 201 bp, Homo sapiens
aactgagcttctatcttatttaagtcattgttattttgggtttgtcatatacagctgaattaaattctagcagataccattctcagtgaataggacctttmttgtatactttattggctttattcttttgggcatatttctgcgtcttgaatgagagattctgattcccacatgtcaatgtcagtgaataatgagaaacag

SEQ ID NO: 368288 - DNA, 201 bp, Homo sapiens
agcaaaggcgtgacttctactgatgttgcatttctgtagtactgccatatttggacacttatcttacaaatacttatatgttgtcttcttcatgatgttcmcattgaggtgggtaattatgccagcagtatactttgtgtttcacagctatgaaacaaagtggatattactacaggatgcctgtgtttccaacaaatattt

SEQ ID NO: 368289 - DNA, 201 bp, Homo sapiens
tagcttgattattggtatttatgaaattaaacattaaatgaattacatatactagatttgtgggaaggaaagctttctttaaaggcagaataaactcccaragattttactaattggacaacatgtattttttccctatagaaatgaaaaaaatatgtaatccatgactttcatgctgtaatacgtacatagaaaaaaaga

SEQ ID NO: 368290 - DNA, 201 bp, Homo sapiens
attgaacatccctgtatgccttgtgatagagtaatagattgagacacatatttacaacaattgataaaggttttattggttgtgaaggtgctatgcatacrtatgaatgacctgtcacggatctcacagatacttcctttttatgcagtagctatagccactttaaaagatacagatgttatatagtaaaaatactacaaa

SEQ ID NO: 368291 - DNA, 201 bp, Homo sapiens
agctggaccctgtctcaaaaaaaaacaaaaaacagaaaacaaaccaacaaacaaaaaacaaaaaaaaaaccacacatacacacagaaaacaaaaagcgaaraaaaccacaccaccccaaaacaaacaaaaaagatgtaaaagtgaccttgcacataacaagcttccagccaagaaaattgaaaagcaattaaatagaggaa

SEQ ID NO: 368292 - DNA, 201 bp, Homo sapiens
tgatttccacagcactccagtctgggcaacagagctggaccctgtctcaaaaaaaaacaaaaaacagaaaacaaaccaacaaacaaaaaacaaaaaaaaaaccacacatacacacagaaaacaaaaagcgaagaaaaccacaccaccccaaaacaaacaaaaaagatgtaaaagtgaccttgcacataacaagcttccagc

SEQ ID NO: 368293 - DNA, 201 bp, Homo sapiens
tttcaatatttgttgtctacttagaaaaatgattttgcatttatttaaattatttgtcatattagattttatgtgccatagaacttaactttattccatcwtgggtagcttgaatcattgaagagagaatcccctttaaaaggcctgttcatagcaaagacatgaagtcaacctagatccccatcactggtagactgaata

SEQ ID NO: 368294 - DNA, 201 bp, Homo sapiens
gaacacaacatcttagagaacaaaagtgcatggaatccaattagagtttggaagtgaaagtgacttataattaaacagaaaataaccaaataatgacagtwattgggcatttgagtgtagtctgtccatttttaagacttcctatccaaagaatttggttatgttttatgacaagagaggtggagaaaaatttaggctctt

SEQ ID NO: 368295 - DNA, 201 bp, Homo sapiens
gaaggctaaggagaaacctggagatggtatagaaacctcctgaaagggtggctgggaaagagaactgaccagagacatggcaaaaagtagagtgagatcarcacagggattaaggtatatagccaaagaggccttgcacagtccagttccagaaaatgccactcctcacttgagtattgttgcctccctgatcattaaata

SEQ ID NO: 368296 - DNA, 201 bp, Homo sapiens
tcaaaaccacaaggcatttttcttttaatgtagtttggtgtgtgtgtgtgtgtgtgtgtaaaataatgaataaaagttgtattacacttgtcgtgttcaakttgtcacttaggttgtattgaattctttttcgattggtccctaaaaaatgttttgtgttcttgtaccacctgcagcacctattgaagagatataatttac

SEQ ID NO: 368297 - DNA, 201 bp, Homo sapiens
tttcaaagaaaaaaagaataatataagatttctaaatatcaatgaggattttattcacggacttttctctaagtgaatgatagtgggactcaaattgctgkgatatttatacgccattggtaacagagtaatatagccatttcattttaatctcataatgtttacaacattatttacaactatttaaacatggaatgggaa

SEQ ID NO: 368298 - DNA, 201 bp, Homo sapiens
gcagtacgtgactgtatttctttgtagaaggaagaaaaagaaacccttgaaatctgagtcattattttgaacttcaacaaggattcagattttgtcttgayattagcagatctaatatcccaagtccattttctctacattcctaaaacctagccccttattaccaatttggataccttcactcacatacatattctaaag

SEQ ID NO: 368299 - DNA, 201 bp, Homo sapiens
aaaagaataatataagatttctaaatatcaatgaggattttattcacggacttttctctaagtgaatgatagtgggactcaaattgctgtgatatttataygccattggtaacagagtaatatagccatttcattttaatctcataatgtttacaacattatttacaactatttaaacatggaatgggaatagtattcttt

SEQ ID NO: 368300 - DNA, 201 bp, Homo sapiens
tttgtgtatataacatatctaaacatagaaaagacacagtaaaaatatgatgttataatcttatgggcctaccatcatgtaggcagcatgtccttggccamaaccttgttatgcagtacgtgactgtatttctttgtagaaggaagaaaaagaaacccttgaaatctgagtcattattttgaacttcaacaaggattcaga

SEQ ID NO: 368301 - DNA, 201 bp, Homo sapiens
atattacatctacaattggataatttaataatcaaattttttgccaaatttttgccccaactctttctcatagagtatcgacactggctcttttgatttcwcctcttgctatttctatcctcttcctggtacagtcactaaagagtaactgaatgacttaatgccaaaagaggtagccatgagaaggatgaaaagcattat

SEQ ID NO: 368302 - DNA, 201 bp, Homo sapiens
tacagggtctatttatataaacctagagaatgtgatgtagcctattgcttctcggctacaaacctgtaccacgttactgtactgaatattgtaggtaattrtaacacaaaggtaagtatttgtgtatataacatatctaaacatagaaaagacacagtaaaaatatgatgttataatcttatgggcctaccatcatgtagg

SEQ ID NO: 368303 - DNA, 201 bp, Homo sapiens
atgaagtaactcagttttagacagattgactgtcaaatgagtaatgattattccacaagacagatatcaatggccataatatgctatattaatgaaatacrtttactgagcatctactttatgcctagccaccttttagtttttacggttatagagaaacataaacaatctttcttcatggaattcatagtctaatgaggg

SEQ ID NO: 368304 - DNA, 201 bp, Homo sapiens
gatatagctgatacagggtctatttatataaacctagagaatgtgatgtagcctattgcttctcggctacaaacctgtaccacgttactgtactgaatattgtaggtaattgtaacacaaaggtaagtatttgtgtatataacatatctaaacatagaaaagacacagtaaaaatatgatgttataatcttatgggcctac

SEQ ID NO: 368305 - DNA, 201 bp, Homo sapiens
atattcattttggttgaaaatttatatattatcctctataacatcagtgagggaagctacacatgaagtaactcagttttagacagattgactgtcaaatragtaatgattattccacaagacagatatcaatggccataatatgctatattaatgaaatacatttactgagcatctactttatgcctagccaccttttag

SEQ ID NO: 368306 - DNA, 201 bp, Homo sapiens
cctcagcctccccagtatctgggattacaggcacatgccaccatgcccggctaatttttgtatttttagtagagatgggatttcgccatgttggccaggcyggtttcgaactcctgacctcaggtgatccgccagcctcggcctcacagagttctgggattacaggtgtgagtcaccgcgcccggcctatttcactttttt

SEQ ID NO: 368307 - DNA, 201 bp, Homo sapiens
aatattatcgtactatttaaagtttgtttccctttttactttctgtctttgcaccctgtgtccttcattgcatttgctataatttgtgattattttatttkttcatttggttatttgttacgtaggttctttacaaagctacaaattctatgagtacagggctggtgtctgtcttattccttttctttttttttttcagag

SEQ ID NO: 368308 - DNA, 201 bp, Homo sapiens
gttctgctctctgggcagaggggataggccagcatcagctgggcaaactgctaatctctctggtttgcctgtttcctgcagtgggggatttgtccctgggkcagcagaggattccctcagtgccggggcctgccatttagcatgtcaggcagttgccaggagaaccctctggctttgttcctggatgtgagagtggactgg

SEQ ID NO: 368309 - DNA, 201 bp, Homo sapiens
tgttgaatctaggaaaaaaatcctgttattcaggagcctttttgagagttaactttcatgcttctttttaaatccatatcccatgcctctttgaaattgtyactcgggggttgggcgcggtggctcacacttgtaattccagcactttgggaggccgggtgggtggatctcctgcggtcaggagttttagaccagcctggc

SEQ ID NO: 368310 - DNA, 201 bp, Homo sapiens
tgttgaatctatacattagagtagtaagtatattatacatatatacacatattttcatgtgttaaatatctgtaagattgcaatgctctaaaaagtggaaygcaacttagagatggtgatgatttctgaagtgatactttaagaagtgatattgtttttaagtagaaatactaagtggcacacaggatattcattgggaaa

SEQ ID NO: 368311 - DNA, 201 bp, Homo sapiens
cccagcaaaggacataaattcatccttttttatggctgcacagtatatatgtgccacattttctttatccagtctaacattgatggacatttggattgtcyccaagtctttgctattgtgaatagtgctgaaataaacatacgtgtgcatgtgtctttatagtagaatgatttattattctttgggtatatacccagtaat

SEQ ID NO: 368312 - DNA, 201 bp, Homo sapiens
ttgcagggaataacagacttcaaagtgaataactttgtgggtacagatcaaaaggcagtaacttctgataaagattttgaaggacaaatagcagcttaccragaccaaaaggggctagggaaagagcattctaggcattcaaatgtgtcctaaggagcagagggatgttttagcttgatatatttgcaatactattttcca

SEQ ID NO: 368313 - DNA, 201 bp, Homo sapiens
aggaacgtatggcatgatgcatatgtccttttctttgaatctgggaggtggaagaaagcttagtttgaacaagcttatctagtacctgacattgaacatcsctgtatgccttgtgatagagtaatagattgagacacatatttacaacaattgataaaggttttattggttgtgaaggtgctatgcatacgtatgaatgac

SEQ ID NO: 368314 - DNA, 201 bp, Homo sapiens
aactagacacttgtgacagctagaaaaaataatgcagttaactttaattttatagtttctaatttgataaatattagctattttacagtataggctgttgytagccacagaggaaaatatagtatatggatatgtggtttgaatctacaaatctgtgtgtgggtatgggtgtgtgtgtgtgtgtttatatagagtgagaat

SEQ ID NO: 368315 - DNA, 201 bp, Homo sapiens
tgtgggaggtaaaggggtaaatgggaactctgtacttaccattcagtttttttttctctaaatctaaaactgttccaaacaacatattttattttaatatrgtaaacatgcaaaggcaaaccctatttcctgtacatagtggatgtctgataaatacatggtacatgaatgcatgatgggatgagtgaagaaatgaactgc

SEQ ID NO: 368316 - DNA, 201 bp, Homo sapiens
gactttttaagcatatttgtgcatctttataatcaattttactgttgtcttatgctttgaaaatgtatttttctttaaaaagaaggtttgtctggatctgrtggccatatcacactcatttattctacaagcgtttgttgttgccgagaaacagaatgtaagatttgtgtgcagtaggtttattggagagcactcccagga

SEQ ID NO: 368317 - DNA, 201 bp, Homo sapiens
acattatatttttaaagatacatacagcaaaccgagggcaataaatagaagaataactgtcttcctccccttgacccccgtcctgatttttctcttagtgrtactctacaggccttgtctcaaactttggcttttcttcatttctctctgttcctgcctagaatgctttgtctggccctagcattccctattggtcatgga

SEQ ID NO: 368318 - DNA, 201 bp, Homo sapiens
gaaaaagcagaggaatatatcagttcaggtttcttgttgctgttgttccctctactgcaaactgtgaactggagtccaggaaactgccatgcacaaatgcrggaaatgcctgccaaagctgtaactactccatagcccctaaactggtgactagaattggaatatggaattgccagttattaaaaagtttttaccaaaacc

SEQ ID NO: 368319 - DNA, 201 bp, Homo sapiens
gagagaatattctcttgtcctcattaaagcctacatcaagcaattacagagaccacactgtctatgctacatgcttttgtgatctctttaaaaataccacwactttgacttgtgggccaatgcatatcctgaattgatagattcagatcattagtttttcttgagagaagggacctcagggcgaacaacaacaaaagcccc

SEQ ID NO: 368320 - DNA, 201 bp, Homo sapiens
gaaagggtgggaataagaaaggatgagagaatattctcttgtcctcattaaagcctacatcaagcaattacagagaccacactgtctatgctacatgcttytgtgatctctttaaaaataccacaactttgacttgtgggccaatgcatatcctgaattgatagattcagatcattagtttttcttgagagaagggacctc

SEQ ID NO: 368321 - DNA, 201 bp, Homo sapiens
atgggtttgttttggtaaaatttaaacttgagtatttattaacgctgaattagattaaattatataacatactgcttatgctgctcatgaaaggaacaacrtttttaccaatattttcttccaattgtgttccagtggacgtttataggtggagagaatgaaggcctggatgtgaaattacagatactagaactctgtcat

SEQ ID NO: 368322 - DNA, 201 bp, Homo sapiens
accactgaagtaagtgatctcaatggttatttcataatcattctatgtaaatctacccaattaacagattttgcaacggcttttaattgtatagagccagraccctaaaaaaaaaaaaaaaacttaaatcccattatttttagaaatagcaagttatacagaactgataggaccttataggggacaagagggagaggagaa

SEQ ID NO: 368323 - DNA, 201 bp, Homo sapiens
gttaaaaggttaggggactgtatgaagcacattaaaggttaatgttcagtttaagtttgtgtctgtctgaatctgtcttaaagattgtacaggtaaaaaaatagacatagcaaatgttttactgtttgtacaaagaataattagtctatatttaaaaatggcattatttcatttttcaatgtttgggaaaaagactgcctt

SEQ ID NO: 368324 - DNA, 201 bp, Homo sapiens
aattccttttattttcatgtaaattacctattgtttcataaaaggctgctttgtgcttgtatatggccaattctcttgaaaggttagtacattttattgaygtacacatgtaagtattataatatttgaacaactacttagacatcaaagcagtttcagatgttcaagggtttttcttttattcttgggtaaagcaacaag

SEQ ID NO: 368325 - DNA, 201 bp, Homo sapiens
cataatctggctgctgagagaaggaaagttcgattacaacatgaagatacctttaacaatttaatgaaggaaagtagcaaatttgatggtcagtaaatccrcttataagaattttaattctataactgtgacaggcaaaggagtcttttcttagagcacacttattttcaccttattattaccattcagtcctggtgacac

SEQ ID NO: 368326 - DNA, 201 bp, Homo sapiens
actagaaggtcttatgggatttattaaaccaggattcagtataggtgataggtctcttaagtgtcttttaacataaaatgttcccttccttcttttatctygcaatttattttttaaagaaacctggtcatttgttttatagaatttacatccactgtagccttgattaatgtgttctcctgtcctttgtatttcttgtaa

SEQ ID NO: 368327 - DNA, 201 bp, Homo sapiens
tcttactagaaggtcttatgggatttattaaaccaggattcagtataggtgataggtctcttaagtgtcttttaacataaaatgttcccttccttcttttrtcttgcaatttattttttaaagaaacctggtcatttgttttatagaatttacatccactgtagccttgattaatgtgttctcctgtcctttgtatttctt

SEQ ID NO: 368328 - DNA, 201 bp, Homo sapiens
cgtggtggctcacacctgtaatcccagcactttgggaggcctaggggggtggatcacctgaggtcagcagttcaaaaccagcctggccaacatgaaacccygtctattttgtactaattttgtactaaaagtacaaaaattagccagttgtgatgacgggcgcttgtaatcccagttactcaggaggctaaggcaggagaa

SEQ ID NO: 368329 - DNA, 201 bp, Homo sapiens
aataacatggtgactatttgtgtatctaaacatagttaaacattaaaaagatacagtaaaatacagtataaaagatgaaaaaatggtacacctggccaggygtggtggctcacacctgtaatcccagcactttgggaggcctaggggggtggatcacctgaggtcagcagttcaaaaccagcctggccaacatgaaacccc

SEQ ID NO: 368330 - DNA, 201 bp, Homo sapiens
tcaactcacagacactcttgctttatcaatacctctccacactcccccatatgcctggattgttttgaggaaaaccccaagcatcatctgtaaatgtttcmgtctatacagtcatgcatcacttaatgacgggatatgttctgagaaatgcatcactaacgacttcatccttgtaggaacatcatagagtgtacttacaca

SEQ ID NO: 368331 - DNA, 201 bp, Homo sapiens
ttagtccattttgtcattatgtatctgtattagtccattttcatgctgctgataaagacatatctgagactgggtaatttataaagaaaaagagatttaayggactcacagttccatgtgggtggggaagcctcacaatcatggtggaaggtggaaggcacttcttatatggcggtggcaggagagaaaatgagaaccaag

SEQ ID NO: 368332 - DNA, 201 bp, Homo sapiens
ctaagaacagaaaaaaatgaattttaaaaataaagtgtggccaggtacaatggctcatgcctataatcctagcactttgggaggctcaggtaggaggatgrtttgagcccaggaacttgagaccagcctgggcaacatagagagatcctgtctctaccaaaaaaagaaaatgttaaaattagccaggcatggtagcatgta

SEQ ID NO: 368333 - DNA, 201 bp, Homo sapiens
ccagaaggcagtgcaacaatatcttgaagaataataattacaaaaactttgaaccaagagcttcaaggccctgtgcatagcctgtcctcagccttcactcyagcctcatctcacccactctccctcctactctctgcattgcagtcaccaggacctttgtagtcactgttccctctgctcagcaggccttcccctcctctg

SEQ ID NO: 368334 - DNA, 201 bp, Homo sapiens
ccaaatatggtgaaagacatacaattacagattcaaggtcatagaacatcaagaaaaactaatacaggctgggcctggtggctcacacctgtaatcccagyactttgggaggctgaggcaggcaaatcacctgaggtcagaagttcaagaccagcctggccaacatggtgaaatcccatctttactaaaaatacaaaaatt

SEQ ID NO: 368335 - DNA, 201 bp, Homo sapiens
cttctcacttcacatactctatgcatggagcaagtcctatcagtgttaccccctaaaggagtctctgaaatccaagcactttgctgcacccccattgcgamcatctactccaagctatcatcatgtttcatgcagacttcagcagtgatttccaaactcatctccattcattctggtctcctctccacactgcttctaaag

SEQ ID NO: 368336 - DNA, 201 bp, Homo sapiens
gcattgaatctataaattactttgggcagtatggccattttcatgatactgattcttcctatccatgagcagggaatattttcccatttgtttgtgtcctrtcttatttccttgagcagtggtttgttgttctccttgaagaggtccttcacatcccttgtaagttggattcctaggtattttattctctttgaagcaatg

SEQ ID NO: 368337 - DNA, 201 bp, Homo sapiens
gctgtaaatacatgatgcaattctgtccgtgttagcttggttatgaaactctgagactatgctgcctagagacatttaaaaaaaggaaaaaaaactctgakagtaaaggctaaaaaagttatggtacatctctctggtggttttataaggcagacaccaatatcttgttttcaaaagcatatttagtaatcatgaaattta

SEQ ID NO: 368338 - DNA, 201 bp, Homo sapiens
gccctcactaggacctacaatgggcaagcacctcgatttggaacttccctgcctccacaattgtgagaaatcaatgattcgtttaagccttttttttttttaacaggatttgagattggttatattaacaatggaaacatgaatacaaaattaatccacacataggaaaaaagaataatacataaaccactgaggttgcta

SEQ ID NO: 368339 - DNA, 201 bp, Homo sapiens
ttaatctgtccttttgtttgaaggtgaatgtttaaatattttggttcaaaaataaaaatgagatgacagttttaatactttattctgaattatgaatattsatcttatgaaactgcaactcattgtcttgatagcttatgacaaagtaaatgcagaacagaaatagaagacaggcttcacacttaaaaataatcagtctag

SEQ ID NO: 368340 - DNA, 201 bp, Homo sapiens
agctttattctttttgcttaggattgtcttggctattcaggctcttttttggttccatataaaatttaaagtagtttatccaattctgtgaagaaagtcawtggtagcttcatggggatagcattgaatctataaattactttgggcagtatggccattttcatgatactgattcttcctatccatgagcagggaatattt

SEQ ID NO: 368341 - DNA, 201 bp, Homo sapiens
agccctcactaggacctacaatgggcaagcacctcgatttggaacttccctgcctccacaattgtgagaaatcaatgattcgtttaagccttttttttttttaacaggatttgagattggttatattaacaatggaaacatgaatacaaaattaatccacacataggaaaaaagaataatacataaaccactgaggttgct

SEQ ID NO: 368342 - DNA, 201 bp, Homo sapiens
gacctgaaaatggattttaatagttgcacaggtttgctgataacaaacaagaaaacccaggcccttatcctcctgttgcttagaggaggtggcagcggtgkgcaaggagggcctgatgggtcaagatcctctttgcccaccgccctgcatcacccttcacagtgttgaagttggagttcgcgtggaggcctttgactgtca

SEQ ID NO: 368343 - DNA, 201 bp, Homo sapiens
ctctaaacacaaatgaaactcgaccttttattcaagcataatagtaaaaatctttgacaccagagagaaatggaggtaacaaatgttcatgcatgcagatkacattttcattgtaaaaggaagaaagggaccattcagaaaaacacaagaatagtaaaatgaaaattagtatgaaaccaacaaaagatatgaaaccataat

SEQ ID NO: 368344 - DNA, 201 bp, Homo sapiens
attggtctatatatctgttttggtaccagtaccatgctgttttggtgactgtagccttgtagtatagtttgaagtcaggtagcatgatgcctccagctttrttctttttgcttaggattgtcttggctattcaggctcttttttggttccatataaaatttaaagtagtttatccaattctgtgaagaaagtcaatggtag

SEQ ID NO: 368345 - DNA, 201 bp, Homo sapiens
tacctttaagtctttaatccatcttgagttaatttttgtataaggtgtaaggaagggatccaatttcagttttctgcatatggctagccagttttcctaaygccatttattaaatagagaatcctttctccattgcttgtttttgtcaggtttgtcaaaggtcagatggttgtagatgtgtggtgttatttctgaagcctc

SEQ ID NO: 368346 - DNA, 201 bp, Homo sapiens
cttaccctgactcaggtcatgaacttcaaaaaatattcattgagaaaatataaaccatcaggcaggagtcttttcctattcccatccatgcgcctttcacytctttgctttttcttctgttataatggatgaaatatctctacccctagcagagaacactttctctcaccttctccaggactcccttccatcagttctctt

SEQ ID NO: 368347 - DNA, 201 bp, Homo sapiens
ctgcatcacccttcacagtgttgaagttggagttcgcgtggaggcctttgactgtcaggaatgggccgagggccgagggcgtcacatcaacagtgcttttstcatttacaatgctgctgatgataaggaaaatctcatcacgtttcccagaatccaacccatttcaaaggtcagttattatcacacgaggttcaatagccg

SEQ ID NO: 368348 - DNA, 201 bp, Homo sapiens
attaacctgaatttcgcatgcatgaaaattatcagcatgataaggtggaactgctttatggcatgcatttaagtaatctttaagtcttatctgaaatgaartgtgctaaaactactgaggtttttttgtttgtttttccctagagttggacaagttataaccatcaaagcaaaagttactagagcattcagcacaagcatg

SEQ ID NO: 368349 - DNA, 201 bp, Homo sapiens
gcaattctgtccgtgttagcttggttatgaaactctgagactatgctgcctagagacatttaaaaaaaggaaaaaaaactctgagagtaaaggctaaaaaagttatggtacatctctctggtggttttataaggcagacaccaatatcttgttttcaaaagcatatttagtaatcatgaaatttaaaagagctttcatata

SEQ ID NO: 368350 - DNA, 201 bp, Homo sapiens
atcctgccagtcactatgtcaccttctaaggccgtttcctgatgggaatgaaatgggaatgataatgcccacctcatggggttactgctcagtgaatgacrtgttgttagattatgatacaaagcgtttagcatggtgcttttttttttattattattgtactttaagttctggggtacatgtgcagaacgtgcaggtttg

SEQ ID NO: 368351 - DNA, 201 bp, Homo sapiens
ttcttgtgttagtttgctgagaatgacggtttccagcttcatcaatgtccctgcaaaggacatgaactcatccttttttatggctgcatagtattacatgrtgtatatgtgccacattttctttatccagtctatcattgatgggcatttgggttggttccaagtctttgctattgtgaacagtgccacaataaatatacg

SEQ ID NO: 368352 - DNA, 201 bp, Homo sapiens
ataacaaacaagaaaacccaggcccttatcctcctgttgcttagaggaggtggcagcggtgggcaaggagggcctgatgggtcaagatcctctttgcccamcgccctgcatcacccttcacagtgttgaagttggagttcgcgtggaggcctttgactgtcaggaatgggccgagggccgagggcgtcacatcaacagtgc

SEQ ID NO: 368353 - DNA, 201 bp, Homo sapiens
aagctgtaaatacatgatgcaattctgtccgtgttagcttggttatgaaactctgagactatgctgcctagagacatttaaaaaaaggaaaaaaaactctsagagtaaaggctaaaaaagttatggtacatctctctggtggttttataaggcagacaccaatatcttgttttcaaaagcatatttagtaatcatgaaatt

SEQ ID NO: 368354 - DNA, 201 bp, Homo sapiens
ctgccagatagcgaaaaatctcttaatttacccagatgtcctaattaattgtaatcttgtaatttgtgtccacactatgggaatcctaaggtcatcctttsggatcatctattccagaaggtcccccagaagattagggtcttagcctcccctacaccagcaagactcagatcctttcttgaaaaagctccaagtcaataa

SEQ ID NO: 368355 - DNA, 201 bp, Homo sapiens
aaaatcatgttttttccaggttttcaatataaattagatggtaaaaatttaagattgtagtatatgtgatgaaattggatagggcttatggttttaattcrtttcatgtttcatgtataatgatagaattaattgtagtagtaatacaaggagcaaaatgtatattttggaaacatcacacaggtatgtgaaacagctgaa

SEQ ID NO: 368356 - DNA, 201 bp, Homo sapiens
tacaaagcgacctttgtgggacccccattttgtgtaagaacaaatttaaaaatttttctcaatcaaccttgacataatgtaaaagatgatctccatactgmagtccatctccatcgtccaatgtgtgacccattgtttaaagagtatttttagaagtttgacccagcatagcactttgggaggctgaggcaggtggatagt

SEQ ID NO: 368357 - DNA, 201 bp, Homo sapiens
tataggaaacagaccagaggggagctattctcatggagccgggggaggggctgggcccagagctccgcccttccgacccccacccgcttggcccccgtggkcatctccagatacctccagggaaaatgaaggctcccctaggcttctgtaaaaaccacttttgccctctttaccacagtgtagtctccataacatatttgt

SEQ ID NO: 368358 - DNA, 201 bp, Homo sapiens
tttatttgtgaatcttttccagggtttactatctctggagtggcacccaactcatctagttgagcaagtcaaaagtctaggagtcatccttgatatttctstctccaccttacttctcacttcacatactctatgcatggagcaagtcctatcagtgttaccccctaaaggagtctctgaaatccaagcactttgctgcac

SEQ ID NO: 368359 - DNA, 201 bp, Homo sapiens
aagaccccactgctcggggacatggtatttcccaaaatattggcaggtagcgtgcagacctaccctcaacccacataatccagttatttatttcagtcaamtttaaagaaatgcttatttgaagacttgtctgtgcatttgttcgatgaatgaatgtgtgatcgctttcttctctctccctccctttgtctccccagccgc

SEQ ID NO: 368360 - DNA, 201 bp, Homo sapiens
gttttttatttgtgaatcttttccagggtttactatctctggagtggcacccaactcatctagttgagcaagtcaaaagtctaggagtcatccttgatatytctctctccaccttacttctcacttcacatactctatgcatggagcaagtcctatcagtgttaccccctaaaggagtctctgaaatccaagcactttgct

SEQ ID NO: 368361 - DNA, 201 bp, Homo sapiens
cccattatttttccagtcccttaagtctaaagtcttgaagctatctgagtaatcctctatctcacacgtccatgtattattttggaacatctcacacacayggttttttatttgtgaatcttttccagggtttactatctctggagtggcacccaactcatctagttgagcaagtcaaaagtctaggagtcatccttgata

SEQ ID NO: 368362 - DNA, 201 bp, Homo sapiens
tagtaagaaggtaaatttagaagatttttattctgcatccacttgattttattttctctaccattgtgaatactggattctcaggggctcttgagatctcyattcaggttaaattagcaggaaaggagttgctggatctcatattgtacctcccaggttgctcaggatcagtcccttcaatctctgggcatgaagacatgg

SEQ ID NO: 368363 - DNA, 201 bp, Homo sapiens
tgttgtctttttccattatcattaacctgaatttcgcatgcatgaaaattatcagcatgataaggtggaactgctttatggcatgcatttaagtaatcttyaagtcttatctgaaatgaaatgtgctaaaactactgaggtttttttgtttgtttttccctagagttggacaagttataaccatcaaagcaaaagttacta

SEQ ID NO: 368364 - DNA, 201 bp, Homo sapiens
taatttttttgttgtcttttagataaaaatatatactctggaagagcatgatgttttatctgtttgggttgaaaagcacgtgggaagtccagcacatttgrcttatcgtctcttgtctgactttacaaagcgacctttgtgggacccccattttgtgtaagaacaaatttaaaaatttttctcaatcaaccttgacataat

SEQ ID NO: 368365 - DNA, 201 bp, Homo sapiens
cacatgcatatatacacacacgtatttcatgtcatatgtatgtaatataaaatgtgtgtatatattatgtaatatgatattatatatgtgtatgtattatrtgatatgtatgtgtatatattatatatcatatatgacatcatatatatcatatacacttatatatcatatatgatatatagaaaaagctagaagaaaatt

SEQ ID NO: 368366 - DNA, 201 bp, Homo sapiens
cacggtttcataggagctgcatgtaatctcaacagagcagaaagctgcaactctgagtaggaaagaaatttgctaaagatcatatggggtatgagcagagrcttaagatcctgctcctgttgcctggtgctttccacaatcaccctgcgttttatgagccacacttccttagttctctggcagtgatttcctgggctcttt

SEQ ID NO: 368367 - DNA, 201 bp, Homo sapiens
ttgaacctgagaggcggaggttgcagtgagccaagattgcaccactgcactccagcctgggcaacgagagcaaaaccccatctctaaaaaaaaaaaaaagrttttaatactgcatttttactgcatcttttctacatttagctatgtttggatacacaaatacttaccattgtgttacggttacctacagtattcagcaca

SEQ ID NO: 368368 - DNA, 201 bp, Homo sapiens
atttaaacttgcacaaatgtaatttttaatttcagcctggaggtgagtatgggaactactttagtgaaattccatttttttcatgcaattttcaaaatccrtgaacatatttttaaccctttgttctgcttggggccttttcacaattagtaaattgtgaaggactggtttttgtcttataagggtagccgtatgtcccaa

SEQ ID NO: 368369 - DNA, 201 bp, Homo sapiens
tagtgctgagctgtgcctgagatagctcattattttcagaagatagtattactcatctgaaatatgtagggaaaaggtttattagccagaatctaaagacragtacctgagtttaccaacacttctgcgaagtgcaatcctgaggaccaagcttcagcgctcttcacacagggggaaatctagcccattttagtatcaaca

SEQ ID NO: 368370 - DNA, 201 bp, Homo sapiens; identical to SEQ ID NO: 79951

SEQ ID NO: 368371 - DNA, 201 bp, Homo sapiens
aagctgttcttgtctggggtttcaccctgtatatggtccagttagtatcaacccaaagactcacaggcatatttctggaattctttctctttttttttagyttccttctctggtactctaacccacaaattttagctccattcaattcagcagagttaggtttttcttctctaacctaaccgtaaattaccttcagcctga

SEQ ID NO: 368372 - DNA, 201 bp, Homo sapiens
tttcctgtcttttgtgctctctctccttttggactttatagagttttagacttcttgttagtgttccacgggtcactgatactgttcgtttttcttctttyagtcttcctttctcttcatgctacattctgtgtagcttcttttgtcatcttcagcttcactgactttttcccctgcattaactaaactgctgttaatctt

SEQ ID NO: 368373 - DNA, 201 bp, Homo sapiens
aacgattctcctgcctcagcctcccaagtagctgggattacaggcatgcgccaccatggtcagctaattttatatttttagtagagatggagtttctccaygttggtcaggatggcctcgaactcctgacctcaggtgatctgcctgcctcagcctcccaaagtgctgggattacaggcgtgagccactgcacccggcctg

SEQ ID NO: 368374 - DNA, 201 bp, Homo sapiens
gaggtcacgtgttacattggcacagatgctagagttgaaatgggaggagttcccttatcctcctcatagggcctgcgacaagggtgtggcttgtttcttcsgtgctgctcaaacccctagagggatcatgcagacgcttaagtcgcttaagtcgtggggagtgtttttgagctctgaccccacggcagcatctagggttga

SEQ ID NO: 368375 - DNA, 201 bp, Homo sapiens
tcatgtcgcacactatctctgcaaagtctcttttctgtttaaatattggtggtccgctaacaccataagtgtggtttacagttatcggcctttgtttttargtgttgtctttttccattatcattaacctgaatttcgcatgcatgaaaattatcagcatgataaggtggaactgctttatggcatgcatttaagtaatct

SEQ ID NO: 368376 - DNA, 201 bp, Homo sapiens
tttttatttattctaacaatctctgccttctacctggagtatttaaactatttacatttgattatctatatggtagagttgaaatctatcatctggctgtytgtcttctatttcttccatctgttctttgtttcttcctgtccccatcttttcctgcattttttagagcagagtaatttttagtaatccattttatctcca

SEQ ID NO: 368377 - DNA, 201 bp, Homo sapiens
tcagtttcctgccacaactgaggccagccctctgctaatttgctgagcagaaataaatgactgacttctccctgaatccaaagcaagcaggaactctgctstgtgccaaacctacttccaggggattctcagactctactgatcagtctcttccctcttcccacctctggaaggtgtgtgatgcattactattaatagatg

SEQ ID NO: 368378 - DNA, 201 bp, Homo sapiens
agtacagagctgtgcaccctgccaactgcactgacagagaccagctgcactggggcccagccaccttggctatagcaccccgcagggcttcatggcccacyttgttgacacggaagagttgatgagatgggcttcctatgtgttaagcgtttcctaatcttgacaagatagaggctcatcttcaaattttctaaaactcac

SEQ ID NO: 368379 - DNA, 201 bp, Homo sapiens
gactggcactatggagttcaccctggccacctgccctcagctcctctgagattgcagagccccagcaggccatcctagagccacttacctaccaaccaccrattggatgactgatgaatctgataatctctctggatatacaccaatgaaactccttcaactccccctgtgctgggggcaaagttaggcatgcccatgcta

SEQ ID NO: 368380 - DNA, 201 bp, Homo sapiens
aactgtggggctcttagcctttgcacacaggagcctctgggcttggcctgtctcctgagggccacacattctcctgatagacagtccaaatatagataaawcctcctttacatttctccttttcctcctcttccctaagacaggctagaatttctaaaggaggcttatctaaaagctaagaaaacaaaagtaaaacccagt

SEQ ID NO: 368381 - DNA, 201 bp, Homo sapiens
cgggggaggggctgggcccagagctccgcccttccgacccccacccgcttggcccccgtggtcatctccagatacctccagggaaaatgaaggctcccctrggcttctgtaaaaaccacttttgccctctttaccacagtgtagtctccataacatatttgtcaatagatggtacaaaaattctcaaatttttagttgttt

SEQ ID NO: 368382 - DNA, 201 bp, Homo sapiens
tctgataaaagatgtttttgaagagttttcctcctcttctctcccacgttttacagcttatatgtttttaatttcaaaatatgactctaatttttttctgycaccttttagtggaataattcttacaacacagttgtctgttaagaatcatacttttgggccaggctcagtggctgacgcctgtaatcccaacactttggg

SEQ ID NO: 368383 - DNA, 201 bp, Homo sapiens
tcctggtgtctctggtcctttgtagctcagattcctttatctttaacaactttattgtggtgtaattgacaaacaatgaatggcccatatttaaagcatayaatttgataagttttgaagtaagtttacacctgtgaaaacatcaccacaatcaagataatgacatatccatcacccccaacatttctgccccttcctgtc

SEQ ID NO: 368384 - DNA, 201 bp, Homo sapiens
ttcaaacatctgcctgttggtgctcacttcttcattgtttacaaagggtagagcaggaggcctagactaatatttggagttagtgagattctctatttcasaaggctctggaatgtgtagtcaggtcacaggtaaataataagcagcagatgtttccactgtttcccagctaaaattcaacatggccaggcatggtagctc

SEQ ID NO: 368385 - DNA, 201 bp, Homo sapiens
gggagctattctcatggagccgggggaggggctgggcccagagctccgcccttccgacccccacccgcttggcccccgtggtcatctccagatacctccarggaaaatgaaggctcccctaggcttctgtaaaaaccacttttgccctctttaccacagtgtagtctccataacatatttgtcaatagatggtacaaaaat

SEQ ID NO: 368386 - DNA, 201 bp, Homo sapiens
ggcctttattagcagggtttaaagagaaccaaaactaactactgcatttccttgtctgctttgtttgcatcaatatcattgatttatacagcagggcaacrgggactttctgctaccctcaccttctaggggaaagatcaaaatcgaatttgctcatccagtactgtacctgacattggataagtcaagtgagctctgtaa

SEQ ID NO: 368387 - DNA, 201 bp, Homo sapiens
gagttcaagaccagcctggccaacatggtgaaaaccatctctactgaaaatacaaaaattagccaggcgtggtggcacgcacctgtaagcccagctactcrggaggccgaggcaggagaattgcttgaacctgggaggctgaggttgcagtgagctgagatcgcaccactgcactccagcctggatgacagagtgagactg

SEQ ID NO: 368388 - DNA, 201 bp, Homo sapiens
tttaaatattggtggtccgctaacaccataagtgtggtttacagttatcggcctttgtttttaagtgttgtctttttccattatcattaacctgaatttcscatgcatgaaaattatcagcatgataaggtggaactgctttatggcatgcatttaagtaatctttaagtcttatctgaaatgaaatgtgctaaaactact

SEQ ID NO: 368389 - DNA, 201 bp, Homo sapiens
ataggtttgagagaaaaattttagaaaggagaagctttgagcattgtcatagactgatggagattcagggaagaggcagagattgaaggcagaaaagagarcagagctgatgaggcagagccaacaagggaggggacagggccactggaggatgggaccaatggcacaggtaaagaaagagattaggtctcaagagatccc

SEQ ID NO: 368390 - DNA, 201 bp, Homo sapiens
tagagatggggtttcaccatgttggccaggatgatctcaatcttctgacctcatgatctgcccaccttggcctcccaaagtgctaggatcgatcacaggcrtgagctactgtgcctggctgatgtgttcactttctagcagtatccaaataagcagaatacaaagcacttgaagaaagcagaaaggaaatgtcgtgaagaa

SEQ ID NO: 368391 - DNA, 201 bp, Homo sapiens
agttgagtccgggagttcaagaccagcctgggcaacatggtgaaagcccatctctataaaatacacaaaaattagctggacatggtggtgcatgcctgtartcctagctacccgggagacccaggtgggaggattgcatgagtctgggaggtcaaggctacagtgagccaagatcacaccactgcactctagcctgggtga

SEQ ID NO: 368392 - DNA, 201 bp, Homo sapiens
cactggcattgagaagcttgttagtgtggctttctccacatttgtagccaaaccagttggaaaagaaaaggtaaattttgtatgtgaagatgtatctagcrtgtaattcagggacatagtaacaattgcatcagaatgttatagaaaaaaatgacacttcttctttccatgagatatacttccccaagatttgttattcac

SEQ ID NO: 368393 - DNA, 201 bp, Homo sapiens
aagtcttgactctttccctttattcattaagagcctatggattttcatgtacttgatgtgttacaattcatccatgttattcttcttctttttttttttttgagacagagttttactgttgtcacccaggctggagtgcgatggcgcaatctcagctcactgcaacctccgcctcccaggttcaagcgattctcctgcctc

SEQ ID NO: 368394 - DNA, 201 bp, Homo sapiens
agtgtaaagtggtgctgtgttgtaggaccccaggggatctgcagctgcaaatgcagctcctttgtgaagaaatgactttaaagccagctcccaagaatttycacagaaaaagatccaagcaatatgagatcctagtgaaaaatcataaaagatagaaataaagcaaggcttcaagatctggaagtgacaccaggccccaca

SEQ ID NO: 368395 - DNA, 201 bp, Homo sapiens
tgtataagtcagaaaaataaacgatgtttttaggaagtttgaattgaagaaaagaaaagcaacttgagatagaataggtttgagagaaaaattttagaaargagaagctttgagcattgtcatagactgatggagattcagggaagaggcagagattgaaggcagaaaagagaacagagctgatgaggcagagccaacaag

SEQ ID NO: 368396 - DNA, 201 bp, Homo sapiens
gttcactgtgggtgtgtgaatctgtttctgggttcccagttctgttccattggtctatgtgtctgtttttatgccagtgcctggctgttttgcttactacractctgtagcataatttgaagtcagataattgtattaatttattttaaacaaaaaatgtgccatttgagtaagtaacattagcctgaaaacaacctcaat

SEQ ID NO: 368397 - DNA, 201 bp, Homo sapiens
agtctcaatgagatgaactgggtacctcatttggaaatgcagaaaaatcaccccccttctgcatcgatctcgctgatagctgcagactggagctgctcctrttcggccatcttgccagcaaatcccatggtgcctgatttacacacaacattcagtagagagtagtcattgttattagtatggccacactgagaaacatta

SEQ ID NO: 368398 - DNA, 201 bp, Homo sapiens
atactgtatatgtcttcataggaagtatgtggtttctctttaaagttatccctcagaaaagaaggagctgctttatatttgagtctttacaatgtctctcrtaaggccttctcttaattttttatttataattatctaaaaactatttttaaagagatagtacatgcacagggtaaaaaatgcaaaacgcataaaaaggca

SEQ ID NO: 368399 - DNA, 201 bp, Homo sapiens
gcatttgacaagatgtattacatagtctagagatttaaattagggagacattaaaacataatggaatccaatcaattttagtaataagaacaactttacttgtgtcatttaacatatattccaggtggctgaccaatttagtgtctattgctctaatagacacacaaggtacctgtaaaatgtagtattacagagaaagag

SEQ ID NO: 368400 - DNA, 201 bp, Homo sapiens
tcccttggctaggggagggaaatcccctgaccccttgcacttccctggtagggtgatgacccaccttgcttcggctcaccctccatgggctgcacccactrtccaaccagtctcaatgagatgaactgggtacctcatttggaaatgcagaaaaatcaccccccttctgcatcgatctcgctgatagctgcagactggagc

SEQ ID NO: 368401 - DNA, 201 bp, Homo sapiens
tcctttcacataaaacaacttttaacctaattccactgatctgattttgtttttggaaattttactaacttccatgccagcaaaggtgccagagaacttawaagcaattcatcttaaagaatgcaagagccagactctgacatttaaagccgctgtgtagtatgtgatttctccacctgctgctccttagatcagatggag

SEQ ID NO: 368402 - DNA, 201 bp, Homo sapiens
agcatttgacaagatgtattacatagtctagagatttaaattagggagacattaaaacataatggaatccaatcaattttagtaataagaacaactttacttgtgtcatttaacatatattccaggtggctgaccaatttagtgtctattgctctaatagacacacaaggtacctgtaaaatgtagtattacagagaaaga

SEQ ID NO: 368403 - DNA, 201 bp, Homo sapiens
acagtcattcaaatatagagataaaacgattgcaattgacttgagtttcagtgtgttacaaagttggccagattagatctacatctacatgtctagttcawagttcaatttcaaattatagatttttctcaaagtcttcttttatcatctgctttgtttaatctgccctaacttattctacatcctttcacataaaacaac

SEQ ID NO: 368404 - DNA, 201 bp, Homo sapiens
cctcagcctcccaagtagctgggattacaggcatgcgccaccatggtcagctaattttatatttttagtagagatggagtttctccacgttggtcaggatrgcctcgaactcctgacctcaggtgatctgcctgcctcagcctcccaaagtgctgggattacaggcgtgagccactgcacccggcctgttttttaatttaa

SEQ ID NO: 368405 - DNA, 201 bp, Homo sapiens
gagcatttgacaagatgtattacatagtctagagatttaaattagggagacattaaaacataatggaatccaatcaattttagtaataagaacaactttacttgtgtcatttaacatatattccaggtggctgaccaatttagtgtctattgctctaatagacacacaaggtacctgtaaaatgtagtattacagagaaag

SEQ ID NO: 368406 - DNA, 201 bp, Homo sapiens
aaactcattctccatccagtttttttcccttcctggcacggagttgtgatcctttgaaggagaagaggcattctggtttttggaattttcagcctttttgygctgttttctccccatcttcatgggtttatctacctttggtctttgatgctggtgaccttcagatgaggtctctgagtggatgtcctttttgttgatgtt

SEQ ID NO: 368407 - DNA, 201 bp, Homo sapiens
ggagcatttgacaagatgtattacatagtctagagatttaaattagggagacattaaaacataatggaatccaatcaattttagtaataagaacaactttacttgtgtcatttaacatatattccaggtggctgaccaatttagtgtctattgctctaatagacacacaaggtacctgtaaaatgtagtattacagagaaa

SEQ ID NO: 368408 - DNA, 201 bp, Homo sapiens
atgggtggctgcaccggcttcttctggtgttgtgcaagttgcactaataagtgaaatcagcagcagacaatttgtctgcacaacactaatagtactttgartactggagatagtctaaattagtgacaggcacacatgacagtcattcaaatatagagataaaacgattgcaattgacttgagtttcagtgtgttacaaag

SEQ ID NO: 368409 - DNA, 201 bp, Homo sapiens
gccaggtaaacatgggtggctgcaccggcttcttctggtgttgtgcaagttgcactaataagtgaaatcagcagcagacaatttgtctgcacaacactaayagtactttgagtactggagatagtctaaattagtgacaggcacacatgacagtcattcaaatatagagataaaacgattgcaattgacttgagtttcagt

SEQ ID NO: 368410 - DNA, 201 bp, Homo sapiens
ttctgtatgaaacgcctgtcatgtgccaggaacctgcttgccactagaggtataaagatgaataatgcagggtctttgctcttaagaaacttgtagtttaktgctggagacagacatattaatagtttctaaataatatagtaagtgaatagagagctgtagactctaagtaatgtgggagcccagaggaagggcccttca

SEQ ID NO: 368411 - DNA, 201 bp, Homo sapiens
agaacacacccctgtcattaaactaggcataactgtaagtagatattcatcattccttttagtatctacatagtactccattgtggagacgcactacattwttcaactggccctccactgatgaacatttatattgtttccagtcttttgctattacaaataatatttcaatttgtagtcttgtgcagatgtatgtttgtt

SEQ ID NO: 368412 - DNA, 201 bp, Homo sapiens
cacttccctggtagggtgatgacccaccttgcttcggctcaccctccatgggctgcacccactgtccaaccagtctcaatgagatgaactgggtacctcakttggaaatgcagaaaaatcaccccccttctgcatcgatctcgctgatagctgcagactggagctgctcctgttcggccatcttgccagcaaatcccatgg

SEQ ID NO: 368413 - DNA, 201 bp, Homo sapiens
ccccatctctactaaaaataaaaaattagctgggtgtcatggcgggcacctgtaatctcagctgcttgggaggcttaggcatgagaatcacttgaacctgrgaggcagaggttgcagtgagccgagattgtgcagctgcactccagcctgggcaacagagtgagaccctatatcaaaaaaaaaaaaagaatcatactttcc

SEQ ID NO: 368414 - DNA, 201 bp, Homo sapiens
tgtgcatttgttcgatgaatgaatgtgtgatcgctttcttctctctccctccctttgtctccccagccgcctgtgttgggctcatccctttctgaagtccrtagatatgtttaagttccggggaccatctacagttggagatcgtcttgtcttcactgccattgtcaacaatacatttcagacctggtaaagtgagccctt

SEQ ID NO: 368415 - DNA, 201 bp, Homo sapiens
gttctcctggataatatcctgaagagtgttttccgacttggttccattctccccatcactttcaagtataccaaaccaacgtagatttagtcttttcacawagtactatatttcttggaggctttgtttgtttattttcattcttttctctcttatcttgtttctcactttatttcattaagttgatcttcaatctctgat

SEQ ID NO: 368416 - DNA, 201 bp, Homo sapiens
agtccaagcagaaaacccattccccaaagtcactgccatccctagagcagggttcaggggcagagaaggacaggagaccctccagtcaagaagttggcggccaaaagctgagaaaacccatcctggaatttttgcttaggggctctgagtttaaactttgaaccacatccttataaatttgtatttgaatttggaaacact

SEQ ID NO: 368417 - DNA, 201 bp, Homo sapiens
cagtccaagcagaaaacccattccccaaagtcactgccatccctagagcagggttcaggggcagagaaggacaggagaccctccagtcaagaagttggcggccaaaagctgagaaaacccatcctggaatttttgcttaggggctctgagtttaaactttgaaccacatccttataaatttgtatttgaatttggaaacac

SEQ ID NO: 368418 - DNA, 201 bp, Homo sapiens
acagtccaagcagaaaacccattccccaaagtcactgccatccctagagcagggttcaggggcagagaaggacaggagaccctccagtcaagaagttggcggccaaaagctgagaaaacccatcctggaatttttgcttaggggctctgagtttaaactttgaaccacatccttataaatttgtatttgaatttggaaaca

SEQ ID NO: 368419 - DNA, 201 bp, Homo sapiens
ctattacagtgttttgcatgccatcaggtttaaagagacatacatcatttggatcataattttatctattttcagaggttttttaggagaccctcggaagytcatgcccacaataactagactgtaagctccctgagggccgatctgctcaccactacacccagaccataggagcgcctggcacttcagagatgctcacta

SEQ ID NO: 368420 - DNA, 201 bp, Homo sapiens
ccaccacactcaaataattttttaaaaaatttttataaagatagggttttgcaagattttgcccaggttagtcctgaactcctggcctcaagtgatcctcycacctcagactcccaaggtgttaggattgcaggcatgagccactgtgcctaccctcaaagagctcttctaaaggcagacttgagcaataatgctggcttt

SEQ ID NO: 368421 - DNA, 201 bp, Homo sapiens
ggggtgccggtggagagcacaatgagggaggggaggaagtgaagtgagcccgcccaggccccacaagctcaccactgccaagagggcagaaggttcagcamcccttggctccaaaggaaggcaccggaagaagaggaaggaaaggagaggacaagaacatgtcagaacaaggatgtcaaaagagaaggagaaagagtgcat

SEQ ID NO: 368422 - DNA, 201 bp, Homo sapiens
ttgtaatctgacagttacatctaaaaattgacatgatgaaggtttgattttgttttttctttgagatggagtcttgttctgtcacccaggctggagtgcaktggtgcgatcttgactcactgcaacccaggttcaagcgattgtcctgcctcagcctcccgagtagctgggactacagggcagctgccaccatgccctgat

SEQ ID NO: 368423 - DNA, 201 bp, Homo sapiens
gttatcctaaagaagaacggtttgctgggaggccgactcaacgagtcagtgggctctatcaaaggctggagtctaagtgttccatggggttccatgctggytgggagcagccgcactggttctacaaaccaggccaggacactcagtacaggtgggagaaggactttacctgcctgtggttctgaccgaggggtgaaacaa

SEQ ID NO: 368424 - DNA, 201 bp, Homo sapiens
atgacagaaccaggcccagaggcaaagaaagaaactgaagaggaagatgttgaatgtgaagatgatctcatttttgcatgtcagccagaaagttcggtgamagcactggattttgatatcagtgaaaatcaaagagaaatagaattatctctgattgatcatggcatttctgttacagaccgaataagtacttttcaggca

SEQ ID NO: 368425 - DNA, 201 bp, Homo sapiens
atccaagtggaatcaaaccattgttcacagacaacaagctagaaagaaattgttaatatagtggtcaaagcatccaattctctttgggaaatttgaggtamatggtaataagaattgaggaggcagaaaattttcagtgatacttagccctggctggacattagaatcatctggggtatgattcttttaaataatatttcg

SEQ ID NO: 368426 - DNA, 201 bp, Homo sapiens
ttaaggcaggtttaacaacttactttcatcctggaataaacttgaagaaaatacattatgatagcatcaaactttatgagaaactggaagaagaaactggkcaggtaaaggcatttaacttgaaactgtctgttaggtcggcttctcagaaacatgtaagatttctgaaggattttgatgcatcattgtgtatgaccgtgt

SEQ ID NO: 368427 - DNA, 201 bp, Homo sapiens
gctacacccaagatcaatttaaaaagaagctcttgtagggactcaggcatcagttgtttttaattccccaggtgattctgcagagatggagaattactgtyttcaaccaaagattttcaactggctgaacatattatcctgaagaactaaaaattacctgaactgaaagaactaaaaactactcaagtagttctcaaggtg

SEQ ID NO: 368428 - DNA, 201 bp, Homo sapiens
caaaggtggatatgatgttgaaattaaaaacataactgatgagcttggagttcttggagttgctgggccacaggcaagaaaggtccttcagaaactgaccyctgaagatcttagtgatgatgttttcaagtttcttcaaaccaagtccttaaaggtttccaacattcctgtcactgctattaggatatcttatactggtaa

SEQ ID NO: 368429 - DNA, 201 bp, Homo sapiens
catgtcacaagaaatgtgtgagtgtgtatgcatgtgcacactcacactcacttttgtccatgcgactttggaggaagatttttgttctgcccagctcttakgtctagtctgtctattcactcctcatcttgaaagtggttccacagatttctagttgttgctccagtcccatcgctgcctaccatctggaagggcagataa

SEQ ID NO: 368430 - DNA, 201 bp, Homo sapiens
agattatttggtggccaaatactgatttggtttttcctaaattactctaacacatcacttttactcttcacttagtgctgattggatctggcctaagtttwttctaccatttaataattaaactattgaaaattcatgttacagacatagcatcctgctctgaagttaaaataccacattagaagtccacttcataaagca

SEQ ID NO: 368431 - DNA, 201 bp, Homo sapiens
attagctgcccctcctggcttatatcagtgcactcattccatggctctggaggccagtggttcccatacctgggtgaggagcagaatcatctgaggagcaygttaaaaagcagagtcttgaccatgtggttagtcacatgcacattttttatctcctatacctctcatctgtgaaattcctattatttgtcactagaaccc

SEQ ID NO: 368432 - DNA, 201 bp, Homo sapiens
cttggcagttattaatcagccagagataaacttttactaatgaatgtattcacattttatttttcacagtcaaaaagttttcttttttcacggtcaaccarttttcacagtaagtttagaaatcatatggagaacagccgggcgtggtggctcatgcctgtaatcccagcactttgggaggccaaggcaggctgatcacga

SEQ ID NO: 368433 - DNA, 201 bp, Homo sapiens
gataaactgtgccatgctaactattcacctaacgtcattgtcccagaaaacagtcaagcctcattagaaagctggggtccagggtggagattaattcctgyattatagtctttctgtgtcatgacaagaggtgtcctgcataccaccatctacatgggagtcaggatcggcacaaatgcatctgtgatatggtgggcttct

SEQ ID NO: 368434 - DNA, 201 bp, Homo sapiens
tgcccacacaacctcctgcctccccgttttttcctcaatccactgccagcttggtctgctttcaagatttgaatatagatgctattgtgcttttacagctrgaaacacaactgatatcagaggccagatatccatcctaataagaaggaaaacccaagagtctataacagagcagggtttttggtactgtaaatggagtac

SEQ ID NO: 368435 - DNA, 201 bp, Homo sapiens
ccgaaaaattaagtgttctctttaacatcaaatctagtaagatttaatattaaagacatgtaatgggggctttagttttgaaaatctggtttgatttgaaygctaattagcctgattacttgcctggcttaggaactatattttagttattttcccaggtttctattttatcccccttttttagtgactatggttcctgtt

SEQ ID NO: 368436 - DNA, 201 bp, Homo sapiens
taatgtaattgagggttttatagtcacctatagagtccatatgcaggcatgtggaagtaggagtgcttctcctgcacatcactcatgtatcttctttggarcaatgtctattcatatcctttgccattttcataattgggtaatttgtctttttattgtttagctatggaagttctttatatattctagatataagaacct

SEQ ID NO: 368437 - DNA, 201 bp, Homo sapiens
tggaggttgcagtgagccaagatcaagccactgtactctaggctgggcaaaagagtaatactctgtcttggaaaaaaaaaagtttgaaaagttaaaaaagwatatatattttgtaatagaaaaaaggttccagaataaggatataaagaaataaaatatttctatatagctgtagaatgtgtttgcatttaaactgttatt

SEQ ID NO: 368438 - DNA, 201 bp, Homo sapiens
ggaagatttttgttctgcccagctcttatgtctagtctgtctattcactcctcatcttgaaagtggttccacagatttctagttgttgctccagtcccatmgctgcctaccatctggaagggcagataaaaaaaaagtgggggctgggtgcagtggctcacacctgtaatcccagcactttgggaggctgaggcgggctga

SEQ ID NO: 368439 - DNA, 201 bp, Homo sapiens
ccctttttctctctccttcccctctctccccgtgtagagcttctaactagtagaaacagaataaaatgtaatctctattaaacataagttataagacaatrttgattctagaaaatgcagggtctcttttggaagaaatatttaaagcataactgttcgataaccaaaaacaaaacaacccaaaaaagctggtaaagaggc

SEQ ID NO: 368440 - DNA, 201 bp, Homo sapiens
caggctggagtgcagtggtgcaatcatagctcactataagcacaaactcctgggctcaagcaatcctcccagttagctaggattatacaggtgtgcgctamcatgcccagctattttcttaatttttttagaaatgggggtctcactatgttgcccgggctggtcttgaactcctggcctcaaatgatcctccagcctcaa

SEQ ID NO: 368441 - DNA, 201 bp, Homo sapiens
ccgtctctactaaaaatacaaaaaaaaaaaaaaattagccgggcgtggtggtgggcgcctgcagtcccagctacttgggaggctgaggcaggagaatggcrtgaacctgggaggtggagcttgcagtgagccgagatcgtgccactgcactccagcctgggcaacagagcaagactccatctaaaaaaaaaataaaataga

SEQ ID NO: 368442 - DNA, 201 bp, Homo sapiens
tccctcctgtctcttgctcctgctcctgccatgtaagacatgccagctccccctttgccttctgccatgattgtaagttccctgagacctccccagaagcmaagcagatgcccacatcttgcttcctgtatagtctacagaactgtgagccaattaaatctattttctttataaattacccagtctcaggcatttctttat

SEQ ID NO: 368443 - DNA, 201 bp, Homo sapiens
ttggaggttgcagtgagccaagatcaagccactgtactctaggctgggcaaaagagtaatactctgtcttggaaaaaaaaaagtttgaaaagttaaaaaaraatatatattttgtaatagaaaaaaggttccagaataaggatataaagaaataaaatatttctatatagctgtagaatgtgtttgcatttaaactgttat

SEQ ID NO: 368444 - DNA, 201 bp, Homo sapiens
aggacccctgctgctgcttctctggaggttaaggggatttattacactcagtcctaaatgtttcaagtgcagaaagaactgtgtaagtcctaaatgttagyggtggaggacatcttaggcatgaaatactctttcttattgccaataaagaaattaaagcttttggttgtttcctttctttgcgttcagagagtagtctgt

SEQ ID NO: 368445 - DNA, 201 bp, Homo sapiens
ttcaaaagacagaacgcaattgactgaaaggaaaatgcaatgttgctcatttttgaaaacataaaattctatatattctgtttaaagaaaacaaacccaargacttgaaacacactggacaatgagaaggatatgatttagagggtaaatgatctatttgctcaccacatccatgtctgtaaatgcaaaagatggatttta

SEQ ID NO: 368446 - DNA, 201 bp, Homo sapiens
tcccacggatgtcagccctccctccagggcgctcactctcagtgctctctcttcacctctgactagtttatcacacttatcatgtgtctcctggcatttgrttgagtagaattctatctcccttattagctaagtgtctctgctgaggagtcattgctcacttgtgtgtcctactcacaggtaaggtgtattaaggtgtat

SEQ ID NO: 368447 - DNA, 201 bp, Homo sapiens
ggggtctcaggtgagggtgtgtgaggacccctgctgctgcttctctggaggttaaggggatttattacactcagtcctaaatgtttcaagtgcagaaagarctgtgtaagtcctaaatgttagcggtggaggacatcttaggcatgaaatactctttcttattgccaataaagaaattaaagcttttggttgtttcctttc

SEQ ID NO: 368448 - DNA, 201 bp, Homo sapiens
cccacccccatttgtcctatattaaataacacgggttccaatcttctttaaattttcatgatctggcttcataataaagctttatagttggttcttaccakttgtatcaccctggggaaggagaaagaattggatgttcattttgcacattattttaacctcggctaatggaaactttctctaacttcctgtgtaggtcag

SEQ ID NO: 368449 - DNA, 201 bp, Homo sapiens
caaattatagaaatacaattggtcttatatgttgatcttatattttggaactttgctcaatctgcttagtggttctagtagcatttttgtagattccatcrgattgtcacatggacaatcatgttgtataaaaataaagcttttctttgtcttttctaatttggatatcttttttttctttttcttgccttatattccttt

SEQ ID NO: 368450 - DNA, 201 bp, Homo sapiens
atgtctagtctgtctattcactcctcatcttgaaagtggttccacagatttctagttgttgctccagtcccatcgctgcctaccatctggaagggcagataaaaaaaaagtgggggctgggtgcagtggctcacacctgtaatcccagcactttgggaggctgaggcgggctgatcacctgaggtcgggagttcgagacaa

SEQ ID NO: 368451 - DNA, 201 bp, Homo sapiens
ttatgataggatcagaatagctgctttgcccattttaaggaggaaaatggctgggtgagcagatgggccatcaggccttattagggtgaatcgtgttcttrtcaaaacctgtcagcaagtagggaaaagaacaatggagtactgaagaactctttcatcacaaagggagacggcgcagtggcccttgcttccttccgtctt

SEQ ID NO: 368452 - DNA, 201 bp, Homo sapiens
tgagggcctctttgcctgaatgtttctaagataatggctcaagttccttgcgcacaggtcattgtctaaggaggtcagaactaacttgagtctgagaagasatggatgggacaccacagtacatatgtttctcccaccgtgtttcctaccagtcaggataatcatagctcaggagggctgttagggtaccagccacatctg

SEQ ID NO: 368453 - DNA, 201 bp, Homo sapiens
aagctggggtccagggtggagattaattcctgtattatagtctttctgtgtcatgacaagaggtgtcctgcataccaccatctacatgggagtcaggatcrgcacaaatgcatctgtgatatggtgggcttctttgcagtggggtcttgtaactttttgtgagctggtctttttagagactgacaatgtctgtgttgcata

SEQ ID NO: 368454 - DNA, 201 bp, Homo sapiens
cacagtagaggccttcattagacaagactgagtgggtagaactacacatggccaatgtaaaacccatccattttctgatgtcaaaacccctttattttcckcatcgtgttcttgattttaaagtatcatcttaagaaaatagaaaacaagcccaccttccccatcaagtggcctattagttgcaaaatacaagagacagtg

SEQ ID NO: 368455 - DNA, 201 bp, Homo sapiens
gggaccatcttaatagcttagctttgtgtaaatccagatgaacattttgtgatagacttagatagctcaaggactgctcaataaattagaaaccagccctrtagctgggtcccaataactcatcaagccatagaaattgaaactagagtttctgtcttttccttgtgattctcagagcaattacgtgtcttgtggcaggca

SEQ ID NO: 368456 - DNA, 201 bp, Homo sapiens
aggaaatggtacttcctaaaattatactttgataagcttcttgagataggaaatgaatccctccactctactcctcaaagagtaggcccaaataatagcamatgatcactaaattgccttctacagaagttaggccagctggtttcagggctttggttgtgctgagtgggctctgcacatttgggcctgagcagaattgct

SEQ ID NO: 368457 - DNA, 201 bp, Homo sapiens
ctcttttctttatatattacccagtctcaggtatttctttatagcaatgcaagagcagactaatacagggaatattcattttctagccaataataaccaayttagttgctaaactaataatttaacattttgctatcaaggagacgttgaaattgtggttattgttaacttatgtggaatgttaagaagctctgaatagtg

SEQ ID NO: 368458 - DNA, 201 bp, Homo sapiens
tctaagatttaaaatgtgtgtttcctttttagatgaactgtgatacaaatcctttggaagctggactggaatattttgtgaagttaaataaggtatgtttrcattccaaagtgtgcttgaagtaaatcttaacattatgatgctattttgtgacagagccattctttaaaatttaaccaagtatggattataggagaaaca

SEQ ID NO: 368459 - DNA, 201 bp, Homo sapiens
acttcctgtgtaggtcagcaatttaaagttggattatccatagaaatcatatttcattgtaggttcatcctagaggttctaaactaggaaaggaatggacbggcgggggggggggtctcaggtgagggtgtgtgaggacccctgctgctgcttctctggaggttaaggggatttattacactcagtcctaaatgtttcaag

SEQ ID NO: 368460 - DNA, 201 bp, Homo sapiens
tttgagaatgttaattttttttcagtatttcttttcctctctgcttttaaggcaggtttaacaacttactttcatcctggaataaacttgaagaaaatacrttatgatagcatcaaactttatgagaaactggaagaagaaactgggcaggtaaaggcatttaacttgaaactgtctgttaggtcggcttctcagaaacat

SEQ ID NO: 368461 - DNA, 201 bp, Homo sapiens
ggggcaacagagcaagactccatctcaaaaaacaagcaaacaaaagcaatgattaggtgcagccgcagagctgcttccagggctacatggctgagggggaygcagggagtaaccaaaggcaggatgaggaaattgaagcaatggtagccattgatggcgaggaatggtgtgtcattgatgactgtgccaaaatattttgta

SEQ ID NO: 368462 - DNA, 201 bp, Homo sapiens
caggctggagacatttgcataagtaaaaaggagccaagtgctgataaccaaaacactggggaaaaaggtcttgaaggcatttcagagaccttcacaacaayccctatcatcacagccccagaggcctaagaggaatgaatgttttgtgggccaggcccaaggccccactgccttgcatggcattgggacactgctccctgc

SEQ ID NO: 368463 - DNA, 201 bp, Homo sapiens
ccaaaatccattctaaatgagaagcttttcaggaaaatattgaaggatagtggcacagcctgtcatctggatttccatctccactctgccacttacagtasctgatgatcacagtctctgcagcccttccccgcctataagacacagtagcctgattccacaaccagtgctgtgcctgattcccaaggaagctttactggg

SEQ ID NO: 368464 - DNA, 201 bp, Homo sapiens
caatgcaagagcagactaatacagggaatattcattttctagccaataataaccaacttagttgctaaactaataatttaacattttgctatcaaggagaygttgaaattgtggttattgttaacttatgtggaatgttaagaagctctgaatagtggaaaaggaaccaagagttgagaagcttgggtttaaggtttggtg

SEQ ID NO: 368465 - DNA, 201 bp, Homo sapiens
gctacaactggggactgaggcgaggctaggcgcagggacagaaacggaggacagcgcggtccccacactctccgaggaatgaagcagcaggagcagccctytgggagtcagacatttctccattctcctgccttttattttctcagatttcctctcccggcgacctcctctggagagcttttctccttctcccgtccctcc

SEQ ID NO: 368466 - DNA, 201 bp, Homo sapiens
gcatacaacactgccatcttgtgggaagtgctccgtagagccacttcaggaagccttgaccaaagctgcggtaaaaataattgaatctgtacttttaaaatcttcttaactaaaaacgcttcacctgaaacgactcatatcattgttctcaatggtatttttggtatgttccaaaggaagtaacttttgggaggaaaatca

SEQ ID NO: 368467 - DNA, 201 bp, Homo sapiens
catacaacactgccatcttgtgggaagtgctccgtagagccacttcaggaagccttgaccaaagctgcggtaaaaataattgaatctgtacttttaaaatcttcttaactaaaaacgcttcacctgaaacgactcatatcattgttctcaatggtatttttggtatgttccaaaggaagtaacttttgggaggaaaatcag

SEQ ID NO: 368468 - DNA, 201 bp, Homo sapiens
atacaacactgccatcttgtgggaagtgctccgtagagccacttcaggaagccttgaccaaagctgcggtaaaaataattgaatctgtacttttaaaatcttcttaactaaaaacgcttcacctgaaacgactcatatcattgttctcaatggtatttttggtatgttccaaaggaagtaacttttgggaggaaaatcagt

SEQ ID NO: 368469 - DNA, 201 bp, Homo sapiens
tagctattattaaaacatcagagtgctaaaaacaaaaaaatccaagtggaatcaaaccattgttcacagacaacaagctagaaagaaattgttaatatagkggtcaaagcatccaattctctttgggaaatttgaggtaaatggtaataagaattgaggaggcagaaaattttcagtgatacttagccctggctggacatt

SEQ ID NO: 368470 - DNA, 201 bp, Homo sapiens
actgtcacctgggacctgctagaaaattcaaattgttgagtaccatcccagacccccaaaatcagaagctgccagggtggagcccaactatctatctatckatcgatctatctgtctatctaactatttttattgagacggagtcttgccctattgcccaggctggagtgcagtggtgcaattttggctcactacaacctt

SEQ ID NO: 368471 - DNA, 201 bp, Homo sapiens
gagaagaatgaagcgcagggtggttacataacttgcccaaggtcacccagctaacagtggaagaataagaatcatacccagatcttttccccatacttttrtacttttagctgctaagccagggattctccagagatgttttctattttcctaagatgatactttaaaatcaagaacatgatgtggaaaataaaggggttt

SEQ ID NO: 368472 - DNA, 201 bp, Homo sapiens
ctggttaaatctcttacctagggtttgttttttttaattgagtttttaaagtgctttctgtattctttatcagatacatgctttgcaaatttttttcagakgtcttgacttttcatttgtctcatggtgtctttcaaagagccatttttaatttttgaattttaaagttcttatcaattgttcttttatgaatcatgcttt

SEQ ID NO: 368473 - DNA, 201 bp, Homo sapiens
gggaggctaaggcacaagaatcgcttcaaccttgggggtggaatttgcaaagatggcgccactgcactccagcctgggtgacagagtgagacgctgtctcaaaaaaaaaaaaaaaaggaaaagaaaagaaaaagagatgacagctgtgtatgtgttattgcccctgaagaccttccagtgggacaagatttggaggtgtga

SEQ ID NO: 368474 - DNA, 201 bp, Homo sapiens
gcattagcaaataacatggctgcattgtgctcctgccctagggatctatggatcttagaaactgagactgatgatttagagtatctagtggaagaaatttytaagcagcaaagcattcaagatgtggcctggctacttctgacagtcaatgctcatgtgtgtgaacaaagaaatgacctgaagttggaacttatatttaaa

SEQ ID NO: 368475 - DNA, 201 bp, Homo sapiens
tgtgtgaacaaagaaatgacctgaagttggaacttatatttaaaggggaagcagagtgtaaaagtttggaaaatgtgcaacctgaccatgtagtagaaaaraaaagcccattttctggggaggaattcaagcaggctggagacatttgcataagtaaaaaggagccaagtgctgataaccaaaacactggggaaaaaggtc

SEQ ID NO: 368476 - DNA, 201 bp, Homo sapiens
aaatgacagaatattggtgaaagtattctttacctgtgagtggagaaaataagagatgttccaatacaaaaacctcagatgacagaaccaggcccagaggyaaagaaagaaactgaagaggaagatgttgaatgtgaagatgatctcatttttgcatgtcagccagaaagttcggtgacagcactggattttgatatcagt

SEQ ID NO: 368477 - DNA, 201 bp, Homo sapiens
gaggcaagagagttgcttgaacccaggaggtggaggttgcagtgagccaagattgtgaccactgcactccagcctgggtgacagagagagattctgtctcaaaaaaaaaaaagaaaagaaaagaaaagaaaagaagaaagaaagtaagtgtttcttactttcaataagatttttgctgttgtttttgttagaatatgtttt

SEQ ID NO: 368478 - DNA, 201 bp, Homo sapiens
cctggaataaacttgaagaaaatacattatgatagcatcaaactttatgagaaactggaagaagaaactgggcaggtaaaggcatttaacttgaaactgtstgttaggtcggcttctcagaaacatgtaagatttctgaaggattttgatgcatcattgtgtatgaccgtgtggagtgcttaatgtagtagaggaatatga

SEQ ID NO: 368479 - DNA, 201 bp, Homo sapiens
tgatcaaacatagtgcattcattgatccttctggatactcacagtgtggagcagcctcacttcagcatatctgtccatctgcttatcaagcatctttgtgkgtaactgcaacatctgaatataagcaaataacacgtttcaaacgttttcggcataaaatgggtattaactgagaagctaatataagcccaaataatcata

SEQ ID NO: 368480 - DNA, 201 bp, Homo sapiens
gaaattgcacattagctgatcaaacatagtgcattcattgatccttctggatactcacagtgtggagcagcctcacttcagcatatctgtccatctgcttrtcaagcatctttgtgggtaactgcaacatctgaatataagcaaataacacgtttcaaacgttttcggcataaaatgggtattaactgagaagctaatata

SEQ ID NO: 368481 - DNA, 201 bp, Homo sapiens
ccatatcagaccctgcctaccgtgctgctgtcaaatttgattttaactacatatctcagagctctccattgccctaagaatcacaaccaaaaatatactgrtttactttctttcatttacatgtgcttttaggtaatatggttcctttaatagagctaatgagagatgagtaattatatttcacttaaaaatctacttaat

SEQ ID NO: 368482 - DNA, 201 bp, Homo sapiens
catggttagctaatacctgatgttccttcttagcctttggtaaaattgtgaatttgacaaaggtagagttagtctccttttccagcacatctcaaccctcrcctagctctgccccaatagctctcatccagcacccccagctggtcatggccagcttccaccacatcgcctccagaggtgtagcagatattgatttaagtg

SEQ ID NO: 368483 - DNA, 201 bp, Homo sapiens
actccagcctgggtgacagagagagattctgtctcaaaaaaaaaaaagaaaagaaaagaaaagaaaagaagaaagaaagtaagtgtttcttactttcaatragatttttgctgttgtttttgttagaatatgttttatttcatgtctgaggatgaaattactgaaaagacctaattcctaatttagggatatacaaataca

SEQ ID NO: 368484 - DNA, 201 bp, Homo sapiens
ccagcacccccagctggtcatggccagcttccaccacatcgcctccagaggtgtagcagatattgatttaagtggctccattagggctgttcagagtaggygaaatgaacagggctaggcctcctgagatcttggttcttaaccagtttgttgattgcctgtctttgactgagttaatgcactgctcttggactccaaatc

SEQ ID NO: 368485 - DNA, 201 bp, Homo sapiens
tttggaaaaaaaacaaaaaatgttcatcactgagtaatggagtaagtgaaaatccaggagtatccacttgcagttatgggctgaggtgacaattcttccamcatatttgttagcgtaaatattatgcctccatttctgttgcaaattggtgattgtgaaatttccaaaagtgattttctagtctctgcttctttaattctt

SEQ ID NO: 368486 - DNA, 201 bp, Homo sapiens
accccttgtcatcattattctatgattgcaagtctcctttttaaaagatagcaaaaaaaaaatgttgctgttatagaattctttcttagatatagtcatcyctctgtgtatgtgggggattggttccagaacccccacatataccaaaatctgagtttactcaagaaccaccaacccatatatacaaaaagtcagcccctc

SEQ ID NO: 368487 - DNA, 201 bp, Homo sapiens
gctgggcagtgctggagaaagggattataaccttaaatgaggtttaatttttttgaaatcaaggcataaagatggtcatgagaaaggctttctttatattsggtggctcagttattaaaagatgcttagcttggaaggaagttttgaaaaagaggtttgtggagaggtttggagagcttagaaggttttttaaaattatta

SEQ ID NO: 368488 - DNA, 201 bp, Homo sapiens
aagaaaataatgagttccatttttgatgggttgggcttgaagtgttaagtttaggtatgtgggacatccagagggagaaagtcagatggagatttgggatggaagttataatgtaattgagggttttatagtcacctatagagtccatatgcaggcatgtggaagtaggagtgcttctcctgcacatcactcatgtatctt

SEQ ID NO: 368489 - DNA, 201 bp, Homo sapiens
gggactttctgataactctagacacaaagcatgtcttcagagagataatttattaccaaagtacattattcaagcaatatttaacaccatgttcatgactraaacgcagatggattgaagaagaagcagtcaaaggtggatatgatgttgaaattaaaaacataactgatgagcttggagttcttggagttgctgggccac

SEQ ID NO: 368490 - DNA, 201 bp, Homo sapiens
tctttcaaaaagcaatgattaagccaggcatgctagctcatacctgtaatcccagcactttgggaggccaaggcgggctgatcacttgagttcaggagttygagaccagcctggccaacatggtgaaaccccgtctctactaaaaatacaaaaattggccaggcatggtggtgtacacctgtagtcccagctactcaggag

SEQ ID NO: 368491 - DNA, 201 bp, Homo sapiens
atgaatgtattcacattttatttttcacagtcaaaaagttttcttttttcacggtcaaccagttttcacagtaagtttagaaatcatatggagaacagccrggcgtggtggctcatgcctgtaatcccagcactttgggaggccaaggcaggctgatcacgaggtcaggagttcgagaccatcctggctaacacggtgaaa

SEQ ID NO: 368492 - DNA, 201 bp, Homo sapiens
gaaatcatatggagaacagccgggcgtggtggctcatgcctgtaatcccagcactttgggaggccaaggcaggctgatcacgaggtcaggagttcgagacyatcctggctaacacggtgaaaccccgcctctactaaaaaaatacaaaaaaattagccgggcgtggtggtgggtgcctgtagtcccagccactcgggaggc

SEQ ID NO: 368493 - DNA, 201 bp, Homo sapiens
tctctaccaaaaacacaaaaattagctgggtgtggtggtgcacacctgtaatcccagctacatgggaggctgaggcaggagaattgcttgaacccagtagktggaggttgcagtgagccaagatcaagccactgtactctaggctgggcaaaagagtaatactctgtcttggaaaaaaaaaagtttgaaaagttaaaaaag

SEQ ID NO: 368494 - DNA, 201 bp, Homo sapiens
gtttcaccatttgtatttttaatagagacggggtttcaccatgttggccaggctggtctcgaactcttgacctcatgatctgcccaccttggcctcccaasatacttttctatatagtcatatataggactatatagcacatagtcctaaaccttccatctaaatcatcccatttctgaatctctgtacaacgctatccat

SEQ ID NO: 368495 - DNA, 201 bp, Homo sapiens
tgttgtttgtaatgtgctctttgctgaggcagctgaatgatcaccaggctgatttccatccatgaatgtcttgagctccagctgtaagcagtccactgtgycagacggtaggactttaaggattagtgcaatgttgtgtggccaggagaagccattttgagcagggctatatatcgtgttttacttttgttgtcttccttt

SEQ ID NO: 368496 - DNA, 201 bp, Homo sapiens
tagagacggggtttcaccatgttggccaggctggtctcgaactcttgacctcatgatctgcccaccttggcctcccaacatacttttctatatagtcatayataggactatatagcacatagtcctaaaccttccatctaaatcatcccatttctgaatctctgtacaacgctatccatgttaacttgtagggacttaaca

SEQ ID NO: 368497 - DNA, 201 bp, Homo sapiens
agtacttacctaataggattgtgatgaagattgagttaacatgtgcaaaattattaaacgcaaggtattggataataaatgtcagctttatatggaaggayactgtctgggtgagcctggatatgggcccaagatctttacctatactcccctcacctgcatttggtggtccttttatttacttatggttttatttatttt

SEQ ID NO: 368498 - DNA, 201 bp, Homo sapiens
ttgatgactgtgccaaaatattttgtattagaattagctacgatatagatgaccccaaatggacactttgcttgcaagtgatgctgccaaatgaggacccmggtacagctccacctgtctatcagttgaatgctcattggcttaaagggcaagaacttgtccatttattgaatagcctgaggaaatatatatgtggccacc

SEQ ID NO: 368499 - DNA, 201 bp, Homo sapiens
cctaggccttcacattcactcacctctcactcagactcatctagagcaacttccagtcctacaagcttgattcatggtaaagtaccctagacagctgtacmattttaaatctttttttttttttccttttgagacagggcctcactctgtctgctaggtctgagtggagtggcgcagtcatggttcactgcagcttcaacc

SEQ ID NO: 368500 - DNA, 201 bp, Homo sapiens
actattctgtcctcattgaattatgctggcatctgtaatgtcttttttctgattccttttcttacaccaaatgtgtggtattttccagcaccaacaaccarttctccaattctctagtactaactgggtgtccaacaattccattcaattctgacaccaactcctggaattaacatagaccccacaggttaagggatccgt

SEQ ID NO: 368501 - DNA, 201 bp, Homo sapiens
tgtccaacaattccattcaattctgacaccaactcctggaattaacatagaccccacaggttaagggatccgttccacaagactgctctcacttcggacamcagtctcaagtctcgggagacacccatacttctgaccaactgggtgttcccacaaccctctcctcagatttgataatttgctagaaccaatcacaaaact

SEQ ID NO: 368502 - DNA, 201 bp, Homo sapiens
gatatcagtgaaaatcaaagagaaatagaattatctctgattgatcatggcatttctgttacagaccgaataagtacttttcaggcagactttgatccagyagtttgtcccaaacaggtgaaaatggttctttccaacttgtatgagaataagaaaatagctagtaccacccacagcatctatgcctacagagtatattgt

SEQ ID NO: 368503 - DNA, 201 bp, Homo sapiens
acctttagcaacataagtgtgcctcctgtgtacaggtattagagaaaatttgggtttaaattaattttgcaaggctgaatcattagtttaaatgcaaaagkgctgtgtcactatttaaaagaattgtgtggcagagctcattaaattgaaggatccttctgtactgtgaaaaattaccccccaaatttataagtgggtgat

SEQ ID NO: 368504 - DNA, 201 bp, Homo sapiens
caattacgtgtcttgtggcaggcacattattaacctttagcaacataagtgtgcctcctgtgtacaggtattagagaaaatttgggtttaaattaattttkcaaggctgaatcattagtttaaatgcaaaagggctgtgtcactatttaaaagaattgtgtggcagagctcattaaattgaaggatccttctgtactgtga

SEQ ID NO: 368505 - DNA, 201 bp, Homo sapiens
tgtgccagaaccttttttagatattaccttaatgaattctcttaatattttgcaaggtatatattattcccatgatcagatgaggaaactgaggtttgggwtaagggaacttactcacacgagctttttgattctgatgcccgcatttggtccacttctgtaagctgtcttcctaaattatctttgtcctttgtgatgctt

SEQ ID NO: 368506 - DNA, 201 bp, Homo sapiens
taaacctgattgtttcaaataaactttattttttttaatacaaaaatatttgaagtgagggcccctgcccctcccaaaggtaattcatccataggttactkgttctaataatattaatccatttattaggcatcatcaatgtgccagaaccttttttagatattaccttaatgaattctcttaatattttgcaaggtatat

SEQ ID NO: 368507 - DNA, 201 bp, Homo sapiens
gagtggggaaaggcattatcctgctttgcatacaaggtattaggctatggtttacaaaataaggatccatgcaatgtgagttcaaggtggaatcaggcatyagaagccaggttatttggcccccttggaataaaagacagttgtcctaggaagttgattctagggttttttgcaagtcaaagatgcctccctctgagcagc

SEQ ID NO: 368508 - DNA, 201 bp, Homo sapiens
ctcttgacctcgtgatctgccctgctcggcctcccaaagtgctgggattacaggcgtgagccaccgcgccaggctgatattaagaatttttaacaccgagrtatttgtggagtagatctgagaataaggaaggttgcagagccagctaacaagaggcagactataaaaataaaggcagtttccctgaagcacgatatgtgc

SEQ ID NO: 368509 - DNA, 201 bp, Homo sapiens
tataataaatgaaaggattgaattcgtaatcaaaaacttcccacaaagaaaaccccaggcctggatgacttcactagttaatttgaccagatatgtagagwagacttaatgccaatctctctcaaactcttccaaaatagaagagtgaatgcctctcaactcattctatgaggccagtattgccctgataacaaaatcaga

SEQ ID NO: 368510 - DNA, 201 bp, Homo sapiens
gtaccttgcctgaaggcctaaaacaaagtagatatgcaagaattaattgttgaatgattgaatcaaacataaatttcctgacaccagatatattatttaaygtgaatttattaacagtattaaaaattaaatataaattataattgatatatcagttggaattagatttgtcttcaaatgtcagaaaccaaaataagaagg

SEQ ID NO: 368511 - DNA, 201 bp, Homo sapiens
tttaataaatgtcaaatgaatgtttacttcaattcagacaatctaagcattgcaacattttgattctacatgatctctccttaaattttttgtctttctcyttttcatacagtttttgttcacgctgtacattaacactcattccatgctactgtgattttgcatttagctgtctgtcttcaactgtggggtataaattcc

SEQ ID NO: 368512 - DNA, 201 bp, Homo sapiens
cagactttgatccagtagtttgtcccaaacaggtgaaaatggttctttccaacttgtatgagaataagaaaatagctagtaccacccacagcatctatgcytacagagtatattgtgagaataaacagaccttcttacaggattgtgaggatgatggggaaagagcagctggtgggcatcttcttcatctcatggagattt

SEQ ID NO: 368513 - DNA, 201 bp, Homo sapiens
attcttaatttatttgaagggttgtaattcttaatgattatatctccgtttcatcttcccttccttatcttctctaccagctacaatcactttttccaaaygacagctaaactcctttcctatgacttctgtgacctttctggcatcttctctttccctagtttcatagttactatgtgtctaggactcaatcatttaccc

SEQ ID NO: 368514 - DNA, 201 bp, Homo sapiens
ttgacatcagtcactggactttttgaggtagtagaggctcctgagagagggagaggtttgttaaggagacaggggaagcactagttagcatccgttatgcyatccattatttagcatccaggaatgaattttctaactccatcattccttctatcttattaattgtcagtctaaggaagacctttacattctcctgtactt

SEQ ID NO: 368515 - DNA, 201 bp, Homo sapiens
gaaatgttggtattattattaggttttctgccccaaaatgatatgtatcacatagaaaaactctcatatatgtgagaaataaacttttaatccatttcaawttttttctaaatgaggagtttcaacaggatttgttcccatttacttaaaatacaaaaaatgcaataccttccaactagtttgtaacaacaggcagacaca

SEQ ID NO: 368516 - DNA, 201 bp, Homo sapiens
agagctagatgggtccctggggatcagctggtactcccctcccccatctgaagcagaggaaactgaagcacagagagggaaagtgacctgggggaggccaytgctttagcttaggtcgaacgccaccctctgacctcatcgtggagctttcccacccaccactttcccccacaaagtccttttccacagtgggcttatcag

SEQ ID NO: 368517 - DNA, 201 bp, Homo sapiens
atatttaaaaaaatagatgcagcctgtcccttcacagaaaaagtgatgctttcagtaggtgagaaataattgccttttgcaaaatagtcctgttgggaaarcagcattttgaaaagggatgtttggaaatgttggtattattattaggttttctgccccaaaatgatatgtatcacatagaaaaactctcatatatgtgag

SEQ ID NO: 368518 - DNA, 201 bp, Homo sapiens; identical to SEQ ID NO: 79963

SEQ ID NO: 368519 - DNA, 201 bp, Homo sapiens
gcaacacattctccaagtgggtggcaagagtttgcatgcggcacaccagtgtgtgtctttttcccacatcttccctggttcccagaatagcccattttgtwatctttgctaaatctgataggtaaaaatggcatgtccttgttttgattggtctgtatttaaatatgagcaatgctgaacatctttcgacttcttatattt

SEQ ID NO: 368520 - DNA, 201 bp, Homo sapiens
cattcagtccatagcaccatgaaagatgtattgaattgcaacaaacaagcaaacaaacagatttccagacactactcctatagattctgatttagtggtcyggagaggggcccaggaatctgtattttattataataatatctgtaattcttggtacagccagttcagggaataggtgtttgcaaactgcttacatatgtg

SEQ ID NO: 368521 - DNA, 201 bp, Homo sapiens
ggcttagaggatagaggagttggcttgtagggctttcttaggtatatcattatgtattatgttggtcacagcaacacaggggcctcttcctttgcctgacygtccctgtccacaaatatgggcagtcttgttacggtacttcttactaacatttgtgccttttgtatatttgggttgttcgttttttctttcaaataaatt

SEQ ID NO: 368522 - DNA, 201 bp, Homo sapiens
ttgttatgacatttattagactttgccatgagtacttaagccttctaaacattttattctaatataaattgctatatgagtgtcagttatgtgtttatatrtgggctgacacttttaaatgatttttttgtttaaggattttgggctcgtgaagtaggtaaaatgattggactagaacatcctctcattccggttcaacat

SEQ ID NO: 368523 - DNA, 201 bp, Homo sapiens
ttttgtttaaggattttgggctcgtgaagtaggtaaaatgattggactagaacatcctctcattccggttcaacatcaatatgttgttacatcgactatayctgaagtgaaagctttgaaacgagaactccctgtgctccgtgacctggaaggatcatattatctccgacaggaaagggatgggcttttgtttggtccata

SEQ ID NO: 368524 - DNA, 201 bp, Homo sapiens; identical to SEQ ID NO: 79960

SEQ ID NO: 368525 - DNA, 201 bp, Homo sapiens
ttcaggactcctgggtcaccaatggagttcctccaggtgggttcagcaaatgaaagtgtgtgctagtcagacatgaatggttcatcctctccatggctggrggatggctgtagaataagacaacaacataatactagactttcagatacctgggacattggaggtgacaggtttgaggtgagctctgttctcgtatccctt

SEQ ID NO: 368526 - DNA, 201 bp, Homo sapiens
tgttagggaaaaggttacgtgcatctgaaagattgaaagacagcaacacattctccaagtgggtggcaagagtttgcatgcggcacaccagtgtgtgtctktttcccacatcttccctggttcccagaatagcccattttgttatctttgctaaatctgataggtaaaaatggcatgtccttgttttgattggtctgtatt

SEQ ID NO: 368527 - DNA, 201 bp, Homo sapiens
tattcggagctagcagaactggggaagtttctgatgcttccgacctcttgatgggcagtagtctaacttgcctttagttaccaaagctttccaaattggcytcactctaccctttccctcaggtacagctcagggacgcgggcaggtactagttattatgatgcaggctttttctccgcatggtgttgaacgtttttcttt

SEQ ID NO: 368528 - DNA, 201 bp, Homo sapiens
catcctgtcaatattctacactatcgttagtctattcattaacatttaaatggtttttggttgtttattactgcaaataacgtgcatgtgaaaattcttakgcatctatctttgagtacatatgggagtcggtagcaacagtttttaaaggtgaacttgttagggaaaaggttacgtgcatctgaaagattgaaagacagc

SEQ ID NO: 368529 - DNA, 201 bp, Homo sapiens
tcagatcaaatgatatcccatgaggacaagccagaaacccatacccttatgattctttcctctgtattgtaacttttgaggtatatatatatatatatatwtttttttttttttttttgagacaaagttttgctcttgtgccccaggctggagtgcaatggcgcgatctcggctcactgcaacccggtttcaagcgattct

SEQ ID NO: 368530 - DNA, 201 bp, Homo sapiens
ttcaggaatggagttcccctagatcacagatatcttcaaatctctgggtaatgcaaaatattgtcttctcttcccccattcagttttgcaatgacaaaagwttagattgttatgacatttattagactttgccatgagtacttaagccttctaaacattttattctaatataaattgctatatgagtgtcagttatgtgtt

SEQ ID NO: 368531 - DNA, 201 bp, Homo sapiens
  misc_feature (1)...(201): n = A,T,C or G
gtatccaaaggttccccgtgtaaagtctctcctgccccaatccccttggccagtgaacaattgttaatagtgtcttctgaatctaaccagagacagtctangcataggcaaacacaggtcagtataggttttcctttggctttttgacatcttgctttttacaattatcaatatatcttggagattgttccatatcaacac

SEQ ID NO: 368532 - DNA, 201 bp, Homo sapiens
gtatatacccagtaatgggatggctgggtcaaatggtatttctagttctagatccctgaggaatcaccacactgacttccacaatggttgaactagtttayagtcccaccaacagtgtaaaagtgttcctatttctccacatcctctccagcacctgttgtttcctgactttttaatgattgccattctaactggtgtgag

SEQ ID NO: 368533 - DNA, 201 bp, Homo sapiens
gtggttttgatttgcatttctctgatggccagtgatgatgagcattttttcatgtgtctttttgctgcataaatgtcttcttttgagaagtgtctgttcayatccttcgcccactttttgatggggttgtttgtttttttcttgcaaatttgtttgagttctttgtagattctggatattagccctttgtcagatgagtag

SEQ ID NO: 368534 - DNA, 201 bp, Homo sapiens
tattcacctaacgtcattgtcccagaaaacagtcaagcctcattagaaagctggggtccagggtggagattaattcctgtattatagtctttctgtgtcaygacaagaggtgtcctgcataccaccatctacatgggagtcaggatcggcacaaatgcatctgtgatatggtgggcttctttgcagtggggtcttgtaact

SEQ ID NO: 368535 - DNA, 201 bp, Homo sapiens
tttgtgatgctttgtgctttctggcccacagctggatctaagttgctgacctgccaagtccagcctttacatgaatcttcattctattataaagtctttartctaatattccaaatatttttggaatattattatttaatacatgtcttactctgacagattctcatcttagttgtacagtgatgcaaattatatgctcca

SEQ ID NO: 368536 - DNA, 201 bp, Homo sapiens
ctcccatttgccctcatctcaggggatgaaacaggttcttatggttaattgaagcataacgatcttcttgacaaaccaaattatagtttttttaaaaaaaractgattggattaaatatcagaaactatattattcatacatttaaattttatattaattaaaggttaacttttatgattttgtttcaagaacaataccat

SEQ ID NO: 368537 - DNA, 201 bp, Homo sapiens
tataagtcctcaggttgctttctatttatgactccattgcctctttgatgtttcatttctgatgtttgttccattaatttggtgaatattgatgtcaagcycactcaactatcatatcacatcttctaatattctatttttcttccccattttatttggccatttattcaactaatgtataataactgctagctctgtgcc

SEQ ID NO: 368538 - DNA, 201 bp, Homo sapiens
aatgtaattgagggttttatagtcacctatagagtccatatgcaggcatgtggaagtaggagtgcttctcctgcacatcactcatgtatcttctttggaamaatgtctattcatatcctttgccattttcataattgggtaatttgtctttttattgtttagctatggaagttctttatatattctagatataagaacctt

SEQ ID NO: 368539 - DNA, 201 bp, Homo sapiens
tagatataagaaccttatcaggtacatgatttgcagaacttttctcccattctgtgggttgtttttttactttcttgatggtgtccattgaaatacaaaastttttaattttgatgaagtccagaatatgtatttttccttggttcacatgtacttttggtgtcatatacaagtaaccattgtctaatccaagttcgtgaa

SEQ ID NO: 368540 - DNA, 201 bp, Homo sapiens
acacccagctaatttttgtatttttagtagagatgaggtttcaccatgttggccaggatggtctcaatctcttgacctcgtgatctgccctgctcggcctyccaaagtgctgggattacaggcgtgagccaccgcgccaggctgatattaagaatttttaacaccgagatatttgtggagtagatctgagaataaggaagg

SEQ ID NO: 368541 - DNA, 201 bp, Homo sapiens
cttttatttatttatttatttttgagacagagtcttactctgctgcccagggaatggcacgatcttgtctgactgcaacctccacctcccgggttcaagcrattctcttgcttcagcctcccgaatagctgggattacaagcacgctccaccatacctggataatttttgtatttttagtagagatggggttttcccattt

SEQ ID NO: 368542 - DNA, 201 bp, Homo sapiens
catgctactgtgattttgcatttagctgtctgtcttcaactgtggggtataaattccacttaggcagagtctttacctttcttgttcacccctacacctgyggggcttagaatagtgcctggctccgaacaggcacttagtaaatatggtagttgctgaataagtgtcttttaataagatgcaaatattttaatagttatt

SEQ ID NO: 368543 - DNA, 201 bp, Homo sapiens
tgagacagagtcttactctgctgcccagggaatggcacgatcttgtctgactgcaacctccacctcccgggttcaagcgattctcttgcttcagcctcccraatagctgggattacaagcacgctccaccatacctggataatttttgtatttttagtagagatggggttttcccattttggccaggctggtctcaaactc

SEQ ID NO: 368544 - DNA, 201 bp, Homo sapiens
tcttttccccatacttttgtacttttagctgctaagccagggattctccagagatgttttctattttcctaagatgatactttaaaatcaagaacatgatrtggaaaataaaggggttttgacatcagaaaagggattggttttacattggccatgtgtagttcataacactcagttgtatggaattttatgtaaagcttg

SEQ ID NO: 368545 - DNA, 201 bp, Homo sapiens
actcacgtgaccctgagagtcctatagccagccttggtgaagcctcttggcatttaccagatgctcggaagaaacttgcgaccgccctccaaattcccacstggcttcagttggctcctaaaggtttgctgtactttagggtgctcagtggaatcacatcgtgtataaccacaaaatgtacctggagttttggattttctg

SEQ ID NO: 368546 - DNA, 201 bp, Homo sapiens
caggccaagtcagtcttgcattcttcatggtatgcataattgttccagggctgcgccataattgactaggcttacctggaaagctgcccaggtagatgaasggattgacactgctgtcatattgccaaaccagggatttctgacatcatttagggatgggagaggaagtttttaggactgctggtgcagttttcttttggg

SEQ ID NO: 368547 - DNA, 201 bp, Homo sapiens
aggcgtgagacatcgcgcccggcctgagaaagtcttttataaaatgtaggcactcatttttatgaaagcaaaacaggtgtcttgttgtgggaaaagttagytaacattttcagcatttgctaaagttcctcccatgctcttagaagctgtggttctggctaagttgttgttgttggggatactagcatttctgtgtcttga

SEQ ID NO: 368548 - DNA, 201 bp, Homo sapiens
acattatccttatttttatgctgtcattttgctttttacaataggttttgctattttaagactagatctaattcatacaaagtatagcagagaacccgttkttgatgaatgaatttgggctttataagcagccaatctagattatttggtggccaaatactgatttggtttttcctaaattactctaacacatcactttta

SEQ ID NO: 368549 - DNA, 201 bp, Homo sapiens
gttttatgacactaaatgttgtgtttcaggccaagttttcgccgcacaaactggtttgagcctgtgggctcggagtataaacaggttatgcaaagagtagsggtaactgacctatcaccatttggcaagtttaacatcaaaggccaagattccattagactactggaccatctctttgcaaatgtcattccaaaggtaaat

SEQ ID NO: 368550 - DNA, 201 bp, Homo sapiens
gactggtatcccttttgaacatagatacaaaaatcctcaacaaaatactagcaaactgaattcagtaacatataaaacagattatgcagtatgaccaaatrgaatgtattccaggaatgcagggttggtttaacatctaaaaattaatcaatgtaacaataccacattaatagaataaaggacaaaactacacagttattt

SEQ ID NO: 368551 - DNA, 201 bp, Homo sapiens
gacctttgttccaggtctggctctgtcattaatgtgaaggccttggagatcattttgtgccttttctctgaaaaatgaagatttgggaccagatccttatgtaccccaggtgtggaccaacagcataggcatctcctgcgagcctggcagaatgcagactatggggtcccaccccatacctgctgcttcagaatgtggaat

SEQ ID NO: 368552 - DNA, 201 bp, Homo sapiens
taatttttaaagttttttgtagagatgaggtctccctacgttgtccaggctggtctcaaactcctgggctcaagcagtcctcccacttaagcctcccaaaktgctgggattataggcttgagccactaagcctggccgcattgattttttttttttttttgagacagagtctcactctgttgccaggctggagtacagtgg

SEQ ID NO: 368553 - DNA, 201 bp, Homo sapiens
ctgcccatttatttgctcatgtgcatggttgaaagggaaagaacatgatggtatagcagccaggccataggaaatcaaagcacccctggctctgccctggragtctgtcaaaaatatagacagtgctgtatctgctatgtgtgtcttggctgaacaaagactgagaactactgaagataggaaagtccgataacaaggagc

SEQ ID NO: 368554 - DNA, 201 bp, Homo sapiens
aggcaacagtgtgatgtggctgcacagacctacaaatgctttaaaatccagttgcatggatacaggaggctgaaagcatcaatcctgtaatatatccagawgagaagtgccagtccaggaatcacattttgttccctgtaagtttctgaagggggccatctcagtaaatgatggttgttcatatgaaagatattattattt

SEQ ID NO: 368555 - DNA, 201 bp, Homo sapiens; identical to SEQ ID NO: 79976

SEQ ID NO: 368556 - DNA, 201 bp, Homo sapiens
taaatgtatttaagagttaacatcatcctcatgccaagaccttactgtgtttcagataacggagggcagactttggcagggggtaataactggccccttcraggaagaaaatggagcctgtgggaaggaggcgtccgaggggtgggctttgtggcaagccccttgctgaagcagaagggcgtgaagaaccgggagctcatc

SEQ ID NO: 368557 - DNA, 201 bp, Homo sapiens; identical to SEQ ID NO: 79981

SEQ ID NO: 368558 - DNA, 201 bp, Homo sapiens
ctaaaagcttgctagccatggaaggagtgttattaccatagccgctgttcgtaggtaactgtttggaaattgccagatgagaggatggtcattttcctatygtgtctgaaacatgctatagcagtatccagcattcccagtatcttcaaaggaaagtttcagtcatagacataagtgaatgaaataatcaatagtcaagct

SEQ ID NO: 368559 - DNA, 201 bp, Homo sapiens
ttggtagtatttcaatagaaatatagtttaaaaattttggtatattatgtgcatgtgctgtgagtaattaataaaatgacttaaaaaatgattggcttagrtgtaaggtgaggctttattatgacaaacttttggttaagggatccataaattttgggatcagggcagttcctctaaccttgtacttcctccctacaagaa

SEQ ID NO: 368560 - DNA, 201 bp, Homo sapiens
ctgtaacaagtcacattaactgtacattatttttaccattatatagctttgaaggattgagattttatcacccttactgagtttcaactctgataaaaaawaaaactgttagtgttacatgatagcgcctatattctaaaggcgaatgaggaatagatttgagtttttatgcagtaatgttttaatgccttctgccaccag

SEQ ID NO: 368561 - DNA, 201 bp, Homo sapiens
tatttgagaaaacccattttcttccatgtgaagtctaaattatgggataggccgttgatgccatttaaatctggggtgaaattgagatcattttaggtagmaaagtcttatttcagtgctcactttagtttgatctgttggctctgttatgtctagagatcctctattaggaaaggtttgtatctttcaccagtgggtgtc

SEQ ID NO: 368562 - DNA, 201 bp, Homo sapiens
ggcatcataggaaaagtgccttctccaagaaagaaggggccccaggaggctgtcttacttagatcaaccataaactaccacagatgggtcatttcttataytatttcaaaatatctttgaagatgagaattcatttgtgtccttcatagaccaaagttctttgtgttaccttttcccaaaagtaaattcctttccctttat

SEQ ID NO: 368563 - DNA, 201 bp, Homo sapiens
ctgaagtgatttcctcaagctttaatgcccagtagttattaaaaaccttaaatagacctccagtgttctgacattctaatcacccatgtaagggctgaaaytatttttatggatacatttctttctctgttacacattaattaacaagtactttgtatttcgttttccattatatacataggagaaaagattgccatataa

SEQ ID NO: 368564 - DNA, 201 bp, Homo sapiens
atttctgttcaaatcagatctgactcttaaaggcacccatttattgccccagacctgactgtagatattctgcaggatctacacatacttttatctttatytatatttctatttgcttatgttgaagccgagtgggtcctgggaacataaaggatatagctcaaggatagaggcttttaccataaattgccaaagctcacc

SEQ ID NO: 368565 - DNA, 201 bp, Homo sapiens
actgcagcattttatgttgctgttgtcatgcagaagagaaaggattaatcacggtaactttcatcggcagaggggtgaaacaaatgaaaaaaatgttcagkcacttaatgcttctgtgaaaacccaattagcaccccttcatggttataatttctaattactttttgaactgagaaaaaaatgttcttgctaattagctaa

SEQ ID NO: 368566 - DNA, 201 bp, Homo sapiens
gctgccatcatctttaggctcagtattgaagttcaaatttgtgaatcattattatgaagaaaagcttcatgtgattgtcacatggttgcttggtattagtkttgccaagtatgtgaatagttttatttctggaattctcctatctgtattatcttttaaatatttgtagttcatgcctttgctaatgaagtgtatctgtcc

SEQ ID NO: 368567 - DNA, 201 bp, Homo sapiens
atttagaagacaatacaattcctaagagaaacaataagcctatttactaatacatctattttctacacctcagtcaaatttatagttaaaaactagaatgmattgtctttagggttgaaagcctgtctcatgatgctgatgagccagcgtaaggaagtgtggtgactgtttgagttgtgtctgtctcttggtctgttctct

SEQ ID NO: 368568 - DNA, 201 bp, Homo sapiens
gttaggtggttttcttgtagatgttttgaggtattttcttctgttcaagctagggccagagcaccaaagtgcaattcagtaaaagtaattatatgggggcyaaaacaatgcagctgaagcacatggctctgtaatgcctcattggattcagggttaaaatcaagatgcaaggatgtcagacaggagggtgtgtgtgcccca

SEQ ID NO: 368569 - DNA, 201 bp, Homo sapiens
caaaagcattttctggctcttaggcctgacagaaatttctcctttgggagaaggagaaggtaaggtggacaacatctttaaaaatgtcattttaataataygttaggtggttttcttgtagatgttttgaggtattttcttctgttcaagctagggccagagcaccaaagtgcaattcagtaaaagtaattatatgggggc

SEQ ID NO: 368570 - DNA, 201 bp, Homo sapiens
aaaagaggattgagcaaggttgcttaaggagaaaggaaggattcattatgataggagatcaagcaagacacttgaaaagcatgtcccttctggtagcgggygcctgaagtcccagctactcaagaggctgaggcaggagaatggcatggacccaggaggcggagcttgcagtgagccgagattgagatcacgccactgcac

SEQ ID NO: 368571 - DNA, 201 bp, Homo sapiens
aaagagatgtccaggcttggtatgaggctgctagagccttccttgcttttccttttgtgatctttgagtcaggttgggaaggatgactagggtaagccccrgctgaagcatgcacagggatgttggggtagagatgatgtttcagggcagccctccacggccaagccacacattaaattgtttggggagtagttctaaaaa

SEQ ID NO: 368572 - DNA, 201 bp, Homo sapiens
gaactcctgacctcgtgacccacccatcttggcctcccaaagtgctgggattacaggtgtgagccaccgcgcccagcctgagatttgaaatttatttgtcygaagagggagaaagaaaggaaaagactataagagttacattatttacaagataaatggaaaccagatgttcaggaaaagcaaaagcattttctggctctt

SEQ ID NO: 368573 - DNA, 201 bp, Homo sapiens
cttatttttttcttttgattcctattggtgcccggttgccttcctgccccttgcagcatggcgtggctctgtagttctgtgctgaagtgctgggttggaaycagttcggcatttgcctgtttactgcttctctacacattacagcttccttccttcagatagtgtttgaacagaccgaaaacatgtttttggatgtcatcc

SEQ ID NO: 368574 - DNA, 201 bp, Homo sapiens
tcttggggaaacctacttaggctatgggttctgacttctttcaagtacttcctctgatcttgcggaagtactatggatgggtataggcaaaccccaaaaartccccagaaagagttttagtagagaaactaggtgattaggagtgccactactttgtgcaaaagaggaaaattccccatgctcatgcctcttaaatggctg

SEQ ID NO: 368575 - DNA, 201 bp, Homo sapiens
tgcttcgctcttgggagagtttgagtgtagctgaaatattgtgctctgaactcccatatagataactaatcaattgactgtctggacctctgaaaggggarttgaaagagattctgatatgggagctgccatcttcctctcccccagcaagagattggattttctcctttaagctcatgagactatactgcaaggaactcc

SEQ ID NO: 368576 - DNA, 201 bp, Homo sapiens
gactccttttttcctctcccagtctggaccagtcattctcctacctcagttccccagtcttaccatctgtaaagataaatatatccatctttcttgaaagmgtctaccataaaattctgtaaaaacataaaacctcataaaattttagggaacatatccaatgaaattaaaatttacaaagtaaatctattttgtaaatat

SEQ ID NO: 368577 - DNA, 201 bp, Homo sapiens
atgagttcattttgctcagaccagactgactggacagaacctcccttctgttcaacgggatattatctcaacactgttgaggtgaggagagaaagagcatytatcgccttctgtgcagcagtggtttgcttcgctcttgggagagtttgagtgtagctgaaatattgtgctctgaactcccatatagataactaatcaatt

SEQ ID NO: 368578 - DNA, 201 bp, Homo sapiens
cgtgttttccccatccggagctataaggagagcaaggcttcattgtatagttctctcggtgtcttatgtataagagattaatacatattgaaagaatgcaygctaataaatgaataatttatcatcagctgattcgattagaatcagtctaatgagaacaatagtaatttcatacatcattttcaaggcatttttatttct

SEQ ID NO: 368579 - DNA, 201 bp, Homo sapiens
ccagtgtgtttcataaagggagcacttgccagcaagaagaataggtaggaatattaatgtttcattttatcttcatattattcttgtgtctgtgtcccagrttatagtctttgaggttatattatttccatgtctgcagaatctggatctatattttacaataaaagggcttttgttgcctcatgcaattctcataacaac

SEQ ID NO: 368580 - DNA, 201 bp, Homo sapiens
ctggaagagggcatggacacagcctctccccaccctgctggaaggctgttggtggttcccagctgtccactagcaagccctcctacaacgcccaccattcrgcaccattgcaatgccctccttcagtcctgtttatctcccttgttgccctgcgccttctgtagagttcagtgcacattcctactcctccgtgaagccctc

SEQ ID NO: 368581 - DNA, 201 bp, Homo sapiens
aaaacaacacccaagtttatatagccagtaatttctggagttgggatgcacaccctgaaaggctttgctcccaaagacaatgctatacttcttatgagagwgtgatgtcttcagaaattggtcaggaggaaagttcattttctgatgattgtatggaaatgaaactttggaactgtatgatgtcctggaatactatagtat

SEQ ID NO: 368582 - DNA, 201 bp, Homo sapiens
cttcaccagaattcagctttataggagcaggggccttgtctgtcttgttcaccactatatcattccctgtgcttggcacatagcaagttggtaatttaaaktttgacattgaaatacatgtgtgtgtgtatctatgtgtttataattactggtagaaacaggccaaaaagatccccccaagaatgaataacaacctccact

SEQ ID NO: 368583 - DNA, 201 bp, Homo sapiens
cacacccaagtgcaatcaaatgaaagaactggatatttgaacacagagtgaatcagtcggcactgtaatggggctgctttctaatgttacctctgtaaacrgggctctgtgctgaccttatggtgggcaaacccattacctttgttggagttctaaatgccaccttagggccttgcaagagtttactatccacgttggaga

SEQ ID NO: 368584 - DNA, 201 bp, Homo sapiens
ctcagagcgacattcagagccatttcccagtattatgttgccatttccaagattgtttattcagtaaataaataaacgatgatggcctgggatgcatgagrtactgttataaatactcgagatcagttaagctaaagccaaacctaaaggtctggctaaaacccagtctggaagagtctggaagagggcatggacacagcc

SEQ ID NO: 368585 - DNA, 201 bp, Homo sapiens
ggtcaggaggaaagttcattttctgatgattgtatggaaatgaaactttggaactgtatgatgtcctggaatactatagtatttgtagcattacctaaaartgaatacatgcatatatgtgtgtgtgtgtagagagagacatagagaagatagaagctaacacatgattatagtatagcaataatcaaccccacaaccatt

SEQ ID NO: 368586 - DNA, 201 bp, Homo sapiens
acctccacttactaaacctttgtctcattctttgctccattcctgattttcttacacacttgtattgcttttaggacatgataaatgatacaacttaatargaaaatgataaatctcaaggagaaaacttggcattaatgtaacatttaatctgcagaacaaattgatgttgtagcttccttcttatctttctgtttttat

SEQ ID NO: 368587 - DNA, 201 bp, Homo sapiens; identical to SEQ ID NO: 79973

SEQ ID NO: 368588 - DNA, 201 bp, Homo sapiens
gtgtctaacggttggcatttctcaggaagcatgctgggattatggatgtgaaagttaacatgggttgagagaggactgaggcttcagcaatctcagaatgyctgtctgttgagcttcataaccaagctgccaaattcaaatctgcatctacagattcttgagcacttgaggcgggtgccctctgaagctggaccttttcaa

SEQ ID NO: 368589 - DNA, 201 bp, Homo sapiens
caaagtcattgttttattgtcttacagcctttcctgagcctaaaagtacctccagatggccacttatactccttttaaaccccaaacctaccttttgtgcytaagtaaaaataacttagaagctacaagtcacttattaagttgtaattgacattatatacagatgtttgaaactgttcattcagcttctaagtgcccacc

SEQ ID NO: 368590 - DNA, 201 bp, Homo sapiens
caatttttttcatgatatttgagaatggaaaaatattttaagataaatatttcctttattatatgattgcaaatgtgtatgtataattgtactttcaaacagatagttgactatttcataaacatctatatttattcaagctggtagtagtaacatttggagcttctcactgagaaaatgaggatcaccttaaataggatt

SEQ ID NO: 368591 - DNA, 201 bp, Homo sapiens
aatttttttcatgatatttgagaatggaaaaatattttaagataaatatttcctttattatatgattgcaaatgtgtatgtataattgtactttcaaacagatagttgactatttcataaacatctatatttattcaagctggtagtagtaacatttggagcttctcactgagaaaatgaggatcaccttaaataggattg

SEQ ID NO: 368592 - DNA, 201 bp, Homo sapiens
tttttttcatgatatttgagaatggaaaaatattttaagataaatatttcctttattatatgattgcaaatgtgtatgtataattgtactttcaaacagatagttgactatttcataaacatctatatttattcaagctggtagtagtaacatttggagcttctcactgagaaaatgaggatcaccttaaataggattgtc

SEQ ID NO: 368593 - DNA, 201 bp, Homo sapiens
agttaagactaggaaaaccgattctgcaaccctgaaaacagtgattgacctcaacatcttaatgcagccattgtgtatttatattaactcttttttttgtytgttttgttttttttgagatggagtctcgctctgtcactcaggctggagtacagtagcatgatcttggcttgctgcaatcactgcctcccgggttcaagt

SEQ ID NO: 368594 - DNA, 201 bp, Homo sapiens
aggcacacaatgcatagtaatcatatctgggtaatggggatatctatgccctcaagcatttatcatttctttgtgttaccaacattccaattaaactcttytgattatttaaaaatgtacaataaattattattaactgtagtcaccctattgtgttattaaatactagctcttattcattctatctaagtatatttgtgt

SEQ ID NO: 368595 - DNA, 201 bp, Homo sapiens
ggaacagctccagtctacagcttccaacatgtgcgacgcagaagacgaatgatttctgcatttccaactgaggtactgggttcatctcactggggattgtyggacagtgggtgcaggacaatgggtgtggtgcactgagcctgaggcaaagcagggcgaggcatcgcctcacccgggaagcgcaaggggtcagggaattcc

SEQ ID NO: 368596 - DNA, 201 bp, Homo sapiens
gtatcccgcgcctggctcagagggtcctacgcccatggagcctcgctcattgctagtacagcagtctgagatcaaactgcaaggtggcagcgaggatgggrgaggggcgcccaccattgccaaggcttgagtaggtaaacaaagtggccgggaagctcgaactgggtagagcccaccgcagctcaaggaggcctgtctgcc

SEQ ID NO: 368597 - DNA, 201 bp, Homo sapiens
aaaaccacaaagatggggaaaaaacagagcagaaaaactgaaaattctaaaaatcagagtgcctctcctcctccaaaggaatgcagctcctcaccagcaayggaacaaagctggatggagaatgagtttgatgagttgagagaagaaggcttcagacgatcaaacttctccgagctaaaggaggaagttcgaacccatggc

SEQ ID NO: 368598 - DNA, 201 bp, Homo sapiens
agctaaatctattagctcatccacctgctgactatccatttccggagcccagacatggatctccctgcctgcttcctgggttgagggtcacagggtgacaraattactaggaatgagaaaagctgttacttaatatttggaaacatcattccagtggagatgcagggcacatgaggcatactgcttagcctgtaataattt

SEQ ID NO: 368599 - DNA, 201 bp, Homo sapiens
gattcaggaaatacagagaatgccacaaagatactccttgagaagagcaactccaagacacataattgtcagattcaccaaagttgaaatgaaggaaaaawtgttaacggcagccagagagaaaggtcaggttacccacaaagggaagcccatcagactaacagtcggtctctcggcagaaactctacaagccagaagaga

SEQ ID NO: 368600 - DNA, 201 bp, Homo sapiens
attgttaacggcagccagagagaaaggtcaggttacccacaaagggaagcccatcagactaacagtcggtctctcggcagaaactctacaagccagaagasagtgggggccaatattcaacattcttaaagaaaagaattttcaacctagactttcatatccagccaaactaagcttcataagtgaaggagaaataaaata

SEQ ID NO: 368601 - DNA, 201 bp, Homo sapiens
agccatctcataaaacacacccaagtgcaatcaaatgaaagaactggatatttgaacacagagtgaatcagtcggcactgtaatggggctgctttctaatsttacctctgtaaacagggctctgtgctgaccttatggtgggcaaacccattacctttgttggagttctaaatgccaccttagggccttgcaagagtttac

SEQ ID NO: 368602 - DNA, 201 bp, Homo sapiens
ccgtggcctgggttgagaactggcactcttacctcctgtgtccccagagcctgtttattctataaatcaagagctcccagggctggggaaggctggtgtcyggtgcagagttgaatttgagaccccagtcccactttctacaaagaagagcatctccctggctaagccaggacaaggaggcaggaggtgttaagttttagg

SEQ ID NO: 368603 - DNA, 201 bp, Homo sapiens
aggatgtggaaagagatcatgcagtaaagcaatagcaggtgcaattcctaacttactaaagttattgaagttagtgagttactgaatgaagttactgcccrgggttacaaagctcataagtgataaagccaggatgggatttaatcctctgagccttatgctattccactttaaattataaggcaaataaaatactcacaa

SEQ ID NO: 368604 - DNA, 201 bp, Homo sapiens
gataggtgtctaattatttctaggagaggcataacaatctcagtaggaaacttaaactcacttttatttttaaacagttttattgagatatgattgacatrcaatgaactgtacacacttcaagtatacaattcgataaactttgataggtatatacctgtgaaaccatcaccacatcaagatagtgaacttaactatcat

SEQ ID NO: 368605 - DNA, 201 bp, Homo sapiens
tttgttcatacattcatcaattcatggacattaggttgtttgcactttttggctattatgaataatgctgctgtgaacatccatgtacaagtttttgtatsagcatattttttaagttcttttgggttaatatgtaggagtgaaacgccgtattgttgcaggacttctccttagttcagctaacgatgaggtccttgtctg

SEQ ID NO: 368606 - DNA, 201 bp, Homo sapiens
tccctatatggcatatattaagatattgattatagaaagttatcaacagatttcttaagatactttctgggaaaccaggacttgttttcaaggggaagccrttatcattatatatggacttcttacctaagtgtcctaaaagctagatacccatcttttgctctataggaacaaaatcaagaatttagaacatgtaatcac

SEQ ID NO: 368607 - DNA, 201 bp, Homo sapiens
gactgcctcctcaagtgggtccctgatccctgaaccccgagcaacctaaccgggaggcaccccccagtaggggcagactgacacctcacacggccgggtaytcctctgagacaaaacttccagaggaatgatcagacagcagcattcatggttcacgaaaatccgctgttctgcagccaccgctgctgatacccaggcaaa

SEQ ID NO: 368608 - DNA, 201 bp, Homo sapiens
tcttaatcttagatgtgggttaaaatcagattgcatttttgacaagggtgccaagatagttccattggaactattgaaaagactattggaaaaaatagtcytttcaaaaaaatagtgctgggataactggctacccacatgcagaagaatgaagttgaagaagcatgacatcagcaagatggtagactagaagaccctagt

SEQ ID NO: 368609 - DNA, 201 bp, Homo sapiens
ttctgtggcaagatacacatttgcactccagtgttgaataaaagctactgttctgcaagggtataaaatgctgatttataacaacacgttccaataacagygatctaattctttcaaactatttcttcccaggtcccaggaacagcatggctccagcaaaggatgactcttctcttccagaatattcagcctttaacacat

SEQ ID NO: 368610 - DNA, 201 bp, Homo sapiens
aagagctcctgaaggaagcactaaacatggaaaggaacaactgataccagccactgcaaaaacatgccaaattgtaaagaccatcgaggctaggaagaaastacatcaactaacgagcaaaataaccagctaacatcatgacaggatcaaattcacacataacaatatgaaccttaaatgtaaatgggctaaatgctccaa

SEQ ID NO: 368611 - DNA, 201 bp, Homo sapiens
aaaacatgccaaattgtaaagaccatcgaggctaggaagaaactacatcaactaacgagcaaaataaccagctaacatcatgacaggatcaaattcacacmtaacaatatgaaccttaaatgtaaatgggctaaatgctccaattaaaagacacagactggcaaattggataaagagtcaagacccatcagtatgctgtat

SEQ ID NO: 368612 - DNA, 201 bp, Homo sapiens
gacttagactcccacacaataataatgggagacattaacaccccactgttaacattagacagatcaatgagacagaaagttaacaaggatatccaggaatkgaactcagctctgcaccaagcggacctaatagacatctacagaactctccaccccaaatcaacagaatatacattcttttcagcaccacaccacacctat

SEQ ID NO: 368613 - DNA, 201 bp, Homo sapiens
aaatgtaagaattaaaactataaaactcttagaagaaaactcaggagtaaagctttgtgatcttgggtcagacagtagtttcttagataaaagcaacacargagaaaatacataagtcgaactacatcaaaatgcaaacttttattctcaaaatgatattctcaaggaagtgaaaaatcaacccacagaataggagaaaat

SEQ ID NO: 368614 - DNA, 201 bp, Homo sapiens
agcggacctaatagacatctacagaactctccaccccaaatcaacagaatatacattcttttcagcaccacaccacacctattccaaaattgaccacatakttggaagtaaagcactcagcaaatgtaaaagaacagaaattatagcaaactgtctctcagaccacagtgcaatcaaactagaactcaggattaagaaact

SEQ ID NO: 368615 - DNA, 201 bp, Homo sapiens
cattatttacaatagcagctccttcgactgcttcagtttttctttgttccaagccacagactatgtttgccatttctaggggacatgacttctctaagcamtttccaattctgtgtagtttttctgcttttcagctcaataatcagcctataggttgtttgaagacatttcataaggttgattgacaaaaaggaaaaccaa

SEQ ID NO: 368616 - DNA, 201 bp, Homo sapiens
gaactgaaggagatagagacacaaaaaacccttcaaaatatcaatgaatccaggagctggttttttgaaaagatcaacaaaattgatagaccgctagcaaractaataaagaagaaaagagagaagaatcaaatagatgcaataaaaaatgataaaggggatatcaccactgatcccacagaaatacaaactaccatcaga

SEQ ID NO: 368617 - DNA, 201 bp, Homo sapiens
aaaaactctcaataaattagatattgatgggacgtatctcaaaagaataagagctatctatgacaaacccacagccaatatactgaatgggcagaaactgraagcattccctttgaaaactggcacaagacagggatgccctctctcaccactcctattcaacatagtgttggaagttctggccagggcaattaggcagga

SEQ ID NO: 368618 - DNA, 201 bp, Homo sapiens
caatggttgaactagtttacagtcccaccaacagtgtaaaagtgttcctgtttctccacatcctctccagcacctgttgttccctgactttttaatgattrccgttctaactggtgtgagatgatatctcatagtggttttgatttgcatttctctgatggccagtgatggtgagcattttttcatgtgttttttggctgc

SEQ ID NO: 368619 - DNA, 201 bp, Homo sapiens
acattatttacaatagcagctccttcgactgcttcagtttttctttgttccaagccacagactatgtttgccatttctaggggacatgacttctctaagcwatttccaattctgtgtagtttttctgcttttcagctcaataatcagcctataggttgtttgaagacatttcataaggttgattgacaaaaaggaaaacca

SEQ ID NO: 368620 - DNA, 201 bp, Homo sapiens
taatttatagattcaatgccatccccatcaagctaccaatgactttcttcacagaactggaaaaaactactttaaagttcatatggaaccaaaatgagccygcattgccaagtcaatcctaagccaaaagaacaaagctggaggcatcacactacctgacttcaaactatgctacaaggctacagtaactgaaacagcatg

SEQ ID NO: 368621 - DNA, 201 bp, Homo sapiens
taaatgatgagttaatgggtgcagcacaccaacatggcacatgtatacatatgtaacaaacctgcacgttatgcacatgtaccctagaacttaaagtattaaaaaaaaaaaaagaaatacataggagagcttggaccacttgatgttgagagctctttttactaggaaagctgatggttttgtaattctgccagttttcag

SEQ ID NO: 368622 - DNA, 201 bp, Homo sapiens
gaatatatatattcattatatatataagatatatatatcatatatatgatatatatatcttacatatatatatcttacatatatatgatatatatatctthtatatatcttacatatatatgatatatatatcttacatatatatcttacatatatatgatatatatatcttacatatatatatcttacatatatatgtaa

SEQ ID NO: 368623 - DNA, 201 bp, Homo sapiens
tcatatatatgatatatatatcttacatatatatatcttacatatatatgatatatatatcttatatatatcttacatatatatgatatatatatcttacwtatatatcttacatatatatgatatatatatcttacatatatatatcttacatatatatgtaagatatatatatatcgaacttccttgaactgagcatat

SEQ ID NO: 368624 - DNA, 201 bp, Homo sapiens
gtggagttggacaagtcacacatataacctttctaagcctcagttaactcatctgtaaaattgctgtaacatagggtggtttcattaaatgagatagaatrtgtaaattattatcatactgtctagtatgtagacaacatttaatatgtggttgccattactgatattattatttgtttggattaggtccattgaggccgt

SEQ ID NO: 368625 - DNA, 201 bp, Homo sapiens
ctagtgctgaagacccagatagcagtacccagagcagacccatactgcactgtcaggtcagcgatgcacctgcacgttcttccctccagacatcgcagccragaccttcatcacccccaggcagggcatctgttgggatgtcctgcaccatggtctacacgaacatagacgcttcagcatgaccatgcagctggagtagaa

SEQ ID NO: 368626 - DNA, 201 bp, Homo sapiens
agtgagtagaatgatttctatactgaatatttataagaacctttaataatgatccccaaatctttttttccctggtcattgttcaagaactcccctgtccsccttcccagccattgcctttagtaatcaattgctggctgggaatcacctaccctctttctcctttctctccttcgccaggtggttgccatgttgctgcta

SEQ ID NO: 368627 - DNA, 201 bp, Homo sapiens
aggggaggagtcctggtctctggtctttcctagttatttacagaagaagaacaataaggaagagagttactctataatctaagaaacagaagttgcaaacmtgctacgtgacacagtctccaggacttaattttccccttggcataatttagagggtcctgaaaatttatattcttttataaaagtgatggtaatgtcttt

SEQ ID NO: 368628 - DNA, 201 bp, Homo sapiens
atattcagataattggaaaaatagttgctaggtaattggcttaaatcctcagttttcttctacatatttgacattttatggatgcaccttaacacttaacmaggtaaagtcttaagagaactgtgtattattctttgagggagccaccattttacacataagcaaactggcttagagaagttaagtaacttgttcaaggtc

SEQ ID NO: 368629 - DNA, 201 bp, Homo sapiens
  misc_feature (1)...(201): n = A,T,C or G
taaaaggtgattcttaagagtggtccccagatcacactttgaggaatactatgttggtagtatttcaatagaaatatagtttaaaaattttggtatattangtgcatgtgctgtgagtaattaataaaatgacttaaaaaatgattggcttaggtgtaaggtgaggctttattatgacaaacttttggttaagggatccat

SEQ ID NO: 368630 - DNA, 201 bp, Homo sapiens
atatatatcttacatatatatatcttacatatatatgatatatatatcttatatatatcttacatatatatgatatatatatcttacatatatatcttacrtatatatgatatatatatcttacatatatatatcttacatatatatgtaagatatatatatatcgaacttccttgaactgagcatatttattgactaaat

SEQ ID NO: 368631 - DNA, 201 bp, Homo sapiens
agcataaagacctatgcagggcttatcaaacttcaagactctgctgactagagatgcaaaataaaatcatgagggaattagcaggcaccagtgagacctgyaggctttgagaaatctcttgaggtaagtgagaaagacagcttcctatgtgagcagaggttcatttattttgattcaagttaagggttaagggcaacttga

SEQ ID NO: 368632 - DNA, 201 bp, Homo sapiens
catggcggctcacgcctgtaatcccagcactttgggaggccgaggtgggcggatcacctgaagtcagcagttcgagaccagcctggccaacatggcgaaamcccatctctactaaaaatataaaaaattagccagatgtggtggtatgcccctgtagtcccagctactcagaggctgaggcaggagaatcgcttgaacctg

SEQ ID NO: 368633 - DNA, 201 bp, Homo sapiens
cggagattgcagtgagctgagatggcaccactgcactccagcctgtgtgacagagcaagactctgtctcaaaaaaaaaaaaaaaaaaaaaaaagcaaaagyaaatggcaatcacagttgcccacagatccttacttacatcatgaggcacgagctatggtttcccttagctccctgtgggcagtggggaagcagtctagca

SEQ ID NO: 368634 - DNA, 201 bp, Homo sapiens
tgtgtataatctttagagttttttagtgcaagatcatgtcatctgcaagtagaagaagttttacttcctcctttctaatctagataccttttatttcattktcttgcctaattaccctggataggacctccagtgcaatattgagtagaagtggcatgagtggacatacttgtcttgtttccaatcttagaggggaagctt

SEQ ID NO: 368635 - DNA, 201 bp, Homo sapiens
tgggaggattgactgagccagggaggtcaaggctgcagtgagtggtgatcatgccattgcactccagcctgggcaacagagcaaaaccctgtctcaaaaawaattaatttcaacagtttatttttatcttttcatgatctggccactagaagattttaaattacatttgtggctcacattttatttccattagacagtgct

SEQ ID NO: 368636 - DNA, 201 bp, Homo sapiens
catgatatgattttaatcttctccacatatgtaattttaaatagccacattaaaaaactaaaaagaaacacgtgaaattaattttagtaattagatattcygtatatccaaaatattatttcaatttataatcaatataaaaagttattgatgagatgttttacagtcttttacacacacatatatacacatacatatgta

SEQ ID NO: 368637 - DNA, 201 bp, Homo sapiens
gaataacaacctccacttactaaacctttgtctcattctttgctccattcctgattttcttacacacttgtattgcttttaggacatgataaatgatacarcttaataggaaaatgataaatctcaaggagaaaacttggcattaatgtaacatttaatctgcagaacaaattgatgttgtagcttccttcttatctttct

SEQ ID NO: 368638 - DNA, 201 bp, Homo sapiens
aggagaatggcgtgaacctgggaggcggagcctgcagtgagcggagatcgcgccactgcactccagcctgggcgacagcgagactctgtctcaacaaaagaaaaaaaaaaaaaaaagcgaattaaaactacattttaaaagcctggttctcatcacagtttttggctgttagggataggactggtgcaggcaacattgctc

SEQ ID NO: 368639 - DNA, 201 bp, Homo sapiens
ggagaatggcgtgaacctgggaggcggagcctgcagtgagcggagatcgcgccactgcactccagcctgggcgacagcgagactctgtctcaacaaaagaaaaaaaaaaaaaaaagcgaattaaaactacattttaaaagcctggttctcatcacagtttttggctgttagggataggactggtgcaggcaacattgctcc

SEQ ID NO: 368640 - DNA, 201 bp, Homo sapiens
aaggtggaggggtagagtggcccatttttctgaatttttaagtactgcagcaggaggtattgcacacatatgtgggcacatgaggatatgagttcattttkctcagaccagactgactggacagaacctcccttctgttcaacgggatattatctcaacactgttgaggtgaggagagaaagagcatctatcgccttctgt

SEQ ID NO: 368641 - DNA, 201 bp, Homo sapiens
ttgttgaaaagagtgttctttcctcattgcaccctttgcacccttgtcaagactcaattgaccatagacgtatgacttacaattctattccattgatctayatgcctatccttatgccagtgcctcactgtcttgattgctgtagctttgtattacaaaggtttcagaattagaaaatgcaagtcttccaattttgttatt

SEQ ID NO: 368642 - DNA, 201 bp, Homo sapiens
aaataatacaaaagatcgatgaaattaaaagttggtttttgaaacgattaacaaaactgacaaataattagctagatgaatcaagaatgtaaatggtccamataaaatcaccaacaaaaaaggagacattgcaactgataccatagaaatacaagtgatcatgagagactattatgaacaactatatgccaacaaattaga

SEQ ID NO: 368643 - DNA, 201 bp, Homo sapiens
ggcgggagaattgcttgaacccgggagacggagattgcagtgagccgagattgcgccactgcactccagcctgagcaacagagcaagactccatctcgcgsgggggaagtggggaaagaaagaaatacaaacaagtaaggtgaatttaaatagcatgacaatacatgtggagaagaaaataaagtaggtcaagtgatcttg

SEQ ID NO: 368644 - DNA, 201 bp, Homo sapiens
cttgagtctgggagattgagactgcaatgagccatgatcaagccactgtactccagtctgggcaacaaaatgagaccccatctcaaaaaataaaaataaakttaaaagatcattcaccattatcaagtgggatttatcccaaagttgcaagaatggttcaacatatacaaatccataaacatgacacattacatcaacaga

SEQ ID NO: 368645 - DNA, 201 bp, Homo sapiens
attgcgccactgcactccagcctgagcaacagagcaagactccatctcgcgggggggaagtggggaaagaaagaaatacaaacaagtaaggtgaatttaartagcatgacaatacatgtggagaagaaaataaagtaggtcaagtgatcttgactcaggaaggtgtcttcaaggaggtagtatgagcagaggcctgaatga

SEQ ID NO: 368646 - DNA, 201 bp, Homo sapiens
caacaaaatgagaccccatctcaaaaaataaaaataaatttaaaagatcattcaccattatcaagtgggatttatcccaaagttgcaagaatggttcaacrtatacaaatccataaacatgacacattacatcaacagaatgaagtataaaaaccacatgaccatctcaatagatacataaaaaggatttgatacaattca

SEQ ID NO: 368647 - DNA, 201 bp, Homo sapiens
acattacatcaacagaatgaagtataaaaaccacatgaccatctcaatagatacataaaaaggatttgatacaattcaacatcgcttcataatcaaaacastcaactaattagttatagaaggaccacagctcaacacgataaaggccatatatcataagcccatagcaaacatcgcactgaatgggaaaaagttgacagc

SEQ ID NO: 368648 - DNA, 201 bp, Homo sapiens
taaaacttgaactttttttgtgtcagtttttatagtaaggtgacattgaggctattatacactaaagaacatttcgaatctaacagtgttctaaatgggcrtattttaaggaaatacagtcaagtgccatgtggcattctttggatgcatgtaattccaattagaattaattgtacatattctctctttttctttaaaaga

SEQ ID NO: 368649 - DNA, 201 bp, Homo sapiens
ccatctcaatagatacataaaaaggatttgatacaattcaacatcgcttcataatcaaaacactcaactaattagttatagaaggaccacagctcaacacrataaaggccatatatcataagcccatagcaaacatcgcactgaatgggaaaaagttgacagcctttcccctaacatctgaaacaagacaacgatgctcac

SEQ ID NO: 368650 - DNA, 201 bp, Homo sapiens
gagaatggcgtgaacctgggaggcggagcctgcagtgagcggagatcgcgccactgcactccagcctgggcgacagcgagactctgtctcaacaaaagaaaaaaaaaaaaaaaagcgaattaaaactacattttaaaagcctggttctcatcacagtttttggctgttagggataggactggtgcaggcaacattgctcca

SEQ ID NO: 368651 - DNA, 201 bp, Homo sapiens
gcctcggtgaaattccatctctataaaaagttaaaaaattaaccaagtgtggtggtaagcgcctgtagtcccagctacacaggagactgaggttgagaccsgggggcaggggggtagatggcgggaaattgcttgagcctggggaggcagagtttgcagtgagccaggatggtgccactgcactccagtccaggtgacaga

SEQ ID NO: 368652 - DNA, 201 bp, Homo sapiens
aagagaacacacaaaaaatgaaaagatatctcatattcatagatttgaagaataaatattgtgaaaatgatcttactaccaaaagcaatctacagagtcartgcaatccctatctaaataccaataacattctcaacagaaattaaaaaatcctaaaatttacatgcacccacaaaagaccctatagccaaagcaatcctg

SEQ ID NO: 368653 - DNA, 201 bp, Homo sapiens
agatgaacatgcataagaaagtggagattattgatatcaaaaatttccagaggagtgaggaagggatggcagtgagacaacaatggaaaacgttttctctaaaaaaaaaaaaaagggaaaaaaacaaaaacaaaaacagaaaactcaccacacaccaggcattttccttctaaatccaagagagggatctttcatgtgatt

SEQ ID NO: 368654 - DNA, 201 bp, Homo sapiens
ggatcttttcagcctgtctccccaccctccttcccataggcagctcctgtttattggtttcttgatatcgcttggaggcatgttatgcatatgagaaaatmgattttatatttatttttcccttgtttaaaacctcaagattaaaaatattaatttaaaaattctccagcttttctaatagaatttgtgtactgcatttag

SEQ ID NO: 368655 - DNA, 201 bp, Homo sapiens; identical to SEQ ID NO: 80032

SEQ ID NO: 368656 - DNA, 201 bp, Homo sapiens
agattattgatatcaaaaatttccagaggagtgaggaagggatggcagtgagacaacaatggaaaacgttttctctaaaaaaaaaaaaaagggaaaaaaamaaaaacaaaaacagaaaactcaccacacaccaggcattttccttctaaatccaagagagggatctttcatgtgattattggagactactcaaatttaagt

SEQ ID NO: 368657 - DNA, 201 bp, Homo sapiens
cacctgtgggtatttctcatcgggtgggacgagagactgagaaaagaaataagacacagagacaaagtatagagaaagaacagcgggcccaggagaccggygcttagcatacagaggacctgcaccggcaccggtccccgggtttcctcagtatttattgattactattttcactatctcagcaagaggaatgcggcagga

SEQ ID NO: 368658 - DNA, 201 bp, Homo sapiens; identical to SEQ ID NO: 80033

SEQ ID NO: 368659 - DNA, 201 bp, Homo sapiens
tcactacagccttgaactcctgggctcaagggatcctcttgcctcagcctcctgtgttgctgggactacaggcatgcaccaccatgctcaaattattattwttattattatagtagtagtagtagtagtagtagtagtagtagtagtagtagtagtacagaccaggtctcagtatgttgcctaagcttgtctcaaactcct

SEQ ID NO: 368660 - DNA, 201 bp, Homo sapiens
tgtaggccacatttatgcttctctccacccaaacatctcagtggagtaaagagtagcagagcagcattgctgccaacatgtctcgcctcccgccacagggsggcttttctcctatctcagaattgaacaaatgtacaatcgggttttataccgagacattcagttcccaggggcaggcaggagacagtggccttcctctat

SEQ ID NO: 368661 - DNA, 201 bp, Homo sapiens
ttgaactcctgggctcaagggatcctcttgcctcagcctcctgtgttgctgggactacaggcatgcaccaccatgctcaaattattattattattattatagtagtagtagtagtagtagtagtagtagtagtagtagtagtagtacagaccaggtctcagtatgttgcctaagcttgtctcaaactcctggctggcctca

SEQ ID NO: 368662 - DNA, 201 bp, Homo sapiens
tgaggcaggagaatggcgtgaacccgggaagcggagcttgcagtgagccgagattgcgccactgcagtccgcagtccggcctgggcgacagagcgagactycgtctcaaaaaaaaaaaaaaaaaaaagagtcatatctatgaacttggcagtcatgctttaagttaatatttacagacccctttcccataattatttaact

SEQ ID NO: 368663 - DNA, 201 bp, Homo sapiens
gtcaccagcataggtattttccacacagctgcaagtgaaacttcacaatggacttggccgctatttgcttacacttgccatctgtgcaaccgctctacccrtggcctcccccgctttgtggttgtcttctaacaggagcagtccacgcaaagccttcctgaatacttaacaaaattttaaaaaatataatagatactgtcc

SEQ ID NO: 368664 - DNA, 201 bp, Homo sapiens
tcaagaactagaaattcaggtctctctacactcaggctaggggccttcccacagccctatgactcattcattcattatttgtgaaatctttaaaaaaatcygtattttatttttaaaatagaaaatacattcacatggcttaaaaacttaaaagctgcaaaagggcttacagtgaaaatctaccaaaacacacacacacac

SEQ ID NO: 368665 - DNA, 201 bp, Homo sapiens
tgaactcctgggctcaagggatcctcttgcctcagcctcctgtgttgctgggactacaggcatgcaccaccatgctcaaattattattattattattatagtagtagtagtagtagtagtagtagtagtagtagtagtagtagtacagaccaggtctcagtatgttgcctaagcttgtctcaaactcctggctggcctcaa

SEQ ID NO: 368666 - DNA, 201 bp, Homo sapiens
attttttaagttcttttgggttaatatgtaggagtgaaacgccgtattgttgcaggacttctccttagttcagctaacgatgaggtccttgtctgtcccayggccatgaaaattcaggctcgcagatggtttgaagggtgagtaaagcagggttttattgggtgaaaaggaaaaaagggggaaacagggacccactgaaag

SEQ ID NO: 368667 - DNA, 201 bp, Homo sapiens
aggctggagtacagtggtgtaaccatagctcactgcagcctctacctcctgggctcaagtgatcctcctgccttagcttcccaaatagctgggactgcagkcatgcaccactacacttggctaattttttttttttttaattttttatgtttggttagcgattggatcacactatgttgcctggctggtgtgagccacagt

SEQ ID NO: 368668 - DNA, 201 bp, Homo sapiens
cagtgtccagactgttttttctttttctttcccttttctttcttaactctaccccaagacaggccccagttgaagatctgcattggtgttgtggtggggtscaggcacctaaaatctcaaaagaagacccacatttctgaccggagtgtgagataatctctgttattttcctctttttttttttttttttttttttttttg

SEQ ID NO: 368669 - DNA, 201 bp, Homo sapiens
gagtattactacctcaacaatataactcttccaatttaagaatatgagatgtctttctgtttatttagagggtttttttttttttttaagacagagtctcrctctgctctgttgcccaggctggagcacagtgttggctcactataacctctgcctcatgggttcaaacaattctcctgcctcagcctcctgagtagctgg

SEQ ID NO: 368670 - DNA, 201 bp, Homo sapiens
agggaaaagactaaaaatagattatttcagctgtgatgagctcatttgagatgatcatccaaatattggtgttgtcagacaaaaactttaatgcagctatkgtaaccattctccatgagacaaagttgaacactcttgaaatgaatggaaaaatagcagtgaaatagaaactaaagccaaacaaatgaacaaacaaaacaa

SEQ ID NO: 368671 - DNA, 201 bp, Homo sapiens
acctattttggacatttcatataaatggaatacaatagatgtcctttcatctatgttgtagcatgtattgttcccttttatggctcaataatattccatgrtatggacatgccacattttgttcatacattcatcaattcatggacattaggttgtttgcactttttggctattatgaataatgctgctgtgaacatccat

SEQ ID NO: 368672 - DNA, 201 bp, Homo sapiens
ggagcacagtgttggctcactataacctctgcctcatgggttcaaacaattctcctgcctcagcctcctgagtagctgggactataggcacccaccaccamgcctacctagtttttgtatttttaatagagatggggtttcaccatgttggccaggctggtcttgaactcctgacctcaaatgatccacctgccttggcct

SEQ ID NO: 368673 - DNA, 201 bp, Homo sapiens
ggttgtgtaaccaatattttcatcacctcagaaagaaaccactcaactattagcagtcactcttcatttcctcattccaccagcccttggaaaccaccagycttcttattatctatgtgactttacctattttggacatttcatataaatggaatacaatagatgtcctttcatctatgttgtagcatgtattgttccctt

SEQ ID NO: 368674 - DNA, 201 bp, Homo sapiens
cattgatcattttgcaaccttaatgaacttgttagccctaattgtgtgtgtgtgtataatctttagagttttttagtgcaagatcatgtcatctgcaagtagaagaagttttacttcctcctttctaatctagataccttttatttcattttcttgcctaattaccctggataggacctccagtgcaatattgagtagaag

SEQ ID NO: 368675 - DNA, 201 bp, Homo sapiens
ttaaagtatccaattcaatggttttttgtacattcacaaggttgtgtaaccaatattttcatcacctcagaaagaaaccactcaactattagcagtcactsttcatttcctcattccaccagcccttggaaaccaccagtcttcttattatctatgtgactttacctattttggacatttcatataaatggaatacaatag

SEQ ID NO: 368676 - DNA, 201 bp, Homo sapiens
attgatcattttgcaaccttaatgaacttgttagccctaattgtgtgtgtgtgtataatctttagagttttttagtgcaagatcatgtcatctgcaagtagaagaagttttacttcctcctttctaatctagataccttttatttcattttcttgcctaattaccctggataggacctccagtgcaatattgagtagaagt

SEQ ID NO: 368677 - DNA, 201 bp, Homo sapiens
gaaatatgtgtagggactgggtacaggttggaggcaatggaggagactaattagcagatggggtaagtagttactggtaaattcaagaactagaaattcargtctctctacactcaggctaggggccttcccacagccctatgactcattcattcattatttgtgaaatctttaaaaaaatccgtattttatttttaaaat

SEQ ID NO: 368678 - DNA, 201 bp, Homo sapiens
ataatccctgtattacttttggacatttgggtcattcctaaatatctcaaggtaaagaatcaacccatcatatttctgagttaggaattgcctatattccrtgtaaaataaaaatagattttatttctgagtcatttgttatgcataattttagacaataaaatgaaggaattttttgactgtctcaaaatgagttacttg

SEQ ID NO: 368679 - DNA, 201 bp, Homo sapiens
tattgcctactcaaaattattaaaaataacatcccaaggactgcttcatacatactaaataatccctgtattacttttggacatttgggtcattcctaaayatctcaaggtaaagaatcaacccatcatatttctgagttaggaattgcctatattccatgtaaaataaaaatagattttatttctgagtcatttgttatg

SEQ ID NO: 368680 - DNA, 201 bp, Homo sapiens
caagaagaaatagaaaacctgaatagaccaattataagtaatgagattgaatcttgtaataaaaagtctcccattgaagagaagcccaggacctgatgacytcattgcagaattctacaaaacatttaaagaactaataaaaattcttctcaaactcttccagaaaattgaagaggagggaattcttctaaacttattcca

SEQ ID NO: 368681 - DNA, 201 bp, Homo sapiens
tgtgcaaccgctctacccgtggcctcccccgctttgtggttgtcttctaacaggagcagtccacgcaaagccttcctgaatacttaacaaaattttaaaaratataatagatactgtcctagcatgaaggcgctgcctttgtgatttttaggaattaacccaaataaaatatgaaaaataaactaccgagtgctttaacgc

SEQ ID NO: 368682 - DNA, 201 bp, Homo sapiens
tcacagccaggtgtggtgtctcatgcctgtaatctcagggctttgggaggccaaggcaggaggatcacttgaacctaggagttcaagaccagcctgggcarcagagggagatcccatttctgcaaaaaatttaaaaattagccaggcatggtggcatgctcctatagcccaggtactagggaggctgaggtgggaggattg

SEQ ID NO: 368683 - DNA, 201 bp, Homo sapiens
agccaggtgtggtgtctcatgcctgtaatctcagggctttgggaggccaaggcaggaggatcacttgaacctaggagttcaagaccagcctgggcaacagwgggagatcccatttctgcaaaaaatttaaaaattagccaggcatggtggcatgctcctatagcccaggtactagggaggctgaggtgggaggattgcttg

SEQ ID NO: 368684 - DNA, 201 bp, Homo sapiens
gggttccaggtagtgtgagcaaccacattatctgattgggctggtcaggtactgcccaacacctgctgggtgtcacaagtgtgactttcctagcagtcctggaagtgattccgcttgattctgcctcctgcctaaattaacctgtaaagagccttaccatttccttcagggcaggcatgcatgtagtgcttccagatcaca

SEQ ID NO: 368685 - DNA, 201 bp, Homo sapiens
gctcaccacaaaatattctcattcagagattcctgctcagagaattaccccacagtcattctaaatgtgtcaccaggcactcgggccccacttgcccggcyagcctcactccaggcactccttgtcatgttctcacttcctagacacttgtcatctccatgcagatcatcgtactgtcatgaatatgcttttccctatgcc

SEQ ID NO: 368686 - DNA, 201 bp, Homo sapiens
gcctcctcttcaccttctgtcatgattgtaagttcctgaggcctccccagccatgattcctgtacagcctgtggaaccctgaaccaattaaacctctcttrtttatacctagtctcaggtagttctttataacaatgcaaggacggacgaatacactatcaccacagcactgtgtgctgcagggttcttggtgcaacttgc

SEQ ID NO: 368687 - DNA, 201 bp, Homo sapiens
caaattagaaaagggagaaataaaactcataatctcagagattacttttgaaaatcattttcattatggcgatgccattctgtttcctaatctgttacatrtgcaacttccccctctcattagagacggttttctgaaatttcactgtgatgtgctttgggtgtagatcatcatttattcatcatgctgagtactcagaga

SEQ ID NO: 368688 - DNA, 201 bp, Homo sapiens
tcatagagaaacatgcacacacaccaggggtcaccaaatctctcatagatcaggagattcaccattctgcagtaaagcataaagtctcaaggatgcatacrtaaattataccattaggatgactacaatttaaaaaatgaaagaaagaaaaggagagagagtggaaaaaggaaggaagggagggagggagggaggggaaaa

SEQ ID NO: 368689 - DNA, 201 bp, Homo sapiens
gcttaaggctaggagttcaagaccagcctggccaacatgatgaaaccccatctctaccaaaaaatacaaaaattagtcaggtgtggtggcacacgcctgtygtcccagctactcaggaggctgaggcaggagaactgcttgaacccaggagggcagaggttgcagtgagctgagatagcgccactgcattccagcctgggc

SEQ ID NO: 368690 - DNA, 201 bp, Homo sapiens
gatttattttggaattgtgtggccctccgtcccaccttcccctattttttctgtacagaactcctattatttggtcaccaggtcagtcctctaatttttcytagttttttttttccctctcctgttttctttatttttcttctagtatttgggaaatcttactgttttgtaagcttcctattgaatttattttaactgcca

SEQ ID NO: 368691 - DNA, 201 bp, Homo sapiens
gaaagaaagaaaaggagagagagtggaaaaaggaaggaagggagggagggagggaggggaaaataagaattgttgaggatgtagagaaattggaacccttrttcactgttaatgggaaagtaaaataatgtagcctctatggacaataacattgtgtgattactcaaaatattaaaaatagaattatcataggatccagca

SEQ ID NO: 368692 - DNA, 201 bp, Homo sapiens
acatgatgaaaccccatctctaccaaaaaatacaaaaattagtcaggtgtggtggcacacgcctgttgtcccagctactcaggaggctgaggcaggagaaytgcttgaacccaggagggcagaggttgcagtgagctgagatagcgccactgcattccagcctgggcaacagagtgagaccctctctcaaaaaaaaaaaaa

SEQ ID NO: 368693 - DNA, 201 bp, Homo sapiens
attgtgtggccctccgtcccaccttcccctattttttctgtacagaactcctattatttggtcaccaggtcagtcctctaatttttcctagtttttttttyccctctcctgttttctttatttttcttctagtatttgggaaatcttactgttttgtaagcttcctattgaatttattttaactgccatgtctgttaatta

SEQ ID NO: 368694 - DNA, 201 bp, Homo sapiens
tgaatcctcatgataatggattctctgggaactattattgtcccatcttgcagatgtgagaactgaagcacaaagggcataagtaacttgccccaggtcaygcagccaggcagagcctggctccactacagtatcctgcctcccagatgatgatctcagtgttctcataggacctcatggtatagcagagctttccatatg

SEQ ID NO: 368695 - DNA, 201 bp, Homo sapiens
ggagggcagaggttgcagtgagctgagatagcgccactgcattccagcctgggcaacagagtgagaccctctctcaaaaaaaaaaaaaaaaaagaaagaargaaaagaaagaaaattatacagcctgaaacacagaaaaaaggaagaaaaacagtgctgcagggacctatggaataatatcaaaaggtctagcatttatgt

SEQ ID NO: 368696 - DNA, 201 bp, Homo sapiens
agtaaaataatgtagcctctatggacaataacattgtgtgattactcaaaatattaaaaatagaattatcataggatccagcaatcccacttctgagtatrtacctaaaagaattaaaagcaggggcttgaacaggtatttgtacactcatgtttgtagcagcattactcagcattactcagaacagccaaaaggtagtag

SEQ ID NO: 368697 - DNA, 201 bp, Homo sapiens
ttgatcattttgcaaccttaatgaacttgttagccctaattgtgtgtgtgtgtataatctttagagttttttagtgcaagatcatgtcatctgcaagtagaagaagttttacttcctcctttctaatctagataccttttatttcattttcttgcctaattaccctggataggacctccagtgcaatattgagtagaagtg

SEQ ID NO: 368698 - DNA, 201 bp, Homo sapiens
tcatctttaatttttatgtgtgttatgaagtagggtttgtcaaggttttgtttgttttttttaacgtagatatcagaatactctagcattatttttttttkaaaaaactatttccctattggttggtttggcacccttgctaaaaagcaaatgaccatttaaatgtggttgttttactaggcactccattccagttccatg

SEQ ID NO: 368699 - DNA, 201 bp, Homo sapiens
aaataatgtagcctctatggacaataacattgtgtgattactcaaaatattaaaaatagaattatcataggatccagcaatcccacttctgagtatatacstaaaagaattaaaagcaggggcttgaacaggtatttgtacactcatgtttgtagcagcattactcagcattactcagaacagccaaaaggtagtagcaac

SEQ ID NO: 368700 - DNA, 201 bp, Homo sapiens
aattgcttgaacccgggagacggagattgcagtgagccgagattgcgccactgcactccagcctgagcaacagagcaagactccatctcgcgggggggaagtggggaaagaaagaaatacaaacaagtaaggtgaatttaaatagcatgacaatacatgtggagaagaaaataaagtaggtcaagtgatcttgactcagga

SEQ ID NO: 368701 - DNA, 201 bp, Homo sapiens
gggcagtggcgcgatctcggctcactgcaagctctgcctcccaggtcccgggttcacaccattctcctgcctcagcctcccaagtagctggcactacaggygcccgctaccatgcccagctaatttttttgtatttttagtagagacgggcttcactgtgttagccaggatggtctcgatctcctgacctcgtgatctgcc

SEQ ID NO: 368702 - DNA, 201 bp, Homo sapiens
gtgattactcaaaatattaaaaatagaattatcataggatccagcaatcccacttctgagtatatacctaaaagaattaaaagcaggggcttgaacaggtrtttgtacactcatgtttgtagcagcattactcagcattactcagaacagccaaaaggtagtagcaacccaaatgtccatcagtgaatggatgaataaaca

SEQ ID NO: 368703 - DNA, 201 bp, Homo sapiens; identical to SEQ ID NO: 79983

SEQ ID NO: 368704 - DNA, 201 bp, Homo sapiens
tgtaattccaattagaattaattgtacatattctctctttttctttaaaagaaataagcttggctgggcgcagtggctcatgcctgtaatcccagcaattkgggaggcctaggtgggtggatcactggagtccaggagttcgagagcagcctcggtgaaattccatctctataaaaagttaaaaaattaaccaagtgtggt

SEQ ID NO: 368705 - DNA, 201 bp, Homo sapiens
aaaatgaaactctcaaaggtcaaggacaaagagaggatcctaaaagcagcagagaaaagaagcaaataacacgtaaagtagctctaattcatgtggcaacrgattactctaaggaaactaaacaggccaggagggagtggaatggcattttcagattgctcaaagagagacaaaaaaagcctgccatccaagaatattgta

SEQ ID NO: 368706 - DNA, 201 bp, Homo sapiens
gttaaaaaattaaccaagtgtggtggtaagcgcctgtagtcccagctacacaggagactgaggttgagacccgggggcaggggggtagatggcgggaaatygcttgagcctggggaggcagagtttgcagtgagccaggatggtgccactgcactccagtccaggtgacagagtgagactctgtctcaaaaaaaaaaaaaa

SEQ ID NO: 368707 - DNA, 201 bp, Homo sapiens
tcatgtttgtagcagcattactcagcattactcagaacagccaaaaggtagtagcaacccaaatgtccatcagtgaatggatgaataaacaaaatgtggcatatatatatatatatatatatatatatatatatatatatacacatatatataccatgaaatagtatccagcactaacagtgaaagaaattctaatacatg

SEQ ID NO: 368708 - DNA, 201 bp, Homo sapiens
acttttcaaagtataaaacctacaggtaaaattaagtacctggacaaactcagaatactctcttactgtattgctggtatgcaatccactcataactctastatgaagctcaaaagacatgagccaaggagtgaaaacagcctctagaagctagaaaggcaaggaaatggatttgctagaaaggcaaggaaatggaacttc

SEQ ID NO: 368709 - DNA, 201 bp, Homo sapiens
catgtttgtagcagcattactcagcattactcagaacagccaaaaggtagtagcaacccaaatgtccatcagtgaatggatgaataaacaaaatgtggcatatatatatatatatatatatatatatatatatatatatacacatatatataccatgaaatagtatccagcactaacagtgaaagaaattctaatacatgc

SEQ ID NO: 368710 - DNA, 201 bp, Homo sapiens
tataacatttttctttttaatcctcattcatccctgattttgccctttccctgcatgcatcttttttaaatctccacatcttttggtggctacatccgtgyattagtccattttcacactgctgataaagacatacccaagactgggtaatttataaagaaaaaggtttaatggactcacagttccatgtggcttgggaga

SEQ ID NO: 368711 - DNA, 201 bp, Homo sapiens
cactgcagcctcgacctcccaggctcaagtgatcctcccacctcagtctccttggtagctgggactacaggcacaggccaccatgccttgctaattttttytatttttatttttagtagagatgagatcatggcatgttgcccaggctggtctggaattcctggagtcaagctagcctcctgccttagcctcccaaagtgt

SEQ ID NO: 368712 - DNA, 201 bp, Homo sapiens
ggtggaaggtgagggaagaacaaaggcacatcttacatggcagcaggcaaaagcaaaatgagagccaggtgaaaggggaaaccccttttaaaatcatcagmtctcgtgaagcttgttcactaccacgagaacagtatgggggaatctgcccctgtgattcaattatctcccactgggtctcccctacaacacatgggaatt

SEQ ID NO: 368713 - DNA, 201 bp, Homo sapiens
ctaggttgttgtatctgcttctgcatttaacctgttatgatatattatttttagtaaaagttgaagaaaaatctggccccacaaagatgtgtagttggaaaagggagggctattttaatatccttttcatataattgtgggtattctactcaatattacaccaaaagttaagaagtggtcattgcttaaagtttagttgct

SEQ ID NO: 368714 - DNA, 201 bp, Homo sapiens
agtatatgttggaccaggatttgacccagggcacgtggccctagggttgatgcctataaccactaagccatattgcctactcaaaattattaaaaataacrtcccaaggactgcttcatacatactaaataatccctgtattacttttggacatttgggtcattcctaaatatctcaaggtaaagaatcaacccatcatat

SEQ ID NO: 368715 - DNA, 201 bp, Homo sapiens
catgaatagatcaatgctgtctcccaggatcgagttctcaatctcaagggaatggattagtcgccatgagagtgggttgttataaagtgaggctcttcctsctctttggtccctctttacctgcacctgcctctccttccacttctctgccatgttatgatgcagcacaaaagccctcaccagcaactgatgccagtgcct

SEQ ID NO: 368716 - DNA, 201 bp, Homo sapiens
taggttgttgtatctgcttctgcatttaacctgttatgatatattatttttagtaaaagttgaagaaaaatctggccccacaaagatgtgtagttggaaaagggagggctattttaatatccttttcatataattgtgggtattctactcaatattacaccaaaagttaagaagtggtcattgcttaaagtttagttgctg

SEQ ID NO: 368717 - DNA, 201 bp, Homo sapiens
gtgtccgttgtgcttttcctgcatccactggtcgtcccgggcttatgaaattggccttttttcccctcaatctgaatacgattgtcatatttctaagaccytgaagttattatgaccatattaaatacagtaaatgggaactgttggataccacctgcatgccttcacagagtacatatgctgtttactcaacaaaaatat

SEQ ID NO: 368718 - DNA, 201 bp, Homo sapiens
aggttgttgtatctgcttctgcatttaacctgttatgatatattatttttagtaaaagttgaagaaaaatctggccccacaaagatgtgtagttggaaaagggagggctattttaatatccttttcatataattgtgggtattctactcaatattacaccaaaagttaagaagtggtcattgcttaaagtttagttgctgt

SEQ ID NO: 368719 - DNA, 201 bp, Homo sapiens
agggcgtgggctgggagcaaagacgaggggagaggtaaaatgaaggggtgctcgccgtgggtgcgaccctggcccgtgggaacccagcggtgataggttasgagtgtcccaccaaagattatttttttccaggttctcaacacccctggaatgaaacctgatgctaggttgatttttcttaggctgctgacattcctttca

SEQ ID NO: 368720 - DNA, 201 bp, Homo sapiens
ggttgttgtatctgcttctgcatttaacctgttatgatatattatttttagtaaaagttgaagaaaaatctggccccacaaagatgtgtagttggaaaagggagggctattttaatatccttttcatataattgtgggtattctactcaatattacaccaaaagttaagaagtggtcattgcttaaagtttagttgctgta

SEQ ID NO: 368721 - DNA, 201 bp, Homo sapiens
gcaggcggagcggtcctgaggtgggaggctggggagggcgtgggctgggagcaaagacgaggggagaggtaaaatgaaggggtgctcgccgtgggtgcgamcctggcccgtgggaacccagcggtgataggttaggagtgtcccaccaaagattatttttttccaggttctcaacacccctggaatgaaacctgatgctag

SEQ ID NO: 368722 - DNA, 201 bp, Homo sapiens
cccggcccttgaggccgcgggcgctggcaggcggggctcggaccgccgacccagttatgggtcccggcggcttctcgccccaacctcgctcttccaggccrgcagcccgccgcggcctctgcgcatgcccggctctggcgccccgcggacccgcgccccggccgccgggttgggcgggtggctttgtctttcgttttctga

SEQ ID NO: 368723 - DNA, 201 bp, Homo sapiens; identical to SEQ ID NO: 79991

SEQ ID NO: 368724 - DNA, 201 bp, Homo sapiens; identical to SEQ ID NO: 80025

SEQ ID NO: 368725 - DNA, 201 bp, Homo sapiens; identical to SEQ ID NO: 80026

SEQ ID NO: 368726 - DNA, 201 bp, Homo sapiens
gtgagccattgtacctggcatacttgtttggttttaagcccacaaattagacatcatcatcattctatttagattttctcatatttaccattttctttacrtatcatttctacttccattcagagcttctgggatcaaaccgtagttcctggcattttggactggttgatagtctccaggatattcaggcagttaagtgtc

SEQ ID NO: 368727 - DNA, 201 bp, Homo sapiens
aggtcatgcagccaggcagagcctggctccactacagtatcctgcctcccagatgatgatctcagtgttctcataggacctcatggtatagcagagctttmcatatggtgtgctgcaatattgatctactgaggagcctgggcagggccagaatagcatctaccctgagcagccttgttcacttgtgtgggtgctatccaa

SEQ ID NO: 368728 - DNA, 201 bp, Homo sapiens
tgatcactgtgatttatggagtagagggggacaatgacatctgatagaataccaaagttaaatatgctcaatttaaggagctgttatttattcagagatcstgtctttcctaccttttttgctgtttattttataaaataatggtgatggtagttgaagtttgttattttgttttgttttaaattaattcattaagatttg

SEQ ID NO: 368729 - DNA, 201 bp, Homo sapiens
ggtgccagaagagaaattattacaacatataaaaaataggattatggccggaagaaaagttattataacatacaacaaataggattgtgggatcctgaatrtgttattcaggatccatattgtaaaacatattttctttgaaattttaatcattagaaactatatagttcaaatatattctcaaggctaatccatccatat

SEQ ID NO: 368730 - DNA, 201 bp, Homo sapiens
atttgcagttaatagagatatttgtttatggagccttaaaaataaaccaaatgaatggaaacaccatacattcaaggagacactgaggccatgtgtacatyttactgagcagagaatttagcatagaaggttagagatgggatttgggggtcagtctgcctgagctccaaacccagtcctgtcacctgctcaaccacatga

SEQ ID NO: 368731 - DNA, 201 bp, Homo sapiens
tgatacgtgtaaagtattttaaatggtgtgttgcacataaaaaatgttctatcagtgcaagctactgttatccaaactagcctagccaaaacaaatgaaamcccaaaataactagtttggttgttataggcatgggtaaaacttgccaacttcaccggtttagaggtaggtcttcatcactaagtggcaaatggcaaacaa

SEQ ID NO: 368732 - DNA, 201 bp, Homo sapiens
ttcaacatcgcttcataatcaaaacactcaactaattagttatagaaggaccacagctcaacacgataaaggccatatatcataagcccatagcaaacatygcactgaatgggaaaaagttgacagcctttcccctaacatctgaaacaagacaacgatgctcacttttaccacttttgttcaacagagtaatggaagtcc

SEQ ID NO: 368733 - DNA, 201 bp, Homo sapiens
atgtttgtagcagcattactcagcattactcagaacagccaaaaggtagtagcaacccaaatgtccatcagtgaatggatgaataaacaaaatgtggcatwtatatatatatatatatatatatatatatatatatatacacatatatataccatgaaatagtatccagcactaacagtgaaagaaattctaatacatgct

SEQ ID NO: 368734 - DNA, 201 bp, Homo sapiens
gaaaaagttgacagcctttcccctaacatctgaaacaagacaacgatgctcacttttaccacttttgttcaacagagtaatggaagtcctagccagagcartcaggcaatagaaagaaataaaggacctccaaaatggaaaggaggatgtcaaattgtccctatttgcagatgatatcatcatatatacagaaaaccctaa

SEQ ID NO: 368735 - DNA, 201 bp, Homo sapiens
cagccaaaaggtagtagcaacccaaatgtccatcagtgaatggatgaataaacaaaatgtggcatatatatatatatatatatatatatatatatatatayatacacatatatataccatgaaatagtatccagcactaacagtgaaagaaattctaatacatgctacaacatggatgaaccttaaagacattatgctaag

SEQ ID NO: 368736 - DNA, 201 bp, Homo sapiens
gccaaaaggtagtagcaacccaaatgtccatcagtgaatggatgaataaacaaaatgtggcatatatatatatatatatatatatatatatatatatatayacacatatatataccatgaaatagtatccagcactaacagtgaaagaaattctaatacatgctacaacatggatgaaccttaaagacattatgctaagca

SEQ ID NO: 368737 - DNA, 201 bp, Homo sapiens
ttttacgggtggaatgacctagtgcaatggttttcaacctctgtttggtgttacagctctgtttggggttagcagctgattgactgtcccttagtggccagggggagaggacttcctcaggccatctcttcatcccactccaggtatcccagctcaagaatagtaggtttcaggtctctagttataggaaatacacaatgg

SEQ ID NO: 368738 - DNA, 201 bp, Homo sapiens
ccttggaagtgctttggtctctgttcagatagtacccttctcttttcctttgttcccttctgagaaaactcctaagaattatttattcctccatgtctttaaaatacttctgtcttcgtccagcagcacagggtggtcagtgtaagaaacccgtgagagagcctggggaatagcaccattgaagctgattagtgggaaagc

SEQ ID NO: 368739 - DNA, 201 bp, Homo sapiens
aataataggaacgtttaatgtccataagaagactttcatgaggccaggtgtggtggctaccacctataaatcccagcactttgggaggccaaggcaggtcrcttgagccagagttaaagaacagcctggccaacatgaccaaaccctgcctctactgaaaacagaaaaattagctgggcgtggtggcaggtacctgtagtc

SEQ ID NO: 368740 - DNA, 201 bp, Homo sapiens
agtactatatgtcattgtagataatttgcaaactacaaaaaataaaaataattggctgggcgtggtggctcatgcctgtaatcccagcactttgggagacygaggtgggtggaccacctgaggtcaggagttcaagaccagcctggccaacatggtgaaaccccgtctctactaaaaatataaaaactagccgggtgtggt

SEQ ID NO: 368741 - DNA, 201 bp, Homo sapiens
gcagcacagggtggtcagtgtaagaaacccgtgagagagcctggggaatagcaccattgaagctgattagtgggaaagcctggaaacctctaaagtggtgrggaacagccataatcccagggtaggcaagaggtcctgcaggtctgaattcagctctacatggttccaaggagagctccagccccaaattccacactcctg

SEQ ID NO: 368742 - DNA, 201 bp, Homo sapiens
tctttgtaaattaatatttaaaataatactttctaacttttggattaccagattagactttattgtataataaaccacatgattttagatttaaagtcagyttttgaaagaaatccttattatttgttcattaattttaattaaaaatttgataatgtttctgataaaaaatattaatatgtggctgctgggcacagtggt

SEQ ID NO: 368743 - DNA, 201 bp, Homo sapiens
gagaatcgcttgaacccatgaggtggaagttgcagtgagccgagattgcgccgctgcacttcagcctgggtaaaagagcgagactctgtctcaaaaaaaawaataataataatataaataattattgttaaaaatgaaagaatgtatttatttcatctttcgatcatgatacttaccaacaatgttggcataaactccacc

SEQ ID NO: 368744 - DNA, 201 bp, Homo sapiens
ctccagccccaaattccacactcctgcaaggccccagcaagcatggctcagaccacaaggagaactgcttcaaaggcattattttgcctgaggaaaaacawatacacctatcctgcaggtgccgggcttgatcttggctgttctgcagtaatgatcctgccccatctgagaccacgactcactttggaagtcagacgtggc

SEQ ID NO: 368745 - DNA, 201 bp, Homo sapiens
gcaggagaatgggcatgaacccaggaggtggagcttgcagtgagccgagatcatgccactgcactctagcctgggcaacagagcaagactctgtctcaaaaataataataataataataataataataataataataataataataaaataaaaaatgaatatttccttcacaaaggtttggtgtgtttttttctccctgt

SEQ ID NO: 368746 - DNA, 201 bp, Homo sapiens
tcaatactgaccacccatccacttctaaagtgttcacaattatctcttagttggaggaattcatccttgaatagatttctcaggattctttgaattcttgmatgtttattaaaacattttctacaaccttgataattgaacaccagctcaaccggttaaaataaaacccttgtcccacactttcttgctttgagtttcttg

SEQ ID NO: 368747 - DNA, 201 bp, Homo sapiens
caggagaatgggcatgaacccaggaggtggagcttgcagtgagccgagatcatgccactgcactctagcctgggcaacagagcaagactctgtctcaaaaataataataataataataataataataataataataataataataaaataaaaaatgaatatttccttcacaaaggtttggtgtgtttttttctccctgtg

SEQ ID NO: 368748 - DNA, 201 bp, Homo sapiens
ggagtgggatttggacactttcatttacttcaggtgcttcaagagcgctgtgtattgctatagtgaagtgcagtttctttgctaaatgtagcccctttcttttttttttttttttttaattatactttaagttttagggtacatgtgcacattgtgcaggttagttacatatgtatacatgtgccatgctggtacgctgca

SEQ ID NO: 368749 - DNA, 201 bp, Homo sapiens
aggagaatgggcatgaacccaggaggtggagcttgcagtgagccgagatcatgccactgcactctagcctgggcaacagagcaagactctgtctcaaaaataataataataataataataataataataataataataataataaaataaaaaatgaatatttccttcacaaaggtttggtgtgtttttttctccctgtgg

SEQ ID NO: 368750 - DNA, 201 bp, Homo sapiens
gaatcacctccctatttgaaagtcagctgattagcaatcttaattccatctgcagcctgaatgcccctttgccgtgtaacctaacatattcacaggtcctggggattgggacgtggatatctttagggggccattattctgctaccacaaatacctgctgtgttgccctagacttcatgaaaaatacaacaagtcgcttat

SEQ ID NO: 368751 - DNA, 201 bp, Homo sapiens
gagtgggatttggacactttcatttacttcaggtgcttcaagagcgctgtgtattgctatagtgaagtgcagtttctttgctaaatgtagcccctttcttytttttttttttttttaattatactttaagttttagggtacatgtgcacattgtgcaggttagttacatatgtatacatgtgccatgctggtacgctgcac

SEQ ID NO: 368752 - DNA, 201 bp, Homo sapiens
aataagcattgttaatattttggtgggctttttctatttctatttagggagagctttcaacatttcaccgttcagtatgatatcgattgcagatttttttwatactctttatcagtgtaagaaaactccctcctattcttagtttgtagaatttttaaaacagctattgctgttgtccacaggaaagtccctttgtgtctg

SEQ ID NO: 368753 - DNA, 201 bp, Homo sapiens
ggagaatgggcatgaacccaggaggtggagcttgcagtgagccgagatcatgccactgcactctagcctgggcaacagagcaagactctgtctcaaaaatwataataataataataataataataataataataataataataaaataaaaaatgaatatttccttcacaaaggtttggtgtgtttttttctccctgtgga

SEQ ID NO: 368754 - DNA, 201 bp, Homo sapiens
actttcatttacttcaggtgcttcaagagcgctgtgtattgctatagtgaagtgcagtttctttgctaaatgtagcccctttctttttttttttttttttwaattatactttaagttttagggtacatgtgcacattgtgcaggttagttacatatgtatacatgtgccatgctggtacgctgcacccactaactcgtcat

SEQ ID NO: 368755 - DNA, 201 bp, Homo sapiens
tactgtctctctcagcagttgggggcagattctgatgattagttaagtcatgatgaaaagataataccagaaattaggctattaatgaggaagaaaacagcaggctgtgaacaggtctgataactttcctgtatatcctaggaactcacctgggaatactaggtgaaaacattggcattccacacatctggtctattaccc

SEQ ID NO: 368756 - DNA, 201 bp, Homo sapiens
attcagggttaaaatcaagatgcaaggatgtcagacaggagggtgtgtgtgccccactctcatccaggtccaccagcagacctcactactcaatcttagcttttttttttttttttttaaatggacccggatgtattctcagtacctcaaatagctgttaaaattagacttgatgtaagatcactttgtcatcttggaaat

SEQ ID NO: 368757 - DNA, 201 bp, Homo sapiens
aggtatatctcccaatgctatccctcccccctccccctccccaccacagtccccagggtgtgatattccccttcctgtgtccatgtgatctcattgttcarttcccacctatgagtgagaatatgcggtgtttggttttttgttcttgcgatagtttactgagaatgatggtttccaatttcatccatgtccctacaaagg

SEQ ID NO: 368758 - DNA, 201 bp, Homo sapiens
ttcagggttaaaatcaagatgcaaggatgtcagacaggagggtgtgtgtgccccactctcatccaggtccaccagcagacctcactactcaatcttagcttttttttttttttttttaaatggacccggatgtattctcagtacctcaaatagctgttaaaattagacttgatgtaagatcactttgtcatcttggaaatt

SEQ ID NO: 368759 - DNA, 201 bp, Homo sapiens
ccacagtccccagggtgtgatattccccttcctgtgtccatgtgatctcattgttcaattcccacctatgagtgagaatatgcggtgtttggttttttgtycttgcgatagtttactgagaatgatggtttccaatttcatccatgtccctacaaaggacatgaactcatcattttttatggctgcatagtattccatggt

SEQ ID NO: 368760 - DNA, 201 bp, Homo sapiens
aagaaaagaggtttatttggctcgtggtgctgcagactctacaagaagcatggcaccagcatttgcttctgggtaagggcttcaggaagcttccagtcatmatggaaggtgaagttgagctggcgtgtgcagatcacatggcaggagaggagagagagagagatgccaggctctttctaacaaccagccctctcaggaact

SEQ ID NO: 368761 - DNA, 201 bp, Homo sapiens
gtgagaatatgcggtgtttggttttttgttcttgcgatagtttactgagaatgatggtttccaatttcatccatgtccctacaaaggacatgaactcatcmttttttatggctgcatagtattccatggtgtatatgtgccacattttcttaatccagtctatcattgttggacatttgggttggttccaagtctttgcta

SEQ ID NO: 368762 - DNA, 201 bp, Homo sapiens
gtggtgctgcagactctacaagaagcatggcaccagcatttgcttctgggtaagggcttcaggaagcttccagtcataatggaaggtgaagttgagctggygtgtgcagatcacatggcaggagaggagagagagagagatgccaggctctttctaacaaccagccctctcaggaactaatacagtgagaacttataactg

SEQ ID NO: 368763 - DNA, 201 bp, Homo sapiens
agaggagagagagagagatgccaggctctttctaacaaccagccctctcaggaactaatacagtgagaacttataactgcaaagatggcatgaagccattygtgagggatccacctccatgacccagacagctgccattaggctcccactggggatcaaatttaaacatgaggtttggaggagggtcaaatatctaaacta

SEQ ID NO: 368764 - DNA, 201 bp, Homo sapiens
aaaagtacagtgctttttaaaaaagacttagttcttttagagcagttttagattcatagcaaaattgagaagaaggtacagagatttcccatataaccctkgtccccacacatgcttacatcccccattatcaacatccccaccagagtggtacatctgtacagctggtgaacctacattgacaacataatcatgtaaagt

SEQ ID NO: 368765 - DNA, 201 bp, Homo sapiens
ccttctttctctttttcagcaggataattccccatactagtgacactacagactgaaagtaacatattcataaaatatctttcttttaaaaacagcccccygtcagccgggtgcactggcccacacctgtaatcccagcactttgggaggccgaggcgggtggattgtgaggttaggagtttgagaccaccctgaccaaca

SEQ ID NO: 368766 - DNA, 201 bp, Homo sapiens
ggctgttagggataggactggtgcaggcaacattgctccagctgaccaggaaatggtcttccagaatccctctgatttaatgagccctatctcctagctckgcgtgggttttgagtaaccatgaaaaaaagcttttaagtgatcaaaatgatatattgattctttctttctaatgccttgaatattctttcagcaaagctg

SEQ ID NO: 368767 - DNA, 201 bp, Homo sapiens
aaagaatatttaacactattagttttctatcactgatcaaacaaattaccataaactcaatggcttaaaacaaccaatacttaaccatcactctattttcrtattttttgaatgttttcagttctgtaggtcagaagtctgacatgggtctcactggactaaatccagggtaccgattggcagggctgcagtcccttccaa

SEQ ID NO: 368768 - DNA, 201 bp, Homo sapiens
tttgttttgttttaaattaattcattaagatttgtttttatatttccttacttggcaaatacaaagttgtgaatcacaacccagattttttgaaattgtaytgggcattgaaatcccaaaccactgctatcaacagctaactgtgagtttggcgtgtggacactgggacacctgaaaccatgtcttggttacgtcaggagc

SEQ ID NO: 368769 - DNA, 201 bp, Homo sapiens
caagtatgcatggctctcttttatccctgaggctaagccattgctgaactgccccagcccaatggcctgacatccccaagtcgagcaactgttttgtgctyccctgtggggccaagcagaggtggagctgctccacctcccaccaccctttcctcctcaggccagagctgaagcagtgtcctgattcctgggaaaacagta

SEQ ID NO: 368770 - DNA, 201 bp, Homo sapiens
ttgtattgggcattgaaatcccaaaccactgctatcaacagctaactgtgagtttggcgtgtggacactgggacacctgaaaccatgtcttggttacgtcrggagccttattgattatttatattatgtatgaatcctgtggtgttaacagtactttgcaacctttagtacttagctgaactgtattagattatcagggag

SEQ ID NO: 368771 - DNA, 201 bp, Homo sapiens
agagaaggagccaatactatgatccacaccctgtggcccacatagctaccatgctatgccatcttggagttggaactatggctggatgtgtcttgctctgkgggcaagtatgcatggctctcttttatccctgaggctaagccattgctgaactgccccagcccaatggcctgacatccccaagtcgagcaactgttttgt

SEQ ID NO: 368772 - DNA, 201 bp, Homo sapiens
cctgcagagtagaagaaattaatgtcaaaaccagatgttcctctgtgggccttgctggattcataagtcaggataaagccagcgtggatgcatgcatgtcaaaaaaaaaaaaaaaaagtcttggccagtgttgtagagaaatgaagtgttgtttcatctgcagttcctctccagtccttgctggttgggagcactggctcc

SEQ ID NO: 368773 - DNA, 201 bp, Homo sapiens
aaattcatgacagagttgttaactggcaggtttgttatttcctataagtacaaggaagggaagtattaaaataattcatgcccattagagagaggaaattmacattcccttaaaaattgttttccagtgaaggaagcccatcccccagaattgagctgctgcataatattgacccgaacttcgtggactcttcaccgtgtg

SEQ ID NO: 368774 - DNA, 201 bp, Homo sapiens
agctagcagaagagaacacacaaaaaatgaaaagatatctcatattcatagatttgaagaataaatattgtgaaaatgatcttactaccaaaagcaatctrcagagtcaatgcaatccctatctaaataccaataacattctcaacagaaattaaaaaatcctaaaatttacatgcacccacaaaagaccctatagccaaa

SEQ ID NO: 368775 - DNA, 201 bp, Homo sapiens
ttccctactgcaaggaggtaaacaaaaggatcccagcagccccatcaacaccgtggatacctacagacctgagcactggggtcccctgcaatcctcacagrcactaagcctagctgagggagctgcctgaagtccacatgtccgtgcttcccccagagaaggagccaatactatgatccacaccctgtggcccacatagct

SEQ ID NO: 368776 - DNA, 201 bp, Homo sapiens
gtgcctaccttaaagaagctaattagagagctctgctttgttcctataagcctggagcccaagtatttgctgtaataaaaacacccattaccttgattcaygtaaaaccaggacatttcatgaacttgtgtgattattgaaaacccgtttatcattaacaccgtcagtcattatttagagatttttatttcacaaataaaa

SEQ ID NO: 368777 - DNA, 201 bp, Homo sapiens
taagcctggagcccaagtatttgctgtaataaaaacacccattaccttgattcacgtaaaaccaggacatttcatgaacttgtgtgattattgaaaacccrtttatcattaacaccgtcagtcattatttagagatttttatttcacaaataaaatcaacaatctgataaagacagtattgctcatgcagctaaactatag

SEQ ID NO: 368778 - DNA, 201 bp, Homo sapiens
ttagttagagaaagctgtacacacaccaaagaaacacaaattaaagaaacatgtggtagaaaaacagaaagaggaattctgttatttcatgcatatttaaytctagtgggaaagtcattgctggcaaagtgttattgaaatcttgagctaataagtagaagcattctagaagatatgcaccgcctcctcatagtgctttat

SEQ ID NO: 368779 - DNA, 201 bp, Homo sapiens
ttgtgtgattattgaaaacccgtttatcattaacaccgtcagtcattatttagagatttttatttcacaaataaaatcaacaatctgataaagacagtatwgctcatgcagctaaactatagcatctaccaaaaccaaaaaataaggaaaatacctagataacagattgcaatatgtattttttaatatacagtctataat

SEQ ID NO: 368780 - DNA, 201 bp, Homo sapiens
tcttccccaacagcagctaagccttctctaaaaggaattaccattaccttgaaataacttcctatgtacactcataggaagagtgtacactttgctgaggytgaccgtacttgtggttttcatcaggaagtgaaagtttatgtggcctacatgtgtgagcccactctatactagggatagcaggagtgtggtgctctaggg

SEQ ID NO: 368781 - DNA, 201 bp, Homo sapiens
gccatacaaataaaaccaaaattggcccagtgcagtggctcacgcctgtaatcccagcactttgggaggctgaggtgggtggatcatctgaggtcaggagwtcgagaccaacctggctgacatggtgaaactctgtctctactaaaattacaaaaaaattagctgggcgtgctggtggatgcctgtaatcccagctactca

SEQ ID NO: 368782 - DNA, 201 bp, Homo sapiens
agtggattgtttagcttagggatctccaaagcgcatatcatcgagggactgccttgttttccagtggctctctccatggaggatttaaaggtagatatgtrtcacactgggccttacttatgtctgaataatgaaaggctatgtcaatgggaaaagggaatttagggtgggaaaaggcaaggaattttctttttttttatt

SEQ ID NO: 368783 - DNA, 201 bp, Homo sapiens
ccacagaggtgaccactgctaacagttttgactttatagaccactttagatgtgcttatgtatacaatatggatttatggagcagtggtgtgtacaatacttttttttttttacatagataatatcatataaaatgttgtggggttttttttttgccacatacttttttctgtcaatgatctgtcttggagatctttccag

SEQ ID NO: 368784 - DNA, 201 bp, Homo sapiens
tgctgaacataatcatagtattcaacactctggaaataccatactttgaccaatttccagttgcaaaatatatagattatttcttatctttttatattatyaatttttctgtaattaataattaatgttaaaaaatagtagggttcagcagcctaagattagtttttacaaaggaagtttgatagctattcaagtttaaac

SEQ ID NO: 368785 - DNA, 201 bp, Homo sapiens
agtttggcgtgtggacactgggacacctgaaaccatgtcttggttacgtcaggagccttattgattatttatattatgtatgaatcctgtggtgttaacastactttgcaacctttagtacttagctgaactgtattagattatcagggagtcctcagtacaccctcaatgatttaaattgtttttagctacttctgtaag

SEQ ID NO: 368786 - DNA, 201 bp, Homo sapiens
ttaaggagaaaggaaggattcattatgataggagatcaagcaagacacttgaaaagcatgtcccttctggtagcgggcgcctgaagtcccagctactcaaraggctgaggcaggagaatggcatggacccaggaggcggagcttgcagtgagccgagattgagatcacgccactgcactccagcctgggcgacagagcgag

SEQ ID NO: 368787 - DNA, 201 bp, Homo sapiens
atagtattccatggtgtatatgtgccacattttcttaatccagtctatcattgttggacatttgggttggttccaagtctttgctattgtgaataatgccrcaataaacatacgtgtgcatgtgtctttatagcagcatgatttatagtcatttgggtatatgcccagtaatgggatggctgggtcaaatggtatttctag

SEQ ID NO: 368788 - DNA, 201 bp, Homo sapiens
cttgtattaacttgattttttattattatggagattaatatttaactttttatattccatttgtattttgtctttgaaagtattcattccatgtgcttttmcacttattttactgaaaagtaggtgttttttgtggatttgtttgcttctttatgtcaggtttttggattgttgtatttcttgcaaatatttttccttttt

SEQ ID NO: 368789 - DNA, 201 bp, Homo sapiens
tttgaggttcagaagtggggcacaggagagtgcagagctggaagaaatgtttacagggtgcagggattggggaaagtgcatgtctcaaggtgggcgctccyaggatcccctggcaaaggcacaggaggagggagctgtcagaggaccatgtagccttgagaccatgggtgcctcctaagagaaaacagtgtctttatttct

SEQ ID NO: 368790 - DNA, 201 bp, Homo sapiens
gtatctcagatgcaggacttttatctcagatataactaagagtatccaagattgcagctgtctcggccctagatgctcaagcctgtgcagccttagttgtrtatcagagatctacagagatcttagttgtgtatcagagatctacagagatcttagttgtgtatcagagatctacagagatcttagctgtatatcagagat

SEQ ID NO: 368791 - DNA, 201 bp, Homo sapiens
aaatggtatttctagttctggatccctgaggaatcgccacactgacttccacaatggttgaactagtttacagtcccaccaacagtgtaaaagtgttcctrtttctccacatcctctccagcacctgttgttccctgactttttaatgattaccgttctaactggtgtgagatgatatctcatagtggttttgatttgcat

SEQ ID NO: 368792 - DNA, 201 bp, Homo sapiens
tataactaagagtatccaagattgcagctgtctcggccctagatgctcaagcctgtgcagccttagttgtatatcagagatctacagagatcttagttgtrtatcagagatctacagagatcttagttgtgtatcagagatctacagagatcttagctgtatatcagagatccacagagatcttaattgtatatcagagat

SEQ ID NO: 368793 - DNA, 201 bp, Homo sapiens
atcgccacactgacttccacaatggttgaactagtttacagtcccaccaacagtgtaaaagtgttcctgtttctccacatcctctccagcacctgttgttycctgactttttaatgattaccgttctaactggtgtgagatgatatctcatagtggttttgatttgcatttctctgatggccagtgatggtgagcattttt

SEQ ID NO: 368794 - DNA, 201 bp, Homo sapiens
cacctgttgttccctgactttttaatgattaccgttctaactggtgtgagatgatatctcatagtggttttgatttgcatttctctgatggccagtgatgrtgagcattttttcatgtgttttttggctgcataaatgtcttcttttgagaagtgtctgttcatgtccttcgcccgctttttgatggggttgtttgttttt

SEQ ID NO: 368795 - DNA, 201 bp, Homo sapiens
gcagccttagttgtatatcagagatctacagagatcttagttgtgtatcagagatctacagagatcttagttgtgtatcagagatctacagagatcttagytgtatatcagagatccacagagatcttaattgtatatcagagatctttctttggggggcggcacagggggacggagtcttgctctgtcacccaggctgga

SEQ ID NO: 368796 - DNA, 201 bp, Homo sapiens
tgagtaactgagactataggcacatgccaccatgcccggttaatttttgtattttgtagagacagggtttcgccatgttacccaggctggtcttgaactcytgagctcaagcaatccacctgcctcagcctcccaaagtgctgggattacaggcatgagccaccacatcagcccatcaattattattaaactcatgtgtac

SEQ ID NO: 368797 - DNA, 201 bp, Homo sapiens
gaagcaattgtgaatgggagttcactcatgatttggctctctgtttgtctgttgttggtgtataggaatgcttgtgatttttgtatattgattttgtatcytgagactttgctgaagttgcttatcagcttaaggagatttggggctgagacaatggggttttctagataaacaatcatgtaatctgcaaacagggacaat

SEQ ID NO: 368798 - DNA, 201 bp, Homo sapiens
gattacatttattgatttgcgtatattgaagcagccttgcatcccagggatgaagcccacttgatcatggtggataagctttttgatgtgctgctggattyggtttgccagtattttattgaggatttttgcatcaatgttcatcaaggatattggtctaaaattctcttttttggttgtgtctctgcctggctttggtat

SEQ ID NO: 368799 - DNA, 201 bp, Homo sapiens
gctgctggatttggtttgccagtattttattgaggatttttgcatcaatgttcatcaaggatattggtctaaaattctcttttttggttgtgtctctgccyggctttggtatcaggatgatgctggactcataaaatgagttagggaggattctctctttttctattgattggaatagtttcagaaagaatggtaccagtt

SEQ ID NO: 368800 - DNA, 201 bp, Homo sapiens
atttgagggggatggggcccctgtttctcatactccagccttttgttaccagatggagtgtggacaaagagtagtcagaaattctgatttttccaaaaaartttttttatataaaaacagatcgatgtgatatttcctgattttttttaaaactttacgtgggctgcaaattgttgtagacttccgatttttaatcctatc

SEQ ID NO: 368801 - DNA, 201 bp, Homo sapiens
ttgccagtattttattgaggatttttgcatcaatgttcatcaaggatattggtctaaaattctcttttttggttgtgtctctgcctggctttggtatcagratgatgctggactcataaaatgagttagggaggattctctctttttctattgattggaatagtttcagaaagaatggtaccagttcctccttgtacctct

SEQ ID NO: 368802 - DNA, 201 bp, Homo sapiens
ttttgttaccagatggagtgtggacaaagagtagtcagaaattctgatttttccaaaaaagtttttttatataaaaacagatcgatgtgatatttcctgattttttttaaaactttacgtgggctgcaaattgttgtagacttccgatttttaatcctatccccatctggaccttggctggtggctggagttggctcagtc

SEQ ID NO: 368803 - DNA, 201 bp, Homo sapiens
ttattgaggatttttgcatcaatgttcatcaaggatattggtctaaaattctcttttttggttgtgtctctgcctggctttggtatcaggatgatgctggmctcataaaatgagttagggaggattctctctttttctattgattggaatagtttcagaaagaatggtaccagttcctccttgtacctctggtagaattcg

SEQ ID NO: 368804 - DNA, 201 bp, Homo sapiens
atcaattaaaaaaaagatgctaggacatgtaacactggtgtagcaaaattattcctgggaaatgacctcattgttgcaagaactggaagtcataagtttakaaaacaagtctttgttctagagatcacaattagacaatttcaggacaaatgattttctaaagtgaaagtatatatggattaatgtattgtacgtgggctt

SEQ ID NO: 368805 - DNA, 201 bp, Homo sapiens
atcaaggatattggtctaaaattctcttttttggttgtgtctctgcctggctttggtatcaggatgatgctggactcataaaatgagttagggaggattcyctctttttctattgattggaatagtttcagaaagaatggtaccagttcctccttgtacctctggtagaattcggctgtgaatccttctggtcctggactc

SEQ ID NO: 368806 - DNA, 201 bp, Homo sapiens
gaggctggaggattgcttgagcctaggaggttgaggctgcagtgagctgagattgcgccactgtactccagcctgggtaacagagcgagaccttgtttcaaaagaaagaaagaaagaaagaaagaagagtgcatgggaagaggtggaatacaatttttttcatgatatttgagaatggaaaaatattttaagataaatatt

SEQ ID NO: 368807 - DNA, 201 bp, Homo sapiens
aggctggaggattgcttgagcctaggaggttgaggctgcagtgagctgagattgcgccactgtactccagcctgggtaacagagcgagaccttgtttcaaaagaaagaaagaaagaaagaaagaagagtgcatgggaagaggtggaatacaatttttttcatgatatttgagaatggaaaaatattttaagataaatattt

SEQ ID NO: 368808 - DNA, 201 bp, Homo sapiens
ggctggaggattgcttgagcctaggaggttgaggctgcagtgagctgagattgcgccactgtactccagcctgggtaacagagcgagaccttgtttcaaaagaaagaaagaaagaaagaaagaagagtgcatgggaagaggtggaatacaatttttttcatgatatttgagaatggaaaaatattttaagataaatatttc

SEQ ID NO: 368809 - DNA, 201 bp, Homo sapiens
gctggaggattgcttgagcctaggaggttgaggctgcagtgagctgagattgcgccactgtactccagcctgggtaacagagcgagaccttgtttcaaaagaaagaaagaaagaaagaaagaagagtgcatgggaagaggtggaatacaatttttttcatgatatttgagaatggaaaaatattttaagataaatatttcc

SEQ ID NO: 368810 - DNA, 201 bp, Homo sapiens
agcacagaaacttgggatggccacatagagaatgggaagaaatgccaggcctccattaccctaaccccaattggaagcagctgggaatgaactaggaggarcgtttccctactgcaaggaggtaaacaaaaggatcccagcagccccatcaacaccgtggatacctacagacctgagcactggggtcccctgcaatcctca

SEQ ID NO: 368811 - DNA, 201 bp, Homo sapiens
tttcctgcttctagaggctgcctacattccttggcccatggcctccttcctccatcttcaaagccagcaatggaaggttgggtccttttctagcacattckttgaacctggcttccatcatctcatcttgtctgacctgttctgcctccttcttcaacttttctggactcttgtgataacattgggcccacctggataaat

SEQ ID NO: 368812 - DNA, 201 bp, Homo sapiens
caatattttaatttggttatcttttattattgagttgtaatatgattcatctttaatttttatgtgtgttatgaagtagggtttgtcaaggttttgtttgttttttttaacgtagatatcagaatactctagcattatttttttttgaaaaaactatttccctattggttggtttggcacccttgctaaaaagcaaatgac

SEQ ID NO: 368813 - DNA, 201 bp, Homo sapiens
tcatgcccattagagagaggaaattaacattcccttaaaaattgttttccagtgaaggaagcccatcccccagaattgagctgctgcataatattgacccraacttcgtggactcttcaccgtgtgagtaccagtgcattgctactagattaaatctaattggcccaccaagatggtttgattacctagtgtgtctctagc

SEQ ID NO: 368814 - DNA, 201 bp, Homo sapiens
catggaagctaaaaaacgttgatctcatagaagcaaagagtagagtagtgtttttcctgaggggtgggaagggtaggggagaggagaatagccaaaggttrgttaatggatataaaagtacaattaaataggaggaataaggtctagtgctctatagcactatagggtgactatcattaacaacaatttattgtatatttt

SEQ ID NO: 368815 - DNA, 201 bp, Homo sapiens
gggggtctttctcctttcatcccttgccagagactcagcctgggccatgctcatcatcataatcacaggctgaagaggaatattttgggtttagtttccctttttttttttttttttacacacaatgcctatttataaccatttgttgacagactctaccaattacttaaaaaaacgtgtatttagacagagacagaccaa

SEQ ID NO: 368816 - DNA, 201 bp, Homo sapiens
aggccaccatgccttgctaattttttctatttttatttttagtagagatgagatcatggcatgttgcccaggctggtctggaattcctggagtcaagctakcctcctgccttagcctcccaaagtgttgggattgtagggataagccaccccgcctggcccagagaagctttcttttgccactctatcacaagtgccacct

SEQ ID NO: 368817 - DNA, 201 bp, Homo sapiens
cagcaaagtttgagaatgagtactgcaaaaaacaagatacctaatggcaaataagatggttaataaaattttcttattttgtttttaacagaaggatagakgaacatgcataagaaagtggagattattgatatcaaaaatttccagaggagtgaggaagggatggcagtgagacaacaatggaaaacgttttctctaaaa

SEQ ID NO: 368818 - DNA, 201 bp, Homo sapiens
gatggcttgaggccaggagtttcagaccagccaggtaacgtagggaaacaattacaaaaatcatagtggcctctttaaaaattttttttctaatttttttwaaattagctaggtatggtagcacatgcctgtggtcctaaccactcaggaggctgaggtaggaggatcatttgagccaagaagttcaaggctgcagtaagc

SEQ ID NO: 368819 - DNA, 201 bp, Homo sapiens
gagtcaagctagcctcctgccttagcctcccaaagtgttgggattgtagggataagccaccccgcctggcccagagaagctttcttttgccactctatcayaagtgccacctctgtcactgtctccctctccttctttacttttcctcatggcaatgatcactgttggacattagagtatcagttctcaaactttttggtc

SEQ ID NO: 368820 - DNA, 201 bp, Homo sapiens
ccaacaacttcagactacatgttttttacattggtgcttggataattcatagtccgtattagaaatgaaaatgttgaatatctgttattcaaaaggttataaaaaaaataacaaattaagcccaaagaaaataaaaggagggaaataataaagataaaagaagttaatgaaatagaaaacaaacatactacagataggatc

SEQ ID NO: 368821 - DNA, 201 bp, Homo sapiens
atgagtgagaacatgcagtgtttggttttctgtccttgctatagtttgctcagagtgatggttttcagcttcatccatgtccctacaaaggacatgaactygtccttttttatggctgtacagtattccatggtgtatatgtgccatgttttcttaatccagtctatcattgatggacatgtgagttgattccaagtcttc

SEQ ID NO: 368822 - DNA, 201 bp, Homo sapiens
tccacaatggttgaactagtttacactcccaccagcaatgtaaaagccttcccatttctccacatcctctccagcacctgttgtttcctgactttttaatkatcgccattctaactaatgtgagatagtatctcattgtggttttgatttgcatttctctgatgaccagtgatgatgagcatttttttcatgcgtctgttg

SEQ ID NO: 368823 - DNA, 201 bp, Homo sapiens
aaatagtaataaacccactatattaacataaataacttatgaaaaaagctctatttttcaaaaccaaatagttaagtgagaagaatggcattgttttataytttttgtacatcttttctactaatagaagtttgctaggttgttgtatctgcttctgcatttaacctgttatgatatattatttttagtaaaagttgaaga

SEQ ID NO: 368824 - DNA, 201 bp, Homo sapiens
atgggtaaattgtaaaaattttctcccattctgtaggttgcctgttcactttgatggtagtttctttttgctgtgcagaagctctttagtttaattagatsccatttgtctattttggcttttgttgccattgcttttggtgttttagacgtgaagtccttgcccatgcctatgtcctgaatggtaatgcctaggtttttt

SEQ ID NO: 368825 - DNA, 201 bp, Homo sapiens
gattcttcctatccatgagcatggaatgttctcccatttgtttgtgtcctcttttatttcgttgagcagtggtttgtagttctccttgaagaggtccttcmcatcccttgtaagttggattcctaggtattttattctctttgaagcaattgtgaatgggagttcagttgtgatttggttctctgtttgtctgttatttgt

SEQ ID NO: 368826 - DNA, 201 bp, Homo sapiens
tcctggtttagtcttgggagggtgtgtgtgtcgaggaatttatccatttcttctagattttctagtttatttgcatagaggtgtttgtagtattctctgayggtagtttgtatttctgtgggattggtgctgatataccctttatcattttttattgtgtctatttgattcttctctcttttcttctttattagtcttgct

SEQ ID NO: 368827 - DNA, 201 bp, Homo sapiens
gtctatcaattttgttgatcttttcagaaaaccagctcctggattcattgatttttttgaagggtttttgtgtctccatctccttcagttctgctctgctsttagttatttcttgccttctgctagcttttgaatgtgtttgctcttgcttctttagttcttttaattgtgatgttagggtgtcaagttttagatctttcc

SEQ ID NO: 368828 - DNA, 201 bp, Homo sapiens
agatctttcctgctttctcttgtgggcatttagtgctatagatttccctctacacagtgctttaaatgtgtcccagaggttctggtatgttgtgtctttgytctcattggtttcaaagaacatctttatttctgccttcatttcattatttatgcagtagtccttcaggattaggttgttcagtttccatgtagtagtgca

SEQ ID NO: 368829 - DNA, 201 bp, Homo sapiens
gaggcaaagcaaatccatcttcttctactttctttgggatcatgttttgattcttatggcagaatccaagaatgtgttgttcgtctcttcagcattggcaytagtgaaaatccccttgggactttggcatatggtcttctctttagtttccaacgctgttgccagttttcatctttttgtaattcttcgtggatattaaaa

SEQ ID NO: 368830 - DNA, 201 bp, Homo sapiens
cccagaagtcctaccaattattttttagtaatgaataggaaaagattatattaagggtatgattcagtgatttttgattacttttttctctagactacttraaaaacttaataaaccttcttaataacaatctatatgaaaaatatctttccatatataactctagacccagtgaattcaacttacatatttcctcactga

SEQ ID NO: 368831 - DNA, 201 bp, Homo sapiens
aacatcatcctcatgccaagaccttactgtgtttcagataacggagggcagactttggcagggggtaataactggccccttcgaggaagaaaatggagccygtgggaaggaggcgtccgaggggtgggctttgtggcaagccccttgctgaagcagaagggcgtgaagaaccgggagctcatccacatctctgactggctg

SEQ ID NO: 368832 - DNA, 201 bp, Homo sapiens
cttttgtacaaataatagatgggggggtggtgcaagaaatttttaaaaatacagaaaagctcaaaatttttaaaaatacacacaaaaaaaatcaccctaarcctattattctgctacccagaaataagcattgttaatattttggtgggctttttctatttctatttagggagagctttcaacatttcaccgttcagtatg

SEQ ID NO: 368833 - DNA, 201 bp, Homo sapiens
ttaagacctggacaggaaagggccctgagacaggcgagaatggctacatcgtggagaaatttctatttcttttggagtaaacgcatgtcagtgagagaggyaagggcaaggtttgagccctaaggactgtaagaacagtctagatttgtgctgtccagtatagtagccacaggccacatgtggctgtcaggtacttaaaat

SEQ ID NO: 368834 - DNA, 201 bp, Homo sapiens
gccggggccagccggccgccccacctggtcttcttgctggcagacgacctaggctggaacgacgtcggcttccacggctcccgcatccgcacgccgcaccwggacgcgctggcggccggcggggtgctcctggacaactactacacgcagccgctgtgcacgccgtcgcggagccagctgctcactggccgctaccaggta

SEQ ID NO: 368835 - DNA, 201 bp, Homo sapiens
taggtttcaggtctctagttataggaaatacacaatggagtatttaggagcaaaaagccatgatatatttaacataccctcaaatggttcagaaaaaaatgtgtgtgtgtgtgtgtgtgtgtatgtatgtacatgtgcacagagagaattcaaatggactgcaaaattaaataaaagaatataggtaaggtgcataagtat

SEQ ID NO: 368836 - DNA, 201 bp, Homo sapiens
cagtacaggaatagagttaaacatccaagtcaacagatatgatcagtaaggtagaaggccattttatctgcttgttcacaatatttcaatgtcattaatcyataattttatgtttatctctgtaagatccgtacaggtttacagcaccaaataatctggccctgtcagcccagctgtgttcctctggatgaaaaactcctg

SEQ ID NO: 368837 - DNA, 201 bp, Homo sapiens
aacaacacgttccaataacagtgatctaattctttcaaactatttcttcccaggtcccaggaacagcatggctccagcaaaggatgactcttctcttccakaatattcagcctttaacacatctgtccatgctgcaattagacatggaaattggaaactcctcacgggctacccaggtagagtccttagcttagcaaactt

SEQ ID NO: 368838 - DNA, 201 bp, Homo sapiens
tggcctcccaaagcgctggaattacaggtgtgagccattgtgctcagccataattcttaaattgttgcaagatggtgtgcgtgttatgtgaggtcagtgtytaaatcagaggagtaatgttttttgcagttttttaagattgtaggcctctttaagaccgatgaaaactatgaacttacaggaaaaaagtacctaaacata

SEQ ID NO: 368839 - DNA, 201 bp, Homo sapiens
attatagaaagttatcaacagatttcttaagatactttctgggaaaccaggacttgttttcaaggggaagccgttatcattatatatggacttcttacctaagtgtcctaaaagctagatacccatcttttgctctataggaacaaaatcaagaatttagaacatgtaatcacatatggtgacctctataacaaggccaga

SEQ ID NO: 368840 - DNA, 201 bp, Homo sapiens; identical to SEQ ID NO: 79987

SEQ ID NO: 368841 - DNA, 201 bp, Homo sapiens
acaacttcattttaacaaaaataactgaggaggagcacagtggtgcacaagagaagtaacagataccctggtgagcacagaaacttgggatggccacataragaatgggaagaaatgccaggcctccattaccctaaccccaattggaagcagctgggaatgaactaggaggaacgtttccctactgcaaggaggtaaaca

SEQ ID NO: 368842 - DNA, 201 bp, Homo sapiens
tgttcttaggttcttattccactttaagaaaaacagcactagaaactatagataaaacattatagatatggtttatgaaataaagatgataggaacaacartcagtagccctgcatgcaaagactatgaagtgactatctatttttttttattattattatactttaagttctagggtacatgtgcacaatgtgcaggttt

SEQ ID NO: 368843 - DNA, 201 bp, Homo sapiens
tgagatttgggaggggccaggggtggaatgatatggtttggctctgtgtccccaccagatctcatctggaactgtactcccataattctcatgtgtcatgkgagggacccggtggcagataattgaatcatgggggcagtttcctccatactgttctcgtggtagtgaataagtctcatgagatctgatggttttgtcagg

SEQ ID NO: 368844 - DNA, 201 bp, Homo sapiens
gggagtgcaagacagtgggcacaggacagtgggtgcagcgcaccatgcgcaagcctaagcagggcgaggcattgcctcactcgggaagtgcaaggggtcarggagttccctttcctagtcaaagaaaggggtgacagacggcacctggaaaattgggtcactcccaccctaatactgcacttttccaatgggcttaaaaaa

SEQ ID NO: 368845 - DNA, 201 bp, Homo sapiens
accaggcctgtcctaaaagagctcctgaagcactaaacatggaaaggaacaatcggtaccagccgctgcaaaatcatgccaaattgtaaagaccatcgagrctaggaagaaactgcatcaactaacgagcaaaataaccagctaatatcataatgacaagatcaaattcacacataacaatattaactttaaatgtaaatg

SEQ ID NO: 368846 - DNA, 201 bp, Homo sapiens
ttagtgtgctgtattcaggaaacccatctcatgtgcagagacacacaaaggctcaaaataaaaggatggaggaagatctaccaagcaaatggaaaacaaaraaaggcaggggttgcaatcctagtctctgataaaacagactttaaaccaacaaagatcaaaagagacaaagaaggccattacataatggtaaagggatca

SEQ ID NO: 368847 - DNA, 201 bp, Homo sapiens
ccatctcatgtgcagagacacacaaaggctcaaaataaaaggatggaggaagatctaccaagcaaatggaaaacaaaaaaaggcaggggttgcaatcctastctctgataaaacagactttaaaccaacaaagatcaaaagagacaaagaaggccattacataatggtaaagggatcaattcaacaagaagagctaactat

SEQ ID NO: 368848 - DNA, 201 bp, Homo sapiens
acagatcaatgagacagaaagttaacaaagatacccaggaattgaactcagctctgcaccaagcggacctaatagacatctacagacctctccaccccaartcaacagaatatacatttttttcagcaccacaccacacctattccaaaattgaccacatagttggaagtaaagcactcctcagcaaatgtaatagaacag

SEQ ID NO: 368849 - DNA, 201 bp, Homo sapiens
cacagtgcaatcaaactagaactcaggattcagaaactcactcaaaactgctcaactacatggaaactgaacaacctactcctgaatgactactgggtacwtaacgaaatgaaggcagaagtaaagatgttctttgaaaccagcgagaacaaagacacaacataccagaatctctgggacacattcaaagcagtgtgtagt

SEQ ID NO: 368850 - DNA, 201 bp, Homo sapiens
agaaggcaagaaataactaagatcagagcagaactgaaggagatagaggcacaaaaaacccttcaaaaaattaatgaatccaggagctggttttttgaaargatcaacaaaattgatagaccgctagcaagactaacaaagaagaaaagagagaagaatcaaatagacgcaataaaaaatgataaaggggatatcaccact

SEQ ID NO: 368851 - DNA, 201 bp, Homo sapiens
aatgaatatatatattcattatatatataagatatatatatcatatatatgatatatatatcttacatatatatatcttacatatatatgatatatatatsttatatatatcttacatatatatgatatatatatcttacatatatatcttacatatatatgatatatatatcttacatatatatatcttacatatatatg

SEQ ID NO: 368852 - DNA, 201 bp, Homo sapiens
atgaatatatatattcattatatatataagatatatatatcatatatatgatatatatatcttacatatatatatcttacatatatatgatatatatatcwtatatatatcttacatatatatgatatatatatcttacatatatatcttacatatatatgatatatatatcttacatatatatatcttacatatatatgt

SEQ ID NO: 368853 - DNA, 201 bp, Homo sapiens
ctgcagagtagaacaccttgtaggcaggttcataatcttctctgtacttggaaatcacccggaaagccccctttcaagtttttaattgccccaggtaatcyttttttttttttttttttttttttttttttttttttttagagggagtctcactctgttccccaggctggagtgcagttgtgcgatctgagctcactgcaa

SEQ ID NO: 368854 - DNA, 201 bp, Homo sapiens
tgactgtctttacatgtgtttattgccttttgtgtatcctctttggagaaattgctattcagattctttgcccattttgtagttgagttatcattgagttrtaagggttctttatatattctggagatgagtcccttatcatacatgtgattcacaaatactttcaatgcattctgtaggttgtcttgatattatttttat

SEQ ID NO: 368855 - DNA, 201 bp, Homo sapiens
gggggtctatttgagctctatgtatggatactcctttttgcattacaaggatgtgtaatataaaatttaaaacaacttgtcaacaatgaagaatgaaataygagcaccacccccccaccaaagtctgtttctaaccattttcattcatttatgagatttaaatgcctcaaatactttaacagaattatacgtttatttttg

SEQ ID NO: 368856 - DNA, 201 bp, Homo sapiens
aagtagttgttgaataaatgtcttttcttaaagaaaaaatgaaaaaaggggccaggcatggtggctcatgcctgtaatcccagcactttgggaggctgagrcgagcagatcacaaggtcaggggtttaagaccagcctgaccaaaatggtgaaaccccatctctactgaaaatacaaaaagtagtcaggcatggtggtgca

SEQ ID NO: 368857 - DNA, 201 bp, Homo sapiens
actcctaaacttttctctaccccagtacacctaagagatacatttcagtcatatcaaagtctctaagggtggctggaagagaatagtggggaggcaggaayggctttaaaactttctgagtaatttaatgcactgcaaagcccagtataacctaggtctaggggatatgtggaatatgccacccacattataatggttgta

SEQ ID NO: 368858 - DNA, 201 bp, Homo sapiens
gcatttctgtggtttctcactccagctcttcccagatcgttggtgcttactgcgggagaagaaggtagcgttccacctccaccttccctaaagccacttcrtcagtttcctcacctgtggagtaaagaaggaattaaatgatctccaaggtccctctggcttcagtgttctgtgggtctctatatgaatgggacctcaaag

SEQ ID NO: 368859 - DNA, 201 bp, Homo sapiens
cctcacctgtggagtaaagaaggaattaaatgatctccaaggtccctctggcttcagtgttctgtgggtctctatatgaatgggacctcaaaggagcaaakctgcttactctgcttctctcctttttctgcctgctagaaggagtgtgtccattgataagcagtgatgttgccaaaggcatgatcataaatagataaacac

SEQ ID NO: 368860 - DNA, 201 bp, Homo sapiens
gagaagtcactagaaagaatcaattaaaaaaaagatgctaggacatgtaacactggtgtagcaaaattattcctgggaaatgacctcattgttgcaagaaytggaagtcataagtttagaaaacaagtctttgttctagagatcacaattagacaatttcaggacaaatgattttctaaagtgaaagtatatatggattaa

SEQ ID NO: 368861 - DNA, 201 bp, Homo sapiens
gcagggtctggggcatgctcttcctatatatggcattcagccctgaggattctcctccccagcaatcggccatgtctctctaatgaccattgtctctgccrtttactggtcttttcaaaattatgactctgaaatatctcctaggcaaaattatgaggcttgcagagttagctttgagacttctcatcacccaccccttcc

SEQ ID NO: 368862 - DNA, 201 bp, Homo sapiens
ctagagccttccttgcttttccttttgtgatctttgagtcaggttgggaaggatgactagggtaagccccagctgaagcatgcacagggatgttggggtaragatgatgtttcagggcagccctccacggccaagccacacattaaattgtttggggagtagttctaaaaattaatgctgttgtcatggtttcattttgat

SEQ ID NO: 368863 - DNA, 201 bp, Homo sapiens
aaactaccatcagagaatactacaaacacctctatgcaaataaactagaaaatctagaagaaacggataaattactggatacgtacaccctcccaagactraaccaggaagaagttgaatctctgaatagaccaataacaggctctgaaattgtgacaataatcaatagcttaccaaccaaaaagagtccaagaccagttg

SEQ ID NO: 368864 - DNA, 201 bp, Homo sapiens
tagggttcagcagcctaagattagtttttacaaaggaagtttgatagctattcaagtttaaacattaaagtttaaagtcctgtgagttcaggaatggataraagaagtgttcagccaggccgctcaacctctcacaacgtggagtctatgggttcctctctaatgggcctcacccacaagggtgagactagggaaggtcct

SEQ ID NO: 368865 - DNA, 201 bp, Homo sapiens
aaaggcaccaagaacatttattgaggaagagacagtcttttcaataaatggtgctgggaaaattggatatccacatgcataaaaatgaaaccaaacctgtrtctctcaccatatataaaaatcaactcaaaatgggttaatgacttaaatataagacctgaagctatgaaactcctgaaagaaaacataggagaaatgctt

SEQ ID NO: 368866 - DNA, 201 bp, Homo sapiens
gcaacttcagcaaagtctcaggatgcaaaatcaatgtacaaaaatcacaagcattcttatacaccaataacagacaaacagagagccaaatcatgagtgarctcccattcacaattgcttcaaagagaataaaatacctaggaatccaacttacaagggatgtgaaggacctcttcaaggagaactacaaaccactgctca

SEQ ID NO: 368867 - DNA, 201 bp, Homo sapiens
tcccattcacaattgcttcaaagagaataaaatacctaggaatccaacttacaagggatgtgaaggacctcttcaaggagaactacaaaccactgctcaakgaaataaaagaggatacaaacaaatggaagaacattccatgctcatggacaggaagaatcaatattgtgaaaatggccatactgcccaaggtaatttata

SEQ ID NO: 368868 - DNA, 201 bp, Homo sapiens
tgcccaaggtaatttatagattcaatgccatccccatcaagctaccaatgactttcttcacagaattggaaaaaactaaagttcatatggaaccaaaaaaragcccacattgccaagtcaatcctaagccaaaagaacaaagctggaggcatcacgctacctgacttcaaactatactacaaggctacagtaaccaaaaca

SEQ ID NO: 368869 - DNA, 201 bp, Homo sapiens
cccaaggtaatttatagattcaatgccatccccatcaagctaccaatgactttcttcacagaattggaaaaaactaaagttcatatggaaccaaaaaagarcccacattgccaagtcaatcctaagccaaaagaacaaagctggaggcatcacgctacctgacttcaaactatactacaaggctacagtaaccaaaacagc

SEQ ID NO: 368870 - DNA, 201 bp, Homo sapiens
tagaaataccatttgacccagccatcccattacggggtatatacccaaaggactataaatcatgctgctataaagacacatgcacacgtatgtttattgcrgcactattcacaatagcaaagacttggaaccaacccaaacgtccaacaatgatagactggattaagaaaatgtggcacatatacaccatggaatactatg

SEQ ID NO: 368871 - DNA, 201 bp, Homo sapiens
tggattaagaaaatgtggcacatatacaccatggaatactatgcagccataaaaaatgatgagttcatgtcctttgtacggacatggatgaaattggaaaycatcattctcagtaaactatcgcaaggacaaaaaaccaaacaccgcatgttctcactcataggtgggaattgaacaatgagaacacatggacacaggaag

SEQ ID NO: 368872 - DNA, 201 bp, Homo sapiens
ggattaagaaaatgtggcacatatacaccatggaatactatgcagccataaaaaatgatgagttcatgtcctttgtacggacatggatgaaattggaaatcatcattctcagtaaactatcgcaaggacaaaaaaccaaacaccgcatgttctcactcataggtgggaattgaacaatgagaacacatggacacaggaagg

SEQ ID NO: 368873 - DNA, 201 bp, Homo sapiens
ggatgaaattggaaatcatcattctcagtaaactatcgcaaggacaaaaaaccaaacaccgcatgttctcactcataggtgggaattgaacaatgagaacwcatggacacaggaaggggaacatcacactctggggagtgttgtggggtggggggaggggggaggatagcattaggagatatacctaatgctaaatgacga

SEQ ID NO: 368874 - DNA, 201 bp, Homo sapiens
cacatgtatacatatgtaactaacctgcacattgtgcacatgtaccctaaaacttaaagtataataataataaaataataataataataaaataaaaaaaytcacgctaaaaaataatacaaaagatcgatgaaattaaaagttggtttttgaaacgattaacaaaactgacaaataattagctagatgaatcaagaatgt

SEQ ID NO: 368875 - DNA, 201 bp, Homo sapiens
cctggccaacatggtgaaaccctgtctctactaaaaatacaaaaattagccaggtatgatggtgcgcacctgtaatcccagctactcatgaggctgaggcrggagaattgcttgaacccgggagacggagattgcagtgagccgagattgcgccactgcactccagcctgagcaacagagcaagactccatctcgcggggg

SEQ ID NO: 368876 - DNA, 201 bp, Homo sapiens
ttatagaatagacttttggagtgggaatttggaatgttttcccatggaaataatggaagtacgggttctacattatcatcattttcactccatcagctgcstccttagtttaataggttttaaagcaacgactttgacatttagcagctatttttaactttgtgagtttagggaaaacgtatttctgagttccaaagacct

SEQ ID NO: 368877 - DNA, 201 bp, Homo sapiens
gtacttctttataaggataagaatactggttgcattcaaatcaataaatgttgagtccattagtacagaaaaccatgaaaacaatctagcttcctggtgtyggattatatttggtgatcggtaaaggcaaaggcataatttttagattttgatgtttgataaagctaacttttaaaaatttctgttataatctgagagaaa

SEQ ID NO: 368878 - DNA, 201 bp, Homo sapiens
aacattcttgtttgagtcagatgggaaatacagttctgtttcatttttctccccgtcttaattggttttccgtatgcgggttcagaagtaggattttgccrtacacatcatccttcatgtgagtaggtgagcaccagcatcaggggaaggaaaagagacaaactgactgttagggagggagtctctctccagactcggcta

SEQ ID NO: 368879 - DNA, 201 bp, Homo sapiens
aagatccgtacaggtttacagcaccaaataatctggccctgtcagcccagctgtgttcctctggatgaaaaactcctgccccagctcctaaaagaagcagkttatactacccatatggtcggaaaatggcacctgggaatgtaccggaaagaatgccttccaacccgccgaggatttgatacctactttggtaatggaaat

SEQ ID NO: 368880 - DNA, 201 bp, Homo sapiens
gctagaaacattatatgcactagaggaatttgaattattttatgagtttcttattactatatcctggccacctttctgatttccgttccgaaacatcaccrtatcgatccgcttttctatctcctctttcccttagtgggtcatcctggggtttgttgaccaatgtctcctctgattgtgaatcatacgaataggcattac

SEQ ID NO: 368881 - DNA, 201 bp, Homo sapiens
tttttttcatggtcacatgcacatggtaggttgtggcttggatactaacagtaaaaatactcaaagatcggcacaaaatattgatacacgtacacattcayagagaaacatgcacacacaccaggggtcaccaaatctctcatagatcaggagattcaccattctgcagtaaagcataaagtctcaaggatgcatacgtaa

SEQ ID NO: 368882 - DNA, 201 bp, Homo sapiens
ccagtcctgccctgcaagagctcctgaaggaagcactaaacatggaaaggaacaactgataccagccactgcaaaaacatgccaaattgtaaagaccatcraggctaggaagaaactacatcaactaacgagcaaaataaccagctaacatcatgacaggatcaaattcacacataacaatatgaaccttaaatgtaaatg

SEQ ID NO: 368883 - DNA, 201 bp, Homo sapiens
cgaggggtgggctttgtggcaagccccttgctgaagcagaagggcgtgaagaaccgggagctcatccacatctctgactggctgccaacactcgtgaagcyggccaggggacacaccaatggcacaaagcctctggatggcttcgacgtgtggaaaaccatcaggtacctacaccctgccctttttcctcccaggacagaa

SEQ ID NO: 368884 - DNA, 201 bp, Homo sapiens
tacagcaccaaataatctggccctgtcagcccagctgtgttcctctggatgaaaaactcctgccccagctcctaaaagaagcaggttatactacccatatsgtcggaaaatggcacctgggaatgtaccggaaagaatgccttccaacccgccgaggatttgatacctactttggtaatggaaatgcacatgtttctttaa

SEQ ID NO: 368885 - DNA, 201 bp, Homo sapiens
atagtctccaggatattcaggcagttaagtgtctccgaaagaaaatgagaaaagaaaggtcctgggaaatatgccccacccccacccctgcagtgctgccrctgctgtcccaggaccgtgggcacccctgaatgtttctcttccactgtctctgatcactgtgatttatggagtagagggggacaatgacatctgatagaa

SEQ ID NO: 368886 - DNA, 201 bp, Homo sapiens
agatgacatgattgtatatctagaaaaccccatcgtctcagccccaaatctccttaagctgataagcaacttcagcaaagtctcaggatacaaaatcaatrtacaaaaatcacaagcattcttatacaccaataacagacaaacagagagccaaatcatgagtgaactcccattcacaattgcttcaaagagaataaaata

SEQ ID NO: 368887 - DNA, 201 bp, Homo sapiens
gattttcactttagaactgaaatggagggtgattggaagcaggccgaccttttaggaggctctgacaataaagagaggagagaagataaggagcacttgartaaaggcagagggaaggtggatggagataagaggacagatttaagaaatacataggaggggtggagccaagatggccgaataggaacagctccagtctac

SEQ ID NO: 368888 - DNA, 201 bp, Homo sapiens
tgtgaataaatcagtgagtgtgtccacattctattactctttgcaattatgcatttatttggcgcgtctatcatagaggaaaattacaacccatgcctcaraataatgagacttgaatgaacttttccatagccagtcattaattcatgccacctctttagatttcacctgttaatgtccacactgagagcatgttggatc

SEQ ID NO: 368889 - DNA, 201 bp, Homo sapiens
tcccatgaacgctgtacattaattgacgctctgaatgtcacacgatgtgctcttgattttcgagatggcgaagaagttgcaacaggatataaaaatatgtrttcaacaaacatattcaccaaaagggctatagccctcataactaaccatccaccagagaaggtaagttttgcttctatttactgatagcaaaatcttgtt

SEQ ID NO: 368890 - DNA, 201 bp, Homo sapiens
acagcttcctatgtgagcagaggttcatttattttgattcaagttaagggttaagggcaacttgacattttgtattacacctatcccttccccacccctctttttttttttttcttaggagttgtaaggatcttacaagatcatctgatcttagaaagaaataaagaccctggccaggcacagtggctcgcacctgtaatc

SEQ ID NO: 368891 - DNA, 201 bp, Homo sapiens
aacaaaaacaaaaacaaaaccacttgtaaaaaaatcaccaagttttcgaagattacagaagtgtcttctaatcaaacaccaacttcttgtgtgcccaaaaytggaacgcttttttcttgttagattcacaccacatattattgctactttttttgaggcaaaaagtaacaagttaatggtttctaacatagtgccttgata

SEQ ID NO: 368892 - DNA, 201 bp, Homo sapiens
acaaaaacaaaaccacttgtaaaaaaatcaccaagttttcgaagattacagaagtgtcttctaatcaaacaccaacttcttgtgtgcccaaaattggaacrcttttttcttgttagattcacaccacatattattgctactttttttgaggcaaaaagtaacaagttaatggtttctaacatagtgccttgataaatattg

SEQ ID NO: 368893 - DNA, 201 bp, Homo sapiens
tgtccactacttcatttgaataagagaattctgcctttcagaaatatcctcaagccagtacaggaatagagttaaacatccaagtcaacagatatgatcartaaggtagaaggccattttatctgcttgttcacaatatttcaatgtcattaatctataattttatgtttatctctgtaagatccgtacaggtttacagca

SEQ ID NO: 368894 - DNA, 201 bp, Homo sapiens
  misc_feature (1)...(201): n = A,T,C or G
tacttttcctggtatctaaaacagtaccttgcacaccctccaaaaaattattaattaatttaatgtttttctgtaattcctgtgacaccttatacagtttnttaaacatggcagatgctcaaaaaattcttgttgatttgttattattgttattttaatgtataaccccctgtaaaatgcaaagtcttggtcagttaaggg

SEQ ID NO: 368895 - DNA, 201 bp, Homo sapiens
aaactcctgccccagctcctaaaagaagcaggttatactacccatatggtcggaaaatggcacctgggaatgtaccggaaagaatgccttccaacccgccraggatttgatacctactttggtaatggaaatgcacatgtttctttaacaacttagactaactgcagccatctcataaaacacacccaagtgcaatcaaat

SEQ ID NO: 368896 - DNA, 201 bp, Homo sapiens
aaaactcctgccccagctcctaaaagaagcaggttatactacccatatggtcggaaaatggcacctgggaatgtaccggaaagaatgccttccaacccgcygaggatttgatacctactttggtaatggaaatgcacatgtttctttaacaacttagactaactgcagccatctcataaaacacacccaagtgcaatcaaa

SEQ ID NO: 368897 - DNA, 201 bp, Homo sapiens; identical to SEQ ID NO: 79984

SEQ ID NO: 368898 - DNA, 201 bp, Homo sapiens
aaatcaataaaggtaatccagcatataaagagaaccaaagacaaaaaccacatgattatctcaatagatgcagaaaaggcctttgacaaaattcaacaacscttcatgctaaaaactctcaataaattagatattgatgggacgtatctcaaaagaataagagctatctatgacaaacccacagccaatatactgaatggg

SEQ ID NO: 368899 - DNA, 201 bp, Homo sapiens
tatatctttctttcaagttctttttatagtgagctatctgtttagctatttagctacctacctacctcccatctgttcatttatttatttacaaccctccrtagccaaaaaggaacacatattgaacatagaaagtttaaacaggattaaataatcaggatgagtagaaaaagatggaataggttaatggcatcaaattac

SEQ ID NO: 368900 - DNA, 201 bp, Homo sapiens
cactgtcaggtcagcgatgcacctgcacgttcttccctccagacatcgcagccgagaccttcatcacccccaggcagggcatctgttgggatgtcctgcascatggtctacacgaacatagacgcttcagcatgaccatgcagctggagtagaaggtgtatgtgtgtcgagtggaagcagaggcagaactgaaatggtgtc

SEQ ID NO: 368901 - DNA, 201 bp, Homo sapiens
cactacttcatttgaataagagaattctgcctttcagaaatatcctcaagccagtacaggaatagagttaaacatccaagtcaacagatatgatcagtaargtagaaggccattttatctgcttgttcacaatatttcaatgtcattaatctataattttatgtttatctctgtaagatccgtacaggtttacagcaccaa

SEQ ID NO: 368902 - DNA, 201 bp, Homo sapiens
aaatcatgcccctccaatgcctaagtcaaagcagcacgctgcatcctagggaaatggtgcctggtccacccagagcagtcatacctgttggactcaagccraaatgacacatcaccctctggggaatttgtaccctggctgagctgaatagctgcaaatcccagggctgtgctgacatggtatcctgtgtcccagggaaac

SEQ ID NO: 368903 - DNA, 201 bp, Homo sapiens
catagagaatgggaagaaatgccaggcctccattaccctaaccccaattggaagcagctgggaatgaactaggaggaacgtttccctactgcaaggaggtwaacaaaaggatcccagcagccccatcaacaccgtggatacctacagacctgagcactggggtcccctgcaatcctcacaggcactaagcctagctgaggg

SEQ ID NO: 368904 - DNA, 201 bp, Homo sapiens
tgcctgaagtccacatgtccgtgcttcccccagagaaggagccaatactatgatccacaccctgtggcccacatagctaccatgctatgccatcttggagytggaactatggctggatgtgtcttgctctgggggcaagtatgcatggctctcttttatccctgaggctaagccattgctgaactgccccagcccaatggc

SEQ ID NO: 368905 - DNA, 201 bp, Homo sapiens
cacccctgaatgtttctcttccactgtctctgatcactgtgatttatggagtagagggggacaatgacatctgatagaataccaaagttaaatatgctcartttaaggagctgttatttattcagagatcgtgtctttcctaccttttttgctgtttattttataaaataatggtgatggtagttgaagtttgttattttg

SEQ ID NO: 368906 - DNA, 201 bp, Homo sapiens
aaccaaaatgagcccgcattgccaagtcaatcctaagccaaaagaacaaagctggaggcatcacactacctgacttcaaactatgctacaaggctacagtractgaaacagcatggtactggtaccaaaacagagatatagaccaatggaacagaacagagccctcagaaataatgccacatatctttaactatctgatct

SEQ ID NO: 368907 - DNA, 201 bp, Homo sapiens
ttggcctagtagatggtctttcttgttgtccacatcaggtgtaattgaaaagaatgcgtattctgtagttgttaagtatagtgttaggtttttctttatgwtccagtctgtaatgttttagtagatgaatttatacatatttataaatatttttatttctattcttagttttttcattgttttgttacatttactttttat

SEQ ID NO: 368908 - DNA, 201 bp, Homo sapiens
gttgattgacaaaaaggaaaaccaaaggattaaaaccttgcaagtttctttttaattattttatatttaattaaacaatgtaaaacataagcagactaggygtggtggctcacgcctataatcccagcactatgggaggccgaggagggaggattgcttgagcccaggagttcgagaccagcgtgggcaacatagcgaaac

SEQ ID NO: 368909 - DNA, 201 bp, Homo sapiens
aaacataagcagactaggcgtggtggctcacgcctataatcccagcactatgggaggccgaggagggaggattgcttgagcccaggagttcgagaccagcstgggcaacatagcgaaaccctgtctctacaaaaaatacaaaaattagctgggtgtgttggcacacacctgtagtcccagctactcaggaggctgaggcag

SEQ ID NO: 368910 - DNA, 201 bp, Homo sapiens
tggtgttcaaagaggcacacaagaccacaggagaaatggggcacatcttcctggagtgttcattttgcttgaatatatagaagggaaaataaataatttawctggttaataatttaaaacattgttatattaaaacaggcaaattatggaagagaatacaattaatttcatggatttttgttaaagttcaaaatctcaggt

SEQ ID NO: 368911 - DNA, 201 bp, Homo sapiens
catggtgaaaccccgtctctaataaaaatataaaaattagctgagcatggtggcgggcgcctgtgatcccagctactcgggaggctgaggcaggagaatcrcttgaacccgggaggcagaggttgcagtgatccgagattgcaccactgcactccaacctgagcaacagactgagaccctgcctcaaaataaataaataaa

SEQ ID NO: 368912 - DNA, 201 bp, Homo sapiens
cctctcctcttcttgagtggaaagaagtagtctttcccagggctgcgagctgcactcccttggccatcctagctggtgtctcagtaggtcacgtgcccccycctccccccccaccaaatccactggctctaagcccagcatggtattaggatttgcctagaaattgcagtccttgtaccctggactaccttaaagtttatt

SEQ ID NO: 368913 - DNA, 201 bp, Homo sapiens
atgtttctcttccactgtctctgatcactgtgatttatggagtagagggggacaatgacatctgatagaataccaaagttaaatatgctcaatttaaggarctgttatttattcagagatcgtgtctttcctaccttttttgctgtttattttataaaataatggtgatggtagttgaagtttgttattttgttttgtttt

SEQ ID NO: 368914 - DNA, 201 bp, Homo sapiens
cacatatgtaattttaaatagccacattaaaaaactaaaaagaaacacgtgaaattaattttagtaattagatattccgtatatccaaaatattatttcartttataatcaatataaaaagttattgatgagatgttttacagtcttttacacacacatatatacacatacatatgtatgtacatacacatatatgtgtgt

SEQ ID NO: 368915 - DNA, 201 bp, Homo sapiens
cctgggtgcctattgtgctccctacatacatctggtgatgtttatgctcccaatttcttaagaacactgctttgagagtcacacaacccaatattctaccrataacttactatgtaccttcatcatttgtaagaagagggggttgaactaagcgatctccaagtcacttttcagcacaaatgtaggttgtgattgtatttg

SEQ ID NO: 368916 - DNA, 201 bp, Homo sapiens
tgggattgagtttctttagcagagtggaaatttagatcatggaaggagaaaaggacaggtcattgagcgtccaggttttgggaaagatcatctgtgtcagytttgaattcatcaaggtttatgagagagtggagagactgataggatgttaggtcttaaaatcttcaaaagagaatctacaaactcctggcaggtctgatc

SEQ ID NO: 368917 - DNA, 201 bp, Homo sapiens
agtgtgtaattattatcagctgttcacatatgagatgtaagtatcttggatattttggattttatggaagtcatacgcgcttaccacattatattcatccmgaacttcagtaattttacaatgaatcattgatcttaaggaagacttgtaataaatgctaatctcagagcattaatgaagacacaaactaagactacataa

SEQ ID NO: 368918 - DNA, 201 bp, Homo sapiens
tatttcctataagtacaaggaagggaagtattaaaataattcatgcccattagagagaggaaattaacattcccttaaaaattgttttccagtgaaggaarcccatcccccagaattgagctgctgcataatattgacccgaacttcgtggactcttcaccgtgtgagtaccagtgcattgctactagattaaatctaatt

SEQ ID NO: 368919 - DNA, 201 bp, Homo sapiens
tgaattttgtgtttagatttgatcccagccccaagatgtatcattatgtatatgcaaatatcccacaaaaaaaattttaaatcccaaacacttctggtccyaagtgttttggacaaggagtattcaacctgtagtgtccacttagatctggttggtgttagcttccattttaccttcttattcataccctcactctccttt

SEQ ID NO: 368920 - DNA, 201 bp, Homo sapiens
gtgtgagcaaccacattatctgattgggctggtcaggtactgcccaacacctgctgggtgtcacaagtgtgactttcctagcagtcctggaagtgattccrcttgattctgcctcctgcctaaattaacctgtaaagagccttaccatttccttcagggcaggcatgcatgtagtgcttccagatcacaacggactgtaat

SEQ ID NO: 368921 - DNA, 201 bp, Homo sapiens
agctaacaactgaaaaagccagaattcaaacccagatctacttgaggtcaaaacccaattaacctaatcagttgtctttttgcatctcattttcttttccrtttatttcatcccattgtactgcatttctacgcttgtgttcacaggacccatccttttcctgaacctttctgaatagaacttttctaaaatctttatttt

SEQ ID NO: 368922 - DNA, 201 bp, Homo sapiens
ccccgtctctaataaaaatataaaaattagctgagcatggtggcgggcgcctgtgatcccagctactcgggaggctgaggcaggagaatcgcttgaacccrggaggcagaggttgcagtgatccgagattgcaccactgcactccaacctgagcaacagactgagaccctgcctcaaaataaataaataaataaataaaaa

SEQ ID NO: 368923 - DNA, 201 bp, Homo sapiens
ataattattgttaaaaatgaaagaatgtatttatttcatctttcgatcatgatacttaccaacaatgttggcataaactccaccttgtcaaataccaaaaytgcaatcctgtcttgtttttgtttgcctttacctggttcactttgctataataatactcaccagtagacaataaactaacgtctacagcatcttgagcag

SEQ ID NO: 368924 - DNA, 201 bp, Homo sapiens
attcaacacttcatcttttctgcagagtagaacaccttgtaggcaggttcataatcttctctgtacttggaaatcacccggaaagccccctttcaagtttytaattgccccaggtaatccttttttttttttttttttttttttttttttttttttttagagggagtctcactctgttccccaggctggagtgcagttgtg

SEQ ID NO: 368925 - DNA, 201 bp, Homo sapiens
aaaattagccgggtgcagtggtgggtgcctgtagtccagctactctggaggttgaggcaggagaatggcgtgaacccgggaggcggagcttgcagtgagcygagatcgcaccactacactccagcctgggcgacagagcaagactccgtctcaaaaaaaaaaaaaaaaaaaaatcgagcacatgtagaagtgaaaacacag

SEQ ID NO: 368926 - DNA, 201 bp, Homo sapiens
  misc_feature (1)...(201): n = A,T,C or G
cttttttcatcttcaaaaattaagcaaagaggttcactaaagcatcagttcagagtgtggggcttctagtcagtgtattttagggaattaattttaggaanaaactatttttaggtccacgattatttttaaaaacaaaaatctagacaacagtgcatacatgcacgtctggatatgtaagcccttaccacacagcgagat

SEQ ID NO: 368927 - DNA, 201 bp, Homo sapiens
cttctgtagtgcagtgtatggtaactgatgggctcaaaactggcccacatttgccagtctccctatatgctcagcacttgaaaatgagtcttctctgctgyaatttaaagctagaaatccaaagacattgagtcaccagcataggtattttccacacagctgcaagtgaaacttcacaatggacttggccgctatttgctt

SEQ ID NO: 368928 - DNA, 201 bp, Homo sapiens
ctgtatcttttttgcccttagttgtgtacagtcttgtattttttcacataggctatgctttctgtggatgttgcctccctcgaaagcagggaccatgtgtygaacccctgttgccttttcccagagtagcgggcacctagcaggtgcttaattaaggtgtgtcaaataattgtttccttttttattcttacctgacatgaa

SEQ ID NO: 368929 - DNA, 201 bp, Homo sapiens
  misc_feature (1)...(201): n = A,T,C or G
agtaattaatgcttaaattaacttgtgtcttaccactcctttggcatttatcatgtattgccttttattgacatttattctcccaattcattctaagcttnttaagtagagatacttttcctggtatctaaaacagtaccttgcacaccctccaaaaaattattaattaatttaatgtttttctgtaattcctgtgacacc

SEQ ID NO: 368930 - DNA, 201 bp, Homo sapiens
gcccagctgtgttcctctggatgaaaaactcctgccccagctcctaaaagaagcaggttatactacccatatggtcggaaaatggcacctgggaatgtacyggaaagaatgccttccaacccgccgaggatttgatacctactttggtaatggaaatgcacatgtttctttaacaacttagactaactgcagccatctcat

SEQ ID NO: 368931 - DNA, 201 bp, Homo sapiens
  misc_feature (1)...(201): n = A,T,C or G
ctcttcaaagtaattaatgcttaaattaacttgtgtcttaccactcctttggcatttatcatgtattgccttttattgacatttattctcccaattcattntaagcttcttaagtagagatacttttcctggtatctaaaacagtaccttgcacaccctccaaaaaattattaattaatttaatgtttttctgtaattcct

SEQ ID NO: 368932 - DNA, 201 bp, Homo sapiens
tacacttggctaattttttttttttttaattttttatgtttggttagcgattggatcacactatgttgcctggctggtgtgagccacagtgtccagactgwtttttctttttctttcccttttctttcttaactctaccccaagacaggccccagttgaagatctgcattggtgttgtggtggggtgcaggcacctaaaat

SEQ ID NO: 368933 - DNA, 201 bp, Homo sapiens
gtgaaatccaaacaggataaactcaaagaaaactacaccagcatcataatggaactgctgaaaactaaagatgaaaaaaaaaaataccttgaaagcagcartctcattcatgggattgaatgaaattgaatgaaagcatgttcacacaaaaaacaatacccatatatttatagcatctttattgataattactaaaaactg

SEQ ID NO: 368934 - DNA, 201 bp, Homo sapiens
ggtgtacaatttgtctacaaagaggtggtacaaaggagttatatcacagtgatagaatgttctatcctgattgtggtggtatttatatgactctatttgtyaaaatccataatgatgcacaccaaaataagtgaattttactgtatgtaaattaaaatgaaatcaccagcacatgatttcatatctgatatggttaatata

SEQ ID NO: 368935 - DNA, 201 bp, Homo sapiens
ccacaaatttaggcatcctctttggccttctgctgctcttccttccctctctggagcccacccaggccttcatgttggcttccccaccagcttgggactcytgctctgactcctgcagataacgaaggacattgtcagctcttgcaaggatgtagaaccacattcactgttgcttcacacacacacagcgttctctgctgt

SEQ ID NO: 368936 - DNA, 201 bp, Homo sapiens
tgttctatcctgattgtggtggtatttatatgactctatttgtcaaaatccataatgatgcacaccaaaataagtgaattttactgtatgtaaattaaaawgaaatcaccagcacatgatttcatatctgatatggttaatatatcttcatgactatgtgaagtatagaaaagattcatgtaatctcttatctattttgaa

SEQ ID NO: 368937 - DNA, 201 bp, Homo sapiens
ctgctcctgttttctgggatgttccctctggttgtttcatcattcactggttatctcagtgccccaaccctagctctgcttttatccccttcctccctccmctgcctcccagcttcatgacctgtgtcagagtgtgggatgtaattgctttcctgtgtgctttgaggagactttttattcatttttgaaggctttgttctg

SEQ ID NO: 368938 - DNA, 201 bp, Homo sapiens
ctggattaagaaaatgtggcacatatacaccatggaatactatgcagccataaaaaatgatgagttcatgtcctttgtacggacatggatgaaattggaaatcatcattctcagtaaactatcgcaaggacaaaaaaccaaacaccgcatgttctcactcataggtgggaattgaacaatgagaacacatggacacaggaa

SEQ ID NO: 368939 - DNA, 201 bp, Homo sapiens
gatttttttctttgaaccatgtatttagaagtgcattgttaagtttccaaattttgggtttttccctagttaaattattgatttctagtttatttcagttktggttttgaggaccacaaataattgaaatgctttttattatttcaattattattattgttttttaacagagacaaggtctcaatttgtcacccaagctag

SEQ ID NO: 368940 - DNA, 201 bp, Homo sapiens
caatcctcctgcctcagcctcccaaagcgctgggattacaggtgtgagccatcactcctgggctaattgttttaaatttgagacttggcctagtagatggwctttcttgttgtccacatcaggtgtaattgaaaagaatgcgtattctgtagttgttaagtatagtgttaggtttttctttatgatccagtctgtaatgtt

SEQ ID NO: 368941 - DNA, 201 bp, Homo sapiens
ctatgtgaagtatagaaaagattcatgtaatctcttatctattttgaagtcattttccatttgattccataaactttcaggaagccaaaaatggaataaayaatgaaatggtctctgatacatacagaaagctttccaaaaaagaattttgtgtttcatatgccaggcatatgttttgtagggtcagcttaccacaaaagg

SEQ ID NO: 368942 - DNA, 201 bp, Homo sapiens
taaactttcaggaagccaaaaatggaataaataatgaaatggtctctgatacatacagaaagctttccaaaaaagaattttgtgtttcatatgccaggcakatgttttgtagggtcagcttaccacaaaaggcctcgctgaaaaaatgcagtataaaagtaggggcctgtaagagaaagagaagcacattgactccagagg

SEQ ID NO: 368943 - DNA, 201 bp, Homo sapiens
ttctctaccccttagcagttactcccaactccctttcctccctctgtcaatcacataatctatgttttgtccttatggattttactaagctagacatttcrtaaaaatggaatcatacaatatatggctttttgtgtctggcttcttttatttggcataatgttttagatgttcatccattttgtagcataaatcagtatt

SEQ ID NO: 368944 - DNA, 201 bp, Homo sapiens
gtgactcccccatttgggacaggcagcactgcaaccgtttactagagccaaagtgaacctgggcttatagcgccacctagagccgaaaaggaggcagcaayctagttgcaaagattaagcaaatatattcaatgaaagacaaaacaagctggacagagaaaactagaatcaataattaatccttcaatgcaaagacataga

SEQ ID NO: 368945 - DNA, 201 bp, Homo sapiens
taagaaagcttagatttggcttaattgatggcaagtttaagagactgaggtttacttgagactgacattagtataaatttaaaatgacttaaagaggaagkcatgggtatttgaactatttatattcatttcagatcctttcttttacatcattttgtaaaaactccttcgaaaaaaatagttcagtgcttatagctgact

SEQ ID NO: 368946 - DNA, 201 bp, Homo sapiens
  misc_feature (1)...(201): n = A,T,C or G
tcccaaagtgctgggattacaggcgtcagccaccgcacccggcctgtggggaggtttttaattactaatttcaatgtctttaatgggtatagggcatgtangttatctattttttcctgaatgaacttagattaatcatttttgaagtcttagttgctagaaaaaaatatttaaaaattggtgaattttctcattaaagca

SEQ ID NO: 368947 - DNA, 201 bp, Homo sapiens
  misc_feature (1)...(201): n = A,T,C or G
gctagaaaaaaatatttaaaaattggtgaattttctcattaaagcagcttttagtgcatttttgaatatagtaaatataaatattttatatttatagaatntattttagatctgaaaaataattattatgagagtccgcatattacaaaaatacaaatattatatctgagtccttacttaccaggagatctgattataact

SEQ ID NO: 368948 - DNA, 201 bp, Homo sapiens
gggggggagagacagagagaaagacagaaagaaaagaaaggaggaaagaaaaggaaggaaggaagggaaggagagaaggggggaggggaggggaggggagkggaggagaggggaggagagagaacgaaaaatacccagagagggacgttgggacttttgtaaatactcaggaggcagatggcctgagtccaacactcactg

SEQ ID NO: 368949 - DNA, 201 bp, Homo sapiens
  misc_feature (1)...(201): n = A,T,C or G
attaaagcagcttttagtgcatttttgaatatagtaaatataaatattttatatttatagaatgtattttagatctgaaaaataattattatgagagtccncatattacaaaaatacaaatattatatctgagtccttacttaccaggagatctgattataacttgatttcccatacatttatgccactcccatgggccat

SEQ ID NO: 368950 - DNA, 201 bp, Homo sapiens
ccattaaatgttttactctccggttattcttcagggaggattgtgctcatcagtgttctcgtgacttttgtttgcctctctctgcattaaacacccaaacrtcagtgagatcctttagaatctggcaaaacttcagagaactctgaggaaatgaaactgcctgtccactcagtttcattgatttttctgagtaaccttaaa

SEQ ID NO: 368951 - DNA, 201 bp, Homo sapiens
tgaaactgcctgtccactcagtttcattgatttttctgagtaaccttaaaggcatatcttactacttaagaagtagagattcagtaaaatgttgtttctgytccaaggataaaaattgagaacatttaacttgtattatatacttggaatcataaagacaaattgaaatagttgatgtctgcccagatagaatgtgctagc

SEQ ID NO: 368952 - DNA, 201 bp, Homo sapiens; identical to SEQ ID NO: 80000

SEQ ID NO: 368953 - DNA, 201 bp, Homo sapiens
gattttcttacacacttgtattgcttttaggacatgataaatgatacaacttaataggaaaatgataaatctcaaggagaaaacttggcattaatgtaacrtttaatctgcagaacaaattgatgttgtagcttccttcttatctttctgtttttatcaataagagaaagatgtctttggggatgggaaggaaacagaggg

SEQ ID NO: 368954 - DNA, 201 bp, Homo sapiens
ctgtaacactccctaagagtgccaaaaaaattagtttgcctggaaatccattagtaaaaaatatcaaacattcctaaaaattaaacaataggaaaaacaarcagggttttagttgttaaaaaggacagaccaaatatttggtacttttactcgcttaatacatcaaacatgggtcttctgtgctacttgtcagggggattc

SEQ ID NO: 368955 - DNA, 201 bp, Homo sapiens
ttacacacttgtattgcttttaggacatgataaatgatacaacttaataggaaaatgataaatctcaaggagaaaacttggcattaatgtaacatttaatstgcagaacaaattgatgttgtagcttccttcttatctttctgtttttatcaataagagaaagatgtctttggggatgggaaggaaacagagggtcttgag

SEQ ID NO: 368956 - DNA, 201 bp, Homo sapiens
gaaaaagttaagttgttgcttgccaatatgtaataaattaggacactgttttccagtttccagttccattttaacttgtagagaataaacgttttcaatcyttcaacagactttggagtcttttcatccttaataaatgttaaaggagagataaaaccccattgatatctcagcattataagcaatggcattagcctcatt

SEQ ID NO: 368957 - DNA, 201 bp, Homo sapiens
gctattgttatagtgtttttttctatgataattgatgtcctttatttaaactcatgggaacagaaaggagttatcctggctctcccctgatagtaacaacmcccctcacaattcactgtgttgttgaacttctcaagaaattacctatagaatagagaatgcaggctgggcgtggtggcttctgcctgtaatcccagcact

SEQ ID NO: 368958 - DNA, 201 bp, Homo sapiens
taaaaatagctaatattatttagcactgcttctatgccaggcacaatattaaggtgggtattttgttatcctcatttctcaaataaggaaacttaggctcmgagattgagtacttgcccaaacccacagtgcttagctcctctcagttccctgcatttcagtgaaattagacatggggcagtaggggtgataggggaaagt

SEQ ID NO: 368959 - DNA, 201 bp, Homo sapiens
tgagcccaggagatcgaggctgcagtgagctgtgatcctgccactgcactccatcctggttggaggagtgagactttgtctcaaaaaaaaaaaaaaaagakaagatttgagaatatcagaatgtaatttgaatatctaggtagataatgtctccaaaatcttttagcaggagaagattgaatttaccgaatcctttagatg

SEQ ID NO: 368960 - DNA, 201 bp, Homo sapiens
ctgcttcaaaatattaaaatgttagaagaaatagtagttctggagtgggtgacattatttacaatagcagctccttcgactgcttcagtttttctttgttscaagccacagactatgtttgccatttctaggggacatgacttctctaagcaatttccaattctgtgtagtttttctgcttttcagctcaataatcagcct

SEQ ID NO: 368961 - DNA, 201 bp, Homo sapiens
cccaaaagcataggctgccatcatctttaggctcagtattgaagttcaaatttgtgaatcattattatgaagaaaagcttcatgtgattgtcacatggttkcttggtattagttttgccaagtatgtgaatagttttatttctggaattctcctatctgtattatcttttaaatatttgtagttcatgcctttgctaatga

SEQ ID NO: 368962 - DNA, 201 bp, Homo sapiens
tgtgaatagttttatttctggaattctcctatctgtattatcttttaaatatttgtagttcatgcctttgctaatgaagtgtatctgtcctatattctgcyaactgatagaaagcagctcacacttaacagttaaagaacctgaagtgatttcctcaagctttaatgcccagtagttattaaaaaccttaaatagacctcc

SEQ ID NO: 368963 - DNA, 201 bp, Homo sapiens
tccattaattgatgaataaagaaaatgtggtatatttttggcaatatacaggaatgaaaggaatattattcattatttaaaaagaatgaagtactgatacrtgctacaaaatgaatgaaccttgagaacattatgccaagtgaaagaagccagacacgaaaggccacatattgtctgatcctatttatataaaatgtccag

SEQ ID NO: 368964 - DNA, 201 bp, Homo sapiens
acaaaccaaatatcacctgccccccatacacacacacccttaacaaaggaaataagtcctgtaaggagtttcaccgggatagtggttaaaaatcggtactytttgattagatctggtttaaatcctgtctcctccattaattacttgtgcaatctttaagcattgatttccttgtgtaaaatgtaataatagttacatttg

SEQ ID NO: 368965 - DNA, 201 bp, Homo sapiens
tactcctaccagttttatgttgaattctttgaaatacccaggagactgaactagaacttatggaccgcaccctatttctcatatagttaaccaactaatgkcctaactcagtggattctgccccattgctgataagtggcaaccatcggccaggtgccatctgtgggggtacaaggacaggcgaagctgaactgcccttct

SEQ ID NO: 368966 - DNA, 201 bp, Homo sapiens
agaccttgttggaatcctagcattgccatctattcactgtttggctttttcaaacttccttttaaaaaacgtgacaaaatggttataatactaaactattygggttgttgtaaattttaagaacaacagcagttactaccatgtattgagcacttaggttgtgtcaggtaccctgccaagaaaagatcataagcaatgtca

SEQ ID NO: 368967 - DNA, 201 bp, Homo sapiens
aggttgtgtcaggtaccctgccaagaaaagatcataagcaatgtcacttcatttccatcataatacatgaagtagtgctatggtttggatgtggtttgttyccaccaaagctcatgtggaagtctaattgccactgcatcttgggaggtggggcccagtaggaagtgtttgggtcatgggggcgggttcctcatgaataga

SEQ ID NO: 368968 - DNA, 201 bp, Homo sapiens
gccagttgtgataagtgccaggaaggcaaaaaagtatgttgtgatagatagagctggctgatgtgaagaagatacatcagggaacaggacccagactcagrtttggaaatcgtgatggtctttttcctgtttaacccccacagtgtagagcaatagcccccaaggttgggaggcacatgccttagaggttgcaagatgttc

SEQ ID NO: 368969 - DNA, 201 bp, Homo sapiens
tcatctcatcctttttaaagtatatgttttttaagacacataatatattagtagacttgtacataaatctaatttataaataaatatgcatatattggagrtattatttttacgggtggaatgacctagtgcaatggttttcaacctctgtttggtgttacagctctgtttggggttagcagctgattgactgtcccttag

SEQ ID NO: 368970 - DNA, 201 bp, Homo sapiens
tggggttagcagctgattgactgtcccttagtggccagggggagaggacttcctcaggccatctcttcatcccactccaggtatcccagctcaagaatagyaggtttcaggtctctagttataggaaatacacaatggagtatttaggagcaaaaagccatgatatatttaacataccctcaaatggttcagaaaaaaatg

SEQ ID NO: 368971 - DNA, 201 bp, Homo sapiens
gtcctgtgagttcaggaatggatagaagaagtgttcagccaggccgctcaacctctcacaacgtggagtctatgggttcctctctaatgggcctcacccasaagggtgagactagggaaggtcctcatctcttacaaacccaagggaaaatctgatttaattagctttataaccttctttcaattattttgcaactcaaag

SEQ ID NO: 368972 - DNA, 201 bp, Homo sapiens
gctttataaccttctttcaattattttgcaactcaaagttccatgttttccttcgagaatttattaaattttaaagatcacttttcaagcagcaacatttrtagtattgggtagccatttcttcaccatttctaaacattattttggttcttatgagtcatattattttcatattattttaaaatcctcactagcctcaaa

SEQ ID NO: 368973 - DNA, 201 bp, Homo sapiens
attcatatgcgatgacttttttttctttttctttgaaacatttctgcctctatccatgatctaaacttgatatgttaaatttaaatttaatttccccaagygtgagtactatatgtcattgtagataatttgcaaactacaaaaaataaaaataattggctgggcgtggtggctcatgcctgtaatcccagcactttggga

SEQ ID NO: 368974 - DNA, 201 bp, Homo sapiens
gacacagattattttttaaagttattcttaaacatgtggaattactttataataaacccaaaagttgctgttgttagagggaaatttttactaagtcaagyactctctggaaaaaaaaatgtgtgagcataagctaatatcataaatgaaatgatgaagaagaggataagggcacatggtcctaagtgaggaaactttgac

SEQ ID NO: 368975 - DNA, 201 bp, Homo sapiens
ataattgtgggtattctactcaatattacaccaaaagttaagaagtggtcattgcttaaagtttagttgctgtatggaccttatgccctgggcatacttgygtgagccactcccaagcagcagtcagatggccgctttttataagaaaaagttgaacactctcttttgagataatgatttacataaagtagaataaaaaat

SEQ ID NO: 368976 - DNA, 201 bp, Homo sapiens
agcttccagtcataatggaaggtgaagttgagctggcgtgtgcagatcacatggcaggagaggagagagagagagatgccaggctctttctaacaaccagmcctctcaggaactaatacagtgagaacttataactgcaaagatggcatgaagccattcgtgagggatccacctccatgacccagacagctgccattaggc

SEQ ID NO: 368977 - DNA, 201 bp, Homo sapiens
agccctcatttggctgggaagatacttaacttcagttactctagtagcttctaccctgtctttgccaagatctcccattccttctgttgtcttggaagagwaaccttctcttccctggtattgtgcataatgaaactttatttcaccatcctgtcaagaggggaaaaatttttttcacaattatatttttccatctaatgt

SEQ ID NO: 368978 - DNA, 201 bp, Homo sapiens
atttttagtaaaagttgaagaaaaatctggccccacaaagatgtgtagttggaaaagggagggctattttaatatccttttcatataattgtgggtattcwactcaatattacaccaaaagttaagaagtggtcattgcttaaagtttagttgctgtatggaccttatgccctgggcatacttgtgtgagccactcccaag

SEQ ID NO: 368979 - DNA, 201 bp, Homo sapiens
catatggaactttgagaatatgtttgcaggtgtgaaaataatggtcggtggatctttctccctgtcatgtatatatacagtgtgtagagagtaagagacayattttggaaaagaaaaatgattttaattgttggtgtttcaggacaatgctttgcttttaaagttacatgtcattatctcaaccccaattcagtctattcc

SEQ ID NO: 368980 - DNA, 201 bp, Homo sapiens
tattagctgtatagttacaaatttctcttaggactgcttcaaaatattaaaatgttagaagaaatagtagttctggagtgggtgacattatttacaatagsagctccttcgactgcttcagtttttctttgttccaagccacagactatgtttgccatttctaggggacatgacttctctaagcaatttccaattctgtgt

SEQ ID NO: 368981 - DNA, 201 bp, Homo sapiens
attatggcgatgccattctgtttcctaatctgttacatgtgcaacttccccctctcattagagacggttttctgaaatttcactgtgatgtgctttgggtrtagatcatcatttattcatcatgctgagtactcagagagcactttcaatctgaaaatgcagatccttttgttatggggaattttcttatatgatttattt

SEQ ID NO: 368982 - DNA, 201 bp, Homo sapiens
aatcttactgttttgtaagcttcctattgaatttattttaactgccatgtctgttaattaccagcaactcttttgtgttttctgataattccttttttgtraagttctgtttttaatttatagatgtcataacttgtttccccaaagcctgtgctcttaaccattactcttaaatgtgtattatgtgtgtgtgtatatata

SEQ ID NO: 368983 - DNA, 201 bp, Homo sapiens
gttactatgtgtgggacgcagttctaagtgtttcatgcgaattagttcagtgaatcctcatgataatggattctctgggaactattattgtcccatcttgsagatgtgagaactgaagcacaaagggcataagtaacttgccccaggtcatgcagccaggcagagcctggctccactacagtatcctgcctcccagatgat

SEQ ID NO: 368984 - DNA, 201 bp, Homo sapiens
gggacagtgaccggatcctgttcaataacacatttctacttagacaaatagagcaatttattgcagagtctaaacttttagcacttattatctgagctttyacaatattacatgtgatttaatactcaaatggagttaataatcttaactaattcctctaaatcttacgtcccttttccccttacatataagaatttcctt

SEQ ID NO: 368985 - DNA, 201 bp, Homo sapiens
tgttgcttcccatgggttaaagcatgggcaggcctcctgccagggaacccaggatggtggggaagctggttgtttacctccatctcactttttccagtgtrgaaaccatgagttgggccacagtgggtggggggtgtagcagatatggacatttgattcttttaccatctcctcagagtttttcacttctctgtgaccctg

SEQ ID NO: 368986 - DNA, 201 bp, Homo sapiens
tctgtggagaggagtgaacctagattgtgtctgtgttatcattttggaactagaagttccgaaatcaataaccaatacattttaaaaccacccccaccccrcaccaaagggtcttgcatttgtattctctgtgtcaaaccattgaattcataatcccagagtcgaaggaaaaaatgcctctcaatctctatgtttatcaga

SEQ ID NO: 368987 - DNA, 201 bp, Homo sapiens
  misc_feature (1)...(201): n = A,T,C or G
tcctccacctggctgtgtgcccagcaactaggactagttcaagaagtatttgttgacgaagtaaatcaatttagtttggggggaccatggccacaggatcnagacacttctcagctctctgctgtctccttactcttgctttccagactctgattcccgagcagttgggaagacatctttttgtttcttccattctgaaat

SEQ ID NO: 368988 - DNA, 201 bp, Homo sapiens
  misc_feature (1)...(201): n = A,T,C or G
ttgggaagacatctttttgtttcttccattctgaaattcactgaccaactgcgtacatccatgctcataaacatttgatttagctataaaatctattttanataaaaatgccaattagagtagaaacttcctgctcctccctgtccccactatgtgtaaggtaagtgtggaggtgggaaaaagagcgttgtcttctaagga

SEQ ID NO: 368989 - DNA, 201 bp, Homo sapiens
acaacttagactaactgcagccatctcataaaacacacccaagtgcaatcaaatgaaagaactggatatttgaacacagagtgaatcagtcggcactgtartggggctgctttctaatgttacctctgtaaacagggctctgtgctgaccttatggtgggcaaacccattacctttgttggagttctaaatgccaccttag

SEQ ID NO: 368990 - DNA, 201 bp, Homo sapiens
tgttacactaatgtcttttcagacaaatgtaggaaaaggccattgttgtttagggaaaaatctaataaattctagggaagtccttttcaaattatacagtrtcccagaatcagcctgggaagcttgttaaaaaggaagattcctggagcccacctctagggtgtgatttattaggcgtgggagaaatccgtacatcagcat

SEQ ID NO: 368991 - DNA, 201 bp, Homo sapiens; identical to SEQ ID NO: 79972

SEQ ID NO: 368992 - DNA, 201 bp, Homo sapiens
ataatctggccctgtcagcccagctgtgttcctctggatgaaaaactcctgccccagctcctaaaagaagcaggttatactacccatatggtcggaaaatkgcacctgggaatgtaccggaaagaatgccttccaacccgccgaggatttgatacctactttggtaatggaaatgcacatgtttctttaacaacttagact

SEQ ID NO: 368993 - DNA, 201 bp, Homo sapiens
catgactctattatctggagtacaaatcactgcttttttttttgttttgtgagacagggtctccctctgtcctccaggatgagcacaaaggcatcctctcrgctcactgcagccttgagctccctggctcaagtgatcctcccacctcagcctcctgaatagctgggaccacaggcatgtgctaccatgcccaactaattt

SEQ ID NO: 368994 - DNA, 201 bp, Homo sapiens
cacccctcttggcctcccaaagtgctgggagtacaggtgtgagccaccgcgcccggcctatcagagatcttaatttgatttatttctgttcaaatcagatytgactcttaaaggcacccatttattgccccagacctgactgtagatattctgcaggatctacacatacttttatctttatttatatttctatttgcttat

SEQ ID NO: 368995 - DNA, 201 bp, Homo sapiens
ctcagactccttccctgaaattagaacctgcctctgtgcttctccctcagtaaactgttttgttttctttgctaggctgtggttactggttccctccaccrtctcaatacaatgtttctgagataccctcatcagacccaccaaccaagaccctctggctctttgatattgatcgggaccctgaagaaagacatgacctgt

SEQ ID NO: 368996 - DNA, 201 bp, Homo sapiens
ctatttgtccatttttgctttggttacctgtgcttgtgggatattacacaagaagtctttgcctagtccaatgtcctggagagtttccccaatgttttctwttagtagttgcatagtttgtgttcttagacttaagtctttaatccattttgatttgatttttctatatggtgagagataggggtctagtttcattcttct

SEQ ID NO: 368997 - DNA, 201 bp, Homo sapiens
aagaatggtgaagtgaatactttgcacatatgtcattttgtacatattggaacgtatatgaaggataagttcctagaaatggaattttctgggtttaaggrtagatgcatttgtaattttgataaatattgcaaaattgcatcttaagggattgtaccaatttacattcccactggcaatattaagttatagttcacatcc

SEQ ID NO: 368998 - DNA, 201 bp, Homo sapiens
attgcttgaacccgggagacggagattgcagtgagccgagattgcgccactgcactccagcctgagcaacagagcaagactccatctcgcgggggggaagkggggaaagaaagaaatacaaacaagtaaggtgaatttaaatagcatgacaatacatgtggagaagaaaataaagtaggtcaagtgatcttgactcaggaa

SEQ ID NO: 368999 - DNA, 201 bp, Homo sapiens
taatctggccctgtcagcccagctgtgttcctctggatgaaaaactcctgccccagctcctaaaagaagcaggttatactacccatatggtcggaaaatgrcacctgggaatgtaccggaaagaatgccttccaacccgccgaggatttgatacctactttggtaatggaaatgcacatgtttctttaacaacttagacta

SEQ ID NO: 369000 - DNA, 201 bp, Homo sapiens
ttaaatgtatttaagagttaacatcatcctcatgccaagaccttactgtgtttcagataacggagggcagactttggcagggggtaataactggccccttygaggaagaaaatggagcctgtgggaaggaggcgtccgaggggtgggctttgtggcaagccccttgctgaagcagaagggcgtgaagaaccgggagctcat

SEQ ID NO: 369001 - DNA, 201 bp, Homo sapiens
ttaacatcatcctcatgccaagaccttactgtgtttcagataacggagggcagactttggcagggggtaataactggccccttcgaggaagaaaatggagsctgtgggaaggaggcgtccgaggggtgggctttgtggcaagccccttgctgaagcagaagggcgtgaagaaccgggagctcatccacatctctgactggc

SEQ ID NO: 369002 - DNA, 201 bp, Homo sapiens; identical to SEQ ID NO: 79997

SEQ ID NO: 369003 - DNA, 201 bp, Homo sapiens
tgccttgatgacagtaataaactagagtgtcttgataaagaccaaagtcatcaattttccaaaatctgtatttgattaattctccaaaggtccaggtcaakgttattcctcaaactttattattttaacatagaagcccaaagtttccaagtctgtcagaaaattcattatcactgtaaaacagcaaaaggtcacaaaatg

SEQ ID NO: 369004 - DNA, 201 bp, Homo sapiens
tttctctcccaattatccaaacaaaggctggtttaggcactgcctgaaaggacttgatagatgtaatccaagtcccatatccttaagtgcctcaaccaagrggaagtcctgggtgggcctgattcagtcatatgagtaaaatataaattttcctttgtaggctggtttttactaaaaatgatattgctggattatccttgg

SEQ ID NO: 369005 - DNA, 201 bp, Homo sapiens
gcattattttgcctgaggaaaaacatatacacctatcctgcaggtgccgggcttgatcttggctgttctgcagtaatgatcctgccccatctgagaccacractcactttggaagtcagacgtggcattctatgatggctggaacacacatatccgatcatgtaacataggtgtatatatttaaaacgtacgcacacacag

SEQ ID NO: 369006 - DNA, 201 bp, Homo sapiens; identical to SEQ ID NO: 80003

SEQ ID NO: 369007 - DNA, 201 bp, Homo sapiens
gaatgtattcacaatttttcctttttttttgaagggggtgggggaagactcttccattggcattcttccacctgtgaaatctgtttttgcaatcacaaagktggggaagataggttttaaaaaacaaaggaaaatgaggaggccaaataaatggtaataagaaggataataagaaataataataagtattttataaacttg

SEQ ID NO: 369008 - DNA, 201 bp, Homo sapiens
gatgagtagaaaaagatggaataggttaatggcatcaaattacagaaaagttgcatggctctaggctgtcttcatattcatctctgatatttgaaatttctttttttttttttttatatacggagtctcgctctgttgcccaggctggagtgctgtgtcatgatctcggctcactgcaacctccgcctcccgggttcaagc

SEQ ID NO: 369009 - DNA, 201 bp, Homo sapiens
cagtgggtggggggtgtagcagatatggacatttgattcttttaccatctcctcagagtttttcacttctctgtgaccctggaaatggaatcatcctcatrtttgagttctgcgatgttgctggtgataatcttggcaccttatatttgttttggttttctgtggagaggagtgaacctagattgtgtctgtgttatcatt

SEQ ID NO: 369010 - DNA, 201 bp, Homo sapiens
tagaagttccgaaatcaataaccaatacattttaaaaccacccccaccccgcaccaaagggtcttgcatttgtattctctgtgtcaaaccattgaattcayaatcccagagtcgaaggaaaaaatgcctctcaatctctatgtttatcagatcttcaatgttttattatagtacttaatatatactatgctataatgtctt

SEQ ID NO: 369011 - DNA, 201 bp, Homo sapiens
tcttaggaaccatgtagcataaataaagggaaaagaacccccaatatctcaaacatgaatatgctaatagctctaggtgataatgtcttgcttttatgtartacttagatatttagtaatgatttcatgcctaggatttcatttcacattcccaagacactggaaagggttacaggtagggttggagctaaggcagtaact

SEQ ID NO: 369012 - DNA, 201 bp, Homo sapiens
cttgaactcctgggctcaagggatcctcttgcctcagcctcctgtgttgctgggactacaggcatgcaccaccatgctcaaattattattattattattakagtagtagtagtagtagtagtagtagtagtagtagtagtagtagtacagaccaggtctcagtatgttgcctaagcttgtctcaaactcctggctggcctc

SEQ ID NO: 369013 - DNA, 201 bp, Homo sapiens
cccggcggcttctcgccccaacctcgctcttccaggccggcagcccgccgcggcctctgcgcatgcccggctctggcgccccgcggacccgcgccccggcmgccgggttgggcgggtggctttgtctttcgttttctgaagctccgggcgaaggggtttatgggaatgccgggtgctgggcgccgcggccggcaggcggag

SEQ ID NO: 369014 - DNA, 201 bp, Homo sapiens
ggattttgttgtaaatccagaaaaatacgtaggaagctgtaaacgattataaaaattcaggcccattcttcaatccatgggtatatatttgacaccttggraacttgcattaatactttttcggtaaaataaaaacctcaactcaccttcatttattgagcatcttctgtgtgatgagcagtgtcacctctgtgtttacgc

SEQ ID NO: 369015 - DNA, 201 bp, Homo sapiens
cttgcattaatactttttcggtaaaataaaaacctcaactcaccttcatttattgagcatcttctgtgtgatgagcagtgtcacctctgtgtttacgcacrtataaaagttccaggttctgctttcaagagtttacattcttatatgagcagtaaggctagctatccaacccacttgctaatagtgtaagactttatacaa

SEQ ID NO: 369016 - DNA, 201 bp, Homo sapiens
gggttttagagacaatccccacacaatgttttcattttaaaaacagagacccagagaggctaagtgcaaccacttatgttagaatggagacttagccttgyctcttacacttgtcctcttaccacagttaggtgagtccatctgataatgatgcagaaaggttagcgttgccttgatgactgtcagaaggcagctataggc

SEQ ID NO: 369017 - DNA, 201 bp, Homo sapiens
gtggttctctgacttgatttgaagctctggcttagtcagctgaggaaagactacagtcgccttcctccccaggagtttatcagagacttgctcttccgtgsagggcctgggaacgcagtgcctaagctcttggtgggggaccaccccgctgtgcttggcttcaaacaggctgctgtccattgctttcagaagcatgagatt

SEQ ID NO: 369018 - DNA, 201 bp, Homo sapiens
actgactgtaatctttatgatctttttttgtatttttctttcacagtatgggccatatctaatcagcctctcctaccgtgactattcaaagaaaaggatcttttttttctttttctttttcttttgtttccatctcagaacactttcttgtcaatatcttctttttaaaaaatgaggattgttgtaacaaatttagcaaac

SEQ ID NO: 369019 - DNA, 201 bp, Homo sapiens
ctcaaaatagcctgtgatctggtgaactattcagatacatgcaaattagtcaaaatataaaagaaatagaggtggggaacaaagggagtgctgtgtttgcrctgacagtgctggccgtaggttgccattttaaactcccactttggtgtccccttttgtttgaaggtccctctggagtccagaggtaatagagcaggctga

SEQ ID NO: 369020 - DNA, 201 bp, Homo sapiens
tatctgctaatgaatgataaacagatcaacctgtcaaagtcattgttttattgtcttacagcctttcctgagcctaaaagtacctccagatggccacttayactccttttaaaccccaaacctaccttttgtgcctaagtaaaaataacttagaagctacaagtcacttattaagttgtaattgacattatatacagatgt

SEQ ID NO: 369021 - DNA, 201 bp, Homo sapiens
cttccaaaactgaagagaaactgcatgagaatagggtctctatctttttcatttactgccatatgcacagtaaggtctccgtagcacagaacctaacatcrtagtaagttgttgggttaatatcagtaaatatctgctaatgaatgataaacagatcaacctgtcaaagtcattgttttattgtcttacagcctttcctga

SEQ ID NO: 369022 - DNA, 201 bp, Homo sapiens
tttaatgccactggaccatacaattaaaagtggttaggatagtaaattttatgttgtttgtattttaccacaatttaaaaatataaaaaataaataaaacrtaactttccctccttccaaaactgaagagaaactgcatgagaatagggtctctatctttttcatttactgccatatgcacagtaaggtctccgtagcaca

SEQ ID NO: 369023 - DNA, 201 bp, Homo sapiens
ggcatgattgttgagtgggtgtagagatggatggtgatgatgacagcataacaacgtgaatgtatttaatgccactggaccatacaattaaaagtggttargatagtaaattttatgttgtttgtattttaccacaatttaaaaatataaaaaataaataaaacgtaactttccctccttccaaaactgaagagaaactgc

SEQ ID NO: 369024 - DNA, 201 bp, Homo sapiens
tcctaggccctcccttcatgcagcttcaggatctctcagctatattttgatcaaacatccaaggaatttctggtgattcaaggaccacactttgaggaagsttgctgtagacatggaaagcatataatccatagttctttgtcctgtaagaccgtataactgagttagggaacaggaggtagacatacataaagataacga

SEQ ID NO: 369025 - DNA, 201 bp, Homo sapiens
agaatggggcatgattgttgagtgggtgtagagatggatggtgatgatgacagcataacaacgtgaatgtatttaatgccactggaccatacaattaaaartggttaggatagtaaattttatgttgtttgtattttaccacaatttaaaaatataaaaaataaataaaacgtaactttccctccttccaaaactgaagag

SEQ ID NO: 369026 - DNA, 201 bp, Homo sapiens
atcagagatctacagagatcttagttgtgtatcagagatctacagagatcttagttgtgtatcagagatctacagagatcttagctgtatatcagagatcyacagagatcttaattgtatatcagagatctttctttggggggcggcacagggggacggagtcttgctctgtcacccaggctggagtgcagtggtgtgatc

SEQ ID NO: 369027 - DNA, 201 bp, Homo sapiens
tctgcccctaaggagccagagagggccagggcaagggtgggagggggcatctataaacaactgcttgcaatgcaaaacagaatcaagttagtcctaaaaaraggattgagcaaggttgcttaaggagaaaggaaggattcattatgataggagatcaagcaagacacttgaaaagcatgtcccttctggtagcgggcgcct

SEQ ID NO: 369028 - DNA, 201 bp, Homo sapiens
aatttctgtatttttagtagagacttttaaaaacatgtttatttgtagatatcagtgaatgtttcttccatttacttttgacccaactgcaatcaaccttstttcctaaatatccctaaatccattgctactgctttaacaaaataccacagactgggtaatttataaataataaaactttatttctcacagttctggagg

SEQ ID NO: 369029 - DNA, 201 bp, Homo sapiens
caatcccgctactgggtatatatgcaaaggaaatgaaatcagtatatcaaggagatatgtgcactcccatatttattgcagtactattcacaatacccaakatatagaatcaacttaagggtccatcagtgggtgaatgaagaaaatatggtatatatacacaatggaatactctttagccataaaacaaaatgaaatcct

SEQ ID NO: 369030 - DNA, 201 bp, Homo sapiens
atagtaaccaatacagcatgttacttgtgtaaaatacagattcatataccaatggaacaaaatagagaacctagaaataaattcgtgtatgtatagcctamtgatccttgacaaaggcaccaagaacatttattgaggaagagacagtcttttcaataaatggtgctgggaaaattggatatccacatgcataaaaatgaa

SEQ ID NO: 369031 - DNA, 201 bp, Homo sapiens
tacagcatatcaaaaacctatggtatacagcaaaagaagtgttaagaggaaaatgtatagcaatagatgcctacatccaaaaagtagaaggatttccaatmagcaacgtagcaatgtatctcaagaaactagaaaagcaagaacaagccaaatccaaaattagtagaaggaaagaaataatgatgaaagcagaaataaaca

SEQ ID NO: 369032 - DNA, 201 bp, Homo sapiens
ttatatgaattacatattgaaatgataatatttttatatattgggttgaataaaatatattattaaaattaatttcagccaggcaggcgtggtggctcacrcctgcaatcccagaacttgatcacttgagcccaggaattagagaccagccttggaaacagggtgaaaccccatctgtacaaaaagatacaaaaattagct

SEQ ID NO: 369033 - DNA, 201 bp, Homo sapiens
aaaaccctgtctcaaaaataattaatttcaacagtttatttttatcttttcatgatctggccactagaagattttaaattacatttgtggctcacattttrtttccattagacagtgctgctttagatggtagcttcataattgcagtaattcatacctcttgagagttctccagggattattttgttgaagattttctct

SEQ ID NO: 369034 - DNA, 201 bp, Homo sapiens
actattttcgtcttccattcttgcaggatatctcctgggtagtgaagattattattcccatgaacgctgtacattaattgacgctctgaatgtcacacgaygtgctcttgattttcgagatggcgaagaagttgcaacaggatataaaaatatgtattcaacaaacatattcaccaaaagggctatagccctcataactaa

SEQ ID NO: 369035 - DNA, 201 bp, Homo sapiens
taatattttcccaagtcttgaagcactaattgattttgggacttaagcaagatcactttttacattgaatgcagaaactgtgttcctatggattagggcayggtctgtgtagccatcaactggagatcctgctgagaactgtaaatgaggaagaaattatgggtcatgataataaggtgttccaagtctcaagattcagac

SEQ ID NO: 369036 - DNA, 201 bp, Homo sapiens
caactgggtaggattggggcaagcaggagctaatgactcaatagccaattgctgtctttaaatcttactgaaattcttaaaactattgaatggcagcattytagttttaagtcttttccagaatgtgaggtaggtatgttattctctgtttttcagatgacgacgtgagcttaagggactgtgatccatagttaaagcaaa

SEQ ID NO: 369037 - DNA, 201 bp, Homo sapiens
atgctcaccccatcccctgtggtggaggtgtgtcccccactgctgtcccagccttattgccttctgagggttctgataacccgccgcaggtatggcctgtrgctagcagggtagaggaccactaagacctaagtctcacagtgtatctttctacccctgacttccatcctgtctcctgtttgaagtgttgctcagatgact

SEQ ID NO: 369038 - DNA, 201 bp, Homo sapiens
cattcccctttgacataccttttcatccttgagtcaggacaattttacctttcagaaagtagctacagtccttttataatttactcctcaccaaaggtaaratacatccattttctctgtgtgtgacttctgactattctgcactgattcaataccccttcgttttttgcttattttttcattctcaccattcaaccacac

SEQ ID NO: 369039 - DNA, 201 bp, Homo sapiens
accattcaaccacacttgacacttgaatcacttttgttgatttaaaagaacaacaacaacaaaaatacagagtaagatcacttgactttattgtattagcyattaaatctctttctggagcaatagttctctaagtatggtcccaggagcagcaatatcactatcacctggaaacttgttagaaaggcaaattctcaggcc

SEQ ID NO: 369040 - DNA, 201 bp, Homo sapiens
tggttgggagcactggctcccgggagactggtggccctgacactcaagccattaactgagaatgctctctaatcccttgttttcattgttggtgttccggmcaggctgcccgcacagagcctgcccgttttcattggctgcaggaattgttattggagtggctgacagctgtctgccaggctgcctgaaactgccttcctg

SEQ ID NO: 369041 - DNA, 201 bp, Homo sapiens
caacaattacattctggctgctacgattggggcagggtgggaaagttgcacttttcactttatgtatttctctagttttaattttaaattatgagcacatrtgacttccttaatcaggaataaagccataaagctttatttgtgaaaaccacctccaaggagggttccggtaagcatggaatatctgaaatctgctgggtt

SEQ ID NO: 369042 - DNA, 201 bp, Homo sapiens
ctgattatagggtgaaagaacagccttcttcccaccctctcctctctcacacacacattttctgtggtgcaattgccaaatccatgcttgagatccaagartcgtccaggttggaatgcttggagctgctccctgtttcctcctcagagcgacattcagagccatttcccagtattatgttgccatttccaagattgttta

SEQ ID NO: 369043 - DNA, 201 bp, Homo sapiens
gcttgattatagatgaagggcagtgacagatgttagcattttccaccccaccaaaggccagctcttcaaagtgattccatacagctttgttactatttcakttaaaggccctcttctctttaaagtttctaatgagatgttatttctgctcctgattatagggtgaaagaacagccttcttcccaccctctcctctctcac

SEQ ID NO: 369044 - DNA, 201 bp, Homo sapiens
tattggagtggctgacagctgtctgccaggctgcctgaaactgccttcctgtgctctccgctgctgctccacttcacagcgctattgttcctgttgagccttttcttaaaatctttcccagctgtatcctgatatggtaaaccacttaaattagctccagattgttctgtttattttgtgttagataagcgacaaaataca

SEQ ID NO: 369045 - DNA, 201 bp, Homo sapiens
ttgtgttagataagcgacaaaatacagtcccagcggcagaccaagaggagagtggaagtcgggggaggggggtcagaggacacaaggtcttttacaacacraggtagagttcccagacaaaactgtgagaggcacaagtatgatacagtcactggcctgaccatttatacgtgactctgatgggccaggtgagcattaacg

SEQ ID NO: 369046 - DNA, 201 bp, Homo sapiens
aactttggaataataatcaccccgccccatccccttgccctctgatggaaagtgccttgtcttctccatcaaggtctagctgggggcttgaacggcctccrtgtcacctctaattccccagtttttaccttgtttcctttctctgtatcttttttgcccttagttgtgtacagtcttgtattttttcacataggctatgct

SEQ ID NO: 369047 - DNA, 201 bp, Homo sapiens
attagagtccagaaagagagcagaaatattagtgtagaaaaaatatataaaggaataatgtgtgaaaacttcacaaatttggtgcaagatacatgtacaarttcaagaagctcagtgaaatccaaacaggataaactcaaagaaaactacaccagcatcataatggaactgctgaaaactaaagatgaaaaaaaaaaatac

SEQ ID NO: 369048 - DNA, 201 bp, Homo sapiens
aggggttaaggctgggtgtacaatttgtctacaaagaggtggtacaaaggagttatatcacagtgatagaatgttctatcctgattgtggtggtatttatrtgactctatttgtcaaaatccataatgatgcacaccaaaataagtgaattttactgtatgtaaattaaaatgaaatcaccagcacatgatttcatatctg

SEQ ID NO: 369049 - DNA, 201 bp, Homo sapiens
atattttgttaaatggatacattgtagtttatttagccagttgcatactgatgaacatgtaggttgtttccagccttttgatatatcaaagaatggtgaartgaatactttgcacatatgtcattttgtacatattggaacgtatatgaaggataagttcctagaaatggaattttctgggtttaaggatagatgcatttg

SEQ ID NO: 369050 - DNA, 201 bp, Homo sapiens
cccgggttcacaccattctcctgcctcagcctcccaagtagctggcactacaggtgcccgctaccatgcccagctaatttttttgtatttttagtagagasgggcttcactgtgttagccaggatggtctcgatctcctgacctcgtgatctgcctccttaggcctcccaaagtgctgggattacaggcgtgagctactgc

SEQ ID NO: 369051 - DNA, 201 bp, Homo sapiens
acaaaggagcatcacaaaatatttgttatgaaaagggtggggatgttagatttgaaaagcctgagaggcatgttatagaaacaaactttcttctgatttcmgtacttttcctatcattatagttgctattacataaaaatgtaaagtcttggaatgagtccatattactgcttcaaaataaccaaaacaataaaaatggat

SEQ ID NO: 369052 - DNA, 201 bp, Homo sapiens
gataattgatgtcctttatttaaactcatgggaacagaaaggagttatcctggctctcccctgatagtaacaacacccctcacaattcactgtgttgttgmacttctcaagaaattacctatagaatagagaatgcaggctgggcgtggtggcttctgcctgtaatcccagcactatgggaagccgaggtggatgaatcac

SEQ ID NO: 369053 - DNA, 201 bp, Homo sapiens
aaaattagcatgaaagggcatgacatattctaacaacagggagaagttagttctacgtgactgaagctcagggcactttttatgggggaggacaggagttratacccaaaaaggaggttgggggcagatatgaaggattctatatgtgggcctgaagttggaactttttccctgattggaaagcaatcaggtctttaaaca

SEQ ID NO: 369054 - DNA, 201 bp, Homo sapiens
catttcttttctagacagtaaaggccttataattagattttccctgtgccaaaacattgctgcaaaaccatctccctgaaaaaacgtttctttgcttcttytaggagctggcgtcatcttattttgatttggaatttttttcatatgtcagtcaggaaatgaaacaaaaatttctcttgaatatgaattcttaacaagaaa

SEQ ID NO: 369055 - DNA, 201 bp, Homo sapiens
aggcgtccgaggggtgggctttgtggcaagccccttgctgaagcagaagggcgtgaagaaccgggagctcatccacatctctgactggctgccaacactcrtgaagctggccaggggacacaccaatggcacaaagcctctggatggcttcgacgtgtggaaaaccatcaggtacctacaccctgccctttttcctcccag

SEQ ID NO: 369056 - DNA, 201 bp, Homo sapiens
agctgccattaggctcccactggggatcaaatttaaacatgaggtttggaggagggtcaaatatctaaactataagaagatcaccgtgtggattctggttkacatacctgtttggacttggtatgtggctgctggttccccttccagtttctgcctgtttgaactcagtattggaaatcttccctgaatgagttaaatgcc

SEQ ID NO: 369057 - DNA, 201 bp, Homo sapiens
aagattcctggagcccacctctagggtgtgatttattaggcgtgggagaaatccgtacatcagcattttagagaaactcttaaaaggtgattcttaagagkggtccccagatcacactttgaggaatactatgttggtagtatttcaatagaaatatagtttaaaaattttggtatattatgtgcatgtgctgtgagtaat

SEQ ID NO: 369058 - DNA, 201 bp, Homo sapiens
gcatctagggccgcatctttttatgtttccacacccacaacccagtgcagccttggcctcagactccttccctgaaattagaacctgcctctgtgcttctscctcagtaaactgttttgttttctttgctaggctgtggttactggttccctccaccgtctcaatacaatgtttctgagataccctcatcagacccaccaa

SEQ ID NO: 369059 - DNA, 201 bp, Homo sapiens
gcatgtattgttcccttttatggctcaataatattccatggtatggacatgccacattttgttcatacattcatcaattcatggacattaggttgtttgcrctttttggctattatgaataatgctgctgtgaacatccatgtacaagtttttgtatgagcatattttttaagttcttttgggttaatatgtaggagtgaa

SEQ ID NO: 369060 - DNA, 201 bp, Homo sapiens
tttgagaatggaaaaatattttaagataaatatttcctttattatatgattgcaaatgtgtatgtataattgtactttcaaacagatagttgactatttcrtaaacatctatatttattcaagctggtagtagtaacatttggagcttctcactgagaaaatgaggatcaccttaaataggattgtcttatattttgatac

SEQ ID NO: 369061 - DNA, 201 bp, Homo sapiens
tgtgtggctcacacctgtaatcccagcactttgggaggctggatcgcttgaggccaggagctagagaccagcctggccaacatagtgaaacctgtatctakatagatagatagatagatagatagatagatagatagatagatagatagatggttatcgattttttaataactatagatcaatggaatggcatcgagagtc

SEQ ID NO: 369062 - DNA, 201 bp, Homo sapiens
tcagtttgctagggtttcatttaggatttttgcatcaattcagaagtggaagtagagttagtggtttcttttttgtgtcaggttttgttgtcttggttgtrctcacttcataaaataatgtggttagttttgccatctttttctatgctctggaatagtttatagaatgttggaaagatctttctgtttagctggtccctg

SEQ ID NO: 369063 - DNA, 201 bp, Homo sapiens
gaaactcttaaaaggtgattcttaagagtggtccccagatcacactttgaggaatactatgttggtagtatttcaatagaaatatagtttaaaaattttgrtatattatgtgcatgtgctgtgagtaattaataaaatgacttaaaaaatgattggcttaggtgtaaggtgaggctttattatgacaaacttttggttaag

SEQ ID NO: 369064 - DNA, 201 bp, Homo sapiens
ttcttttctcagtccatatattttttccaccttaaatacagccagaagaagtggagacaaggcacccagtttgagagtccaggacttggcagtgcacatcrgacattagagaggggttacccataaagctatcttaggggcagctgaatatacaggatctctgtgattcctacccttaccccaaaaagcaggatggctcac

SEQ ID NO: 369065 - DNA, 201 bp, Homo sapiens
gaaccgtacaacacagggtgagctcagccttcagcaaggcgttttggatggtgaggctttgtggttgggattgcactaaatgccatgtagggggcgggggkgtctttctcctttcatcccttgccagagactcagcctgggccatgctcatcatcataatcacaggctgaagaggaatattttgggtttagtttccctttt

SEQ ID NO: 369066 - DNA, 201 bp, Homo sapiens
cttactgtctcagatgtgtttccagttttcattggaaagagaaattgtgttctgaatcccagttcatgtgaaaccctgataacttctcaaaatataaaacrtccttactttcgggggctgctgtcaagaactagaggaggctggaaagagttgtctcaaatgtttgcttttttacctttggcaagcatcacctagtggccc

SEQ ID NO: 369067 - DNA, 201 bp, Homo sapiens
atacagttctgtttcatttttctccccgtcttaattggttttccgtatgcgggttcagaagtaggattttgccatacacatcatccttcatgtgagtaggygagcaccagcatcaggggaaggaaaagagacaaactgactgttagggagggagtctctctccagactcggctagccagcacagcttcagatcctgcccct

SEQ ID NO: 369068 - DNA, 201 bp, Homo sapiens
ctaatgtcatgcaattcatcttcctccaaaagcaacatctctcacgtgttcttccagtgatgccattccagacctagcagtcctttttcctgctctattcrtcgtctagacttacttgaccaatccaaccctggactggttcagtacttccccgactaggctcttcaattggtttctttctgctctgatacagaatgctaa

SEQ ID NO: 369069 - DNA, 201 bp, Homo sapiens
ccaaggccagcgtgcttctctgcatggaaggctgtgcatgagagggttttctgggcccaggcctgcctggaagtggtgctcccaaccgcactcacattcckccagcacacacccaactgcaagggaggccgagaaatgtggtcagagtgtgatcccaagaaggagacagggcagatgacgcagacactgtgggccatgttg

SEQ ID NO: 369070 - DNA, 201 bp, Homo sapiens
taggtttttttttttgagatagagtctctgtcacccagactggagtgcagtggcacgatcttggctcactgcaacctccgcctcccgggttcaagtgattytcctgcctcagcctcctgagtagctggaattacaggtgtgtgtcaccatgcctggctaatttttgtatttttagtagagacggagtttcaccatgttggc

SEQ ID NO: 369071 - DNA, 201 bp, Homo sapiens
agcctgggcaacacagcaagaccccagtctctgcaaaattaaaaaaaactagccacagggtggcacacgcctgtagtcccagctactcaggatgctgaggygggaggatctttagagcccaggaggttgaggctgcagtgggccatgatcatgctgccgcactccaacctaggccacggagtgagaccctgtctcaaaaaa

SEQ ID NO: 369072 - DNA, 201 bp, Homo sapiens
ttcatcacctccacccaaatctccaactattttggagttatttttgtcagagatcagagtatcccagcatctcactatcctcaccattggaggatagattytggcaacttcttagtgagcattttctctacatatttttaaagacaaatacattgctggcagaaacgtcccaaagagtcaaatctagacgatcattttctt

SEQ ID NO: 369073 - DNA, 201 bp, Homo sapiens
cctctcctccagatcatgaattaatgctgtcctttccccttaagcctggcttcttctggcaggtttccccctaatcacccgtatatgagcgttggcattaygagtgttgtttctaattttgatagaaattgactgcagtatattgagttatgtgaacaaactcatttcatttctgaaatctggcacttttgttcattaatt

SEQ ID NO: 369074 - DNA, 201 bp, Homo sapiens
gaaagtgagaggcaaaccactggagaggctcactgaagccaggccagggagaacaaggatgtttgtgacacttgcttcgcaatccaggttttaccatgttwactctcaacatgaccttctagggtcactcctcctttcagcttgttaggtgagactctccaaatctcagtatcaggcttgtttatattttggcttttgctg

SEQ ID NO: 369075 - DNA, 201 bp, Homo sapiens
aaagcttataatgggctactattaaaagttccatttagtactggtttgcatcacagcttaattgtagtcgttataaacttgggcacttattttcatttcarcaaaatcacaaacatgaccttaaattggttaggggagtcattcattctgctgtcctgatgtcttttgttattttggttgacttactgtgaccagtgtgta

SEQ ID NO: 369076 - DNA, 201 bp, Homo sapiens
agttagaatacactgctttgtaatctctcagctgacgcgatgtatctgtatacacccagctgtctctcactttccctctcctcctcccttcccaccctcaratggatcctgtctacctggtcccagaatttgtggatgagttagcattggtggcaattagatttccaaaagctactgcacagccttatgacttggtaaagg

SEQ ID NO: 369077 - DNA, 201 bp, Homo sapiens
taaagtacttgagttattcattacttgagttggaggaggtcacagagcaggaagcgcactggaaagcaaggggaaaggtggcagagagggtggggaatgcrtcagggtgaccttctaggggctgatgggaactcagagtcctggtatggggtgggtatcagagtgggaaggtgacaaagtcatagcaacagccccaaggtt

SEQ ID NO: 369078 - DNA, 201 bp, Homo sapiens
cggcaggtgcaggagcgggaggcggggcggagctgggcagagtcctcgccagtccggcgtcccggagtgaccttcccccaccccgccagcgcccaggaggrgtggacccacagcccagggaggccgaaagcgcgggcgggcaggcagaggcgtggaggctgggccaggactgccgggctggggtcctcgaggctccgggcg

SEQ ID NO: 369079 - DNA, 201 bp, Homo sapiens
ggtttttttttttgagatagagtctctgtcacccagactggagtgcagtggcacgatcttggctcactgcaacctccgcctcccgggttcaagtgattctyctgcctcagcctcctgagtagctggaattacaggtgtgtgtcaccatgcctggctaatttttgtatttttagtagagacggagtttcaccatgttggcca

SEQ ID NO: 369080 - DNA, 201 bp, Homo sapiens
agtggattcaccccttcaagaccacccttcctcttagggcagtgacacctctgccttttttacatattggactttcctaagaaaattgcaaagaaacgctycttaaatggcagtctccccgactggagattaaaacaacaaaaaaggaaagcctacttgaagtcatgcttgagggaaaaggatgacattatttattcatga

SEQ ID NO: 369081 - DNA, 201 bp, Homo sapiens
tttttttttttgagatagagtctctgtcacccagactggagtgcagtggcacgatcttggctcactgcaacctccgcctcccgggttcaagtgattctccygcctcagcctcctgagtagctggaattacaggtgtgtgtcaccatgcctggctaatttttgtatttttagtagagacggagtttcaccatgttggccagg

SEQ ID NO: 369082 - DNA, 201 bp, Homo sapiens
acttagttttcagtgtctttaagcaaagcttataatgggctactattaaaagttccatttagtactggtttgcatcacagcttaattgtagtcgttataamcttgggcacttattttcatttcaacaaaatcacaaacatgaccttaaattggttaggggagtcattcattctgctgtcctgatgtcttttgttattttgg

SEQ ID NO: 369083 - DNA, 201 bp, Homo sapiens
ggagaatgaagaagactgtttaagtgacaggtagaattttaatagaagaaataagaaacattgctttcaagtataagtctcagtgagatgaattgtagctrtactaggtaaaactttttaaaagaacagaaagatgtaatcagaataagactgatgtcagtttctccactggcataagaaactcaaatatctgaatttaat

SEQ ID NO: 369084 - DNA, 201 bp, Homo sapiens
ggagtgcagtggcacgatcttggctcactgcaacctccgcctcccgggttcaagtgattctcctgcctcagcctcctgagtagctggaattacaggtgtgygtcaccatgcctggctaatttttgtatttttagtagagacggagtttcaccatgttggccaggctggtctcaaactctggatctcagatgatccacccat

SEQ ID NO: 369085 - DNA, 201 bp, Homo sapiens
agtgcagtggcacgatcttggctcactgcaacctccgcctcccgggttcaagtgattctcctgcctcagcctcctgagtagctggaattacaggtgtgtgycaccatgcctggctaatttttgtatttttagtagagacggagtttcaccatgttggccaggctggtctcaaactctggatctcagatgatccacccatct

SEQ ID NO: 369086 - DNA, 201 bp, Homo sapiens
tttggggccaacattaaaaaaaaattaatgtcacataaaaattagtggtttgggcttctcttttaaaaatattgaaatatcgcctggtgcagtggctcackcctgtaatcctagcactttgggaggccgagatgggcagataatgaggtcaagagtttgagaccagcctggccaacatggtgaaaccctgtctctactaca

SEQ ID NO: 369087 - DNA, 201 bp, Homo sapiens
ccgggttcaagtgattctcctgcctcagcctcctgagtagctggaattacaggtgtgtgtcaccatgcctggctaatttttgtatttttagtagagacggrgtttcaccatgttggccaggctggtctcaaactctggatctcagatgatccacccatcttggcctcccaaagtgttgggattataggcgtgagccaccat

SEQ ID NO: 369088 - DNA, 201 bp, Homo sapiens
atggtgaaaccctgtctctactacacatacaaaaattagctgggcgtggcggcgcgtgcctgtaatcccagctgaggacctgaggcaggagaatcgcttgracctgggaggcggaggttgcagtgagctgagatcacgccattgcactccagcctggggacagagcaagactatctcaaaaaaaaaaaaaaaaaaaaaaaa

SEQ ID NO: 369089 - DNA, 201 bp, Homo sapiens
ttcaagtgattctcctgcctcagcctcctgagtagctggaattacaggtgtgtgtcaccatgcctggctaatttttgtatttttagtagagacggagtttyaccatgttggccaggctggtctcaaactctggatctcagatgatccacccatcttggcctcccaaagtgttgggattataggcgtgagccaccatgcccg

SEQ ID NO: 369090 - DNA, 201 bp, Homo sapiens
attacaggtgtgtgtcaccatgcctggctaatttttgtatttttagtagagacggagtttcaccatgttggccaggctggtctcaaactctggatctcagrtgatccacccatcttggcctcccaaagtgttgggattataggcgtgagccaccatgcccggcctcagataaacaataatttttaaatgtaagtgtgtccc

SEQ ID NO: 369091 - DNA, 201 bp, Homo sapiens
atctgagaaatggcatcactattcctcatactcatatcaaagtaatggaaccttgagcagccactggaagagagaatgcaagcagccagaaagtgagaggsaaaccactggagaggctcactgaagccaggccagggagaacaaggatgtttgtgacacttgcttcgcaatccaggttttaccatgtttactctcaacatg

SEQ ID NO: 369092 - DNA, 201 bp, Homo sapiens
ctaaataactccctgcttgcctgaaagtgaatatacagccacaggaagaagaggacggatcagagaagagcctaaatcagagttcacggcatttagcttasacaggaggaatgatttctttaccctgagtgttggtaaacatccagattggctgtagagacagtccggggattcagttttctaagactttgtaaagggagc

SEQ ID NO: 369093 - DNA, 201 bp, Homo sapiens
ctggggacagagcaagactatctcaaaaaaaaaaaaaaaaaaaaaaaaaaattgaaagactaaggtaacaattagtgcatgtttcctttggatccaaaaaytaatggaccgtttagagagaaaggcagaacaaagaaagggagttcccagacagtgctagcaccaagcaaggaagtggagattgatttctcaacaagaaaa

SEQ ID NO: 369094 - DNA, 201 bp, Homo sapiens
ttcagttttctaagactttgtaaagggagcagattctgagtgtcggagggtgtgaatgtgaccctgcctgcaggcagggagatttattccttgctaatctyagagcctgagtctgggagctggaggcagaaggtgagtcaaaggtggctagtttccagaaagtgcaaaggcgccttttttctgtgcctctccccttacttt

SEQ ID NO: 369095 - DNA, 201 bp, Homo sapiens
gtgcatgtttcctttggatccaaaaactaatggaccgtttagagagaaaggcagaacaaagaaagggagttcccagacagtgctagcaccaagcaaggaartggagattgatttctcaacaagaaaatgagaggcaagtagtaaactttggagataatatcactagacagatcatttactgggccaacagcaaggtgtttc

SEQ ID NO: 369096 - DNA, 201 bp, Homo sapiens
gctgggtgcagtggctcatgcctgtaatccttgcactttgggaggctgaggagggaggattgcttgagcctaggagttcgagaccaacctgggcaacacartgagaccccatctctacaaaaaataagacaagttagctgggtgtggtggtgtgtgcccgtggtcccagctacttgggaggctgaagtgggaggatcactt

SEQ ID NO: 369097 - DNA, 201 bp, Homo sapiens
ccagacagtgctagcaccaagcaaggaagtggagattgatttctcaacaagaaaatgagaggcaagtagtaaactttggagataatatcactagacagatyatttactgggccaacagcaaggtgtttctgcctttcaatgttggccttgtttctaggaggcttgaagaatgcttatttggcatttgactcagcttcccca

SEQ ID NO: 369098 - DNA, 201 bp, Homo sapiens
tgagaccccatctctacaaaaaataagacaagttagctgggtgtggtggtgtgtgcccgtggtcccagctacttgggaggctgaagtgggaggatcacttsagcctgggaggtcgaggctgcaataagccatgatcacgccacagcactccagcctgggcaccagtgtgagaccctgtctcaaaaacgttaaaacaaacaa

SEQ ID NO: 369099 - DNA, 201 bp, Homo sapiens
tctagagctcagggtggttaatgtaaattcaagtttagaagactggagagggaaaaggttagatttgtttcctggaatataacttgaaattgcgtgccagygattgggtgttctgctgtctttggccctctgggagttaccagtgcaaacagagctcatccttgtccagagtcataactaacaactttaagaagtgggcag

SEQ ID NO: 369100 - DNA, 201 bp, Homo sapiens
gctgcactctagttatcacttccacattcgttaacgtcgttgtcttcatatctgagtcactgttgccactctcagattataattccctagagaagcagttstaagccaagggtgtttaaagatcttttcgtacttattaaacagattctcaaatctctttcttagagattacgattttgcaggtctggaggggagtctctg

SEQ ID NO: 369101 - DNA, 201 bp, Homo sapiens
ttgttattttggttgacttactgtgaccagtgtgtacttgtttggactacggagtagttttatttttcagaaacttaagaaatcatttacaatctactgawcataatgggttttatttttagcctcccaagaatgagtccttggagacttacccagtgatgaagtataacccaaatgtccttcccgttcagtgcactggca

SEQ ID NO: 369102 - DNA, 201 bp, Homo sapiens; identical to SEQ ID NO: 80040

SEQ ID NO: 369103 - DNA, 201 bp, Homo sapiens; identical to SEQ ID NO: 80041

SEQ ID NO: 369104 - DNA, 201 bp, Homo sapiens
tcaccgctctcctgccattcctgctctccgcttcccctcatccacccacagagcactaaccttgggcagaaccaatcacaggactccagaaccatgcctcytccccagcctgcactgaaaaaagggattaaaaattgttctcttcctcctgagcctttaaactgaactgaataatttctttctcctttctgcagagaaaca

SEQ ID NO: 369105 - DNA, 201 bp, Homo sapiens
cagagagggtggggaatgcgtcagggtgaccttctaggggctgatgggaactcagagtcctggtatggggtgggtatcagagtgggaaggtgacaaagtcrtagcaacagccccaaggttagccaaggtcaaatggaaacagctgattataattaagctagctacttagctcttgccatgcctcaggcactgtgcttaaca

SEQ ID NO: 369106 - DNA, 201 bp, Homo sapiens
gaatcagggctacgatagctgccttgctgactgttacaccaactcttgcacctcttaggagcattcactggaaaaattttccagatctcttgacgtcacarcgttgccatttgcctactgctgcttggatacagaatgcagcacttaacccttgtcctgcggggagggagtgattgagttgggtgctgtagttctggatta

SEQ ID NO: 369107 - DNA, 201 bp, Homo sapiens; identical to SEQ ID NO: 80047

SEQ ID NO: 369108 - DNA, 201 bp, Homo sapiens
attaactgatctgtgatattaaagcatagtcactggtacttggggttacctaatctaaatgccagaggagtgatttaacaagggaggcaagaccctttctktttagccaagtggagttagcaaagtatgttttgtatgtggaaagtctacttttgaattgtcttcgtttctgccttcctactaatgattttctctctgcct

SEQ ID NO: 369109 - DNA, 201 bp, Homo sapiens
taaatgttgtctacagtgcaaaatccatgttctaacatatgtaataattgccaggagtacagtgctcttgttgatcttgtattcagtcaggttaaaacaayggacaataaaagaatgaacacattcctcgtgtgtgattcactcttgtctaaatgtcccaacctgtgacttctttactttccacaccactaattatccaag

SEQ ID NO: 369110 - DNA, 201 bp, Homo sapiens
agtaaaaatggaaaaatatattttttccctggtggtctagtggttagagaaaaaaaaaagttttttattttttacttcataaagaatggattaaaaaaaawattttaacccacttgcatgtatagtccagttttggtcctctggaagccacaggaacatttcaaaaaaattgataatctgaaaaaatattttttctgaatt

SEQ ID NO: 369111 - DNA, 201 bp, Homo sapiens
gtaaaaatggaaaaatatattttttccctggtggtctagtggttagagaaaaaaaaaagttttttattttttacttcataaagaatggattaaaaaaaaawttttaacccacttgcatgtatagtccagttttggtcctctggaagccacaggaacatttcaaaaaaattgataatctgaaaaaatattttttctgaattt

SEQ ID NO: 369112 - DNA, 201 bp, Homo sapiens
tacaaaaattagctgggcgtggcggcgcgtgcctgtaatcccagctgaggacctgaggcaggagaatcgcttggacctgggaggcggaggttgcagtgagmtgagatcacgccattgcactccagcctggggacagagcaagactatctcaaaaaaaaaaaaaaaaaaaaaaaaaaattgaaagactaaggtaacaattag

SEQ ID NO: 369113 - DNA, 201 bp, Homo sapiens
acaaaaattagctgggcgtggcggcgcgtgcctgtaatcccagctgaggacctgaggcaggagaatcgcttggacctgggaggcggaggttgcagtgagcygagatcacgccattgcactccagcctggggacagagcaagactatctcaaaaaaaaaaaaaaaaaaaaaaaaaaattgaaagactaaggtaacaattagt

SEQ ID NO: 369114 - DNA, 201 bp, Homo sapiens; identical to SEQ ID NO: 80043

SEQ ID NO: 369115 - DNA, 201 bp, Homo sapiens
ggaaatgtttaagagacatttgggaaacatgtttttaaaaattttaaagtgaatttaaatggcattgtatttgttgtgcagtctctccctttaacaaaccyatgcttgttgggttagcgcctgccaagcttttctccagaggagacccccttaggcagtcctgcagtgctgctctgcagcatcgcttctcatctgttgatg

SEQ ID NO: 369116 - DNA, 201 bp, Homo sapiens
tttttgtcccccataattcttcaggttctacatcatccttttcaggatgattttttttttttttttttttttttaaattgcgatagagtcttgctaggttgcctgggctggtcttgaactcctgggctcaagcgatccttccatcttggcctcccaaagtgctgtgattacaggcatgagccactgcacctggcctgaaga

SEQ ID NO: 369117 - DNA, 201 bp, Homo sapiens
cttgctaggttgcctgggctggtcttgaactcctgggctcaagcgatccttccatcttggcctcccaaagtgctgtgattacaggcatgagccactgcacytggcctgaagatgattgttaatgtccttaagtcctttgccctgggcacccctgtgccttgctccagtgattacttgtcttcctctctatcccttccattc

SEQ ID NO: 369118 - DNA, 201 bp, Homo sapiens
gtctaggattaacacagattcctcagatccagaagactgaaatttcctttcgtcctaatgatcccaagagctatgaggcatatgtactgaacatagttagrttcctggaaaagtacaaagattcagcccagagggatgacatgatttttgaagattgtggcggtaagtagactcattgtagatgtctgtggctagttttct

SEQ ID NO: 369119 - DNA, 201 bp, Homo sapiens
cttgatatcctatccagcaagctatcagtatgctgatttgtgaatgtagacccaggactgctgtacttgcctcctcttcccttccatgttccacggtacargtgctgggctaaaaatcccctttttgttttgtgctaatatgtctgcccctttctggcagtgtaaaaactgtcagagcctctcttaggtagaaaaggcggc

SEQ ID NO: 369120 - DNA, 201 bp, Homo sapiens; identical to SEQ ID NO: 80051

SEQ ID NO: 369121 - DNA, 201 bp, Homo sapiens
tagtttaattaactgtctcctttagctcttaaaaacttgggtgaacaaaaagattatcataagaaatgcaaactgccacacgagtccctgctgtgacttgrgtgccatcagtgtagagctatgtgtgtccacaccagtcgtgaaaggcccatggccatcatgcctgatgctgataggacaaggcagtggaatagccacaaa

SEQ ID NO: 369122 - DNA, 201 bp, Homo sapiens
cttgtaggcatttttacaaaattttaaactgtaatctgtgtttattttaaactgaagatttttatgagcaaattctgctacttcccctttgattcatttctatcactgttgaaatttttgtcccccataattcttcaggttctacatcatccttttcaggatgattttttttttttttttttttttttaaattgcgataga

SEQ ID NO: 369123 - DNA, 201 bp, Homo sapiens
gtcatttcatcctctcctccagatcatgaattaatgctgtcctttccccttaagcctggcttcttctggcaggtttccccctaatcacccgtatatgagcrttggcattatgagtgttgtttctaattttgatagaaattgactgcagtatattgagttatgtgaacaaactcatttcatttctgaaatctggcacttttg

SEQ ID NO: 369124 - DNA, 201 bp, Homo sapiens
catctggaactcagagaagaaggagtttctgggcaggaccggtggcagttggtgtaagtacggggtccgcagctcccggccgccgcgtctgatctttcccsggcggcgcatcccctgcgcagggtccgcggccggttccgcacccaccgcgctggccggggtggcgggggcgagggtggtggacgctgctgggtcgcgccg

SEQ ID NO: 369125 - DNA, 201 bp, Homo sapiens
attttgaagggcagagttgtaggcgaatctatgagtcgtgactgcgtgagggaaggagggagggaactccccctgctgcatcactgccccctcctcctccmacatcatcatcatcatcatcatcatcatgaccatcaccaccaacaccactggcaccaccactgcagtcattcagggagtcctgaacagaggccgattggt

SEQ ID NO: 369126 - DNA, 201 bp, Homo sapiens
atctgatattatcttcagtgttaatacacaatgagtttatctacaatgactatgtatattacctctaggctctaaacaaacgctgctgaaagaagctgaakatcaagcagaccgtaaaatagatattcctccttatctctagaagactccaagtggtccagcaagagaggagtcatgaaatacctcagatcctctctcatc

SEQ ID NO: 369127 - DNA, 201 bp, Homo sapiens
aaagttattcttccatcatgatgtgattttataattcttttttttttttgagacagagttttgctctgtcacctaggctggagtgcagtggcgcaatctcrgctcactgcagtctccgcctctcaggttcaagcgattctcctgtctcagcctcccaaatagctgggattataggcatgcaccaccatgcctggctaattt

SEQ ID NO: 369128 - DNA, 201 bp, Homo sapiens
tgtcacctaggctggagtgcagtggcgcaatctcggctcactgcagtctccgcctctcaggttcaagcgattctcctgtctcagcctcccaaatagctggrattataggcatgcaccaccatgcctggctaatttttgtatttttagtagagacaaggtttcaccatgttggccaggctggtctcgaactcctggcctcag

SEQ ID NO: 369129 - DNA, 201 bp, Homo sapiens; identical to SEQ ID NO: 80050

SEQ ID NO: 369130 - DNA, 201 bp, Homo sapiens; identical to SEQ ID NO: 80039

SEQ ID NO: 369131 - DNA, 201 bp, Homo sapiens
tattttgaactttataaaaagcaatgcagtaccccatagactggtgttaaatgttgtctacagtgcaaaatccatgttctaacatatgtaataattgccakgagtacagtgctcttgttgatcttgtattcagtcaggttaaaacaacggacaataaaagaatgaacacattcctcgtgtgtgattcactcttgtctaaat

SEQ ID NO: 369132 - DNA, 201 bp, Homo sapiens
tctaatgcagacgaggttgtgtgttacagcatctttcttctagtctaaatacgtatctcaaaagagaggaaagagaagggtggagaggaatccatccacaytgtagtatttcacagcgatggctaaggatttccctccatgacctcccctggagtcatcaccacccagaaatggttcaataagctccatttcaggactccg

SEQ ID NO: 369133 - DNA, 201 bp, Homo sapiens
aagggcagagttgtaggcgaatctatgagtcgtgactgcgtgagggaaggagggagggaactccccctgctgcatcactgccccctcctcctccaacatcwtcatcatcatcatcatcatcatgaccatcaccaccaacaccactggcaccaccactgcagtcattcagggagtcctgaacagaggccgattggtgttcct

SEQ ID NO: 369134 - DNA, 201 bp, Homo sapiens
atttgtttgtttttccaaaaaaacctctgtattacttttttttaaaagaagaaaaattgcgtgaaagggagatgcctctgaagcctctcagctcccctcayagtgccaccccagatagttggtgtgacttatctagccttttttttggctagtggggagcccctggtggcctgtgtctgagtgagccactgcataggcccc

SEQ ID NO: 369135 - DNA, 201 bp, Homo sapiens
ggaaaattcctcacttttcttaggatatcgtgtgggcagaatagaaaggctgtctgtttctgagcttaatcggcgtacttgcaaaatgacttgtttttccrttgctcttatttgtattttaaactgtagcctcaattatgtaccctcttatgttgttagaattaggcatctggagtccagggaatgagtatagagatgttt

SEQ ID NO: 369136 - DNA, 201 bp, Homo sapiens
tcaattatgtaccctcttatgttgttagaattaggcatctggagtccagggaatgagtatagagatgtttcagttgttcgaaggggcacatgtaggtaagstaagagcaccaagatgaggtgggggtggggggcagcaagaggaaacttgaatcagggctacgatagctgccttgctgactgttacaccaactcttgcacc

SEQ ID NO: 369137 - DNA, 201 bp, Homo sapiens
ttaggcatctggagtccagggaatgagtatagagatgtttcagttgttcgaaggggcacatgtaggtaaggtaagagcaccaagatgaggtgggggtgggsggcagcaagaggaaacttgaatcagggctacgatagctgccttgctgactgttacaccaactcttgcacctcttaggagcattcactggaaaaattttcc

SEQ ID NO: 369138 - DNA, 201 bp, Homo sapiens
cagttgttcgaaggggcacatgtaggtaaggtaagagcaccaagatgaggtgggggtggggggcagcaagaggaaacttgaatcagggctacgatagctgycttgctgactgttacaccaactcttgcacctcttaggagcattcactggaaaaattttccagatctcttgacgtcacagcgttgccatttgcctactgct

SEQ ID NO: 369139 - DNA, 201 bp, Homo sapiens
tacagaatgcagcacttaacccttgtcctgcggggagggagtgattgagttgggtgctgtagttctggattacacaaccttttctttcttccttatctttrcttctgtctttgcttttttccttgttatttgcttttgatagaggagaaaaaggattatgattaagcattttgctgtggttttgtgtgttttgcttgtttt

SEQ ID NO: 369140 - DNA, 201 bp, Homo sapiens
ccttcacagaaggggccttggaacaaaagcccagctcagcacagcccaacgggacataaagtacttgagttattcattacttgagttggaggaggtcacasagcaggaagcgcactggaaagcaaggggaaaggtggcagagagggtggggaatgcgtcagggtgaccttctaggggctgatgggaactcagagtcctggt

SEQ ID NO: 369141 - DNA, 201 bp, Homo sapiens
atgggtgtcactttttctattgagaaaaaattctttggaaaattactctataatgtagttttaaagcaaccatgaaaagggaaaagagaaacttctctcgkctgcagccagatgtcctacccgcattgcaggcagagctcccacgggttgcagacatcttatttgcccagttctagagtgagggtgaagcgtcctggttct

SEQ ID NO: 369142 - DNA, 201 bp, Homo sapiens
gctcttgccatgcctcaggcactgtgcttaacactttcccatatcgctccttttatccttgcaataatgtatcacttcaattttatgactgagggaacagycctggagagaacaagtgacttgcccaaggtcacccagctagcatgcatgttctgaagctgggaaggtgaatgtaggtctttaccagcttgttctgtgtga

SEQ ID NO: 369143 - DNA, 201 bp, Homo sapiens
tgaaaccctgtctctactacacatacaaaaattagctgggcgtggcggcgcgtgcctgtaatcccagctgaggacctgaggcaggagaatcgcttggaccygggaggcggaggttgcagtgagctgagatcacgccattgcactccagcctggggacagagcaagactatctcaaaaaaaaaaaaaaaaaaaaaaaaaaat

SEQ ID NO: 369144 - DNA, 201 bp, Homo sapiens
gaaaccctgtctctactacacatacaaaaattagctgggcgtggcggcgcgtgcctgtaatcccagctgaggacctgaggcaggagaatcgcttggacctrggaggcggaggttgcagtgagctgagatcacgccattgcactccagcctggggacagagcaagactatctcaaaaaaaaaaaaaaaaaaaaaaaaaaatt

SEQ ID NO: 369145 - DNA, 201 bp, Homo sapiens
atattttgtgcagcctgttgcttggttggatagacttttttccatcgaaaattagatttcttgttttcagcctctccggaaaggtgacttttttttttttwaaaaaaaggtcattttgaagggcagagttgtaggcgaatctatgagtcgtgactgcgtgagggaaggagggagggaactccccctgctgcatcactgccc

SEQ ID NO: 369146 - DNA, 201 bp, Homo sapiens
atttagggaataaaaaaatataaggatcctagttctagctgaacattcctcctacccttaaccacctcccatacacactgcaagtggagggctgcccagcytctcgattttcaccctgtgtcagtggggtgaggtgcactcttgacgttggacaaggaagaaatcatgggaccgggggaaccaggaaggaagcttgttcat

SEQ ID NO: 369147 - DNA, 201 bp, Homo sapiens
gtaaaatccacatgaatagcttcatttccttcagagatagcatgggtgtcactttttctattgagaaaaaattctttggaaaattactctataatgtagtyttaaagcaaccatgaaaagggaaaagagaaacttctctcggctgcagccagatgtcctacccgcattgcaggcagagctcccacgggttgcagacatctt

SEQ ID NO: 369148 - DNA, 201 bp, Homo sapiens
tgccatttaaaagttattcttccatcatgatgtgattttataattcttttttttttttgagacagagttttgctctgtcacctaggctggagtgcagtggygcaatctcggctcactgcagtctccgcctctcaggttcaagcgattctcctgtctcagcctcccaaatagctgggattataggcatgcaccaccatgcct

SEQ ID NO: 369149 - DNA, 201 bp, Homo sapiens
ggctcactgcagtctccgcctctcaggttcaagcgattctcctgtctcagcctcccaaatagctgggattataggcatgcaccaccatgcctggctaattyttgtatttttagtagagacaaggtttcaccatgttggccaggctggtctcgaactcctggcctcaggtgatccacccacttcggcctcccaaagtgctgg

SEQ ID NO: 369150 - DNA, 201 bp, Homo sapiens
ctcactgcagtctccgcctctcaggttcaagcgattctcctgtctcagcctcccaaatagctgggattataggcatgcaccaccatgcctggctaattttkgtatttttagtagagacaaggtttcaccatgttggccaggctggtctcgaactcctggcctcaggtgatccacccacttcggcctcccaaagtgctggga

SEQ ID NO: 369151 - DNA, 201 bp, Homo sapiens
tccgcctctcaggttcaagcgattctcctgtctcagcctcccaaatagctgggattataggcatgcaccaccatgcctggctaatttttgtatttttagtrgagacaaggtttcaccatgttggccaggctggtctcgaactcctggcctcaggtgatccacccacttcggcctcccaaagtgctgggaggtgtgagcatg

SEQ ID NO: 369152 - DNA, 201 bp, Homo sapiens
ccgcctctcaggttcaagcgattctcctgtctcagcctcccaaatagctgggattataggcatgcaccaccatgcctggctaatttttgtatttttagtaragacaaggtttcaccatgttggccaggctggtctcgaactcctggcctcaggtgatccacccacttcggcctcccaaagtgctgggaggtgtgagcatga

SEQ ID NO: 369153 - DNA, 201 bp, Homo sapiens
cacttggtctttttctggcttttatatgaggattgaattaaaaatgccagaataaaatttctcagtccagcaaatgcttaatgcatagctttaaaaggcakaaactcaaatcaaaaaagcctgggcaacacagcaagaccccagtctctgcaaaattaaaaaaaactagccacagggtggcacacgcctgtagtcccagct

SEQ ID NO: 369154 - DNA, 201 bp, Homo sapiens
aggattatgattaagcattttgctgtggttttgtgtgttttgcttgttttaacagctctgtagcctgatttcctttaactgtttagtgcctgataggaaarttgggcttttaaatgtatggacagggcaacaaggctaattcctgcagttgtgtacccactccctccctggccccctcctaccacatatacttcttttcaa

SEQ ID NO: 369155 - DNA, 201 bp, Homo sapiens
ctcaggttcaagcgattctcctgtctcagcctcccaaatagctgggattataggcatgcaccaccatgcctggctaatttttgtatttttagtagagacarggtttcaccatgttggccaggctggtctcgaactcctggcctcaggtgatccacccacttcggcctcccaaagtgctgggaggtgtgagcatgagctacc

SEQ ID NO: 369156 - DNA, 201 bp, Homo sapiens
gttcaagcgattctcctgtctcagcctcccaaatagctgggattataggcatgcaccaccatgcctggctaatttttgtatttttagtagagacaaggttycaccatgttggccaggctggtctcgaactcctggcctcaggtgatccacccacttcggcctcccaaagtgctgggaggtgtgagcatgagctaccatgcc

SEQ ID NO: 369157 - DNA, 201 bp, Homo sapiens
gcgattctcctgtctcagcctcccaaatagctgggattataggcatgcaccaccatgcctggctaatttttgtatttttagtagagacaaggtttcaccaygttggccaggctggtctcgaactcctggcctcaggtgatccacccacttcggcctcccaaagtgctgggaggtgtgagcatgagctaccatgcctggcct

SEQ ID NO: 369158 - DNA, 201 bp, Homo sapiens
ttaatgcatgagatctggacctttttagcagtaacctaaggctcctttgtgcagtcgtgcttctgactcgataaccttacagttcacttgttccctgtttygcattcacattgagtcgtttggctggcacaggactgccaggcaatgcctagtacagcctgttactatgcagctaatcagggagataatccttgtaaacca

SEQ ID NO: 369159 - DNA, 201 bp, Homo sapiens
ggttcaagaccagcctgggcaacatagcaagaccccatatccacacacacacaaaaaatttttttaagtctcctgttaaaaaaaaaggggtggggccaggmgtggtgactcacgtctgtaatcccagcacttccgaggcaggcggatcatgaggtcaggagatcgagaccattctggctaacacagtgaaactccgtctct

SEQ ID NO: 369160 - DNA, 201 bp, Homo sapiens
ggacctttttagcagtaacctaaggctcctttgtgcagtcgtgcttctgactcgataaccttacagttcacttgttccctgtttcgcattcacattgagtygtttggctggcacaggactgccaggcaatgcctagtacagcctgttactatgcagctaatcagggagataatccttgtaaaccagtaactgatagccacc

SEQ ID NO: 369161 - DNA, 201 bp, Homo sapiens
gtgaaactccgtctctactaaaaaatacaaaaaattagcctgtcgtagtggcgggcacctgtagtcccagctactcggaaggctgaggcaggagaatggcrtgaacccgggaggcggagcttgcagtgagccgaaattgtgccattgcactccagcctgggtgacagagcgaagactccatctcaaaaaaaaaaaaaagaa

SEQ ID NO: 369162 - DNA, 201 bp, Homo sapiens
acaaagtcactcttacttctcaatatttatacccattgatttaataagcatctcatttgccagctttctggtcccactttgtagtttaattaactgtctcytttagctcttaaaaacttgggtgaacaaaaagattatcataagaaatgcaaactgccacacgagtccctgctgtgacttgggtgccatcagtgtagagct

SEQ ID NO: 369163 - DNA, 201 bp, Homo sapiens
cgggaggcggagcttgcagtgagccgaaattgtgccattgcactccagcctgggtgacagagcgaagactccatctcaaaaaaaaaaaaaagaaaaaaaargggggtggggaatcatatgctctgtgagaactaaatgagatgataaacatatataaagcaaatagtactttatggtggcaaaaccaatggtattaagtgt

SEQ ID NO: 369164 - DNA, 201 bp, Homo sapiens
gaggcagaaggtgagtcaaaggtggctagtttccagaaagtgcaaaggcgccttttttctgtgcctctccccttactttgctaggtaagttgataccaacycacagatgtaaaacaaaaataaacaaacaaaatccagaaatatcttaggtcctacagagtggcacttaaaggagaaatttctatctcatatatgtgcgta

SEQ ID NO: 369165 - DNA, 201 bp, Homo sapiens
tccagaaatatcttaggtcctacagagtggcacttaaaggagaaatttctatctcatatatgtgcgtatgcatacatatgtgtgtgtttatgtgtacatayacgtgtgagtatgtatgaattcatacctctgtgtattttttttaaaattggaaattacttttcaactcggaatgtataggagacacatgatttgtgcatg

SEQ ID NO: 369166 - DNA, 201 bp, Homo sapiens
atttctatctcatatatgtgcgtatgcatacatatgtgtgtgtttatgtgtacatatacgtgtgagtatgtatgaattcatacctctgtgtattttttttwaaattggaaattacttttcaactcggaatgtataggagacacatgatttgtgcatggctacatttaaaagcatttctttgcttcctgtgcccttctcagt

SEQ ID NO: 369167 - DNA, 201 bp, Homo sapiens
aagcatttctttgcttcctgtgcccttctcagtcatatgggtaccttcctggaggtttccatgggaaatgattcctatttagagatttgatctagtgattyatcagatgtattaaatgacaggtgcaagcagctgtgcatttgaataacttacaaggttgaaatggctacattctagtttaaatactttaaactcacatgt

SEQ ID NO: 369168 - DNA, 201 bp, Homo sapiens
ctggaagaaattcatctggaactcagagaagaaggagtttctgggcaggaccggtggcagttggtgtaagtacggggtccgcagctcccggccgccgcgtstgatctttcccgggcggcgcatcccctgcgcagggtccgcggccggttccgcacccaccgcgctggccggggtggcgggggcgagggtggtggacgctgc

SEQ ID NO: 369169 - DNA, 201 bp, Homo sapiens
atactttaaactcacatgtagattgagaaatgatgaacttgctacattataaacctaaagaaacaaaatcctttccctcaagccttttcccccttgtgctrtcaacacttactaaagctaaacatggaggatcttccttatttctcaagagatggggaccaaaggcaggtaaatgtgtctttgaaaagcaagtgggaagcc

SEQ ID NO: 369170 - DNA, 201 bp, Homo sapiens
ccctcaagccttttcccccttgtgctatcaacacttactaaagctaaacatggaggatcttccttatttctcaagagatggggaccaaaggcaggtaaatrtgtctttgaaaagcaagtgggaagccagaagttttttctaaatctaaatcttatgtaaagttgaaatactcattgaaaaccaaatattaaaattttacat

SEQ ID NO: 369171 - DNA, 201 bp, Homo sapiens
tctcaagagatggggaccaaaggcaggtaaatgtgtctttgaaaagcaagtgggaagccagaagttttttctaaatctaaatcttatgtaaagttgaaatrctcattgaaaaccaaatattaaaattttacatacccagattatgatttctgcctcttcaagtggctttgttaattaatgatatatagcttaaggcaaatg

SEQ ID NO: 369172 - DNA, 201 bp, Homo sapiens
tcttatgttgttagaattaggcatctggagtccagggaatgagtatagagatgtttcagttgttcgaaggggcacatgtaggtaaggtaagagcaccaagwtgaggtgggggtggggggcagcaagaggaaacttgaatcagggctacgatagctgccttgctgactgttacaccaactcttgcacctcttaggagcattc

SEQ ID NO: 369173 - DNA, 201 bp, Homo sapiens
tcagcaaggtgggatttgtgcagcccttggagaatgtcatggttggagaatttgggtgtggcctcaaaatgcagatgctcttcgatttaggatggggttaygttctagtaacccattgtaagtcgaaaatactgtgagtcaaaaatgcatttactaaccctgctaaacccactgtgaagctgaaaaatcataaggcaaaca

SEQ ID NO: 369174 - DNA, 201 bp, Homo sapiens
ggtgggatttgtgcagcccttggagaatgtcatggttggagaatttgggtgtggcctcaaaatgcagatgctcttcgatttaggatggggttatgttctartaacccattgtaagtcgaaaatactgtgagtcaaaaatgcatttactaaccctgctaaacccactgtgaagctgaaaaatcataaggcaaacattgtaag

SEQ ID NO: 369175 - DNA, 201 bp, Homo sapiens
aatgtgtctttgaaaagcaagtgggaagccagaagttttttctaaatctaaatcttatgtaaagttgaaatactcattgaaaaccaaatattaaaattttmcatacccagattatgatttctgcctcttcaagtggctttgttaattaatgatatatagcttaaggcaaatgatcctatcagaacaaagctgtctctagag

SEQ ID NO: 369176 - DNA, 201 bp, Homo sapiens
tgtttttttctttttttcttttttttttttttcaagagggagtcttcttctgtcgcccaggctggagtgcagtggcatgatcttggctcactgcaacctcygccccctgggttcaagcgattctcctgcctcagcctcccgagtagctggggctacaggtgcgcgccaccatgcccagctaatttttgtatttttagtaga

SEQ ID NO: 369177 - DNA, 201 bp, Homo sapiens
ttttcttttttttttttttcaagagggagtcttcttctgtcgcccaggctggagtgcagtggcatgatcttggctcactgcaacctctgccccctgggttmaagcgattctcctgcctcagcctcccgagtagctggggctacaggtgcgcgccaccatgcccagctaatttttgtatttttagtagagatggggtttcac

SEQ ID NO: 369178 - DNA, 201 bp, Homo sapiens
ttttttttttttttcaagagggagtcttcttctgtcgcccaggctggagtgcagtggcatgatcttggctcactgcaacctctgccccctgggttcaagcrattctcctgcctcagcctcccgagtagctggggctacaggtgcgcgccaccatgcccagctaatttttgtatttttagtagagatggggtttcaccatat

SEQ ID NO: 369179 - DNA, 201 bp, Homo sapiens
cttggctcactgcaacctctgccccctgggttcaagcgattctcctgcctcagcctcccgagtagctggggctacaggtgcgcgccaccatgcccagctawtttttgtatttttagtagagatggggtttcaccatattggtcaggttggtgtcaaactcctgacctctggtgatccacccgcctcagcctcccaaagtgc

SEQ ID NO: 369180 - DNA, 201 bp, Homo sapiens
acctctgccccctgggttcaagcgattctcctgcctcagcctcccgagtagctggggctacaggtgcgcgccaccatgcccagctaatttttgtatttttmgtagagatggggtttcaccatattggtcaggttggtgtcaaactcctgacctctggtgatccacccgcctcagcctcccaaagtgctgggattacaggcg

SEQ ID NO: 369181 - DNA, 201 bp, Homo sapiens
aaatagccaaagggcccaaccttgtaagtaaggacttggaaatgaccttgcctgtaaatcaactggctgaagtgctcagtcctttccaacaccctctcacsgtgcctcccttcccttccttccatccccttcctaaaagacatgttcttagtacctatatttagtgtgctcacagcagttggactgacctgacaaaccctg

SEQ ID NO: 369182 - DNA, 201 bp, Homo sapiens
aatcccagcactttgagagactgaggcaggaggatcctttgaaggcaggggttcaagaccagcctgggcaacatagcaagaccccatatccacacacacasaaaaaatttttttaagtctcctgttaaaaaaaaaggggtggggccaggagtggtgactcacgtctgtaatcccagcacttccgaggcaggcggatcatga

SEQ ID NO: 369183 - DNA, 201 bp, Homo sapiens
cccctgggttcaagcgattctcctgcctcagcctcccgagtagctggggctacaggtgcgcgccaccatgcccagctaatttttgtatttttagtagagayggggtttcaccatattggtcaggttggtgtcaaactcctgacctctggtgatccacccgcctcagcctcccaaagtgctgggattacaggcgtgagccac

SEQ ID NO: 369184 - DNA, 201 bp, Homo sapiens
gcgccaccatgcccagctaatttttgtatttttagtagagatggggtttcaccatattggtcaggttggtgtcaaactcctgacctctggtgatccacccrcctcagcctcccaaagtgctgggattacaggcgtgagccaccgcacctggtccagggtttttatagccctatctttctactagaagcagcagtttcttct

SEQ ID NO: 369185 - DNA, 201 bp, Homo sapiens
ttgtatttttagtagagatggggtttcaccatattggtcaggttggtgtcaaactcctgacctctggtgatccacccgcctcagcctcccaaagtgctggrattacaggcgtgagccaccgcacctggtccagggtttttatagccctatctttctactagaagcagcagtttcttctttttggacactaaatttccagat

SEQ ID NO: 369186 - DNA, 201 bp, Homo sapiens
atcttgattgtaaagaggaaatatctaatcttaaaactcattaggggcctggcgcagtggctcatacctgtattcccagcactttgggaggccgaggcagkcagatcacccgaggtcaggattttgagaccagcctggccaacatggtgaaaccccatctctactaaaaatacaaaacttagctaggcgtgatggcaggca

SEQ ID NO: 369187 - DNA, 201 bp, Homo sapiens
aaatccatgttctaacatatgtaataattgccaggagtacagtgctcttgttgatcttgtattcagtcaggttaaaacaacggacaataaaagaatgaacmcattcctcgtgtgtgattcactcttgtctaaatgtcccaacctgtgacttctttactttccacaccactaattatccaagatcttgaagaagtattgaac

SEQ ID NO: 369188 - DNA, 201 bp, Homo sapiens
ggggcctggcgcagtggctcatacctgtattcccagcactttgggaggccgaggcaggcagatcacccgaggtcaggattttgagaccagcctggccaacrtggtgaaaccccatctctactaaaaatacaaaacttagctaggcgtgatggcaggcacctctaatcccagttacttgggaggctgaggcaggagaatcac

SEQ ID NO: 369189 - DNA, 201 bp, Homo sapiens
gagccgaaattgtgccattgcactccagcctgggtgacagagcgaagactccatctcaaaaaaaaaaaaaagaaaaaaaaagggggtggggaatcatatgytctgtgagaactaaatgagatgataaacatatataaagcaaatagtactttatggtggcaaaaccaatggtattaagtgtagggtaactgttgagagcaa

SEQ ID NO: 369190 - DNA, 201 bp, Homo sapiens
aaaacccattagggttcgagtcattatcattctatctcagcttgattaagtaaaattcctgagaagtcattatgtcagtctcagaatacctaatttttccrccccccgcaaactacctcatacttgtattactatctctcactcacacttcaaaggagaaataaggggaaattagaaacatttggcttccttatactttgg

SEQ ID NO: 369191 - DNA, 201 bp, Homo sapiens
gtggctcatacctgtattcccagcactttgggaggccgaggcaggcagatcacccgaggtcaggattttgagaccagcctggccaacatggtgaaaccccrtctctactaaaaatacaaaacttagctaggcgtgatggcaggcacctctaatcccagttacttgggaggctgaggcaggagaatcacttgaacccggaag

SEQ ID NO: 369192 - DNA, 201 bp, Homo sapiens
tagagggcggggcgcacggccgccggggcgcggtatatagtaaaggtagggcgggcgcagccaattcctcggctcctggcgggagtgccggtggcgccccscagtccgcttgtccgtccttccctctctgactctcctaccccgggcctgtctctgcagaggtcaggggaggcgggggcccagcacacgtccccagtggca

SEQ ID NO: 369193 - DNA, 201 bp, Homo sapiens
tcatacctgtattcccagcactttgggaggccgaggcaggcagatcacccgaggtcaggattttgagaccagcctggccaacatggtgaaaccccatctcwactaaaaatacaaaacttagctaggcgtgatggcaggcacctctaatcccagttacttgggaggctgaggcaggagaatcacttgaacccggaaggcaga

SEQ ID NO: 369194 - DNA, 201 bp, Homo sapiens
ctagtaacccattgtaagtcgaaaatactgtgagtcaaaaatgcatttactaaccctgctaaacccactgtgaagctgaaaaatcataaggcaaacattgtaagttgggaactgtctgtaataattaccaaatccaatcccattgctttctatctcttcttaacagtctgataatcctaaagtaaatgatttaaaggattt

SEQ ID NO: 369195 - DNA, 201 bp, Homo sapiens
agaccagcctggccaacatggtgaaaccccatctctactaaaaatacaaaacttagctaggcgtgatggcaggcacctctaatcccagttacttgggaggytgaggcaggagaatcacttgaacccggaaggcagacgttgcagtgagccaagatcgtgccactgcactccagcctgggcaactagagcaagactccatct

SEQ ID NO: 369196 - DNA, 201 bp, Homo sapiens
agagggcggggcgcacggccgccggggcgcggtatatagtaaaggtagggcgggcgcagccaattcctcggctcctggcgggagtgccggtggcgccccgsagtccgcttgtccgtccttccctctctgactctcctaccccgggcctgtctctgcagaggtcaggggaggcgggggcccagcacacgtccccagtggcag

SEQ ID NO: 369197 - DNA, 201 bp, Homo sapiens
ttttggtcatagcccctaggctcctggggaatgcactagccttatcattttgttagtaaagagcccagaggactgagtgagagttgctgatgttttgagtytgacacatgtcccctggtcacttttaatagtggaaaccgtggacttgacatcgtgaaggaatgaaaagcgctcagcataatacctcctcctgttcttact

SEQ ID NO: 369198 - DNA, 201 bp, Homo sapiens
ttagtaaagagcccagaggactgagtgagagttgctgatgttttgagtctgacacatgtcccctggtcacttttaatagtggaaaccgtggacttgacatygtgaaggaatgaaaagcgctcagcataatacctcctcctgttcttactctccttttttttgtgtgggagaatctgagaaatggcatcactattcctcata

SEQ ID NO: 369199 - DNA, 201 bp, Homo sapiens
accccatctctactaaaaatacaaaacttagctaggcgtgatggcaggcacctctaatcccagttacttgggaggctgaggcaggagaatcacttgaaccyggaaggcagacgttgcagtgagccaagatcgtgccactgcactccagcctgggcaactagagcaagactccatctaaaaaaaaaaaaaccaaaaacaaaa

SEQ ID NO: 369200 - DNA, 201 bp, Homo sapiens
ctgagcgatgcacaggcatttgtctctctctctggctgcctatgcactggctcttcgggtggcccctcagcatgaccgtccctcaaggctccattctctcytgactccaggattctcccattctgaattttgttgagcctctggctttgggtctgctggtgtacttcccccaggtccaggcaagtcaccttgacttaagtg

SEQ ID NO: 369201 - DNA, 201 bp, Homo sapiens
tgagaaatgatgaacttgctacattataaacctaaagaaacaaaatcctttccctcaagccttttcccccttgtgctatcaacacttactaaagctaaacmtggaggatcttccttatttctcaagagatggggaccaaaggcaggtaaatgtgtctttgaaaagcaagtgggaagccagaagttttttctaaatctaaat

SEQ ID NO: 369202 - DNA, 201 bp, Homo sapiens
ttctcaagagatggggaccaaaggcaggtaaatgtgtctttgaaaagcaagtgggaagccagaagttttttctaaatctaaatcttatgtaaagttgaaayactcattgaaaaccaaatattaaaattttacatacccagattatgatttctgcctcttcaagtggctttgttaattaatgatatatagcttaaggcaaat

SEQ ID NO: 369203 - DNA, 201 bp, Homo sapiens
tctactaaaaatacaaaacttagctaggcgtgatggcaggcacctctaatcccagttacttgggaggctgaggcaggagaatcacttgaacccggaaggcrgacgttgcagtgagccaagatcgtgccactgcactccagcctgggcaactagagcaagactccatctaaaaaaaaaaaaaccaaaaacaaaacaaacaaa

SEQ ID NO: 369204 - DNA, 201 bp, Homo sapiens
cagcttgattaagtaaaattcctgagaagtcattatgtcagtctcagaatacctaatttttccgccccccgcaaactacctcatacttgtattactatctstcactcacacttcaaaggagaaataaggggaaattagaaacatttggcttccttatactttggaggggttgttagtgcaaagtgccagtaaggtgtttcc

SEQ ID NO: 369205 - DNA, 201 bp, Homo sapiens
tgaatcagggctacgatagctgccttgctgactgttacaccaactcttgcacctcttaggagcattcactggaaaaattttccagatctcttgacgtcacmgcgttgccatttgcctactgctgcttggatacagaatgcagcacttaacccttgtcctgcggggagggagtgattgagttgggtgctgtagttctggatt

SEQ ID NO: 369206 - DNA, 201 bp, Homo sapiens
acagtaatacctattattttcacaaatgtgatcttagatattttttttctttctctttttcttttcttttcttttttttttttttttgagacagagtctckctctgttgcccaggctggagtgcagtggtgctgtctcagctcactgcaacctctgcctcttgggctcaagcgattctcgtgcctcagcctcccaagtagc

SEQ ID NO: 369207 - DNA, 201 bp, Homo sapiens
ctgctttcccttggcaaaggtttagtaacagctgtatttaggtgacaatcttcagatgatctacgtggccctgagcagcctagatcaagggctactgcctsccacaggcttttcctgcgtacctccttgaatgtgggaaggattcacagaggaagatcttcaaaatacggaggtggcaagcattgttgtgtagccctaagt

SEQ ID NO: 369208 - DNA, 201 bp, Homo sapiens
tatcttggttaggtaggcttgagtctagagaatttggaatggttatacatttactgacaataaggattataaaagaagacctctgtgtccaaggcttacaygtaattagggagggtaaagccacctgcacacaatgctagctagcagggtattttaaaaaactgtgcacgttggggtactagaaacataatgggctttgga

SEQ ID NO: 369209 - DNA, 201 bp, Homo sapiens
cctcttgggctcaagcgattctcgtgcctcagcctcccaagtagctgggattacaggcatgtgctactatgcctggctaattttgtgtttttagtagagayggggtttcaccatgttggccaggctggtctcgaactcctggcctcaagtgatccacccaactcatcctcccaaagttctgggattacaggcattagccac

SEQ ID NO: 369210 - DNA, 201 bp, Homo sapiens
gtccaaggcttacacgtaattagggagggtaaagccacctgcacacaatgctagctagcagggtattttaaaaaactgtgcacgttggggtactagaaacrtaatgggctttggagtacagcacacctgggttggaattctggttctaccactttctgtgcagccttggcccaggtagttaatctttcagtgcaagcagtg

SEQ ID NO: 369211 - DNA, 201 bp, Homo sapiens
ttctcgtgcctcagcctcccaagtagctgggattacaggcatgtgctactatgcctggctaattttgtgtttttagtagagatggggtttcaccatgttgkccaggctggtctcgaactcctggcctcaagtgatccacccaactcatcctcccaaagttctgggattacaggcattagccaccattcccggccatattcc

SEQ ID NO: 369212 - DNA, 201 bp, Homo sapiens
gcaagaccctttctttttagccaagtggagttagcaaagtatgttttgtatgtggaaagtctacttttgaattgtcttcgtttctgccttcctactaatgwttttctctctgcctggtctaggattaacacagattcctcagatccagaagactgaaatttcctttcgtcctaatgatcccaagagctatgaggcatatgt

SEQ ID NO: 369213 - DNA, 201 bp, Homo sapiens
cctcccaagtagctgggattacaggcatgtgctactatgcctggctaattttgtgtttttagtagagatggggtttcaccatgttggccaggctggtctcraactcctggcctcaagtgatccacccaactcatcctcccaaagttctgggattacaggcattagccaccattcccggccatattcctagatgattaacaa

SEQ ID NO: 369214 - DNA, 201 bp, Homo sapiens
tctgggagtgaggagtagaatcaagttgccagatttaataaataaaaatacagggtgcccacttaagtttgaatttcagttaaactatatctctctctctmtatatatatatatttatatatatctctatctatctatctatatatataggtttttttttttgagatagagtctctgtcacccagactggagtgcagtggc

SEQ ID NO: 369215 - DNA, 201 bp, Homo sapiens
tcccactttgtagtttaattaactgtctcctttagctcttaaaaacttgggtgaacaaaaagattatcataagaaatgcaaactgccacacgagtccctgstgtgacttgggtgccatcagtgtagagctatgtgtgtccacaccagtcgtgaaaggcccatggccatcatgcctgatgctgataggacaaggcagtggaa

SEQ ID NO: 369216 - DNA, 201 bp, Homo sapiens
tgctttcccttggcaaaggtttagtaacagctgtatttaggtgacaatcttcagatgatctacgtggccctgagcagcctagatcaagggctactgcctgscacaggcttttcctgcgtacctccttgaatgtgggaaggattcacagaggaagatcttcaaaatacggaggtggcaagcattgttgtgtagccctaagtc

SEQ ID NO: 369217 - DNA, 201 bp, Homo sapiens
cccaagtagctgggattacaggcatgtgctactatgcctggctaattttgtgtttttagtagagatggggtttcaccatgttggccaggctggtctcgaastcctggcctcaagtgatccacccaactcatcctcccaaagttctgggattacaggcattagccaccattcccggccatattcctagatgattaacaacag

SEQ ID NO: 369218 - DNA, 201 bp, Homo sapiens
gatcgagagataatcctgaaataatgaaagattgaactctggccatatttagacactttttttaaaaaaagcaggaagacacaatgaaaaacagtacagcytcaagtatgactgttttctgcattggaaaggtgtcttactttaaaacactcctaggtactattttttactattcagagccaagacagcaattccggtttt

SEQ ID NO: 369219 - DNA, 201 bp, Homo sapiens
ttgtaggcatttttacaaaattttaaactgtaatctgtgtttattttaaactgaagatttttatgagcaaattctgctacttcccctttgattcatttctatcactgttgaaatttttgtcccccataattcttcaggttctacatcatccttttcaggatgattttttttttttttttttttttttaaattgcgatagag

SEQ ID NO: 369220 - DNA, 201 bp, Homo sapiens
agggaggattgcttgagcctaggagttcgagaccaacctgggcaacacagtgagaccccatctctacaaaaaataagacaagttagctgggtgtggtggtrtgtgcccgtggtcccagctacttgggaggctgaagtgggaggatcacttgagcctgggaggtcgaggctgcaataagccatgatcacgccacagcactcc

SEQ ID NO: 369221 - DNA, 201 bp, Homo sapiens
tgagcaaattctgctacttcccctttgattcatttctatcactgttgaaatttttgtcccccataattcttcaggttctacatcatccttttcaggatgattttttttttttttttttttttttaaattgcgatagagtcttgctaggttgcctgggctggtcttgaactcctgggctcaagcgatccttccatcttggcc

SEQ ID NO: 369222 - DNA, 201 bp, Homo sapiens
aaacctagttctgaaaattattgacagtccttttgtattctgattataatatccctgttactgagctaagccagtgttgacagtgtgaatgatgctactcrcgcagtgtgatccgtctcctttcagtcttctaaatagctgagtaatccattatttaaaagaagggaaatattgccagagactaaatattacgtgctgatc

SEQ ID NO: 369223 - DNA, 201 bp, Homo sapiens
aacctagttctgaaaattattgacagtccttttgtattctgattataatatccctgttactgagctaagccagtgttgacagtgtgaatgatgctactcaygcagtgtgatccgtctcctttcagtcttctaaatagctgagtaatccattatttaaaagaagggaaatattgccagagactaaatattacgtgctgatca

SEQ ID NO: 369224 - DNA, 201 bp, Homo sapiens
atatatatatatatttatatatatctctatctatctatctatatatataggtttttttttttgagatagagtctctgtcacccagactggagtgcagtggyacgatcttggctcactgcaacctccgcctcccgggttcaagtgattctcctgcctcagcctcctgagtagctggaattacaggtgtgtgtcaccatgcct

SEQ ID NO: 369225 - DNA, 201 bp, Homo sapiens
tatatatatatatttatatatatctctatctatctatctatatatataggtttttttttttgagatagagtctctgtcacccagactggagtgcagtggcrcgatcttggctcactgcaacctccgcctcccgggttcaagtgattctcctgcctcagcctcctgagtagctggaattacaggtgtgtgtcaccatgcctg

SEQ ID NO: 369226 - DNA, 201 bp, Homo sapiens
atatatatatatttatatatatctctatctatctatctatatatataggtttttttttttgagatagagtctctgtcacccagactggagtgcagtggcaygatcttggctcactgcaacctccgcctcccgggttcaagtgattctcctgcctcagcctcctgagtagctggaattacaggtgtgtgtcaccatgcctgg

SEQ ID NO: 369227 - DNA, 201 bp, Homo sapiens
aattttaacccacttgcatgtatagtccagttttggtcctctggaagccacaggaacatttcaaaaaaattgataatctgaaaaaatattttttctgaatyttattgcggaagtagaagtttaacatcatctaggctgaattttgctagccatgctgttggctttttgtattactgcaacttataatggataaacattact

SEQ ID NO: 369228 - DNA, 201 bp, Homo sapiens
atatatttatatatatctctatctatctatctatatatataggtttttttttttgagatagagtctctgtcacccagactggagtgcagtggcacgatctyggctcactgcaacctccgcctcccgggttcaagtgattctcctgcctcagcctcctgagtagctggaattacaggtgtgtgtcaccatgcctggctaatt

SEQ ID NO: 369229 - DNA, 201 bp, Homo sapiens
ccacttgcatgtatagtccagttttggtcctctggaagccacaggaacatttcaaaaaaattgataatctgaaaaaatattttttctgaattttattgcgraagtagaagtttaacatcatctaggctgaattttgctagccatgctgttggctttttgtattactgcaacttataatggataaacattactctggatcac

SEQ ID NO: 369230 - DNA, 201 bp, Homo sapiens
atatatctctatctatctatctatatatataggtttttttttttgagatagagtctctgtcacccagactggagtgcagtggcacgatcttggctcactgsaacctccgcctcccgggttcaagtgattctcctgcctcagcctcctgagtagctggaattacaggtgtgtgtcaccatgcctggctaatttttgtatttt

SEQ ID NO: 369231 - DNA, 201 bp, Homo sapiens
tatatctctatctatctatctatatatataggtttttttttttgagatagagtctctgtcacccagactggagtgcagtggcacgatcttggctcactgcracctccgcctcccgggttcaagtgattctcctgcctcagcctcctgagtagctggaattacaggtgtgtgtcaccatgcctggctaatttttgtattttt

SEQ ID NO: 369232 - DNA, 201 bp, Homo sapiens
ccctaatcacccgtatatgagcgttggcattatgagtgttgtttctaattttgatagaaattgactgcagtatattgagttatgtgaacaaactcatttcrtttctgaaatctggcacttttgttcattaattttctattgaatgctattaatttatttctacaatgcttgttacccatgaataatattttcaaaagaaaa

SEQ ID NO: 369233 - DNA, 201 bp, Homo sapiens
ttctgatttccactttcatagaggtgacccacttacgaccttggcctctcaatctgttgttcttctttcttctaacattcttgccctcagactaaccttakccatggttatgccttaaaactgatcattatcaatcactatagccccctctcctcccacccacagtaatctcagtctcgagtatcttttaactttccagct

SEQ ID NO: 369234 - DNA, 201 bp, Homo sapiens
gtggtgtcattttggctcactgcagcctcgacctcacaggctcaagccatcctcccacacagcctcccaagtagctgggactacaggcgtgcaccactacrcctggctaatttttgtattttttgtagcaacggggtctctctgtgttgccaaggctgctctcaaactcctcccaaagtgccgattataggtatgagcctg

SEQ ID NO: 369235 - DNA, 201 bp, Homo sapiens
ggtgcgtgccaccatgccctgctaatttttgtatttttagtagaaacagggtttcaccatgttgatcaggctggtctctaactcctgacctcaggtgatcyacccgcctcggcctcccaaagtgctgggattacaggcatgatccaccgcgctaggccaacacacatgaacctcttcagatttcaagtgctgtgcatgtag

SEQ ID NO: 369236 - DNA, 201 bp, Homo sapiens
ccgggttcaagccattcttctgcctcagccccccaagtagctgagactacaggtgcgtgccaccatgccctgctaatttttgtatttttagtagaaacagkgtttcaccatgttgatcaggctggtctctaactcctgacctcaggtgatccacccgcctcggcctcccaaagtgctgggattacaggcatgatccaccgc

SEQ ID NO: 369237 - DNA, 201 bp, Homo sapiens
gaaaaaaaaaaaacagccaggaattaccaaccatttttgttgttgttgttgtttttgagatggaatctcgctctttcacccaggctggagtgcagtggcgygatctcggctcactgcaacctccgcaccgccgggttcaagccattcttctgcctcagccccccaagtagctgagactacaggtgcgtgccaccatgccct

SEQ ID NO: 369238 - DNA, 201 bp, Homo sapiens
gtacatttgatctttaggtattttcttgttttgtcttatttttctcctagagaatgttgacatctaagaatacacacacacacacagagtagtttttaatyaatacacagtttttagtcatgattatagagctaactagacatcagaaatgaatcatccagaattacacacttaaatatgaatatgaatagaaatttcata

SEQ ID NO: 369239 - DNA, 201 bp, Homo sapiens
gagaaggaagcctgtctgaagattgataaccttgaacatggcattaatgagtgctgctgctacatggtcaaaagaaatggttgcgctttaaacaaatactrttctgtgataggccaaagagaagttaagaatagcatgaagaatagaatatagttgtaagaatatttcaagataagattcttccagcaaatttagctttct

SEQ ID NO: 369240 - DNA, 201 bp, Homo sapiens
atgaaacaccatccatatatcatccacaatttattcgcagaaatccaaattggtacttagttacctcagttatttgtgcttagtagtatttgtgcttgaawatctcattctcaaagagatcaaagcctaccttttcccacccacatttatagttgtaacagcctaacactcaattacttatcctactatatttggttttac

SEQ ID NO: 369241 - DNA, 201 bp, Homo sapiens
tgataagtgttatggaaaaaaaatcaaacaagacagagagtgaagaagttggtatttagttagctggtcagagaagcctccttacattgctgacatatgartggagacctgaatgaagtgatgatgtggagagccctgggaatcctagccctagagctgtctaggtagaggaaatagtacatccaaagaccctgaggtggg

SEQ ID NO: 369242 - DNA, 201 bp, Homo sapiens
actcacccttactggaagcagctggcttgagggagcaggttcttagatggtgttgatttctttctatatatatgtatatatatatatctcttctgaaacayatatataaatatatatttaatatataaaagtatatattaaatatatattatttatttaatatatataaaatatataaacatatatattatatatatttct

SEQ ID NO: 369243 - DNA, 201 bp, Homo sapiens
agaattatgggtcaaaaacagtggactcttttattctgagagagagctctagcttcattcattcaacaattatttttaagtttctcttgagtgccaggcastgttctgagcaatcagtgacaaagtcccacccttatggagctaaaatttctggggagatgcagaataaacaaatatgtagtataatttgaggttttgata

SEQ ID NO: 369244 - DNA, 201 bp, Homo sapiens
tcatgaataaataatgtcatccttttccctcaagcatgacttcaagtaggctttccttttttgttgttttaatctccagtcggggagactgccatttaagragcgtttctttgcaattttcttaggaaagtccaatatgtaaaaaaggcagaggtgtcactgccctaagaggaagggtggtcttgaaggggtgaatccact

SEQ ID NO: 369245 - DNA, 201 bp, Homo sapiens
aaaaaaagaaaaaaaaaaaacagccaggaattaccaaccatttttgttgttgttgttgtttttgagatggaatctcgctctttcacccaggctggagtgcygtggcgtgatctcggctcactgcaacctccgcaccgccgggttcaagccattcttctgcctcagccccccaagtagctgagactacaggtgcgtgccacc

SEQ ID NO: 369246 - DNA, 201 bp, Homo sapiens
cttctgaaaggaaggcaaccagaatacctcatctagcagcatgtccctggcatctatgacaagcaaatagagaactcataaaaaaaaagaaaaaaaaaaaacagccaggaattaccaaccatttttgttgttgttgttgtttttgagatggaatctcgctctttcacccaggctggagtgcagtggcgtgatctcggctca

SEQ ID NO: 369247 - DNA, 201 bp, Homo sapiens
agatactgtttcactgtgtgttgttttaaagagtaaatctccagtgatgctggaaaacaaggaagagtacacacatacacacacacacacacacacacacacgtatgtttttgtttttgtgggtttgttttttttttgtttttttttagttttgttacaggccataaacttcaaaagactcaaagcagataggattgtatc

SEQ ID NO: 369248 - DNA, 201 bp, Homo sapiens
gagatactgtttcactgtgtgttgttttaaagagtaaatctccagtgatgctggaaaacaaggaagagtacacacatacacacacacacacacacacacacacgtatgtttttgtttttgtgggtttgttttttttttgtttttttttagttttgttacaggccataaacttcaaaagactcaaagcagataggattgtat

SEQ ID NO: 369249 - DNA, 201 bp, Homo sapiens
ggagatactgtttcactgtgtgttgttttaaagagtaaatctccagtgatgctggaaaacaaggaagagtacacacatacacacacacacacacacacacacacgtatgtttttgtttttgtgggtttgttttttttttgtttttttttagttttgttacaggccataaacttcaaaagactcaaagcagataggattgta

SEQ ID NO: 369250 - DNA, 201 bp, Homo sapiens
tccttacaggaatttacaggagatactgtttcactgtgtgttgttttaaagagtaaatctccagtgatgctggaaaacaaggaagagtacacacatacacwcacacacacacacacacacacgtatgtttttgtttttgtgggtttgttttttttttgtttttttttagttttgttacaggccataaacttcaaaagactc

SEQ ID NO: 369251 - DNA, 201 bp, Homo sapiens
caatccatcaggaaatggaggggggaagtgctgttattatttcactctcacttttagtattttttaatatttttgtattttttagtatttcaatatttttyactttataagcatatgtgatattttatactaatcaaaactaaaattaatttatcaataccttttttaaagaggatctaacatgaaagcctagattttaag

SEQ ID NO: 369252 - DNA, 201 bp, Homo sapiens
gtaagtgccctctataggtctacatcattttttaccatatttttactgtaccttttctgtttagatatgtgtagatacacaaatatttatcattgtgttayagttgcctacaatattcagtatagcaacatgctatacaagtttatagcctagtagcaaattatatagcctagatgtgtagtaggctatatcatctaggtt

SEQ ID NO: 369253 - DNA, 201 bp, Homo sapiens
gaaatagttacagtaagctaaggttaatttactattgaagaaataaaaatatttttataaatttagtgtagcccaagtgtacagtgttttataaagtctgyagtagtatacagtaatgtcctaggccctcacactcactcaccactcactcacggactcacctagagcaactgctagtcctacaagctccattcatggtaa

SEQ ID NO: 369254 - DNA, 201 bp, Homo sapiens
ttagggttactaggacttgagctatactagctcctcttttaatgtttatccatatatgtatatcactgctaacatagttatcctgtagtccagagaatatttttttccttgtacttagattttcctggaattagactagtgacctcgtgataaaccaccatatgctactcattacagtcatgcactgcataacaatatttc

SEQ ID NO: 369255 - DNA, 201 bp, Homo sapiens
cagcaaatttggaaagtttttagcacttattttaaaaaatatatttatgtttatcaccttttcttctcttctgagattctaattacacatataatagacarcttgacatggttgcacagcagggcttttttcttcttcttcatttttctttctctccatgcttatttttgaatagtttctattgaatgtcttcaaatttat

SEQ ID NO: 369256 - DNA, 201 bp, Homo sapiens
ggttgaaaaacatcaaaagtagaataatattttgtgacacatgaaaagtatgtgatatgcaaatttcaatgtccataaataaagttttataggaacatagyggggaaaaggcttttattcttttagtgtagccttttatgtttgaagagcaaattatattgccttgcaagaaattcaaaggtcagtacccaggtgctagcc

SEQ ID NO: 369257 - DNA, 201 bp, Homo sapiens
gaaaggatcaatagcctctctagatggatttaattgtagccaagggttgttacacttccaagggaactccagtctctgaatgggggaatctgtggcttctstggaaggagccagccatgacctgattgattacccagattttttggggggaagtctcaatgtgaaggctgccatttgccctcccagggaggaggagaggcc

SEQ ID NO: 369258 - DNA, 201 bp, Homo sapiens
tatatgagaagtcaaaatgatctgatcccacagctggtgcaatataggaatagagttttaaaggaaaagatgtgtttgttgtgttcccttaagcaatcttytatacctgttctttaagtcaaggttttgattaataccgaatgacaataggttcagagttaaactttctgaaaaatagctggaatgtggttattgtatgtc

SEQ ID NO: 369259 - DNA, 201 bp, Homo sapiens
gcaaaacgagaaatagattactgtgattataaatatgaagcagtaggtggaaactgaagctgtttctggcatttctcaccaaaacggccatggcctccagrtctgtctctctgtaagagggcagcacccctgaagacacagtgccacgtcaaggatgtgtgtgagctcctctgcctgcacaggctttgcgaaaggtttccg

SEQ ID NO: 369260 - DNA, 201 bp, Homo sapiens
attcacacatcttacttactctagaaaacctatggttcaaagttctaacttattttagttattagttcttttctaacctatcaccaacttacatctactaygtctcttttaacacttagcatacgtactgtgacttctatgtgtgcaaaataggaagtgagttactcatcccagttatttcaccagagcagtttcatggtg

SEQ ID NO: 369261 - DNA, 201 bp, Homo sapiens
tgttaggagagtcatctggtttgcttttaaaaaaagttttttagactttttagctaatcagtttaaaatgcattcttttattgccgctgtagatattcttyagtggtaatataaatgtaaaaataaatccctgttacaattaataaactctgaattctaaatgtttccatattctccccttttttagtgatgtcagttaaa

SEQ ID NO: 369262 - DNA, 201 bp, Homo sapiens
gacttgatgggactcagcatgcaaggttttaggggaggatgaatatgcctggaattttgtggaatttgaaagactgctgaccctccaagtacaaataagtrtcgctctttaatgagtctgattttctcagcataacctgttatttataaatactgcaataactttttaagaattatttatggtattagatgaaattatatg

SEQ ID NO: 369263 - DNA, 201 bp, Homo sapiens
atgctatacaagtttatagcctagtagcaaattatatagcctagatgtgtagtaggctatatcatctaggtttgtgtaagtacactctatgatgttcacasaatgaggaaatcacctaatgatgcatttcttagactatatctctgttgttaagcaatgcatgactgtatctgaatatattctacagttgatctttttctg

SEQ ID NO: 369264 - DNA, 201 bp, Homo sapiens
tgttgtgagatagtcacacaatgcattactcacgtgtttgtggtgatgttggcataaataaacctactgtgctgccacttgtattaaagtatactacatamaattatgtatagtacataatacttgataatgataataaatgactatgttactggtttacatatttactatactttttatcgttgttttagagtatacttt

SEQ ID NO: 369265 - DNA, 201 bp, Homo sapiens
aaaatgaccagagtatgcacctgtagtactgtacactaaataaaatacacaaggcagcaatacttaggggccagaaacactgcttactacaagtcagttayggaatcataatttacagtaaaaatgggcacgtcccaaggctcaatttttctttttcttttgtcatttacagtagaataaatattttgttgctattgctac

SEQ ID NO: 369266 - DNA, 201 bp, Homo sapiens; identical to SEQ ID NO: 80065

SEQ ID NO: 369267 - DNA, 201 bp, Homo sapiens
gaatataattctgctgctgagttagtctctggtctgttctccatgatttctgtctgtgataatagtactaatatatatgttgtagatgagagtggtaacaktctaaacaccaacctcaaaagattagttgtataatattccagttaacttcagtaaccaatcatgaaactgtcacccatggaattttaactctttgaggat

SEQ ID NO: 369268 - DNA, 201 bp, Homo sapiens
gcatcttaactctgttctacctggttccatcttgaattgtttgtgttttaaaatgtcaagaatatatttccaaattataattgcatataatgcaaaaaacatgttttgaatgcccttaaagcatttaagaatataattctgctgctgagttagtctctggtctgttctccatgatttctgtctgtgataatagtactaata

SEQ ID NO: 369269 - DNA, 201 bp, Homo sapiens
ctactgggaaaagctgtttgatgggtcagttttggtaagatatttttgaagtgccggaggagtcaagagagcacttagcatgtgctgtttagtattacaaracttgttgcagaagaatactagtaatggatagaaatgaaaatatttgctgttttagttatagtggtcccctcactggcatttgatattaagttttattac

SEQ ID NO: 369270 - DNA, 201 bp, Homo sapiens
tttagggttactaggacttgagctatactagctcctcttttaatgtttatccatatatgtatatcactgctaacatagttatcctgtagtccagagaatatttttttccttgtacttagattttcctggaattagactagtgacctcgtgataaaccaccatatgctactcattacagtcatgcactgcataacaatattt

SEQ ID NO: 369271 - DNA, 201 bp, Homo sapiens
tgacaggccccagtgtgtgttgctcccctcctcccctccatgtgtccctgtgttttcatcatttagctctcacttataaatgagaacatgcgggtatttgrttttctattcctgcgttagtttgctaaggataatggcctccagctccatccatgtttctgcaatggacatgatcttgttcctttttatggctgcatagta

SEQ ID NO: 369272 - DNA, 201 bp, Homo sapiens
atctttgtgccatgtgtacatttgatctttaggtattttcttgttttgtcttatttttctcctagagaatgttgacatctaagaatacacacacacacacagagtagtttttaattaatacacagtttttagtcatgattatagagctaactagacatcagaaatgaatcatccagaattacacacttaaatatgaatatg

SEQ ID NO: 369273 - DNA, 201 bp, Homo sapiens
tgctgagactaatgttgctactctaggacaaataaacctaaattttataaaatctctgtgttattttataaattggatatacctgtactaagatcagtttrttagacccattgtttctttctttgactgacatgccttttttttttttccaacttttattttaagttcaggggtaaatgttcatgttacatgggtaaatgt

SEQ ID NO: 369274 - DNA, 201 bp, Homo sapiens
ttttagggttactaggacttgagctatactagctcctcttttaatgtttatccatatatgtatatcactgctaacatagttatcctgtagtccagagaatatttttttccttgtacttagattttcctggaattagactagtgacctcgtgataaaccaccatatgctactcattacagtcatgcactgcataacaatatt

SEQ ID NO: 369275 - DNA, 201 bp, Homo sapiens
tatctttgtgccatgtgtacatttgatctttaggtattttcttgttttgtcttatttttctcctagagaatgttgacatctaagaatacacacacacacacagagtagtttttaattaatacacagtttttagtcatgattatagagctaactagacatcagaaatgaatcatccagaattacacacttaaatatgaatat

SEQ ID NO: 369276 - DNA, 201 bp, Homo sapiens
ccaaaatctttctactaactgctgagactaatgttgctactctaggacaaataaacctaaattttataaaatctctgtgttattttataaattggatatamctgtactaagatcagtttattagacccattgtttctttctttgactgacatgccttttttttttttccaacttttattttaagttcaggggtaaatgttc

SEQ ID NO: 369277 - DNA, 201 bp, Homo sapiens
gttttagggttactaggacttgagctatactagctcctcttttaatgtttatccatatatgtatatcactgctaacatagttatcctgtagtccagagaatatttttttccttgtacttagattttcctggaattagactagtgacctcgtgataaaccaccatatgctactcattacagtcatgcactgcataacaatat

SEQ ID NO: 369278 - DNA, 201 bp, Homo sapiens
tgttttagggttactaggacttgagctatactagctcctcttttaatgtttatccatatatgtatatcactgctaacatagttatcctgtagtccagagaatatttttttccttgtacttagattttcctggaattagactagtgacctcgtgataaaccaccatatgctactcattacagtcatgcactgcataacaata

SEQ ID NO: 369279 - DNA, 201 bp, Homo sapiens
ttagccgggtgtggtggcgggcgcctgtagtcccagctgctcaggaggctgaggcaggagaatggtgtgaacctgggaggcggagcttgcagtgagccgckatcacgccactgcactccagcctgggcgacagagctagactctgtctcaaaaaaaacaacaaaaaaagagaattgctgagccaagggaaatactgtgtgt

SEQ ID NO: 369280 - DNA, 201 bp, Homo sapiens
cgtctctactaaaaatacaaaaaaaaattagccgggtgtggtggcgggcgcctgtagtcccagctgctcaggaggctgaggcaggagaatggtgtgaaccygggaggcggagcttgcagtgagccgctatcacgccactgcactccagcctgggcgacagagctagactctgtctcaaaaaaaacaacaaaaaaagagaat

SEQ ID NO: 369281 - DNA, 201 bp, Homo sapiens
ctgttagaagaatgcttggcatatggtaggtatctgttgagtctaagaacacaaaccacattccccagtctcctagtggtgatataacactaaagatcagkagtgggaaataggttggcacaatctggagaaattaagagaagcaagatttggagagaatcttggagaaagttacagacacacacaatggcttagaacaga

SEQ ID NO: 369282 - DNA, 201 bp, Homo sapiens
tgaaacctcgtctctactaaaaatacaaaaaaaaattagccgggtgtggtggcgggcgcctgtagtcccagctgctcaggaggctgaggcaggagaatggygtgaacctgggaggcggagcttgcagtgagccgctatcacgccactgcactccagcctgggcgacagagctagactctgtctcaaaaaaaacaacaaaaa

SEQ ID NO: 369283 - DNA, 201 bp, Homo sapiens
aggccgaggcgggcagatcctgaggttaggagatcaagaccatcctggctaacacggtgaaacctcgtctctactaaaaatacaaaaaaaaattagccggrtgtggtggcgggcgcctgtagtcccagctgctcaggaggctgaggcaggagaatggtgtgaacctgggaggcggagcttgcagtgagccgctatcacgcc

SEQ ID NO: 369284 - DNA, 201 bp, Homo sapiens
ggaggccgaggcgggcagatcctgaggttaggagatcaagaccatcctggctaacacggtgaaacctcgtctctactaaaaatacaaaaaaaaattagccrggtgtggtggcgggcgcctgtagtcccagctgctcaggaggctgaggcaggagaatggtgtgaacctgggaggcggagcttgcagtgagccgctatcacg

SEQ ID NO: 369285 - DNA, 201 bp, Homo sapiens
tgggaggccgaggcgggcagatcctgaggttaggagatcaagaccatcctggctaacacggtgaaacctcgtctctactaaaaatacaaaaaaaaattagycgggtgtggtggcgggcgcctgtagtcccagctgctcaggaggctgaggcaggagaatggtgtgaacctgggaggcggagcttgcagtgagccgctatca

SEQ ID NO: 369286 - DNA, 201 bp, Homo sapiens
atttttgtatatggtgtaaggaaggggtccagttttagtcttctgtatatagctagcccgttatcccagaatcatttattgaatagggagtcctttccccrttgcttgtttttgtcagctttgtcaaagatcagatggttgtaggtgtgtgggtttatatctgggctctctatcctgctccattggtctgtgtgtctgttt

SEQ ID NO: 369287 - DNA, 201 bp, Homo sapiens
gaacagattgcaaaaattttctcccattctataggttgcctgttcactctgatgataatttctcttttgctatgcagaagctttttagtttaattagatcrcatttgtcaattttggcttttgttgccattgcttttggtcttttagtcatgaagtctttgcctatgcctatatcctgaatgatattgctgaggttttctt

SEQ ID NO: 369288 - DNA, 201 bp, Homo sapiens
gaactttgaactaaggggattcatgaaaaagctgcagctagcaacatatttaaatggcaagtgtgaatgctttcttcctgagattgggaacaaggctaggmtgtctgctctcacaattttatacaacactggaatggaagttctagctggtacagtcaggcaagaaataaatgaaagacatctagaccggagaggataaaa

SEQ ID NO: 369289 - DNA, 201 bp, Homo sapiens
gctgaagctaggcctttaaaggcaccaaaatctttctactaactgctgagactaatgttgctactctaggacaaataaacctaaattttataaaatctctrtgttattttataaattggatatacctgtactaagatcagtttattagacccattgtttctttctttgactgacatgccttttttttttttccaactttta

SEQ ID NO: 369290 - DNA, 201 bp, Homo sapiens
ccttcaacttaatcttataggtagtcaagtatcattatccgttggatatgttgaatatgttacatgaatggcagaagaaggaggggaaggaagtggtatcratgagaatagtttagaccatgtaagacgtttagaagtacaaaagtaaaaatttcatgaggacctagtgtgtttggacactcccctgtgaccccctacctc

SEQ ID NO: 369291 - DNA, 201 bp, Homo sapiens
ccaggagtttgagaccagcttgggcaacatagtgaggctccatctcaatttaaaaataataataataataataataataataataataataataataaagaccctgggttctgttatctatctaagttcaaatcctacctccaccactcagtagctttgctcttggcaagtgtggtatcctttgaaaactttagtttcttc

SEQ ID NO: 369292 - DNA, 201 bp, Homo sapiens
ttcttatttaaatttaatggtgataaagacagaacgagccttcaacttaatcttataggtagtcaagtatcattatccgttggatatgttgaatatgttamatgaatggcagaagaaggaggggaaggaagtggtatcgatgagaatagtttagaccatgtaagacgtttagaagtacaaaagtaaaaatttcatgaggac

SEQ ID NO: 369293 - DNA, 201 bp, Homo sapiens
tctggagaagatagacatgaaatcaaatgatcctacacatagctacctaaggacagcagtcaaaaggctgtaaaggaaacagaaaggttgtttttttgttyaaaaaatttgtgacttaattaaaaactagggtgacttaaaaattctgagtcaatttttgaaggaacatgttatgcttttgatgaagttctttgtttaaca

SEQ ID NO: 369294 - DNA, 201 bp, Homo sapiens
cccaggagtttgagaccagcttgggcaacatagtgaggctccatctcaatttaaaaataataataataataataataataataataataataataataaagaccctgggttctgttatctatctaagttcaaatcctacctccaccactcagtagctttgctcttggcaagtgtggtatcctttgaaaactttagtttctt

SEQ ID NO: 369295 - DNA, 201 bp, Homo sapiens
cactttgggaggccgaggcgggcagatcctgaggttaggagatcaagaccatcctggctaacacggtgaaacctcgtctctactaaaaatacaaaaaaaawttagccgggtgtggtggcgggcgcctgtagtcccagctgctcaggaggctgaggcaggagaatggtgtgaacctgggaggcggagcttgcagtgagccgc

SEQ ID NO: 369296 - DNA, 201 bp, Homo sapiens
gatcactgaattttccaccaaattacaggtgcctcatttgagacagttttcctttatccatggggcagatatacactttatgcttgtaaacaaagtatgasaaaaaccaaaaatttagccttgatgtttagaataggtttacttttagaataggtttagaatagaatatttacttaagacaaatatgaatcccatatagat

SEQ ID NO: 369297 - DNA, 201 bp, Homo sapiens
gcccaggagtttgagaccagcttgggcaacatagtgaggctccatctcaatttaaaaataataataataataataataataataataataataataataaagaccctgggttctgttatctatctaagttcaaatcctacctccaccactcagtagctttgctcttggcaagtgtggtatcctttgaaaactttagtttct

SEQ ID NO: 369298 - DNA, 201 bp, Homo sapiens
gaggccgggcacggtggctcacgcctgtaatcccagcactttgggaggccgaggcgggcagatcctgaggttaggagatcaagaccatcctggctaacacrgtgaaacctcgtctctactaaaaatacaaaaaaaaattagccgggtgtggtggcgggcgcctgtagtcccagctgctcaggaggctgaggcaggagaatg

SEQ ID NO: 369299 - DNA, 201 bp, Homo sapiens
gagaatatttggaaaccaataatagtgatatttattatgcaatatttatgctggacactattttaaatgtcttccatataattcctcatttaaacttcacwacaaacctacatagtaggtattgttacattatagatgtggaatctgaggaacaaagaagttaagtaacttgctcaaggttacctggccaggagatggcag

SEQ ID NO: 369300 - DNA, 201 bp, Homo sapiens
agcccaggagtttgagaccagcttgggcaacatagtgaggctccatctcaatttaaaaataataataataataataataataataataataataataataaagaccctgggttctgttatctatctaagttcaaatcctacctccaccactcagtagctttgctcttggcaagtgtggtatcctttgaaaactttagtttc

SEQ ID NO: 369301 - DNA, 201 bp, Homo sapiens
atcgatcacatctgatttctgttgcttattgtaagccatttgtaaggcaattattaagaaagaggagaggccgggcacggtggctcacgcctgtaatcccwgcactttgggaggccgaggcgggcagatcctgaggttaggagatcaagaccatcctggctaacacggtgaaacctcgtctctactaaaaatacaaaaaaa

SEQ ID NO: 369302 - DNA, 201 bp, Homo sapiens
gatactagtaaatgccaaattaagtgaggggttttattctttccccagatcacatataatgatatcagatgggcttggtttgggctctgatttctgaggcrcctactttgactaactatctaggacagtagttttctttttttttcttcatccagaaactttattgtaaatcatttgtcaacaagatctgcatttctaatt

SEQ ID NO: 369303 - DNA, 201 bp, Homo sapiens
tgagcccaggagtttgagaccagcttgggcaacatagtgaggctccatctcaatttaaaaataataataataataataataataataataataataataawaaagaccctgggttctgttatctatctaagttcaaatcctacctccaccactcagtagctttgctcttggcaagtgtggtatcctttgaaaactttagtt

SEQ ID NO: 369304 - DNA, 201 bp, Homo sapiens
gtcactctgtagaatcgatcacatctgatttctgttgcttattgtaagccatttgtaaggcaattattaagaaagaggagaggccgggcacggtggctcaygcctgtaatcccagcactttgggaggccgaggcgggcagatcctgaggttaggagatcaagaccatcctggctaacacggtgaaacctcgtctctactaa

SEQ ID NO: 369305 - DNA, 201 bp, Homo sapiens
actgtggatactagtaaatgccaaattaagtgaggggttttattctttccccagatcacatataatgatatcagatgggcttggtttgggctctgatttckgaggcacctactttgactaactatctaggacagtagttttctttttttttcttcatccagaaactttattgtaaatcatttgtcaacaagatctgcattt

SEQ ID NO: 369306 - DNA, 201 bp, Homo sapiens
gtaatttttgtatttttagtagagacggagtttcgccatgttggccaagctagtcttgaactcctgacctcaaatgattcacccgcctcagcctcccaaadtgctgggattacaggcatgagccaccgcgcctggcttaaaatgggatttataatagtacctatctcataaagtagttgtgagggttacatgagtttagtg

SEQ ID NO: 369307 - DNA, 201 bp, Homo sapiens
acttgagcccaggagtttgagaccagcttgggcaacatagtgaggctccatctcaatttaaaaataataataataataataataataataataataataataataaagaccctgggttctgttatctatctaagttcaaatcctacctccaccactcagtagctttgctcttggcaagtgtggtatcctttgaaaacttta

SEQ ID NO: 369308 - DNA, 201 bp, Homo sapiens
gggtgtggtggcacatgcctgtaatcccagctactcaggagactgaggcaggagaattgtttcaacccacgaggtggaggttgcagtgagctgagattgtkccactgcactccagcctgggtgacagagcaagactctgtctcaaaaaaaaaaaaaaaaaaagaagaggtttcagctagaagtctaattgattataggtga

SEQ ID NO: 369309 - DNA, 201 bp, Homo sapiens
gtatctaacttcctgtggtaaagatgctacttgtttatcataatggccctatagcacatgaagaaagatgctaaaaccagcaaacacttcaagagcaccayagggcatacatttgctagtttctttgaaaccttaagtcttgttaattccacccatgccttttgaaatacttcattctttggagtaccacagatgcaagcc

SEQ ID NO: 369310 - DNA, 201 bp, Homo sapiens
atcacttgagcccaggagtttgagaccagcttgggcaacatagtgaggctccatctcaatttaaaaataataataataataataataataataataataataataataaagaccctgggttctgttatctatctaagttcaaatcctacctccaccactcagtagctttgctcttggcaagtgtggtatcctttgaaaact

SEQ ID NO: 369311 - DNA, 201 bp, Homo sapiens
cgggtgtggtggcacatgcctgtaatcccagctactcaggagactgaggcaggagaattgtttcaacccacgaggtggaggttgcagtgagctgagattgsgccactgcactccagcctgggtgacagagcaagactctgtctcaaaaaaaaaaaaaaaaaaagaagaggtttcagctagaagtctaattgattataggtg

SEQ ID NO: 369312 - DNA, 201 bp, Homo sapiens
gagaaatagagattgggccatgcagggctttgtgggctattttaagaatatggatctttatcctcaaaacatcaggaggcaacccttgaggggaatgggcrttgacataatcaggtttatagtttttaagaggtctctccagttaccatgtggaaaatggactgaagggggtcaggttgggatagatttgttaaataatag

SEQ ID NO: 369313 - DNA, 201 bp, Homo sapiens
ttagccgggtgtggtggcacatgcctgtaatcccagctactcaggagactgaggcaggagaattgtttcaacccacgaggtggaggttgcagtgagctgarattgtgccactgcactccagcctgggtgacagagcaagactctgtctcaaaaaaaaaaaaaaaaaaagaagaggtttcagctagaagtctaattgattat

SEQ ID NO: 369314 - DNA, 201 bp, Homo sapiens
agtggttaagaccctgggtgctgttgggcatggtgaaatacactttagactcagctacttgggaggctgaggcgggaggatcacttgagcccaggagtttragaccagcttgggcaacatagtgaggctccatctcaatttaaaaataataataataataataataataataataataataataataaagaccctgggttc

SEQ ID NO: 369315 - DNA, 201 bp, Homo sapiens
gtgggcagattatctgaagtcaggagtttgagaccagtttggccaacatggtgaaaccccatctctactaaaaatacaaaaattagccgggtgtggtggcrcatgcctgtaatcccagctactcaggagactgaggcaggagaattgtttcaacccacgaggtggaggttgcagtgagctgagattgtgccactgcactcc

SEQ ID NO: 369316 - DNA, 201 bp, Homo sapiens
atcccagcaccttgggaggccgaggtgggcagattatctgaagtcaggagtttgagaccagtttggccaacatggtgaaaccccatctctactaaaaatayaaaaattagccgggtgtggtggcacatgcctgtaatcccagctactcaggagactgaggcaggagaattgtttcaacccacgaggtggaggttgcagtga

SEQ ID NO: 369317 - DNA, 201 bp, Homo sapiens
gcctgtaatcccagcaccttgggaggccgaggtgggcagattatctgaagtcaggagtttgagaccagtttggccaacatggtgaaaccccatctctactraaaatacaaaaattagccgggtgtggtggcacatgcctgtaatcccagctactcaggagactgaggcaggagaattgtttcaacccacgaggtggaggtt

SEQ ID NO: 369318 - DNA, 201 bp, Homo sapiens
cgggggaaaaaaaaaagaatgactatagagggcaaaaacagcaacagggagcctaatcaggagtctgttggaataacccagtgagatgatggcttggaccygggtggtaataatgaaagaagtatacaaatatattttaaaatatatattaacggttgaaggtcaaataaacaagattttctgctagattgaatgtagagt

SEQ ID NO: 369319 - DNA, 201 bp, Homo sapiens
caaattagatggggggcccaaaagggagagagaggagtcttaggatgactcccaagctgttggcctaggtaacttggtgtaagagtggtgccatttatgamgagagggaatttaggaagagggggagttttgggaggaagacaatgaggttagttttgtgcaagctgagtataagagccctgtgggggccaggcacattat

SEQ ID NO: 369320 - DNA, 201 bp, Homo sapiens
actggagaaatagagattgggccatgcagggctttgtgggctattttaagaatatggatctttatcctcaaaacatcaggaggcaacccttgaggggaatsggcattgacataatcaggtttatagtttttaagaggtctctccagttaccatgtggaaaatggactgaagggggtcaggttgggatagatttgttaaata

SEQ ID NO: 369321 - DNA, 201 bp, Homo sapiens
ctagaggacatattcttcatgatttttgcctttcaaactggttaagatttgcctctggcttagaatagtcaattattaatgatctatgtgtgttagaaaaraatgtttaggccaggtgtggtggctcacgcttgtaatcccagcactttgggaggctgaggcgggtggatcagttgaggtcaggagttggagaccagcctg

SEQ ID NO: 369322 - DNA, 201 bp, Homo sapiens
gacaataggaaccaacaagtatagcaaagtggttaagaccctgggtgctgttgggcatggtgaaatacactttagactcagctacttgggaggctgaggcrggaggatcacttgagcccaggagtttgagaccagcttgggcaacatagtgaggctccatctcaatttaaaaataataataataataataataataataat

SEQ ID NO: 369323 - DNA, 201 bp, Homo sapiens
atagcacttgctaaagcccttatgcggggaattggttggtgtgttttagaaaaggaaagaagaaatataaaatgcaaaaaaaaaaaaaaaaaagcctgagrtgacactggagaaatagagattgggccatgcagggctttgtgggctattttaagaatatggatctttatcctcaaaacatcaggaggcaacccttgaggg

SEQ ID NO: 369324 - DNA, 201 bp, Homo sapiens
aagatggctggccttgggagggacagtctcctcagggtcaataaggccccagatgttaaaacatcagaataaaaagatgtgcttaacacagtctcttaccstcactggctatgctccaagcaattctaaatgacttgaatttccaaccactcaaggctaaattcctctaccctcttcctggagggaagatatcttcttgga

SEQ ID NO: 369325 - DNA, 201 bp, Homo sapiens
ttgagacagtctcgctctgtcacccaggctggagtgcagtgatattatcatagcttgctacagcctctacctcctagactcaagtgatcctcctgcctcakcctgccaagtagctgggactacaagtgcgtgccgccacacctggcccatgttttaaatttttgtagcgatagggtctctctatgttgcccaggctggtct

SEQ ID NO: 369326 - DNA, 201 bp, Homo sapiens
agttgtaatcggggaacctggtgtagataggggattaagaaaggtttcctttagcaaatggcatttgaactgaggcctgaaatgagtgtcagctgaggaaraaggtagttgactccaggccgagaaaatagcacttgctaaagcccttatgcggggaattggttggtgtgttttagaaaaggaaagaagaaatataaaatg

SEQ ID NO: 369327 - DNA, 201 bp, Homo sapiens
tgggtgtttagtgctataatttccctcttaacactgccttagctgtgtcccagaaatactgatttgttgtgtctttgttctcattcatttcaaagaacttyttgatttctgccttaatttcattatttacctaagagtcattcaggagcaggttgtttaatttccatgcaattgtatggctttgagcaattttcatggcct

SEQ ID NO: 369328 - DNA, 201 bp, Homo sapiens
gtaatgggattgctgggtcaaacggtatttctgcctctaggtctttgaggaatcaccacactgtcttccacaatggttgaactaatttacattcccaccamcagtgtaaaagcattcctatttctctgcaacctcaccagcatctgttgttttttgactttttaataatagccattctgactggtgtgagatggtatcaca

SEQ ID NO: 369329 - DNA, 201 bp, Homo sapiens
aaattctgattattgctgtgtagtgaaagacaggatgagttgtaatcggggaacctggtgtagataggggattaagaaaggtttcctttagcaaatggcayttgaactgaggcctgaaatgagtgtcagctgaggaagaaggtagttgactccaggccgagaaaatagcacttgctaaagcccttatgcggggaattggtt

SEQ ID NO: 369330 - DNA, 201 bp, Homo sapiens
aaactgggcaacattgtgagatcttgtcttttcaaaaactaaaaaattaaccaggcatggtggtgcatacctgtagtcccagctacttgggagactgaggwaggaagatcacttgagtccaggaggtcaaggctgcactgagctttgatcaaactactgcactccagcctggttgacagagcaagaccctgtctcaaaaac

SEQ ID NO: 369331 - DNA, 201 bp, Homo sapiens
attcctttgagtatatacccagtaatgggattgctgggtcaaacggtatttctgcctctaggtctttgaggaatcaccacactgtcttccacaatggttgmactaatttacattcccaccaacagtgtaaaagcattcctatttctctgcaacctcaccagcatctgttgttttttgactttttaataatagccattctga

SEQ ID NO: 369332 - DNA, 201 bp, Homo sapiens
aaactaaaccgtaaattcattcattgaacatttcactgaacttttcctatacaccagaaattggtaagcactgaggagacagtaatgaacaagagctcctrttcagacacacattccattcagggctcatagtctaatgaggaaggcagacattaatcagataatcacaaaaggaaatggacaagtataaattctgattat

SEQ ID NO: 369333 - DNA, 201 bp, Homo sapiens
tccacactgtggaagctttgttctttcgctctttgcaataaatcttgctactgctcactctttgggtccatgctgcttttatgagctgtaacactcaccgygaagatctgcagcttcactcctgagcccagcgagaccacgagcccaccgggaggaacgaacaactccggacgcgctgtcttaagagctgtaacactcacc

SEQ ID NO: 369334 - DNA, 201 bp, Homo sapiens
aatcccagcactttgggatgctaaggtgggaggactgcttgaagccaggagttcaagacaaaactgggcaacattgtgagatcttgtcttttcaaaaactraaaaattaaccaggcatggtggtgcatacctgtagtcccagctacttgggagactgaggaaggaagatcacttgagtccaggaggtcaaggctgcactga

SEQ ID NO: 369335 - DNA, 201 bp, Homo sapiens
atgtctttataatagaacagtttatattcctttgagtatatacccagtaatgggattgctgggtcaaacggtatttctgcctctaggtctttgaggaatcrccacactgtcttccacaatggttgaactaatttacattcccaccaacagtgtaaaagcattcctatttctctgcaacctcaccagcatctgttgtttttt

SEQ ID NO: 369336 - DNA, 201 bp, Homo sapiens
tccatgtagggaaactacatggaatttgatatagcatagcttaaaaagacattagagaattgcagatgagcatggaaaggtagctaaggctcaagtcatayaattattttatgccaaatttaggagtttgaaatttattcatagggttagtccatggactgactggctgaaattgtttgcaaaatgttgtggatgtattca

SEQ ID NO: 369337 - DNA, 201 bp, Homo sapiens
ggcgggcagatcatttgaggccaggagttcgagaccagcctggccaatatggtaaaaccctgtttctactaaaaatacaaaaattagctgggtgtggtggygcccacctgtaatcccagctactccagaggctaaggtgggagaattgcttgaaccagggaggtggaggttgcagtgaactgagatcatgccactgtgctc

SEQ ID NO: 369338 - DNA, 201 bp, Homo sapiens
ctccatccatgtttctgcaatggacatgatcttgttcctttttatggctgcatagtattccatggtgtatatgtacattttctttatccagtctataattratgggcatttaggttgattctatgtctttgctattgtgaatagtgttgcaatgaacatacaggtgcatatgtctttataatagaacagtttatattcctt

SEQ ID NO: 369339 - DNA, 201 bp, Homo sapiens
tcactgtgttagtttccttgagaactgtctgttaaaaagagcctggcatcgttcccttcttcctcttgcttccacccttaccctgtgatctctgcatgccrcttccccttcaccttccaccatgagtagaaacagcctgaggccctcatcagaagcagatgctggtaccatgcttctggtatagcctgcagaaccatgagc

SEQ ID NO: 369340 - DNA, 201 bp, Homo sapiens
ttctcacattgataattttggtccttctcaggttaacatacatttattgaaggcctgtttgtgccattcactgttctaggcactacggctaaataagacayactcctcattctcaaagaatttaacattctccaggaaaaattgttatcgaaattgacatcagaaagtaaatgctaggagattgatccttcctgggtttca

SEQ ID NO: 369341 - DNA, 201 bp, Homo sapiens
actttgaaacatagcttttactttttagggaagagaaaaaagataaacaggactccataaatctagccttcattattttgttttctttatttccagactaytcactccagcaccctcccttccccaccgcatcagatctttgcactgatttggaggcttctatgctttcctgcttttgaatttctcatcaatgttagaaag

SEQ ID NO: 369342 - DNA, 201 bp, Homo sapiens
catcacacaatatatctatgtaacagacctacacatgtaccctctgaatcaataaaaataatatgaaatgctgtatctctccactttttactttcttcttsaggcccactatactctcatattataccacatttagctcacatctcttgtggtatgcactgtgcactcacaattgtgctggatgctgtttttgtttctagg

SEQ ID NO: 369343 - DNA, 201 bp, Homo sapiens
gccagctgtggaggaaaagtgggcaacagacatgataaattatagataggtaggtagatagatgatagatagatagatagatagatagatagatagatagaatagataggattatagcctaggatggcagcatgagaaacatggttagattgactgccctcaagcttatgttcaaggtttccattagcatgagagaggtta

SEQ ID NO: 369344 - DNA, 201 bp, Homo sapiens
tgccagctgtggaggaaaagtgggcaacagacatgataaattatagataggtaggtagatagatgatagatagatagatagatagatagatagatagatadaatagataggattatagcctaggatggcagcatgagaaacatggttagattgactgccctcaagcttatgttcaaggtttccattagcatgagagaggtt

SEQ ID NO: 369345 - DNA, 201 bp, Homo sapiens
ttatcaaaagaagaagaaatggcactttctttggcactgaatggaaagggggaagggaaggataatgtgtgtgtatatatgtgtgtgtgtgtgtgtgtgtktgtgtgtgtgtaggaatttgagggagctgaatctcttgatatcagtcttaatttttttttctgtgaagcaggaaacaaaattgctgagagaaaacatgta

SEQ ID NO: 369346 - DNA, 201 bp, Homo sapiens
tgggggaggataaagttaaagttaccttttagaatataactcctaataaaaagtttttcttttcaaaaaagctattataatgtgaccatgagaaaaaaaaatctttttacaataaagtattagggaagtaaaaacaatatactttcagaaggcaataactttacattacctaagaaatggcatattctgatttagtaaatg

SEQ ID NO: 369347 - DNA, 201 bp, Homo sapiens
gatttgggacatgttgtgtttgaggtactgtcaaaagaccaggattagagatgcccagcattcactccagttactatcaaatgacagttttgaaattactyttcctgtgactttctaaaatacttaactatacagactagttgaagttcaaagttatttatttttttaaaagattgcttcatttcaatagtacaagagaaa

SEQ ID NO: 369348 - DNA, 201 bp, Homo sapiens
aacaaatgagatcaacaaattaggtaatgaccaattgattttgggaatggatgaaatggttggaaatagccctatattatgtagcctgaacatttggtaayagtgatactactagaaactgaagaagaaaaactgagttgagagggagaggcagagggagggatcataggggaagataattgttttgatttgggacatgtt

SEQ ID NO: 369349 - DNA, 201 bp, Homo sapiens
caggagtaggtagtcttatatcagataaaacagattttaaagcaacaacagtaaaaaaagacaaagaaggtcattatatgatgataaaaggatcaatccarcaagaagatattataatcctaaatttatatacacttaacactggagctcccagattcataaaacaattactattagacctaagacatgagatagacatga

SEQ ID NO: 369350 - DNA, 201 bp, Homo sapiens
gaaggagtaaggcagacctagagctgatatccttgtgtatttattttacatttattaaaaggtcactgggtttaatcatttgaggcttttgaaatatattyaaagatgatatttcttggatttgatatgactcctctgatttaacccctgggaagaggtcactgggatttaaagagtatgtatgttatagtctgtccctta

SEQ ID NO: 369351 - DNA, 201 bp, Homo sapiens
agtgcaaaaagatattccactccaaatggaaaccaaaagtgagcaggagtaggtagtcttatatcagataaaacagattttaaagcaacaacagtaaaaawagacaaagaaggtcattatatgatgataaaaggatcaatccaacaagaagatattataatcctaaatttatatacacttaacactggagctcccagattc

SEQ ID NO: 369352 - DNA, 201 bp, Homo sapiens
gcccatcagaggtgtttgagtcaggaagaaattgtatcatgctgactctcaattgcattttgctgaactaaagtagtagctttagttcagaatggaaagargttcacagaaccaagaggatcctgtgaaacgttgcatgggtaccctagagttccctcttttgtgctccccttatagcactttgcatatatctctagtaga

SEQ ID NO: 369353 - DNA, 201 bp, Homo sapiens
gtggaaggaagggaaggagtaaggcagacctagagctgatatccttgtgtatttattttacatttattaaaaggtcactgggtttaatcatttgaggcttytgaaatatattcaaagatgatatttcttggatttgatatgactcctctgatttaacccctgggaagaggtcactgggatttaaagagtatgtatgttata

SEQ ID NO: 369354 - DNA, 201 bp, Homo sapiens
gatgatgagttagtgggtgcagtgcaccagcatggcacatgtatacatatgtaactaacctgcacaatgtgcacatgtaccctaaaacttaaagtataataaaaaaaaaaagaaaaaaaaaaaaaagaaaccagagtatgtaggtaacaagtaacaggataactggaacagtacctcacatctcaatattaacattggata

SEQ ID NO: 369355 - DNA, 201 bp, Homo sapiens
acaggactcaatggaagttttgtaaagaggtttactgttatgacaaatatgtatgttctcttttttatcctgggtcaaatttcatctgcctttttcacttytaaatattttctaaagcataaatcatgtagaagtgtatgaaggaatgatgaggctgaaagagtagctcaagcaagatgaaaaagttccttgaattgtcgt

SEQ ID NO: 369356 - DNA, 201 bp, Homo sapiens
tagttgattattgacaaatggctgtggaaggaagggaaggagtaaggcagacctagagctgatatccttgtgtatttattttacatttattaaaaggtcaytgggtttaatcatttgaggcttttgaaatatattcaaagatgatatttcttggatttgatatgactcctctgatttaacccctgggaagaggtcactggg

SEQ ID NO: 369357 - DNA, 201 bp, Homo sapiens
agatgatgagttagtgggtgcagtgcaccagcatggcacatgtatacatatgtaactaacctgcacaatgtgcacatgtaccctaaaacttaaagtataataaaaaaaaaaagaaaaaaaaaaaaaagaaaccagagtatgtaggtaacaagtaacaggataactggaacagtacctcacatctcaatattaacattggat

SEQ ID NO: 369358 - DNA, 201 bp, Homo sapiens
aaatccttagcctgtgtgttcctatgaagcctgtccaaataagttgcaaaatagtgtctagagcctgcaatcctgtccgtggtgctattttgttatttgtstgagtctcaggtttcaattctcaacctaatgaagtaccatttaaaagcaacaattagagaagcagccacatctcttcccttttgcagtagaaatactcta

SEQ ID NO: 369359 - DNA, 201 bp, Homo sapiens
tgtccccattgtccttatacatacttctgttaacatacttggtgtattgttaaataattatttgtttctgtgtagttcaccccttagtgtgaactccttgrgggcaggggccatgtcttacctttgtatcccaagaacctagcctctgtttatcagtaacttagttgattattgacaaatggctgtggaaggaagggaagg

SEQ ID NO: 369360 - DNA, 201 bp, Homo sapiens
ggattattatggtcataaatacgtcctcattattgaaagctgttattgctacaaaaagtcaaattgaagaggctcaagctaagagacttctgtttctttgkgttctttcactggcaacacaattttaacaagtagatctttttggtattgggattttgtgtacacaagaaagcagaaatttgggtgtatgactctttcttt

SEQ ID NO: 369361 - DNA, 201 bp, Homo sapiens
ggcacatatacaccatggaatactatgcagccataaaaaatgatgagttcatgtcctttgtagggacatggatgaaactggaaaacatcattctcagtaarctgttgcaagaacaaaaaaccaaacactgcatattctcactcataggtgggaattgaacaatgagatcacatggacacaggaaggggaatatcacactct

SEQ ID NO: 369362 - DNA, 201 bp, Homo sapiens
ttaaaaaagaaagggaaaacatgagatatgttctttgatctgaaagaactaatgatctggagctgaactggagcttgcaaaagaaaaattaaaaaaaaaaagagcttatgatctatatgagggattcaatagactatggtaggaatatgatagtcccgtgacctggaatatacctaaaagtcttatttaatgtggcctgca

SEQ ID NO: 369363 - DNA, 201 bp, Homo sapiens
aaccagaaagaagttgaatccctgaatagaccaataacaagttctgaaatttaggtttttaaatgaatcttaagtatgaaatatattgtacatagtcaaayccctcagagcaatagagcattcaaatccttagcctgtgtgttcctatgaagcctgtccaaataagttgcaaaatagtgtctagagcctgcaatcctgtcc

SEQ ID NO: 369364 - DNA, 201 bp, Homo sapiens
attatcaaaagaagaagaaatggcactttctttggcactgaatggaaagggggaagggaaggataatgtgtgtgtatatatgtgtgtgtgtgtgtgtgtgtttgtgtgtgtgtaggaatttgagggagctgaatctcttgatatcagtcttaatttttttttctgtgaagcaggaaacaaaattgctgagagaaaacatgt

SEQ ID NO: 369365 - DNA, 201 bp, Homo sapiens
atttgttgaatgaccaagtacataattctcatctcccattctaataataatgtgtcatatgaggaacaaaatcacaagtactttctcctctttgtccccaytgtccttatacatacttctgttaacatacttggtgtattgttaaataattatttgtttctgtgtagttcaccccttagtgtgaactccttgagggcaggg

SEQ ID NO: 369366 - DNA, 201 bp, Homo sapiens
tgtggcacatatacaccatggaatactatgcagccataaaaaatgatgagttcatgtcctttgtagggacatggatgaaactggaaaacatcattctcagyaaactgttgcaagaacaaaaaaccaaacactgcatattctcactcataggtgggaattgaacaatgagatcacatggacacaggaaggggaatatcacac

SEQ ID NO: 369367 - DNA, 201 bp, Homo sapiens
tcaccaaatatggtaattgtatcctctcatacagtcttccaagcaaaacattatgctttgataaactggaatttaaaaaagaaagggaaaacatgagataygttctttgatctgaaagaactaatgatctggagctgaactggagcttgcaaaagaaaaattaaaaaaaaaaagagcttatgatctatatgagggattcaa

SEQ ID NO: 369368 - DNA, 201 bp, Homo sapiens
aattatcaaaagaagaagaaatggcactttctttggcactgaatggaaagggggaagggaaggataatgtgtgtgtatatatgtgtgtgtgtgtgtgtgtgtttgtgtgtgtgtaggaatttgagggagctgaatctcttgatatcagtcttaatttttttttctgtgaagcaggaaacaaaattgctgagagaaaacatg

SEQ ID NO: 369369 - DNA, 201 bp, Homo sapiens
aaaaactaagcatgagggaagatataataggaaatagagtcagaatatttggcctccctcaaaagtaattagaatgattagatatttacttaggttttatmcttattaactgatatttttattcacaaacttgtccaactcagttttagattaaaaatataaagttatttattccttaaaaaattcttaactatcaagctg

SEQ ID NO: 369370 - DNA, 201 bp, Homo sapiens
tttaaagtaggacttgcattgatacagtttattgaataaagcaaaaatttttacaagtattttataagtttaaatagcaaattgaaattgtgcgaaaatartgattttgtgattattaaacattcattgttttaagagtgcatgtaacaaaaagtatctgtagttacctaacactataatagttaaaatacctgttaatat

SEQ ID NO: 369371 - DNA, 201 bp, Homo sapiens
cccaaatgtccaacaatgatagactggattaagaaaatgtggcacatatacaccatggaatactatgcagccataaaaaatgatgagttcatgtcctttgyagggacatggatgaaactggaaaacatcattctcagtaaactgttgcaagaacaaaaaaccaaacactgcatattctcactcataggtgggaattgaaca

SEQ ID NO: 369372 - DNA, 201 bp, Homo sapiens
tgattaaaaattctaggaggtgacttagaaaggagtctaaaacatggttgccctaatagaattcatcctgtttttcattcataaaatattacagctactcycactttggctttagggtgaaaattgttaaacctactactgttctttgtcctttagacagttatgggctttcctgttttaagaggaaacagaagactagtc

SEQ ID NO: 369373 - DNA, 201 bp, Homo sapiens
gaaaaccccattgtctcagcccaaaatctccttaagctgataagcaacttcagcaaagtctcaggatacaaaatcaatgtgcaaaaatcacaagcattctyatacaccaataacagacaaacagagagccaaatcatgagtgaactcccattcacaattgcttcaaagagaataaaatacctaggaatccaacttacaagg

SEQ ID NO: 369374 - DNA, 201 bp, Homo sapiens
caggatttcaccatgttagccaggctggtctcaaactcctgacctcaggtcatccacccacctcggcctcccaaagtaggattacaggcgtcagccactgygccctgcaagttaaatattacttaaaactaacaaatagatatgctcactagtgctcttatttctagtaatcttgaagttgaaagaacttccagaagagca

SEQ ID NO: 369375 - DNA, 201 bp, Homo sapiens
ttcttttctttataaatgggagtcttgcctcaagatcatatataaagatgtgagttattgcttatagaggtgtatatatttaaaatatataatagtaataracaagtctaacataagatgaaagattatttattatatgtgatctctcatgtttagagtgaattggtcttttctatgctatggatattcaccagaagatta

SEQ ID NO: 369376 - DNA, 201 bp, Homo sapiens
tcagtagagatggggtttcaccatgttagccaggatggtctcaatctcctgacctcgtgatccgcccgcctcagcctcccaaagtgctgggattacaggcvtgagccactgtgcccggccagggcttttcttaagaaatatgtaaccaagaaaatatacttgacttgcaactatagtgaacagagtttattcttttcttta

SEQ ID NO: 369377 - DNA, 201 bp, Homo sapiens
gcgcctgccaccatgcccagctaatttttttgtattttcagtagagatggggtttcaccatgttagccaggatggtctcaatctcctgacctcgtgatccrcccgcctcagcctcccaaagtgctgggattacaggcgtgagccactgtgcccggccagggcttttcttaagaaatatgtaaccaagaaaatatacttgac

SEQ ID NO: 369378 - DNA, 201 bp, Homo sapiens
cctcagcctcccaagtagctgggactacaggcgcctgccaccatgcccagctaatttttttgtattttcagtagagatggggtttcaccatgttagccagratggtctcaatctcctgacctcgtgatccgcccgcctcagcctcccaaagtgctgggattacaggcgtgagccactgtgcccggccagggcttttcttaa

SEQ ID NO: 369379 - DNA, 201 bp, Homo sapiens
gtgatctcggctcactgcaagttctacctcccgggttcacgccattctcctgcctcagcctcccaagtagctgggactacaggcgcctgccaccatgcccrgctaatttttttgtattttcagtagagatggggtttcaccatgttagccaggatggtctcaatctcctgacctcgtgatccgcccgcctcagcctcccaa

SEQ ID NO: 369380 - DNA, 201 bp, Homo sapiens; identical to SEQ ID NO: 80066

SEQ ID NO: 369381 - DNA, 201 bp, Homo sapiens
ttgagcacagacatgaagctcaaaggaaatggtcgttgtagcattttcaaccactggtttatgtttattggatttttgaattgggtatgctccacaaataygtatctacagatatttcaaaatcaaaaaaaaaattgaaatccaaaacactgcttgtcacaagcatttctgtaaggaatattcaacctgtacacacacaca

SEQ ID NO: 369382 - DNA, 201 bp, Homo sapiens
taacagctgcatagtgttccagcatatggattaactaaccattcccctactgttgatttttttctaatttttatataagaggatgttgcagagaccagacktatacataaatgtttgtacaagtttttaccttggaactaatttctagaggtaaaattgctaggtcagaggataaaagatgttcatttataatttgtttca

SEQ ID NO: 369383 - DNA, 201 bp, Homo sapiens
ttttaattagaagatggctttgcatttttttgatgcaacttatttagactttaaagaacaaatattctcactggtcaaatattaacctttgtttctagaaygttcaggatgctgtgtaaaaagatggataaggccaggtgcggtggctcatgcctgtaatcccagcactttgagaggccgaggtgggtggatcacctgagg

SEQ ID NO: 369384 - DNA, 201 bp, Homo sapiens
aaaaagcctttgacaaaattcaacaaccctttatgctaaaaactctcaataaattaggtattgatgggacgtatttcaaaataataagagctatctatgamaaacccacagccagtatcatactgaatgggcaaaaactagaagcattccgtttgaaaactggcacaagacagggatgccctctctcaccactcctattca

SEQ ID NO: 369385 - DNA, 201 bp, Homo sapiens
cattgatgcaaaaatcctcaataaaatactggcaaaaggaatccagcagcacatcaaaaagcttatccaccatgatcaagtgggcttcatccctgggatgyaaggctggttcaatatacacaaatcaataaatgtaatccagcatataaacagagccaaagacaaaaaccacatgattatctcaatagatgcagaaaaagc

SEQ ID NO: 369386 - DNA, 201 bp, Homo sapiens
gtggcagagagctgaaatttgaacccaagtttgtctaagtccaaaaccagtgtttctatacagcaaactaggtcaacgatgacaaaagtgtttcaattcamgtgccagtttttgatttattgataaaactacaaccaaatagaaaaaaaaaatcaccatgatggattactgatgtttgctgtaaatgctggatgggagttt

SEQ ID NO: 369387 - DNA, 201 bp, Homo sapiens
acattgatgcaaaaatcctcaataaaatactggcaaaaggaatccagcagcacatcaaaaagcttatccaccatgatcaagtgggcttcatccctgggatkcaaggctggttcaatatacacaaatcaataaatgtaatccagcatataaacagagccaaagacaaaaaccacatgattatctcaatagatgcagaaaaag

SEQ ID NO: 369388 - DNA, 201 bp, Homo sapiens
tggaaagctttctgatggcaataatgaacattatggtaacagtgataaaaataataactttaatttactaagcaatatataccaggtactatgccacattgtttacctgcattacctaaaaactctgttgaatagtttctattatctccattttatatgctaagagagtgaggctcccataggtgaaatgacttggccagg

SEQ ID NO: 369389 - DNA, 201 bp, Homo sapiens
atttgttaagtgctgcatttttatgtaatatgcaaatagcactaagactgaactgagatattgattgaaaaaatacgctgaatgattgaagatgttagatrtctttttttctgatttctccatctgatcaataggaatggactttagcttatccattttcattaataccagactggatgagattatacgtgaataacttct

SEQ ID NO: 369390 - DNA, 201 bp, Homo sapiens
ttcctgccattaagtatcataactgggattcaaatcttcacattgttgctctcaacttcatgcctttaaccattatatcatattgttttattacatgttcrtgatcctatcacaatattaccagggcataaaacatgtgcaaatctaatgacttttgaaaattaaatagaaaagtattctctgttaagttttaaaagtaga

SEQ ID NO: 369391 - DNA, 201 bp, Homo sapiens
tctgaaactattccaatcaatagaaaaagagggaatcctccctaactcattttatgaggccagcatcattctgataccaaagccaggcagagacacaaccraaaaagagaattttagaccaatatcgttgatgaacattgatgcaaaaatcctcaataaaatactggcaaaaggaatccagcagcacatcaaaaagcttat

SEQ ID NO: 369392 - DNA, 201 bp, Homo sapiens
actttggaaagctttctgatggcaataatgaacattatggtaacagtgataaaaataataactttaatttactaagcaatatataccaggtactatgccamattgtttacctgcattacctaaaaactctgttgaatagtttctattatctccattttatatgctaagagagtgaggctcccataggtgaaatgacttggc

SEQ ID NO: 369393 - DNA, 201 bp, Homo sapiens
tttgtatatgttctgtataggtgcaattttttttcaaaatattttttgatcccagattgtttgtgttcacggatacagaatctgcggatacagagggccarctatactgtctttcctttaagatgtctccagctgccccaatcttgagtgacctttgccttccttcaaactcctatgccgttaattgtctacacctctcac

SEQ ID NO: 369394 - DNA, 201 bp, Homo sapiens
gaaatacaaactaccatcagagaatactacaaacacctctacgcaaataaactagaaaatcgagaagaaatggataaattcctcgacacatacactctccsaagactaaaccaggaagaagttgaatctctgaatagaacaataacaggatctgaaattgtagcaataatcaatagtttaccaaccaaaaagagtccagga

SEQ ID NO: 369395 - DNA, 201 bp, Homo sapiens
aggcagatttttatacacacagaaaaagaacatggcaggctggttttaggagacattgagttcctctggttgaagtggagggttcctttggtagagtatgrgagataaatttggaaatgtaaattagagctagattgtggagactttggaaagctttctgatggcaataatgaacattatggtaacagtgataaaaataat

SEQ ID NO: 369396 - DNA, 201 bp, Homo sapiens
acctattaactggaaattagcttaacaagcttacaccctgtatgtgtgtgtatgtttgtgtgtatatatatatatatttatttatttattttatttttatwttttttcccaagattattgtttttatgagacagctcaactgctgtctgaccaggatgggtctcttttggccagagctaaacactgacccaaatctctttg

SEQ ID NO: 369397 - DNA, 201 bp, Homo sapiens
aatcccacagaaatacaaactaccatcagagaatactacaaacacctctacgcaaataaactagaaaatcgagaagaaatggataaattcctcgacacatrcactctcccaagactaaaccaggaagaagttgaatctctgaatagaacaataacaggatctgaaattgtagcaataatcaatagtttaccaaccaaaaag

SEQ ID NO: 369398 - DNA, 201 bp, Homo sapiens
gagcacagtggcgtgatctcggctcactgcaagttctacctcccgggttcacgccattctcctgcctcagcctcccaagtagctgggactacaggcgcctsccaccatgcccagctaatttttttgtattttcagtagagatggggtttcaccatgttagccaggatggtctcaatctcctgacctcgtgatccgcccgcc

SEQ ID NO: 369399 - DNA, 201 bp, Homo sapiens
caaaggagggttgagtattaccatactcccttttttcttattttccaagtaaagtactcctcggtatttgagggagattggttccaggacccctcagataycaaaatctgagatgctcaagtccctgatataaaatagtgtagtaattgcatatgatctatgcacatcttcctttatcatctctagtttacttatacctaa

SEQ ID NO: 369400 - DNA, 201 bp, Homo sapiens
tgtattacaaagagaatgaatgtatagcactgggtaatctggagcacctattaactggaaattagcttaacaagcttacaccctgtatgtgtgtgtatgtktgtgtgtatatatatatatatttatttatttattttatttttatattttttcccaagattattgtttttatgagacagctcaactgctgtctgaccagga

SEQ ID NO: 369401 - DNA, 201 bp, Homo sapiens
aaaagataaacaggactccataaatctagccttcattattttgttttctttatttccagactactcactccagcaccctcccttccccaccgcatcagatmtttgcactgatttggaggcttctatgctttcctgcttttgaatttctcatcaatgttagaaagtaacattgtcctgttattaaagcttattcatactgat

SEQ ID NO: 369402 - DNA, 201 bp, Homo sapiens
gctggagcacagtggcgtgatctcggctcactgcaagttctacctcccgggttcacgccattctcctgcctcagcctcccaagtagctgggactacaggcdcctgccaccatgcccagctaatttttttgtattttcagtagagatggggtttcaccatgttagccaggatggtctcaatctcctgacctcgtgatccgcc

SEQ ID NO: 369403 - DNA, 201 bp, Homo sapiens
catattataaaataattctatattttccaaaagaattcctttcaggagtgcttcaaaaaggagttttcctgcattctaaataaatcctaaatttaatatayttgtttaaaaaatgaaatacacacagtttggggaaaacagcctggccttattcacagaaggctgtatatttgtacatcatgcatactgttttcaagttac

SEQ ID NO: 369404 - DNA, 201 bp, Homo sapiens
cctaaactacaaagcctgaagaggactaaggttttcctttctcataattcacttttgaaattccaagatcagtataattaactgtatagatcttcaaaagrtatgcttgtacatactagaaagcttactgctgtggacatctgtgggctcattaccaccaatcaatatgtattacaaagagaatgaatgtatagcactggg

SEQ ID NO: 369405 - DNA, 201 bp, Homo sapiens
tggttgggagcaactgggctaagttacacatgcttatggagtctttgattgataattttattcaaacttgatatggaaaacatatatcacatttcataggycaaagaggaatgtaaactagttgagtcctgcgagtggtgattttatctatgttaaagaaaattgggacaggtgctgtggtaatcccagcactttgggagg

SEQ ID NO: 369406 - DNA, 201 bp, Homo sapiens
cgctctgtcgcctaggctggagcacagtggcgtgatctcggctcactgcaagttctacctcccgggttcacgccattctcctgcctcagcctcccaagtarctgggactacaggcgcctgccaccatgcccagctaatttttttgtattttcagtagagatggggtttcaccatgttagccaggatggtctcaatctcctg

SEQ ID NO: 369407 - DNA, 201 bp, Homo sapiens
aatttcagtgagtaggtaaattcacaaacatggaatccacaaacagtggggattgactatattttctatgttttttaacaatgaatttaaatgactttttwaaaagtatttaatagcaatttattaaataatttattaagtaaagttattaagtaaaacaaatttattaagtaaatagcaaagtaaatagcaactaatttt

SEQ ID NO: 369408 - DNA, 201 bp, Homo sapiens
ttaaaactaactgttttctggcttcccaggtgggccttgctttctaaagctcaaataagatgctaagctagtatttagcaaccttgaaaaaatgagtcacytctccttttttttttgtttcattttgacattagtacctgtcacttctctttacaacaaaataaataataatagaggtaggaggcagagaaactctaggca

SEQ ID NO: 369409 - DNA, 201 bp, Homo sapiens
gtggagtctttaggtttttccaaatataaaatcatatcatctgtaaacaaggataatttgacttcttccttttcaatttggatgccctttatatctttctsttgtctgattgttctagctaggacttccattattatgttgaacaacagtagtgataatgggcaccctcgtcatgtttcagatctcagaggaaaggctttt

SEQ ID NO: 369410 - DNA, 201 bp, Homo sapiens
agctttacctgaagctcactttattgctattgcatgccaaaggcatgatggtcgaagcagtccacttcaggcacaggcaaaacagcattgcatcttctgtrgatcattttaaaacaataatagaatccactaatagtttgtctgctttttgttatcaccataaacaggcagttccaaacaacgtcagtgagaaaatactgc

SEQ ID NO: 369411 - DNA, 201 bp, Homo sapiens
tttttttctttttttctgagatggagtctcgctctgtcgcctaggctggagcacagtggcgtgatctcggctcactgcaagttctacctcccgggttcacrccattctcctgcctcagcctcccaagtagctgggactacaggcgcctgccaccatgcccagctaatttttttgtattttcagtagagatggggtttcacc

SEQ ID NO: 369412 - DNA, 201 bp, Homo sapiens
attgttcactgttggcatatagaaataccactgatatttgtatgatttcgtatcctgcaactttactgaatttatcagttctaagagtctttcagtggagyctttaggtttttccaaatataaaatcatatcatctgtaaacaaggataatttgacttcttccttttcaatttggatgccctttatatctttctcttgtct

SEQ ID NO: 369413 - DNA, 201 bp, Homo sapiens
gttgcaaaaattaaaaaataaaaagttttaaattgtatgccattctgagtagtatgaggaaatattacagtatattgttataattatgctattttattgtkaatctcttactgtgcctaatttataaattaaactttatctctcatacatatggaaaaacgtagtatagatagagttcggtactatccacagtttcaggca

SEQ ID NO: 369414 - DNA, 201 bp, Homo sapiens
ggaatgggtattctctgcaaaggatttttcctctttcccagggctactgtagatgaagacttttggcaggctgcattgattggcattgggctatattactaaaaaaaaaaaaaaaaaaaaaaaattcaaaattggaaaaattttttaaatgccttaacaggaaatactattattttttctttgctttgctttgtttgtttg

SEQ ID NO: 369415 - DNA, 201 bp, Homo sapiens
tatccttttgatatccttttgttacaaacaatgcagttacactctttaagttattttaaaatgtacaattaagttattattggctacagtcaccctactcygctatcaaatattaggtcttagtcattctttttaattttattttttttgtacctgttattcacccccaccttccctacagcctcccactactcttcccaa

SEQ ID NO: 369416 - DNA, 201 bp, Homo sapiens
ttcatttaaggctaagaggcctatgaagagattcaagtttcaagggagtttacaatggcactgaagttctgcagaaagcaataggaatagttagagattgrggaagggaagaagaatctcagagccatgtgagaatagcaggatcggagaaaagaggtgaatataatggcctccatgttggtgggttggggtgtgacaaat

SEQ ID NO: 369417 - DNA, 201 bp, Homo sapiens
aagctattataatgtgaccatgagaaaaaaaaatctttttacaataaagtattagggaagtaaaaacaatatactttcagaaggcaataactttacattayctaagaaatggcatattctgatttagtaaatgttctcattaataggataatacagtataatctgtacacatagggcttttcttttttttttctttttttc

SEQ ID NO: 369418 - DNA, 201 bp, Homo sapiens
actttagatgctgaggtgtaaggatcacttgagctcaggagctcgagactagcctgggcaacacagtgagatcctatctcaagtcataataattataataagatatgataaaggttatcttagtgagaagtacagaatgctcaggaaatacagccatcctctggtatcttgggggcttggttccagtaccccctcagacac

SEQ ID NO: 369419 - DNA, 201 bp, Homo sapiens
tacaccatgaaaatgagcaaacaatacaaatctgttttttattgttgttttttgaaaactgttaaacagttactagcacatcaccgactgtttattaacatgtctgacttcttataagactgtgaccatttagaataaaaataccatcttatttttatttccttatttctagcccagtacctcacaaattataggtatcaa

SEQ ID NO: 369420 - DNA, 201 bp, Homo sapiens
tactttagatgctgaggtgtaaggatcacttgagctcaggagctcgagactagcctgggcaacacagtgagatcctatctcaagtcataataattataataagatatgataaaggttatcttagtgagaagtacagaatgctcaggaaatacagccatcctctggtatcttgggggcttggttccagtaccccctcagaca

SEQ ID NO: 369421 - DNA, 201 bp, Homo sapiens
ttacaccatgaaaatgagcaaacaatacaaatctgttttttattgttgttttttgaaaactgttaaacagttactagcacatcaccgactgtttattaacatgtctgacttcttataagactgtgaccatttagaataaaaataccatcttatttttatttccttatttctagcccagtacctcacaaattataggtatca

SEQ ID NO: 369422 - DNA, 201 bp, Homo sapiens
aggggatatcacctactaatcccacagaaatacaaactaccatcagagaatactgtaaacatctctactcaaataaactagaaaatctagaggaaatggayaaattcctggacacatacaccctcccaagactaaaccagaaagaagttgaatccctgaatagaccaataacaagttctgaaatttaggtttttaaatgaa

SEQ ID NO: 369423 - DNA, 201 bp, Homo sapiens
gacacagcataccaaaatctcttcaacacagctaaaacagtgtttagagggaaattgatagcactaaatgcccacatcagaaagctggaaagatctaaaaytgacaccctaacatcacaattaaaaaaaccagagaagcaagagcaaacaaaagctagcagaagacaagaaataactaagatcagagcagaactgaaagag

SEQ ID NO: 369424 - DNA, 201 bp, Homo sapiens
tgttttacgccactacatatgtggatggtttgttatgcagttacagataacagagatactactgatatatctttgtcaccctattgtttcttcatgtgctrtctttatttttaaattaacacatatgatgctgatctctctcttattttccctccaaaatacaatttactattacttactgaaaaattaagcagcaaagac

SEQ ID NO: 369425 - DNA, 201 bp, Homo sapiens
gtcaatggcatttaaagagtccatagcactgcactatctaagatgtttaatagcactgtactatctaagactttattacatagcaatagcactatactgtytgggacatttattgtactgcaatcagtcatctttctcagaaatatatttgctgcaatttttgctcagaacctgatggtatatgaagacatttattgcata

SEQ ID NO: 369426 - DNA, 201 bp, Homo sapiens
ttgcattgttcatcatggcatttttcatgttcacagattcacattaacgcgctttattaagagtatggggtggtgtgtatgtgactgtctcaacactgatytgaatctccctagatcttggagtctttttgcttttctgagtggcagagcactgccccacgcccccacgagggccattaacaggtgtatgttggatcagcg

SEQ ID NO: 369427 - DNA, 201 bp, Homo sapiens
gaaccataatatttgtgaggatttttttcaaaaatagttataaaatgctttacattgaatgttccctgtgtactcatgaaccacattaaaaataaaagacrtacttactgaactcagtaaccttcctgtagtcaaaaaatggtttttgaaatgatttttcccatataatattttactgagagaagtaatattcaatgatac

SEQ ID NO: 369428 - DNA, 201 bp, Homo sapiens
tgtacctgaaagtgatggggagaatggaaccaagttggaaaacactctgtaggatattatccaggagaacttccccaatctagcaaggcaggccaacattsagattcaggaaatacagagaatgccacaaagatactcctcgagaagagcaactccaagacacataatggtcagattcaccaaagttgaaatgaaggtaaa

SEQ ID NO: 369429 - DNA, 201 bp, Homo sapiens
tggtgtacctgaaagtgatggggagaatggaaccaagttggaaaacactctgtaggatattatccaggagaacttccccaatctagcaaggcaggccaacrttcagattcaggaaatacagagaatgccacaaagatactcctcgagaagagcaactccaagacacataatggtcagattcaccaaagttgaaatgaaggt

SEQ ID NO: 369430 - DNA, 201 bp, Homo sapiens
atcagtcactagagatatgtaagtctaggaactgagagaagctttcatgttgagtggcattgaaatcacctaggatcatggttaggaggtagggtggagargaaaatggtgactcaaattctgaagtctttcacaaactagggaagtttgtgaaccaaaggtgtgacagcaacaaggagaaaagatctagccagatggcat

SEQ ID NO: 369431 - DNA, 201 bp, Homo sapiens
aataacagggaaagagctgtgtcactgtacacttcagaagtggagctttccatggtaatggatgatatgattcagggtgtggccatggaaggaggtagccmgtgtggagtggagatcagtatcagtcactagagatatgtaagtctaggaactgagagaagctttcatgttgagtggcattgaaatcacctaggatcatgg

SEQ ID NO: 369432 - DNA, 201 bp, Homo sapiens
ctactttagatgctgaggtgtaaggatcacttgagctcaggagctcgagactagcctgggcaacacagtgagatcctatctcaagtcataataattataataagatatgataaaggttatcttagtgagaagtacagaatgctcaggaaatacagccatcctctggtatcttgggggcttggttccagtaccccctcagac

SEQ ID NO: 369433 - DNA, 201 bp, Homo sapiens
cattcaaaccaaaggcaaagaagttgaaaactttgaaaaagatttagaagaatgtataactagaataaccaatacagagaagtgcttaaaggagctgatgragctgaaaaccaaggctcgagaactacgtgaagaacgcagaagcctcaggagtcgatgcgatcaactggaagaaagggtttcagtgatggaagatgaaat

SEQ ID NO: 369434 - DNA, 201 bp, Homo sapiens
tacacatagtagggaagagattttttcttgcctggcatataaaagctcttcaataagtgatttttgaaagaaaggaaggaagagtttagttaaataaattrtattttttgcactcggtgaaaaagtatgtcacactttatagagaagactctataacagtgtttcctagccttggttgcacatcagaatcacctagccagt

SEQ ID NO: 369435 - DNA, 201 bp, Homo sapiens
tgaaatagaaaaagggaaatggaagaatccttagttctacggagtagaaatggaataaaacagagttctctctactctattatgattttatctcactctaytgatgagaaaatggaaggtgaattcatattcctgcctgtcaatttagtacataacaacgcttagagaaggcatttatacctaaccagagataacaggcat

SEQ ID NO: 369436 - DNA, 201 bp, Homo sapiens
cctctaagaaaccttccatggcacccatagtctgcatcagtccgtatgtgtgttttcatagcactttgccttcctatactatagtggtgtagccaagtcaraatagctctgtactcctgggcaagttactcatctcactatgcgtaggtttcctcactctgtaaaacgaagataacagtacctgccctatcaaatatcatt

SEQ ID NO: 369437 - DNA, 201 bp, Homo sapiens
aaaattagccaggcatggtggcgggcacctgtaatcctaactactcaggaggcagaggcaggagaattgcttgaacccgggaggtggaggttgcagtgagytgagattgcaccactgcactccagcttggacaaaaaagtgatactctctctgtctaaagaaaaaaaaattatatattatatcacactatttattcttcct

SEQ ID NO: 369438 - DNA, 201 bp, Homo sapiens
ggcaacggaacaaagctggatggagaatgactttgacgagctgagagaagaaggcttcagacgatcaaattactctgagctactggagggcattcaaaccraaggcaaagaagttgaaaactttgaaaaagatttagaagaatgtataactagaataaccaatacagagaagtgcttaaaggagctgatggagctgaaaac

SEQ ID NO: 369439 - DNA, 201 bp, Homo sapiens
ttatggggttcatgagatagtttgatacaggcatgcaatgtgaaataagcatatcatggtgaatgtgctctgtcccctcaagcatttatccttttgatachtttatccttttgatatccttttgttacaaacaatgcagttacactctttaagttattttaaaatgtacaattaagttattattggctacagtcaccctac

SEQ ID NO: 369440 - DNA, 201 bp, Homo sapiens
aagcaaaggaagagagtggcagcaggactacaaaatggaaagttatctgcacagatgttcatggaaggagtatttgtgatcattaacaatggaaataataygcatgtttacagatacatcccaccttacctcctctaagaaaccttccatggcacccatagtctgcatcagtccgtatgtgtgttttcatagcactttgcc

SEQ ID NO: 369441 - DNA, 201 bp, Homo sapiens
aagcaaatggaaagaaaaaaataaaaaagcaggggtcgcaatcctagtctctgataaaacagactttaaaccaacaaagatcaaaaaagacaaagaagggyattacataatgataaagagatcagtgcagcaagaagagctaactatcctaaatatatatgcacccaatacaggagcaccaagattcataaagcaagttct

SEQ ID NO: 369442 - DNA, 201 bp, Homo sapiens
cctggccaacatggcgaaaccccatctctgctaaaagcataaaaattagccaggcatggtggcgggcacctgtaatcctaactactcaggaggcagaggcrggagaattgcttgaacccgggaggtggaggttgcagtgagctgagattgcaccactgcactccagcttggacaaaaaagtgatactctctctgtctaaag

SEQ ID NO: 369443 - DNA, 201 bp, Homo sapiens
tagataaaaccacaaagatggggaaaaaacagaacagaaaaactggaaactctaaaaagcagagcgcctctcctcctccaaaggaacgcagttcctcaccrgcaacggaacaaagctggatggagaatgactttgacgagctgagagaagaaggcttcagacgatcaaattactctgagctactggagggcattcaaacca

SEQ ID NO: 369444 - DNA, 201 bp, Homo sapiens
gaggtcaaagatcttagcatgaatacagaaatttgttttctttgaatattgctaattgtgacccagtcaattttgtgattataggaataaattatggtatwtataatatgagacattctagaatgttctgtcactgttaatgttctcttatactctgctggttgtaactacaatgatcttaaatttgtgtgttaaagatag

SEQ ID NO: 369445 - DNA, 201 bp, Homo sapiens
ataaagggatggaggaatatttactaagcaaatggaaagaaaaaaataaaaaagcaggggtcgcaatcctagtctctgataaaacagactttaaaccaacraagatcaaaaaagacaaagaagggcattacataatgataaagagatcagtgcagcaagaagagctaactatcctaaatatatatgcacccaatacaggag

SEQ ID NO: 369446 - DNA, 201 bp, Homo sapiens
ctttaccctccactaacgtcaaactggaccgagcagggtggttccacctgttatcccagcactttggaaggctgaggtaggcagatcacttgaggtcaggrgttcaagatcagcctggccaacatggcgaaaccccatctctgctaaaagcataaaaattagccaggcatggtggcgggcacctgtaatcctaactactca

SEQ ID NO: 369447 - DNA, 201 bp, Homo sapiens
gaaaactaacaaacagaaaggacatccacaccaaaaacccatctgtacatcaccatcatcaaagaccaaaagtagataaaaccacaaagatggggaaaaaacagaacagaaaaactggaaactctaaaaagcagagcgcctctcctcctccaaaggaacgcagttcctcaccggcaacggaacaaagctggatggagaatg

SEQ ID NO: 369448 - DNA, 201 bp, Homo sapiens
ccacagttaaggagagtgtctaagagcagatctggagtcaagctgcctgggttcacctctgtttataagctgtgtgatcttggcaaatttctttttttttwaaatattaaatgtttatgggtacatagtagatatatatatttatggggttcatgagatagtttgatacaggcatgcaatgtgaaataagcatatcatggt

SEQ ID NO: 369449 - DNA, 201 bp, Homo sapiens
ttcttggttagtccctaaaatgtattcctccaaatgaactttttatttatttattgagagggagtctcactctgtcgcccaggctgtagtgcagtggcacratctcggctcactgcaacctccgcctcctgagttcaagcatttctccagcctcagcctcctgcatagctgggattacaggtgcatgccaccatgcccagc

SEQ ID NO: 369450 - DNA, 201 bp, Homo sapiens
aggagacccatctcacatgcaaagacacacatagtctcaaaataaagggatggaggaatatttactaagcaaatggaaagaaaaaaataaaaaagcagggktcgcaatcctagtctctgataaaacagactttaaaccaacaaagatcaaaaaagacaaagaagggcattacataatgataaagagatcagtgcagcaaga

SEQ ID NO: 369451 - DNA, 201 bp, Homo sapiens
aattacacgtatatatgtgtgtgtgtgtgtgtgtgtgtgtgtgtgtatacacacataattatatatttttttctatctttatttttgttatatatatatattatgtaataaagttgatataatataagcctcaaagatcttagcctgtgagtaaacaactgtaagtggctaatttccatgcaatatggcaattgcattgtt

SEQ ID NO: 369452 - DNA, 201 bp, Homo sapiens
cacgagattatatcccgcacctggcttggagggtcctatgcccacggagtctcgccgattgccagcacagcagtctgagatcaaactgcaaggtggcagcsaggctgggggaggggcgcccgccattgctcaggcttgattaggtaaacaaagcagccaggaagctccacctgggcggagcccaccacagctcaaggaggc

SEQ ID NO: 369453 - DNA, 201 bp, Homo sapiens
aaattacacgtatatatgtgtgtgtgtgtgtgtgtgtgtgtgtgtgtatacacacataattatatatttttttctatctttatttttgttatatatatatattatgtaataaagttgatataatataagcctcaaagatcttagcctgtgagtaaacaactgtaagtggctaatttccatgcaatatggcaattgcattgt

SEQ ID NO: 369454 - DNA, 201 bp, Homo sapiens
aaaatggcgcaccacgagattatatcccgcacctggcttggagggtcctatgcccacggagtctcgccgattgccagcacagcagtctgagatcaaactgsaaggtggcagcgaggctgggggaggggcgcccgccattgctcaggcttgattaggtaaacaaagcagccaggaagctccacctgggcggagcccaccaca

SEQ ID NO: 369455 - DNA, 201 bp, Homo sapiens
tttttccccgatgtagatgaaagcagactttacattgggccacagaaaaacccttataagcactgtctatatataacatgtatttcataaataagttagcrtttcatatagctagtgtttttcttatttataccatatgactaacattaatctatatgtgaatgtatgtttaataggaaattgcccggcatttacgccctg

SEQ ID NO: 369456 - DNA, 201 bp, Homo sapiens
ggcaatatagtgagaccctattgctataaaattacacgtatatatgtgtgtgtgtgtgtgtgtgtgtgtgtgtgtatacacacataattatatatttttttctatctttatttttgttatatatatatattatgtaataaagttgatataatataagcctcaaagatcttagcctgtgagtaaacaactgtaagtggctaa

SEQ ID NO: 369457 - DNA, 201 bp, Homo sapiens
atggaaccacaaatgtgagtgctgctcagaatctttgcaccctaagctacacctgtcatgattctttctgatttccactttcatagaggtgacccacttaygaccttggcctctcaatctgttgttcttctttcttctaacattcttgccctcagactaaccttatccatggttatgccttaaaactgatcattatcaatc

SEQ ID NO: 369458 - DNA, 201 bp, Homo sapiens
gaggccaggagttggagacctgccttggcaatatagtgagaccctattgctataaaattacacgtatatatgtgtgtgtgtgtgtgtgtgtgtgtgtgtgtatacacacataattatatatttttttctatctttatttttgttatatatatatattatgtaataaagttgatataatataagcctcaaagatcttagcct

SEQ ID NO: 369459 - DNA, 201 bp, Homo sapiens
tgaggccaggagttggagacctgccttggcaatatagtgagaccctattgctataaaattacacgtatatatgtgtgtgtgtgtgtgtgtgtgtgtgtgtgtatacacacataattatatatttttttctatctttatttttgttatatatatatattatgtaataaagttgatataatataagcctcaaagatcttagcc

SEQ ID NO: 369460 - DNA, 201 bp, Homo sapiens
tgaataaagcaaaaatttttacaagtattttataagtttaaatagcaaattgaaattgtgcgaaaatagtgattttgtgattattaaacattcattgttttaagagtgcatgtaacaaaaagtatctgtagttacctaacactataatagttaaaatacctgttaatatgtataagttaactctacatttttgtaaaagtt

SEQ ID NO: 369461 - DNA, 201 bp, Homo sapiens
ttgaataaagcaaaaatttttacaagtattttataagtttaaatagcaaattgaaattgtgcgaaaatagtgattttgtgattattaaacattcattgttttaagagtgcatgtaacaaaaagtatctgtagttacctaacactataatagttaaaatacctgttaatatgtataagttaactctacatttttgtaaaagt

SEQ ID NO: 369462 - DNA, 201 bp, Homo sapiens
cgttcagctaatatatagtttaaaaggcaaaatagttgaaatctcaaggcctgcagatattcttattcctcttttgatctagtgaaaatgttcttgttgtrtggcagatacagctttgaattaacgaaagcctaaaattggctagagtaaaattttcaagtttctttgtgcatccagatcactctcctccatatttgccat

SEQ ID NO: 369463 - DNA, 201 bp, Homo sapiens
gcctcaacctcccaagttcaagtgatcctccagcctcagccttccgagcagctaggataataggtgtgtgccatgatgcccagctaattttttttttttttcagagacagggtctcactatgctgcccagcctggtcttggacccctgggctcaagtgatcctcccaccttggcctctcaaagtgttgggattatgtttat

SEQ ID NO: 369464 - DNA, 201 bp, Homo sapiens
cttttatgcaaggaattagagagaaatgaaattgttgacctggcacaagctatcctttcattaaaatgtttcctaaagtcccgatgactggaggggatatrttaaaaacaaaaggaggctgctcttcctatggagtaggcattcttttattcctttactttcttaataaacttgctctcacttttctttaaaaaaagaaac

SEQ ID NO: 369465 - DNA, 201 bp, Homo sapiens
caaagtgcagtgatctggaggagtccaggccacgctaacaacaagatcaaataccctgaggcagaaaagagattggtatattttaggaacttatggttcartgtaataaaataatagaaactgggtggtgggatggtgcaggggtggctgcagtagggaaaatatggtgcaaaataccatgaaatgtggttagggaggtag

SEQ ID NO: 369466 - DNA, 201 bp, Homo sapiens
catataaacagaaccaaagacaaaaaccacatgattatctcaatagatgcagaaaaggcctttgacaaaattcaacaacccttcatgctaaaaactctcartaaattaggtattgatgggatgtatctcaaaataataagagctatctatgacaaacccacagccagtatcacactgaatgggcaaaaactggaagcattc

SEQ ID NO: 369467 - DNA, 201 bp, Homo sapiens
accaaccaaaaagagtccaggaccagatggattcacagccgaattgtaccagaggtacaaggaggaactggtaccattccttctgaaactattccactgartaaaaaaagagggaatcctccctaactcattttatgaggccagcatcatcctgataccaaagtcgggcagagacacaaccaaaaaagagaattttagacc

SEQ ID NO: 369468 - DNA, 201 bp, Homo sapiens
ggaatcctagccctagagctgtctaggtagaggaaatagtacatccaaagaccctgaggtgggagcctgcttggtttatttagtaaccagcaagaaggccrgtgtaactggagcagagaaggtgagggagagggtggcagaggcaggtgaggcagatgagataaagaggtagcctgagaccagatcatacaaggcttatgt

SEQ ID NO: 369469 - DNA, 201 bp, Homo sapiens
taaacgaggaagaagtcgaatctctgaatacaccaataacaggctcagaaattgtagcaataatcaatagcttaccaaccaaaaagagtccaggaccagayggattcacagccgaattgtaccagaggtacaaggaggaactggtaccattccttctgaaactattccactgaataaaaaaagagggaatcctccctaact

SEQ ID NO: 369470 - DNA, 201 bp, Homo sapiens
tagaaaatcgagaagaaatggataaattcctcgacacatacactctcccaagactaaacgaggaagaagtcgaatctctgaatacaccaataacaggctcwgaaattgtagcaataatcaatagcttaccaaccaaaaagagtccaggaccagatggattcacagccgaattgtaccagaggtacaaggaggaactggtac

SEQ ID NO: 369471 - DNA, 201 bp, Homo sapiens
ggacagcacctggaaaatcgggtcactcccaaccaaatactgcgcttttctgacaggcttaaaaaatggcgcaccacgagattatatcccgcacctggctyggagggtcctatgcccacggagtctcgccgattgccagcacagcagtctgagatcaaactgcaaggtggcagcgaggctgggggaggggcgcccgccatt

SEQ ID NO: 369472 - DNA, 201 bp, Homo sapiens
tcaccaccgatcccacagaaatacaaactaccatcagagaatactacaaacacctctacgcaaataaactagaaaatcgagaagaaatggataaattcctygacacatacactctcccaagactaaacgaggaagaagtcgaatctctgaatacaccaataacaggctcagaaattgtagcaataatcaatagcttaccaa

SEQ ID NO: 369473 - DNA, 201 bp, Homo sapiens
gagtgccagacagtgggcgcaggtcagtgggtgcgcgtaccgttcgcaagccgaagcagggcgaggcattgcctcacttgggaagcgcaaggggtcagggmgttccctttctgagtcaaagaaagggatgccggacagcacctggaaaatcgggtcactcccaaccaaatactgcgcttttctgacaggcttaaaaaatgg

SEQ ID NO: 369474 - DNA, 201 bp, Homo sapiens
ttaatatatataaaatatataaacatatatattatatatatttcttctaaaaaaatcaggatacatgtgcagaacgtgcaggtttgttacataggtacacrtgtgccatggtgatttgctgcacctattgactcgtcccctaagttcccttccctcatcccccaccccacaacaggccctggtatgtgttgttcccctctc

SEQ ID NO: 369475 - DNA, 201 bp, Homo sapiens
aagatgttctttgaaaccaacgagaacaaagagacaacataccagaatctctgggacacattcaaagcagtgtgtagagggaaatttatagcactaaatgbccacaagagaaagcaggaaagatccaaaattgacaccctaacatcacaattaaaagaactagaaaagcaagagcaaacaacattcaaaagctagcagaag

SEQ ID NO: 369476 - DNA, 201 bp, Homo sapiens
ctgggttcatctcactagggagtgccagacagtgggcgcaggtcagtgggtgcgcgtaccgttcgcaagccgaagcagggcgaggcattgcctcacttggkaagcgcaaggggtcagggagttccctttctgagtcaaagaaagggatgccggacagcacctggaaaatcgggtcactcccaaccaaatactgcgcttttc

SEQ ID NO: 369477 - DNA, 201 bp, Homo sapiens
gcttcaccatgttagccaggctggtctcgaactcctgaccacaaatgattcactcacctctacctctgaaagtgttgggattacaggtgtgggccaccacrcgcagctgagtaggtttttaatattggatacttacttgctagaaaaattacggagaacagaatgaaagtaataaatatgaaataaaatataaagacatcc

SEQ ID NO: 369478 - DNA, 201 bp, Homo sapiens
agtgcaatcaaactagaactcaggattaagaaactcactcaaaaccactcaactacatggaaactgaacagtctgctcctgaatgactactgggtacatarcgaaatgaaggcagaaataaagatgttctttgaaaccaacgagaacaaagagacaacataccagaatctctgggacacattcaaagcagtgtgtagaggg

SEQ ID NO: 369479 - DNA, 201 bp, Homo sapiens
atctgaggtactgggttcatctcactagggagtgccagacagtgggcgcaggtcagtgggtgcgcgtaccgttcgcaagccgaagcagggcgaggcattgyctcacttgggaagcgcaaggggtcagggagttccctttctgagtcaaagaaagggatgccggacagcacctggaaaatcgggtcactcccaaccaaatac

SEQ ID NO: 369480 - DNA, 201 bp, Homo sapiens
ttgaggccaggagttggagacctgccttggcaatatagtgagaccctattgctataaaattacacgtatatatgtgtgtgtgtgtgtgtgtgtgtgtgtgtgtatacacacataattatatatttttttctatctttatttttgttatatatatatattatgtaataaagttgatataatataagcctcaaagatcttagc

SEQ ID NO: 369481 - DNA, 201 bp, Homo sapiens
taggtatgagcctggccatcaaacaaaatttgatagagaataggttctaataaaacagtttactggaactgagtaatttaaaagtgtttttttccctgacyggaaataagaaaaagaacgttagtactcacttttcacaatttcataaattacatcttatgtcacaaaatgacagcttcccactatataagcagagtaagg

SEQ ID NO: 369482 - DNA, 201 bp, Homo sapiens
gccgaataggaacagctccggtctacagctcccagcgtgagcgacgcagaagacgggtgatttctgcatttacatctgaggtactgggttcatctcactarggagtgccagacagtgggcgcaggtcagtgggtgcgcgtaccgttcgcaagccgaagcagggcgaggcattgcctcacttgggaagcgcaaggggtcagg

SEQ ID NO: 369483 - DNA, 201 bp, Homo sapiens
cttgaggccaggagttggagacctgccttggcaatatagtgagaccctattgctataaaattacacgtatatatgtgtgtgtgtgtgtgtgtgtgtgtgtgtgtatacacacataattatatatttttttctatctttatttttgttatatatatatattatgtaataaagttgatataatataagcctcaaagatcttag

SEQ ID NO: 369484 - DNA, 201 bp, Homo sapiens
aggctgctctcaaactcctcccaaagtgccgattataggtatgagcctggccatcaaacaaaatttgatagagaataggttctaataaaacagtttactgraactgagtaatttaaaagtgtttttttccctgaccggaaataagaaaaagaacgttagtactcacttttcacaatttcataaattacatcttatgtcaca

SEQ ID NO: 369485 - DNA, 201 bp, Homo sapiens
aggagaacttccccaaactagcaaggcaggccaacattcagattcaggaaatacagagaatgccacaaagatactcctcgagaagagcaactccaagacayataattgtcagattcaccaaagttgaaatgaaggaaaaaatgttaagggcagccagagagaaaggtcgggttacccacaaagggaagcccatcagactaa

SEQ ID NO: 369486 - DNA, 201 bp, Homo sapiens
caattatgaaccagaatagaacctcttgaaagcataaaactaatggggcctataaaacaataacaataaagaaaccagagggggaggagccaagatggccraataggaacagctccggtctacagctcccagcgtgagcgacgcagaagacgggtgatttctgcatttacatctgaggtactgggttcatctcactaggga

SEQ ID NO: 369487 - DNA, 201 bp, Homo sapiens
gcttgaggccaggagttggagacctgccttggcaatatagtgagaccctattgctataaaattacacgtatatatgtgtgtgtgtgtgtgtgtgtgtgtgkgtgtatacacacataattatatatttttttctatctttatttttgttatatatatatattatgtaataaagttgatataatataagcctcaaagatctta

SEQ ID NO: 369488 - DNA, 201 bp, Homo sapiens
ctcccacacagcctcccaagtagctgggactacaggcgtgcaccactacacctggctaatttttgtattttttgtagcaacggggtctctctgtgttgccraggctgctctcaaactcctcccaaagtgccgattataggtatgagcctggccatcaaacaaaatttgatagagaataggttctaataaaacagtttactg

SEQ ID NO: 369489 - DNA, 201 bp, Homo sapiens
attgaataaagcaaaaatttttacaagtattttataagtttaaatagcaaattgaaattgtgcgaaaatagtgattttgtgattattaaacattcattgttttaagagtgcatgtaacaaaaagtatctgtagttacctaacactataatagttaaaatacctgttaatatgtataagttaactctacatttttgtaaaag

SEQ ID NO: 369490 - DNA, 201 bp, Homo sapiens
ggtgatccacccgcctcggcctcccaaagtgctgggattacaggcatgatccaccgcgctaggccaacacacatgaacctcttcagatttcaagtgctgtkcatgtagcagacacttatatgaaagtaatcttttaatgaatgtagtgcaagttaaataaaattttctttttttgagacagggtcctactctgtctgacaa

SEQ ID NO: 369491 - DNA, 201 bp, Homo sapiens
ttagtagagacggggtttcaccttgttagccaggatggtctcgatctcctgacctcatgatccacccgcctcggcctcccaaagtgctgggattacaggcstgagccaccgtgcccggcctgtacttttttttaaggtaagtaaaactgtgagtgatcagcttgacctaacaaacagaagtaaattaaagagataaaaact

SEQ ID NO: 369492 - DNA, 201 bp, Homo sapiens
aggcaattatgaaccagaatagaacctcttgaaagcataaaactaatggggcctataaaacaataacaataaagaaaccagagggggaggagccaagatgsccgaataggaacagctccggtctacagctcccagcgtgagcgacgcagaagacgggtgatttctgcatttacatctgaggtactgggttcatctcactag

SEQ ID NO: 369493 - DNA, 201 bp, Homo sapiens
attatccaggagaacttccccaaactagcaaggcaggccaacattcagattcaggaaatacagagaatgccacaaagatactcctcgagaagagcaactcyaagacatataattgtcagattcaccaaagttgaaatgaaggaaaaaatgttaagggcagccagagagaaaggtcgggttacccacaaagggaagcccatc

SEQ ID NO: 369494 - DNA, 201 bp, Homo sapiens
tattgaataaagcaaaaatttttacaagtattttataagtttaaatagcaaattgaaattgtgcgaaaatagtgattttgtgattattaaacattcattgttttaagagtgcatgtaacaaaaagtatctgtagttacctaacactataatagttaaaatacctgttaatatgtataagttaactctacatttttgtaaaa

SEQ ID NO: 369495 - DNA, 201 bp, Homo sapiens
tttagtagagacggggtttcaccttgttagccaggatggtctcgatctcctgacctcatgatccacccgcctcggcctcccaaagtgctgggattacaggygtgagccaccgtgcccggcctgtacttttttttaaggtaagtaaaactgtgagtgatcagcttgacctaacaaacagaagtaaattaaagagataaaaac

SEQ ID NO: 369496 - DNA, 201 bp, Homo sapiens
gtacctgtttattaaaaaaaatgttgtgcaaaggctaactttgagaatgagaagatatatgtgtgtgtgtatgtgtgtgtgtgtgtgtgtatatatatatrtatatatatatatatatatgttttattttattttattttattttttttgagacaaggtcttactctgtcatccaggctgagtgcagtgacctgatcatag

SEQ ID NO: 369497 - DNA, 201 bp, Homo sapiens
ttattgaataaagcaaaaatttttacaagtattttataagtttaaatagcaaattgaaattgtgcgaaaatagtgattttgtgattattaaacattcattgttttaagagtgcatgtaacaaaaagtatctgtagttacctaacactataatagttaaaatacctgttaatatgtataagttaactctacatttttgtaaa

SEQ ID NO: 369498 - DNA, 201 bp, Homo sapiens
tttttagtagagacggggtttcaccttgttagccaggatggtctcgatctcctgacctcatgatccacccgcctcggcctcccaaagtgctgggattacakgcgtgagccaccgtgcccggcctgtacttttttttaaggtaagtaaaactgtgagtgatcagcttgacctaacaaacagaagtaaattaaagagataaaa

SEQ ID NO: 369499 - DNA, 201 bp, Homo sapiens
caacgtacctgtttattaaaaaaaatgttgtgcaaaggctaactttgagaatgagaagatatatgtgtgtgtgtatgtgtgtgtgtgtgtgtgtatatatrtatatatatatatatatatatatgttttattttattttattttattttttttgagacaaggtcttactctgtcatccaggctgagtgcagtgacctgatc

SEQ ID NO: 369500 - DNA, 201 bp, Homo sapiens
aaaattttaaaactattcttgtttgcctacttctcagaaataaacactgtaaaataaacattttgacctgacctcaaaccattgtctttttatatatatattataaaaataaaattaagattatataatcattactactttgtaacatcctttttaaattaaaaaatatattgtggtcttctctaatatcattaaatatat

SEQ ID NO: 369501 - DNA, 201 bp, Homo sapiens
ggccataggcaattatgagccttcaaagattttttgagcaagtaaataacatgatcgtattggcatttaggtacaaaattatagcagcatgaaaaatgaaytaaagatggtttgttgtgttggagaaatagagaatgtcagtaagatgaagtgtcatgaagatggcagaagaccatatgtgcccatcatccccttgcttac

SEQ ID NO: 369502 - DNA, 201 bp, Homo sapiens
cagtggcgcaatctcggctcactgcaagctccgcttcccgggttcacgccattctcctgcctcagcctcccgagtagctgggactacaggcgcccgccacygcgcccggctaattttttgtatttttagtagagacggggtttcaccttgttagccaggatggtctcgatctcctgacctcatgatccacccgcctcggcc

SEQ ID NO: 369503 - DNA, 201 bp, Homo sapiens
aaaaattttaaaactattcttgtttgcctacttctcagaaataaacactgtaaaataaacattttgacctgacctcaaaccattgtctttttatatatatattataaaaataaaattaagattatataatcattactactttgtaacatcctttttaaattaaaaaatatattgtggtcttctctaatatcattaaatata

SEQ ID NO: 369504 - DNA, 201 bp, Homo sapiens
aatggggaggaccttgaatgccacactggggagtttagacatttggccataggcaattatgagccttcaaagattttttgagcaagtaaataacatgatcrtattggcatttaggtacaaaattatagcagcatgaaaaatgaattaaagatggtttgttgtgttggagaaatagagaatgtcagtaagatgaagtgtcat

SEQ ID NO: 369505 - DNA, 201 bp, Homo sapiens
atcaacgtacctgtttattaaaaaaaatgttgtgcaaaggctaactttgagaatgagaagatatatgtgtgtgtgtatgtgtgtgtgtgtgtgtgtatatrtatatatatatatatatatatatatgttttattttattttattttattttttttgagacaaggtcttactctgtcatccaggctgagtgcagtgacctga

SEQ ID NO: 369506 - DNA, 201 bp, Homo sapiens
gtcaaaacatacctttctgtctctttaagaattgtcttaatctccttaagacagattctattttatccttgtcttacaaataagaacattaaagcaggcayagagaggttaaataatgtggtgtggtcacacaactgttaagtggcagaggcaaaattcaaatccagagagcctttttccacagcccccacccttatttgc

SEQ ID NO: 369507 - DNA, 201 bp, Homo sapiens
aaaggtaacagtttttgccatttttaacattttaaatttctgatttctgtttgatgggcaagaggggtttttgtactttttttttttttttttttttttgkgacggagtctcgctctgtcgcccaggccggactgcggactgcagtggcgcaatctcggctcactgcaagctccgcttcccgggttcacgccattctcctg

SEQ ID NO: 369508 - DNA, 201 bp, Homo sapiens
tctcttatttgggacacctagctttgaggagcagatggttttcccagtaaactcttagattctataggtatcacatttcagggtcaagaattacgcatatmctcagtataaactctgtaaagactttttttctcttgtttgatggaactcaaaaatggagcaataatagttatcaacaagcaatgagtctgagtcctcagg

SEQ ID NO: 369509 - DNA, 201 bp, Homo sapiens
ctttatcatctctagtttacttatacctaatacaatgtaaatgctatgtaaattttgttatactatattgttcagggaataataagaaaaaaagtttgtayatgttctgtataggtgcaattttttttcaaaatattttttgatcccagattgtttgtgttcacggatacagaatctgcggatacagagggccagctatac

SEQ ID NO: 369510 - DNA, 201 bp, Homo sapiens
ttagttgtataatattccagttaacttcagtaaccaatcatgaaactgtcacccatggaattttaactctttgaggatatttgcctaagtatccttttggrttaggtactttttctgactctgcccctaacattttgaatttagttttgactttgcctgcttctctggccttagcatcttctattacagctaagaattgtc

SEQ ID NO: 369511 - DNA, 201 bp, Homo sapiens
atgatttctgtctgtgataatagtactaatatatatgttgtagatgagagtggtaacattctaaacaccaacctcaaaagattagttgtataatattccarttaacttcagtaaccaatcatgaaactgtcacccatggaattttaactctttgaggatatttgcctaagtatccttttggattaggtactttttctgact

SEQ ID NO: 369512 - DNA, 201 bp, Homo sapiens
aacactctgcaggatattatccaggagaacttccccaaactagcaaggcaggccaacattcagattcaggaaatacagagaatgccacaaagatactcctygagaagagcaactccaagacatataattgtcagattcaccaaagttgaaatgaaggaaaaaatgttaagggcagccagagagaaaggtcgggttacccac

SEQ ID NO: 369513 - DNA, 201 bp, Homo sapiens
ttatccttattaactgatatttttattcacaaacttgtccaactcagttttagattaaaaatataaagttatttattccttaaaaaattcttaactatcargctgctgtattgtcagcagcaagaggcctttgagttcttgagggggatgagagaaggtcacgtgcccctggaattccaaaggattattctgatctcactg

SEQ ID NO: 369514 - DNA, 201 bp, Homo sapiens
aagtttagagagaaaagaataaaaagaaacaaacaaagcctccaagaaatatgggactatgtgaaaagaccaaatctatgtctgattggtgtacctgaaaktgacggggagaatggaaccaagttggaaaacactctgcaggatattatccaggagaacttccccaaactagcaaggcaggccaacattcagattcaggaa

SEQ ID NO: 369515 - DNA, 201 bp, Homo sapiens
gatgcgatcaactggaagaaagggtttcagtgatggaagatgaaatgaatgaaatgaagtgagaagggaagtttagagagaaaagaataaaaagaaacaarcaaagcctccaagaaatatgggactatgtgaaaagaccaaatctatgtctgattggtgtacctgaaagtgacggggagaatggaaccaagttggaaaaca

SEQ ID NO: 369516 - DNA, 201 bp, Homo sapiens
aatcaacgtacctgtttattaaaaaaaatgttgtgcaaaggctaactttgagaatgagaagatatatgtgtgtgtgtatgtgtgtgtgtgtgtgtgtatayatatatatatatatatatatatatatgttttattttattttattttattttttttgagacaaggtcttactctgtcatccaggctgagtgcagtgacctg

SEQ ID NO: 369517 - DNA, 201 bp, Homo sapiens
ctcaggagtcgatgcgatcaactggaagaaagggtttcagtgatggaagatgaaatgaatgaaatgaagtgagaagggaagtttagagagaaaagaataaraagaaacaaacaaagcctccaagaaatatgggactatgtgaaaagaccaaatctatgtctgattggtgtacctgaaagtgacggggagaatggaaccaag

SEQ ID NO: 369518 - DNA, 201 bp, Homo sapiens
aaatcaacgtacctgtttattaaaaaaaatgttgtgcaaaggctaactttgagaatgagaagatatatgtgtgtgtgtatgtgtgtgtgtgtgtgtgtatrtatatatatatatatatatatatatatgttttattttattttattttattttttttgagacaaggtcttactctgtcatccaggctgagtgcagtgacct

SEQ ID NO: 369519 - DNA, 201 bp, Homo sapiens
aaaaccacaaagatggggaaaaaacacagcagaaaaactggaaactctaaaaagcagagtgcctctcctcctccaaaggaacgcagttcctcaccagcaakggaacaaagctggatggagaatgactttgacgagttgagagaaggcttcacatgatcaaactactgcgagctataggaggaaattcaaatcaaaggcaaa

SEQ ID NO: 369520 - DNA, 201 bp, Homo sapiens
acatccacaccaaaaacccatctgtacatcaccatcatcaaagatcaaaagtagataaaaccacaaagatggggaaaaaacacagcagaaaaactggaaaytctaaaaagcagagtgcctctcctcctccaaaggaacgcagttcctcaccagcaatggaacaaagctggatggagaatgactttgacgagttgagagaag

SEQ ID NO: 369521 - DNA, 201 bp, Homo sapiens
aggaacaatcagtcagcagcattcacagttcatgaaaatccactgttctgcagacaccgctgctgatacccaggcaaacagggtctggagtggacctctascaaactccaacagacctgcagctgagggtcctgtctgttagaaggaaaactaacaaacagaaagaacatccacaccaaaaacccatctgtacatcaccat

SEQ ID NO: 369522 - DNA, 201 bp, Homo sapiens
acaaaacttcaagaggaacaatcagtcagcagcattcacagttcatgaaaatccactgttctgcagacaccgctgctgatacccaggcaaacagggtctgsagtggacctctagcaaactccaacagacctgcagctgagggtcctgtctgttagaaggaaaactaacaaacagaaagaacatccacaccaaaaacccatc

SEQ ID NO: 369523 - DNA, 201 bp, Homo sapiens
tgctataaacccaacaatacaatgcatttgctttgaacaattatgtttgaaagcaactgaaaatacaaaaattagctagatgtggtggtgggtgcctgtartcccagctactcaggaggctgaggcgtgagaatagcttgaaccctggaggctgaggttgcagtgagccaagatcgtgccactgtgctccagctgggcaac

SEQ ID NO: 369524 - DNA, 201 bp, Homo sapiens
tgacacctcacacggccaggtactcctctgagacaaaacttcaagaggaacaatcagtcagcagcattcacagttcatgaaaatccactgttctgcagacrccgctgctgatacccaggcaaacagggtctggagtggacctctagcaaactccaacagacctgcagctgagggtcctgtctgttagaaggaaaactaaca

SEQ ID NO: 369525 - DNA, 201 bp, Homo sapiens
atttccattttttttctttgaaggcacttgagtaaaggtgacaaaatataagggaaaatctgtctaaatctctatttgtctttttctttgtgcatttttargaggtgttctttgagttgctgatcatgctcaggctcagtcatactgttacagatcttggctaattgacttttagtctgccttctctctttctaatcacaa

SEQ ID NO: 369526 - DNA, 201 bp, Homo sapiens
gccaggtcacctcttgaatgcttttctgcttagaaatttcttctgccagataccctaaatcatcttttgagttcaaagctccacagatctctaaggcagasgcaaaatgccgccagtctctttgctaaagcatagcatgagtgaccttcactccagttcccactaagtttctcatcttcatctgagaccacctcagcctgg

SEQ ID NO: 369527 - DNA, 201 bp, Homo sapiens
gtccatattggcagaaatttctcagtgggtcttcaatcctggcaacaataaacaagcaaaatggagggaaaataaaactgggaattctgaggctactttttaaaaaaaataaggtcttagtttttgagaaccttagaatttaacgaaattttattcctaactaaatttaaattcagccttgataagaataagtccctctag

SEQ ID NO: 369528 - DNA, 201 bp, Homo sapiens
aacactgctaaatttactaattgtacctgttgcattgttaaaccccatgctgtcagtgaaggtatgttgaatacactatattcagtacattttgttaatargagagcaatgtttattttcttgatgtactttatgtatagaaaataaagtatacttttagtatttccattttttttctttgaaggcacttgagtaaaggtg

SEQ ID NO: 369529 - DNA, 201 bp, Homo sapiens
cctatacaagtccaaaacctggcagggtacttgttaaaaaaatttttttttaattcattaaagctccagaatggtctcctctgattccatgtctcacaccyagggcatgctgatggaagaggtgagctcccagggcattggcagctccttccctgtggatctgtaggggacagtccccatggctgctttcaaaggctggca

SEQ ID NO: 369530 - DNA, 201 bp, Homo sapiens
aatcctcctagcttaaatgattgtccatattggcagaaatttctcagtgggtcttcaatcctggcaacaataaacaagcaaaatggagggaaaataaaactgggaattctgaggctactttttaaaaaaaataaggtcttagtttttgagaaccttagaatttaacgaaattttattcctaactaaatttaaattcagcct

SEQ ID NO: 369531 - DNA, 201 bp, Homo sapiens
gagtgagaacatacagtgtttggttttctcttcctgtgttagtttgctgagaatgatggtttccagcttcatccatgtccatgcaaaggacatgaactcayccatttttatggttgcatagtattctatgctgtatatgtgccccattttctttatccagtctatcactgatgggcatttgggttggttccaagtctttgc

SEQ ID NO: 369532 - DNA, 201 bp, Homo sapiens
gtatgttcaagaaacagtgtggctaaggcaaagtaagcaagagtgacagttgtgggagatgaagtcagacggatcactggaggccagatcttggagggctytgtgggctattgaaagtgggttgacattattctcataggctgagttggcaaattttaagcagaggaatgaggtgatacaatttatatttttacagaatcc

SEQ ID NO: 369533 - DNA, 201 bp, Homo sapiens
acactaatagtacatggtgatttagggtcactcggtaagatccagatgatccagaatatggtgtgtgtgtgtgtgtgtgtgtatgtgtgtgtgtgtgtgtgcctttgtgcatgtatgtgtaagagacagagttttagttgacttgaaaaaaagaaacttagacttttataggaaacaaatggaatctcaaagtcagcccca

SEQ ID NO: 369534 - DNA, 201 bp, Homo sapiens
accgatgcgtacactttaataatttaatacagaaataacccagagtagtttttacgctaataaaaggatatttcttgaagcctgctggggattttttttttatcaccaaaccagctcagtgtttattgattaagagagttctttgtcagtctttgaattctaatagttttacacaaaaataaataaattcttactaaaaat

SEQ ID NO: 369535 - DNA, 201 bp, Homo sapiens
tttgaattacatgaggtaatataggcaaatgcattccaaagaaaacactgtcttaatatcttcttcagatagactgtctgatgatcactacttctaacacktgtggatgtatttaagacttttaccacttttataaaggtacattagtggttacagccacttaagtctgtatcactttattgtaaacacagtattttctcc

SEQ ID NO: 369536 - DNA, 201 bp, Homo sapiens
aataaaaataaagacctaacaccacaggaaaagactatggagtatgttaaaaatgctcatcgatgggccattacctttgaaagagccaaaaaacaaaaaamaaaaaaaaaaaaaaaattaccatgccagttttattcccgttgaatatttacaccttggacagcaaaccttgctcacataaagtagaaaacagatacaata

SEQ ID NO: 369537 - DNA, 201 bp, Homo sapiens
gacactaatagtacatggtgatttagggtcactcggtaagatccagatgatccagaatatggtgtgtgtgtgtgtgtgtgtgtatgtgtgtgtgtgtgtgtgcctttgtgcatgtatgtgtaagagacagagttttagttgacttgaaaaaaagaaacttagacttttataggaaacaaatggaatctcaaagtcagcccc

SEQ ID NO: 369538 - DNA, 201 bp, Homo sapiens
cccatcacctttttgtgtttttctgtagtgtcacttaaaatttaaagggcagttcccccatgacaaacccccaccccagcccccaggaaaaaaataaaaawaaagacctaacaccacaggaaaagactatggagtatgttaaaaatgctcatcgatgggccattacctttgaaagagccaaaaaacaaaaaaaaaaaaaaa

SEQ ID NO: 369539 - DNA, 201 bp, Homo sapiens
agacactaatagtacatggtgatttagggtcactcggtaagatccagatgatccagaatatggtgtgtgtgtgtgtgtgtgtgtatgtgtgtgtgtgtgtgtgcctttgtgcatgtatgtgtaagagacagagttttagttgacttgaaaaaaagaaacttagacttttataggaaacaaatggaatctcaaagtcagccc

SEQ ID NO: 369540 - DNA, 201 bp, Homo sapiens
cagacactaatagtacatggtgatttagggtcactcggtaagatccagatgatccagaatatggtgtgtgtgtgtgtgtgtgtgtatgtgtgtgtgtgtgtgtgcctttgtgcatgtatgtgtaagagacagagttttagttgacttgaaaaaaagaaacttagacttttataggaaacaaatggaatctcaaagtcagcc

SEQ ID NO: 369541 - DNA, 201 bp, Homo sapiens
gtggttgaggtactaatttgcatttccatcaacagtgtataagtgtgttccctttctctacagacttgccagcatatctgtcgttttttgactttttttttaaaaaaaaatcaacttctattttagatacagggggtacacatgcagatttgttacgtgggaatattgtgtgatgctgaggtttggagtatggatcccatc

SEQ ID NO: 369542 - DNA, 201 bp, Homo sapiens
actttagattcagggggtacatgtgcaggtttgttacctgggtatattgtgtgatgctgaggtttggggtacaattgatcccattacccaggtactgagcrtaatacccaatagttagtttttcaacccttgctcccttccctttctcccactctagtagtccccagtgtctgttgttgccatcaatagatattattgtcc

SEQ ID NO: 369543 - DNA, 201 bp, Homo sapiens
agcacagacttgaacccaggcaatctgggtccagaatttatactctctaacctcactgcctttctgtgtgatcttaaatgtaacaagtattatttctttasagttcatgataggatggggagtgagactagaaaaactaagcatgagggaagatataataggaaatagagtcagaatatttggcctccctcaaaagtaatt

SEQ ID NO: 369544 - DNA, 201 bp, Homo sapiens
tcaaatctgcactcaccatttggcatggtcatgtggctcagaggtgtacaggggaccaactcttgtcattctccctgtgggttgtgtaagtgccttgaggrcctgggcttataagggacttttgtatctccagctgctaacatattgcaggcttttagtctgttgagtaaatgcatgtgggaatatatcatgaatggggac

SEQ ID NO: 369545 - DNA, 201 bp, Homo sapiens
ttatgcaaaggagggttgagtattaccatactcccttttttcttattttccaagtaaagtactcctcggtatttgagggagattggttccaggacccctcrgatatcaaaatctgagatgctcaagtccctgatataaaatagtgtagtaattgcatatgatctatgcacatcttcctttatcatctctagtttacttata

SEQ ID NO: 369546 - DNA, 201 bp, Homo sapiens
taagatctcagcttaacattttacctcttttatttctttccactctctttttattcttagaataaatatgttcgttgttctgaatatctttaaaaataacyctattccaatcagacatgtccctatcacagtcagaaggaggggctcaagtttccctaaaaagtgcacattaggaatggagcatagccaccagctggagct

SEQ ID NO: 369547 - DNA, 201 bp, Homo sapiens
tatccttccaatttgatttaaattggttatggttattaatattaaacatgtctattttaggcaccagttttattagttcgtgtactcttggctacatcacrattaaaacttttctttcagtttctttccaaaataaactgcaagatttccttgttgacattttttcatttttaaaaatcgtttcgttttatttcccaccac

SEQ ID NO: 369548 - DNA, 201 bp, Homo sapiens
agtgctcagctttttcatatttgatttccttcctgcagttcatccactaggatactgtgaaagaggcatgacattttttggtataaagagagctaaacatygtatatttaactcagttttaacaaaaattccagaagtggtcccagttttgcttagaatgtcaccattttggagttttgtgaatgtgttctgttctatctg

SEQ ID NO: 369549 - DNA, 201 bp, Homo sapiens
ggcagactgcctcctcaagtgggtccctgacccctgacccccaagcagcctaactgggaggcacccccacaggaggggcagactgacacctcacacggccrggtactcctctgagacaaaacttcaagaggaacaatcagtcagcagcattcacagttcatgaaaatccactgttctgcagacaccgctgctgatacccag

SEQ ID NO: 369550 - DNA, 201 bp, Homo sapiens
cgcatcatgcgcgagccgaagcagggcgaggcattgcctcactcgggaagtgcaaggggtcagggagttccctttcctggtcaaggaaaggggtgacagayggcacctggaaaatcgggtcactcccacccaaatactgtgcttttctgatggcttaggaaatggcgcaccagaaggtcatatcccgcacctggcttggag

SEQ ID NO: 369551 - DNA, 201 bp, Homo sapiens
ttcatctcactagggagtgccagacagtgggcgcaggacagtgggtgcagcgcatcatgcgcgagccgaagcagggcgaggcattgcctcactcgggaagygcaaggggtcagggagttccctttcctggtcaaggaaaggggtgacagacggcacctggaaaatcgggtcactcccacccaaatactgtgcttttctgat

SEQ ID NO: 369552 - DNA, 201 bp, Homo sapiens
taccgggttcatctcactagggagtgccagacagtgggcgcaggacagtgggtgcagcgcatcatgcgcgagccgaagcagggcgaggcattgcctcactygggaagtgcaaggggtcagggagttccctttcctggtcaaggaaaggggtgacagacggcacctggaaaatcgggtcactcccacccaaatactgtgctt

SEQ ID NO: 369553 - DNA, 201 bp, Homo sapiens
cacagaagatgggtgatttctgcatttccatctgaggtaccgggttcatctcactagggagtgccagacagtgggcgcaggacagtgggtgcagcgcatcrtgcgcgagccgaagcagggcgaggcattgcctcactcgggaagtgcaaggggtcagggagttccctttcctggtcaaggaaaggggtgacagacggcacc

SEQ ID NO: 369554 - DNA, 201 bp, Homo sapiens
aacagctccagtctacagctcccagtgtgagtgacacagaagatgggtgatttctgcatttccatctgaggtaccgggttcatctcactagggagtgccasacagtgggcgcaggacagtgggtgcagcgcatcatgcgcgagccgaagcagggcgaggcattgcctcactcgggaagtgcaaggggtcagggagttccct

SEQ ID NO: 369555 - DNA, 201 bp, Homo sapiens
tacgaatgcacattcagacactaatagtacatggtgatttagggtcactcggtaagatccagatgatccagaatatggtgtgtgtgtgtgtgtgtgtgtatgtgtgtgtgtgtgtgtgcctttgtgcatgtatgtgtaagagacagagttttagttgacttgaaaaaaagaaacttagacttttataggaaacaaatggaa

SEQ ID NO: 369556 - DNA, 201 bp, Homo sapiens
gacgaattaagaaaatgtggggaggagccaagatggccgaataggaacagctccagtctacagctcccagtgtgagtgacacagaagatgggtgatttctrcatttccatctgaggtaccgggttcatctcactagggagtgccagacagtgggcgcaggacagtgggtgcagcgcatcatgcgcgagccgaagcagggcg

SEQ ID NO: 369557 - DNA, 201 bp, Homo sapiens
atacgaatgcacattcagacactaatagtacatggtgatttagggtcactcggtaagatccagatgatccagaatatggtgtgtgtgtgtgtgtgtgtgtatgtgtgtgtgtgtgtgtgcctttgtgcatgtatgtgtaagagacagagttttagttgacttgaaaaaaagaaacttagacttttataggaaacaaatgga

SEQ ID NO: 369558 - DNA, 201 bp, Homo sapiens
aatgatagacgaattaagaaaatgtggggaggagccaagatggccgaataggaacagctccagtctacagctcccagtgtgagtgacacagaagatgggtratttctgcatttccatctgaggtaccgggttcatctcactagggagtgccagacagtgggcgcaggacagtgggtgcagcgcatcatgcgcgagccgaag

SEQ ID NO: 369559 - DNA, 201 bp, Homo sapiens
aaatttttaattgatttttgacgtataatgaaatgaatcagcatttggaaaatctgcataactcagtgagctggtatttgccaaatgattaatgtgtgatrttaaaaatcatgtctgagtcatatcatagtttcattcgaagtacatacaagatagaccagtggattttaatgtaacagggtaaaaaaaagtttattgata

SEQ ID NO: 369560 - DNA, 201 bp, Homo sapiens
tccctcttttactctgcacttctctttgttgccgccatgtgaaggacatgtttgcttccccttctgccatgattgtaagtttcctgaggcctccctagccrtgctgaactgtgagtcaattaaacttctttcctttataaattacccggtctcagatatgtctttattagcagcatgagtacggactaatacatgtgataa

SEQ ID NO: 369561 - DNA, 201 bp, Homo sapiens
ccaaatgcccatcaatgatagacgaattaagaaaatgtggggaggagccaagatggccgaataggaacagctccagtctacagctcccagtgtgagtgacrcagaagatgggtgatttctgcatttccatctgaggtaccgggttcatctcactagggagtgccagacagtgggcgcaggacagtgggtgcagcgcatcat

SEQ ID NO: 369562 - DNA, 201 bp, Homo sapiens
acgatcttgggtcactgcaacctccaccttccaggttcaagtgattctcctgcctcagcctcctgagtagctgggattacaggcacccaccaccacactcmgctatgtttttgtagttttagtagaggcagggtgtcactatgttggccaggctggtctcgaactcctgtcctcaggcaatccatctgcctcggcctccca

SEQ ID NO: 369563 - DNA, 201 bp, Homo sapiens
gatgctgtttatgaagatggggaagttgccttctatttctatttttttcttacagtttttttgatttatgagtgctgtatattttcaaatgtttttttctrtatcaatatatgcagatatatatctatagatagatatgtgatcaacatatattgatgtgttcatgtgatttttcttccttagcctgttaatatattggtt

SEQ ID NO: 369564 - DNA, 201 bp, Homo sapiens
gcttttccctcttttactctgcacttctctttgttgccgccatgtgaaggacatgtttgcttccccttctgccatgattgtaagtttcctgaggcctcccyagccatgctgaactgtgagtcaattaaacttctttcctttataaattacccggtctcagatatgtctttattagcagcatgagtacggactaatacatgt

SEQ ID NO: 369565 - DNA, 201 bp, Homo sapiens
caggagagagagcactagagagaaacaggcttccactgcaggtgccggactctgattccaatgtgcttaacatgtgaaagcaggagaacaatacgctatcycttacttgtacactatcccctacttgagggtctgcaggtctgagaaaaaagaggtcgggccacaaataaccagaaacccttaaatatggccggacatgga

SEQ ID NO: 369566 - DNA, 201 bp, Homo sapiens
agcattccaggcagagtcaatagtgagcacagaggtgcattagaggaacaggagggagctagtgtggctggggcctagggaatgagaggacagctggaggrgaagagatctgagaggcaggaaggagccaggaatactgagacttatggaacttgggagggattttggattttattctaaatgcagtagtattatacatct

SEQ ID NO: 369567 - DNA, 201 bp, Homo sapiens
acacaacccatcacctttttgtgtttttctgtagtgtcacttaaaatttaaagggcagttcccccatgacaaacccccaccccagcccccaggaaaaaaawaaaaataaagacctaacaccacaggaaaagactatggagtatgttaaaaatgctcatcgatgggccattacctttgaaagagccaaaaaacaaaaaaaaa

SEQ ID NO: 369568 - DNA, 201 bp, Homo sapiens
agaaattaagagaagcaagatttggagagaatcttggagaaagttacagacacacacaatggcttagaacagaaagtacacaatacatacgaaaacaggtyaagtctcaccaaggtcgtgaccttatagcagccttaaaaatgcaaaataccctccagtttgaatgaatgctcccctttcctcagacctaaagccccattc

SEQ ID NO: 369569 - DNA, 201 bp, Homo sapiens
tggaaccaagccaaatgcccatcaatgatagacgaattaagaaaatgtggggaggagccaagatggccgaataggaacagctccagtctacagctcccagygtgagtgacacagaagatgggtgatttctgcatttccatctgaggtaccgggttcatctcactagggagtgccagacagtgggcgcaggacagtgggtgc

SEQ ID NO: 369570 - DNA, 201 bp, Homo sapiens
gcttcttgtcatctcttgagctcagttagtctccattcttccctccaaattactaactgatgaagaactaacacaggagatagatgtagatcaaaatattragtattaattttacttaggctgtcttgtgaaagcgtgtttgagaatggttgaggctttctttctattcctatttcctctatcccttacactgatctggaa

SEQ ID NO: 369571 - DNA, 201 bp, Homo sapiens
aggccctcctctaaacccctttcctgcactaacattccatgattctaggttttgaggaaatcaaattctaatccgacaccttggttttaccattgaggaawgtgttgcccaaagaaggaaaatggctcacctaaaattgcatggcttagtgtatagaacattactctcctaactagtaatcctgggtttttctagtttgcc

SEQ ID NO: 369572 - DNA, 201 bp, Homo sapiens
cacgagatctgatggttttataaggggcttttccctcttttactctgcacttctctttgttgccgccatgtgaaggacatgtttgcttccccttctgccaygattgtaagtttcctgaggcctccctagccatgctgaactgtgagtcaattaaacttctttcctttataaattacccggtctcagatatgtctttattag

SEQ ID NO: 369573 - DNA, 201 bp, Homo sapiens
cagattgcttgtaactgtgctacttactaggtgtgtgactgaacagttgaccactgtgtttatttcttcatttgcaaaatgggatttttttttttttttttgagatggagtcttgctctgttgcccaggctggagtgtagtggcacgatttcggctcactgcaacctccacctcccaggttcaagcaattctcctgccttg

SEQ ID NO: 369574 - DNA, 201 bp, Homo sapiens
aaaaatacaaataaaaacaaagcactataacaagtatttacatagcatttgcattgtattaggtgttgtaagtaatttagagatgaattaaaatatactgraggatatgcataggttatatgcaaatgctatatcattgtatgtaagggacttgagcgtctaaggattctggtatctgtaggagtcctggaaccaatcccc

SEQ ID NO: 369575 - DNA, 201 bp, Homo sapiens
catcctccttcctcagcctcccgagtagctgggactactggcacccaccaccatgcccagctaattttttgtattttgtttagtagagatgaggtttcacygtgttagccaggatggtctcgatctcctgatctcatcatcctcccacctttggcctcccaaagtgctgggattacaggcgtgagccaccgcacctggcca

SEQ ID NO: 369576 - DNA, 201 bp, Homo sapiens
ctcggctcactgaaagctccgcctcccaggttcacgccatcctccttcctcagcctcccgagtagctgggactactggcacccaccaccatgcccagctarttttttgtattttgtttagtagagatgaggtttcaccgtgttagccaggatggtctcgatctcctgatctcatcatcctcccacctttggcctcccaaag

SEQ ID NO: 369577 - DNA, 201 bp, Homo sapiens
gttcctgtctttagttctgtttatgtgatgagtcacatttattgatttgtgtatgttgaactaaccttgtatcccaaggataaagcctacttgatcatggkggattcactttttgatgtgctgctggatttggcttgcgagtattttgttgaaaatttttatatagatgtacatcaaggacattggcctgaagttttcttt

SEQ ID NO: 369578 - DNA, 201 bp, Homo sapiens
actacgtctggctaatttttgtatttttagtagagatagggtttctccatgttggccaggctgggcttgaactcaggacctcaagtgatccacccaccttktcctcccaaagtgctaggattacaggcatgagccaccgcacccaggtggtagatattgtgatatcaagggaaaatattgatgccaggaaagaccttaaca

SEQ ID NO: 369579 - DNA, 201 bp, Homo sapiens
attccattgtgtaatgaatggtaattcttctaatgataaatactggtcccctttggtaccaaccttagagttagaaatagcttaatctgttgagtaaatgrataaaaaccgcaagttgaaaacagcaaaaataatttctttgcttggaatatcagtgtacatatctttccgtgcaaagttctccacttttctcattaccca

SEQ ID NO: 369580 - DNA, 201 bp, Homo sapiens
tcctgggttcaagcgattcttgtgcctcagcctcccaggtagctgggattacaggcatgtggcactacgtctggctaatttttgtatttttagtagagatygggtttctccatgttggccaggctgggcttgaactcaggacctcaagtgatccacccaccttgtcctcccaaagtgctaggattacaggcatgagccacc

SEQ ID NO: 369581 - DNA, 201 bp, Homo sapiens
cctccaccccgcctcccactgtgcttctataactggccttatgacaacaaatgaatctggcataagagagaagagcaccagagtaagtgaaacagaattgwgtgaattagccgtctcgttggattctacccaatcacactgtgaaagtccattatgcattatgcttatattccattgtgtaatgaatggtaattcttctaa

SEQ ID NO: 369582 - DNA, 201 bp, Homo sapiens
gtggcataatcttggctcactgtaagctctgcctcctgggttcaagcgattcttgtgcctcagcctcccaggtagctgggattacaggcatgtggcactaygtctggctaatttttgtatttttagtagagatagggtttctccatgttggccaggctgggcttgaactcaggacctcaagtgatccacccaccttgtcct

SEQ ID NO: 369583 - DNA, 201 bp, Homo sapiens
tccagggtttttatggttttgggttttacatttaagtctttaatccatcttgagttaatttttctataaagtgtaaggaagcgttccagtttcatttttcygcatatggctagtcagtttgcccagcaccatttactgaataggagatcctttccccattgcttgtttttgtcaggtttgtcaaagatgagatggttgtag

SEQ ID NO: 369584 - DNA, 201 bp, Homo sapiens
tgcagttaataatgaaccatgaaattgagtagactgattacctcacatttttcttttttgaaattgttttagttattctagttcctttatcttaccatatrattttagaataatcttatctattgctacaaaaaaaacttgctggtattttgataacaattttgttaaacttatttgtcaatttagggagaattgacatct

SEQ ID NO: 369585 - DNA, 201 bp, Homo sapiens
attttgttttcattttcatacattgaaatgttcaatccacctggaatttattagacatatagtgtgaggtatggatttagccagctatcacaatattgtttattaataataaacaatttattttatttaaatggctaaatccatccatcctttcattgttctttctcatttattgaatacttatatacatccttgcctgtt

SEQ ID NO: 369586 - DNA, 201 bp, Homo sapiens
tttcccaatgatgtactgcaaatcaaagttcagattttccagataggcaatgctgtcaagtcaaaaacaactttcattcttacttttcattctttggttgtttttttttttttttcacttttgtcccagtaattatttatgatctagtcaatttatctttaatttttaaaagattttttaaaaatatcaacttttttagtt

SEQ ID NO: 369587 - DNA, 201 bp, Homo sapiens
gaattggaaataccatttggcccagcaatcccattactaggcatatacccaaagggttataaatcattctgctgtaaagacagattcacatgtatgttaaygcagcactattcacaatagcacagacttggaaccaagccaaatgcccatcaatgatagacgaattaagaaaatgtggggaggagccaagatggccgaata

SEQ ID NO: 369588 - DNA, 201 bp, Homo sapiens
ttttctttaagttccgggatacgtgtgcagaatgtacaggtttattacataggtatacatgtgccatggtggtttgctgcacctttcaacctgtcatctargctttaaaatccaatcagattatctttttaaaaaaatttttttataaatacagttttataatctgcatctactgtagagcacttatttgtaacgtaacta

SEQ ID NO: 369589 - DNA, 201 bp, Homo sapiens
gatatgaacagacacttctcaaaagaagtgcagccaacagacatatgaaaaaatgctcctcatccctggtcattagagaaatgcaaatcaaaattacaatragataccatcttacaccagttagattggtgattattaaaaagtcaggacatgacagatgctggagaggttgtggaaaaatgggaacgcttttacactgtt

SEQ ID NO: 369590 - DNA, 201 bp, Homo sapiens
aaattacaaaaattagccggccgtggaggcgtgtgcctatagtcccagctgcttgggaggctgagtgggagaattgcttgaacccgggaggtggaggttgyagtgagctgagatggcaccactgcactccagcctgggtgacacagcgagactccatctcaaaaaaaaagaaaaaaaaaaaagaaagaaagaaaagaaagg

SEQ ID NO: 369591 - DNA, 201 bp, Homo sapiens
caaacttacaagaaaaaaacaaacaaccccatcaaaaaatgggcaaaggatatgaacagacacttctcaaaagaagtgcagccaacagacatatgaaaaamtgctcctcatccctggtcattagagaaatgcaaatcaaaattacaatgagataccatcttacaccagttagattggtgattattaaaaagtcaggacatg

SEQ ID NO: 369592 - DNA, 201 bp, Homo sapiens
ttattaatgatctatgtgtgttagaaaagaatgtttaggccaggtgtggtggctcacgcttgtaatcccagcactttgggaggctgaggcgggtggatcasttgaggtcaggagttggagaccagcctggccaatgtggtgaaaccttgtctctactaaaaaattacaaaaattagccggccgtggaggcgtgtgcctata

SEQ ID NO: 369593 - DNA, 201 bp, Homo sapiens
tctagaatctacaaagaatgtaaacaaacttacaagaaaaaaacaaacaaccccatcaaaaaatgggcaaaggatatgaacagacacttctcaaaagaagygcagccaacagacatatgaaaaaatgctcctcatccctggtcattagagaaatgcaaatcaaaattacaatgagataccatcttacaccagttagattgg

SEQ ID NO: 369594 - DNA, 201 bp, Homo sapiens
aattattaatgatctatgtgtgttagaaaagaatgtttaggccaggtgtggtggctcacgcttgtaatcccagcactttgggaggctgaggcgggtggatsagttgaggtcaggagttggagaccagcctggccaatgtggtgaaaccttgtctctactaaaaaattacaaaaattagccggccgtggaggcgtgtgccta

SEQ ID NO: 369595 - DNA, 201 bp, Homo sapiens
aaagccataattgacatatgggatctaattaaactaaagagtttctgcacagcaaaagaaactatcatcagagtgaacaggcaacctacagaataggagaraatttttgcaatctatccatctgacaaagggctaatatctagaatctacaaagaatgtaaacaaacttacaagaaaaaaacaaacaaccccatcaaaaaa

SEQ ID NO: 369596 - DNA, 201 bp, Homo sapiens
ctttatgtctaaaacaccaaaagcaatggcaacaaaagccataattgacatatgggatctaattaaactaaagagtttctgcacagcaaaagaaactatcrtcagagtgaacaggcaacctacagaataggagaaaatttttgcaatctatccatctgacaaagggctaatatctagaatctacaaagaatgtaaacaaac

SEQ ID NO: 369597 - DNA, 201 bp, Homo sapiens
attgggatatcataatgtatgaatgacttaaaagacattttaattttaattaaaattaaatttaaaaattaaattaaaattaaaattaaaattaaattaawtttaattttaataaatacaaaaaatgtacctcttctgttcttccatcccaactggaataaattaagtttagaatactttaaaaattattattctgtcttc

SEQ ID NO: 369598 - DNA, 201 bp, Homo sapiens
ctcacttaattgcatcttgatgaatttcagtacacaaagtcaccatattgtaggtatatctacaaaggtgttgttatactggaccagatgcagtggcttaygcctgtaatcccagcactttgggaggctcaggtgggaagatcacttcaggccaggagtttgataccagtctgggcaacagtgagaccctgtctctacaaa

SEQ ID NO: 369599 - DNA, 201 bp, Homo sapiens
tacaggcacgcaccaccatgctcagctaatttttatattattaatagagacagagtttcactatgttggccaggctggtctcgaactcctgacctcaagtgatccacctgtctcggcctcccaaagtcctgggattacaggtgtgagccactgcacctggccctgatttttataaattgattttgtatcctgaaacttcgc

SEQ ID NO: 369600 - DNA, 201 bp, Homo sapiens
ccaagacaatcttgggcatgaagaacaaagctggaggcattatgctacctgacttctaactatactacaaggctacagtaaccaaaacagcatggtacttstaccaaaacagatatgtagacaaaaggaacagaatgtaggcctcagaaataacaccacacagctacaaccatctgatctttgacaaacctgacacacaca

SEQ ID NO: 369601 - DNA, 201 bp, Homo sapiens
gattacagtattgggatatcataatgtatgaatgacttaaaagacattttaattttaattaaaattaaatttaaaaattaaattaaaattaaaattaaaattaaattaaatttaattttaataaatacaaaaaatgtacctcttctgttcttccatcccaactggaataaattaagtttagaatactttaaaaattattat

SEQ ID NO: 369602 - DNA, 201 bp, Homo sapiens
aatactgagggacagctctacgttttattctttcatttactctgatttaaccaatccatttattaatttgttctgttaacacaatactaacatatttttgygaacacatttttatagacatccataattatttccttacaataaattaaaaaggaaataactaggtgcgagaggtcatgtgcatttttaggctttcaatat

SEQ ID NO: 369603 - DNA, 201 bp, Homo sapiens
acctatttacccaatcttacacagttttcagtttccagcctatctactcagtaccctactttattttgtttttcttagactgtccttgttttaaaactgtgatcttatttcaaccaaggtatagctgttcttagcttcctttgcatgctgagcctgtctttcttcacagtgaggaggaacccctgactactctttcctgga

SEQ ID NO: 369604 - DNA, 201 bp, Homo sapiens
cctcccaagtagctgggattacaggcacgcaccaccatgctcagctaatttttatattattaatagagacagagtttcactatgttggccaggctggtctygaactcctgacctcaagtgatccacctgtctcggcctcccaaagtcctgggattacaggtgtgagccactgcacctggccctgatttttataaattgatt

SEQ ID NO: 369605 - DNA, 201 bp, Homo sapiens
atttatagattcaatgctatccccatcaagctaccattgactttcttcacagaattggaaaaaaactactttaaacttcatatggaaccaaaaaagagccygcgtagccaagacaatcttgggcatgaagaacaaagctggaggcattatgctacctgacttctaactatactacaaggctacagtaaccaaaacagcatg

SEQ ID NO: 369606 - DNA, 201 bp, Homo sapiens
taataaaatagagtgatctgaactagcctggggtggtgagggaaagtctctttgatgataaaactctttaattgtttttttccttagtttgagagaaaaacagtttacatgaataaataaacgaatgatgacctcatatgatgataagtactatgaggaaaattaaactaagtaatgcaatattggttggttccaagagca

SEQ ID NO: 369607 - DNA, 201 bp, Homo sapiens
gacctatttacccaatcttacacagttttcagtttccagcctatctactcagtaccctactttattttgtttttcttagactgtccttgttttaaaactgtgatcttatttcaaccaaggtatagctgttcttagcttcctttgcatgctgagcctgtctttcttcacagtgaggaggaacccctgactactctttcctgg

SEQ ID NO: 369608 - DNA, 201 bp, Homo sapiens
ttcactttgtcacccaggctggagtgcagtggcatgatctcggctcacggcaacctccacctcccaggttcaagcgattcttgtgcctcagcctcccaagyagctgggattacaggcacgcaccaccatgctcagctaatttttatattattaatagagacagagtttcactatgttggccaggctggtctcgaactcctg

SEQ ID NO: 369609 - DNA, 201 bp, Homo sapiens
atttggaagaattgcagttccaaagatccacaggattttatttacaaaaagtgaatcagaaagcacagggcataaattgcagatatgaaactcttaaaagyttattttcctatatattgtattacaaatgcagtttagagcctgttatattcttgtttagtaggaaacagtggtatttggagaacggaatagtaagtggtt

SEQ ID NO: 369610 - DNA, 201 bp, Homo sapiens
aatccagcagcacatcaaaaagcttatccatcacaatcaagtggcttcattgctggaatgcaaggctggttcaacatacacaaatcgataaacgtaattcrtcacataaacaaaaccaatgacaaaaaacacatacctcaatagatgcagaaaaggccttcaataaaattcagcaccccttcatgctaaaaactctcaata

SEQ ID NO: 369611 - DNA, 201 bp, Homo sapiens
agtttcactttgtcacccaggctggagtgcagtggcatgatctcggctcacggcaacctccacctcccaggttcaagcgattcttgtgcctcagcctcccragtagctgggattacaggcacgcaccaccatgctcagctaatttttatattattaatagagacagagtttcactatgttggccaggctggtctcgaactc

SEQ ID NO: 369612 - DNA, 201 bp, Homo sapiens
actggcaaaccgaatccagcagcacatcaaaaagcttatccatcacaatcaagtggcttcattgctggaatgcaaggctggttcaacatacacaaatcgayaaacgtaattcatcacataaacaaaaccaatgacaaaaaacacatacctcaatagatgcagaaaaggccttcaataaaattcagcaccccttcatgctaa

SEQ ID NO: 369613 - DNA, 201 bp, Homo sapiens
ttctactatcaaggtgtaattctttgaagagtatctgtctcctcccctgtcctctatgatccatgagaacagtgaccttgtgtgttttgttcattcctcarttctccagtgggtaggcattcaatatagttttcttaaatccagtaataataaaagcaatgatgatcatagaaagcactccctttgtgcccagactgggtt

SEQ ID NO: 369614 - DNA, 201 bp, Homo sapiens
aaataaataaataggacctaattaaataaaagaaacttcagtacattaaaagaaataactatcagaataaatagacaacccacagagtgggagaaaatatytgcaaactatacatctagcaaaggactaatatctagaatctacaatgaactcaagtacatcaacaagaaaaaaaaatcccatcaaaatgtgggcaaataa

SEQ ID NO: 369615 - DNA, 201 bp, Homo sapiens
tgttttttgagacacagtttcactttgtcacccaggctggagtgcagtggcatgatctcggctcacggcaacctccacctcccaggttcaagcgattcttstgcctcagcctcccaagtagctgggattacaggcacgcaccaccatgctcagctaatttttatattattaatagagacagagtttcactatgttggccag

SEQ ID NO: 369616 - DNA, 201 bp, Homo sapiens
ttgttttttgagacacagtttcactttgtcacccaggctggagtgcagtggcatgatctcggctcacggcaacctccacctcccaggttcaagcgattctygtgcctcagcctcccaagtagctgggattacaggcacgcaccaccatgctcagctaatttttatattattaatagagacagagtttcactatgttggcca

SEQ ID NO: 369617 - DNA, 201 bp, Homo sapiens
tgtttctattttactgttttcctgtttttctatttttttcttcttgccttttctttggattagttgaagaaatttttcttcctctcttcagttttttttttctattatatggttttctattgaagttataacaaattactaccaagttagtcacttaaacaatacaaatttatgatcttacagttctgtcagaagtccaat

SEQ ID NO: 369618 - DNA, 201 bp, Homo sapiens
gaatgctactgatttttataaattgtttttgtttgttcgtttgttttttgagacacagtttcactttgtcacccaggctggagtgcagtggcatgatctcrgctcacggcaacctccacctcccaggttcaagcgattcttgtgcctcagcctcccaagtagctgggattacaggcacgcaccaccatgctcagctaattt

SEQ ID NO: 369619 - DNA, 201 bp, Homo sapiens
gccaggctggtctcgagctcctgacctcaagtgatccacttgcctcggcttccccaagtgctgggattacaggcatgagtcaaagttgtttttaacagagytttcaaagacagtttcataattactgaagaacaaaattttattccatgaaatgaaatgcttttcagtttccaactttatgacgtttctcctaatagcttt

SEQ ID NO: 369620 - DNA, 201 bp, Homo sapiens
aagtagaggaattcctgaaagattttcatttattctgaagcctgtagaggccctaaatctggggagaacctagcatattctaggaattcaaggaagtctartttggctctagcctacaatgcaaagaggaaagtagcctacaaggtaactaaagagattgcttaggccagagtatgaaggccacattaactagtttatatt

SEQ ID NO: 369621 - DNA, 201 bp, Homo sapiens
tgtgagtaacttggattacaggcatgtgccaccatgcctggctaatttttgtgtttttagtggagacagggtttcaccatgttggccaggctggtctcgarctcctgacctcaagtgatccacttgcctcggcttccccaagtgctgggattacaggcatgagtcaaagttgtttttaacagagttttcaaagacagtttc

SEQ ID NO: 369622 - DNA, 201 bp, Homo sapiens
ctcaataagcagctgaagatggaggttgtttgctctgttggtgaggcttcctgaccactgcagtttatctaatcagcttctgtcttcatctagtttgttayagttgaggcttccaaattctggaatcacctttatattgtgaagcagagatagggaaccatagtttagcatgtttctcatacacctcatttaagatgaagc

SEQ ID NO: 369623 - DNA, 201 bp, Homo sapiens
acctggtagtctaaaataggaccattcagaaattttcttctccttcaagtgatctatttctactatcaaggtgtaattctttgaagagtatctgtctcctyccctgtcctctatgatccatgagaacagtgaccttgtgtgttttgttcattcctcagttctccagtgggtaggcattcaatatagttttcttaaatccag

SEQ ID NO: 369624 - DNA, 201 bp, Homo sapiens
tttgaactaaggggattcatgaaaaagctgcagctagcaacatatttaaatggcaagtgtgaatgctttcttcctgagattgggaacaaggctaggatgtstgctctcacaattttatacaacactggaatggaagttctagctggtacagtcaggcaagaaataaatgaaagacatctagaccggagaggataaaactgc

SEQ ID NO: 369625 - DNA, 201 bp, Homo sapiens
ttgtatatgaccagagaaaggggtcttgttccattcttctgtgtataaatacccagtttttccagtaccatttattgaagaggctgtcttctccaatataygttcttggaaactttgttgaaaatgagttcattgtagatgtatggatttgtttcagggttctctattctgttccattgatctatgtgtctgtttttatgc

SEQ ID NO: 369626 - DNA, 201 bp, Homo sapiens
tgaagatacacatttctgcccagcacagtggctcacacctgtaatcccaacactttcggaggctgaggtgagagaatcacttgagcccaggagtttgagascagcctgggcaacatggcaagacccagtctctaaagaaatacaaaaattagccaggtgtagtggcatgtacctgtggtctcagctactccaaaggctgag

SEQ ID NO: 369627 - DNA, 201 bp, Homo sapiens
ttatagataggtaggtagatagatgatagatagatagatagatagatagatagatagatagaatagataggattatagcctaggatggcagcatgagaaayatggttagattgactgccctcaagcttatgttcaaggtttccattagcatgagagaggttaatactgcagatattattagtcttggctcagcccttaatg

SEQ ID NO: 369628 - DNA, 201 bp, Homo sapiens
agagggaatccttcctaactcataaaatgaggccagcatcatcctgataccaaaacctggaagagacacaacaaaaaaagaaaatttcaggccaatatccstgatgaacatctatgagaaaatccacaataaaatactggcaaaccgaatccagcagcacatcaaaaagcttatccatcacaatcaagtggcttcattgct

SEQ ID NO: 369629 - DNA, 201 bp, Homo sapiens
aatagcttaccaaccaaaaaaagtccaggaccagacagattcacagccaaattctaccagaggtacaaagaggagctggtaccattccttctgaaactgtyccaaacaatagaaaaagagggaatccttcctaactcataaaatgaggccagcatcatcctgataccaaaacctggaagagacacaacaaaaaaagaaaat

SEQ ID NO: 369630 - DNA, 201 bp, Homo sapiens
acattcttctcagcacctcatcacacttattctaaaattgaccacataattggaagtaaaacactcctgaccaagtgcaaaagaatggaaattataacagyctctcagaccacagtgcaatcaaattagaactcaggattaataaactcactcaaaactgcacaaaatacatggaaactgaacaacctgctcctgaatgac

SEQ ID NO: 369631 - DNA, 201 bp, Homo sapiens
tttgtcaaagatcagatggttgtaggtgtgtgggtttatatctgggctctctatcctgctccattggtctgtgtgtctgtttttataccagtaccatgttgtttttggttactgtagccttgtactacagtgtgaagttggacaatatgattcctccagctttgatctttttgcttagggttcccttggcaattcaggctc

SEQ ID NO: 369632 - DNA, 201 bp, Homo sapiens
ctcttttccagataggcaagctaaggttccatgagattaagttgtttctcctaatttggaatggaaattgaggatgcaaaccctgtttgtttgtttgtttktttttaatctccattctgttccctctatactctattgccctaatagcaatagccacaaaaaagtcacatggcacatgattagtaacaattccataggaag

SEQ ID NO: 369633 - DNA, 201 bp, Homo sapiens
agcctggccaacatggtgaaaacccatctctactaaagatacaaaaaattagccgggtgtggtggcacatgcctgtaatcccagctactcgggaggctgargcaggagaatagcttgaactcaggaggtggaggtggcagtgagctgagatcacgccactgcactcctgcctgtcctgcctgggcgactgcatgagactct

SEQ ID NO: 369634 - DNA, 201 bp, Homo sapiens
ttgtatatggtgtaaggaaggggtccagttttagtcttctgtatatagctagcccgttatcccagaatcatttattgaatagggagtcctttccccattgyttgtttttgtcagctttgtcaaagatcagatggttgtaggtgtgtgggtttatatctgggctctctatcctgctccattggtctgtgtgtctgtttttat

SEQ ID NO: 369635 - DNA, 201 bp, Homo sapiens
agttactgcaacctcagcctcccgagtagctgggactacaggtacatgccaccatgcccagctaatttttgtatttttagtagagacagggtttcaccatrttggtcaggctggtctcaaactcctgacctcagatgatctacccacctcggcctcccaaagtgctgggattataggcatgagccactgtgcccagccaat

SEQ ID NO: 369636 - DNA, 201 bp, Homo sapiens
agttcgagactagcctggccaacatggtgaaaacccatctctactaaagatacaaaaaattagccgggtgtggtggcacatgcctgtaatcccagctactygggaggctgaggcaggagaatagcttgaactcaggaggtggaggtggcagtgagctgagatcacgccactgcactcctgcctgtcctgcctgggcgactg

SEQ ID NO: 369637 - DNA, 201 bp, Homo sapiens
gctcaaggtttgtgagtgcaccaatcgacactctgtatctagctgctctggtggggccttggagaatctttatgtctagctcagggatttaaatacaccartcagcacccagtgtttagcttaaggtttgcgattgcaccaatggacactctgtatctagctgctcttgtggggccttggagaacctttatgtctagctaa

SEQ ID NO: 369638 - DNA, 201 bp, Homo sapiens
gtgggtcagaaaacagaagaatagggggaaatatgggcaagagcttctattgtgatttccttgggaaggaatgggtgaggaagggctaacaagttcaggaytggctagtttgaataatttcagtggactgtagggtgtacagggctgttctaagttgtctgaccctgtccctgaggaaattagggcaggggaatattgatc

SEQ ID NO: 369639 - DNA, 201 bp, Homo sapiens
gcatctgttattttttgactttttagtaatagccattctgactggtgtgagatggtatctcactgtggttttgatttgcatttctctaatgatcagtgatkttgagctttttttcatggttgttggctgcatgtgtgtcttcttttgaaaattgtctgttcatgtccttcacccactgtgttatggggttgtttttatttt

SEQ ID NO: 369640 - DNA, 201 bp, Homo sapiens
catgatctcgagttactgcaacctcagcctcccgagtagctgggactacaggtacatgccaccatgcccagctaatttttgtatttttagtagagacaggrtttcaccatattggtcaggctggtctcaaactcctgacctcagatgatctacccacctcggcctcccaaagtgctgggattataggcatgagccactgtg

SEQ ID NO: 369641 - DNA, 201 bp, Homo sapiens
gaagtcaggagttcgagactagcctggccaacatggtgaaaacccatctctactaaagatacaaaaaattagccgggtgtggtggcacatgcctgtaatcscagctactcgggaggctgaggcaggagaatagcttgaactcaggaggtggaggtggcagtgagctgagatcacgccactgcactcctgcctgtcctgcct

SEQ ID NO: 369642 - DNA, 201 bp, Homo sapiens
tgcatcagatgattgccattgaaaagatagctacaatccccaagaggacagtgcacactgcacatgcagggccacacagggaaacatgagggtgggtcagraaacagaagaatagggggaaatatgggcaagagcttctattgtgatttccttgggaaggaatgggtgaggaagggctaacaagttcaggattggctagtt

SEQ ID NO: 369643 - DNA, 201 bp, Homo sapiens
gatgggcatttaggttacttttatgtctttactattgtgaatagtgcttcagtgaacatttgcatgcgtgtttatggtagaatgatttatattcctctggrtatgtacccagtaatgggattgctgtgtcaaatggtatttatggctttaggtctttgaggaatcgccacactgtcttccacaatagctgaactaatttac

SEQ ID NO: 369644 - DNA, 201 bp, Homo sapiens
tggcatgatctcgagttactgcaacctcagcctcccgagtagctgggactacaggtacatgccaccatgcccagctaatttttgtatttttagtagagacrgggtttcaccatattggtcaggctggtctcaaactcctgacctcagatgatctacccacctcggcctcccaaagtgctgggattataggcatgagccact

SEQ ID NO: 369645 - DNA, 201 bp, Homo sapiens
gtgaaatgacttggccaggatcaccccaccaatgagtggcagagagctgaaatttgaacccaagtttgtctaagtccaaaaccagtgtttctatacagcawactaggtcaacgatgacaaaagtgtttcaattcacgtgccagtttttgatttattgataaaactacaaccaaatagaaaaaaaaaatcaccatgatggat

SEQ ID NO: 369646 - DNA, 201 bp, Homo sapiens
ttacttcactgcaattctgtaaccacactgctgcctgagtaatctttttaaaatgtaaatctagtcatattatgcccctgcttaacactgttctgtggctyccaatgtctcctgagtagttaaaactcctcagacaacactttacatggtcttgcccctttctgtctatgtagcagaatttactgaatctttgttttattt

SEQ ID NO: 369647 - DNA, 201 bp, Homo sapiens
ggctccagtgtctgtttttcaacttctgtccatgtcttttcattatttagcttccacttgtaagtgagaacatgtggtatttggttttctgttccttcatkagtttgctaaggataatggcctccagttccattcgtgttcctataaaggacatgatctcattttttttgttaatggctgcagagtattccatggtgtata

SEQ ID NO: 369648 - DNA, 201 bp, Homo sapiens
tcactacatgttgtaagggtaacgttcatgaacttttgtttaattgtatatgtattggatgtgtactggattctgatgtaaaatatatttcttactgtgastcctgatccacaaagttcaagacacagggtactttgaataatatatactttatttgttttatcttattattttatttttatttatttattttttttgaga

SEQ ID NO: 369649 - DNA, 201 bp, Homo sapiens
actactcctgccaacccttgcttcatcactgctttgttgccctcatttttcccattttgccagaaagcagtgaaatgtcatcctagaccctcaccatctgrtggttgggagcaactgggctaagttacacatgcttatggagtctttgattgataattttattcaaacttgatatggaaaacatatatcacatttcatagg

SEQ ID NO: 369650 - DNA, 201 bp, Homo sapiens
ccaggagaacttccccaaactagcaaaacagaccaacattcaaattcaggaaatacagagaacaccacaaagatgctcctcgagaagagcaaccccaagayacataatcattagattcaccaaggttgaaatgaacaaaaaaatgttaagggcagccagagagaaaggttgggttacccacaaagagaagcccattcagac

SEQ ID NO: 369651 - DNA, 201 bp, Homo sapiens
gtggcatgatctcgagttactgcaacctcagcctcccgagtagctgggactacaggtacatgccaccatgcccagctaatttttgtatttttagtagagamagggtttcaccatattggtcaggctggtctcaaactcctgacctcagatgatctacccacctcggcctcccaaagtgctgggattataggcatgagccac

SEQ ID NO: 369652 - DNA, 201 bp, Homo sapiens
tcacagtattgcctagatcatattaggcactcaaatgtttgcggaatgaatacaaaataagaaagaatgcgctaagtggtctgagagaatacaaagtaatwgggggcaaattgtacaattgagtccctgcttctcagtcagagtcagaaaagttgtcatgaagaaaatggaatagaatttcaatagttagaattctatgac

SEQ ID NO: 369653 - DNA, 201 bp, Homo sapiens
cctccacccttaagaaggctccagtgtctgtttttcaacttctgtccatgtcttttcattatttagcttccacttgtaagtgagaacatgtggtatttggytttctgttccttcattagtttgctaaggataatggcctccagttccattcgtgttcctataaaggacatgatctcattttttttgttaatggctgcagag

SEQ ID NO: 369654 - DNA, 201 bp, Homo sapiens
tgtccaagctggagtgcagtggcatgatctcgagttactgcaacctcagcctcccgagtagctgggactacaggtacatgccaccatgcccagctaatttktgtatttttagtagagacagggtttcaccatattggtcaggctggtctcaaactcctgacctcagatgatctacccacctcggcctcccaaagtgctggg

SEQ ID NO: 369655 - DNA, 201 bp, Homo sapiens
agagtctagttctgttgtccaagctggagtgcagtggcatgatctcgagttactgcaacctcagcctcccgagtagctgggactacaggtacatgccaccwtgcccagctaatttttgtatttttagtagagacagggtttcaccatattggtcaggctggtctcaaactcctgacctcagatgatctacccacctcggcc

SEQ ID NO: 369656 - DNA, 201 bp, Homo sapiens
tgcttggagagcttctggacttcactgtttgggcttcacccctggaaattctgaatgaaaggaatggagctcggtatttgcattttaaataagcctatagrttattttaattcacccctatgtttgagagggttctagttaattcacttaactaccatatcttttaagcacttatggataacggactggaggatagaaaga

SEQ ID NO: 369657 - DNA, 201 bp, Homo sapiens
acttaagaactgtatttaatataatttatcccactttatataggcacttataaaatcatttgccaaagactctaggattattttagattaatttattttgkataaattggttaattaataactatggaaaatccatataaaataaatagacacaatcattggactaaaagtgaccttacagggggcatttaagaatctcca

SEQ ID NO: 369658 - DNA, 201 bp, Homo sapiens
tctaggtctgtgcttgcttttcttttctcttttcttttctttcttcttcttttttttttaaacagaaatttctcctgggattgcttggagagcttctggamttcactgtttgggcttcacccctggaaattctgaatgaaaggaatggagctcggtatttgcattttaaataagcctatagattattttaattcaccccta

SEQ ID NO: 369659 - DNA, 201 bp, Homo sapiens
gctgccttctgaatctgaaaagtaacaagcttaatgacttaagaactgtatttaatataatttatcccactttatataggcacttataaaatcatttgccraagactctaggattattttagattaatttattttggataaattggttaattaataactatggaaaatccatataaaataaatagacacaatcattggact

SEQ ID NO: 369660 - DNA, 201 bp, Homo sapiens
ttaactgacagttggaagcagcagcagcctcttaactttgaaaggatcaatagcctctctagatggatttaattgtagccaagggttgttacacttccaasggaactccagtctctgaatgggggaatctgtggcttctgtggaaggagccagccatgacctgattgattacccagattttttggggggaagtctcaatgt

SEQ ID NO: 369661 - DNA, 201 bp, Homo sapiens
tttctgtgaagcaggaaacaaaattgctgagagaaaacatgtaattgaggatggagccttgaggataatgacgaacattggcaatgccagctgtggaggawaagtgggcaacagacatgataaattatagataggtaggtagatagatgatagatagatagatagatagatagatagatagatagaatagataggattata

SEQ ID NO: 369662 - DNA, 201 bp, Homo sapiens
gtgtgtgtgtgtgtgtgtgtttgtgtgtgtgtaggaatttgagggagctgaatctcttgatatcagtcttaatttttttttctgtgaagcaggaaacaaarttgctgagagaaaacatgtaattgaggatggagccttgaggataatgacgaacattggcaatgccagctgtggaggaaaagtgggcaacagacatgataa

SEQ ID NO: 369663 - DNA, 201 bp, Homo sapiens
cacctgaaattttactatttttctttaaatccattcagtgctatacttgaacaaatttattttactgctataaatggaaaactacttgttttaaactattsttaattgaaggtaataaaatacaatgaaaaccagtttaaaaatcctagctaggtaacatcttatggcaaagcttctgacaccaaggcctgtccctctttg

SEQ ID NO: 369664 - DNA, 201 bp, Homo sapiens
tatttaggaacaaggaagttgaagcttggagcggtagagtgagaaataaggaatatgtgggagagaaagtaaagtgaaaaaaattagatcagatttttttkttgttgttgttagcactaaactggtttgcttcaggcccctagccagggttgattttgaaacctatagcagagctattttgaatactctgtctgaaaggtc

SEQ ID NO: 369665 - DNA, 201 bp, Homo sapiens
tttttagtagagatgggggtttcactatgttggccaggctggtcttgaactcctgacctcgtgatccttttgcctcaacctcccaaagtgctgggattacrggtgtgatccaccacgcccagccattttgacttcttagtagccattctgactggtgtgagatggtaccacattgtggttttgatttgcatttctctatac

SEQ ID NO: 369666 - DNA, 201 bp, Homo sapiens
tagaataaccaatgcagagaagaacatgaatgacctgatggagctgaaaagcatagcacaagaactttgtgaagaatacacaactatcaatagtcaaatcratcaagtagaagaaaggatgtcagtgactgaagatcaacttaatgaaataaaaagagaagaccagattagagaaaaaagaataaaaagaaatgaacaaag

SEQ ID NO: 369667 - DNA, 201 bp, Homo sapiens
tccctgcaatctcctcctcccgggttcaagcaattctcctgcctcagactctcaaatagctgggactacaggcgcctgccaccatgcctggctaatttttktatttttagtagagatgggggtttcactatgttggccaggctggtcttgaactcctgacctcgtgatccttttgcctcaacctcccaaagtgctgggatt

SEQ ID NO: 369668 - DNA, 201 bp, Homo sapiens
taagatgaattaaagacttaaatgtaaaacccaaaactataaaaaccctagtagaaaatctagtcaatagcattcaggacataggcatgggcaacaatttygtgaacaaaatgtgaaaagcaattacaacaaaaacaaaaattgccagattggatctaattaaactaaagagcttctgtacagcaaaatgaactatcatca

SEQ ID NO: 369669 - DNA, 201 bp, Homo sapiens
tgagacagagtctagttctgttgtccaagctggagtgcagtggcatgatctcgagttactgcaacctcagcctcccgagtagctgggactacaggtacatrccaccatgcccagctaatttttgtatttttagtagagacagggtttcaccatattggtcaggctggtctcaaactcctgacctcagatgatctacccacc

SEQ ID NO: 369670 - DNA, 201 bp, Homo sapiens
gatctcggctccctgcaatctcctcctcccgggttcaagcaattctcctgcctcagactctcaaatagctgggactacaggcgcctgccaccatgcctggstaatttttgtatttttagtagagatgggggtttcactatgttggccaggctggtcttgaactcctgacctcgtgatccttttgcctcaacctcccaaagt

SEQ ID NO: 369671 - DNA, 201 bp, Homo sapiens
tgtataccttaataattgcacatatagctgggagaactgatagccacatggagaaaattgacacgggaccccttccttataccgtatacaaaaattaactyaagatgaattaaagacttaaatgtaaaacccaaaactataaaaaccctagtagaaaatctagtcaatagcattcaggacataggcatgggcaacaatttt

SEQ ID NO: 369672 - DNA, 201 bp, Homo sapiens
gattcctgatattaatctctgttcctataaaatttcctagttttaaattttattttacatattttaatgaaaaatttaaaattaaatttgtgtctaattaactaatgctttggggagaataagaactttatattggtatttccaatattcaaaatttattaaatctttgtccactatattcctggaacaaaatgacacata

SEQ ID NO: 369673 - DNA, 201 bp, Homo sapiens
tgcgatctcggctccctgcaatctcctcctcccgggttcaagcaattctcctgcctcagactctcaaatagctgggactacaggcgcctgccaccatgccyggctaatttttgtatttttagtagagatgggggtttcactatgttggccaggctggtcttgaactcctgacctcgtgatccttttgcctcaacctcccaa

SEQ ID NO: 369674 - DNA, 201 bp, Homo sapiens
agattcctgatattaatctctgttcctataaaatttcctagttttaaattttattttacatattttaatgaaaaatttaaaattaaatttgtgtctaattaactaatgctttggggagaataagaactttatattggtatttccaatattcaaaatttattaaatctttgtccactatattcctggaacaaaatgacacat

SEQ ID NO: 369675 - DNA, 201 bp, Homo sapiens
gtgcgatctcggctccctgcaatctcctcctcccgggttcaagcaattctcctgcctcagactctcaaatagctgggactacaggcgcctgccaccatgcytggctaatttttgtatttttagtagagatgggggtttcactatgttggccaggctggtcttgaactcctgacctcgtgatccttttgcctcaacctccca

SEQ ID NO: 369676 - DNA, 201 bp, Homo sapiens
cagattcctgatattaatctctgttcctataaaatttcctagttttaaattttattttacatattttaatgaaaaatttaaaattaaatttgtgtctaattaactaatgctttggggagaataagaactttatattggtatttccaatattcaaaatttattaaatctttgtccactatattcctggaacaaaatgacaca

SEQ ID NO: 369677 - DNA, 201 bp, Homo sapiens
gtggtgcgatctcggctccctgcaatctcctcctcccgggttcaagcaattctcctgcctcagactctcaaatagctgggactacaggcgcctgccaccaygcctggctaatttttgtatttttagtagagatgggggtttcactatgttggccaggctggtcttgaactcctgacctcgtgatccttttgcctcaacctc

SEQ ID NO: 369678 - DNA, 201 bp, Homo sapiens
tatcacaagatcagaaaactaaacactgcatgttctcactcataagtctgagttgaacaatgaaaacacatggacacagggaggggaacatcacacactgkggcctgtcagggggtgggaggctaggggagggatgacattaggagaaatacctaattatatgtgataggttgatgggtgcagctaaccagcagggcacgt

SEQ ID NO: 369679 - DNA, 201 bp, Homo sapiens
tcagattcctgatattaatctctgttcctataaaatttcctagttttaaattttattttacatattttaatgaaaaatttaaaattaaatttgtgtctaattaactaatgctttggggagaataagaactttatattggtatttccaatattcaaaatttattaaatctttgtccactatattcctggaacaaaatgacac

SEQ ID NO: 369680 - DNA, 201 bp, Homo sapiens
ggagtgcagtggtgcgatctcggctccctgcaatctcctcctcccgggttcaagcaattctcctgcctcagactctcaaatagctgggactacaggcgccygccaccatgcctggctaatttttgtatttttagtagagatgggggtttcactatgttggccaggctggtcttgaactcctgacctcgtgatccttttgcc

SEQ ID NO: 369681 - DNA, 201 bp, Homo sapiens
agggggagtggggagggatagcattaggagatatacctaatgctaaatgacgagtcaatgggtgcagcacaccagcatggcacatgtatacatatgtaacmaacctgcacattgtgcgcatgtaccctaaaacttaaagtataataataaaaaaaaattaagaaaaaaatagaaaagaaagtgtggtgcatatacgccatg

SEQ ID NO: 369682 - DNA, 201 bp, Homo sapiens
tagtagaaataatagcagtgaaagcttagagacaggaaagcatctaaataattaaaagaactgattagtgtgaacatctttgtggctagttcaaattgttgtgttgtcattttagtgaaccacatgcaaagtgaataacacagcctgaatctgtttataaaacatggttcatttgattttattttatactaggcctatagt

SEQ ID NO: 369683 - DNA, 201 bp, Homo sapiens
agaaggtgaaccctgtggaatacttagaatttctataatctgaaatgggaatctgtacttttaaaatgagagattatgtcacataggcattgagattgcawggctgagtaatttagtttgaagcattggatatagtataatagtagacaataaagctagagagatattagcatcataatgagtccaaggctgggaattttg

SEQ ID NO: 369684 - DNA, 201 bp, Homo sapiens
accaaacaccgcatgttctcactcatagatgggaattgaacaatgagaacacatggacacaggaaggggaacatcacactctggggactgttgtggggtakggggagtggggagggatagcattaggagatatacctaatgctaaatgacgagtcaatgggtgcagcacaccagcatggcacatgtatacatatgtaacta

SEQ ID NO: 369685 - DNA, 201 bp, Homo sapiens
gattgtatatatctggttatttttctgtttcttctagagttttcagtttattggcatatagttgcttgtagtagccactaaagatttttttaatttctccwgtaacatttgtaatggattttatttatttatttatttagagacagagtcttgctctgtcaccagactggagtgcagtggtgcgatctcggctccctgcaa

SEQ ID NO: 369686 - DNA, 201 bp, Homo sapiens
aaaggtcaaataagaatccctggagttgaagaccaagcattaacccaagacagcttcttcctttttattccttgtcctagtattaatcctccctaccctcygtgttccaggcctctgaggtattcctccttgtaagacttgtagccatccattctttttcagtctctcaacatcagctccaacttccatatagatatttga

SEQ ID NO: 369687 - DNA, 201 bp, Homo sapiens
taaggtgagggctgagaataattaaccagtggacttagcaacatggaggtagtaagggattttaatgagcagctttggtggaatgaaaacctaattggttrtggatttaaaagagactgtaggagaggaagtaaaaatggaaatggaaaagaaagacatttcttttgaattttgttgtgaagggaacagaccaatgggaac

SEQ ID NO: 369688 - DNA, 201 bp, Homo sapiens
aggacttccattattatgttgaacaacagtagtgataatgggcaccctcgtcatgtttcagatctcagaggaaaggcttttagtttttccccattcagtakgatactagctgtgggtctgtcatatttgtcaaatatgcttttattatgttgaggtatgttacttctatattcagttttttgagagttttcatcatgaagg

SEQ ID NO: 369689 - DNA, 201 bp, Homo sapiens
ggaaccaacccaaatgtccaacaatgatagactggattaagaaaatgtggcacatatacaccatggaatactatgcagccataaaaaatgatgagttcatrtcctttgtagggacatggatgaaattggaaatcatcattctcagtaaactatcgcaaggacaaaaaaccaaacaccgcatgttctcactcatagatggga

SEQ ID NO: 369690 - DNA, 201 bp, Homo sapiens
atatacctaaagctttcgaattcagtctgaatttttaattttttgtaaagctataaatatttattctttcctactagggaatttaggaaaatgtaaaaggscaagagtaatagcaggaatctttggaagaacaggatctttatacaaaatattttagcccctcaaatcccaaagaagcctggatattatttttgtgacttt

SEQ ID NO: 369691 - DNA, 201 bp, Homo sapiens
agacacttctcaaaagaagacatttatgcagccaaaagacacatgaaaaaatgctcatcatcactggccatcagagaaatgcaaatcaaaaccacaatgasataccatctcacaccagttagaatggcaatcattaaaaagtcaggatacaacaggtgctggagaggatgtggagaaataggaacacttttacactgttgg

SEQ ID NO: 369692 - DNA, 201 bp, Homo sapiens
cctttacttgtgaggcctctgttctgttccattgatctatactgttttaatttgggacatttacagaaatgatattcattttaaattactattacaagtamaaagttttggagaaacttttaactggccaccatttagccatacttttattatcataataaaattattagtatagattaattacaaatgctttagtgaaat

SEQ ID NO: 369693 - DNA, 201 bp, Homo sapiens
caaaatgggagaaaattttcgcaacctactcttctgacaaagggctaatatccagaatctacaatgaactcaaacaaatttacaagaaaaaaacaaacaaycccatcaaaaagtggacaaagaatatgaacagacacttctcaaaagaagacatttatgcagccaaaagacacatgaaaaaatgctcatcatcactggcca

SEQ ID NO: 369694 - DNA, 201 bp, Homo sapiens
atttatgtctttatccatcttgagttaatttttgtataagatgaaaggaaggggtccagtttctgttttctgcatatggctagccagttttcccaataccrtttattaaatagggaatcctttcaccattgcttgtttttgtcaggtttgtcaaagatcagatggttggagatgtgtgcctttacttgtgaggcctctgtt

SEQ ID NO: 369695 - DNA, 201 bp, Homo sapiens
gacgctcagtgttgacataaattattttaatttttagtaatacaacttaaatatgtccaaatataaaactaaatacaaacttttgcacatacaagtgcatrgctaaaataatttgcaaattcgtagcaaggaaaatataaaacagaatttaacataatagcattaatgtgacagaagatgttatttgccataaaaacaagc

SEQ ID NO: 369696 - DNA, 201 bp, Homo sapiens
gacttaaacgttagacctaaaaccataaaaaccctagaagaaaacctaggcaataccattcaggacataggcataggcgacgacttcatgtctaaaacacyaaaagcaatggcaacaaaagccaaaattgacagatgggatctaattaaactaaagagcttctgcacagcaaaagaaactaccatcagagtgaacaggcaa

SEQ ID NO: 369697 - DNA, 201 bp, Homo sapiens
ggtgctgggaaaactggctagccatatgtagaaagctgaaactggatcccttccttacaccttatacaaaaattaattcaagatggattaaagacttaaaygttagacctaaaaccataaaaaccctagaagaaaacctaggcaataccattcaggacataggcataggcgacgacttcatgtctaaaacaccaaaagcaa

SEQ ID NO: 369698 - DNA, 201 bp, Homo sapiens
caggatcggagaaaagaggtgaatataatggcctccatgttggtgggttggggtgtgacaaattaataattaattttctggtcactagtaaatagagaccytaaaatcatctttaaaaatgagaacttttatttttccgccccataatttgagatctgaaggtaggcatgtgggactggtatggcaactccgtaataccat

SEQ ID NO: 369699 - DNA, 201 bp, Homo sapiens
aactatactacaaggctacagtaaccaaaacagcatggtactggtaccaaaacagagagatagatgaatggaacacaacagagccctcagaaataatgccrcatatctacaactatctgatctttgacaaacctgagaaaaacaagcaatgggaaaaggattccctatttaataagtggtgctgggaaaactggctagcca

SEQ ID NO: 369700 - DNA, 201 bp, Homo sapiens
gaaatgaaaaattctgagaaaatataagtgaaaatgggtccggtttagggttaagaaagttatttctagggcaaaatccaagaaggaaactgtaaataaawattttatttttttaacttcttatagattttaaaatttttgtgtcaaaataagctaaatgaaatttaaaaagaaataataaatttaagtgattaaatgaag

SEQ ID NO: 369701 - DNA, 201 bp, Homo sapiens
tctctcatcttttaaattaacataaaatatgaaatgaaaaattctgagaaaatataagtgaaaatgggtccggtttagggttaagaaagttatttctaggscaaaatccaagaaggaaactgtaaataaaaattttatttttttaacttcttatagattttaaaatttttgtgtcaaaataagctaaatgaaatttaaaaa

SEQ ID NO: 369702 - DNA, 201 bp, Homo sapiens
gctagccagactaataaagaaaaaaagaagattcaaatagacacaataaaaaatgataaaggggatatcacctactaatcccacagaaatacaaactaccrtcagagaatactgtaaacatctctactcaaataaactagaaaatctagaggaaatggataaattcctggacacatacaccctcccaagactaaaccagaa

SEQ ID NO: 369703 - DNA, 201 bp, Homo sapiens
tgaaaatatttgaaaaaaaaaaataacaatacaatgataaaaaatacaaataaaaacaaagcactataacaagtatttacatagcatttgcattgtattasgtgttgtaagtaatttagagatgaattaaaatatactgaaggatatgcataggttatatgcaaatgctatatcattgtatgtaagggacttgagcgtcta

SEQ ID NO: 369704 - DNA, 201 bp, Homo sapiens
aagaagagctaactatcctaaatatatatgcacccaatacaggagcaccaagattcataaagcaagttcttagagacctacaaagagacttagactcccayacaataatagtgggagactttaacactctactctcaatattagacagatcaacgagacagaaaattaacaaggatattcaggacttgaactcaactctgg

SEQ ID NO: 369705 - DNA, 201 bp, Homo sapiens
gatttcttcctgtagagttgtttgagttccttaggtgttctggttattaatcccttgtcagattggtagtttgcaaatattttctcccattctgtgggttstctcttcactttgttgattgttttatttgctgtgcagaaggtttttaacttgatatgatcctgtttgtccgtttttgctttgattgcctatgtttgtggg

SEQ ID NO: 369706 - DNA, 201 bp, Homo sapiens
tacatttatctataataacactgcctgtatacaatcgctattaatatttttgtgtaatatcctggtcacatatatactcatacatatatacacacacacamagagatacatatcctttaaaatatgattctattatattcattgtttagaaatctgttttatcccacttaatatatcttttgcatttttccagatcagttt

SEQ ID NO: 369707 - DNA, 201 bp, Homo sapiens
gatgtactctccaagatgaacttcgtacaaaatataccttaagggcagccagagagaaaggtcgggttaccaacaaagggaagcctgtcaaactaacagcrgatctctctgcagaaaccctacaagccagaagagagtaggggccaatattcaacattcttaaagaaaagagttttcaacccaggatttcatatccagcca

SEQ ID NO: 369708 - DNA, 201 bp, Homo sapiens
tagatttcttcctgtagagttgtttgagttccttaggtgttctggttattaatcccttgtcagattggtagtttgcaaatattttctcccattctgtgggwtgtctcttcactttgttgattgttttatttgctgtgcagaaggtttttaacttgatatgatcctgtttgtccgtttttgctttgattgcctatgtttgtg

SEQ ID NO: 369709 - DNA, 201 bp, Homo sapiens
atatttaacttattctgttgtagaaatataggaaaattacttagtcatttttagaaatgagaaaatataaaagtaaaagtaataaaattacatttatctataataacactgcctgtatacaatcgctattaatatttttgtgtaatatcctggtcacatatatactcatacatatatacacacacacacagagatacatat

SEQ ID NO: 369710 - DNA, 201 bp, Homo sapiens
cccaataatttgttgcatagacgtgattgaacaatcaagtttccaaagctctgtagtatagatcatgattgtacagctttagcctgaaatttataaaataagcaggtgtgatcagttgcttgccctatgccatgaaataaaacacccacacattcaaacaaagcaaaacaaaaaccatcaataaaatacttatagacattt

SEQ ID NO: 369711 - DNA, 201 bp, Homo sapiens
attattagatttcttcctgtagagttgtttgagttccttaggtgttctggttattaatcccttgtcagattggtagtttgcaaatattttctcccattctstgggttgtctcttcactttgttgattgttttatttgctgtgcagaaggtttttaacttgatatgatcctgtttgtccgtttttgctttgattgcctatgt

SEQ ID NO: 369712 - DNA, 201 bp, Homo sapiens
gatatttaacttattctgttgtagaaatataggaaaattacttagtcatttttagaaatgagaaaatataaaagtaaaagtaataaaattacatttatctataataacactgcctgtatacaatcgctattaatatttttgtgtaatatcctggtcacatatatactcatacatatatacacacacacacagagatacata

SEQ ID NO: 369713 - DNA, 201 bp, Homo sapiens
tttacactctcaccaacagtgtaaaagcgtttctatttctccacatcctctccagcatctgttgtttcctgattttttaatgatcatcattctaactggcrtgagatggtatctcattgtggttttgatttgcatttctctaatgaccagtgatgagctttttttcatatgttggctgcataaatgtcttcatttgagaag

SEQ ID NO: 369714 - DNA, 201 bp, Homo sapiens
agctggattattagatttcttcctgtagagttgtttgagttccttaggtgttctggttattaatcccttgtcagattggtagtttgcaaatattttctccyattctgtgggttgtctcttcactttgttgattgttttatttgctgtgcagaaggtttttaacttgatatgatcctgtttgtccgtttttgctttgattgc

SEQ ID NO: 369715 - DNA, 201 bp, Homo sapiens
agatatttaacttattctgttgtagaaatataggaaaattacttagtcatttttagaaatgagaaaatataaaagtaaaagtaataaaattacatttatctataataacactgcctgtatacaatcgctattaatatttttgtgtaatatcctggtcacatatatactcatacatatatacacacacacacagagatacat

SEQ ID NO: 369716 - DNA, 201 bp, Homo sapiens
gtatatgtgccccattttctttatccagtctatcactgatgggcatttgggttggttccaagtctttgctattgtgaatagtgctgcaataaacatacgtrtgcatgtgtctttacaacagaatggtttataatcctttgggtgtatatccagaaatgggattgctgggtcaaatgctatttctggttctagatccttgag

SEQ ID NO: 369717 - DNA, 201 bp, Homo sapiens
agtgggattgctggatcatttttagttctgtgagaaaccttcaaactgttctccatagtggttgttttaatttacattcctaacaacagtgtacaagggtsccctgttctccacatcctcaccagcattttttattgcctgtcttttggataagagccattttaactgggataagatgatatctcattgtagttttgatga

SEQ ID NO: 369718 - DNA, 201 bp, Homo sapiens
aagatatttaacttattctgttgtagaaatataggaaaattacttagtcatttttagaaatgagaaaatataaaagtaaaagtaataaaattacatttatctataataacactgcctgtatacaatcgctattaatatttttgtgtaatatcctggtcacatatatactcatacatatatacacacacacacagagataca

SEQ ID NO: 369719 - DNA, 201 bp, Homo sapiens
tgaagccagctgggttcctgagtctggtggggccttggaggacctttatgtctagctcagggattgtaaatacaccaatcggcactctgtatctagctcarggtttgtaaacacaccaatcagcaccctgtgtctagctcaaggtttgtgagtgcaccaatcgacactctgtatctagctgctctggtggggccttggaga

SEQ ID NO: 369720 - DNA, 201 bp, Homo sapiens
ggatacatgtgcgtaacgtgcaggtttattatgtaggtatacacgtgccatggtggtttgctgcacccatcaccccatcatctacattaggtatttctccyaatgctatccttcccctagccccccaccccgcaacatgccacggtgtgtgatgttcccctccttgtgttctcattgttcaactcccacatatgagtgaga

SEQ ID NO: 369721 - DNA, 201 bp, Homo sapiens
attcttttttatggcttaatggtacttcattgtgtatatgtaccacattttctttattcatctgttgatggacatttaggttgctttcaaatcttagctaytgtaaacagtgctgcaacaaacataggagtgcagatatctcttcaatatactgattcccttttatttgggtatataccctgcagtgggattgctggatca

SEQ ID NO: 369722 - DNA, 201 bp, Homo sapiens
gacccgcccagtccctccgcatatccagcagctctctcactcctaaccacttccgattactcagggtttcgcttccggaatacgtttccaaaagagcaggrtaaacaaattctgcagtgcgtataaactcaagtaacacagaacacacactgtaaggcctccgtaagtgaaaagcggacagatttctactttaaaataaaa

SEQ ID NO: 369723 - DNA, 201 bp, Homo sapiens
tgaaaatggccatactgcctaaggtaatttatagattcaatgccatccccatcaagctaccaatgcctttcttcacagaattggaaaaaactactttaaakttcatatggaaccaaaaaagagcccacatcgccaactcaatcctaagccaaaagaacaaagctggaggcatcacgctacctgacttcaaactatactaca

SEQ ID NO: 369724 - DNA, 201 bp, Homo sapiens
ttattattattattattatactttaagttctgggatacatgtgcgtaacgtgcaggtttattatgtaggtatacacgtgccatggtggtttgctgcacccwtcaccccatcatctacattaggtatttctcccaatgctatccttcccctagccccccaccccgcaacatgccacggtgtgtgatgttcccctccttgtgt

SEQ ID NO: 369725 - DNA, 201 bp, Homo sapiens
tgtgagatggtatctcattgtggtttggatttgcatttctctgatgattagtgatgttgagctttttttcatgtttgttggccacataaatgtcttctttygagaagtgtctgttcatatcctttgcccacttttggatggggttgtttgtttttttcttataaatatgtttaagttccttgtaaattctggatattagac

SEQ ID NO: 369726 - DNA, 201 bp, Homo sapiens
aaccattgctcagtgaaataaaagaggatacaaacaagtggaagaacattccatgctcatgggtgggaagaatcaatatcgtgaaaatggccatactgccyaaggtaatttatagattcaatgccatccccatcaagctaccaatgcctttcttcacagaattggaaaaaactactttaaatttcatatggaaccaaaaaa

SEQ ID NO: 369727 - DNA, 201 bp, Homo sapiens
ttactttgatgttgatgtctgctgattgatcagggttgtttttgccaaaggttgaagtggctgtgtctatttctttttattattattattattattattatactttaagttctgggatacatgtgcgtaacgtgcaggtttattatgtaggtatacacgtgccatggtggtttgctgcacccatcaccccatcatctacat

SEQ ID NO: 369728 - DNA, 201 bp, Homo sapiens
ctcccattcacaattgcttcaaagagaataaaatacgtaggaatccgacttataagggacgtgaaggacctcttcaaggagaactacaaaccattgctcartgaaataaaagaggatacaaacaagtggaagaacattccatgctcatgggtgggaagaatcaatatcgtgaaaatggccatactgcctaaggtaatttat

SEQ ID NO: 369729 - DNA, 201 bp, Homo sapiens
ctttgctattgtaaatagtgctgcagaaaacatatgtgtgcatgtgtctttatagtagaataatttatattcctttgggtatatacccagtaatgggattrctgggtcaaatggtatttctggttctaaatccttgaggaatcaccatactgtcttccacaatggctgaactaatttacattcccaccaacaacgtaaaag

SEQ ID NO: 369730 - DNA, 201 bp, Homo sapiens
cttactttgatgttgatgtctgctgattgatcagggttgtttttgccaaaggttgaagtggctgtgtctatttctttttattattattattattattattatactttaagttctgggatacatgtgcgtaacgtgcaggtttattatgtaggtatacacgtgccatggtggtttgctgcacccatcaccccatcatctaca

SEQ ID NO: 369731 - DNA, 201 bp, Homo sapiens
gatctcattccttgttatggctgcatagtattccatggtgtatatgtaccacattttctttatccagtctatcattgatgggcatttgggttggttccatktctttgctattgtaaatagtgctgcagaaaacatatgtgtgcatgtgtctttatagtagaataatttatattcctttgggtatatacccagtaatgggat

SEQ ID NO: 369732 - DNA, 201 bp, Homo sapiens
accgtgttcttatacaccaataacagacaaacagagagccaaatcatgagtgagctcccattcacaattgcttcaaagagaataaaatacgtaggaatccracttataagggacgtgaaggacctcttcaaggagaactacaaaccattgctcagtgaaataaaagaggatacaaacaagtggaagaacattccatgctca

SEQ ID NO: 369733 - DNA, 201 bp, Homo sapiens
tcttactttgatgttgatgtctgctgattgatcagggttgtttttgccaaaggttgaagtggctgtgtctatttctttttattattattattattattattatactttaagttctgggatacatgtgcgtaacgtgcaggtttattatgtaggtatacacgtgccatggtggtttgctgcacccatcaccccatcatctac

SEQ ID NO: 369734 - DNA, 201 bp, Homo sapiens
atgtccctgcaaaggacatgatctcattccttgttatggctgcatagtattccatggtgtatatgtaccacattttctttatccagtctatcattgatggrcatttgggttggttccatgtctttgctattgtaaatagtgctgcagaaaacatatgtgtgcatgtgtctttatagtagaataatttatattcctttgggt

SEQ ID NO: 369735 - DNA, 201 bp, Homo sapiens
gacggggtttcaccgtgttcttatacaccaataacagacaaacagagagccaaatcatgagtgagctcccattcacaattgcttcaaagagaataaaataygtaggaatccgacttataagggacgtgaaggacctcttcaaggagaactacaaaccattgctcagtgaaataaaagaggatacaaacaagtggaagaaca

SEQ ID NO: 369736 - DNA, 201 bp, Homo sapiens
cccagcactttgggaggccaaggcgggcagatcatttgaggccaggagttcgagaccagcctggccaatatggtaaaaccctgtttctactaaaaatacaraaattagctgggtgtggtggcgcccacctgtaatcccagctactccagaggctaaggtgggagaattgcttgaaccagggaggtggaggttgcagtgaac

SEQ ID NO: 369737 - DNA, 201 bp, Homo sapiens
tcactgcaagctccgcctcccgggttcacgccattctcctgcctcagcctcctgtgtagctgggactacaggcacgcgccaccatgcccggctaatttttrtattttttttagtagagacggggtttcaccgtgttcttatacaccaataacagacaaacagagagccaaatcatgagtgagctcccattcacaattgctt

SEQ ID NO: 369738 - DNA, 201 bp, Homo sapiens
gccatttaaaaggatcattctggctgttgcattaagaatgactatagaggctgggagtggtggctcacacctgtaatcccagcactttgggaggccaaggygggcagatcatttgaggccaggagttcgagaccagcctggccaatatggtaaaaccctgtttctactaaaaatacaaaaattagctgggtgtggtggcgc

SEQ ID NO: 369739 - DNA, 201 bp, Homo sapiens
tgggtggtggtggtgtgggtagaaaagggaagtataaatgtgtaacacatttaccactactgctggtgcctagaggaaggagtggcatcatattgaaaagyatagtgcagcttatagtgctgctttaagctgtggcaggtgaggaagtaaacagtgaagccgcaaccagcacaaaaaggctacaccatgcaattgattcaa

SEQ ID NO: 369740 - DNA, 201 bp, Homo sapiens
gcgatctcgactcactgcaagctccgcctcccgggttcacgccattctcctgcctcagcctcctgtgtagctgggactacaggcacgcgccaccatgcccrgctaatttttgtattttttttagtagagacggggtttcaccgtgttcttatacaccaataacagacaaacagagagccaaatcatgagtgagctcccatt

SEQ ID NO: 369741 - DNA, 201 bp, Homo sapiens
caaaggactgatatcttccacttgccatttaaaaggatcattctggctgttgcattaagaatgactatagaggctgggagtggtggctcacacctgtaatyccagcactttgggaggccaaggcgggcagatcatttgaggccaggagttcgagaccagcctggccaatatggtaaaaccctgtttctactaaaaatacaa

SEQ ID NO: 369742 - DNA, 201 bp, Homo sapiens
tgtctgtgaagtcaaggccagctccactgaaaatgtgaaagaaatagattatattgtttagctccttcctctcctcgccatagtcctgaggtctcagccckgggttcctctattgtcttaacagaacaaagtctctaagcaggtctggtcaatttggtcacactgagacacaaattactattcagaatcaatatattacca

SEQ ID NO: 369743 - DNA, 201 bp, Homo sapiens
ttttttttttgagacggagtttcgctctgtcgcccaggctggagtgcagtggcgcgatctcgactcactgcaagctccgcctcccgggttcacgccattckcctgcctcagcctcctgtgtagctgggactacaggcacgcgccaccatgcccggctaatttttgtattttttttagtagagacggggtttcaccgtgttc

SEQ ID NO: 369744 - DNA, 201 bp, Homo sapiens
tgaaagtttacttaaaagctttagagcaggaacaaaagaaaggaaagtacacttggaagatggccaagcaggtgacttgaaagacaagtgtatggcttgamcttttgacttgaggtttttatatgatggcatacctccagggtcttgcactacttctgaccacttgcccaactcctgagatcttattgagaagccgctcgt

SEQ ID NO: 369745 - DNA, 201 bp, Homo sapiens
gtacaaaaatcacaagcattctttttttttttttttttttttttttttgagacggagtttcgctctgtcgcccaggctggagtgcagtggcgcgatctcgrctcactgcaagctccgcctcccgggttcacgccattctcctgcctcagcctcctgtgtagctgggactacaggcacgcgccaccatgcccggctaatttt

SEQ ID NO: 369746 - DNA, 201 bp, Homo sapiens
tagcaagactttgcctctaaaaaggcggggaaggagtctaatatacagtgtgatagtgttacccatggcaaattcatatgggtctgcagcaacctcagtayctgcctcttcagaagaaagaattcaactgaggaagcataaggcagaaggagagactgaggcaagttttagagcaggagtgaaagtttacttaaaagcttt

SEQ ID NO: 369747 - DNA, 201 bp, Homo sapiens
cttcagcaaagtctcaggatacaaaatcaatgtacaaaaatcacaagcattctttttttttttttttttttttttttttgagacggagtttcgctctgtcrcccaggctggagtgcagtggcgcgatctcgactcactgcaagctccgcctcccgggttcacgccattctcctgcctcagcctcctgtgtagctgggacta

SEQ ID NO: 369748 - DNA, 201 bp, Homo sapiens
ctgggttcaagcgattctcctgcctccaccttgtgagtaacttggattacaggcatgtgccaccatgcctggctaatttttgtgtttttagtggagacagrgtttcaccatgttggccaggctggtctcgagctcctgacctcaagtgatccacttgcctcggcttccccaagtgctgggattacaggcatgagtcaaagt

SEQ ID NO: 369749 - DNA, 201 bp, Homo sapiens
acctctgcctcctgggttcaagcgattctcctgcctccaccttgtgagtaacttggattacaggcatgtgccaccatgcctggctaatttttgtgtttttrgtggagacagggtttcaccatgttggccaggctggtctcgagctcctgacctcaagtgatccacttgcctcggcttccccaagtgctgggattacaggca

SEQ ID NO: 369750 - DNA, 201 bp, Homo sapiens
atttagggtaaggcatcgagtctaataacctgttttgaacaaacattatgtgtttgcattgttcatcatggcatttttcatgttcacagattcacattaaygcgctttattaagagtatggggtggtgtgtatgtgactgtctcaacactgatctgaatctccctagatcttggagtctttttgcttttctgagtggcaga

SEQ ID NO: 369751 - DNA, 201 bp, Homo sapiens
aaagttgtttgtttgtttatgtatttatttatttttgagacacagtctcactctatcaccctggctggagtgcagtggtgtgatctcgggtcactgcaacytctgcctcctgggttcaagcgattctcctgcctccaccttgtgagtaacttggattacaggcatgtgccaccatgcctggctaatttttgtgtttttagt

SEQ ID NO: 369752 - DNA, 201 bp, Homo sapiens
ctagtttgctgaagatgatggcttccagcttcatccatgtccctgcaaaggacatgatctcattccttgttatggctgcatagtattccatggtgtatatrtaccacattttctttatccagtctatcattgatgggcatttgggttggttccatgtctttgctattgtaaatagtgctgcagaaaacatatgtgtgcatg

SEQ ID NO: 369753 - DNA, 201 bp, Homo sapiens
agttaaactataaatttctcccatagttagcttgcctatgcccaggtatgagcaagggcagttagctttgtgaggttagaagcaatatggagtcagttagrttagatttctctcactgttataatttttgcaaaggtggattcacttccagacccagtgtaggtgtcttttctgtgatgccttccttccctactcaaagag

SEQ ID NO: 369754 - DNA, 201 bp, Homo sapiens
gtgctagtttgctgaagatgatggcttccagcttcatccatgtccctgcaaaggacatgatctcattccttgttatggctgcatagtattccatggtgtaratgtaccacattttctttatccagtctatcattgatgggcatttgggttggttccatgtctttgctattgtaaatagtgctgcagaaaacatatgtgtgc

SEQ ID NO: 369755 - DNA, 201 bp, Homo sapiens
ggtgtatgttggatcagcgctcttctatccagttggttaccttctaggtctgtgcttgcttttcttttctcttttcttttctttcttcttcttttttttttaaacagaaatttctcctgggattgcttggagagcttctggacttcactgtttgggcttcacccctggaaattctgaatgaaaggaatggagctcggtatt

SEQ ID NO: 369756 - DNA, 201 bp, Homo sapiens
ccacttatgagtgagaatgtgtagtatttggttttctgttcgtgtgctagtttgctgaagatgatggcttccagcttcatccatgtccctgcaaaggacaygatctcattccttgttatggctgcatagtattccatggtgtatatgtaccacattttctttatccagtctatcattgatgggcatttgggttggttccat

SEQ ID NO: 369757 - DNA, 201 bp, Homo sapiens
ctttttggcagaatttcttttcttttgggtatatacccagtaatggaattgctaggttaaatggtagctctgttttaagttctttgagaaatatccacacygctttccacaatggctggagtaattaatattcccaccaaccgtgtataagcattctctttcctctatagtcttgccagcatgttattttttgacttttta

SEQ ID NO: 369758 - DNA, 201 bp, Homo sapiens
cattgttcacctcccacttatgagtgagaatgtgtagtatttggttttctgttcgtgtgctagtttgctgaagatgatggcttccagcttcatccatgtcyctgcaaaggacatgatctcattccttgttatggctgcatagtattccatggtgtatatgtaccacattttctttatccagtctatcattgatgggcattt

SEQ ID NO: 369759 - DNA, 201 bp, Homo sapiens
tatatatatacctaacacctggtactaacttattatttaaatattttttctatcgaaatgggtcctgcttcttacaaattattttctaagatatagagctrttttataaagtgattcacaagaaagttcagcctaacagtgaccattaaatcagtttgtaactatatatgttgcagattgacatgatttcatcattgatgt

SEQ ID NO: 369760 - DNA, 201 bp, Homo sapiens
aaatggtagttctgttttaagtcctttgaaaaaactccaaactattttctacagtggttgaggtactaatttgcatttccatcaacagtgtataagtgtgttccctttctctacagacttgccagcatatctgtcgttttttgactttttttttaaaaaaaaatcaacttctattttagatacagggggtacacatgcaga

SEQ ID NO: 369761 - DNA, 201 bp, Homo sapiens
atatgtatatatatatatctcttctgaaacatatatataaatatatatttaatatataaaagtatatattaaatatatattatttatttaatatatataawatatataaacatatatattatatatatttcttctaaaaaaatcaggatacatgtgcagaacgtgcaggtttgttacataggtacacatgtgccatggtga

SEQ ID NO: 369762 - DNA, 201 bp, Homo sapiens
caaatggtagttctgttttaagtcctttgaaaaaactccaaactattttctacagtggttgaggtactaatttgcatttccatcaacagtgtataagtgtgttccctttctctacagacttgccagcatatctgtcgttttttgactttttttttaaaaaaaaatcaacttctattttagatacagggggtacacatgcag

SEQ ID NO: 369763 - DNA, 201 bp, Homo sapiens
tgtaacactcaccgcaaaggtctgcagcttcactcctgagccagcgagaccacgaacccaccagaaggaagaaactccgaacacatctgaacatcagaagrgacagactccagatgcgccaccttaagagctgtaacactcactgcgagggtccacggcttcattcttgaagtcggtgagaccaagaacccaccaattccg

SEQ ID NO: 369764 - DNA, 201 bp, Homo sapiens
tccggacgcgctgtcttaagagctgtaacactcaccgcaaaggtctgcagcttcactcctgagccagcgagaccacgaacccaccagaaggaagaaactcygaacacatctgaacatcagaagggacagactccagatgcgccaccttaagagctgtaacactcactgcgagggtccacggcttcattcttgaagtcggtg

SEQ ID NO: 369765 - DNA, 201 bp, Homo sapiens
gaacaactccggacgcgctgtcttaagagctgtaacactcaccgcaaaggtctgcagcttcactcctgagccagcgagaccacgaacccaccagaaggaakaaactccgaacacatctgaacatcagaagggacagactccagatgcgccaccttaagagctgtaacactcactgcgagggtccacggcttcattcttgaa

SEQ ID NO: 369766 - DNA, 201 bp, Homo sapiens
atcctcctagcttaaatgattgtccatattggcagaaatttctcagtgggtcttcaatcctggcaacaataaacaagcaaaatggagggaaaataaaactsggaattctgaggctactttttaaaaaaaataaggtcttagtttttgagaaccttagaatttaacgaaattttattcctaactaaatttaaattcagcctt

SEQ ID NO: 369767 - DNA, 201 bp, Homo sapiens
gaggaacgaacaactccggacgcgctgtcttaagagctgtaacactcaccgcaaaggtctgcagcttcactcctgagccagcgagaccacgaacccaccaraaggaagaaactccgaacacatctgaacatcagaagggacagactccagatgcgccaccttaagagctgtaacactcactgcgagggtccacggcttcat

SEQ ID NO: 369768 - DNA, 201 bp, Homo sapiens
tcaaacacttgtgtctcctaccttgtctgcctgtagcaacattagcaagaaggtagcttctgctttgtcctgtcttccaaatctcatttaggacttccacrtcgcaagaattctagccaaaaatgtgtctggggaatgtagtttttagatttctaatttccatctagaaggaggatagaataaagagttgagagagtcact

SEQ ID NO: 369769 - DNA, 201 bp, Homo sapiens
caagattagtattaaattccttctgttgactttagtaacacttgtgatttcttttatatgttagcattgaacattaaactctcataatctctagttttttkatttgtctttacactaatcatgttttaaagatacacgtctattttttagttaaaatggctttgaattttatttcactagatttaaattttaaaggaaatc

SEQ ID NO: 369770 - DNA, 201 bp, Homo sapiens
catagtcctgatggctgggacatcaagattgggcatctgcatctcgtgagggtctcaggcagcttccactgcctgaggtggaaggtaaaagggagcctgcrtgtgcacagatcacatggtaagagaagaagcaagccaccgggagaggtgtcaggctgtttttaacaaccagctttcagaggaactaatagagggaaaatt

SEQ ID NO: 369771 - DNA, 201 bp, Homo sapiens
gagcccaccgggaggaacgaacaactccggacgcgctgtcttaagagctgtaacactcaccgcaaaggtctgcagcttcactcctgagccagcgagaccaygaacccaccagaaggaagaaactccgaacacatctgaacatcagaagggacagactccagatgcgccaccttaagagctgtaacactcactgcgagggtc

SEQ ID NO: 369772 - DNA, 201 bp, Homo sapiens
cttaactatacagactagttgaagttcaaagttatttatttttttaaaagattgcttcatttcaatagtacaagagaaaattgcatttttataatacattytgaacactacgtttgcagggaaaagcagagatcagatagcctagaagagaatgactgaggaaatggaattttgtttttttttttaaaaacaatgtaagtg

SEQ ID NO: 369773 - DNA, 201 bp, Homo sapiens
gaggaaaaacaagctaagggaaagcacagcataaacacataatggcaagatgtgaaagtattaataagcttcaccccattctgtttgacagggattttgartatcacagagaaaatacacaggactcaatggaagttttgtaaagaggtttactgttatgacaaatatgtatgttctcttttttatcctgggtcaaatttc

SEQ ID NO: 369774 - DNA, 201 bp, Homo sapiens
gtggatcacctgaggtcaggagtttgagaccagcctggccagcatggtgaaaccccatctctagtaaaagtacaaaaattagctgggcattgtggcacacrcctgtaattccagcgacttgggaggctaaaacaggagaactgcttgaacccaggaggtggaggttgtagcgagcgccaagatcgtgccactgcactctgg

SEQ ID NO: 369775 - DNA, 201 bp, Homo sapiens
atctagagggtggcatcacaactgaggaggagtgagcttgggttaccagctgttccattagcaagcaataaacaagcctactctttatactgaagagaggytttaccttatccctcaaggtttcttgttgcaaacacaatcctgagaaacgacaccgatgaagatcagtcaggtccttgcattcttggcatacccgataag

SEQ ID NO: 369776 - DNA, 201 bp, Homo sapiens
tagaatgttcaggatgctgtgtaaaaagatggataaggccaggtgcggtggctcatgcctgtaatcccagcactttgagaggccgaggtgggtggatcacytgaggtcaggagtttgagaccagcctggccagcatggtgaaaccccatctctagtaaaagtacaaaaattagctgggcattgtggcacacgcctgtaatt

SEQ ID NO: 369777 - DNA, 201 bp, Homo sapiens
tgatatgtaatttttattcagtttgaaacattttttactttctttgtgttgtcttctttggtttattatttatttagaattatgtttatttccaaacatayggagatttgtttttctctttttgtattggaatctagctgaattgcatgtgtctagaggacatattcttcatgatttttgcctttcaaactggttaagatt

SEQ ID NO: 369778 - DNA, 201 bp, Homo sapiens
taaatattaattgaacaattcgacacctattatgtacttggcactgttcttggcatctggatatagcagggaataatacagttctgatctgtgctcttacrgagggacagacaacataaaattttagttacaatataaatcactgtgctaaaataccctttgtagcacagaggtttattaactctagctatggattgagaa

SEQ ID NO: 369779 - DNA, 201 bp, Homo sapiens
actctggaccaagcagacccaatagacatctacagaactctccacccgaaatcattcttctcagcacccacatcgcacttattctaaaattgaccacatarttatacataaaacactcctcagcaaatgcagaagaacgaaaatcataacagtctctcagaccacagtgccatcaaattagaactcaggattaagaaactc

SEQ ID NO: 369780 - DNA, 201 bp, Homo sapiens
tctactggtctggaaactgcctctagacagtaagacagagcaattctacagctcacctaatctgtttccatactttcaggggtcatagacctgtgctgccyatcacccagtgtatgaaaactattgtttcgtatattttatctagtttctagatgtttaatatgggagaataaatctggtcctattatttcttgttgctag

SEQ ID NO: 369781 - DNA, 201 bp, Homo sapiens
gagaaagggtcatgattgggaggcatatatagagggcttcgagggtgggcttttgatgtgggtgatgataactgtagatgttcactttaaaattatttaayctgagcatatctgttatatattttaccataaaagtatattttatattttacaatgtaaaatgtattcaatattttacaatttaaaatataaaaattttca

SEQ ID NO: 369782 - DNA, 201 bp, Homo sapiens
tggagtgcagtggcgtgatctcggctcactgcaacctccgcaccgccgggttcaagccattcttctgcctcagccccccaagtagctgagactacaggtgygtgccaccatgccctgctaatttttgtatttttagtagaaacagggtttcaccatgttgatcaggctggtctctaactcctgacctcaggtgatccaccc

SEQ ID NO: 369783 - DNA, 201 bp, Homo sapiens
taacaaaaattccagaagtggtcccagttttgcttagaatgtcaccattttggagttttgtgaatgtgttctgttctatctgaaaaagtaaacagttggayggaattttatcaattgcaccaagtacactgaactacatgttaggaccctgactttgaatgcacagagcttagcatacatttttgaaacataaaattatag

SEQ ID NO: 369784 - DNA, 201 bp, Homo sapiens
tgctgtgtaagccaagagccctggtagatgcatgcaacctcctaaatttgggccgattgaatcagttaagtgctcagctttttcatatttgatttccttcmtgcagttcatccactaggatactgtgaaagaggcatgacattttttggtataaagagagctaaacattgtatatttaactcagttttaacaaaaattcca

SEQ ID NO: 369785 - DNA, 201 bp, Homo sapiens
ccatgggcttactctaaaaagtactgtgtccctgcttaatatagtcagagggaggatgtcacttatttcatagttaaacttgtcattgcatcctgtacacwtataaaagtagaaaataaaatgaagtattgtcttttataccttgggggactgtgactcagtgctggatttttagtcaagaaccgatgcgtacactttaat

SEQ ID NO: 369786 - DNA, 201 bp, Homo sapiens
catgcagggtggaaggaagtgtgtaaaaaatagtcataagttagtgggcacaaaagagcctgtcacaccatgctcctttctccaggaggatctcttctctstactttggatgagagaaaaccatgggcttactctaaaaagtactgtgtccctgcttaatatagtcagagggaggatgtcacttatttcatagttaaactt

SEQ ID NO: 369787 - DNA, 201 bp, Homo sapiens
agacaataggaaccaacaagtatagcaaagtggttaagaccctgggtgctgttgggcatggtgaaatacactttagactcagctacttgggaggctgaggmgggaggatcacttgagcccaggagtttgagaccagcttgggcaacatagtgaggctccatctcaatttaaaaataataataataataataataataataa

SEQ ID NO: 369788 - DNA, 201 bp, Homo sapiens
aaaaaaatcattttgttttgtttttctttgttgtctctttttttccttctgcttctgtgatagtgaaggtgtagttaattttgatcctcttcccccttggrtgtaccctgagactaatcctagagcaaggttcttatcctgatgtctacagacccctatggcttttgggaatagaattcaggggtgctctagtttggtttg

SEQ ID NO: 369789 - DNA, 201 bp, Homo sapiens
agcccagcgagaccacgagcccaccgggaggaacgaacaactccggacgcgctgtcttaagagctgtaacactcaccgcaaaggtctgcagcttcactccwgagccagcgagaccacgaacccaccagaaggaagaaactccgaacacatctgaacatcagaagggacagactccagatgcgccaccttaagagctgtaac

SEQ ID NO: 369790 - DNA, 201 bp, Homo sapiens
gaacctttgtatctagctcagggattgtaaacacaccaatcagtgccctgacaaaacaggccactcggctctaccaatcagcaggatgtgggtggggccasataagagaataaaagcaggctgcctgagctagctgtggaagggaaggtccccttccacactgtggaagctttgttctttcgctctttgcaataaatcttg

SEQ ID NO: 369791 - DNA, 201 bp, Homo sapiens
cagcacccagtgtttagcttaaggtttgcgattgcaccaatggacactctgtatctagctgctcttgtggggccttggagaacctttatgtctagctaagrgattgtaaatacaccagtcggcactctgtatctagctcaaggtttgtaaacacaccaatcagcaccctgtgtttagctcaaggtttgtgaatgcaccaat

SEQ ID NO: 369792 - DNA, 201 bp, Homo sapiens
taacctttgtttctagaatgttcaggatgctgtgtaaaaagatggataaggccaggtgcggtggctcatgcctgtaatcccagcactttgagaggccgagrtgggtggatcacctgaggtcaggagtttgagaccagcctggccagcatggtgaaaccccatctctagtaaaagtacaaaaattagctgggcattgtggca

SEQ ID NO: 369793 - DNA, 201 bp, Homo sapiens
ctcgggacctgcagcccgccatgcctgagcctcccacccactccgtgggttcctgtgcagcccgagcctcccctacaagcgccgccccctgctccatggcrcccagtcccatcgaccacccaagggctgaggagtgcgggcacacggcactgggactggcaggcagctccacctgcagccccggtgcgggatccactgggt

SEQ ID NO: 369794 - DNA, 201 bp, Homo sapiens
tattaacctttgtttctagaatgttcaggatgctgtgtaaaaagatggataaggccaggtgcggtggctcatgcctgtaatcccagcactttgagaggccraggtgggtggatcacctgaggtcaggagtttgagaccagcctggccagcatggtgaaaccccatctctagtaaaagtacaaaaattagctgggcattgtg

SEQ ID NO: 369795 - DNA, 201 bp, Homo sapiens
gaaatatgtgtgtatgtctatcagcgttccacagaaacaccttctatgtaacaaccgatttagtctagttctcagttttgtatagtgttgagaaaaatttwtgaaccaattacattttcaactcttttctttctatagtaaagcctgtagtgaggaggatgagtgaaattgatccccatggagcctatcagctaattgggg

SEQ ID NO: 369796 - DNA, 201 bp, Homo sapiens
ctgggagcagtcggccagccctgctggccctgggcaatgagggacttagcacccgggccagcagctgcggagggtgtactgggtcccccagcagtgccagsccaccggcgctgcgctcgatttctcaccgcgtgccttagctgccttcccacggggcacggctcgggacctgcagcccgccatgcctgagcctcccaccca

SEQ ID NO: 369797 - DNA, 201 bp, Homo sapiens
gtcaaatattaacctttgtttctagaatgttcaggatgctgtgtaaaaagatggataaggccaggtgcggtggctcatgcctgtaatcccagcactttgaraggccgaggtgggtggatcacctgaggtcaggagtttgagaccagcctggccagcatggtgaaaccccatctctagtaaaagtacaaaaattagctgggc

SEQ ID NO: 369798 - DNA, 201 bp, Homo sapiens
tccgggtgggcgtgggcttggcgggccctgcactgggagcagtcggccagccctgctggccctgggcaatgagggacttagcacccgggccagcagctgcrgagggtgtactgggtcccccagcagtgccagcccaccggcgctgcgctcgatttctcaccgcgtgccttagctgccttcccacggggcacggctcgggac

SEQ ID NO: 369799 - DNA, 201 bp, Homo sapiens
aggcagcttttaaaaacacgactgtagtctttcctttggagagacctagctaagaaaaaaagctataaacattaaattaaaattctagcctaagctcttawgtttaaagcctgtggaaaaaaatgacaaatttttaattagaagatggctttgcatttttttgatgcaacttatttagactttaaagaacaaatattctca

SEQ ID NO: 369800 - DNA, 201 bp, Homo sapiens
catggtttaaatatgtctttggatgattgtgggaaaaataaaagtgtcttaaaaataaaagtgtcatctacgttatagtttatggatatattataaacatmattagacacacaacttctaccattagaatttataagtcaattattaacttaaaaagaacccccaaattttccctaaccagagcatcagatggcaaatcca

SEQ ID NO: 369801 - DNA, 201 bp, Homo sapiens
gagcccactccctcagcttgcagggaggtgtggagggagaggcgtgagcgggaaccagggctgtgtgcggcgcttgcgggccagctggagttccgggtggrcgtgggcttggcgggccctgcactgggagcagtcggccagccctgctggccctgggcaatgagggacttagcacccgggccagcagctgcggagggtgta

SEQ ID NO: 369802 - DNA, 201 bp, Homo sapiens
aatatttccataaaatcacctattttttgttataaaacttatatgaattttacattccactcaataacatatatttatatacacatatatgcatgttgcartgtaaaaattgtttacgttacttaccatcgagtaagactggtgctctaggaaagttctctctgtatagacagagaccttaagactttaagatactaaggc

SEQ ID NO: 369803 - DNA, 201 bp, Homo sapiens
aaggccagagcccactccctcagcttgcagggaggtgtggagggagaggcgtgagcgggaaccagggctgtgtgcggcgcttgcgggccagctggagttcygggtgggcgtgggcttggcgggccctgcactgggagcagtcggccagccctgctggccctgggcaatgagggacttagcacccgggccagcagctgcgga

SEQ ID NO: 369804 - DNA, 201 bp, Homo sapiens
ttagtagagacggagtttcgccatgttggccaagctagtcttgaactcctgacctcaaatgattcacccgcctcagcctcccaaagtgctgggattacagrcatgagccaccgcgcctggcttaaaatgggatttataatagtacctatctcataaagtagttgtgagggttacatgagtttagtgtctctatacttctag

SEQ ID NO: 369805 - DNA, 201 bp, Homo sapiens
ttctctttaagcaacacatttcagggccatgtctcttgctgtaggctgccagcaaatgatagcagcagtagcaccagcagcagcagacttatcagattggygtgctcgttgcactcagcatgctagtagtaccaggcccagttggtatttgttgattgatgatcatagtatcatcaggaatggaatagctttctgatcagt

SEQ ID NO: 369806 - DNA, 201 bp, Homo sapiens
acagttctgcatggctgtggaggcctcaggaaagttaacaatcatggcagtaggcaaaagggaagcaggcatcttcctcacaaggcggcaggagagagaaygtgcaggggaaactgccacttttaaaaccatcagatctcgtgagaacccgctatcacaagaacagcatgggggaaactgcccctgtaatccaatcacctt

SEQ ID NO: 369807 - DNA, 201 bp, Homo sapiens
atttgcaaaatgggatttttttttttttttttgagatggagtcttgctctgttgcccaggctggagtgtagtggcacgatttcggctcactgcaacctccrcctcccaggttcaagcaattctcctgccttggcctcccaagtagctggaactacaggagcacaccaccacgcccgggtaatttttgtatttttagtagag

SEQ ID NO: 369808 - DNA, 201 bp, Homo sapiens
ttccaaacctttacataagttccaatctcaaaccatctctgtgaatacatctgactgaatgctttcagaaaatgccaggtcacctcttgaatgcttttctrcttagaaatttcttctgccagataccctaaatcatcttttgagttcaaagctccacagatctctaaggcagaggcaaaatgccgccagtctctttgctaa

SEQ ID NO: 369809 - DNA, 201 bp, Homo sapiens
actgtgctacttactaggtgtgtgactgaacagttgaccactgtgtttatttcttcatttgcaaaatgggatttttttttttttttttgagatggagtctygctctgttgcccaggctggagtgtagtggcacgatttcggctcactgcaacctccacctcccaggttcaagcaattctcctgccttggcctcccaagtag

SEQ ID NO: 369810 - DNA, 201 bp, Homo sapiens
attacaggcatgagccaccacgcctggccaacctccgaatgaactttaaatgactttttaccgaggtctttactccacccctacaaaatgcaagtgggacyttcagtgacattacaatatgtttataaattatatggaaatgtcatatctgtaatagtgagtttctccaacttcatatgtggtatgcctctccttttatgc

SEQ ID NO: 369811 - DNA, 201 bp, Homo sapiens
actcacatgaattttaattgagaatgaatatttgccaaaacagtaatttgtctttttaagtctttgtttcatatgcagagaattttatttgttaagcatastgtactcagagtcaggccaatcagaaataatataagaaaagaaaaactggttaactctttctatctatattagtctaaggagtaccagggctaacaaatc

SEQ ID NO: 369812 - DNA, 201 bp, Homo sapiens
ctagttataaggtgaaaaagattgcctttagttaaaggaatttggaaaaaaatcattttgttttgtttttctttgttgtctctttttttccttctgcttcygtgatagtgaaggtgtagttaattttgatcctcttcccccttgggtgtaccctgagactaatcctagagcaaggttcttatcctgatgtctacagacccc

SEQ ID NO: 369813 - DNA, 201 bp, Homo sapiens
ttctatgctttcctgcttttgaatttctcatcaatgttagaaagtaacattgtcctgttattaaagcttattcatactgatacaccaaaactcataaatayttgcatttttcagactattttctagttataaggtgaaaaagattgcctttagttaaaggaatttggaaaaaaatcattttgttttgtttttctttgttgt

SEQ ID NO: 369814 - DNA, 201 bp, Homo sapiens
agcaggcatctttttcacaaggtggcaggagagagagaatgtgcaggggaagcttccacttttaaaaccattagatctcatgaggactccctcactatcaygagaacagcatgggggaaactgcccccatgatccagtcacctcccactaggtccctgcctcaacatgtggggattacaattcgaaatgagatttgggtgg

SEQ ID NO: 369815 - DNA, 201 bp, Homo sapiens
cttgtattagtccatgttcacactgctataaaggtactacgtgagactgggtaatttataaagaaaagaagtttaattgactcacagttccacatggctgsggaggcctcaggaaacttacaatcatgccagaaggcaaaggggaagcaggcatctttttcacaaggtggcaggagagagagaatgtgcaggggaagcttc

SEQ ID NO: 369816 - DNA, 201 bp, Homo sapiens
atatatatactaatacaagtatatatatgtacttgtattagtccatgttcacactgctataaaggtactacgtgagactgggtaatttataaagaaaagasgtttaattgactcacagttccacatggctgcggaggcctcaggaaacttacaatcatgccagaaggcaaaggggaagcaggcatctttttcacaaggtgg

SEQ ID NO: 369817 - DNA, 201 bp, Homo sapiens
gtacttgtatatatatatatactaatacaagtatatatatgtacttgtattagtccatgttcacactgctataaaggtactacgtgagactgggtaatttwtaaagaaaagaagtttaattgactcacagttccacatggctgcggaggcctcaggaaacttacaatcatgccagaaggcaaaggggaagcaggcatcttt

SEQ ID NO: 369818 - DNA, 201 bp, Homo sapiens
cggggtttcaccgtgttagccaggatggtctcgatctcctgacctcttgatccgcctgcctcggcctcccaaagtgctgggattacaggcgtgagccaccrcgcccggccaggatatttgaattttatcctgagctaagtttgtcttattggtgaaaaaaatccaaaatgaaaagaccaacctttctccttttatggattc

SEQ ID NO: 369819 - DNA, 201 bp, Homo sapiens
atatgtacttgtatatatatatatatactaatacaagtatatatatgtacttgtatatatatatatacactatatatatgtacttgtatatatgtatatayactatatatatgtacttgtatatatatatactatatatatatgtacttgtatatatatatactatatatatatgtacttgtatatatatatactatatat

SEQ ID NO: 369820 - DNA, 201 bp, Homo sapiens
agtagagacggggtttcaccgtgttagccaggatggtctcgatctcctgacctcttgatccgcctgcctcggcctcccaaagtgctgggattacaggcgtsagccaccgcgcccggccaggatatttgaattttatcctgagctaagtttgtcttattggtgaaaaaaatccaaaatgaaaagaccaacctttctcctttt

SEQ ID NO: 369821 - DNA, 201 bp, Homo sapiens
atatatgtacttgtatatatatatatatactaatacaagtatatatatgtacttgtatatatatatatacactatatatatgtacttgtatatatgtatayatactatatatatgtacttgtatatatatatactatatatatatgtacttgtatatatatatactatatatatatgtacttgtatatatatatactatat

SEQ ID NO: 369822 - DNA, 201 bp, Homo sapiens
tagtagagacggggtttcaccgtgttagccaggatggtctcgatctcctgacctcttgatccgcctgcctcggcctcccaaagtgctgggattacaggcgkgagccaccgcgcccggccaggatatttgaattttatcctgagctaagtttgtcttattggtgaaaaaaatccaaaatgaaaagaccaacctttctccttt

SEQ ID NO: 369823 - DNA, 201 bp, Homo sapiens
agtatatatatgtacttgtatatatatatatatactaatacaagtatatatatgtacttgtatatatatatatacactatatatatgtacttgtatatatrtatatatactatatatatgtacttgtatatatatatactatatatatatgtacttgtatatatatatactatatatatatgtacttgtatatatatatac

SEQ ID NO: 369824 - DNA, 201 bp, Homo sapiens
taaactagaaatcagagttatcctacattcctccctcttctatttctcccatattcagttgttcactagatcaaattttagtttgtcatctcctcatttcrtgattattttaatagtgacttttacagtctggtctggaaattctccaatccattattttctctgccacaagaaggaatttttaaaaacccaacctgttga

SEQ ID NO: 369825 - DNA, 201 bp, Homo sapiens
tttagtagagacggggtttcaccgtgttagccaggatggtctcgatctcctgacctcttgatccgcctgcctcggcctcccaaagtgctgggattacaggygtgagccaccgcgcccggccaggatatttgaattttatcctgagctaagtttgtcttattggtgaaaaaaatccaaaatgaaaagaccaacctttctcct

SEQ ID NO: 369826 - DNA, 201 bp, Homo sapiens
aagctgaggcaggagaattgcttgaactggggaggcagaggttgcagtgaaccaagatcatgccattgcactccagcctgggcaacaagagtgaaactctrtctcaaaaaaaaaaaaaaagagacaatgtaatggcatagcatagggatagacatatagattagtggaacagaattgagagtctagaaataaacccttcat

SEQ ID NO: 369827 - DNA, 201 bp, Homo sapiens
aattttttgtatttttagtagagacggggtttcaccgtgttagccaggatggtctcgatctcctgacctcttgatccgcctgcctcggcctcccaaagtgytgggattacaggcgtgagccaccgcgcccggccaggatatttgaattttatcctgagctaagtttgtcttattggtgaaaaaaatccaaaatgaaaagac

SEQ ID NO: 369828 - DNA, 201 bp, Homo sapiens
tagtcccagctactcgggaagctgaggcaggagaattgcttgaactggggaggcagaggttgcagtgaaccaagatcatgccattgcactccagcctgggyaacaagagtgaaactctatctcaaaaaaaaaaaaaaagagacaatgtaatggcatagcatagggatagacatatagattagtggaacagaattgagagtc

SEQ ID NO: 369829 - DNA, 201 bp, Homo sapiens
cttaatatttggaacacgaattaacctgaggagttcataaacagtaggcattgcaatgaacagcatttatcaacttgacttaccagcttacactgccatarttctgttatagtcatgtcacatttgagacattagttgtacaaacagtacatgaagcaactcacatgaattttaattgagaatgaatatttgccaaaacag

SEQ ID NO: 369830 - DNA, 201 bp, Homo sapiens
tgcaggctccgacccccgggttcacatcattctcctgcctcaacctccttagtagctgggactagtagtagcccgccaccttgcctggctaattttttgtrtttttagtagagacggggtttcaccgtgttagccaggatggtctcgatctcctgacctcttgatccgcctgcctcggcctcccaaagtgctgggattaca

SEQ ID NO: 369831 - DNA, 201 bp, Homo sapiens
ctataaaaatacaaaaaaaattagccaggcatggtggcatgtgcctgtagtcccagctactcgggaagctgaggcaggagaattgcttgaactggggaggmagaggttgcagtgaaccaagatcatgccattgcactccagcctgggcaacaagagtgaaactctatctcaaaaaaaaaaaaaaagagacaatgtaatggc

SEQ ID NO: 369832 - DNA, 201 bp, Homo sapiens
aaaactcagccataagctatatccaatttaagtaaggatatttgattttttttttttttttttttttgagatggagtctcgctgtcgcccaggctggagtrcagtggtgctatcttggctcactgcaggctccgacccccgggttcacatcattctcctgcctcaacctccttagtagctgggactagtagtagcccgcca

SEQ ID NO: 369833 - DNA, 201 bp, Homo sapiens
tttgttattacagttttaaaactcagccataagctatatccaatttaagtaaggatatttgattttttttttttttttttttttgagatggagtctcgctrtcgcccaggctggagtgcagtggtgctatcttggctcactgcaggctccgacccccgggttcacatcattctcctgcctcaacctccttagtagctggga

SEQ ID NO: 369834 - DNA, 201 bp, Homo sapiens
gattcaggctgaaaagcaaaagtctttataacacatttctagtcacgtaaataatacaaactttttctaacttttctcttatttgggacacctagctttgmggagcagatggttttcccagtaaactcttagattctataggtatcacatttcagggtcaagaattacgcatatactcagtataaactctgtaaagacttt

SEQ ID NO: 369835 - DNA, 201 bp, Homo sapiens
caatttcttttgttattacagttttaaaactcagccataagctatatccaatttaagtaaggatatttgattttttttttttttttttttttgagatggartctcgctgtcgcccaggctggagtgcagtggtgctatcttggctcactgcaggctccgacccccgggttcacatcattctcctgcctcaacctccttagt

SEQ ID NO: 369836 - DNA, 201 bp, Homo sapiens
actgacaccagtgccatgtttcagttcagttaagttggcatgaatagtactgagccatggtgttctcaggatgtagttactaaggcgttttatttatatcscagtgaaacaatcctaccacttgcaaggacaaaaagagagactttgggggcccttaaatgtaatcagcagacatgtgccaccctttcacctttgtatgtt

SEQ ID NO: 369837 - DNA, 201 bp, Homo sapiens
acaaatccatcaataagtaaaagccactgacaccagtgccatgtttcagttcagttaagttggcatgaatagtactgagccatggtgttctcaggatgtarttactaaggcgttttatttatatcccagtgaaacaatcctaccacttgcaaggacaaaaagagagactttgggggcccttaaatgtaatcagcagacatg

SEQ ID NO: 369838 - DNA, 201 bp, Homo sapiens
gataatataagaggccttaagctatcaaattgtaattctttatggcccagttagtatttcatcagcattggttgttttctcagataaaagaatcttggatwaggagcaatttcacattccctcctatatcccgtcatagtggggcataagttcattgctagattcaaagggagttacaggttcataggtctttctgtttct

SEQ ID NO: 369839 - DNA, 201 bp, Homo sapiens
attaaatgtttattttaaattttaacttattttataaataaatatttcctcactttctgatagcttggacctatcaactaggtttgaatagagacttttayttaatgagactgaaatgttattaaccatgaaatttatacccattaaaaatattatccaagagggcctgaggggaaaaaaaggaaaaagtattatctaagg

SEQ ID NO: 369840 - DNA, 201 bp, Homo sapiens
tctaggagacagaaagcttttccacctggtttttatgcctaaggttatttgttatgcatgtttgccaagattagtattaaattccttctgttgactttagwaacacttgtgatttcttttatatgttagcattgaacattaaactctcataatctctagttttttgatttgtctttacactaatcatgttttaaagataca

SEQ ID NO: 369841 - DNA, 201 bp, Homo sapiens
caaaactgaacttgctatctttcctcctggtttctcctattttcaccaagttaaataatgctactactatattataacctaaactagaaatcagagttatyctacattcctccctcttctatttctcccatattcagttgttcactagatcaaattttagtttgtcatctcctcatttcgtgattattttaatagtgactt

SEQ ID NO: 369842 - DNA, 201 bp, Homo sapiens
ttgtagtaactgtcattttgtagtaacatattgttcttgttttggcacattgcatttacagtgtactcctttattctgatggagtgtgtgtgtgtgtgtgkatttaaatattatgaatgatttgttctagagcatctgaaactaccacagaaggactatctaaacaacaaacttagaacatagtttctagatgaataccaa

SEQ ID NO: 369843 - DNA, 201 bp, Homo sapiens
ttatccttgggttctgttggatctataggtttatgggtttcagcaaatttggaaagtttttagcacttattttaaaaaatatatttatgtttatcaccttytcttctcttctgagattctaattacacatataatagacagcttgacatggttgcacagcagggcttttttcttcttcttcatttttctttctctccatgc

SEQ ID NO: 369844 - DNA, 201 bp, Homo sapiens
ggcagggtagctgataattgttcagtgtgtgattctctagaggtattatattgcctctgattacagaacctcctccccatcccctgctttcttttttcccyattttatttgtgattatgacgtaactggcaaatttgtagtaactgtcattttgtagtaacatattgttcttgttttggcacattgcatttacagtgtact

SEQ ID NO: 369845 - DNA, 201 bp, Homo sapiens
gaccagcccggccaacatggtgaagccctgtctgctataaaaatacaaaaaaaattagccaggcatggtggcatgtgcctgtagtcccagctactcgggargctgaggcaggagaattgcttgaactggggaggcagaggttgcagtgaaccaagatcatgccattgcactccagcctgggcaacaagagtgaaactctat

SEQ ID NO: 369846 - DNA, 201 bp, Homo sapiens
aggatcacttgaggtcaggagtttgagaccagcccggccaacatggtgaagccctgtctgctataaaaatacaaaaaaaattagccaggcatggtggcatrtgcctgtagtcccagctactcgggaagctgaggcaggagaattgcttgaactggggaggcagaggttgcagtgaaccaagatcatgccattgcactccag

SEQ ID NO: 369847 - DNA, 201 bp, Homo sapiens
gaggatcacttgaggtcaggagtttgagaccagcccggccaacatggtgaagccctgtctgctataaaaatacaaaaaaaattagccaggcatggtggcaygtgcctgtagtcccagctactcgggaagctgaggcaggagaattgcttgaactggggaggcagaggttgcagtgaaccaagatcatgccattgcactcca

SEQ ID NO: 369848 - DNA, 201 bp, Homo sapiens
ggaggatcacttgaggtcaggagtttgagaccagcccggccaacatggtgaagccctgtctgctataaaaatacaaaaaaaattagccaggcatggtggcrtgtgcctgtagtcccagctactcgggaagctgaggcaggagaattgcttgaactggggaggcagaggttgcagtgaaccaagatcatgccattgcactcc

SEQ ID NO: 369849 - DNA, 201 bp, Homo sapiens
gtttcaaaacttactacaaagctacagtaatcaattcaatgtgggccaagtgcagtggctcatgcctataatcccagcactttgggaggccgaggcaggargatcacttgaggtcaggagtttgagaccagcccggccaacatggtgaagccctgtctgctataaaaatacaaaaaaaattagccaggcatggtggcatgt

SEQ ID NO: 369850 - DNA, 201 bp, Homo sapiens
taaaggataaaacacacataattatcgttagacacagaaaaacactttacaaaatcaaataccattcataataaaaattctcaacaaattagaagtagaagtgaactttgaactaaggggattcatgaaaaagctgcagctagcaacatatttaaatggcaagtgtgaatgctttcttcctgagattgggaacaaggctag

SEQ ID NO: 369851 - DNA, 201 bp, Homo sapiens
tgattttgtccactcacatggattctactaacacctttgattttgcttctaaatttcaattttcctctcagatctactaatgcctaactcagttgcttccyggacacatctgtctcaaatgtccttcaaacttaatatgaccaaaactgaacttgctatctttcctcctggtttctcctattttcaccaagttaaataatg

SEQ ID NO: 369852 - DNA, 201 bp, Homo sapiens
ataaaggataaaacacacataattatcgttagacacagaaaaacactttacaaaatcaaataccattcataataaaaattctcaacaaattagaagtagaagtgaactttgaactaaggggattcatgaaaaagctgcagctagcaacatatttaaatggcaagtgtgaatgctttcttcctgagattgggaacaaggcta

SEQ ID NO: 369853 - DNA, 201 bp, Homo sapiens
aataaaggataaaacacacataattatcgttagacacagaaaaacactttacaaaatcaaataccattcataataaaaattctcaacaaattagaagtagaagtgaactttgaactaaggggattcatgaaaaagctgcagctagcaacatatttaaatggcaagtgtgaatgctttcttcctgagattgggaacaaggct

SEQ ID NO: 369854 - DNA, 201 bp, Homo sapiens
gaaagcggtagggcccaaatttgaacctatttagcctagaacctcatgttctttctagcctactacttagggtcacgatgtttaaaatttttttttttttttgagttaactctttcttttgcttttatgtagctatagaaatttaacttccttttcaaaaactcagtttctagtggatataggtgatatacatttttttca

SEQ ID NO: 369855 - DNA, 201 bp, Homo sapiens
tccttcctttctttcttctttctttctttcttggcacgatcttgggtcactgcaacctccaccttccaggttcaagtgattctcctgcctcagcctcctgmgtagctgggattacaggcacccaccaccacactcagctatgtttttgtagttttagtagaggcagggtgtcactatgttggccaggctggtctcgaactc

SEQ ID NO: 369856 - DNA, 201 bp, Homo sapiens
ttacagagggacagacaacataaaattttagttacaatataaatcactgtgctaaaataccctttgtagcacagaggtttattaactctagctatggattragaaatgcttcatggaagtgacaatttttctagagtcttagagtttcattgaccagaaaagaagaggaaaaacaagctaagggaaagcacagcataaaca

SEQ ID NO: 369857 - DNA, 201 bp, Homo sapiens
ctaaaaagtgcacattaggaatggagcatagccaccagctggagctgctagcatttcaaaatctcaggaggctgcagcaacatgtgccaggccttatctcygtaatacacatgtgctgcttgtcagtttcaaatgttaaccctcagcagcattacttaaagtcagtaggctttgtgttgtgatggaaggaaaatattttta

SEQ ID NO: 369858 - DNA, 201 bp, Homo sapiens
ccgcaaaggtctgcagcttcactcctgagccagcgagaccacgaacccaccagaaggaagaaactccgaacacatctgaacatcagaagggacagactccrgatgcgccaccttaagagctgtaacactcactgcgagggtccacggcttcattcttgaagtcggtgagaccaagaacccaccaattccggacacactatg

SEQ ID NO: 369859 - DNA, 201 bp, Homo sapiens
attcttattaaaaagccagcatcttaactctgttctacctggttccatcttgaattgtttgtgttttaaaatgtcaagaatatatttccaaattataattrcatataatgcaaaaaacatgttttgaatgcccttaaagcatttaagaatataattctgctgctgagttagtctctggtctgttctccatgatttctgtct

SEQ ID NO: 369860 - DNA, 201 bp, Homo sapiens
ttgagctcaggagtttgaggctgcagtgagctatgattgtgcctgggtgacagagcaagattgttgtctctaaaataaaattaaagaattttaaaagtatmtttttattgtttccaaaagacatattcttattaaaaagccagcatcttaactctgttctacctggttccatcttgaattgtttgtgttttaaaatgtcaa

SEQ ID NO: 369861 - DNA, 201 bp, Homo sapiens
gtactggttttctatgtatcctcctaaccctttcctctgcagattaaacatctgcgtaattgcacaatgacaaaaggaagacaagagtttcctcctaccaygctgtggttctgcttttcaggcttttttttttttcttctacccaagagctgggctaatctttatgaatctgtgatccaggattcaggacacatgatgtta

SEQ ID NO: 369862 - DNA, 201 bp, Homo sapiens
tttcctcctaccacgctgtggttctgcttttcaggcttttttttttttcttctacccaagagctgggctaatctttatgaatctgtgatccaggattcagracacatgatgttactttatcaagatatgttttaaaacatgaaaacccaaagtagcatgatctcattttataagacttgaaaaaatgattcaagttacatg

SEQ ID NO: 369863 - DNA, 201 bp, Homo sapiens
aggcatggctttcaatatacacagattaaatgtagaaataaaagatataaatgtgtgtatgtgtacacactcagaaaaatacatctctctctctctctctmtatatatatatatatgcatgtattcccatacacatattccatagcaaagaacatacctagtttccagatcttgacttctaaataccattcttcactctac

SEQ ID NO: 369864 - DNA, 201 bp, Homo sapiens
tgtctacagacccctatggcttttgggaatagaattcaggggtgctctagtttggtttgcttgactcccccaaatctcatattgaaatgtgattctcagcrttggaggtagggcctagtgggaggcatttgggtcctgggggcagatccctcatgaatggcttggtggcatcctcagggtaatgactgagttctcactgtg

SEQ ID NO: 369865 - DNA, 201 bp, Homo sapiens
gaggcatttgggtcctgggggcagatccctcatgaatggcttggtggcatcctcagggtaatgactgagttctcactgtgttagtttccttgagaactgtytgttaaaaagagcctggcatcgttcccttcttcctcttgcttccacccttaccctgtgatctctgcatgccacttccccttcaccttccaccatgagtag

SEQ ID NO: 369866 - DNA, 201 bp, Homo sapiens
atgggaatgggtattctctgcaaaggatttttcctctttcccagggctactgtagatgaagacttttggcaggctgcattgattggcattgggctatattmctaaaaaaaaaaaaaaaaaaaaaaaattcaaaattggaaaaattttttaaatgccttaacaggaaatactattattttttctttgctttgctttgtttgt

SEQ ID NO: 369867 - DNA, 201 bp, Homo sapiens
agaattttttggagtaatggaaaatgtgagtagttgggacactctgctttacacaagtagcttctctaatgcacgtttacttctttatagcagttgtttartgaaaataacggtaaatcttgatctgttgctagacagtgcttagattgatctttctctagtgagattggaatgaaacccagtttcatggaaagaaatagc

SEQ ID NO: 369868 - DNA, 201 bp, Homo sapiens
tttccttcctttctttcttctttctttctttcttggcacgatcttgggtcactgcaacctccaccttccaggttcaagtgattctcctgcctcagcctccygagtagctgggattacaggcacccaccaccacactcagctatgtttttgtagttttagtagaggcagggtgtcactatgttggccaggctggtctcgaac

SEQ ID NO: 369869 - DNA, 201 bp, Homo sapiens
tcctttctttccttcctttccttcctttccttcctttctttcttctttctttctttcttggcacgatcttgggtcactgcaacctccaccttccaggttcragtgattctcctgcctcagcctcctgagtagctgggattacaggcacccaccaccacactcagctatgtttttgtagttttagtagaggcagggtgtcac

SEQ ID NO: 369870 - DNA, 201 bp, Homo sapiens
ggactcagtaatgtactaaggagagtgagctccttgagagcagggctctttccttccttccttccttccttccttccttccttccttccttccttccttcyttccttctttctttctttcttttctccctttctttcctttctttccttcctttccttcctttccttcctttctttcttctttctttctttcttggcacga

SEQ ID NO: 369871 - DNA, 201 bp, Homo sapiens
tggttactatagctctgtagtataatttgaagtcagatagtgtgatttttttcagttttcatctttttacttaggatggttttggctattctgagtcttttataaattttaggattgttttttctatttctactctttgaagaatatcattgatattttgatagtgattgcattgaatctgtagattgctttaggtagtat

SEQ ID NO: 369872 - DNA, 201 bp, Homo sapiens
ttggttactatagctctgtagtataatttgaagtcagatagtgtgatttttttcagttttcatctttttacttaggatggttttggctattctgagtcttttataaattttaggattgttttttctatttctactctttgaagaatatcattgatattttgatagtgattgcattgaatctgtagattgctttaggtagta

SEQ ID NO: 369873 - DNA, 201 bp, Homo sapiens
atctattatatataatagatatgtgcacacacatatatatatataaaacatatatacacacccatagtatactaggtgtgtgtatgtgtgtatatatatawgtatacatttatatatacccactatatataatatttataaatatataagtatatatttaatactttaatatataaatatgtacaccagatattttggtac

SEQ ID NO: 369874 - DNA, 201 bp, Homo sapiens
gcaaataaactagaaaatctagaagaaatggataaattcctggacacatacatcctcccaagtctaagccaggaagaagtagaacccctgaacagaccaayaacaggttctgaaattgaggcaataattaatagcttaccaaccaaaaaaagtccaggaccagacagattcacagccaaattctaccagaggtacaaagag

SEQ ID NO: 369875 - DNA, 201 bp, Homo sapiens
tatttattttatattatattcattatatattattatgtttataattatatatctattatataatataatatatctattatgtattatatatattatatctwttatatataatagatatgtgcacacacatatatatatataaaacatatatacacacccatagtatactaggtgtgtgtatgtgtgtatatatatatgtat

SEQ ID NO: 369876 - DNA, 201 bp, Homo sapiens
ggttggcaaaatttaaaaaaatagataaaatccagcattggcaaccatgtggtggaagaggtactcgaggctgtagtactatgggtgagatttttttttttactcctgtgcagttcattctcattatttacagtagttaagttctataaagttaccatgaacactgacttggtgaatactgaactattgttcctaggagaa

SEQ ID NO: 369877 - DNA, 201 bp, Homo sapiens
gagtttccatgctgtctctgggtgcaccaccctttagggactttcatttgctcagctatctggaagctctctgaaccctgtccttttgtatttttatgaargtctcatttcatagtcatggttggttaaattattggccactgatgattggctttaaccttcagcttctcttccctcccgaaaagttaggaagtagagctg

SEQ ID NO: 369878 - DNA, 201 bp, Homo sapiens
tgtccttttgtatttttatgaaagtctcatttcatagtcatggttggttaaattattggccactgatgattggctttaaccttcagcttctcttccctccsgaaaagttaggaagtagagctgaaagtcccttctgatcatacattgatctttctggtgaacagctctcattctgaagctacctgggtggtgtcagccatc

SEQ ID NO: 369879 - DNA, 201 bp, Homo sapiens
gcatggctttcaatatacacagattaaatgtagaaataaaagatataaatgtgtgtatgtgtacacactcagaaaaatacatctctctctctctctctctmtatatatatatatgcatgtattcccatacacatattccatagcaaagaacatacctagtttccagatcttgacttctaaataccattcttcactctacga

SEQ ID NO: 369880 - DNA, 201 bp, Homo sapiens
aagttaggaagtagagctgaaagtcccttctgatcatacattgatctttctggtgaacagctctcattctgaagctacctgggtggtgtcagccatcagtmaactcattagcatacaaaaaggtacttatcactttgaagattccaaagattctaggagttgtatcccaggactaagaccaaatgtgtttagacaaagatc

SEQ ID NO: 369881 - DNA, 201 bp, Homo sapiens
gtttttccccattcagtatgatactagctgtgggtctgtcatatttgtcaaatatgcttttattatgttgaggtatgttacttctatattcagttttttgrgagttttcatcatgaaggtatgttgagttttatcaaatgcttttacaacatcaatggacatgattgtatggtttttatctttcattcttttgatatcaca

SEQ ID NO: 369882 - DNA, 201 bp, Homo sapiens
atggtagtcagagaagcccatacttaccaaaaaagtaagaaaagatgtcctctttgagaatctttctggaaatataagtaaacagacttacaaacaaataytagagtttgggggggagttttttgaatatggaagagtggatttttgccattttgtcaagatctattgctgtgcacatttatttactcctttagatcttta

SEQ ID NO: 369883 - DNA, 201 bp, Homo sapiens
ttatatataatatacagtatattatatataatatacagtatattatatataatatacaatatattatatataatatacagtatattatatataatatactrtatattatatatagatataatatataatatattatatattatatctataatatataatatataatatataatatattatatctataatatatagtatatt

SEQ ID NO: 369884 - DNA, 201 bp, Homo sapiens
attatatataatatacagtatattatatataatatacagtatattatatataatatacaatatattatatataatatacagtatattatatataatatacwgtatattatatatagatataatatataatatattatatattatatctataatatataatatataatatataatatattatatctataatatatagtatat

SEQ ID NO: 369885 - DNA, 201 bp, Homo sapiens
ttatatataatatacaatatattatatataatatacagtatattatatataatatacagtatattatatataatatacaatatattatatataatatacartatattatatataatatactgtatattatatatagatataatatataatatattatatattatatctataatatataatatataatatataatatattat

SEQ ID NO: 369886 - DNA, 201 bp, Homo sapiens
ttatatataatatacaatatattatatataatatacaatatattatatataatatacaatatattatatataatatacagtatattatatataatatacartatattatatataatatacaatatattatatataatatacagtatattatatataatatactgtatattatatatagatataatatataatatattatat

SEQ ID NO: 369887 - DNA, 201 bp, Homo sapiens
ttatatataatatacaatatattatatataatatacaatatattatatataatatacaatatattatatataatatacaatatattatatataatatacartatattatatataatatacagtatattatatataatatacaatatattatatataatatacagtatattatatataatatactgtatattatatatagat

SEQ ID NO: 369888 - DNA, 201 bp, Homo sapiens
gatttttttaatttctccagtaacatttgtaatggattttatttatttatttatttagagacagagtcttgctctgtcaccagactggagtgcagtggtgygatctcggctccctgcaatctcctcctcccgggttcaagcaattctcctgcctcagactctcaaatagctgggactacaggcgcctgccaccatgcctgg

SEQ ID NO: 369889 - DNA, 201 bp, Homo sapiens
taccacattgtggttttgatttgcatttctctatacgccacagttacagtgttataatatcctgtgtttttctgtgtacttactattaccagtgagttttktaccttcaggtgattatttgttgctcattaatgtctttttctttctgattgaagtactccctttaacatttctcatagaacaggtctggtgttgatgaaa

SEQ ID NO: 369890 - DNA, 201 bp, Homo sapiens
actaagaaagtgatatttaagaaaacatttagctagggacagtggctcatgcttgtaatcccagcactttggaaggttgaggtgggaggattgtttgaggscaggagttcaagactagcctggtcaatatagcaagaccctgtctctatttaaaaacaaacaaacaaacaaaaataaaacaaacaaacaacaacaacagac

SEQ ID NO: 369891 - DNA, 201 bp, Homo sapiens
cttttagtatttccattttttttctttgaaggcacttgagtaaaggtgacaaaatataagggaaaatctgtctaaatctctatttgtctttttctttgtgsatttttaggaggtgttctttgagttgctgatcatgctcaggctcagtcatactgttacagatcttggctaattgacttttagtctgccttctctctttct

SEQ ID NO: 369892 - DNA, 201 bp, Homo sapiens
acttaccatcgagtaagactggtgctctaggaaagttctctctgtatagacagagaccttaagactttaagatactaaggcttctgggtataataataccwcattgtccagttcaagtcacttcaagacttctggtataataatacacattttcctttaagactttaagatttctggaacaaagtgtgattatgtgtgagg

SEQ ID NO: 369893 - DNA, 201 bp, Homo sapiens
aagaggaaaaatgatttggcttctttaagaaagtctctttttgatgcagtgtaatctttaaatgttcctcataaagtacttttgatagaagttggaatctycagggaagaaggagctaatgattgtctgtgtaatcattaggttgtggcattctcatcagagcatctgtgacagacaactcaaggtgtatctatgtgctac

SEQ ID NO: 369894 - DNA, 201 bp, Homo sapiens
aggaaaaatgatttggcttctttaagaaagtctctttttgatgcagtgtaatctttaaatgttcctcataaagtacttttgatagaagttggaatcttcarggaagaaggagctaatgattgtctgtgtaatcattaggttgtggcattctcatcagagcatctgtgacagacaactcaaggtgtatctatgtgctactaa

SEQ ID NO: 369895 - DNA, 201 bp, Homo sapiens
taaatcaagtttgaatataatttgtacttggagtaataaaccttttcccacagaggaaacagcactagcttgggagttcgtttccaaaagctctactgaayaagcacaggtttcagctcacttttgtacctgtttctctgtcccttggtgggctccctctaccagcttcttaggcttctcagtcacttgtctgcttgactt

SEQ ID NO: 369896 - DNA, 201 bp, Homo sapiens
gatttaatgctcagtattagggatttaatttagtttctcttgcaaaatatgtgtttttttaaatatagagtataaacaaaaagtactttgctataaaaaaatttgcatttctaagaaactaaaatgtcttaaaattttgtattttttcactcattgtccttcattttcaggactgttgggaaagatcctgatggctatccg

SEQ ID NO: 369897 - DNA, 201 bp, Homo sapiens
tttctcttgagtaatcagcatggtttaaatatgtctttggatgattgtgggaaaaataaaagtgtcttaaaaataaaagtgtcatctacgttatagtttayggatatattataaacataattagacacacaacttctaccattagaatttataagtcaattattaacttaaaaagaacccccaaattttccctaaccagag

SEQ ID NO: 369898 - DNA, 201 bp, Homo sapiens
ccagagcatcagatggcaaatccagaattagcaataaaactcctagattcccttcttccctatgcttttatttgcttattataatgaagatctttggggcragggtatttttactaacatatatgatgggaagtcctgctcaatagtcaagggaaaaggacccatctttgacttatttttttcattttttgctctctgtgg

SEQ ID NO: 369899 - DNA, 201 bp, Homo sapiens
aaactgggtttgaaattcagttctatcacttactagttattaaggcatattgtttaatccttgaatatagatactcaacatctataaaatgaagattatamtagtactttcctcataggcattatcttagttcatttgagctgctacaatataaataccatagactggatgtcttaaacaacaaacatgtatttcccacag

SEQ ID NO: 369900 - DNA, 201 bp, Homo sapiens
tcctccatgaacaagcacttttctgtctagcttttgcctttccctttccatacttaaaaaaaaaaaattctcttgccttttagctacttgcttttcattgwacataccaagcaacttcaaactggtagtatgcctcctctttctactttgcacttgcaattccttctacacagaatacttgcaccctcttgttgcttgcca

SEQ ID NO: 369901 - DNA, 201 bp, Homo sapiens
catagttagcttgcctatgcccaggtatgagcaagggcagttagctttgtgaggttagaagcaatatggagtcagttaggttagatttctctcactgttayaatttttgcaaaggtggattcacttccagacccagtgtaggtgtcttttctgtgatgccttccttccctactcaaagagggttgagtcgagtcaggtgcg

SEQ ID NO: 369902 - DNA, 201 bp, Homo sapiens
agttagctttgtgaggttagaagcaatatggagtcagttaggttagatttctctcactgttataatttttgcaaaggtggattcacttccagacccagtgyaggtgtcttttctgtgatgccttccttccctactcaaagagggttgagtcgagtcaggtgcggtggcatatgtgtgtagtcccagctattgaagaggctg

SEQ ID NO: 369903 - DNA, 201 bp, Homo sapiens
cacaccagcatggcacatgtatacatatgtaactaacctgcacattgtgcgcatgtaccctaaaacttaaagtataataataaaaaaaaattaagaaaaawatagaaaagaaagtgtggtgcatatacgccatggaatactatgcagccttaaaaagtgatgacttcatttcctttgattggacatggatgaagctggaaa

SEQ ID NO: 369904 - DNA, 201 bp, Homo sapiens
tcttttatctcaaacattctgtttgggattattttacctttgcttaaattacatttttaaaaaatattttccttttgagtgtgtttactaatagaaaactyagtttgcactcatctgaaaatgtctttatttcacttacattcatgaaactattttcttatctctgttgtatctttttgtttctctgtgcttcattctgaa

SEQ ID NO: 369905 - DNA, 201 bp, Homo sapiens
gtaactaacctgcacattgtgcgcatgtaccctaaaacttaaagtataataataaaaaaaaattaagaaaaaaatagaaaagaaagtgtggtgcatatacrccatggaatactatgcagccttaaaaagtgatgacttcatttcctttgattggacatggatgaagctggaaactgtcattctcagcaaactatcacaaga

SEQ ID NO: 369906 - DNA, 201 bp, Homo sapiens
accctaaaacttaaagtataataataaaaaaaaattaagaaaaaaatagaaaagaaagtgtggtgcatatacgccatggaatactatgcagccttaaaaartgatgacttcatttcctttgattggacatggatgaagctggaaactgtcattctcagcaaactatcacaagatcagaaaactaaacactgcatgttctca

SEQ ID NO: 369907 - DNA, 201 bp, Homo sapiens
gtttataggttatagttattaattccatccataaaataaattacttttactctgaaatcaggctgtttaggtttgaattctggctctgccacttactagcyatgggatattggattaattacttcatctctttctaccttgtttccttatttctaaaatgagaataattctatacatttttcatggggtaactaaggatta

SEQ ID NO: 369908 - DNA, 201 bp, Homo sapiens
ccagaattagcaataaaactcctagattcccttcttccctatgcttttatttgcttattataatgaagatctttggggcgagggtatttttactaacatayatgatgggaagtcctgctcaatagtcaagggaaaaggacccatctttgacttatttttttcattttttgctctctgtggtagccctaagagtgtacttca

SEQ ID NO: 369909 - DNA, 201 bp, Homo sapiens
ctctgggtatgtacccagtaatgggattgctgtgtcaaatggtatttatggctttaggtctttgaggaatcgccacactgtcttccacaatagctgaactratttacacttcccccaacaggtatataagtgttcctttttctccaccacctaaccagcatctgttattttttgactttttagtaatagccattctgactg

SEQ ID NO: 369910 - DNA, 201 bp, Homo sapiens
tttagtttttatacttaactctatgatgcattttgagttaatttttatgtaaggtgcaaggtatgatcacaatttgttattctttagacatatattcttcyagcattatgctgaaaagaccttatttctttaattaattgcttttgcacctttgttgaaaatgtattgaatatatatatctgggtcaatttcagcgatttg

SEQ ID NO: 369911 - DNA, 201 bp, Homo sapiens
agggtatttagtgagaaattgaaaggaaatattgctgagggtgtgttgataactgatactttgttgaaaagcagaaacattcaatataataggtagaagtrattttgtttcttgcatattggtaatttcattttgtgtgacttacagaagagtgcttgttctttatatgttagtgttaaaattcttctgtctttctttgca

SEQ ID NO: 369912 - DNA, 201 bp, Homo sapiens
aattctcatggatgatatcctgaaatatgtttttcaacttgttttctttcttcccatttctttcaggtatgccagagagtcatagatttggtcttttacayaattccatatttctcagaggttttattcattcctttttgttctgttttcttcctgtctgactgtattatttcagaaagccagtcttcaatctctgagatt

SEQ ID NO: 369913 - DNA, 201 bp, Homo sapiens
gaaattgaaaggaaatattgctgagggtgtgttgataactgatactttgttgaaaagcagaaacattcaatataataggtagaagtaattttgtttcttgsatattggtaatttcattttgtgtgacttacagaagagtgcttgttctttatatgttagtgttaaaattcttctgtctttctttgcagaatcatagtgaaa

SEQ ID NO: 369914 - DNA, 201 bp, Homo sapiens
aaatagaggctaaaaagaaaaagggaaaaatgatgtattatttttcacaattctgtgggttatcaattgatgattcttctgtgctatgccttgcttgagtyattcatgtggcttcattcatctgggagctgtactggagctggagtgtacaagactgaatctcattctcaaaagactctttccatgtggcctctcatcatt

SEQ ID NO: 369915 - DNA, 201 bp, Homo sapiens
aagatggttcaaagatgtaaatctaagacatgaaactataaaaattatagaagataacctaggaaaaactattctggacattggcttaggcaaataattcrtgagtaggaccccaaaagcaaatgcaactaaaataaaaataaataaataggacctaattaaataaaagaaacttcagtacattaaaagaaataactatca

SEQ ID NO: 369916 - DNA, 201 bp, Homo sapiens
agctaagagacttctgtttctttgtgttctttcactggcaacacaattttaacaagtagatctttttggtattgggattttgtgtacacaagaaagcagawatttgggtgtatgactctttctttagcattttgtaaggactactttgctgaaatgatttggtaataaacaaatctttctattcaggtttttaagagtatt

SEQ ID NO: 369917 - DNA, 201 bp, Homo sapiens
aaagatctctacaaggagaactacaaaacactgctgatagaaatcatagatgacacaaacaaatggaaacacatcccatgctcatggattggaataatcartatcatgaaaatgaccatactacccaaagcaatccactgattcagtgcaattcctatcaaaataccaacatcatttttcacagaattagaaaaaacaatt

SEQ ID NO: 369918 - DNA, 201 bp, Homo sapiens
atttatgaatttcaactttctgagactagaattaattatatttgaagtgaaattttaattcctttgtcatctttcttggctttaatttctgtagcttataytttgtatggtttggggagtttttttttcctgtagagtgattggtgctgtaattaaaatagggattatttgtagaagttaaggctatatgtataaaaggct

SEQ ID NO: 369919 - DNA, 201 bp, Homo sapiens
gaggtaaaagatctctacaaggagaactacaaaacactgctgatagaaatcatagatgacacaaacaaatggaaacacatcccatgctcatggattggaakaatcaatatcatgaaaatgaccatactacccaaagcaatccactgattcagtgcaattcctatcaaaataccaacatcatttttcacagaattagaaaaa

SEQ ID NO: 369920 - DNA, 201 bp, Homo sapiens
actagaacctgaaccagtagtattgtgacactaagatgctagatagtgcttctcaaactttagtgtgcaacagaaccacttggggagactgtttaaaattmttattcatggaccctaattttagaatcttttttcagtatatctggagtagagcccaagaatatgcatttttaaaagaatccctgggttttcctgataaac

SEQ ID NO: 369921 - DNA, 201 bp, Homo sapiens
ggctccatcacagcaggaactcagtcacagtatgcattttcctgtcctcttggagatgtactgaaatggtatatggataaaaaaacaagccgtattttagrtgagacctgtgcttggaaggggcttaagaatacttctccctggaggtagggagattgacctaaataaccttttgaactaaatcaccttttgaatttttaa

SEQ ID NO: 369922 - DNA, 201 bp, Homo sapiens
tgtatacatatgtaactaacctgcacaatgtgcacatgtaccctaaaacttaaagtataataaaaaaaaaaagaaaaaaaaaaaaaagaaaccagagtatstaggtaacaagtaacaggataactggaacagtacctcacatctcaatattaacattggatataaattgcttaaattctccacttaaatgatacagattgg

SEQ ID NO: 369923 - DNA, 201 bp, Homo sapiens
gggactgttgtggggtggggggaggggggagggatagcattgggagatatacctaatgctagatgatgagttagtgggtgcagtgcaccagcatggcacaygtatacatatgtaactaacctgcacaatgtgcacatgtaccctaaaacttaaagtataataaaaaaaaaaagaaaaaaaaaaaaaagaaaccagagtatg

SEQ ID NO: 369924 - DNA, 201 bp, Homo sapiens
ccatgtggcctctcatcattcagtagtatagcctgagcttctttaccggatggtttctggcttctaagagtaacattccaagataatcctcaatggaaaaktgctcatcatgtctctgtttgcatcacagctaaggaaagtcacatggccaggtccagagtcagtataggaggagactctacaagcacatgaataccagga

SEQ ID NO: 369925 - DNA, 201 bp, Homo sapiens
tccatgtggcctctcatcattcagtagtatagcctgagcttctttaccggatggtttctggcttctaagagtaacattccaagataatcctcaatggaaaagtgctcatcatgtctctgtttgcatcacagctaaggaaagtcacatggccaggtccagagtcagtataggaggagactctacaagcacatgaataccagg

SEQ ID NO: 369926 - DNA, 201 bp, Homo sapiens
ccgtatgttctcacttataagtgggaaccaagatatgggtatgcaaaggcatacagaattctatgatggactttggcgactcagaagagggagggttgagrggggtgagggattaaaaaactacttattgggtacaatgtacactacttggatgatgggtgcactaaaatctcagacttcaccactatataattcatccgt

SEQ ID NO: 369927 - DNA, 201 bp, Homo sapiens
attccttctgttgactttagtaacacttgtgatttcttttatatgttagcattgaacattaaactctcataatctctagttttttgatttgtctttacacyaatcatgttttaaagatacacgtctattttttagttaaaatggctttgaattttatttcactagatttaaattttaaaggaaatcatatccttccaattt

SEQ ID NO: 369928 - DNA, 201 bp, Homo sapiens
tttaattttaattaaaattaaatttaaaaattaaattaaaattaaaattaaaattaaattaaatttaattttaataaatacaaaaaatgtacctcttctgytcttccatcccaactggaataaattaagtttagaatactttaaaaattattattctgtcttcccctggttgttatggcacttcaccaccgctacccccac

SEQ ID NO: 369929 - DNA, 201 bp, Homo sapiens
gtttattatatggattgtgaagcaaagcatacaggtgatagtgaattatcttgtacaacagcctggtcgcttctttaaatttcagttttgtaagttgtttygctcaccaaagtgtccttttcatgggctctcatgctcgtgagtagggttttgttgtcatctgtatcttgctgttacatccagtaagtttaacattcatgg

SEQ ID NO: 369930 - DNA, 201 bp, Homo sapiens
tcacttctcatttctaagagagctagaacataaagagttcttggtctgtgagataaattgtgggaaaaataaggtatatttgaggcatctgtggtctttttagatatgcagattaaaatatattgtcattttaggactcaggttttaaaaggaaagaaaaacaaggtgaatgttcttgtgttctttttactttaaaaatta

SEQ ID NO: 369931 - DNA, 201 bp, Homo sapiens
atctgtatcttgctgttacatccagtaagtttaacattcatggtaacgatatttttcaagtgtttctacagtgtaaggggctcattggctgcaagattgctgtgaggtatattatagatgatagatactatgattttctgtttatttgttttatttttgttgttgttgttctgagacagaatcttgttctgtcacccaggc

SEQ ID NO: 369932 - DNA, 201 bp, Homo sapiens
aattaattctctttcattgaaaaacctacttctgtatgcactaacacaatattcacctaattacatacttacaaaattggtggctgtccttgagttccatrtgtattttatccctaaatccacatggggacctaatcttaccaatttacttgtctccttcatagatctctcttatttctcttctcttttttatcttttaca

SEQ ID NO: 369933 - DNA, 201 bp, Homo sapiens
ttgttttatttttgttgttgttgttctgagacagaatcttgttctgtcacccaggctggaggacagtggcataatcttggctcactgtaagctctgcctcstgggttcaagcgattcttgtgcctcagcctcccaggtagctgggattacaggcatgtggcactacgtctggctaatttttgtatttttagtagagatagg

SEQ ID NO: 369934 - DNA, 201 bp, Homo sapiens
attagagttgaatttccttttcagctccagcttgagccatctttccttagaaagggtttgattgatagcgtatttgggttaattaatatctttttgccatmtcttttatacttgccctgttatgctttagatatgtctcttgtaaataacatataggttttttttcaatttaatctggaatggttatattttcattggtaa

SEQ ID NO: 369935 - DNA, 201 bp, Homo sapiens
agttctataataatatggctctctcccaactcatacaacaagattaggacactttagctctaatcttctctcttaaatcttacatagttttgttattattkttgtttttggacattcagtttttttgcctgcatgttagacattcttttatttatttatttatttattttgatagaaacaacatttgcttagatttaccta

SEQ ID NO: 369936 - DNA, 201 bp, Homo sapiens
aattgaatcttttattactatgaagagaccatcttcatctctagcaatgccttttactttaaactgtactttctctgatattactatagctgcactggctytcttttagttaacattcgcatggtataccttttccattctttttactttagattttcagtattctcttctatgtgtgcctttcattagtttttgtttttg

SEQ ID NO: 369937 - DNA, 201 bp, Homo sapiens
tgacagaggaatttatttagagttatttatcacatagtcaatcctttgtctcttgtaggcatttaagagaaaatcagattacattttaagctgtttgtcarttttagacttttcacattgcttcttgtttatagacattgatgactactgccatgttttattttttctttaagagccatggtcagtgaaatgttcttccag

SEQ ID NO: 369938 - DNA, 201 bp, Homo sapiens
cctcaacaaaatactagctaattcaagcagcacatcaaaaagataatacaccatgaccaagtaggtttcattccagggatgcagggatggtttaaaatatrcaagtcaataaatgggatacatctgataaaaggaattaaaaagaaaaactctatgatcatctgaatagatgcagaaaaagcatttcataaaatccagcat

SEQ ID NO: 369939 - DNA, 201 bp, Homo sapiens
tatatcagataaaacagattttaaagcaacaacagtaaaaaaagacaaagaaggtcattatatgatgataaaaggatcaatccaacaagaagatattatawtcctaaatttatatacacttaacactggagctcccagattcataaaacaattactattagacctaagacatgagatagacatgaaataataatagtatga

SEQ ID NO: 369940 - DNA, 201 bp, Homo sapiens
agttcaattagaaatgaaactggagactttacaaccaaccccacagaaataaaaaagatcatttgagaccactgtgaacacctctatgcacacaaactaaraaatctagaggaaatggataaattccaggaaacataaacactcctagattaagccaggaagaaatagaaaccccgaacagaccaagaacaagcagtgcga

SEQ ID NO: 369941 - DNA, 201 bp, Homo sapiens
gagctaagtttgtcttattggtgaaaaaaatccaaaatgaaaagaccaacctttctccttttatggattccttgaattaatgccagtgttataagaacaaytggaaatgcagagggaaaagtagcagcaattctttatcacaaaagcagaattactccagctaatatagtttttatgttgcatttgcaaatagtattcttg

SEQ ID NO: 369942 - DNA, 201 bp, Homo sapiens
tcttcatgcagtcacccatgttatgaataaagagtcaatagaagaatttataattatttccaaatcaatgttgaactgactatatagcatacatatgttgragtctaagagaccaaaaaccaagctcataatatatttaatgcaatgttttagagattagtcctttgtataaaatgtattctaagaaatggagattctaaa

SEQ ID NO: 369943 - DNA, 201 bp, Homo sapiens
tgagagtccagctgccttttattaaatgagacattaaagagatttttaaaaaatgtaaaacaatatctctcttctcactaattaaaaaaaatactataatytcttcctggccttttggcttagatcacatttttaaaaaattataattttcctcacaaaatgttatttatgttaacatttaaaggatttttgttatattta

SEQ ID NO: 369944 - DNA, 201 bp, Homo sapiens
atagtagaaataatagcagtgaaagcttagagacaggaaagcatctaaataattaaaagaactgattagtgtgaacatctttgtggctagttcaaattgttgtgttgtcattttagtgaaccacatgcaaagtgaataacacagcctgaatctgtttataaaacatggttcatttgattttattttatactaggcctatag

SEQ ID NO: 369945 - DNA, 201 bp, Homo sapiens
tgtttgagaacttctggcctacaggataaaatccaaacctctgtatatggtccataagtccttctatcatggcttctgccacctctgctcccttctcttcygtctcatttcctttccactctattattcagtaagatgaagatacttttattccagaactatggtgttttacatctccttacctttgcttaatgttccttt

SEQ ID NO: 369946 - DNA, 201 bp, Homo sapiens
tggaaatgtttacatttagctcttcttattataaataataggcaaatatacctatttattttttacctagataggtaaatatacctatctaacaagcagtmcaacctgtttgaccagatattttctaagttatttagtgaaaataagacttatacatttacttatccctttctatcatgaagtaagtaactctaaccccgt

SEQ ID NO: 369947 - DNA, 201 bp, Homo sapiens
ggaaattagggcttattctttgaaaaaccacagatgtatttattatttgagacaaatgtgtagtatgggatcttttctccctccgataatattaaatgctrtgttctcacttgtaagtgggagccaaacaatggttacacatggacatacatagggaaataatagacactggggactctaaaagcggggagagtgagaaga

SEQ ID NO: 369948 - DNA, 201 bp, Homo sapiens
tctccttctattccagtgtctcctgacagttgggatgacttcaacatctctgtcagtgatcatccagggctctgctctatttgctttcccatctcagtgayggtcactatgatttcaattaggtattcctccagatccttgctttttgtttttttaaaaaacgtggtctcgctttgttgcccaggctagtctcgaactggc

SEQ ID NO: 369949 - DNA, 201 bp, Homo sapiens
attcctattgcagccccttagtttaggcattttataggctcatattcaggctttcaacgtatcaacataggctactgactgatttgtctacttcttgactyactaccttctattccttgatggctcatttcctacctcaagattgctccatgccattttcttattgccattagaatgaacctcataaaatgaaaatttgaa

SEQ ID NO: 369950 - DNA, 201 bp, Homo sapiens
taaaggtgatcacacctatttcaatatattgttgtaaggaataaatataataatttaatcatggctataattggctctagaaaattttgatttttttctcytttccatgtctcgggatgaattttattctctatattggcattacatatttcataatctcttcatagccaaatgaatgtttaagtacatttggttagaatg

SEQ ID NO: 369951 - DNA, 201 bp, Homo sapiens
ttatatctttagtaagaagtttataaaaatcaatgaaaaataatgctagtatcctatttaaaaatccattaattttaagtactgagccacatatttacatkgagcaatcctcattccttttgagtctcagccagaaagcaagccatctaatcaaattaaagggagaaaggcatcagtaggttgggtgaacaacattatagt

SEQ ID NO: 369952 - DNA, 201 bp, Homo sapiens
tgaaaaacatcaaaagtagaataatattttgtgacacatgaaaagtatgtgatatgcaaatttcaatgtccataaataaagttttataggaacatagcggrgaaaaggcttttattcttttagtgtagccttttatgtttgaagagcaaattatattgccttgcaagaaattcaaaggtcagtacccaggtgctagcctct

SEQ ID NO: 369953 - DNA, 201 bp, Homo sapiens
cgcttgttcaaaattgcgttgttcatacactcctaggaaacctttcagtgagaaacaacacccactttggtagaggtcatacctttgtgctgtactcatcrgtacatttgactagaaattgggcaacagattattatataaatcagataaacaatttggtttttacagtgtttgaagcccagcaagtttgtgcttttttga

SEQ ID NO: 369954 - DNA, 201 bp, Homo sapiens
aaaaaaaaaaagggaaatagtttacaaagtcattgagcaaaacttaaagactaatgagaaaactgatatttgaagaatcttacctagaattataaagtaawtgtcagccaaaactttctaaaagtattagcttggtgatatattaacaagattgtaggatgacatgtaagcctatttaaaaaaatatagaaatgttagttt

SEQ ID NO: 369955 - DNA, 201 bp, Homo sapiens
tcaagaccctttttcaagtaggtccttaatttggggattagtggtatgtaaaggaggatatcctagaaaactatggagttacatttgtaaaatttattacwtgagaataatctgtcaaaagggccatagcaacatcttgcaactgcacagaattctaagaattatattctctgtctttttattaagtaagaattcctatat

SEQ ID NO: 369956 - DNA, 201 bp, Homo sapiens
agcctatttaaaaaaatatagaaatgttagttttaaacactgacctaattctagatctacagtttagcatagtgattggtgattgggtatagtttgtactratgaaaaaaataattttaaaaatgattaattgagcctataggtaaggcatggtagtgtagtagcaaacacagtcgtggacttgtggagtcagaaagatct

SEQ ID NO: 369957 - DNA, 201 bp, Homo sapiens
tggttgaggtactaatttgcatttccatcaacagtgtataagtgtgttccctttctctacagacttgccagcatatctgtcgttttttgactttttttttwaaaaaaaatcaacttctattttagatacagggggtacacatgcagatttgttacgtgggaatattgtgtgatgctgaggtttggagtatggatcccatca

SEQ ID NO: 369958 - DNA, 201 bp, Homo sapiens
tgactcctctgagtcttagtagtctcatctgtaagttggagccattaatactacctatgcagtaaggtggttgtgagggctaaatgagatgatgcacgtayagaacctagagtgatgctgttatccattattattcttgatgagttgatgtttaataacactttttcttcaaagagtaatctatgtaaagtttatgtttta

SEQ ID NO: 369959 - DNA, 201 bp, Homo sapiens
tactaatttgcatttccatcaacagtgtataagtgtgttccctttctctacagacttgccagcatatctgtcgttttttgactttttttttaaaaaaaaatcaacttctattttagatacagggggtacacatgcagatttgttacgtgggaatattgtgtgatgctgaggtttggagtatggatcccatcatccaggtag

SEQ ID NO: 369960 - DNA, 201 bp, Homo sapiens
taggatgcagtgttttggactaagctcctgtactaggtcccaaatggccagactgaaaatcaatacagagtcattcatactaaagttctgtgtcaacgacytaggttgttatctgaccttctgagaaatcaggagagagcgagccaaatttcccaaacaggctaattttgtttggtataataatgaagttttctctgtctt

SEQ ID NO: 369961 - DNA, 201 bp, Homo sapiens
agatgcaatatcaaaggctggagaaataattgaaataataaacaaagctggatttactataaccaaactcaaaatgatgatgctttcaaggtaatttttttatcattttcagttatgtaatgtctgattcctttttaaaaaatcattttctgtctttcttgtcattgtttaaaattaaaaaacctcgtattgaatgacaaa

SEQ ID NO: 369962 - DNA, 201 bp, Homo sapiens
aaactgtctcacatattaaaagtactcagtaaatattacctgctattattgttgtttttattattatttagtctgatataattctttggtagtagattccrtgttgattatttacacctgtattttctgcttcaacatgtacagtcataaaaaggtgataattcctatctcatgctgttactatgatccacacttattata

SEQ ID NO: 369963 - DNA, 201 bp, Homo sapiens
tcacatagagcgtggaaagctgctgaaaatactttagcttttactctgagtaagaaggggaccattgcagagtttgagcagaggaccaacataacctaacrtgttttaacacaataatgctggcttccatgtggtgaatagacaaagtggggccggagcagaagcaggaagaatgaataatgaatgccagtacttgacatg

SEQ ID NO: 369964 - DNA, 201 bp, Homo sapiens
gtagaatggacagagaaggctgcatttaaaagttaacattggatacagacttgaaggagatgagggtgacagtcacctagcaatccaggctggaggaacarcaagtgccaaagctggagtatgcttagtatattggaagaagtcaggaggacagtgtggccagagtggagtgaatgtgtgaggtgaggtcaaagagataca

SEQ ID NO: 369965 - DNA, 201 bp, Homo sapiens
aatctatcttcacagaggacgttctagttggggggaaacagatcaggagcggaataaataagtaaaatatataatatgatggtaagtgtgtaggggaaaayaaagcaggggagggaaatagggttttccagaaaagggagggatttatagtttttaagtagaatggacagagaaggctgcatttaaaagttaacattggat

SEQ ID NO: 369966 - DNA, 201 bp, Homo sapiens
tgttccttgacatagaacagataatatatgttacactttatgtattctaaatatttgacatgtaattaaatttaagtgaatattttgcatgctcatattaytattactgttgccaaagactgtttacacttctaataagaaagaatgttacatcagccaaactaaatggccacagtagacatgttatttgatatcctgcac

SEQ ID NO: 369967 - DNA, 201 bp, Homo sapiens
atatttgaattaattaattagttaattcatcaaatattttctggggacttactacatactaagtactattctagatacagtagaaatacagtggcaaaagracaaacaataaaatctatcttcacagaggacgttctagttggggggaaacagatcaggagcggaataaataagtaaaatatataatatgatggtaagtgt

SEQ ID NO: 369968 - DNA, 201 bp, Homo sapiens
atatttgacatgtaattaaatttaagtgaatattttgcatgctcatattattattactgttgccaaagactgtttacacttctaataagaaagaatgttayatcagccaaactaaatggccacagtagacatgttatttgatatcctgcactgagtagtgggtttttaaaaaaatttgtatgtaagaaaattattatgcta

SEQ ID NO: 369969 - DNA, 201 bp, Homo sapiens
tccaacttccatatagatatttgaattaattaattagttaattcatcaaatattttctggggacttactacatactaagtactattctagatacagtagaratacagtggcaaaagaacaaacaataaaatctatcttcacagaggacgttctagttggggggaaacagatcaggagcggaataaataagtaaaatatata

SEQ ID NO: 369970 - DNA, 201 bp, Homo sapiens; identical to SEQ ID NO: 80064

SEQ ID NO: 369971 - DNA, 201 bp, Homo sapiens
tcatttgaggcttttgaaatatattcaaagatgatatttcttggatttgatatgactcctctgatttaacccctgggaagaggtcactgggatttaaagartatgtatgttatagtctgtcccttaggtacaccacctgattttattgctaaattatgtcatactccaaagggctttggctgtacttttggtgagtttatc

SEQ ID NO: 369972 - DNA, 201 bp, Homo sapiens; identical to SEQ ID NO: 80067

SEQ ID NO: 369973 - DNA, 201 bp, Homo sapiens
tttacacttctaataagaaagaatgttacatcagccaaactaaatggccacagtagacatgttatttgatatcctgcactgagtagtgggtttttaaaaaratttgtatgtaagaaaattattatgctatagattatttcaaatcaagtgttataaaatattcctaagccttcttagaatagctatatacacttttctaga

SEQ ID NO: 369974 - DNA, 201 bp, Homo sapiens
atgtttatagcattaacttacaactcctagtctaatgatttatgtgtgatttgcatgcagtaaattttattaaaggaatgaattaactagttgcctgttartgagaatgatgtaacaaaagactaggtgaagtaattaaattttcatgaagcagtatctatgatcaggcacatccttccctatattgttacatgccatatt

SEQ ID NO: 369975 - DNA, 201 bp, Homo sapiens
gggtctatttattgagttttcttctggtaatggttagtattttcctacatatttgcctgcctggtaatttttttactggatactgtatattgtaaaatttrcattgttacatggtagatttgtaaagagtgctcaattttggtctggcacctagttaaatcacttggaatcaatttgaaacttttgagtcttgcttttaat

SEQ ID NO: 369976 - DNA, 201 bp, Homo sapiens
ttaaatctagtggttggtcttgggggttttgtttgttttggcagcaaaggtctggcagaaaatgtatgaggaggtattatagaactcttaggatagaagayaagaatacttttttgtacatgctgttttttagaaatattcttcaaaatgaatgggagtgttttaaaaaggaagtactgaggggagctgacatataacatg

SEQ ID NO: 369977 - DNA, 201 bp, Homo sapiens
ccttgatgctccatatatcatataaaaaggcctttcactctggctggtagaaacataaactcttctcagccttgtgctgtctctgagttgtttggtctackttctggcaattctttccccagcctcaagtagtttgctgtacacatgtgacagattagtagccaaagactcatgggaactcctctgcagatcctgtagctt

SEQ ID NO: 369978 - DNA, 201 bp, Homo sapiens
taacccagtgagatgatggcttggacccgggtggtaataatgaaagaagtatacaaatatattttaaaatatatattaacggttgaaggtcaaataaacargattttctgctagattgaatgtagagtatgagaaaaagataccaagtattactccaaagttcttagcctgattatcagaaggatagaatttacgtaaact

SEQ ID NO: 369979 - DNA, 201 bp, Homo sapiens
ggggtcatagacctgtgctgcccatcacccagtgtatgaaaactattgtttcgtatattttatctagtttctagatgtttaatatgggagaataaatctgstcctattatttcttgttgctagaatgcattatgatttttaaaaggttttttaggataaaacctttgaaatttatatatatatatttagtaatgtgaattc

SEQ ID NO: 369980 - DNA, 201 bp, Homo sapiens
tagagtcagaatgaatggacaatcaggagttaacgttttggacatttataaacttaacctgtttgttagttttccaattagactgatgaaaaaaattagtrtgacagcttagagttatcagcacataaatggtatttaaagccgggagactggttgagattaccaaggagaaggtatagatagagaagtaaagaggaccaa

SEQ ID NO: 369981 - DNA, 201 bp, Homo sapiens
ttcaagaaggcctttgcaaggaagatatactagaagatcattccaaataatgaaagtgtcggatgataaagcattatattaaaatgtgataggaatggagragagagagcatatctaaaaaatattcttcaaggaaaaatggacagaatttgggaactgcttgatatgtgggatataagtggggaagaagtcacagatgac

SEQ ID NO: 369982 - DNA, 201 bp, Homo sapiens
catttataaacttaacctgtttgttagttttccaattagactgatgaaaaaaattagtatgacagcttagagttatcagcacataaatggtatttaaagcygggagactggttgagattaccaaggagaaggtatagatagagaagtaaagaggaccaaagatgaagctacatcttgataaaaggtaaggagaagaaggca

SEQ ID NO: 369983 - DNA, 201 bp, Homo sapiens
atggacagaatttgggaactgcttgatatgtgggatataagtggggaagaagtcacagatgactttaaggacattagtggaacagtgaaacaattaaaagrggagagttaaaaattgttaaattcttttcattcttttatattacatatcataggacatggtgacagaaatgtattctggcccttgtgtagcaatggagat

SEQ ID NO: 369984 - DNA, 201 bp, Homo sapiens
aaaactgagagataattatgtcctggaggccaagtgaatcaaatattctaaaatgagagaatgaccagtggtgtcaaataaggcaagtaagaagaggactragaatggattgttaaattttgcaatgtggatatcattggtgaactttgtaaggtgaatgttgatggggaggtggaggcaaaaccctgtgtggagtagact

SEQ ID NO: 369985 - DNA, 201 bp, Homo sapiens
atcagggaaatgtggtgtgtgattgctatactgaattaatggcccatgtagtgttcatggccatgaactatgagtgtggttctccagcctgttcaactgcmtggctgaaggtaaggagtaggtggagagctggcttttaaccatggctgtggttttgtgaaacaaatgtgacggaagtgttaaggaagttaaagatacatg

SEQ ID NO: 369986 - DNA, 201 bp, Homo sapiens
tttttatttctactagattatttaataaatttgagcataaatatacttgttagattttagcatatcttgtagtggagcaacttttgttaagttagctactrtctcagtccattttgtgttgctgtgaaggaatacctgaggctgggtcatttataaaggaaaaaggtttatttggctcatagtcctgatggctgggacatc

SEQ ID NO: 369987 - DNA, 201 bp, Homo sapiens
tcttctttaccttgaattcctattagttattgtctaatttttcattccatctttccagattttaccaaaacatagacttatactcactattttcattcctsagctatctttgactactcatttgtgagcaattgttaaaatttagcattattttcatcattcctgaaaatactgtctttggagaccatgacttgtgtctta

SEQ ID NO: 369988 - DNA, 201 bp, Homo sapiens
agcccaggacttaaaggctgcagtgggccatgacagtaccactacactccagctagggcaacagagcaagaccttgacttaaaaaaaaaaaaaaaaaaaargacatttgttttaaagtgtgaagtgtgagagttaaaataagaaggcagagagtgtcaccttgttcaccctcatttgggagtactcatgagtactcatttg

SEQ ID NO: 369989 - DNA, 201 bp, Homo sapiens
taattactgaagaacaaaattttattccatgaaatgaaatgcttttcagtttccaactttatgacgtttctcctaatagcttttctggttttgtttttagsacctgcctttttttttttttagacagagttttgttctgtcgacccggctgtggagtgcagtggcgcgatttccactcactgcaacctctgcctcctgggt

SEQ ID NO: 369990 - DNA, 201 bp, Homo sapiens
aacattttctcacctggtaactttcgtaattcgatttttccttgtgacatacctagaaacctttattacatatgcagtaggcacaatccaggacacatttmcgaataattaccttctctcaattgggaagacaaggacctatggtaacagctccataattatgagtaacgcttaagtcaagaaaaacaccaatccttattc

SEQ ID NO: 369991 - DNA, 201 bp, Homo sapiens
agtagaaacgaggtttcgccatgttggccaggctggtctcaaactcctgacctcaggtgatccacccgcctaggcctcccaaagtgctgggattacaggcrtgagccactgcacccggctcatttagtcttaaaacatttcaaatatgtcaactaaacctacggagaagataagcatatctgaagaagacactgttatgat

SEQ ID NO: 369992 - DNA, 201 bp, Homo sapiens
tagtagaaacgaggtttcgccatgttggccaggctggtctcaaactcctgacctcaggtgatccacccgcctaggcctcccaaagtgctgggattacaggyatgagccactgcacccggctcatttagtcttaaaacatttcaaatatgtcaactaaacctacggagaagataagcatatctgaagaagacactgttatga

SEQ ID NO: 369993 - DNA, 201 bp, Homo sapiens
gcatgcagtaccacgcacagctaatttttgtatttttagtagaaacgaggtttcgccatgttggccaggctggtctcaaactcctgacctcaggtgatccrcccgcctaggcctcccaaagtgctgggattacaggcatgagccactgcacccggctcatttagtcttaaaacatttcaaatatgtcaactaaacctacgg

SEQ ID NO: 369994 - DNA, 201 bp, Homo sapiens
gctgggattacaagcatgcagtaccacgcacagctaatttttgtatttttagtagaaacgaggtttcgccatgttggccaggctggtctcaaactcctgamctcaggtgatccacccgcctaggcctcccaaagtgctgggattacaggcatgagccactgcacccggctcatttagtcttaaaacatttcaaatatgtca

SEQ ID NO: 369995 - DNA, 201 bp, Homo sapiens
tagtagctgggattacaagcatgcagtaccacgcacagctaatttttgtatttttagtagaaacgaggtttcgccatgttggccaggctggtctcaaactyctgacctcaggtgatccacccgcctaggcctcccaaagtgctgggattacaggcatgagccactgcacccggctcatttagtcttaaaacatttcaaata

SEQ ID NO: 369996 - DNA, 201 bp, Homo sapiens
ctccctagtagctgggattacaagcatgcagtaccacgcacagctaatttttgtatttttagtagaaacgaggtttcgccatgttggccaggctggtctcraactcctgacctcaggtgatccacccgcctaggcctcccaaagtgctgggattacaggcatgagccactgcacccggctcatttagtcttaaaacatttc

SEQ ID NO: 369997 - DNA, 201 bp, Homo sapiens
gcctcagcctccctagtagctgggattacaagcatgcagtaccacgcacagctaatttttgtatttttagtagaaacgaggtttcgccatgttggccaggytggtctcaaactcctgacctcaggtgatccacccgcctaggcctcccaaagtgctgggattacaggcatgagccactgcacccggctcatttagtcttaa

SEQ ID NO: 369998 - DNA, 201 bp, Homo sapiens
gagtctcgccctgtcacccaggttggagtgcagtggcacaatctcagctcactgcaacctccacccccggggttcaagcaattctcctgcctcagcctccytagtagctgggattacaagcatgcagtaccacgcacagctaatttttgtatttttagtagaaacgaggtttcgccatgttggccaggctggtctcaaact

SEQ ID NO: 369999 - DNA, 201 bp, Homo sapiens
tttgttgttaatttttttgtagagacagagtctttctatgttgcccaggctagtttcgaactcctgggctcaagtgatcctcctgccttggcctcccaaartgctgggattacaggtgtgagccactgcacctggccttgaggtttttaaaagagaactctgaagacattgggtttccagaattagaaaaatgtatagtca

SEQ ID NO: 370000 - DNA, 201 bp, Homo sapiens
ttttttgttgttaatttttttgtagagacagagtctttctatgttgcccaggctagtttcgaactcctgggctcaagtgatcctcctgccttggcctcccraaatgctgggattacaggtgtgagccactgcacctggccttgaggtttttaaaagagaactctgaagacattgggtttccagaattagaaaaatgtatag

SEQ ID NO: 370001 - DNA, 201 bp, Homo sapiens
ataagtagtttattgaagatgagcagccaattcaatttaattttattcagggcattgtttattatttttaattttttttttttttagatggagtctcactstgttgcccagtgtagagtgcagcggtgcaatctcggctcactgcaacctccacctcccgggctctagtgattctcctgcctcagccatctgagtagctgg

SEQ ID NO: 370002 - DNA, 201 bp, Homo sapiens
ttccatctttccagattttaccaaaacatagacttatactcactattttcattcctcagctatctttgactactcatttgtgagcaattgttaaaatttarcattattttcatcattcctgaaaatactgtctttggagaccatgacttgtgtcttactaattggtttttcttccttcacttgtcctttcagatgctggta

SEQ ID NO: 370003 - DNA, 201 bp, Homo sapiens
cacagggattttaaaatttggaactgatttaacgtgtaaaatgttaacagtggttatctttaggaggtggaaatatgataatgtttcagttctgttttccyatattttgcaaaatttctttaaagtacttatattacttttataataacaaaaatactttttatcttaaaacctgaaagttaatgaacttttgaatgagga

SEQ ID NO: 370004 - DNA, 201 bp, Homo sapiens
gccagtattctttcttctgccctgtttatccccttaatagaatcagcaaaagatcttgtaggtttttccttctgaacattttcttgaattattccctttcyctgtattcctaccatcactcttctagttctgacctgggctgctgcaagagtcctggaatatacttttctacctcaaatatatcttccacataggcttcag

SEQ ID NO: 370005 - DNA, 201 bp, Homo sapiens
aaggttcagacttggaaagacaacctagtatggggttttagagcccaggtggggtaagcatggtttccctgtagaaggaatggcctggcatagggtgcccratcttatgcacagagaggagggcctgtgatcctggggagcagcctggcatggggagtcagaacctgagtgaggtgaagagagcattcacacttggaggca

SEQ ID NO: 370006 - DNA, 201 bp, Homo sapiens
gaaaatgagaaaactgcaatgaactttgtgttcgaattgaaattggagatatgatatgaaggcatggctttcaatatacacagattaaatgtagaaataawagatataaatgtgtgtatgtgtacacactcagaaaaatacatctctctctctctctctctatatatatatatatgcatgtattcccatacacatattcca

SEQ ID NO: 370007 - DNA, 201 bp, Homo sapiens
aagcatatagattaagtgtaggtcccatacgtatgacagtttgttcaagactagtaggtttttgtttttgtatctttttttaacttattaaatggctagtkggaaagatttgtgcttgtgatcagctcttaacttcaatttttacatcaaaacgtccctgaaaacggtctttctcactgtacccaatgttctcaccgtacg

SEQ ID NO: 370008 - DNA, 201 bp, Homo sapiens
atggcctctaatctttagaaatataaaggtcacaaagttgaataaagactgaggaactgttcaggactgaaaaacactgaagagacatgatatctaaatgsagcatgtgattccaagtcaggatactttggccataaatgacattattgagataattagtgaaacctcaccagggtctaagtatgaagactgtattgtggt

SEQ ID NO: 370009 - DNA, 201 bp, Homo sapiens
taaaaataaagacctaacaccacaggaaaagactatggagtatgttaaaaatgctcatcgatgggccattacctttgaaagagccaaaaaacaaaaaaaamaaaaaaaaaaaaaattaccatgccagttttattcccgttgaatatttacaccttggacagcaaaccttgctcacataaagtagaaaacagatacaataaa

SEQ ID NO: 370010 - DNA, 201 bp, Homo sapiens
accagggtctaagtatgaagactgtattgtggttatataggaggctgtagttgttggtaagaaatataaactaaaatatttggaggtagtggagcatcagrttagcaacttatttttgaacgattcatagcaaaaacaaattatctgtagtctattagtaacttttctataaatttacagttctttcaaaataaaacttaa

SEQ ID NO: 370011 - DNA, 201 bp, Homo sapiens
attctaggcaccaaggatacaccagtgaacaaaacaaatgagaaagtgagagagacagagagataaaatctcctcacagggcaccaagcttacattctagytggagacagataataaacaaataaaaaatagaatacatagtatttcatatgatggaaaatgaagaaaggaagcaacctgagttaaggaagtgtagatagg

SEQ ID NO: 370012 - DNA, 201 bp, Homo sapiens; identical to SEQ ID NO: 80063

SEQ ID NO: 370013 - DNA, 201 bp, Homo sapiens
atgatagaaaggcagttggtatcttaggaatagaacactttttattctagtgtcttaccactggaaatgctcaggtgtatacactactatttgaataattmctcatcatccttgtgtttaaaaaaatgctcatcagtgtggcacattaacacattctataatcttttcattttaaatttaatgaaaaataaatacagttga

SEQ ID NO: 370014 - DNA, 201 bp, Homo sapiens
tgctcatcagtgtggcacattaacacattctataatcttttcattttaaatttaatgaaaaataaatacagttgatccataaacaacacaggtttgaactkcacgagtctacttatatgtggatttttttcaacagaaggattgaaaatgcagtatttgcaagaggtgaaactcacatctacagagatttgacttttccta

SEQ ID NO: 370015 - DNA, 201 bp, Homo sapiens
ccaattactgttgctttgtatattgtcctaggaccagtggtgagcagttgagttttggctgcagaagggcaccctaatgccttagaggaataccttagttyagtaacagaggccttgctaaaaactcacccccaatctttttctcatctttacttatctatagtatcgttgtctaagatggcatgctattgattatacgat

SEQ ID NO: 370016 - DNA, 201 bp, Homo sapiens
actacaggtgtgcaccaccacacccagctaattttttttgttgttaatttttttgtagagacagagtctttctatgttgcccaggctagtttcgaactccygggctcaagtgatcctcctgccttggcctcccaaaatgctgggattacaggtgtgagccactgcacctggccttgaggtttttaaaagagaactctgaag

SEQ ID NO: 370017 - DNA, 201 bp, Homo sapiens
atcccagctattcacttcattatctcatgaattctgattatgtattctctcagcttttatccaatctaagagctttttcacttttctcatctgtccttatwaaaaaaaaggcattccatcttctaaaaaatttttatttctattttctaactctattatttttgtcttggagcttttctaactgaaatgtgtatgaagtat

SEQ ID NO: 370018 - DNA, 201 bp, Homo sapiens
acattgcaagtattcaattttatttgctagtattccagtttgtcttctcatttgagggatattatgtatccattctcttagctctttaccttggttttttrtttttgtctttgtttcctgagatggagtctcactatgttgcccaggctacagtgtagtagctactcacaggagcaatccctaattccatgtagggaaact

SEQ ID NO: 370019 - DNA, 201 bp, Homo sapiens
caccatcacacaatatatctatgtaacagacctacacatgtaccctctgaatcaataaaaataatatgaaatgctgtatctctccactttttactttcttyttcaggcccactatactctcatattataccacatttagctcacatctcttgtggtatgcactgtgcactcacaattgtgctggatgctgtttttgtttct

SEQ ID NO: 370020 - DNA, 201 bp, Homo sapiens
cctcaccatcacacaatatatctatgtaacagacctacacatgtaccctctgaatcaataaaaataatatgaaatgctgtatctctccactttttactttyttcttcaggcccactatactctcatattataccacatttagctcacatctcttgtggtatgcactgtgcactcacaattgtgctggatgctgtttttgtt

SEQ ID NO: 370021 - DNA, 201 bp, Homo sapiens
gctcaatgttttcaagagcacatgtattgagaaggttttgcaggttatggaaagcttttaaagaaatgagtccgggcgcagtggttcacacctgtaatccyagcacttggggaggccaaggcaggtcaatcacttgaggtcaggagtttgagaccagtctggccaacgtggcaaaatcttggctctacaaaaaatacaaaa

SEQ ID NO: 370022 - DNA, 201 bp, Homo sapiens
actagtctaacaggaaaatattaggctcaatgttttcaagagcacatgtattgagaaggttttgcaggttatggaaagcttttaaagaaatgagtccgggygcagtggttcacacctgtaatcctagcacttggggaggccaaggcaggtcaatcacttgaggtcaggagtttgagaccagtctggccaacgtggcaaaat

SEQ ID NO: 370023 - DNA, 201 bp, Homo sapiens
ctacaggtatgcaccaccacacccggctattgtttgtgtttttggtagagacaggatttcaccatgttagccaggctggtctcaaactcctgacctcaggycatccacccacctcggcctcccaaagtaggattacaggcgtcagccactgcgccctgcaagttaaatattacttaaaactaacaaatagatatgctcact

SEQ ID NO: 370024 - DNA, 201 bp, Homo sapiens
ttttattatttttgagatggagtcttactctgtcacccaggctggagtgcagtggcaggatcttggctcactgcaacctccgcctcccaggttcaagcaawtctcctgccttggcctcccgagtagctgggactacaggtatgcaccaccacacccggctattgtttgtgtttttggtagagacaggatttcaccatgtta

SEQ ID NO: 370025 - DNA, 201 bp, Homo sapiens
ctagggacagtggctcatgcttgtaatcccagcactttggaaggttgaggtgggaggattgtttgaggccaggagttcaagactagcctggtcaatatagmaagaccctgtctctatttaaaaacaaacaaacaaacaaaaataaaacaaacaaacaacaacaacagaccagactgggcaacaaggtaaaacctcatctct

SEQ ID NO: 370026 - DNA, 201 bp, Homo sapiens
aaataaaacaaacaaacaacaacaacagaccagactgggcaacaaggtaaaacctcatctctacaaaaaatacaaaagttgccaggcatggtggcacatgsctgtaataggttaaggctgcagtgagccatgatcgcaccactgcactccagcctgactgacagagtgagactctgtctcaaaaaaatttgggtgtgtgca

SEQ ID NO: 370027 - DNA, 201 bp, Homo sapiens
tatagtaaaagaaacatttttcttaggtaatcaacttaatttattttataagcattttgttaactttagcaaatgtaaaaataatttaaaaatacattttyaggaaagtattaagtggtttaaatgcattttaacataagaaaattgaaagtaatccaagtacagtgagtatatataaaaaaagttatgtgttagtaattt

SEQ ID NO: 370028 - DNA, 201 bp, Homo sapiens
attaagtggtttaaatgcattttaacataagaaaattgaaagtaatccaagtacagtgagtatatataaaaaaagttatgtgttagtaatttattttcttygaagtgatttgcatgcaataacttgtaatacctattaagtgattcagtgattacaaaataatcctggagaaaatgatcatgtgtttaatgaagaaacatt

SEQ ID NO: 370029 - DNA, 201 bp, Homo sapiens
atttgcatgcaataacttgtaatacctattaagtgattcagtgattacaaaataatcctggagaaaatgatcatgtgtttaatgaagaaacatttgtctarccgagaaaaagaaagaaaaccctcatctcaatgtcgtatattagttggatgaccaacaccgttcccaatttggccaggactgtcacaggtttcacactga

SEQ ID NO: 370030 - DNA, 201 bp, Homo sapiens
aaatgataaaaaaatgaggaaaaagctgtcttggaaggtctccttagccttccttccatcaagtttctgtagcttcttcatcatataaggtatattggaaygcatttcagaataggagatttagagtaaatatttatttatttcaactgtcattatctattcataaattcaggcatttattaaacacttgctatgaacctg

SEQ ID NO: 370031 - DNA, 201 bp, Homo sapiens
ttttttgagacagagtctagttctgttgtccaagctggagtgcagtggcatgatctcgagttactgcaacctcagcctcccgagtagctgggactacaggyacatgccaccatgcccagctaatttttgtatttttagtagagacagggtttcaccatattggtcaggctggtctcaaactcctgacctcagatgatctac

SEQ ID NO: 370032 - DNA, 201 bp, Homo sapiens
ctcaataccaattactgttgctttgtatattgtcctaggaccagtggtgagcagttgagttttggctgcagaagggcaccctaatgccttagaggaatacyttagttcagtaacagaggccttgctaaaaactcacccccaatctttttctcatctttacttatctatagtatcgttgtctaagatggcatgctattgatt

SEQ ID NO: 370033 - DNA, 201 bp, Homo sapiens
tccttccatcaagtttctgtagcttcttcatcatataaggtatattggaacgcatttcagaataggagatttagagtaaatatttatttatttcaactgtsattatctattcataaattcaggcatttattaaacacttgctatgaacctgatatcatgtttatttattggggattcaaagaggagttgagacccttaaga

SEQ ID NO: 370034 - DNA, 201 bp, Homo sapiens
atttaacagcaattgtatagatgtagtatggtatttggatacttaggttgttttcagtgttttgatattaaaattaaaactttgaagaatatctttatacrtaaatatttgatgatatctctaatcttttcctctggctagtttcctagaaatagaattacttgttggaaggatatgagccttaaagatcttgctgcataa

SEQ ID NO: 370035 - DNA, 201 bp, Homo sapiens
tcaatgaaactaaaaattagttattggaaacaattaacataggcaaaactttggttagactgaccaagaaaaaagactgaagatacaaattatcaaaatcrggaatgaaagaggagacatcgctcctatccctgcagaaattaaaaggattataagggaatactatgaacaactttatcccattaaattagacaacttaga

SEQ ID NO: 370036 - DNA, 201 bp, Homo sapiens
aattacttgttggaaggatatgagccttaaagatcttgctgcataattaatacttctttaattttttaggaagtattttagtatattgtaaatccttaggmccatgattataagtaaataacatgcagcatggataacaaacacttatggagaatataccattatgtgccaggtggcagactggttccttatacattattt

SEQ ID NO: 370037 - DNA, 201 bp, Homo sapiens
aaggttatcttagtgagaagtacagaatgctcaggaaatacagccatcctctggtatcttgggggcttggttccagtaccccctcagacaccaaaatctgmgcatagttaagtcccttatataaaatggtatagtatttgcgtggaacctattcacatccagattactattactacttaatacaatgcctacacatcactt

SEQ ID NO: 370038 - DNA, 201 bp, Homo sapiens
atatgagccttaaagatcttgctgcataattaatacttctttaattttttaggaagtattttagtatattgtaaatccttaggaccatgattataagtaamtaacatgcagcatggataacaaacacttatggagaatataccattatgtgccaggtggcagactggttccttatacattatttttaatcttcacagcaag

SEQ ID NO: 370039 - DNA, 201 bp, Homo sapiens
aggaaatacagccatcctctggtatcttgggggcttggttccagtaccccctcagacaccaaaatctgcgcatagttaagtcccttatataaaatggtatrgtatttgcgtggaacctattcacatccagattactattactacttaatacaatgcctacacatcacttaatttgtgtggattcaatgtagtacttagcac

SEQ ID NO: 370040 - DNA, 201 bp, Homo sapiens
ttaggagatcaagaccatcctggctaacacggtgaaacctcgtctctactaaaaatacaaaaaaaaattagccgggtgtggtggcgggcgcctgtagtccyagctgctcaggaggctgaggcaggagaatggtgtgaacctgggaggcggagcttgcagtgagccgctatcacgccactgcactccagcctgggcgacaga

SEQ ID NO: 370041 - DNA, 201 bp, Homo sapiens
ttaaaaatccaaaattgaattaattgacaaattcaaaattaaattaattctctttcattgaaaaacctacttctgtatgcactaacacaatattcacctaattacatacttacaaaattggtggctgtccttgagttccatatgtattttatccctaaatccacatggggacctaatcttaccaatttacttgtctccttc

SEQ ID NO: 370042 - DNA, 201 bp, Homo sapiens
tatccttgacaccctaaaatgttttattcaatttacctgatctaatccttttcaaggaaaaatatgttgcaaggagagtgaaataaaataaagtggtactmgaataaatactagttgtataccttaataattgcacatatagctgggagaactgatagccacatggagaaaattgacacgggaccccttccttataccgta

SEQ ID NO: 370043 - DNA, 201 bp, Homo sapiens
gggaggccgaggcgggcagatcctgaggttaggagatcaagaccatcctggctaacacggtgaaacctcgtctctactaaaaatacaaaaaaaaattagcygggtgtggtggcgggcgcctgtagtcccagctgctcaggaggctgaggcaggagaatggtgtgaacctgggaggcggagcttgcagtgagccgctatcac

SEQ ID NO: 370044 - DNA, 201 bp, Homo sapiens
ataaagagttgagagagtcactctgtagaatcgatcacatctgatttctgttgcttattgtaagccatttgtaaggcaattattaagaaagaggagaggcygggcacggtggctcacgcctgtaatcccagcactttgggaggccgaggcgggcagatcctgaggttaggagatcaagaccatcctggctaacacggtgaa

SEQ ID NO: 370045 - DNA, 201 bp, Homo sapiens
attaacttctcttagttaaatattatttattttatttttttattatttttgagatggagtcttactctgtcacccaggctggagtgcagtggcaggatctyggctcactgcaacctccgcctcccaggttcaagcaaatctcctgccttggcctcccgagtagctgggactacaggtatgcaccaccacacccggctattg

SEQ ID NO: 370046 - DNA, 201 bp, Homo sapiens
tagagagaaatgtgtaactaaaatattaacttctcttagttaaatattatttattttatttttttattatttttgagatggagtcttactctgtcacccargctggagtgcagtggcaggatcttggctcactgcaacctccgcctcccaggttcaagcaaatctcctgccttggcctcccgagtagctgggactacaggt

SEQ ID NO: 370047 - DNA, 201 bp, Homo sapiens
gcacccgggactcaggactggttttatcttccaaggccttggtgaagggctggcccaggatctacagccacacctcatacagcaccagctctgccttcccrcctagagcaatgagggtggagatggcatcagcctgggccccctctcctggaagccctggggtgggactcatacccaagctctaatgctccaatccagcag

SEQ ID NO: 370048 - DNA, 201 bp, Homo sapiens
atcagctgcccctgaagcacccgggactcaggactggttttatcttccaaggccttggtgaagggctggcccaggatctacagccacacctcatacagcaycagctctgccttcccgcctagagcaatgagggtggagatggcatcagcctgggccccctctcctggaagccctggggtgggactcatacccaagctctaa

SEQ ID NO: 370049 - DNA, 201 bp, Homo sapiens
ctaaatgtttgaattattgaattcatgtaagaataccagtttatggctagtagatattaaaaagaagatataatttgagatatttccttttgattcagacstaacactgtgctttcaagcttaacatcctattattttcctatatatagctagtgtttatgaaagtttctctactccttatttttaaatccatataaataa

SEQ ID NO: 370050 - DNA, 201 bp, Homo sapiens
tggagtgcactggcttgatctcagctcactgcaacctccacttcccgggttcaagcgactcttctgcctcagcctcctgagtagctgggactgcaggtgcmcgccaccatgcccatctaattttcgtgtttttagtagagacggtgttttaccatattggccaggctggtctcgaactcctgatctgctcaccttggcctc

SEQ ID NO: 370051 - DNA, 201 bp, Homo sapiens
ttgggaggctgaggcagaaggattgcttgagccaaggagttcaagaccagcctggacaacacagcaagaccctgtctctatcttaaaaaaaaatttttttwaattatacaaattttaaaaacatattttaaaaataaagaaaaaatcctttataattatttggagaaatagagtattctttaacacttatacatgggcaca

SEQ ID NO: 370052 - DNA, 201 bp, Homo sapiens
taaactagttgagtcctgcgagtggtgattttatctatgttaaagaaaattgggacaggtgctgtggtaatcccagcactttgggaggctgaggcagaagsattgcttgagccaaggagttcaagaccagcctggacaacacagcaagaccctgtctctatcttaaaaaaaaatttttttaaattatacaaattttaaaaa

SEQ ID NO: 370053 - DNA, 201 bp, Homo sapiens
atgtaaactagttgagtcctgcgagtggtgattttatctatgttaaagaaaattgggacaggtgctgtggtaatcccagcactttgggaggctgaggcagraggattgcttgagccaaggagttcaagaccagcctggacaacacagcaagaccctgtctctatcttaaaaaaaaatttttttaaattatacaaattttaa

SEQ ID NO: 370054 - DNA, 201 bp, Homo sapiens
gtctgttgagtaaatgcatgtgggaatatatcatgaatggggacagtgcacctccataccctctctctctttatgtggcggaaatgtctcaatgacctgakgagagtgagccccactttcaagtaccacatctcaccattccctccacctgccagttgccagaaaagtccactgcagcatcccaaaaatgtgaacaattat

SEQ ID NO: 370055 - DNA, 201 bp, Homo sapiens
cctgtttttttttttctaaatgttctgtaacttggtgataccacttttgtgattataaaattttaagaagcatataaaatatttaattgtatgtataagtktaattgcccaacgggttcttcctgccccctgcacagagaaaatcagttcaccaagactgtggtattgaagttaccattttaattgacaagaggccgccca

SEQ ID NO: 370056 - DNA, 201 bp, Homo sapiens
gtggattcaatgtagtacttagcacatggcaaattcaagttttgctttttgcaactttgtacaatttttttatttttccaaatatttttgatccgtggttkgttgactttgcagatgcattaactcatggatatggaggactgattttactctgaaggaacccaacccagtctgtgttgagtggggtggggctgaggccta

SEQ ID NO: 370057 - DNA, 201 bp, Homo sapiens
cttcaagccaaaaaacctgaaacccgtggcccaaagtgagaacttctatccctatttgcctggtctttcctgattggttctttctgaataatgtctttttwcaaattgaatgttgcctttttcaaaactacctatggcttaccctgccccccatcctgtgcctataaagaccccagactcagccagtagaggggagaagca

SEQ ID NO: 370058 - DNA, 201 bp, Homo sapiens
gcaaaaattcaaacaaaagccttcatggttttgaaatcaataaaggaactcaggggactcagaagagccacacgggttctatagtcatgtttcaaacaagrctgttcccttcttttcttcagcaggctcagagagcaggttaggaaaggaaagaccagtcttttcaaaggggctaacaatggagatcaatattgagacttt

SEQ ID NO: 370059 - DNA, 201 bp, Homo sapiens
tcttggatgtctactcatctaattttaatccatgatataagctccctttccaaaccacttgcttctaacatgtcttcctacgttttatcttgaagagcackttctcattctttatacttggtttgtcccctaaactacaaagcctgaagaggactaaggttttcctttctcataattcacttttgaaattccaagatcagt

SEQ ID NO: 370060 - DNA, 201 bp, Homo sapiens
tttctttataaatgggagtcttgcctcaagatcatatataaagatgtgagttattgcttatagaggtgtatatatttaaaatatataatagtaatagacawgtctaacataagatgaaagattatttattatatgtgatctctcatgtttagagtgaattggtcttttctatgctatggatattcaccagaagattaagta

SEQ ID NO: 370061 - DNA, 201 bp, Homo sapiens
ggcaaccatgtggtggaagaggtactcgaggctgtagtactatgggtgagatttttttttttactcctgtgcagttcattctcattatttacagtagttawgttctataaagttaccatgaacactgacttggtgaatactgaactattgttcctaggagaaatacagagttaggttcctgtgagcctgtggtcacaacaa

SEQ ID NO: 370062 - DNA, 201 bp, Homo sapiens
agttctataaagttaccatgaacactgacttggtgaatactgaactattgttcctaggagaaatacagagttaggttcctgtgagcctgtggtcacaacawatatattaatgatcaatatataaccttgttttgtgtgtatttctgtttaaagacactaaataaatatcgttgatctagtaacattgaactcatggccagc

SEQ ID NO: 370063 - DNA, 201 bp, Homo sapiens
attatttgttgaaaagattattatttcccccattggttggccttggcaactttgttgaaaatcagttgaaagtggatgtatatatttatttctgagctctsaattctattccattaatccatatgtctatctttgtgccatgtgtacatttgatctttaggtattttcttgttttgtcttatttttctcctagagaatgtt

SEQ ID NO: 370064 - DNA, 201 bp, Homo sapiens
gctcaagcaatcctcctgcctcagcctcctgagaggctaggactataggctgtgtgaccatgcccaaataattttttttttgtaaagatggggtctcatcrtgttgcccaggctggtcttgaactcctggatttgagcaattctccagccttagcctcccaccgttttgggattataggtgagagtcaccatgcctggcct

SEQ ID NO: 370065 - DNA, 201 bp, Homo sapiens
ttgatccatttatccctttgctcatcagaaatttttctagatggcttccacctacagttctaacaagatactggcaaatttattttgctgtatggcatacrttactcatacgagatgtcatttgttggctcccccttgtctatgaaaatgaatgatgcctttgtgatgttatgactcaacctcgtgtacgcctcccctctt

SEQ ID NO: 370066 - DNA, 201 bp, Homo sapiens
gtggtgcagtctcgactcactgcaacctctgcttcccgggttcaagctattctcctgcctcagcctcccgagtagctgggactacaggtgcatgccaccaygcccagctaattttttgtatttttagtagagacagggttttgccatgttagccaggatggtcttgatcgcctgaccttgtgatctgcccgccttggcttc

SEQ ID NO: 370067 - DNA, 201 bp, Homo sapiens
ggagtgcagtggtgcagtctcgactcactgcaacctctgcttcccgggttcaagctattctcctgcctcagcctcccgagtagctgggactacaggtgcawgccaccacgcccagctaattttttgtatttttagtagagacagggttttgccatgttagccaggatggtcttgatcgcctgaccttgtgatctgcccgcc

SEQ ID NO: 370068 - DNA, 201 bp, Homo sapiens
gctctgttgcccaggctggagtgcagtggtgcagtctcgactcactgcaacctctgcttcccgggttcaagctattctcctgcctcagcctcccgagtagytgggactacaggtgcatgccaccacgcccagctaattttttgtatttttagtagagacagggttttgccatgttagccaggatggtcttgatcgcctgac

SEQ ID NO: 370069 - DNA, 201 bp, Homo sapiens
taaatactgacgtccagactcacccccagagattctaatttttttttttttttttgagacagagtctcgctctgttgcccaggctggagtgcagtggtgcrgtctcgactcactgcaacctctgcttcccgggttcaagctattctcctgcctcagcctcccgagtagctgggactacaggtgcatgccaccacgcccagc

SEQ ID NO: 370070 - DNA, 201 bp, Homo sapiens
ttctaaatactgacgtccagactcacccccagagattctaatttttttttttttttttgagacagagtctcgctctgttgcccaggctggagtgcagtggygcagtctcgactcactgcaacctctgcttcccgggttcaagctattctcctgcctcagcctcccgagtagctgggactacaggtgcatgccaccacgccc

SEQ ID NO: 370071 - DNA, 201 bp, Homo sapiens
gccttggttgcacatcagaatcacctagccagttttctaaatactgacgtccagactcacccccagagattctaatttttttttttttttttgagacagartctcgctctgttgcccaggctggagtgcagtggtgcagtctcgactcactgcaacctctgcttcccgggttcaagctattctcctgcctcagcctcccga

SEQ ID NO: 370072 - DNA, 201 bp, Homo sapiens
tcctagccttggttgcacatcagaatcacctagccagttttctaaatactgacgtccagactcacccccagagattctaatttttttttttttttttgagrcagagtctcgctctgttgcccaggctggagtgcagtggtgcagtctcgactcactgcaacctctgcttcccgggttcaagctattctcctgcctcagcct

SEQ ID NO: 370073 - DNA, 201 bp, Homo sapiens
aataatttcagacttatagaaaagtttaaaaaaatactttccacaagccctttacctatatttgccaaatgttaatattttaccatgttaatcatcctttyttctgtctttctgtacatatgaatttaattatttataatatttaacagtatgttatagatgtaattcccctttatctctcaatacttcagtgtatatttc

SEQ ID NO: 370074 - DNA, 201 bp, Homo sapiens
ccccaacatttcattgtcagtgctgggtacatagtaggtggctcaggagaaatttgcaaatgaaagaaaagaaaggcctgctctaggcaaaggtttcaaasgtttatggtaggcatggacttctccatctattatgtttcattttctgcagtataacctgagttgtattatactattatactattctcttgctgtctagag

SEQ ID NO: 370075 - DNA, 201 bp, Homo sapiens
atccttttcttgtaatgcgtggattttttaactaaattttttaaatgaagatttttctcttttctggttgttcctgccattaagtatcataactgggattmaaatcttcacattgttgctctcaacttcatgcctttaaccattatatcatattgttttattacatgttcatgatcctatcacaatattaccagggcataa

SEQ ID NO: 370076 - DNA, 201 bp, Homo sapiens
gggcccttaaatgtaatcagcagacatgtgccaccctttcacctttgtatgttgatttttgtttagtgacactgtagcaaaacaataaccattagctccakatagtaagtatgtacaagcatgatctttattattattattatttgtggagatggggtctcactgtattgcccaggctggtctcaaactcctggccttaag

SEQ ID NO: 370077 - DNA, 201 bp, Homo sapiens
aagtaaaaatttcatgaggacctagtgtgtttggacactcccctgtgaccccctacctctaccccaccccaacatttcattgtcagtgctgggtacatagyaggtggctcaggagaaatttgcaaatgaaagaaaagaaaggcctgctctaggcaaaggtttcaaaggtttatggtaggcatggacttctccatctattat

SEQ ID NO: 370078 - DNA, 201 bp, Homo sapiens
tcagtgtgtgattctctagaggtattatattgcctctgattacagaacctcctccccatcccctgctttcttttttccccattttatttgtgattatgacrtaactggcaaatttgtagtaactgtcattttgtagtaacatattgttcttgttttggcacattgcatttacagtgtactcctttattctgatggagtgtg

SEQ ID NO: 370079 - DNA, 201 bp, Homo sapiens
tacatctccttacctttgcttaatgttccttttgccttgaatatgtattcttctccagctctttatataaagtactgtctccaaatgcctcttggcatcayttcagttctaacctctctgtacctcttattctgtctttataactctatctgttggtatgcaatcccatgtcactaattttgtgcagggagtttattttac

SEQ ID NO: 370080 - DNA, 201 bp, Homo sapiens
ttggaataatatcaacaatactttcatatattcaggcatatcttctagtgtagtggagaatatagaaaagtcttaggaataaaactctcagagattccctrtggtatacagacttgggtaaactagaaataaatttcactttaagggatttttgcccttttacctccatttttgttagattgagatttactcagttttatt

SEQ ID NO: 370081 - DNA, 201 bp, Homo sapiens
aactatggtgttttacatctccttacctttgcttaatgttccttttgccttgaatatgtattcttctccagctctttatataaagtactgtctccaaatgyctcttggcatcatttcagttctaacctctctgtacctcttattctgtctttataactctatctgttggtatgcaatcccatgtcactaattttgtgcagg

SEQ ID NO: 370082 - DNA, 201 bp, Homo sapiens
ttaggccagagtatgaaggccacattaactagtttatatttactctgagtgcaacaggaagctccatggaaaatttaaataaagaattaatgacatctagrttgtatttttaaaaagctctgtggctatgatgtggaaaatttgttggaggaaaataaaggaaatcggactagaaataatgggaccttgggcttggatggt

SEQ ID NO: 370083 - DNA, 201 bp, Homo sapiens
atagtttatttactatagatgaagaaattcttgatagaaatgtttgttttattttggaatatatacagtaacagtaattaaaacaccaaagcctttattcrttgtttcaatgtttctctggagcttttccagagatttaaatatcacgtacatataaatagcttttactctcaaaagcaggaggtagaaatagcaaaaatg

SEQ ID NO: 370084 - DNA, 201 bp, Homo sapiens
ttaacttttctgtattaacctgactttgactttagacttcatatgacctatttacccaatcttacacagttttcagtttccagcctatctactcagtaccstactttattttgtttttcttagactgtccttgttttaaaactgtgatcttatttcaaccaaggtatagctgttcttagcttcctttgcatgctgagcctg

SEQ ID NO: 370085 - DNA, 201 bp, Homo sapiens
gaaatgtttgttttattttggaatatatacagtaacagtaattaaaacaccaaagcctttattcattgtttcaatgtttctctggagcttttccagagatktaaatatcacgtacatataaatagcttttactctcaaaagcaggaggtagaaatagcaaaaatgcatgcaatcttgaatttaaactattttaactttggc

SEQ ID NO: 370086 - DNA, 201 bp, Homo sapiens
agctatgtgtcatgggtatagagctcagaaagtatggcttcagtttatattttgtcattatccattattttatttatttatttatttatttatttatttttatagcaaacaattatagaacatgttttacttgctggattgtgataggatcaaacaattcatttctactgttctcctagaactcatagtaagtttgagagg

SEQ ID NO: 370087 - DNA, 201 bp, Homo sapiens
gagctatgtgtcatgggtatagagctcagaaagtatggcttcagtttatattttgtcattatccattattttatttatttatttatttatttatttatttttatagcaaacaattatagaacatgttttacttgctggattgtgataggatcaaacaattcatttctactgttctcctagaactcatagtaagtttgagag

SEQ ID NO: 370088 - DNA, 201 bp, Homo sapiens
tgagctatgtgtcatgggtatagagctcagaaagtatggcttcagtttatattttgtcattatccattattttatttatttatttatttatttatttatttttatagcaaacaattatagaacatgttttacttgctggattgtgataggatcaaacaattcatttctactgttctcctagaactcatagtaagtttgaga

SEQ ID NO: 370089 - DNA, 201 bp, Homo sapiens
tactgagctatgtgtcatgggtatagagctcagaaagtatggcttcagtttatattttgtcattatccattattttatttatttatttatttatttatttatttttatagcaaacaattatagaacatgttttacttgctggattgtgataggatcaaacaattcatttctactgttctcctagaactcatagtaagtttg

SEQ ID NO: 370090 - DNA, 201 bp, Homo sapiens
agattattactgcctgtagtttgcaaagccatttactaaatgattgcaatttttctgatctaacttcactggagatttcagtgtacattaatgactgtgtrgtttagagaattaatcaaaaatcagaagttagagcatcagtagcttcctcttatatggctgattattttcttgatatgaacttgaataagtcacattttc

SEQ ID NO: 370091 - DNA, 201 bp, Homo sapiens
ctaaaatgtattcctccaaatgaactttttatttatttattgagagggagtctcactctgtcgcccaggctgtagtgcagtggcacaatctcggctcactrcaacctccgcctcctgagttcaagcatttctccagcctcagcctcctgcatagctgggattacaggtgcatgccaccatgcccagctaattttttgtatt

SEQ ID NO: 370092 - DNA, 201 bp, Homo sapiens
tgttcttggttagtccctaaaatgtattcctccaaatgaactttttatttatttattgagagggagtctcactctgtcgcccaggctgtagtgcagtggcrcaatctcggctcactgcaacctccgcctcctgagttcaagcatttctccagcctcagcctcctgcatagctgggattacaggtgcatgccaccatgccca

SEQ ID NO: 370093 - DNA, 201 bp, Homo sapiens
tattttgttttcattttcatacattgaaatgttcaatccacctggaatttattagacatatagtgtgaggtatggatttagccagctatcacaatattgtttattaataataaacaatttattttatttaaatggctaaatccatccatcctttcattgttctttctcatttattgaatacttatatacatccttgcctgt

SEQ ID NO: 370094 - DNA, 201 bp, Homo sapiens
atattttgttttcattttcatacattgaaatgttcaatccacctggaatttattagacatatagtgtgaggtatggatttagccagctatcacaatattgtttattaataataaacaatttattttatttaaatggctaaatccatccatcctttcattgttctttctcatttattgaatacttatatacatccttgcctg

SEQ ID NO: 370095 - DNA, 201 bp, Homo sapiens
ttattcttatattagtttattgatagtctgtatgtaaacttgctttcagaaggactgaattgttacaatagtaaaatcaggagctcatgttctcagaaaaygttaatttactcaggatgattagatggctgtaaagtaaaaagcaatccataagtcatctttgagatatctaagggtatttagtgagaaattgaaaggaaa

SEQ ID NO: 370096 - DNA, 201 bp, Homo sapiens
atctgtaaagatactaagcttgcccaaagaacacagatagcaaatttgagagctttgataagagttcaaaattgaataaaattgagtcaataattatttaytgaaatgtagtggtagtcaaggcattactagattttgcttgcaaactgttgtaagaaaagataagtttacagacaatggcaaaataaatctgacagtaag

SEQ ID NO: 370097 - DNA, 201 bp, Homo sapiens
agtgcttacatctctggagtaagtgcgtaaggtttccgagagagtgcgacatctgaaagaaggtgaaccctgtggaatacttagaatttctataatctgamatgggaatctgtacttttaaaatgagagattatgtcacataggcattgagattgcaaggctgagtaatttagtttgaagcattggatatagtataatagt

SEQ ID NO: 370098 - DNA, 201 bp, Homo sapiens
cctttctgtccatttccagttcccctaccttaattgagattttcatcacttcccgactgttttataccataacctcctaattagtctccataccttcagamttacttcactgcaattctgtaaccacactgctgcctgagtaatctttttaaaatgtaaatctagtcatattatgcccctgcttaacactgttctgtggct

SEQ ID NO: 370099 - DNA, 201 bp, Homo sapiens
atattttcatcacttcaaaaacaagccctataccttttggctatcatttgcctacttcccacctcaccctcagccctaggcaatcactaatctactttctrtctctatagattttcctgttctggacatttcatatgaatgagatcatataatatgtggtctttcatgactggcctttttcatgtagcataatatttttaa

SEQ ID NO: 370100 - DNA, 201 bp, Homo sapiens
tatttgttgaaaagattattatttcccccattggttggccttggcaactttgttgaaaatcagttgaaagtggatgtatatatttatttctgagctctcarttctattccattaatccatatgtctatctttgtgccatgtgtacatttgatctttaggtattttcttgttttgtcttatttttctcctagagaatgttga

SEQ ID NO: 370101 - DNA, 201 bp, Homo sapiens
tttcccccattggttggccttggcaactttgttgaaaatcagttgaaagtggatgtatatatttatttctgagctctcaattctattccattaatccatatgtctatctttgtgccatgtgtacatttgatctttaggtattttcttgttttgtcttatttttctcctagagaatgttgacatctaagaatacacacacac

SEQ ID NO: 370102 - DNA, 201 bp, Homo sapiens
aactttgttgaaaatcagttgaaagtggatgtatatatttatttctgagctctcaattctattccattaatccatatgtctatctttgtgccatgtgtacrtttgatctttaggtattttcttgttttgtcttatttttctcctagagaatgttgacatctaagaatacacacacacacacagagtagtttttaattaata

SEQ ID NO: 370103 - DNA, 201 bp, Homo sapiens
aatattttgttttcattttcatacattgaaatgttcaatccacctggaatttattagacatatagtgtgaggtatggatttagccagctatcacaatattgtttattaataataaacaatttattttatttaaatggctaaatccatccatcctttcattgttctttctcatttattgaatacttatatacatccttgcct

SEQ ID NO: 370104 - DNA, 201 bp, Homo sapiens
ccagggtcttgcactacttctgaccacttgcccaactcctgagatcttattgagaagccgctcgtcaccagttttaggtgttttctatctactaggagacygccgttccctggcgccagctgtgaccaattattacttcagagagacagttaacaaccacctgaccatcacctgatggtctcccaacactcctggtgtgag

SEQ ID NO: 370105 - DNA, 201 bp, Homo sapiens
catgtgcagagagtgcagttttgttacataggtatacacgtgccctggtggtttgttgcacccatcaacccatcacctacattaggtatttctcctaatgytatccctcccctatcccccccaccccctgacaagtcctggtatgtgatgttccccttggatgactctgttacttggccatctgatgattttggactgcaa

SEQ ID NO: 370106 - DNA, 201 bp, Homo sapiens; identical to SEQ ID NO: 80069

SEQ ID NO: 370107 - DNA, 201 bp, Homo sapiens
cggggctccttttcctctgctgcctcccgcagacccaaggctgagtgaggggcggcggcggaagtgggaggcccacccaaaaagccaaatggggtgccagragagtgaaggcgcaccctggggtcaccctaccctaccccgtcccctcccagccccactctgcgggcgggcgctgcccttttgggcgtcgcagaccctcca

SEQ ID NO: 370108 - DNA, 201 bp, Homo sapiens; identical to SEQ ID NO: 80070

SEQ ID NO: 370109 - DNA, 201 bp, Homo sapiens; identical to SEQ ID NO: 80071

SEQ ID NO: 370110 - DNA, 201 bp, Homo sapiens; identical to SEQ ID NO: 80072

SEQ ID NO: 370111 - DNA, 201 bp, Homo sapiens; identical to SEQ ID NO: 80073

SEQ ID NO: 370112 - DNA, 201 bp, Homo sapiens; identical to SEQ ID NO: 80074

SEQ ID NO: 370113 - DNA, 201 bp, Homo sapiens
catccatcaatcgatatttgggttgcttccactctcaggctattatgaataatgctgctatgaacatgggtgtacaaatttctattcaagttcctgctttyatttttttgggtatatacctggaagtgaaattgttggatcatatggaattctatgtttactttttgaggaatcacttcattcctttttatggctgaataa

SEQ ID NO: 370114 - DNA, 201 bp, Homo sapiens; identical to SEQ ID NO: 80081

SEQ ID NO: 370115 - DNA, 201 bp, Homo sapiens
ggaatcatataatatctgtccttttgtgatagacgtatttcacttagcaaaacgtcttcatgtttcttctatattgtagcagatgtcagagtgcccttcaytgttaaggctaaataatgttccattgtatgtatacactgtattttgtttattcattcatccatcaatcgatatttgggttgcttccactctcaggctatt

SEQ ID NO: 370116 - DNA, 201 bp, Homo sapiens
atgtgcatgtatgttagtatttgaaacagtttttatggtggtttacattaacatgctgtgacgaaccatctggagcactattaaaaatgtactcattttargaaaattctcctaagatacttgagttataattgctatagaggacatgtacatattctcagttgatagagaatacttgtcctgaaagtgcttcatgtcctg

SEQ ID NO: 370117 - DNA, 201 bp, Homo sapiens
aaaatgaattcttttgtttgtgtctctgttggagattgtttgaaattttgcattaatttttattagttacaacttttaactcctgcgtaagcaccaagtaygaagatgatggttgtgtgttcctgaagttgcttaggtacactgttgtctcattatgggaagggatggaatggagggagccctgtctgctctgtgcaggaa

SEQ ID NO: 370118 - DNA, 201 bp, Homo sapiens
caagcggctgcttttaaaatgaattcttttgtttgtgtctctgttggagattgtttgaaattttgcattaatttttattagttacaacttttaactcctgygtaagcaccaagtacgaagatgatggttgtgtgttcctgaagttgcttaggtacactgttgtctcattatgggaagggatggaatggagggagccctgtc

SEQ ID NO: 370119 - DNA, 201 bp, Homo sapiens
gccaggtgtagtgactactggggcctatagtcccagctgcttgggaggccaaggtgggaggatcacttgagcccgggaggttgaggctgcagtgagccatsatctcgccattgcattccagcctgggcgacagaaaaagaccctgtctcataaatagataaataagaacatgatgatttttaaaaagtcataaacccagac

SEQ ID NO: 370120 - DNA, 201 bp, Homo sapiens
cagtccttgaagctctaagtctagcaaccagcccttggagcctttcctgcttttcttgcatgcagcatggtgctgttgcttgtatagtgaagtataaaatsagaacccagaatgacttcagggcattaaccaggcatgtcaaatgaaattctagtgagattttctgtgtagtgtgaaattttgtgaaagtgacaacttcac

SEQ ID NO: 370121 - DNA, 201 bp, Homo sapiens
catgagccaccacaccagccgataagtgagtgtttctaaagcctttagaagagagcctggtatttggaaaggatttttattttaattaattaattaattawttattttttgagatggagttttgccctgttgcccaggctggggtgcagtggcatgatctcagctcactgaaacctctgccttccggattcaggtgattct

SEQ ID NO: 370122 - DNA, 201 bp, Homo sapiens
tcagcatgatttttgtaggttcctacttccttacaagtagatcatatcttcacagctcttctgttccatcattccagaagtgagaactgagactcagaggrgtgaagtgacttactccagggcataccagtcatacttgataccttagattggagcctgtgtcttttgactctgagccctgtctctacccagctttctcat

SEQ ID NO: 370123 - DNA, 201 bp, Homo sapiens
gagcagtaatattttgaaagaaatctttttttctgagtagtaggtctcaacagtggccttaaaaattcattaaaccatgccacaaatacgtatgctgtcakccagggtttgctgttacatttatagagcacaggcagagtagatttaggataattctgcaacttaaagtcaccagctgcattagcctttaacgagagagta

SEQ ID NO: 370124 - DNA, 201 bp, Homo sapiens
atgaaatttctgcctttcagagtagaatgcatgattattgccaatgatgccaccgtcaaaggaggtgcctactacccagtgactgtgaaaaaacaattacrggcccaagaaattgccatgcaaaacaggctcccctgcatctacttaggcaagtcaccagagtggtaaaataaactattattagctggtaaaatgcaagat

SEQ ID NO: 370125 - DNA, 201 bp, Homo sapiens
cactgcgcctggctaattttttgtatttttagtagagacggggtttcaccgtattagccaggatagtcttgatctccggacttcatgatctgcccgcctcrgcctcccaaagtgctgggattacaggcatcacccaccgcgcctggcccagggtagaactttcaaaatgagtcagtcctctcaaacctgactactgcttta

SEQ ID NO: 370126 - DNA, 201 bp, Homo sapiens
gaaggttggggtggctgtggcaatttcttaaaagaagacaacaatgaagtctgccacactgactgactcttgcttttatgaaatattctctgtagtatgcmatactgtttgctagcatttgatccagggtagaactttgttttttttcagactgagtctcactctgtcacccaggctggagtgcagtggcgcgatctcagc

SEQ ID NO: 370127 - DNA, 201 bp, Homo sapiens
taatttaacataacgttgaaggtcaaataatgagttaaaatttattgcataaaaatgcttaactagatgcctcagcaaccagaacactgtgtgcgcgggcrtgtgtgtgtgtgtgtgtgtgtgtgtgtgtgtgtgtgtgtgtgtgtgcgtgtgtatatatgtgcatgtatgttagtatttgaaacagtttttatggtggtt

SEQ ID NO: 370128 - DNA, 201 bp, Homo sapiens
acacacttgccctctcttgccctcccaccttctgctgttccaccatgggatgactgtcagatgccagtgccatgctcttggatttcccagcttccagaacygtgaaaagtaaatttcttttttaaattctttctttctttccttctttccttcttccttccttccttccttccttcctttctttctttctttctctttctt

SEQ ID NO: 370129 - DNA, 201 bp, Homo sapiens
ataaagtgtacagtggtgctttttactcttaagtatctttacgaattaggtactctgggatggcttgaaagtaaaacagaatttaacacaaaatctaatcttttttttttttttatactttaggttttagggtacatgtgcacattgtgcaggttagttacatacgtacacatgtgccatgctggtgcgctgcacccacta

SEQ ID NO: 370130 - DNA, 201 bp, Homo sapiens
cttttgctgtgcagaagctctttagtttaattagatcccatttgtcaattttggcttttgttgccattgcttttggtgttttggacatgaagtccttgccyatgcctatgtcctgaatggtaatgcctaggttttcttctagggtttttatggtttttggtctaatgtttaagtctttaatccatcttgaattgatttttg

SEQ ID NO: 370131 - DNA, 201 bp, Homo sapiens
ttgctcttgcttttctagttcttttaattgtgatgttagggtgtcaattttggatctttcctgctttctcttgtgggcatttagtgctataaatttccctytacacactgtttgaatgtgtcccagagattctggtatgttgtgtctttgttcttgttggtttcaaagaacatctttatttctgccttcatttcgttatgt

SEQ ID NO: 370132 - DNA, 201 bp, Homo sapiens
tgttcatgcctagaaatagatgtggatctcagtaaggagtgacatatgtggcaatgatacctttccatactgtggatatcattggcacagagtaaatactraaagaggggagtgggggacctcaatgattggaaagttttcattgcgcaaaaagtgtgatttggtcataagtaagactccatgtcctgtgcacattatgaa

SEQ ID NO: 370133 - DNA, 201 bp, Homo sapiens
ttcttttaattgtgatgttagggtgtcaattttggatctttcctgctttctcttgtgggcatttagtgctataaatttccctttacacactgtttgaatgygtcccagagattctggtatgttgtgtctttgttcttgttggtttcaaagaacatctttatttctgccttcatttcgttatgtacccagtggtcattcagg

SEQ ID NO: 370134 - DNA, 201 bp, Homo sapiens
ccaccctctagagaaggtggctaatatttggatgttttaggttaatgtgtatatacgcacatttttatgtagttgagatagtctatacgtatatttttttrttttactttttctagtttaaattataaacattttcccatgtctttagaaattcttcatgaaatattttctacggctagatcttaattcctataatagtac

SEQ ID NO: 370135 - DNA, 201 bp, Homo sapiens
  misc_feature (1)...(201): n = A,T,C or G
ggatgtgagtacgatatgttcttatatcttttattttcctgaaatgcattttgactcactgcaccttgaaatcatgtctttaaacaggttaacatgatctntatttctgcaggtcaccattgaaccttctgaagagcctttatttcctgctgatgaattgtatggaatagttggtgctaaccttaagaggagctttgatgt

SEQ ID NO: 370136 - DNA, 201 bp, Homo sapiens
agatgtcagagtgcccttcattgttaaggctaaataatgttccattgtatgtatacactgtattttgtttattcattcatccatcaatcgatatttgggtygcttccactctcaggctattatgaataatgctgctatgaacatgggtgtacaaatttctattcaagttcctgcttttatttttttgggtatatacctgga

SEQ ID NO: 370137 - DNA, 201 bp, Homo sapiens
gaggtaggaggatcacttgagccttggagtttgaggctacagcgagctgtggttgcaccactgcactccagcctgagaaacagaatgagaccctgtctcamaaaagaaaaagaaaagaaaagttcattatagcattgtttgttagagcaaaagttagagaataacctaactgttcattcatgggagattaataatacagtt

SEQ ID NO: 370138 - DNA, 201 bp, Homo sapiens
taaatgtttagtaactggttctctggggaggaaaaaatgccccgatctgtggcatttgccaatttctgtggtatgagtgatcccaccatggctgatttcargctgccaacatgatgcctctatgtggaatcagacacagatgcacgtagttggctcttgtgagttagctgtgagctggcttcgtcacattgttggcctgac

SEQ ID NO: 370139 - DNA, 201 bp, Homo sapiens
gccaggctggccttgaactcctgacctaaggtgacccacccacctcgacctcccagagtgctaggattataggcgtgagccaccgcgcccagccaacattyttaaggattggcacattgtcttcattctaactgctcactccttcaaacctccatgccctacgagagtttcaccagcctagagaccagattcccactctgc

SEQ ID NO: 370140 - DNA, 201 bp, Homo sapiens
aatgttcaattctttgaactgtagagttgcatttccaagctagagcatcagccaagaaggactggagagacaggtttcttatttatttgacaaacattcaytgggcacctgttatgtagcaggcactgttctgggtgcctgaggtaagaggtagatactatctttgacttcgaggaccttatattctagtcagggaggtgg

SEQ ID NO: 370141 - DNA, 201 bp, Homo sapiens
cctgcctggtgtccctgtctgcctagtctatcctttcccatacagtggacacatgctgcaaggttattctttatgtggccctcctgttactatttgctacaaaacaaagctcatacttcttagcccgatacttaagcccccgtgtgatcggatttcaacctaactttctagccttattgctcctggaccctaaactgcagt

SEQ ID NO: 370142 - DNA, 201 bp, Homo sapiens
  misc_feature (1)...(201): n = A,T,C or G
ggatcttggaggtgctgatcttcattgcaggtgaaacagaaatggttgtttctttccgggattgagtgtcattttgtttgtttgtttaaaagaagttttangtatttgtttccagtgctaaacttgccagaccacaccacagtttatttgttcttgatctgctggtttaatgttcaattctttgaactgtagagttgcatt

SEQ ID NO: 370143 - DNA, 201 bp, Homo sapiens
tgaactcctgggttcaagcaatcctcttgcctcagcctcctgagtagctgggattacaggcgtgtgctaccctgcttggcttgttttaaaaatgcatttcwaagcaggcacggtggctcacacctgtaatctcagaggctgaggtgggcagatcacgaggtcaggagatcgagaccatcctggctaacatggtgaaatccc

SEQ ID NO: 370144 - DNA, 201 bp, Homo sapiens
gatttttcacctgtaagagtaaagataatagtctccaggtttcctaggtgcatgaatgagaaagcacagtgttctttagttctatggaagaaaaagtacargtatagtcaggtgaggagttgtgcatgttggggaagcatttttatatgtctgatggaccgatttcactgatgatttttatccttgttgtaggttaaagcg

SEQ ID NO: 370145 - DNA, 201 bp, Homo sapiens
gacggggtttctccatgttggtcaggctggtctcaaactcccaacctcaggtgatccgcccacctcagcctcccaaagtgctgggattacaggcgtgagcyaccacacccaccccctgctttctttctttcttttttttttttttttttgagatggagtcttgctttgtcgcccaggctggagtgcagtggcgtgatctcg

SEQ ID NO: 370146 - DNA, 201 bp, Homo sapiens
tagagatgcttatgtttctcatttcttgtcttcagttgattcgggaggagcatacttacctcgacaagcagatgtgtttccagatcgagaccactttggcygtacattctataatcaggcaattatgtcttctaaaaatattgcacaggtaatttttcatgaataaagtgtacagtggtgctttttactcttaagtatctt

SEQ ID NO: 370147 - DNA, 201 bp, Homo sapiens
ctcgatctcctgacctcatgatccacccgcctcggcctcccaaagtgctgggattacaggcgtgagccaccgcgcccggccaggtctttcaagctggaaaygtgtgggctcaaatgagactccattgcttgctatggactgtaagcaagttctttgtgactctgggcttagatttttcacctgtaagagtaaagataatag

SEQ ID NO: 370148 - DNA, 201 bp, Homo sapiens
gtgaaagtggaactgtgagctttatgaccagctgtgagtctctttgtatgtgtatctatttgcaaagctaaagtttgttaagatatgttcatgcctagaartagatgtggatctcagtaaggagtgacatatgtggcaatgatacctttccatactgtggatatcattggcacagagtaaatactaaaagaggggagtggg

SEQ ID NO: 370149 - DNA, 201 bp, Homo sapiens
tctgtcttttcagagacagagcttgttattatcagttactgaaacctacaatgttttccttaatcctaataggttacatatgtagcgtgccaatttgcttstgctcagttgtttttataatcaaacttttatccggcatttcattagtgcctcttacctggggcagtctttttaatgaacattattaagcagccccttcat

SEQ ID NO: 370150 - DNA, 201 bp, Homo sapiens
gaaccaagaatttagttctgggggtggaataattggaggtgaaaattttaactaactctctctgcagaaggatatttaagacaaagcttttgatgtagagrgtaataagttgtttctatgctgtattttcttttcttttttctttttgtttcagggctcccctcaagaaagactttttctttaccttcaacctctctgtgc

SEQ ID NO: 370151 - DNA, 201 bp, Homo sapiens
taaatattaactgatgacaaattcttatttttttttttggttgatattagtcagatccctgaaaataaatataatttatctgttgtttattcctttttgcractttaaatatccagacacctcttataatttgttattgtctggactgaatgttattttacactaaatgttttggaaggaaaagaaccaagaatttagttc

SEQ ID NO: 370152 - DNA, 201 bp, Homo sapiens
aaagccactgaattgtatgctttaaaatagtgaattttatggtatgtgaattctattccaaaaagtttgttgcttcaaaaatttgtccaagaatcatcttkggttatggaatactaatacaaattcattagaaagaatatgttaaatagagcttatgttttgatgtaaaataagtatatttcccaaaagagggtgttaatt

SEQ ID NO: 370153 - DNA, 201 bp, Homo sapiens
gttttcttctgagagtcttataattttagctcttgcatttgggtctgtgatccattttgagttagtttttgggtgtgggataaggaagggctccagcattsctctatatgtggatatgcagttgttccagcatcattagttgaaaggactctcctttccccattgaatggtcttggcagaaaaaaacttttacttattttt

SEQ ID NO: 370154 - DNA, 201 bp, Homo sapiens
caaaatattaataacatccatttgaagagttattttagtattcctgtgaggtaactggcaaatgtttagaggacttattattattattagacataaaagtyatccttttaatacagttttgcaaaattataggtatattgtggatttcttctctccattagtttttcaggccagtagtctatcaggccagtcttctctctg

SEQ ID NO: 370155 - DNA, 201 bp, Homo sapiens
cctataaggaaaactgatggaatattggaattagtagcaaaaattgctttcatatgataatttaaaaaatattcattatatactttatttttccttggtgrtatcgttcaatcctatttaggagtcatcagccaaacctatatttattattctttgtaccatcctaatttctgagcaagatttttttaaagctttttatta

SEQ ID NO: 370156 - DNA, 201 bp, Homo sapiens
gtcaggtgaggagttgtgcatgttggggaagcatttttatatgtctgatggaccgatttcactgatgatttttatccttgttgtaggttaaagcggcaacyggggaagaagtatctgctgaggatcttggaggtgctgatcttcattgcaggtgaaacagaaatggttgtttctttccgggattgagtgtcattttgtttg

SEQ ID NO: 370157 - DNA, 201 bp, Homo sapiens
ctcaaactcccaacctcaggtgatccgcccacctcagcctcccaaagtgctgggattacaggcgtgagctaccacacccaccccctgctttctttctttcttttttttttttttttttgagatggagtcttgctttgtcgcccaggctggagtgcagtggcgtgatctcggctcagggcaacctccgcctcccaggttaag

SEQ ID NO: 370158 - DNA, 201 bp, Homo sapiens
tcaaactcccaacctcaggtgatccgcccacctcagcctcccaaagtgctgggattacaggcgtgagctaccacacccaccccctgctttctttctttcttttttttttttttttttgagatggagtcttgctttgtcgcccaggctggagtgcagtggcgtgatctcggctcagggcaacctccgcctcccaggttaagt

SEQ ID NO: 370159 - DNA, 201 bp, Homo sapiens
caaactcccaacctcaggtgatccgcccacctcagcctcccaaagtgctgggattacaggcgtgagctaccacacccaccccctgctttctttctttcttttttttttttttttttgagatggagtcttgctttgtcgcccaggctggagtgcagtggcgtgatctcggctcagggcaacctccgcctcccaggttaagtg

SEQ ID NO: 370160 - DNA, 201 bp, Homo sapiens
gagtgcagtggcgtgatctcggctcagggcaacctccgcctcccaggttaagtgattctcctgcttcagcctcctgagtagctgggtttacaggcatgcascaccacacccaattaatttttgtttttttagtaaatactgggtttcaccatgttggctaggctggtcttgaactcctggcctcaagtgatacacccaccc

SEQ ID NO: 370161 - DNA, 201 bp, Homo sapiens
caccatgttggccaggctggttttgaactcctgacctcaggtggtatgcctgcctcagcctcccaaagtgctgggattacaggcatgagccactgcacctkgccaaggcatcttttcatgtgcctgttggccatttgtatgtcttctttggagacatgtctattcagattctttctcatttttaaattgggctatttgtct

SEQ ID NO: 370162 - DNA, 201 bp, Homo sapiens
ttaataagctgttaagagaaagcagcaagattcctacagtgtattaacttttgtgtaaaatggagagaaatatacatttgtatacttctatatgcataaagaagttctagaaaagatacgaaaatactgcttaaaatgtagaggagaggaaacagggtagaagaaagacctttgatttttttgaccctgagactgggtaca

SEQ ID NO: 370163 - DNA, 201 bp, Homo sapiens
gctgaggcaggggaattgctttactgggaggcggaggttgcagtgggttgagattgcgctactgcactccagcctgggcaacagagcgagactccatctcaaaaaaaaaaaaagaaggaaagaaacagaaaaggacaaataaatgattttacttctatgaaatattgagaataggcaaattcatggaggcagaaagtagat

SEQ ID NO: 370164 - DNA, 201 bp, Homo sapiens
tgctttactgggaggcggaggttgcagtgggttgagattgcgctactgcactccagcctgggcaacagagcgagactccatctcaaaaaaaaaaaaagaargaaagaaacagaaaaggacaaataaatgattttacttctatgaaatattgagaataggcaaattcatggaggcagaaagtagattagttgttgccaggga

SEQ ID NO: 370165 - DNA, 201 bp, Homo sapiens
caggcagtgggaggaacacacacacagacacaaagtcttgaccacatgtgtcagggcagcatgacatagggaaagaggatggcctttcaggtctttcttctttttttttttttttttgagacggagtctcgctctgtcgcccaggccggactgcagtggcgcaatctcggctcactgcaagctccgcttcccgggttcacg

SEQ ID NO: 370166 - DNA, 201 bp, Homo sapiens
aaaaatcttttccttttccatgtgtaactgtttaaatgtgtagtttttaatgacattaattcaaacaacatcctttcttcgctttaggtctccatttctgsaattatcccagtttgcaggttaccagttatatgacaatgaggaggtgccaggaggtggcattattacaggcattggaagagtatcagggtgagtattcta

SEQ ID NO: 370167 - DNA, 201 bp, Homo sapiens
gaagtcagcgtgagacagccttaggttccctgcttccagacttattctcctgccttaggtacagtcactatcgtgatattatctatcgctgtgtcaacacwacaccaatccaagcccaaccgcagctctctcagtgccgcaccgcttcgtgagggtcgatccgccggggagacctgctctcctgcgctcgggactagacgc

SEQ ID NO: 370168 - DNA, 201 bp, Homo sapiens
tgtcgcccaggccggactgcagtggcgcaatctcggctcactgcaagctccgcttcccgggttcacgccattctcctgcctcagcctcccgagtagctggkactacaggcgcccgccaccgcgcccagctaattttttgtatttttagtagagacggggtttcaccttgttagccaggatggtctcgatctcctgacctca

SEQ ID NO: 370169 - DNA, 201 bp, Homo sapiens
tattgccaatgatgccaccgtcaaaggaggtgcctactacccagtgactgtgaaaaaacaattacgggcccaagaaattgccatgcaaaacaggctccccygcatctacttaggcaagtcaccagagtggtaaaataaactattattagctggtaaaatgcaagatagtttggaaggctgtatgtattacatttgggatgg

SEQ ID NO: 370170 - DNA, 201 bp, Homo sapiens
gattaagaactgatgctgtcattgatacaagtttccctctgcgtagcacatttagttcatagagatgcttatgtttctcatttcttgtcttcagttgattygggaggagcatacttacctcgacaagcagatgtgtttccagatcgagaccactttggccgtacattctataatcaggcaattatgtcttctaaaaatatt

SEQ ID NO: 370171 - DNA, 201 bp, Homo sapiens
gatactacagacatgagccacgagccaccacaccttgctgattatccatattttctaagtgaagctatttctgagttatgtacctgatcagcattcacatkgccaccctttactcctgtgtgtgcacagccacacacccagaaagcagcaggagcatgatctgatcactgcagagagcatcatgcttttcctaggaccctt

SEQ ID NO: 370172 - DNA, 201 bp, Homo sapiens
ccacttttaaaaggaactgctttataaacataatttgtagcttaatggcttcatggatccaaatagtttaaaatgttaatagctagatgctgtggtgtggstccctatctgtgactttgtgacattagttgtataaaaaggttcttatagtaaaattagtagaaaatacttgtagttctttttgtttttctggataacaat

SEQ ID NO: 370173 - DNA, 201 bp, Homo sapiens
atatacagtgtctcattgaaggttttcctttcctgctgttttggtaaatactagacagttttcataaaaaagcattttattttaaatatttactgatttaraagctgttccttctgcttctatttgacttctgacagtgtagttataagtcagcatttataactggtattatgtatgaagcatttaaaatatatggtcagt

SEQ ID NO: 370174 - DNA, 201 bp, Homo sapiens
gagcgcccctcccccagcctcgctgccgccttgcagtttgatctcagactgctgtgctagcaatcagcgagactccgtgggcgtaggaccctccgagccakgtgcgggatataatctcctggtgcgccgttttttaagctggtccgaaaagcgcaatattcgggtgggagtgacccgattttccaggtgcgtccgtcaccc

SEQ ID NO: 370175 - DNA, 201 bp, Homo sapiens
cggcgctttgaatgtataggtttttgcatggaaatgtttttatttctgttggatatgtacctatgagtagaattgctggatcatgtggtagctgtgtttarcattttgaaaaacttctaatctatccaatacatgttttacatttctaccagcagcatgtgagggttctgattgttccacattcttgtcaacacttgtaat

SEQ ID NO: 370176 - DNA, 201 bp, Homo sapiens
gaataatattccattgtatggttatgctgtgttctagctatccattcatcagttgatgggcatttaggttgcttctgcttttgggtattatgaataacggygctttgaatgtataggtttttgcatggaaatgtttttatttctgttggatatgtacctatgagtagaattgctggatcatgtggtagctgtgtttagcat

SEQ ID NO: 370177 - DNA, 201 bp, Homo sapiens
ttgcttaaaaacccctctccttgatcattttgtttttaccccattttaaacatgagattggttgaacacttactggcatttgttgacaagtatgcttgtaygtttgaaaggtgattagtcactgccagggtctgtgtgtcggcgccaaataattacctcacagaccattgccgctgttggctcggtttttttcttacacca

SEQ ID NO: 370178 - DNA, 201 bp, Homo sapiens
aaggaaacccttactattccagcgcaaggtgggggccagaacatcactaactctctgatgggtgcagatggcagtcagaggaacagctttacagagctctrtgtagttgagatggtccagcattcataggaactggaaaataacatttggacacacttaattttgtactgttgtttctttacaatctgaatggctactgct

SEQ ID NO: 370179 - DNA, 201 bp, Homo sapiens
taataatggcaggaattttacagtgtacccaccatttttctaaaggctttatgtggttttactcatgtatttatcataatgatcctgtgcagtaggtacarttgttatttctgttttatagatgggaaaactgtggtatatagggtccaagaaatttgtctgagataacacagagcctgaatttgaagccaggtggtctgg

SEQ ID NO: 370180 - DNA, 201 bp, Homo sapiens
ctcataacacagcatctactacatataacagtaataactctattactgttattcataataacctgtttaaaattgtgaggaaatgattgggggtgatgaatttttttttttggaaagtaccatgaaatttattagtcacaagtggctctgtgttctctcaaatgcatctttatacctctcttaagtcatccttaagagcta

SEQ ID NO: 370181 - DNA, 201 bp, Homo sapiens
aggctggagttaaggttcaaacgtggcaaagcaagcctccaccagcagtaagtctgatttgtcggggacagccaatttcctatctgccctgcggaaaaggkgggggggtttgcaaagggagtagcctttggtccttttgttacttaggcatggaaagttagggttttcctttcagtttagctctaggaagtcagcgtgaga

SEQ ID NO: 370182 - DNA, 201 bp, Homo sapiens
atactagacactcagatatattaaatgaataaatggataatacactaagccaattatttaatcaaatcaatcaagacaaatggataactctacatgtatcrtgaccctttctagaagcaaaagaaaccagagtctaggaccttaggaacaagaagattgtgacatgagctgttttataccatagacaaaatctctttgcat

SEQ ID NO: 370183 - DNA, 201 bp, Homo sapiens
ttccagacttattctcctgccttaggtacagtcactatcgtgatattatctatcgctgtgtcaacactacaccaatccaagcccaaccgcagctctctcastgccgcaccgcttcgtgagggtcgatccgccggggagacctgctctcctgcgctcgggactagacgcgacctcgcggggctgaggctctgtcccttattg

SEQ ID NO: 370184 - DNA, 201 bp, Homo sapiens
aatttaacataacgttgaaggtcaaataatgagttaaaatttattgcataaaaatgcttaactagatgcctcagcaaccagaacactgtgtgcgcgggcatgtgtgtgtgtgtgtgtgtgtgtgtgtgtgtgtgtgtgtgtgtgtgcgtgtgtatatatgtgcatgtatgttagtatttgaaacagtttttatggtggttt

SEQ ID NO: 370185 - DNA, 201 bp, Homo sapiens
atttaacataacgttgaaggtcaaataatgagttaaaatttattgcataaaaatgcttaactagatgcctcagcaaccagaacactgtgtgcgcgggcatgtgtgtgtgtgtgtgtgtgtgtgtgtgtgtgtgtgtgtgtgtgtgcgtgtgtatatatgtgcatgtatgttagtatttgaaacagtttttatggtggttta

SEQ ID NO: 370186 - DNA, 201 bp, Homo sapiens
ttgtaatttatacatcactatgcacatgtgagatgtaacattattattcatgacatctgttgtttcttttgaattgagatgatctaaacagggccagttgttcactgaagctgacttactcatggcctcttttcctttagttctccagtgctgatgaagcggctttaaaagagcccatcattaagaagtttgaagaggaag

SEQ ID NO: 370187 - DNA, 201 bp, Homo sapiens
tttcaccatgttggccaggctggtcttgaatgcctgagctcaagtgatcctgcctcggcctcccaaagtgcttggattacaggcgtgagccacctgtaatygtggctggccaatatttgggaatttttaaaggttttttgctgaatatatatttttacaaacaaatttacaggtatattttattgtggtggtttgattcat

SEQ ID NO: 370188 - DNA, 201 bp, Homo sapiens
gcaatgttcttcttttattttcccagtggtgcagtttaaatgtgtcccccaaaagtttatgtgttggaaatgtgattgccattgtggtgatgttaaatggyggcacctttgggaggtaattaggtcatgagagctctgccctcatggatggattaatgctatcattgtgggagtttggccttcgtttgctctctgtctcac

SEQ ID NO: 370189 - DNA, 201 bp, Homo sapiens
tttccttcatggcagattttaagaccccttaatcgtttctggagtttaaagagttgatgtgtgggtgtctggtggtctttctttgagtctcatgtcatgasaatgccttctctgggccttctccatatctgaggcctgatgacatgatgatctttgcaatgttcttcttttattttcccagtggtgcagtttaaatgtgtc

SEQ ID NO: 370190 - DNA, 201 bp, Homo sapiens
gtttttatttaatgttactagccttgcccattgtaaattcatttacctagttatttcaaagagtatgtctattggcaatcatacccgtatcgttttctgtrtctttgctgctataaaaatgtggacagattactatagaccttccaggtttcaacattttcttttgctctcaaggagaaaagatagttaaactaggtactt

SEQ ID NO: 370191 - DNA, 201 bp, Homo sapiens
ggaccctaaactgcagtcaacctgatgcagtcactggtctccatatataccatagccttttttgaccatctgctcaggcccatgctggtcctctttccccwcatcctcctgggtcggagtctccaacccatcttccaagacacatctcaaatgccacccttttaaggaaatcccggaatcctttactggaagtaatatttt

SEQ ID NO: 370192 - DNA, 201 bp, Homo sapiens
ttatgaatttgactattctaggtatctcacatgtcagtggaatcatataatatctgtccttttgtgatagacgtatttcacttagcaaaacgtcttcatgkttcttctatattgtagcagatgtcagagtgcccttcattgttaaggctaaataatgttccattgtatgtatacactgtattttgtttattcattcatcca

SEQ ID NO: 370193 - DNA, 201 bp, Homo sapiens
gtgtttgtgggattctggatcaaacactatagaagtcactgcatgagctgcatctcatgtgtttgtcgtgtgcttggattccagatcgcagtggtcatggsctcctgcaccgcaggaggagcctatgtgcctgccatggctgatgaaaacatcattgtacgcaagcagggtaccattttcttggcaggaccccccttggta

SEQ ID NO: 370194 - DNA, 201 bp, Homo sapiens
cttgttttaaaaatgcatttcaaggcagacgcggtggctcacgcctgtaatcccagcactttgggaggcggaggcgggcggatcatgaggtcaggagatcsagaccatcctggctaacatggtttccatgtcttgctcctggttttccttcgctctctgggatggcacagaaagttgtacatatttctgcagtacgtttca

SEQ ID NO: 370195 - DNA, 201 bp, Homo sapiens
aattaaaaataaaaacaagattttgcctgttagatacttgtttgagaattttgactcctttgtacttatttttttgactcattaaaaaaatttttttacascttcgttgagatataattcaaatatcatataacttacccatttgatgtgtacaattcaatggcttttaggatattcacagagttgaatgaatcaatttta

SEQ ID NO: 370196 - DNA, 201 bp, Homo sapiens
atgcctgtaatcccagcactttgggaggtcaaggtgggaggatcgcttgaacacaggagttcaggacctgcctgggccaagtttctggtcattcatcttayatcctttcagtgtcctcttagtggagaatgccatagaattttctttctagggtttcagatcacttgtccagtgagctttgtccagtgtaggctcatgtaa

SEQ ID NO: 370197 - DNA, 201 bp, Homo sapiens
ctcacattgcatgcctgtatcaaaacatctctcgctgggtgtggtgcctcatgcctgtaatcccagcactttgggaggtcaaggtgggaggatcgcttgarcacaggagttcaggacctgcctgggccaagtttctggtcattcatcttacatcctttcagtgtcctcttagtggagaatgccatagaattttctttctag

SEQ ID NO: 370198 - DNA, 201 bp, Homo sapiens
gagtgctacctgggcaatattgggaggcctcatctaaaaaaaataaaaataaaaaagaaagcagacacagtggcagaactcttgttccattcactttgtcmccttttgggagtaagtgaatgactcagaactaaatgacaaggattattagttgggcgtggtggtgcacctgtagtcgcagctactcagaaggctgaggtg

SEQ ID NO: 370199 - DNA, 201 bp, Homo sapiens
ggatgctgagaggtaggaggattgcttgagccaggagtgctacctgggcaatattgggaggcctcatctaaaaaaaataaaaataaaaaagaaagcagacmcagtggcagaactcttgttccattcactttgtcaccttttgggagtaagtgaatgactcagaactaaatgacaaggattattagttgggcgtggtggtgc

SEQ ID NO: 370200 - DNA, 201 bp, Homo sapiens
tgcacagaggtgggaaagcctgatgggtttggggcaatgaatccttttggctgcattgggggtttggagaacgaggctctataacagtttagaaagacagrgcaagttttttgtgaatgtgattaagaactgatgctgtcattgatacaagtttccctctgcgtagcacatttagttcatagagatgcttatgtttctcat

SEQ ID NO: 370201 - DNA, 201 bp, Homo sapiens
ccaggctggtctcaaattcttggcctcaaggatccttctgccttagcctcccaatgtgctgggattacaggcctgagccaacatgctgggcctggtgttamaatttttatagcttaccttttattagtttcctagggctgttgtaacaaattatcacaaattgagtggcttaaagcaacagcaatttatgtatttatttag

SEQ ID NO: 370202 - DNA, 201 bp, Homo sapiens
tgacatttttgtatccctggcagttgctctgatgccgggcacaaagtgaacacatcctaagcctttgcctaatatattgatgagtcctgttggtttcaccyttgggcagttcctctccactctgttcctactatcacccccagaggcagctcaggcctttgttaccactagactgtggctctagcctcacctgcctggtgt

SEQ ID NO: 370203 - DNA, 201 bp, Homo sapiens
ctgtgatgaagcctccataaaaatccctaaatggtgttcagagagcatctgtgctggcaaactcatccaagtgctaggaaggtggtgcattcccactccgyggggacagaagctccagccctcaggacctttgcagactcgccttatgtatcttttcatctggctgttcatctgtatcctttatgatatccttcctaacca

SEQ ID NO: 370204 - DNA, 201 bp, Homo sapiens
tgttggccaggctggccttgaactcctgacctaaggtgacccacccacctcgacctcccagagtgctaggattataggcgtgagccaccgcgcccagccarcattcttaaggattggcacattgtcttcattctaactgctcactccttcaaacctccatgccctacgagagtttcaccagcctagagaccagattcccac

SEQ ID NO: 370205 - DNA, 201 bp, Homo sapiens
attaatatgtgaactgtgattaaagtttgcatttatatcctaagactgctgtctgctaatggatgttaatagtgatacgtactagaagttgaaggttgtaytggggtatcttgtaatgagtgtaattagttttgaagaaatctcttaaattctctctccaatgaaatttctgcctttcagagtagaatgcatgattattgc

SEQ ID NO: 370206 - DNA, 201 bp, Homo sapiens
atttctatgaattggatagtattctacaattttgcagggaggaactgaggtctagagttcacctagcttttcagaattagataaaaaatctcttagctctstgtcagagaccctttccatggggcaggctgttgacctacaatatgtaatttgcttttggtgcaaggagacccagtctctatttgtttaggcaagacctag

SEQ ID NO: 370207 - DNA, 201 bp, Homo sapiens
caatttcctgctggtaccttagtatgaaataataagaaatatacacattgatctctgtccccagttccaggaacagagctcctaaaatcctcataagtttytgagcagtaggggcactaggaggctcttttgttccaatatttggtgtctgccccagttcctccgacagagttcctaatacccttgtagataggggtacta

SEQ ID NO: 370208 - DNA, 201 bp, Homo sapiens
atgtaaaggttaaatacatcgaatcctactgtatattatttgtgtataaacatgcacgtgggagcgatacactcagctttagaacagtggttgcctctgargtgggaaggaagagacagggatgaggtaggaggtagataggcgcttcaactatatctcaaatactttattcctttttttttctttttttttttttgagat

SEQ ID NO: 370209 - DNA, 201 bp, Homo sapiens
gaaatattgtcccattgaggaaaaatcttttccttttccatgtgtaactgtttaaatgtgtagtttttaatgacattaattcaaacaacatcctttcttcrctttaggtctccatttctggaattatcccagtttgcaggttaccagttatatgacaatgaggaggtgccaggaggtggcattattacaggcattggaaga

SEQ ID NO: 370210 - DNA, 201 bp, Homo sapiens
acacccattttagatttttaaaaatagattttatatacaacatgtgtatttgaaatattgtcccattgaggaaaaatcttttccttttccatgtgtaactrtttaaatgtgtagtttttaatgacattaattcaaacaacatcctttcttcgctttaggtctccatttctggaattatcccagtttgcaggttaccagtta

SEQ ID NO: 370211 - DNA, 201 bp, Homo sapiens
ctgtcttgaacgtagtttctgttgtgagattatggtacatggatgctaatcagtagatccatatattacctgaaggaaaacttccttggcatttctgcacrtggagagtgtataaatggtagtttggtggtaaattcataactctttttttgttcttttgtcagggtatgggatgatgggatcattgatccagcagacacc

SEQ ID NO: 370212 - DNA, 201 bp, Homo sapiens
gggaataaaattgatgctcaaagaagagtcctgtttgtcttgtggcgagccctgctggccacatatcctagtatgagaagctcaacactaccctgtgctgkgtgttcagttgccgttctctattttcagcagggatttaatgactcactctttagagttgtaggcagcataaagtgaggtaacacaaacatcagaaacata

SEQ ID NO: 370213 - DNA, 201 bp, Homo sapiens
atggtctcaatctcttgacctcgtgatctgcccaccttggcctcccaaagtgccgggattacaggcatgagccaccacaccagccgataagtgagtgtttytaaagcctttagaagagagcctggtatttggaaaggatttttattttaattaattaattaattaattattttttgagatggagttttgccctgttgccca

SEQ ID NO: 370214 - DNA, 201 bp, Homo sapiens
acttactgtgtaaccttagacaagtgacttgatctctgtgtgtttcagtttcctcatcagtaaatgagggtcacaataagatccacctcagaaggtggttytaaggaggacatgagtgagtgtttcttttttttttttttttttttgagacggagtctcactctgtcaccaggctggagtgcagtggcgcgatctccgttc

SEQ ID NO: 370215 - DNA, 201 bp, Homo sapiens
ctctgtcccttattggctgggtcagggggcgtggcgcggcttgaccaatcgcgggcggcgcgcttaggcacgtgtgtggacaggcctgagaatcagagaarccttctctggggctgcaaggacctgagctcagcttccgccccagccagggaagcggcaggggaaagcaccggctccaggccagcgtgggccgctctctcg

SEQ ID NO: 370216 - DNA, 201 bp, Homo sapiens
tgggcaacagagtgagaccatgtttctttaaaaaaaaaaaaattaataagaagagaaaaaattttaaaggggagtattctttcttgtctttggctgaagtkgtggtgtttgtagaatgcatgatgataatagagttaattcccttttaaaaagatttttatgttatttgcttatagggtactcactttgtccagttatgct

SEQ ID NO: 370217 - DNA, 201 bp, Homo sapiens
gtctctgttaggagagatgggatggggcactaacttgatactcatgtcttagcgtgtatgttaatgatcacttgtaatttatacatcactatgcacatgtkagatgtaacattattattcatgacatctgttgtttcttttgaattgagatgatctaaacagggccagttgttcactgaagctgacttactcatggcctct

SEQ ID NO: 370218 - DNA, 201 bp, Homo sapiens
tatttgcaaagctaaagtttgttaagatatgttcatgcctagaaatagatgtggatctcagtaaggagtgacatatgtggcaatgatacctttccatactrtggatatcattggcacagagtaaatactaaaagaggggagtgggggacctcaatgattggaaagttttcattgcgcaaaaagtgtgatttggtcataagt

SEQ ID NO: 370219 - DNA, 201 bp, Homo sapiens
gtacaggggatgagtacttaatagaagcctttgtcagcaaggccccttggtctagcagaggaaggttaaggttagaaaatagaaggcgggggttcttatgyagctacttgtggtcttaggtgaaggtacttaacttatgcgtacttcagcttttcctgtttgtaaaacaaagggaatacagttttgccagagttcttaaaa

SEQ ID NO: 370220 - DNA, 201 bp, Homo sapiens
attatctcgcagtttctgtgcgttgggagtctgggcgcagtgtagctctgggtctctcacgtggctgcagtcatctcggagcttgactaggaaggacccayttcctggctcactcccatggctgttggcagggtccagcgctttggaggcctgtttcttacgagctgctggccagcggccttcctcagttgcttgccatac

SEQ ID NO: 370221 - DNA, 201 bp, Homo sapiens
gttgtacatatttctgcagtacgtttcataaactgttcatgaaaaaagaaaaaaaaagttctacatattgtctgccatctctggaatagttgaacaggttrgataggttctttgaagaacaacaatagaaaagtacttccaaacaaagtctgtctcaagtcttcagatgcacttcaattgtagtcacttaagacagatgtt

SEQ ID NO: 370222 - DNA, 201 bp, Homo sapiens
tgagggtgggggagaatgggatgaatgatccagtttagctgtgtttcctgattacaaataaaagcaactataataagtaataataatggcaggaattttayagtgtacccaccatttttctaaaggctttatgtggttttactcatgtatttatcataatgatcctgtgcagtaggtacaattgttatttctgttttatag

SEQ ID NO: 370223 - DNA, 201 bp, Homo sapiens
tgaattaaacatgcccttctcatggccgaaggcacaggagcaagaggctgaacacaaattggatttaaaatccttgctggcatgtgatgaaattaatgtgygctcacattagacaaagcaagtccatgagggtgggggagaatgggatgaatgatccagtttagctgtgtttcctgattacaaataaaagcaactataata

SEQ ID NO: 370224 - DNA, 201 bp, Homo sapiens
gggggcataaatacctgaggagcaaagattatagagttaataactgagtggaaggggaaaatggatgactttggagtttccaactgggcagaatatttagktaggtggaactgccattaatacaaagaaggctttggtgatgggttttgtatgaatcaccttttgctaggttgcgctttgtgtaacaaataatcaaaaaat

SEQ ID NO: 370225 - DNA, 201 bp, Homo sapiens
ttttgtagggaagatggacaagaaagcaggtaactgtggtacagtgtaagaagggttgtctaaagcttgagaaggtggttacagaaagctaccgataggawgtaatgggtgagatgaatcttgggtaagagctggccaagttcagggtgcaggatggaaggtaagactgtataaaccaagagagttacaagaacataggta

SEQ ID NO: 370226 - DNA, 201 bp, Homo sapiens
taaatagtgcaaacaacacacaattgtttgtcagtccagaatgtttaattcagaattattaagtggttattgtggtctaggcactattttagatatttggyatggatgcgtaggaatggaactaataattttgtagggaagatggacaagaaagcaggtaactgtggtacagtgtaagaagggttgtctaaagcttgagaa

SEQ ID NO: 370227 - DNA, 201 bp, Homo sapiens
attacaaagttatacttctatgcaaacgaagactggacccccaatcagtctgattggttgtggacagcaaccattcagaggctggagttaaggttcaaacktggcaaagcaagcctccaccagcagtaagtctgatttgtcggggacagccaatttcctatctgccctgcggaaaaggtgggggggtttgcaaagggagta

SEQ ID NO: 370228 - DNA, 201 bp, Homo sapiens
ttaagaatttatgatgtttctggggctttagctggtcctcaaaggagagaaggttctaaccatttcgagaagaattttgcacagaggtgggaaagcctgawgggtttggggcaatgaatccttttggctgcattgggggtttggagaacgaggctctataacagtttagaaagacagggcaagttttttgtgaatgtgatt

SEQ ID NO: 370229 - DNA, 201 bp, Homo sapiens
gatctctaaatcccttcctagctccaaaatgttaggatcctaagataaatttctgctttggtgatattatcattcttgcatatttgctaggtaattgtacrtttctctcccccattttcagggaagggtgagtttgtattaacttctcggtaagtaggtgttcttttagatcagtgattcacagcccagactgcacattag

SEQ ID NO: 370230 - DNA, 201 bp, Homo sapiens
cccggctctgccccttacttactgtgtaaccttagacaagtgacttgatctctgtgtgtttcagtttcctcatcagtaaatgagggtcacaataagatccmcctcagaaggtggttctaaggaggacatgagtgagtgtttcttttttttttttttttttttgagacggagtctcactctgtcaccaggctggagtgcagt

SEQ ID NO: 370231 - DNA, 201 bp, Homo sapiens
tttacttcagaaaattggcaacttgtaagttgagtgaatgattattagccttttctcagaggatatgttgaacttttaaaaagtgctatattttggattawgtattatgtttttctggcattgagacctttttatcgtgtcaatctaatctaatctaatcacatttctatcataggaggtggtgagaaagcccgagcactt

SEQ ID NO: 370232 - DNA, 201 bp, Homo sapiens
taccacttttggggggaaaagtaaagattcaaattcataaattttatgaataaataatttatttttaatttttattaattttttttttaagagatgggttyttgctctattgccaggctggactgaacccctggctcaagcgatcctctcatcttggcctcccaaagtgctgggattacaggtatgagccaccacacctgg

SEQ ID NO: 370233 - DNA, 201 bp, Homo sapiens
gttttgccactaaactacactgcctcttggttagtgagtctcatcctaaggaggctaggttggttgataaaggattgcctgggaggtgaactgtagccagwactggctcttctgtgatttaagtctgatgggctgagcttggcacagatgttgcccagtctgtagaggcaaatgtcagcttcagtgggtcagtgcttttct

SEQ ID NO: 370234 - DNA, 201 bp, Homo sapiens
tacaagaacataggtactgagttatgaaagtgtatatctggtgtgaggacttgaattccatgtctaggacatggaattcattgaatagtgtctggtgatgsgattgattgattatggggccagatagaggaggatcttccatgcaaaagccacatttagattccatttggcaggttgtccattaaaatatttaagtagata

SEQ ID NO: 370235 - DNA, 201 bp, Homo sapiens
ctttaaaagagcccatcattaagaagtttgaagaggaaggaaacccttactattccagcgcaaggtgggggccagaacatcactaactctctgatgggtgsagatggcagtcagaggaacagctttacagagctctatgtagttgagatggtccagcattcataggaactggaaaataacatttggacacacttaattttg

SEQ ID NO: 370236 - DNA, 201 bp, Homo sapiens
atattgacttaatttgtttattcttccttttcttcccccagcccaagatttctctacatttggccaaatgctcgtatctcagtgatgggaggagagcaggsagccaatgtgttggccacgataacaaaggaccaaagagcccgggaaggaaagcaggtcggtgtcgttttctcttgtttctctctggttttgcctctcacc

SEQ ID NO: 370237 - DNA, 201 bp, Homo sapiens
ggcatttagtaagatgagtttagtaaaacaagatgtccttttggtggaattgcgttccgcatattaatcccatcacccagaggctctctttctgatctttstctcaggatttatggttggtagagagtatgaagctgaaggaattgccaaggatggtgccaagatggtggccgctgtggcctgtgcccaagtgcctaagat

SEQ ID NO: 370238 - DNA, 201 bp, Homo sapiens
ccaagatggtggccgctgtggcctgtgcccaagtgcctaagataaccctcatcattgggggctcctatggagccggaaactatgggatgtgtggcagagcrtataggtaggtgtcatgattttctctgaaacaaagaaacatgcttcaagtataaaatacatggtcagtttatttcaggtgtatttgaaatatagaatgcc

SEQ ID NO: 370239 - DNA, 201 bp, Homo sapiens
gagaggtatgtgaaagtggaactgtgagctttatgaccagctgtgagtctctttgtatgtgtatctatttgcaaagctaaagtttgttaagatatgttcaygcctagaaatagatgtggatctcagtaaggagtgacatatgtggcaatgatacctttccatactgtggatatcattggcacagagtaaatactaaaagag

SEQ ID NO: 370240 - DNA, 201 bp, Homo sapiens
taagaaatcatgtggccatttgtattcttttcttataagtaccttgaagtctgaacctaagtttacctccaggtgtagacgcaccctttctctaccccatyctccccctttactctgccccactaagcaaccaatggagtagaagtagtaagtgctcaataaatatgtgaatgaaaaaccttaagttcaaggcattttgta

SEQ ID NO: 370241 - DNA, 201 bp, Homo sapiens; identical to SEQ ID NO: 80083

SEQ ID NO: 370242 - DNA, 201 bp, Homo sapiens
gtactgttgtttctttacaatctgaatggctactgctgaaatgccacccctcctcccagcatccctgcactgtggactcaccaccagtggtctgattctcrcttcccttgtcttccccctagttgaggtgtctggggcctggaggggtcctgcagcccaaggtgggccatgttaggagccgagaataagttataagcttgg

SEQ ID NO: 370243 - DNA, 201 bp, Homo sapiens
ttctcttgtttctctctggttttgcctctcaccataaacaccctggagccaaggagcagcgtgcctggaagcccttggtgttcatggctggggacctggcrcacactgcctggccatatttagactgtgctgccctggaagttgttccagcaaatcacatgatttctgtcctttatctttttaaagccatttcatttgggg

SEQ ID NO: 370244 - DNA, 201 bp, Homo sapiens
cggtgtcgttttctcttgtttctctctggttttgcctctcaccataaacaccctggagccaaggagcagcgtgcctggaagcccttggtgttcatggctgsggacctggcgcacactgcctggccatatttagactgtgctgccctggaagttgttccagcaaatcacatgatttctgtcctttatctttttaaagccatt

SEQ ID NO: 370245 - DNA, 201 bp, Homo sapiens
gtgcctaagataaccctcatcattgggggctcctatggagccggaaactatgggatgtgtggcagagcgtataggtaggtgtcatgattttctctgaaacraagaaacatgcttcaagtataaaatacatggtcagtttatttcaggtgtatttgaaatatagaatgccattcccagatctcaatcaattataccgtaatt

SEQ ID NO: 370246 - DNA, 201 bp, Homo sapiens
ttcactgagttcaaagccttttatggagacacattagttacaggtataaaggtgaagaattgaaaatacgaacattttctgctgctttgaaaatcaggaakctcttgtttcaagactttgatacacttgacatgggctttgttgttgagagcactacaaatgtgtgagccacttttaaaaggaactgctttataaacataa

SEQ ID NO: 370247 - DNA, 201 bp, Homo sapiens
tatcagaagaaattggatgtgagtacgatatgttcttatatcttttattttcctgaaatgcattttgactcactgcaccttgaaatcatgtctttaaacakgttaacatgatctgtatttctgcaggtcaccattgaaccttctgaagagcctttatttcctgctgatgaattgtatggaatagttggtgctaaccttaag

SEQ ID NO: 370248 - DNA, 201 bp, Homo sapiens
agtgctgggattacaggagtgagccactgcacctggactaaatttttaagcagtttgactatttaaaaaaagtaaagctgtaggcaatatattatgttaasggtgtagattctggaatttaacttccgtttgcctcccctattccccttgggacttagacaaactgcttaccctatctgagtctcatttcctcatagataa

SEQ ID NO: 370249 - DNA, 201 bp, Homo sapiens; identical to SEQ ID NO: 80109

SEQ ID NO: 370250 - DNA, 201 bp, Homo sapiens
ctgaaggtctgatggcttgcaaagcaaattctttacaactgttataaaggtttcattgcttaagcatataatctagcaaaactgccaagccccctccactycctaaactctaagacttgccagggaagagaacagtggccagtggactgcaggagtaactgcactcagcccagaactccctggaggacacagggaaggttc

SEQ ID NO: 370251 - DNA, 201 bp, Homo sapiens; identical to SEQ ID NO: 80116

SEQ ID NO: 370252 - DNA, 201 bp, Homo sapiens; identical to SEQ ID NO: 80110

SEQ ID NO: 370253 - DNA, 201 bp, Homo sapiens
tgtcgctcctgggacttcagtgaagaccaaccccaatgccatcaagaccatccagaagaacacaatctttaccaatgtggccgagaccagcgacgggggcrtttactgggaaggcattgatgagccgctagcttcaggtgtcaccatcacgtcctggaagaataaggagtggagctcagaggatggtgtgtccctgccaga

SEQ ID NO: 370254 - DNA, 201 bp, Homo sapiens
tgttcactttccagtggcctcttctaacccagggggctggtgaccagcagggtgtggtggtgttagtggaacaccgtgaaaatgggtctacctgggaaaamaatgctggtcgtgttcgaagtccaaggtcatttctcaccagtgcccacccatcgcaccctgtaggtcgcaccatgtacgtcatcccattcagcatggggc

SEQ ID NO: 370255 - DNA, 201 bp, Homo sapiens
ccatcaagaccatccagaagaacacaatctttaccaatgtggccgagaccagcgacgggggcgtttactgggaaggcattgatgagccgctagcttcaggygtcaccatcacgtcctggaagaataaggagtggagctcagaggatggtgtgtccctgccagaggccttggtgtgccgggctgcagggactgcctgtttga

SEQ ID NO: 370256 - DNA, 201 bp, Homo sapiens
ctcgcctctgtcaaagatcggcatcgagctgacggattcaccctacgtggtggccagcatgcggatcatgacgcggatgggcacgcccgtcctggaagcastgggcgatggggagtttgtcaaatgcctccattctgtggggtgccctctgcctttacaaagtaagtgtattatttcagaatcaaaagtcaaaataaaaaa

SEQ ID NO: 370257 - DNA, 201 bp, Homo sapiens
gagactgtttgcagagacttttctctggcccctgtctcttcacagggagaacgaagaaaggaacttggggagaggttgtctgtgggagagaggagggtgtkgaaaggtcccagaatcagaggaccactggtgtggggcctcgcggatcctccctgaggattagggctatcttccaaatgcccaacacacattccacgctcc

SEQ ID NO: 370258 - DNA, 201 bp, Homo sapiens
aacctctgggctgaagtaccaacctcggggagaaggaaacaaagatcacaataaagaatcttgtccccaacagattctgggtataaccaaccctgagggtragaagaagtacctggcggccgcatttcccagcgcctgcgggaagaccaacctggccatgatgaaccccagcctccccgggtggaaggttgagtgcgtcgg

SEQ ID NO: 370259 - DNA, 201 bp, Homo sapiens
accaacctcggggagaaggaaacaaagatcacaataaagaatcttgtccccaacagattctgggtataaccaaccctgagggtgagaagaagtacctggcrgccgcatttcccagcgcctgcgggaagaccaacctggccatgatgaaccccagcctccccgggtggaaggttgagtgcgtcggggatgacattgcctgga

SEQ ID NO: 370260 - DNA, 201 bp, Homo sapiens
atccttgatctattgtagcttgatcaaattttactttttactttgtggcctcagtcatgtaactttgagttagcagttttctgcaatttagcttggtgaaygcaaaactagctcgattacaaagttattgtcttgccgtgtctttccgtgttgtgaataacaccactggttgtggagtctgaatttcaaagcctctgatga

SEQ ID NO: 370261 - DNA, 201 bp, Homo sapiens
acaataaagaatcttgtccccaacagattctgggtataaccaaccctgagggtgagaagaagtacctggcggccgcatttcccagcgcctgcgggaagacyaacctggccatgatgaaccccagcctccccgggtggaaggttgagtgcgtcggggatgacattgcctggatgaagtttgacgcacaaggtgactctttta

SEQ ID NO: 370262 - DNA, 201 bp, Homo sapiens; identical to SEQ ID NO: 80104

SEQ ID NO: 370263 - DNA, 201 bp, Homo sapiens; identical to SEQ ID NO: 80106

SEQ ID NO: 370264 - DNA, 201 bp, Homo sapiens; identical to SEQ ID NO: 80107

SEQ ID NO: 370265 - DNA, 201 bp, Homo sapiens
catacatgaagttggcaatgtattgaaaatgcacatccctcttctgcttttacagactgtcttatacaaacgtgaaaactagttccatgcatatgggtttyaaatagcttggtgggacccaattgcacatttatgaaaactctttaatttcagcaggctgttcactttccagtggcctcttctaacccagggggctggtga

SEQ ID NO: 370266 - DNA, 201 bp, Homo sapiens
ggggcttcctttcttgagcttccttcccaaagatccagaataattggcaagttcaaatgtagaaccaacccttctggtcacctggaacctttctgaatccytgatctattgtagcttgatcaaattttactttttactttgtggcctcagtcatgtaactttgagttagcagttttctgcaatttagcttggtgaacgcaa

SEQ ID NO: 370267 - DNA, 201 bp, Homo sapiens
gaaatagatcttgagggcctacattccaacctctgggctgaagtaccaacctcggggagaaggaaacaaagatcacaataaagaatcttgtccccaacagrttctgggtataaccaaccctgagggtgagaagaagtacctggcggccgcatttcccagcgcctgcgggaagaccaacctggccatgatgaaccccagcct

SEQ ID NO: 370268 - DNA, 201 bp, Homo sapiens
cctctgcctttacaaagtaagtgtattatttcagaatcaaaagtcaaaataaaaaagaaagctgaacgcaaaccccagtgagtgcctcggggacccccaascagggccctggcgcactgacttgggaggggtccttgttcacagagcctttggtcaacaactggccctgcaacccggagctgacgctcatcgcccacctgc

SEQ ID NO: 370269 - DNA, 201 bp, Homo sapiens
acccatcgcaccctgtaggtcgcaccatgtacgtcatcccattcagcatggggccgctgggctcgcctctgtcaaagatcggcatcgagctgacggattcrccctacgtggtggccagcatgcggatcatgacgcggatgggcacgcccgtcctggaagcactgggcgatggggagtttgtcaaatgcctccattctgtgg

SEQ ID NO: 370270 - DNA, 201 bp, Homo sapiens
catttttttcctgagagcaataactatttggcaatgcacagccctggcaaaaggccgtcgaatgtgtttgaaggtgtctgttgttgtttttgttcaggacrcttgcgttttctatttcaggtgacctcacattcgtgccccttagcagcactctgcagaaatgcctcctcagctgcaaaacggcctgaacctctcggccaa

SEQ ID NO: 370271 - DNA, 201 bp, Homo sapiens
gtccaaggtcatttctcaccagtgcccacccatcgcaccctgtaggtcgcaccatgtacgtcatcccattcagcatggggccgctgggctcgcctctgtcraagatcggcatcgagctgacggattcaccctacgtggtggccagcatgcggatcatgacgcggatgggcacgcccgtcctggaagcactgggcgatgggg

SEQ ID NO: 370272 - DNA, 201 bp, Homo sapiens
gtgttcgaagtccaaggtcatttctcaccagtgcccacccatcgcaccctgtaggtcgcaccatgtacgtcatcccattcagcatggggccgctgggctcrcctctgtcaaagatcggcatcgagctgacggattcaccctacgtggtggccagcatgcggatcatgacgcggatgggcacgcccgtcctggaagcactgg

SEQ ID NO: 370273 - DNA, 201 bp, Homo sapiens
tgcccgtggtgcttggctgaaaggaagcctgtgatttttgcagctggttggctctcactgaccccagggatgtggccaggatcgaaagcaagacggttatygtcacccaagagcaaagagacacagtgcccatccccaaaacaggcctcagccagctcggtcgctggatgtcagaggaggattttgagaaagcgttcaatg

SEQ ID NO: 370274 - DNA, 201 bp, Homo sapiens
tggagtaaatgtccacctggccatgtcttagacggtctgtgtgttcacactgatggactgttgttagcgtgctcagcactctgctaggcatggaaagccayggtactgaaggagatggttcgctgcccgtggtgcttggctgaaaggaagcctgtgatttttgcagctggttggctctcactgaccccagggatgtggcca

SEQ ID NO: 370275 - DNA, 201 bp, Homo sapiens
caaaagctctgccaactagattcctgattaaaaaaaaggcagcccctctcctacagaccagctcctagtggagtaaatgtccacctggccatgtcttagayggtctgtgtgttcacactgatggactgttgttagcgtgctcagcactctgctaggcatggaaagccatggtactgaaggagatggttcgctgcccgtggt

SEQ ID NO: 370276 - DNA, 201 bp, Homo sapiens; identical to SEQ ID NO: 80105

SEQ ID NO: 370277 - DNA, 201 bp, Homo sapiens
cagtttccccaaaccatgcctcctgagtgctccctctgtctccaaatcctgatttttgtgcgcggacccctgtctacaataaacaggatcctatgacttcwttcttcaatgttctcttgtcgtgccttcagatgatgcaaagtatgtaagctaagcccacttgcaggaagctcacagaaggcaagaggctcatcacttgaa

SEQ ID NO: 370278 - DNA, 201 bp, Homo sapiens
tttcaaaagaagagcagccttggacctaagaaaatctgagcctaaggagctccccaaaagctaggaggtctctatggcatccgtcccagaaacaactaackcaactcacaggcagcgtgagccacctccatgccccacccactgagcacacactgcaaagtccactcggcgggttaactgggggtcctcagggatcccacc

SEQ ID NO: 370279 - DNA, 201 bp, Homo sapiens
aggtgtctgttgttgtttttgttcaggacgcttgcgttttctatttcaggtgacctcacattcgtgccccttagcagcactctgcagaaatgcctcctcarctgcaaaacggcctgaacctctcggccaaagttgtccagggaagcctggacagcctgccccaggcagtgagggagtttctcgagaataacgctgagctgt

SEQ ID NO: 370280 - DNA, 201 bp, Homo sapiens
tcacagagcctttggtcaacaactggccctgcaacccggagctgacgctcatcgcccacctgcctgaccgcagagagatcatctcctttggcagtgggtayggcgggaactcgctgctcgggaagaagtgctttgctctcaggatggccagccggctggccaaggaggaagggtggctggcagagcacatgctggtgagcc

SEQ ID NO: 370281 - DNA, 201 bp, Homo sapiens
attagtgggccagcccaagctttaaatgaggtgtgtgcacaaaagctctgccaactagattcctgattaaaaaaaaggcagcccctctcctacagaccagstcctagtggagtaaatgtccacctggccatgtcttagacggtctgtgtgttcacactgatggactgttgttagcgtgctcagcactctgctaggcatgga

SEQ ID NO: 370282 - DNA, 201 bp, Homo sapiens
accttgtccttgacccacctgcctgttaagaaaagggtgttgtgttttgcaacagcagtaaaatgggtcaaggtttagtcagttggaagttgtgtcaaaastcactatggttggttgagggctcgaagtctcccagcattcattaacaactatctgttcaatgattatctccctggggcgtgttgcagtgagttggcccaa

SEQ ID NO: 370283 - DNA, 201 bp, Homo sapiens
tctccgtgttggtcaggctggtctcaaactcctgacctcaggtgatccgcctgcctcagcctcccaaagtcctgggattacagacgtgagcctccgcaccyggcccagaatttctgttcttttattggcctccaggtaaccaagaaacaccaacatgtgttgcaatcagactgtcctctgaatcctccactgtgagacccc

SEQ ID NO: 370284 - DNA, 201 bp, Homo sapiens
ttcaaatattgtttttaattactctaatttttctggaattggttttcgtacacttgacaacctattcagcaagttagatttaaagtagggtaggttcttargtatgtttataagcttttaaaaacatgaggaatttatatgtttattacttttggcagtcttgaaaggtaagtaacttagtaagatagcttaaatgaagat

SEQ ID NO: 370285 - DNA, 201 bp, Homo sapiens
atatatttacttcatttttacattttctcagtttcttcattactttgtgtagatccaagtttctatgtggtattctagccctttaacgcttcctgtaataygtgtcttactgtcagtgaatttcctcagcttttttattttttcttgaaaatgtctttagttcatctttatattatttttatcatggtgaaatacacatag

SEQ ID NO: 370286 - DNA, 201 bp, Homo sapiens
aaataaacttaataccaaattttaaaacacttaaatacagctactacatttcctcttcagaagaattaaccatattgcttacagtctgtttttaagcactytagtaaaagaaatactgtctgtaccttgtcctggtaaatatttttattttgttactttagcttcttcatattgacaaaagaagagaatatctttatcaac

SEQ ID NO: 370287 - DNA, 201 bp, Homo sapiens
tgcccaggctgatcttgaactcctgagctcaagtgatccatccgcctcggcctctcaaagtgataagattacaggcgtgagccactgtgcctggccccatrttaattgtttctgatgtcctttattcttttgtatagatccagattctcatctggtgtaattttccttttgctggaatggtttgctttattatttcctata

SEQ ID NO: 370288 - DNA, 201 bp, Homo sapiens
ttagtaagatagcttaaatgaagatgtacagacaggacagctctttaagtagttattttttcctaacagaatatggactccactcttcactatattcacarcgattcagacttgagcaacaatagcagttttagccctgatgaggaaaggagaactaaagtacaagtaagtgaccaaaaaatgtgttcttttgtgggtgtg

SEQ ID NO: 370289 - DNA, 201 bp, Homo sapiens
tgaaattgacatttttgaagagtccatttggttttatctgtttcctcatgatttgattcaggttattctttccttttttttttttttttttttttttttttgacaggactgctacataagtgatagtgtagttttctcagtgcttcagattaaggagcacctgatagcagtgtccattactggtagtgtggaggtgatgtc

SEQ ID NO: 370290 - DNA, 201 bp, Homo sapiens
atgaaattgacatttttgaagagtccatttggttttatctgtttcctcatgatttgattcaggttattctttccttttttttttttttttttttttttttttgacaggactgctacataagtgatagtgtagttttctcagtgcttcagattaaggagcacctgatagcagtgtccattactggtagtgtggaggtgatgt

SEQ ID NO: 370291 - DNA, 201 bp, Homo sapiens
tccatcagaacatctctgccttcatctgtcttatatgttgaacttgggcgtaaaattttatttcaagagtggattctggggggaagggaaaggaaatacartgtttgctctaaactgtttctctttaggtaaaattttaagttactatgtaaaaattttatgattaaggcaccatggagaaaaggatgtttttaacttaaa

SEQ ID NO: 370292 - DNA, 201 bp, Homo sapiens
aggaatcagtgctgttgactcagcaagttataagttggaagtaatcttgataggtcaagttcctcctttgacctatgaggttaggaaagctgggcccaggrgaagtgaatttatccttaaccaggacccagaagaagtgaatttatctgtgttcatatactttttaagtgctgcatctggtcatggaaccacaaaggccca

SEQ ID NO: 370293 - DNA, 201 bp, Homo sapiens
tcatgcctgtaatcccagcactttgggaggccgaggtgggcggatcacgaggtcaggagatcgagaccatcctggccaacatggtgaaatgtctactgaartacaaaaaaaaattaactgggcgtggtggcgtgcacctgtagtcgcagctgctcaggaggctgaggcaggggagttgcttgaacccaggaggtagaggtt

SEQ ID NO: 370294 - DNA, 201 bp, Homo sapiens
gtatttttcaaggaatcagtgctgttgactcagcaagttataagttggaagtaatcttgataggtcaagttcctcctttgacctatgaggttaggaaagcygggcccaggagaagtgaatttatccttaaccaggacccagaagaagtgaatttatctgtgttcatatactttttaagtgctgcatctggtcatggaacca

SEQ ID NO: 370295 - DNA, 201 bp, Homo sapiens
cttaaaagaagagcagagaaggaaacactgatgttgaaccttacagaatgaaggtacttaaagatgctgccaatgctcgcaactaaattttttttttttttgagatggagtttcactcttgttgcccaggctggagtgcaaaatggcgcgatctcggctcaccgcaacctctgcctcccgggttcaagtgattctcctgcc

SEQ ID NO: 370296 - DNA, 201 bp, Homo sapiens
gacccggttttggattgtttgaggatgacatacctgtcattttactttggctggtagcagttttcagatgctcccgatttgattagtggattacgagaaggttagaaggtgtggcctccgcaggaattactaggtttggagagcatatttctttaatgcggatgttcagaaatcacccagccctccttcagtgttaacagt

SEQ ID NO: 370297 - DNA, 201 bp, Homo sapiens
tccatgggaagagccaccacctcgccagaggctcctgagccgcgtttgggtgcgggcccacattgtcctgctgttcccaatccccaggagatgcccggccktggacaggagagcgcaagctggtcctccagcaccgtgaggaattcagcgtggacaagaggaagttccgcagggaacatcccacaggcagatgctgagggg

SEQ ID NO: 370298 - DNA, 201 bp, Homo sapiens
attttaatgagtttatttccattttcattttgtgtatatggataattcgtttatgtagctcaaaattcaagatacttaaaaggcattcagtgatgttcccytctcagttttttcttctccactcatccattttgcttcctgagatacaaccagttttacctttcttttatatccttccacagctatattatacacacctaa

SEQ ID NO: 370299 - DNA, 201 bp, Homo sapiens
ttcctgaactcctttgctgtcatacctggtttgttcaggtcccatgtttgttgttataggggtgacttatttctgggggagctggtgccaaaacaccagctgtgcttagtgtggggaggaagggccaggcaggtgcttggtgggcagcacagggcaggcaggggcttcggggagggcagcaaggctgtaaactgccttcag

SEQ ID NO: 370300 - DNA, 201 bp, Homo sapiens
gagtggctgaagtgattaaaagggttggtgaaaattgcagccgaaattctgaagataatgaaaatattccactacaactttttgtgagtgaatatgttcarttttcttaagttagcaagtaatgacctaatagactagaacctcatcctgtatgttgcttgtgtgtctgttgtcaggcacttaatatacttagatgagaaa

SEQ ID NO: 370301 - DNA, 201 bp, Homo sapiens
agaaatttctcatcaaaacaaatctaaaaacattgttttgcatcatgtatagtaatattttaggattaataaaaatatatagaataattttgaatacattraaagagatggaggaggctgtaaattattttaggcaactatagaaagcttgctttctgtgtggtttctcacttgcaaaaaaatgttgattaaccatttgta

SEQ ID NO: 370302 - DNA, 201 bp, Homo sapiens
gtatctacaaagtgcaataaaacaaagtatgcctgcactttccagggaacagaatggatgggggatgatacccacacacacacacacacacacacacacacacacacaccatgcactttatatgggacaaaacattttaacctttctttcttgtacagtctattttgagtactgttttggtttggcttgggagtgatccca

SEQ ID NO: 370303 - DNA, 201 bp, Homo sapiens
ctctcagttatttaaaaaaaaaaaaaaaaagcagtctgattaggctaatttgtactgaaatgtgatgacttttccttaaacttcttagtaattgtattttycaaggaatcagtgctgttgactcagcaagttataagttggaagtaatcttgataggtcaagttcctcctttgacctatgaggttaggaaagctgggccca

SEQ ID NO: 370304 - DNA, 201 bp, Homo sapiens
actgtgtacttgtagctgttctctatgatccttccctaatttcctgctgcatctccatcaagccagcattatttggtatcagtgctgcttagccattgttkatacaaatggggagaaggaatgcaccaccgattgccagaatcgcatggtcacagatcatagtggcttgaatgagaagctcaggaaagagtacctgcacac

SEQ ID NO: 370305 - DNA, 201 bp, Homo sapiens
ataaacttaataccaaattttaaaacacttaaatacagctactacatttcctcttcagaagaattaaccatattgcttacagtctgtttttaagcactctrgtaaaagaaatactgtctgtaccttgtcctggtaaatatttttattttgttactttagcttcttcatattgacaaaagaagagaatatctttatcaactt

SEQ ID NO: 370306 - DNA, 201 bp, Homo sapiens
actctgtggcttctctttgcactccgtgatgcttcttgcagaagagaagtgtttttcctttatgggtcatgccgtttgtgtcttctttgagattttttccmatctcaaagtcataaatatcttttcctgtattctctaacacagagaagccttattgttttttgccttgacattcagatctgtattccacctggaatttat

SEQ ID NO: 370307 - DNA, 201 bp, Homo sapiens
tgtaggtatttttcttctcttttttcttttcttttcttctcttttcttttcttttcctttctttccctccctccttccctccctccctccccttctttctwtctctcttctttcttaagcacagtgtgagaaaatgtctctttagctgatgtgagtaaagagatcaaatatctttgaaaaactatgaaagctctaggaaag

SEQ ID NO: 370308 - DNA, 201 bp, Homo sapiens
ggagttgcttgaacccaggaggtagaggttgcagtgagccaagattgtgctactgcactccagcctggcgacagagcaagactccgtctcaaaaaaaaaargtttaggagaataatgcaataaaaaccatatgtatttaagtttaaaagtgaaactttcagtactgtatcatgaaatactttgaatttcaaattgaaagca

SEQ ID NO: 370309 - DNA, 201 bp, Homo sapiens
aagataatacgtactaggcagggatttaaaatgtttctgttacacttttcgatgcataatttaggcatttaaagttagtatctgttattctgatttaattytttgaggttagtaacattcatatataaattagcctttgtatattgcctaatggttaaagtactgcgtactttgtggttagcttactaatgtgttttcatt

SEQ ID NO: 370310 - DNA, 201 bp, Homo sapiens
aaatttcatttcagaaaaaattgtcatttaataatgtattatggactgggcacagtgactcatacctataataccagcactttgagaggttgagacaggargatcacttgagaccaggaggttgagaccagtctgggcaacatagtaagaccccatctctacaaaaaaataaaaaattagccgggcatggtggcacatgct

SEQ ID NO: 370311 - DNA, 201 bp, Homo sapiens
ttgaagaatgttatttttaaagaatggctatgtaacgcttagtttacagtgcctttcatacacaggttattcttcacagcagtcctgtgatgtgtaggctrtggtattctaatactaataagtaagttgactaatgcccaaagggactaaagaaacaaaactcctaagtttagacggaattttaagctaggccttctgatt

SEQ ID NO: 370312 - DNA, 201 bp, Homo sapiens
gagtccttgcttccggtgggaggtgaggagcaaaatattggggctgtatctggtagtggccagggaatcattcagaaacctttggaaggtgcccttgaacrtgaatcatatttaggagtattgttaaatagggatttgggagggtgagtcgtgagacctggtagcctgttttgactgctgccaacaagcctggatggagag

SEQ ID NO: 370313 - DNA, 201 bp, Homo sapiens
agtatgtagtacatattgaaatatccccagtaatgtccttatggcaactgtcttttgctgtaaggacattacttacaaacttactagtttggaacaatttytcagcctttagcattcatgaaattgacatttttgaagagtccatttggttttatctgtttcctcatgatttgattcaggttattctttcctttttttttt

SEQ ID NO: 370314 - DNA, 201 bp, Homo sapiens
tccctattcatttgttggtatatttatttgttaaaatataattttaaagccccaaatctttataaggtaactcattctgtggtgtatctcattgtctttcrttttctaaaatgtaaagatgggaaacaaaatgtggccgatttattgtggcctgagcagtatctagggaaaaactgaagggaaggatagactatgagcttt

SEQ ID NO: 370315 - DNA, 201 bp, Homo sapiens
tctagggaaaaactgaagggaaggatagactatgagcttttttatgttttacgttacattattagagattatgtagagaatagaagggtgttttgatcaawtttgataaaagtttgtacgaattaaaaagttctctttggtgtgatacttctcaaggtattaatatgctaatgtgcttgtgaatatcttagagaaggataa

SEQ ID NO: 370316 - DNA, 201 bp, Homo sapiens
caggcaagaccgtgagagacaaataaaacaaaaaaattgtgaataaattctttaaattgagactcttgcatttttttctttatctcttttcattttccacmcagaaatttaccttgatgtattttcatattttcatgcttgagagttgattgcccagtcacatttctttgcaccaaaaataggtaaagagaaatttaaatt

SEQ ID NO: 370317 - DNA, 201 bp, Homo sapiens
caagtgatccatccgcctcggcctctcaaagtgataagattacaggcgtgagccactgtgcctggccccatgttaattgtttctgatgtcctttattcttytgtatagatccagattctcatctggtgtaattttccttttgctggaatggtttgctttattatttcctatagtgcatgtctgctgttgatgatgtcagtt

SEQ ID NO: 370318 - DNA, 201 bp, Homo sapiens
ttgaaaaaacctagtaaataacattttatcaaaaaggcatctcttaatgaaatggatgggaattttacaaaataattatgtattcatggataaatataatytattgcttagaatgagataatacttaacatcatttctacttttcattttaagagctataagtgctgagaaactttgttgcataaataagtcaatgggaat

SEQ ID NO: 370319 - DNA, 201 bp, Homo sapiens
ctcagttactaaagtttttacaggtgatacctttacccagaatattcaggaacaaaggacttttggacatatggccagttgaaggaccacttcccatctcytgtgaagggagaaagaatgagggggaacactgggccatggtgcctccttagagagcaagatggttggtaaaggactgagacagctgtcacatcctggaga

SEQ ID NO: 370320 - DNA, 201 bp, Homo sapiens
cacatgaccactagtggtcgtcatggcttgtggtggtcacggcttgtgggggtcacagcttgtggctgtagtggctgctgcggcatcactgccaccctggrggcagccagggtcagtcatggacagggcacagctgccccagacccatccgcttggctcagtcttttactagcaagccgtgtccctttgcgagtggtaggt

SEQ ID NO: 370321 - DNA, 201 bp, Homo sapiens
attgctagaacccgggatgcaggggttgcagtgagccaagattgcaccactgtattccagcctgggtgacagagcaagactccatctcaaaaaaaaaaaawtttgttgtttggtgtagctaccttagtggcttaagtaatcttagctagatcttctgaataacttgctgcagctttacctaagcactggctgcttcacctt

SEQ ID NO: 370322 - DNA, 201 bp, Homo sapiens
ttaaagaaaaaaaaaaaagccaaagtgtagtatctacaaagtgcaataaaacaaagtatgcctgcactttccagggaacagaatggatgggggatgatacmcacacacacacacacacacacacacacacacacacaccatgcactttatatgggacaaaacattttaacctttctttcttgtacagtctattttgagtac

SEQ ID NO: 370323 - DNA, 201 bp, Homo sapiens
cattcgatccttctgcctcagccccccaagtagctgggactacagatgtgcaccgccacatctagccaatttttactttatttactaaaaatgaaatcagyattcaaaacaatagtgttttgaaacatgcttttccccacttacagacattttcagtatttcaaatctcattttaatgagtttatttccattttcattttg

SEQ ID NO: 370324 - DNA, 201 bp, Homo sapiens
tagttagcagctcccaaaacaattacaatagtaatatcaaagatcactgatcacagatcaccatagcggatatagcaataatgaaaaagattgaactagtmcaagaattaccaacatacaatacagaggcacagcgtaaacacatgctgttggaaaaatagcaccaatagacttgctaaatgtaagcttgccacagacctt

SEQ ID NO: 370325 - DNA, 201 bp, Homo sapiens
gggcgtgggggaggaaaagactatagaatgttcacagcaagcatagtcaacttttgataaatgtttaacgtctttacagcttccagctttctgtttaaatkttattatttaccaacttaagtttattaagtttatccaacttcaatgactccggttttcttcttttttttttttttttttctgagacggagtctcgctttg

SEQ ID NO: 370326 - DNA, 201 bp, Homo sapiens
tgcgagccaccatgcccagctaattttttgtgtttttagtagagacagtgtttcgccgtgttggccaggctggtcatgaactcctgacctcaagtgatccrcccacctcagcctcccaaaatgctgtgattacaggcatgagctaccgtgcccagccttaggattatattattattgttagaagtagatttcccagatcaa

SEQ ID NO: 370327 - DNA, 201 bp, Homo sapiens
agtatctacaaagtgcaataaaacaaagtatgcctgcactttccagggaacagaatggatgggggatgatacccacacacacacacacacacacacacacacacacacaccatgcactttatatgggacaaaacattttaacctttctttcttgtacagtctattttgagtactgttttggtttggcttgggagtgatccc

SEQ ID NO: 370328 - DNA, 201 bp, Homo sapiens
agatagcagtacacgcagtcattcttttatggaaagactatagaatgtttgtcgcactactgcactgcagcctgggcgacagcaagactctgtctcgggcrtgggggaggaaaagactatagaatgttcacagcaagcatagtcaacttttgataaatgtttaacgtctttacagcttccagctttctgtttaaattttat

SEQ ID NO: 370329 - DNA, 201 bp, Homo sapiens
tagtatctacaaagtgcaataaaacaaagtatgcctgcactttccagggaacagaatggatgggggatgatacccacacacacacacacacacacacacacacacacacaccatgcactttatatgggacaaaacattttaacctttctttcttgtacagtctattttgagtactgttttggtttggcttgggagtgatcc

SEQ ID NO: 370330 - DNA, 201 bp, Homo sapiens; identical to SEQ ID NO: 80135

SEQ ID NO: 370331 - DNA, 201 bp, Homo sapiens
gtagtatctacaaagtgcaataaaacaaagtatgcctgcactttccagggaacagaatggatgggggatgatacccacacacacacacacacacacacacacacacacacaccatgcactttatatgggacaaaacattttaacctttctttcttgtacagtctattttgagtactgttttggtttggcttgggagtgatc

SEQ ID NO: 370332 - DNA, 201 bp, Homo sapiens
tatagaatcccaggattcttaaatgttaccttctctaactaatatatattgcttgactatctagacttatacttaacaggtatttacatctttgaacacakaacagctgatggagaaagaagcattataaataatatacataaactcagtttgtacagataatccgtaatttttaatgtttaacttgtctaaatgctatat

SEQ ID NO: 370333 - DNA, 201 bp, Homo sapiens
tgcaataagtggaaaagtcctgttgatttttgctgctgtttgaatgtgttcttctgtagtcctggagacactgcctccatcagaacatcatcacttcttasctgcatgtctgtaattcctgcctcctatcttacctctcaactcattttctacacttcctccagaatggtctttctaaaacaacagatctattaacaattt

SEQ ID NO: 370334 - DNA, 201 bp, Homo sapiens
ggactcaagcgatctgcccagctcagcctcccagagtgctgggattacaggcatgagccactgcgcccagccagagaaaatagcttgtaagaatttttcartcctagctaaagttctgaatctgggcttcctttagaaaagcttcattattatcctaaacatacttcggcatttgaaagtagattattaaatatacataat

SEQ ID NO: 370335 - DNA, 201 bp, Homo sapiens
tttgaagatgaaagtccatagccttcctaagtaccctcaagaacagataaaggttttgttgctgcaggagaacatgtttgctcacattgccgttatttcartagaaccaactgtgagagcggagctgatggaacaggtgcctcacatcgcactgttttgtcaagaaaaccggccttcaataccatatgctttttcaaaatt

SEQ ID NO: 370336 - DNA, 201 bp, Homo sapiens
ttttgcatagccagaaatccgacggaccaaattatcagcactttttattaatttatcagtgatctttcatgttgggtagggttttgattatcacttttgtraaataatacatttctgtccgttttaaagcaaacataattttgactcataagaaataacttaaaatttaagatatattattatatgttatatatttataat

SEQ ID NO: 370337 - DNA, 201 bp, Homo sapiens
gggaaggatattacagagcgtcttatcctccctaggttttgtgagatgtgctgcgattgcagaatgtttcacgttcgaaaggtatttttttgtcgtttttyttctgctgtttaagaacatagttctagtggttaatgtactgatacatgatatttaaaagattatcttagaagaaccttatgtgtaatattttgaaatgtc

SEQ ID NO: 370338 - DNA, 201 bp, Homo sapiens
cagggaaaaataaacttaataccaaattttaaaacacttaaatacagctactacatttcctcttcagaagaattaaccatattgcttacagtctgtttttwagcactctagtaaaagaaatactgtctgtaccttgtcctggtaaatatttttattttgttactttagcttcttcatattgacaaaagaagagaatatctt

SEQ ID NO: 370339 - DNA, 201 bp, Homo sapiens
cctaacgtgcgagtgctgcttgcaaagacattaagacaaactctactagaaaaaggtaggtagtgactccactagaagaagcgtgtgagtagagaaggagstctgtggactgcactggatcagcagatatcaaagcagaagtattgtctgctcagagaaaataatctggtggaaggaaatactttagttgttccggtgatt

SEQ ID NO: 370340 - DNA, 201 bp, Homo sapiens
actccagcctgggtgagagagtaagacccagtctcagaattttataaaagttgtgtttatactatactgtagtaagcatgtgatagcattttgtctaaaaraaaatgcacataccttcattgaaaaaatactaaaaaatgctgatgatcatctgagctttacacaagttgtagtctcattgctggtggagggtcttgcttc

SEQ ID NO: 370341 - DNA, 201 bp, Homo sapiens
atgcaccaccacacctggctcatttttgtatttttagtagagacagggttcaccatgttggccaggctggtctggaactcctgacctcaagtgatctgccygccttggcctctcaaagtgctgggattacaggcacacccagcctataataaagtttttataatgtataattagttggtcttacggttgatttttggattt

SEQ ID NO: 370342 - DNA, 201 bp, Homo sapiens
tctaaaaagacttacatgtacatacatacaagtttcttgatgtgactttgtgtttcagaagatatctaatactctttgtactgtaaatttactagctgcarttgagagacttcaatacaaataacagcataccttggagatactgctggttcagttccaaaccactgcaaaagagcaaatattgcaatagagtcacacaaa

SEQ ID NO: 370343 - DNA, 201 bp, Homo sapiens
aggctggtctggaactcctgacctcaagtgatctgcccgccttggcctctcaaagtgctgggattacaggcacacccagcctataataaagtttttataawgtataattagttggtcttacggttgatttttggattttgtcttcccacctcaagattgaacatttaatattatcttttagtacttttgatctttatgatg

SEQ ID NO: 370344 - DNA, 201 bp, Homo sapiens
tacctacagttacttcctccactgaagtcttgaatccttcagtcatttatgagggttgaaattaccttcttccatactccctttaatgtggatattttgayctcctcccatgaatcgtgaatgctcctaatggcatctagagtggtgaatcctttccagaaggttttcagtttactttgtccagatccatcagagaaatca

SEQ ID NO: 370345 - DNA, 201 bp, Homo sapiens
aagcaaataggctttaggtctcagctttgcaatatgtcgttggagtagagaggtaatacaaataaccctaaaaataaaataatttaaatgttgttatgtawcttaaaatgattgtaggaatttctgtttccactacttttctttagttatttattattgaaattagcatggtgttatagaatcccaggattcttaaatgtt

SEQ ID NO: 370346 - DNA, 201 bp, Homo sapiens
attccatcttgagaaaccactttctttgctcatcctaagaggcatttgttcaagtttggtcaggagagccggatatagtgaccatgtgcctgtaatcccarctgaggacaggaggattgcttgagaccaggagttcaaggctgtagtggttatgattgtgcctacatataaccactatactccagcctggacaacataaca

SEQ ID NO: 370347 - DNA, 201 bp, Homo sapiens
gaaatgggtctagtaagaaactataaatttgcagagaactgtataggacgagctggtaaactttcttctgtttcacaactactcactcggcctttgcagtrtataagcagccgtagacattacataaatggacaagcttggctgtgttccagtaaaacttcactgacctcaacagtgtgcctatcaaggccatgtttgccg

SEQ ID NO: 370348 - DNA, 201 bp, Homo sapiens
acattttcttctgtaggtcttgatactgtgctatttgctttcttggtgttttgatttggcagttcttctttcttctctgctgccttgttttacctttttgyccgttctcctactgtcctgctgaatagccaaacaaacctgaggtactgttttttgtaaaggaagaaaatcactcaaacctgtcttcctagcaagcaaagt

SEQ ID NO: 370349 - DNA, 201 bp, Homo sapiens
ctgttaagcaaatcaattcttacttattcaattgaacctttaattttattgcaaccctcaagaatgttgatgacatattaaatctatagcaagttagtttkaaatagtacacaagatgcctatacttgatgtataagtcaccatatctaaagagtttctgaagccatctcttatgcaaaataattaagttcaggggcaagc

SEQ ID NO: 370350 - DNA, 201 bp, Homo sapiens
ggtctttgtgggaaggatggtcaggcaagtacatttcccaggatatatgacatcagtgatggttatcagaagaatatacagattgttaagtcattacgcayatcataaagtcaaatgtaataggaagtttctgggtttttttttgacatggtttgcaaatattctgattacttgaaggccatgatagggcatgaattagta

SEQ ID NO: 370351 - DNA, 201 bp, Homo sapiens
aatgacaacaggctatcccatttctttctgtattaactgtgggaacaatgtatctaaatagagggccagttttcaaataaagttaatcctcactttgcctsctattgtgttaactgaaacatgcctatatcagaactgtgttcatgctttccctggaactgaagctttgcaaaaccaggacatggttctgatatgtatgag

SEQ ID NO: 370352 - DNA, 201 bp, Homo sapiens
tagtatctgttgtgattcacatctggttcctgagttcggatagtagtaattctcatggtaaattagaaaagtgataaattcgtctggaaatttattcatayctatttggatagtaagagttcactccttaagcctaaaataatatggttgcgtctttgttgatattttttaataatcacactatatttagtgcttctggat

SEQ ID NO: 370353 - DNA, 201 bp, Homo sapiens
ctctttgaagtcagaaacattagtattttcattgttgtttctccagcatctaccctagtacttggcacaaatgtatttaataaatatttgtttaatgaatrtaaatatattaatgtttttagctttcttctattaagtgaagttagataccagtttcattagctttatcttccacattgcaggactaactatattggtgct

SEQ ID NO: 370354 - DNA, 201 bp, Homo sapiens
agcatggcacaaaagtaccaaattcagtgggcacctttcagttcttccttgactcctttggtagtagatgctgtttaatcatactttcactcattgcttgkttcctttgaaataattaccttttggttagtttttagccattctttcttggtcttctcttccttctcctgcagcttgaatgggtgtctggccttttagttt

SEQ ID NO: 370355 - DNA, 201 bp, Homo sapiens
aatatcctggagatgaagcagtgtatgggataaaaatttctgtcctcatggagccaataacttactctagagagacagactataagtaaaacaactaataygtaccagatgttgacaggcactattgagaaagtaaatcaagtaatgcaggggatagaataggaagtgccaggaaataataataaaaatttcttggaaagc

SEQ ID NO: 370356 - DNA, 201 bp, Homo sapiens
aggagtatttctgatgtctctgatagttggtgtggatgactacagctcagagtctgatgtgattattataccttcagccctggactttgtctcacaagatraaatgttgacgcccctggggagattggacaagtatgctgcaagtgagaacatatttaacaggtatgtgcatattctttttgttaaagtggaagtggaagg

SEQ ID NO: 370357 - DNA, 201 bp, Homo sapiens
gcgtgaacctgggaggcggagcttgcagtgagccgagatcgcgccattgcactccagcctgggcaatagagcgagactctgtctcaaaaaaaaaaaaaaaattagactctcagcttttttatgatgtatactacattttgtcagttttctttaattgttatcccttcaattgctgcttgctcctagggccatttccagggg

SEQ ID NO: 370358 - DNA, 201 bp, Homo sapiens
gttgatgcagcaccgtccccataactcccattacttctgtaatcatcatttcctttggttctgtgaacatgtttataatagctactttgaagtctttttttaagtctgaaatctgattgctctcacaatcagtttctgttgcctgtctcttttatccccctaatgtatggatttttttttttttgcctgccttgtaatgtt

SEQ ID NO: 370359 - DNA, 201 bp, Homo sapiens
gctgggcgtggtggcacacgtctgtaatcccagctacttgggaggctgaggcaggagaattgctggaacccaggaggtggagtttgcagtgagccaagatygcaccacctcactccagcctgggcaaaagagtgagactctgtctcaaaacaaacaaacaaacaaaagaagcgtgaaagcagaaaatgaaagcgaagtaac

SEQ ID NO: 370360 - DNA, 201 bp, Homo sapiens
gatgtgatttattgaaaattgttgagtataaatactaatagatcctactttttaagacaatccaacatttaaaacactgaggctgggcgtggtggctcacrcctgtaatcctagcactttgggaggccaaggcaggtggatcacctgaggtcaggagttcgagaccagcctggccaacatggtgaaccctcatttctacta

SEQ ID NO: 370361 - DNA, 201 bp, Homo sapiens
aaagttaatcctcactttgcctcctattgtgttaactgaaacatgcctatatcagaactgtgttcatgctttccctggaactgaagctttgcaaaaccagracatggttctgatatgtatgagctttagttcacagggtgctttgcaaggcgaggactgaattttttcttagcaatacagatatgctaaatctagatcttt

SEQ ID NO: 370362 - DNA, 201 bp, Homo sapiens
ggtatctcattgtggttgtaatttgcatttcctcagtaaccagtgaagttcatacctggttatacacttactggctatttgggtatctttttttttttttkgagatggagtctcactctgtcacccaggctggagtgtggtggcatgaccttggctcactacaaccttcttctcctgggttcaagtgattcttctgcctca

SEQ ID NO: 370363 - DNA, 201 bp, Homo sapiens
ttttgtcagaaaataagtgtgtctctttgaggatgcatatttgtatacacaggtgcatttatcattgctgcataatctatattcatgttacagttgacttyctgcttattagaaatgtaaatcctcttgaacataaaatctgaaaggcaaaagtctcacatccaaggtatttcttcaaggccatcattgaagctttcaggt

SEQ ID NO: 370364 - DNA, 201 bp, Homo sapiens
tggtatctcattgtggttgtaatttgcatttcctcagtaaccagtgaagttcatacctggttatacacttactggctatttgggtatcttttttttttttkggagatggagtctcactctgtcacccaggctggagtgtggtggcatgaccttggctcactacaaccttcttctcctgggttcaagtgattcttctgcctc

SEQ ID NO: 370365 - DNA, 201 bp, Homo sapiens
ttaaaaattcctgattttaaaaataatacagaaatacgacatgaagtggaattctataacttctttatcacccctcctacatgagacagtcatcaagaacmatagtatatgcttcaagatctttgtgacatactttaagttaacattatgtttctggtacgtctgtcttgcttccttctagtgaacaaattaaagtctttc

SEQ ID NO: 370366 - DNA, 201 bp, Homo sapiens
aaaagatcttgaagtttatgtagctttttctactgtagggtcagtgacgttctttgcagttttctgtattctaagcagaaactggtcctatttggaatttktattttgaattttgtcagaaaataagtgtgtctctttgaggatgcatatttgtatacacaggtgcatttatcattgctgcataatctatattcatgttac

SEQ ID NO: 370367 - DNA, 201 bp, Homo sapiens
tgtcgggcacatctggctttgtttgagccaccccatgctcctgccagccaccatctggccctgggcagctgactgcaattcgagctgatttctccctgccmtgttaggtgctagcaggtgtcctgtccatccgggctctgctgaggggcagttctctttcccatcttgggaagttaggttgtttgtgtgctttgcaacccc

SEQ ID NO: 370368 - DNA, 201 bp, Homo sapiens
gcagagtggcgtgatatccactcactgcaaccacccctgcctcccaggttcaagcaattctcctgcctcagcctctcgaataactgggattacaggcatgygccactacacccagttaatttttgtatttttagtagagaaggggtttcaccatgttggccaggctggtctggaacttctggcctcaagtgatccacctgc

SEQ ID NO: 370369 - DNA, 201 bp, Homo sapiens
catctggtgtaattttccttttgctggaatggtttgctttattatttcctatagtgcatgtctgctgttgatgatgtcagtttttgtgtggctgaaaaaaatctttatttcagcttcatatttgaaagatgtcttgtttcttaggtatggagttgtaggtatttttctttatgtacttgaaagatgttaatgtcttctggc

SEQ ID NO: 370370 - DNA, 201 bp, Homo sapiens; identical to SEQ ID NO: 80134

SEQ ID NO: 370371 - DNA, 201 bp, Homo sapiens
ggtggttttattaacttcagtagggaaaatgaaagtatccactttaaaggaggtattattaacaggcacaatctgagtcaccaagttttattcataatcayagcatgagcagttttgtacttgtttattctttgatcctagtaagcatacaacatgctttctttgcaaaaaaaaaaattaccattaattaccattgctttt

SEQ ID NO: 370372 - DNA, 201 bp, Homo sapiens
gtagagacagatactctttaaggatagatttgtgttttcctttacctgtttaccagctccagagttttttttttttttgtaagtgtgtgtgtgtgtatttwaaaatatgttctcacattggtaaattcatagtaaatgtctctattgacataattccattcattcagtatacatcaaacagtacatactctataccaggtt

SEQ ID NO: 370373 - DNA, 201 bp, Homo sapiens
agctccagagttttttttttttttgtaagtgtgtgtgtgtgtattttaaaatatgttctcacattggtaaattcatagtaaatgtctctattgacataatyccattcattcagtatacatcaaacagtacatactctataccaggttctagattaaatgctagagcagttattaaggtgaacaaggatttgtgtcatcaag

SEQ ID NO: 370374 - DNA, 201 bp, Homo sapiens
gaacgaagaaacacttgaaccccttcagtaggtattgaacacttttctaggcactgtgtaagcacagtggaaataaaataatactttgctcctgctctgamaggtatggtctttgtgggaaggatggtcaggcaagtacatttcccaggatatatgacatcagtgatggttatcagaagaatatacagattgttaagtcat

SEQ ID NO: 370375 - DNA, 201 bp, Homo sapiens
ttccgggttcaagcaattcttctgcctcagcctccccagtagctgggattacaggtgcccgccaccacgcccagctaattttttgtatttttagtagagayggggtttcaccatgttggccaggccggtctcgaactcctgacctcatgtgatctgcctgcctcagcctcccaaagtgctgggattacaggcatgacccac

SEQ ID NO: 370376 - DNA, 201 bp, Homo sapiens
ttatgttaatgatatggtaggggaaagagagcattcctggctaaggaaggagttatgttaaatattgtaaaagcttttgcatagtttgacaaactataaaraagtagtcctatatattattaaatctcagaaccattagtttgtttgccctcccttaaatagcacagtggcatttgttttaagctgtcttaaactgttgtg

SEQ ID NO: 370377 - DNA, 201 bp, Homo sapiens
tttccaaatactgttttaccatatttgctttattctttttttctgaactctttgagaataagttttagacatgatattctttttacctttttaaaatactrtgtatttctttaaaacacagatgttaatatataactgtagtccagttaccaaaattaggaaattaacattgatacaatactgttagctaatctagccttt

SEQ ID NO: 370378 - DNA, 201 bp, Homo sapiens; identical to SEQ ID NO: 80145

SEQ ID NO: 370379 - DNA, 201 bp, Homo sapiens; identical to SEQ ID NO: 80146

SEQ ID NO: 370380 - DNA, 201 bp, Homo sapiens
cagtggaaaaaggttttcatgaagtttttctaagccatgaaaatggaagattcactctcaaatgctgcattctattcccagtgaaaaataacaatcttatytgtcaggtagaaaaatttttgtaacgacaatctgaaaaacagggactaaaaaacaagtaggaagtttatctttctcacataatagcaagtccggaggctg

SEQ ID NO: 370381 - DNA, 201 bp, Homo sapiens; identical to SEQ ID NO: 80147

SEQ ID NO: 370382 - DNA, 201 bp, Homo sapiens; identical to SEQ ID NO: 80148

SEQ ID NO: 370383 - DNA, 201 bp, Homo sapiens; identical to SEQ ID NO: 80149

SEQ ID NO: 370384 - DNA, 201 bp, Homo sapiens; identical to SEQ ID NO: 80150

SEQ ID NO: 370385 - DNA, 201 bp, Homo sapiens; identical to SEQ ID NO: 80153

SEQ ID NO: 370386 - DNA, 201 bp, Homo sapiens
aaatcaaatggagtatcagggttattctcaggagtatctctgtgcacaaataaagctcctccagctccattttgcatagctgtcttatgcaattcctcacatgtcttccggtggggctgcagcggcctccctaagagggctaaggccgtagtgtccttgccgccgcctgcaggcccgtgtagagcccagggctctcctgcg

SEQ ID NO: 370387 - DNA, 201 bp, Homo sapiens
cctgcgcccaaaactaagggagacacggagagcaagagaagggcggcggcagcgccgggctcagcttgagcctccttacccagtgggcggtaaggccagcsgcccgggcccggagcgccgcggagaaggcctttgggtttttaagtggctctcttccaattccttttttggctttagtgttaacgataaccaaatttttag

SEQ ID NO: 370388 - DNA, 201 bp, Homo sapiens; identical to SEQ ID NO: 80154

SEQ ID NO: 370389 - DNA, 201 bp, Homo sapiens
aatcaaatggagtatcagggttattctcaggagtatctctgtgcacaaataaagctcctccagctccattttgcatagctgtcttatgcaattcctcacatgtcttccggtggggctgcagcggcctccctaagagggctaaggccgtagtgtccttgccgccgcctgcaggcccgtgtagagcccagggctctcctgcgc

SEQ ID NO: 370390 - DNA, 201 bp, Homo sapiens
cagggctctcctgcgcccaaaactaagggagacacggagagcaagagaagggcggcggcagcgccgggctcagcttgagcctccttacccagtgggcggtraggccagcggcccgggcccggagcgccgcggagaaggcctttgggtttttaagtggctctcttccaattccttttttggctttagtgttaacgataacca

SEQ ID NO: 370391 - DNA, 201 bp, Homo sapiens; identical to SEQ ID NO: 80157

SEQ ID NO: 370392 - DNA, 201 bp, Homo sapiens; identical to SEQ ID NO: 80158

SEQ ID NO: 370393 - DNA, 201 bp, Homo sapiens
ggcataaatatgactgcagacctgcctctgagctgctactttgagcacactccttttggggtagccgtgccctgcaaggagccgttcatctgctgctgctrttgccgccgctccaataaaagttgctaccccactttgggaggctggggcgggtggatcacctgaggtcaggagtttgagaccagcctgaccaacatggtg

SEQ ID NO: 370394 - DNA, 201 bp, Homo sapiens
gctaattcataacctggatttttaaagcttttacatagttgggtttcatgttgttcagatgtcttactaaaccaggtatctaaatgagtgtttttctgttaaaaaaaaaaaaaaaaggacatgtccccttcctctgccatcccttaatcacggggctccactggaatagagatgggcggataaagaaggaaacttagtgtt

SEQ ID NO: 370395 - DNA, 201 bp, Homo sapiens
gaagtggtagaaggagggttctctgaaatggcattgagagttctaacatcagatgtgtgtggcacccacttggtgaactgagtagctggtagatgcttcaggggtgtgtgtgtgtgtgtgtgtatctgtctgtctttccagctgggtgtagttttctgggttttcctcgtggatgaaattgtgcatatgcaaaggcagagt

SEQ ID NO: 370396 - DNA, 201 bp, Homo sapiens
cttctgagggttgataactggtcatgctattaagaattttgggggaagcaaagctgaagcttagatcagtaaagtacttaccataggctacccagccatcyagtatctgtttagacagcattttcatgtctaatcttatgtacagtttaataatttaacagatggtagactaataggtcagtggaaatgtttatagggtac

SEQ ID NO: 370397 - DNA, 201 bp, Homo sapiens
cttcaaacttataaaatttgggggatgcattatagcgtgagtattggcacccactcctgaagtggaatattggaagcctgaaatatatgacatgttgacartaaagatccaggtaatattggccatgcggggtggctcacacctataatcccagcactttgggaggccaaagtgtgaggactgcttgagccagggaggtta

SEQ ID NO: 370398 - DNA, 201 bp, Homo sapiens
attattagttgtataggaatccatctctttataagcagaataagcagattctttctttacctgttgtgcagagcagtgaacactgatcatctgcttgtttrggggtaaggttgaattatttttcaggttgtgctttttccacaaaatattggtctaaaaagataatgcaggttttgcagatactctagcatggcagaaatc

SEQ ID NO: 370399 - DNA, 201 bp, Homo sapiens
gagatgggaggactaattgagcctgggagattgaggctgcactgaaccatgatcacctcactgtactccagcctgggcaacacagtggaccctgtctcttaaaaaaaaaaaaattagatgatacaagtgtctaagtattaatccccattttgattctattttattccctggaagtaaccatttctttccgtacttttcttt

SEQ ID NO: 370400 - DNA, 201 bp, Homo sapiens
tgttaacaatatgactcagtctgtttgtgttgctataaaagagtacttgaggttggataatttacaaagaaaaaggatttatttggcttatggttctgcaractattcaagaagtgtgatgccagcgtctgcttctggtgagggcctcaggctgcttccactcttggtggaaggggaaggggaagcctgtgtgtatggtga

SEQ ID NO: 370401 - DNA, 201 bp, Homo sapiens
accgtgtgatctcagctcactgtaacctctgcctcctgggttcaagcgattctccttcctcagcctcctgagtagctgagattacaagtacctgccaccaygcccggctaatttttgtgttttttttttttttttttttagcagagatggggtttcaccatattggccaggctgatctcgaactcctgacctcaagtgagc

SEQ ID NO: 370402 - DNA, 201 bp, Homo sapiens
atagctcactgcagccttgacttcctgggctcaggtgatcctcctgcctcagcctcctgagtagttgggactacaggcacgcgccaccatgcctggctacttttttttttttcttttgtagagacaggctctcactttgttgcccaggctgggatgttttcttttggatgggagtgaaaggcttatgtataaatagaaaca

SEQ ID NO: 370403 - DNA, 201 bp, Homo sapiens
tcacctttgcccccagccccccagactttcagccacagcttctttctcaactgaagacctggggaaggggtgctgtctgtgttctttcttccacttctgcyctctcctagccttgagggtagatggtgtggttcttcagtattggatagtgcctgctctgcggacaaaggagaagtttaaattgtccgtagagaaggggat

SEQ ID NO: 370404 - DNA, 201 bp, Homo sapiens; identical to SEQ ID NO: 80163

SEQ ID NO: 370405 - DNA, 201 bp, Homo sapiens
ttggcgggatagatacgagatcagttgtgactgctgagttcagggagttttgagacaacctggcagagacagcagggtgggggctacaggcagactggggrgtctttgggtggaggaggttagtaaggacccagcagcgggtgagattgctgggggattgagaacaggaagcatagagtaagagaaggcagcagccttggc

SEQ ID NO: 370406 - DNA, 201 bp, Homo sapiens
gggtgggggctacaggcagactggggggtctttgggtggaggaggttagtaaggacccagcagcgggtgagattgctgggggattgagaacaggaagcatrgagtaagagaaggcagcagccttggcccagcctctgagaacctggttgagaaaaggaggatgagtgagcaggaggaggggtgggaggacaagcaggccaa

SEQ ID NO: 370407 - DNA, 201 bp, Homo sapiens
ggcgcgcccgctcttcgccgagcccatgtgcccgggtcccaggccgccccaccttctagctcccatccatcctcccccactccccatgactccatcgtttyctgctcccgtgagccccctccctcccctttcttcctctacttcccctattacatccacctccaggtcctcctccctaactcacgttcacctcttcagtgg

SEQ ID NO: 370408 - DNA, 201 bp, Homo sapiens
caatagagttgttgtgtatttgaggattcttaaaacagtgacatattattaatttagtaatcagaagaaaaataaatgctttttttttgtttcatgctagktgctaccaggcttactgtatcattgtttgaaggaagtagaaaggaatttatctatcttcaaagaaactccaaatagtagaatcattagagttagtgatat

SEQ ID NO: 370409 - DNA, 201 bp, Homo sapiens
tgagagcttttgctgtgtgtgatttccagggtaagcttgtaacatgtcttgtaggctttggtcactcctgggctattaccgttgtatctaaaagcctgttmtcttggtcttggacagagtacagaatgcaggctattctgtgagccggccagagggtgacacaggaaagtacaagtccattcctcatcaccatcgaggaga

SEQ ID NO: 370410 - DNA, 201 bp, Homo sapiens
tggagaaatagaaggttgttttgtgttccttgggttatgaagaccttatttgaatagttattaaaatgagcttagaaaataatactaggttggctgggtgyggtggctcacacctgtaatcccagcactttgggaggctaaggtgggtggatcatgaggtcaggagttcaagtccagcctatccaagatggtgaaaccctg

SEQ ID NO: 370411 - DNA, 201 bp, Homo sapiens
gctacttgtcagaattaagtagaatatgcacataaaagggcttagcacagagcttgacacaaaggtccttatgtttatgattttttttttttttttgagayggagtttcgctctcttgttgcccagactggagttctatggtgcgatcttggctcactgcaacctccgcctcctgggttcaagtgattctcaatctgcttc

SEQ ID NO: 370412 - DNA, 201 bp, Homo sapiens
gcaaccatgcccagctaatttttttttttttttttgtatttttagtagagatggggtttcaccatgttagccaggctggtctctaactccagacctcaggygatccgtcctccttggccttccaaagtgctgggattacaggtgtgagccactgcacccggccttatgattcttatttataaccataggaggtgccctctt

SEQ ID NO: 370413 - DNA, 201 bp, Homo sapiens
tttagtggcataaattacattcataatgttatgcagtaatcacttttttttttttttttttttgagacggagtctcgcccaggctggagtgcagtggcgcmatctggtctcactgcaagctccgcctcccgggttcgtgccattctcctgcctcagactgtcgagtagctgggactacaggcacccaccaccacgcccggc

SEQ ID NO: 370414 - DNA, 201 bp, Homo sapiens
gtggcgccatctggtctcactgcaagctccgcctcccgggttcgtgccattctcctgcctcagactgtcgagtagctgggactacaggcacccaccaccamgcccggctaatttttttgtatttttagtagagacggggtttcatcgtgtcagccaggatggtcttgatctcctgacctcatgatccgcccgcctcagcct

SEQ ID NO: 370415 - DNA, 201 bp, Homo sapiens
tgcagctagtcgttgactgaaacgtcattatgcggcacatgactgtgtaagatacaacaggatctgaagaatcgcaacattttggataattttttttggtrtgtgtaatttttcaaaaacataattgaacttacattatatgtacagttttatatactaactaaaaacgttaaatgtagtctagaggcagtgtgacaggtt

SEQ ID NO: 370416 - DNA, 201 bp, Homo sapiens
tctcaggctagcactcaatacaaatctgtatttttctattctccttccttctcctccagctttcagtctagatgttttctgatggcatagcttttggatcratcattctctttttttgctctgtcttacccaatattaaaatattacaccctgttttttttttttttttttgagatggagtttcactcttgttacccaggc

SEQ ID NO: 370417 - DNA, 201 bp, Homo sapiens
tatttttctattctccttccttctcctccagctttcagtctagatgttttctgatggcatagcttttggatcaatcattctctttttttgctctgtcttayccaatattaaaatattacaccctgttttttttttttttttttgagatggagtttcactcttgttacccaggctgaagtggaatggcacgatctcggctca

SEQ ID NO: 370418 - DNA, 201 bp, Homo sapiens
ggagaaaaagacagcttagaagattagaatggacaattttgaatggcatgacactaccaaaaataatttaagctgttagctcccctttctcttattctgcrgacattttccggttttccaaatcattctgctttgatgccaaatgtcttgttaataatgcatggcttttttatagtactcccttcccatcatgcctcttag

SEQ ID NO: 370419 - DNA, 201 bp, Homo sapiens
tgccttaacctcctgaagtgttaggattgcagatgtgagccactgcgccggcctagaattggaatcttgaatttttgccttaggctcactaataatactctttaactacatttaacaaatatttattgggctgctgctatgtggtaggcaaacttgtgtgtccttttaggtaattagtgctttggagaagcagaggaaagt

SEQ ID NO: 370420 - DNA, 201 bp, Homo sapiens
aaagcagcagaaggccagaatacaattgacttcttgcttccctaaattttgctgctttttagatcttggaagtatgttcggcacatctaatcacataaggyaaagaaaaaccttagcacgtaagaagtgagcaatgtaatgctgctgaggcctgtcagagaaatagagaaaaagggaggttaccactggctaagacaaaca

SEQ ID NO: 370421 - DNA, 201 bp, Homo sapiens
aagcaagcaggttgggtgtgggctgaagagaagaggcaggcctatgtgcactgtggggaaaagggcagttgttcttcactttctagtagccaataaaggtrtgcttgcctttgcacacgagttatgttttgtagaaaattgtgaggaaaaattaatgggattttaagatccacttaaaatcctggagctacccaggtaccc

SEQ ID NO: 370422 - DNA, 201 bp, Homo sapiens
gatgccttgttatttcagataggtcagaaatagagactgatcattggtacatagtttaaatgtaggaaggtttctctttctctgtctatccagaacagacyggatgttacagaatgttatggtataattgttaattctcttagtattactgtggttttgaaggataatgtaattttccttaggatttgctactgaagtatt

SEQ ID NO: 370423 - DNA, 201 bp, Homo sapiens
tttcaatagtaagattcttcgaaggaaatcacttgtcctatgtcttcagccttgtggtctccacagtagcctttggggaatttgggaagaaacagcttggrtgaaggtccctgaggtgacagagcagtggcgccctttccgcaggctcccgttccgaatggtgtcctgagcttctgtctgggtggctgcagttgctgtgtt

SEQ ID NO: 370424 - DNA, 201 bp, Homo sapiens
ggagtgcagtggcgctatcttggctcactgcaacctccacctcctgggcttaagagatcctcccacctcagcctcccaagtagctgggactataggcacaygtcatcacgcccagctaattcttttgtattttttgtggaaatggagttttgccatgttggccagactgatctcaaactcctgagctcaagcgatccatct

SEQ ID NO: 370425 - DNA, 201 bp, Homo sapiens
tgttccctccctaaacaggtatgctctgctgaggaagtcaaaagaacggcaagggctggatggcctcaacaacctgaactactttgcaaacatcacatacracgccttgtataaaaacataactgtcaacctgacacccgagctggctcaggtgaacgagtactgagaggagagaatgtacgtttgctttacccaccgcca

SEQ ID NO: 370426 - DNA, 201 bp, Homo sapiens
cctacctcttcatgatgcaagcccaaggcattctgatccgggacaacgtgagaacaatcggtgctcaggtttatgagcaggtgcttcggagtgcttatgcyaagaggaacagcagtgtaaatgactcaggtatatttttagtaaagaggtggtctgattagaatgtctcctcccaagagaggtaaattcggttgcaataat

SEQ ID NO: 370427 - DNA, 201 bp, Homo sapiens
gaggctactgcttcttgccataaatttctaggactgttcattgccttctgaggtcctttgagctgatgctgatctgaaagcatttttttggatatggtccyatacccaggtgatggggataggataccgatttgcctgcaggataagaattagaggccatacagactgctgagacagttacaacctagaggtcaagggcct

SEQ ID NO: 370428 - DNA, 201 bp, Homo sapiens
aatccacctctttttcccctttttgctttctgcagtgaacacctacctcttcatgatgcaagcccaaggcattctgatccgggacaacgtgagaacaatcrgtgctcaggtttatgagcaggtgcttcggagtgcttatgccaagaggaacagcagtgtaaatgactcaggtatatttttagtaaagaggtggtctgatta

SEQ ID NO: 370429 - DNA, 201 bp, Homo sapiens
caataaaaaaaggatgtggagtagttacatttagctgtttgcccttcctactaatttttttttttttttttgatagagagtctctgttgcccaggctgtcrtgcagtgatgctcatagcttactgcagccttgatctcctgggcacaagggatcctcctccctcagcctcctgagtagctgggactccaggtacatgccac

SEQ ID NO: 370430 - DNA, 201 bp, Homo sapiens
actattaatagtgtgtttgcaaaaaatataaaatgccctcagctactataataataccatttgatccatttaatgttttaaaaatacgacttcgttggaattttttttttttttttgagacggagtttcgctcttttgcccaggctggagtgaaatggtgtgatctcagctcactgcaacctctgccccccaggttcaaag

SEQ ID NO: 370431 - DNA, 201 bp, Homo sapiens
tggtcttgaacacctgatccacctgtcttggcttcccaaagtgctgggattacaggcatgagccaccacgcctagcctgtttggtattttcttagccccaratctccattaatcagcatcatttatgttttggtgtttagtattaagtagttacaataaagaccctgaggcatgactttcagtttggtattgtgggtgttt

SEQ ID NO: 370432 - DNA, 201 bp, Homo sapiens
accctctggcctttatgattctcatttatttaatcacttgttttatttgcaatgttgaaatatccctattcccttcagggttctgcagaaaacttttgaayttatttatgacctgttaacttaaaaaaaaatccgagagctcagagtacttccgtactccagtctgatcaggtcttttaaaagataacagaagcgagctat

SEQ ID NO: 370433 - DNA, 201 bp, Homo sapiens
acacaggcacagggtggcaggtggtgaagagaaacaggctgccaagatggtccctagatgactaggaggggcgtgatgtgtgcacagggtttttttttctrttatcctttataacatcagaaaatgatgtcaaatgctgacgaatgaggaaatagaaaaatctaacgtgtaaaagctgctggactcccacagctctgactt

SEQ ID NO: 370434 - DNA, 201 bp, Homo sapiens
acccttgagaatgagaacacaaaaggagaccacagcaaaaaaccttggtaggtagaaagcagaagaaccactgataaaagacttaacaaacccaagaaaastgactgctcaaagcagcaacaggagaaccagcaaccaccccaggatcccccagaagctcaggaactagcaatatgggaagtaggagcaaaggtggcaact

SEQ ID NO: 370435 - DNA, 201 bp, Homo sapiens
gcaggctacatgccatgagactccttgaggaagcacagccctgagtacttttctcactgctccaagacacaccttttctctgccaccacgcccgccccacwcagcaccctgctacgactagatgtgggactgacaaatgccactgtttgacttatttctaggacaatggtgggtggcagtcatgtaggagagaggtctctg

SEQ ID NO: 370436 - DNA, 201 bp, Homo sapiens
catgtggcgggcaagggtggggggcagcggaggaatagtcccttatgcattcatctagctcagtgaatctgcatttttacataagacaaaatatacttacmgggcagaggaagtgatgagattatgcatttgtctcaggtaagcagaggaatgactttaagttctgtcctttgtcccatacctgtgaagataagctgtcaa

SEQ ID NO: 370437 - DNA, 201 bp, Homo sapiens
catggaagaaggccagaagctgccacacctcctctgggaggatgaagttgagagaatacctaatgtatgtcttaggaggaaatgtcttggtgaaaggcgtrgtgttgaattagaatcattgcatataaaactgagcaaacagaaaaacaagatgcataactttccacatttctcagcgacgactagtacttaacagcagca

SEQ ID NO: 370438 - DNA, 201 bp, Homo sapiens
catgcatgttgaagtgtttagcaggaagtatactgatctccgcagtttacttggaaataggtcacaaagtaagatggattaatggatatatttgtgataarcaagttaatagtggaatcaagatggtgagtatatgggagttcactgtaaaatcctttcaactttgctgtatatttgaaatttttcataataaaacggttt

SEQ ID NO: 370439 - DNA, 201 bp, Homo sapiens
tttgagctgatgctgatctgaaagcatttttttggatatggtcccatacccaggtgatggggataggataccgatttgcctgcaggataagaattagaggycatacagactgctgagacagttacaacctagaggtcaagggcctgacatgggagacaggccagttttgatttaagcccttactgcaaggcttgggtgaat

SEQ ID NO: 370440 - DNA, 201 bp, Homo sapiens
gagggtttggttttgttttaatcttaaaaatattggtagggaaccagatatagaggtcacaaactgaagaagaccgcatggcaaattcagtctgtaaatctttttttttttggtcctgcatatattttatttgcctttagatggaacatgactgtcctactgtggttttctcttgccgggcctactttatatgtttacatt

SEQ ID NO: 370441 - DNA, 201 bp, Homo sapiens
tcttgctctgtcgcccaaactggagtacaatggtgcgatcttggctcactgcagcctccgcctcccgggttcaagctattctcctacctcagcctcccaartagctgggattacaggcatgcgccactacgcctagctaatgtttttgtattttcagtagggatggggtttcaccatgttggccaggctggtctcgaactc

SEQ ID NO: 370442 - DNA, 201 bp, Homo sapiens
gattttccttcaagattcttttaaagataaagttctgtttcttttaggttggtacccaaccctttaatcgagccatgcttttcaacgttggctttcaagargcaatgaaagacttggattgggactgtttgatttttcatgatgtagatcacataccggaaagtgatcgcaactattatggatgtggacagatgccgaggc

SEQ ID NO: 370443 - DNA, 201 bp, Homo sapiens
cgaggtgggaggatcacttgagcccgggagttcgaggccacagagagctgtgccactgcactctagcttgggtgacagagtgagacctgtcttaaaaaatmcacacacacacacacacacaccacacacatccaagtttttagaaaatatctttaatcttaatttaaaaatatcttaatatcttaaaaaacaaactgtata

SEQ ID NO: 370444 - DNA, 201 bp, Homo sapiens
attcaaatgataggctgagcactgtggctcacacctgtaatcccacctcttcacaaggcctaggcttgaggatcacttgagcccaggagttcaagaccagyctgggcaacagtgagaccttgtctctacaaaaaataaaaaaaattagcctgttgtggtggcacacgcctgtagtcccagctactcaggaggctgagatgg

SEQ ID NO: 370445 - DNA, 201 bp, Homo sapiens
ccacctcagcctctcaaagtgctgggattacaggcatgagccaccgcgcccagcatgtttattaatccaataaatgtgaaccagcaaatataaacttaacrtttatgcattactgctgtactttctaacagtgtcagtggttaatttaaaagtcagtagaagttaagtgatttgtctaaggcagagtttctcaaccttggc

SEQ ID NO: 370446 - DNA, 201 bp, Homo sapiens; identical to SEQ ID NO: 80162

SEQ ID NO: 370447 - DNA, 201 bp, Homo sapiens
attatagctcattgcagcctcgaacttctgggctgaagggatccttccacctcagccttgtgggtctctggggctgtaggtgtgcaccaccacacttggctttttttttttttttttttttgggcagagacaaggtcttgctatgttgcctatgcaacatagcaagaacccttggcctcaagaggtcctcttgcctcggtc

SEQ ID NO: 370448 - DNA, 201 bp, Homo sapiens
acacctgtaatcccagcactttgggaggccaaggcgggtggatcacaaggtcaggagatcgagaccatcctggctgacacagtgaaaccccgtctctactraaaatacaaaaaaaattagccgggcgaggtggcaggcacctgtagtcccagctactcgggaggctgaggcaggagaatggcgtgaacccctggggggcgc

SEQ ID NO: 370449 - DNA, 201 bp, Homo sapiens
tgaggcaggagaatggcgtgaacccctggggggcgcagcctgcagtgagctgagatcgcgccactgcactccagcctgggtgacagcgagagtccgtctcaaaaaaaaaacaacaacacaagccaaaaaaaaaaaaacacttcaaaaagatccaagtaaaaggaatcaaacaaagtgtgggcagcatagtagctgtggatt

SEQ ID NO: 370450 - DNA, 201 bp, Homo sapiens
gaggcaggagaatggcgtgaacccctggggggcgcagcctgcagtgagctgagatcgcgccactgcactccagcctgggtgacagcgagagtccgtctcaaaaaaaaaacaacaacacaagccaaaaaaaaaaaaacacttcaaaaagatccaagtaaaaggaatcaaacaaagtgtgggcagcatagtagctgtggattc

SEQ ID NO: 370451 - DNA, 201 bp, Homo sapiens
tatatatatatatatatatatatgtatatattttttttttttttttcttgagatgaattctcactatgttgctctggctggacttaaactcctgggctcargccagcctcctacttcagcctcccaagcagctgggaccataggtgtgtgccaccatgcccagctagataatttttttaatacgtaaatgtccaaaatata

SEQ ID NO: 370452 - DNA, 201 bp, Homo sapiens
gagtcctgtctccttctaccaagatgatagctaagagaaagacttacttggtaggcatctgataattgcacggttgatcacacataccagtctgatcgacytttttcctttacctccctagattatcctcttgacttgaaccacagtgaaaccttcctgcaaactacaacatttcttcctgaagacttcacctactttgca

SEQ ID NO: 370453 - DNA, 201 bp, Homo sapiens
tcctgagtagccggagctacaggcgcatgccaccgtgcctggctaattttttgtatttttagtaagagacacagtttcaccatgttggtcaggctggtctsgaactcctgaccttgggtgatccatccgccttggcctcccaaaatgcagagatcaccgcgcccggcttgtttttccattttctaaatgtaaaagcagctg

SEQ ID NO: 370454 - DNA, 201 bp, Homo sapiens
gaaccactgataaaagacttaacaaacccaagaaaactgactgctcaaagcagcaacaggagaaccagcaaccaccccaggatcccccagaagctcaggarctagcaatatgggaagtaggagcaaaggtggcaactaaaataaagggagattgaaagctgttaaaaagcagtcagatacccagacccatttccccatcct

SEQ ID NO: 370455 - DNA, 201 bp, Homo sapiens
ctactttgcaaaccatacctgccctgaaagactcccttccatgagtgagtacagctctggcctgtcttcctctgcttttaaaatggataaaggggagggcrctcttgatctctctgtctgcctgcagagagaatataaatacctccctgccattggaaacagggtttgtgaaagttgtgctcctggctcctcttcaaagcc

SEQ ID NO: 370456 - DNA, 201 bp, Homo sapiens
gcctgtaaccgcagctactcaggaggctgaggcaggagaattgcttgaacccagaggcagaggttgcagtgagctgagatcacaccactgcactccagccygggcaacagagcgagactgtctcaaaaaaaaaaaaaaaaaaaaaaaagctcagctactgttttacttaaagttttcatttctacctggcccctgacagaa

SEQ ID NO: 370457 - DNA, 201 bp, Homo sapiens
ttgctaaaaacaaattcagctgaaaaagcattgcgctctccagagactaaaaccccaggcatagggaaacctatcattttctgacctcttaatcccttttycccgtctctgttcagagggcccaatagacataaacatgagtgaaattggaatggattacattcatgaactcttctccaaagacccaaccatcaagctcgg

SEQ ID NO: 370458 - DNA, 201 bp, Homo sapiens
taatccactccaggtggcgatccttatccccttccggaaccgccacgagcacctcccagtcctgttcagacacctgcttcccatgctccagcgccagcgcytgcagtttgcattttatgtggttgaacaagtgagtagtcctttcttttcctttcttttttctcttctgagacagcagtttaggttgctgcaagctaatcc

SEQ ID NO: 370459 - DNA, 201 bp, Homo sapiens
aaaatcacaaatctcaggattgtgaggattaaatgatgtaatgtgtatagagctctggcatatctgatatgtgataagctctcaataggtgttactgtttttattatatcaacattaaatactctgtaaacaggatcttaagtggctccatttaattcggttatatagatgtactgtaatttatgtaactatttcctggtg

SEQ ID NO: 370460 - DNA, 201 bp, Homo sapiens
cactgcaacatccgcctcccaggttcaagtgattctcctttctcagcctcccgagtaactgggattacaggcatgcaccaccatgctcggctgattttgtrtttttagtagagacggtgtttctccatgttggtcaggttggttgcgaactcctgacctcaggtgatccacctgcctcagcctcccaaagtgctgggatta

SEQ ID NO: 370461 - DNA, 201 bp, Homo sapiens
agaccacagcaaaaaaccttggtaggtagaaagcagaagaaccactgataaaagacttaacaaacccaagaaaactgactgctcaaagcagcaacaggagraccagcaaccaccccaggatcccccagaagctcaggaactagcaatatgggaagtaggagcaaaggtggcaactaaaataaagggagattgaaagctgtt

SEQ ID NO: 370462 - DNA, 201 bp, Homo sapiens
aaatcacaaatctcaggattgtgaggattaaatgatgtaatgtgtatagagctctggcatatctgatatgtgataagctctcaataggtgttactgtttttattatatcaacattaaatactctgtaaacaggatcttaagtggctccatttaattcggttatatagatgtactgtaatttatgtaactatttcctggtgt

SEQ ID NO: 370463 - DNA, 201 bp, Homo sapiens
cagcctcccagaactcccatgggttggtcagcaattcatcaggggtgtcctgctaaggagtgaaagctgagagtcctaactgtgcttcttttgctgtaatycactccaggtggcgatccttatccccttccggaaccgccacgagcacctcccagtcctgttcagacacctgcttcccatgctccagcgccagcgcctgca

SEQ ID NO: 370464 - DNA, 201 bp, Homo sapiens
tggggggcagcggaggaatagtcccttatgcattcatctagctcagtgaatctgcatttttacataagacaaaatatacttaccgggcagaggaagtgatsagattatgcatttgtctcaggtaagcagaggaatgactttaagttctgtcctttgtcccatacctgtgaagataagctgtcaatttacgttgtcagggtg

SEQ ID NO: 370465 - DNA, 201 bp, Homo sapiens
aatcacaaatctcaggattgtgaggattaaatgatgtaatgtgtatagagctctggcatatctgatatgtgataagctctcaataggtgttactgtttttattatatcaacattaaatactctgtaaacaggatcttaagtggctccatttaattcggttatatagatgtactgtaatttatgtaactatttcctggtgta

SEQ ID NO: 370466 - DNA, 201 bp, Homo sapiens
agccctttgaaaaactagaactgcatcttagtcaatcttttagagaatttttaagaaatcatacctcaataaagctagtgagatgctttcatatatagaawgttgataattcatttacattctacataaacattggtcctaagattttaatttatttttatcttactattttttgagatgaagtctctcgctctgtcaccc

SEQ ID NO: 370467 - DNA, 201 bp, Homo sapiens
ttacataagacaaaatatacttaccgggcagaggaagtgatgagattatgcatttgtctcaggtaagcagaggaatgactttaagttctgtcctttgtccyatacctgtgaagataagctgtcaatttacgttgtcagggtgaaattcagcagagtggttgtagggtaaggatgttgaggtccacaaggaatttcctattg

SEQ ID NO: 370468 - DNA, 201 bp, Homo sapiens
agttttatttaaaaatttttaaacaagaaatcaggaaattaagccacccctcccaagatgtagagtaagtttctggaagatttttgcaatagagttgttgygtatttgaggattcttaaaacagtgacatattattaatttagtaatcagaagaaaaataaatgctttttttttgtttcatgctaggtgctaccaggctta

SEQ ID NO: 370469 - DNA, 201 bp, Homo sapiens
agtggaccctgtctcttaaaaaaaaaaaaattagatgatacaagtgtctaagtattaatccccattttgattctattttattccctggaagtaaccatttmtttccgtacttttcttttcttttttgagacagattttctttctgttacccaagctggtgcaattttgctcactgcaacctttgcctcccgggttcaagtg

SEQ ID NO: 370470 - DNA, 201 bp, Homo sapiens
cctcaaatgagaaccttctagggaaaacagttaccctgtaacacacagatgattgatgtcccacatctcctcctaggcttccttataccgagttctttggyggagtgagtggcttaacagtggaacaatttcggaaaatcaatggctttcctaatgctttctggggttggggtggagaagatgacgacctctggaacaggt

SEQ ID NO: 370471 - DNA, 201 bp, Homo sapiens
ggaagtatttactttgtgaaattggaaaaccgtgtggttggtgtggaaaataagcatgttattaataaacagctagtcttgtgctccatactcttggatgkaaggtagaaataaccttgcctctattgctgagatttaaaaaaataaaaagctaggctactacccgtgccttcctcgtccacaacacaggcacagggtggc

SEQ ID NO: 370472 - DNA, 201 bp, Homo sapiens
cacacatgggcgtatcacaaacacaggcacattttctattacttgtgaggtcttttaatttttttctaaaggagaataatttcatctattagattcatccwgagtaataattaggatgaggggttcttcacatagatttttgaagtagttactaccttcagaagaagattcaacccaggccaggtttgcatgtatgagctg

SEQ ID NO: 370473 - DNA, 201 bp, Homo sapiens
cttcaaagttaaaaaatatgatagcagagatgatgattaaaggaaggttgagtaaagttgaggaaatctcttggaaagtagggcagataaatggcaagackgaaaactggatagaaaagatgagacagaggactgggaggtctcacatccaactcctgttctgtattctccagaaaggcagcacagagtacagaagggagg

SEQ ID NO: 370474 - DNA, 201 bp, Homo sapiens
tacctcacattattaagccttggcttcctcatttgctagcaggggctggcgtgagcattaaatgaaataattaagtgaagcacctggcatgaaacacaggmggtgtttctgaccacagcactcagcctggcatagcagaattggccgtgcgcccaccttgtgctgcagaagtgctgccatgggttgcgtcctctgctgtgg

SEQ ID NO: 370475 - DNA, 201 bp, Homo sapiens
ggatgttttcttttggatgggagtgaaaggcttatgtataaatagaaacagcacactcaacatacctattgtttttataaggcacactacagtgaatacaytaaaaaaaaaacagtaggtgagaatactctgaagatagtgagaaagcataattgtaggggacatagtttttaaatggttgaattactgtctgaggcctct

SEQ ID NO: 370476 - DNA, 201 bp, Homo sapiens
aaacaaacaaataacaacaacaaaaacacttgtgctatgtatgcctagagacctagctcctcagaacctgaggccaggagttccaggacagcctgggcaayatagcgagaccccgtctccaaacaaacaaaaaaacatttattctgagagagggaaataagggtagggattgactggaaaggggcttgggaaacctttcag

SEQ ID NO: 370477 - DNA, 201 bp, Homo sapiens
taaataattccatgacatgtgtccagtcctttgtgagttccagggttggttttgcttttctattttgattgccttggacttgctctgcgaaattagtaacsaagttgaccttcatcttttagtttagcccaggactctaggccctgtgtgcttgccatatcaggaggggtgagatcaaggccccacttccagtgtcatttg

SEQ ID NO: 370478 - DNA, 201 bp, Homo sapiens
aacaaacaaataacaacaacaaaaacacttgtgctatgtatgcctagagacctagctcctcagaacctgaggccaggagttccaggacagcctgggcaatrtagcgagaccccgtctccaaacaaacaaaaaaacatttattctgagagagggaaataagggtagggattgactggaaaggggcttgggaaacctttcagg

SEQ ID NO: 370479 - DNA, 201 bp, Homo sapiens; identical to SEQ ID NO: 80159

SEQ ID NO: 370480 - DNA, 201 bp, Homo sapiens
atccattgaatcacaccactcccgtgatcattttaactttgagattgataagagagtgagctaagaattatcaggttcttcatcctcagtatgttaaggakctctcttatctttctcattgagtctaaatattttttttctgattattttgctgtctttgttacttggaaatcaagtaacataaatcctgtataattgtca

SEQ ID NO: 370481 - DNA, 201 bp, Homo sapiens; identical to SEQ ID NO: 80160

SEQ ID NO: 370482 - DNA, 201 bp, Homo sapiens
ttgtgtagaggttactgaccttagcaaattgtcgaaacagttatcggtttcaagagaggtgcctgtgcatggttaggggtaattgtttatgcattgatgamtttttttttttttttttgagatggagtctcgctctgttgcccaggctagagtgcagtggcgcaatctcagctcactgcaacctccgcctcctgggttcaa

SEQ ID NO: 370483 - DNA, 201 bp, Homo sapiens
ggggaaggggtgctgtctgtgttctttcttccacttctgccctctcctagccttgagggtagatggtgtggttcttcagtattggatagtgcctgctctgyggacaaaggagaagtttaaattgtccgtagagaaggggatatgattggggcctttgggaaatggtaccaggtgagaagggggagcatggaggaaagatgt

SEQ ID NO: 370484 - DNA, 201 bp, Homo sapiens
tgtgtagaggttactgaccttagcaaattgtcgaaacagttatcggtttcaagagaggtgcctgtgcatggttaggggtaattgtttatgcattgatgactttttttttttttttttgagatggagtctcgctctgttgcccaggctagagtgcagtggcgcaatctcagctcactgcaacctccgcctcctgggttcaag

SEQ ID NO: 370485 - DNA, 201 bp, Homo sapiens
aaatcaaaacagtttatttctaggataacttttattatttaacttttagttgagaatttgtatttgttgtatataagcatatgtcgtccttctatgtcacttttttttttcctccccagaaacagggtctcccactctgttaaccaggctggagtgcagtggtgcaatcacagttcactgcagccttgaactcctgggctc

SEQ ID NO: 370486 - DNA, 201 bp, Homo sapiens
cccgccactacgcccggctaattttttgtatttttagtagagacggggtttcaccgttttagccgggatggtctcgatctcctgacctcgtgatccgcccrcctcggcctcccaaagtgctgggattacaggcgtgagccaccgcgcccggccgcaatgttgtgtttttacatgtcagtggatccagggtatgctagtgag

SEQ ID NO: 370487 - DNA, 201 bp, Homo sapiens
cctaaacaggtatgctctgctgaggaagtcaaaagaacggcaagggctggatggcctcaacaacctgaactactttgcaaacatcacatacgacgccttgkataaaaacataactgtcaacctgacacccgagctggctcaggtgaacgagtactgagaggagagaatgtacgtttgctttacccaccgccaccaagaaag

SEQ ID NO: 370488 - DNA, 201 bp, Homo sapiens
acacattctcactcgactcatgtggctctgtcagttaaggcagaattttatgctgtttgcatttttcacacatagtacatataatcttggggaagatggcrcagcttgatcatgtgactctttccctaaaccctgccaaaatcctgcttctagttaggtgaagaaacgaggcagtactgactgcccttccagagcgctctc

SEQ ID NO: 370489 - DNA, 201 bp, Homo sapiens
aggtctttcttctgatgatcagagtgctagaatacagattgggtatttggagaagagatggaatatatttttttttaagttgatgctttttctagaactgytggatattgacagaaattcctctaagctctactagctacccaaaagatgttggtgtcctgaaaggtatggaaaatagagttatggtcatgtagggtttta

SEQ ID NO: 370490 - DNA, 201 bp, Homo sapiens; identical to SEQ ID NO: 80167

SEQ ID NO: 370491 - DNA, 201 bp, Homo sapiens
aattcagcagagtggttgtagggtaaggatgttgaggtccacaaggaatttcctattgggcagattgtgagggaggtaggtttgcatgatgccgttcctaycttgacttttctctttgacttagtgggtttggggtccccaagtttattttccttttacattgttattcatcttttactgtgcctaatttataatttaaac

SEQ ID NO: 370492 - DNA, 201 bp, Homo sapiens; identical to SEQ ID NO: 80168

SEQ ID NO: 370493 - DNA, 201 bp, Homo sapiens
tgttttaaaaaacacttttcacaaaaatagtcctttgtcattacattatttactcatgtgtttgtacatttttgtatgttaatttatgaatgattttttcrgtaaaaaatacatattcaagaaccaaaccttggtggtcatttctctttgtgtaggacagtttgggtccttgggggtctttcctttttcctttcctttcct

SEQ ID NO: 370494 - DNA, 201 bp, Homo sapiens
ggtctttcttctgatgatcagagtgctagaatacagattgggtatttggagaagagatggaatatatttttttttaagttgatgctttttctagaactgcyggatattgacagaaattcctctaagctctactagctacccaaaagatgttggtgtcctgaaaggtatggaaaatagagttatggtcatgtagggttttaa

SEQ ID NO: 370495 - DNA, 201 bp, Homo sapiens; identical to SEQ ID NO: 80172

SEQ ID NO: 370496 - DNA, 201 bp, Homo sapiens
acttttcacttcaccagtgttctctgtactaaatgcccatttcattggaaccactccaaactgaagggtggaatattagtgatatgtctacatagatttasctgcgccatcacataaggcttgtactgtacaagcttgggtgaacaatcctgtgtgtgagtggaataaagtaatatttttatggagtaagtaaacagtaac

SEQ ID NO: 370497 - DNA, 201 bp, Homo sapiens
ttgcattctgggtggctactcagaggctgacttttgaggctcagcagttgctacccctgctgctttcaaaggctgggctgtctgggtcacagagtttttcrttttctgttggttaggaaatactgtgttttgaagggccctggtagagggaaagtaatttttgaagcccctgggtttgtggtatgagttgagaggaggcac

SEQ ID NO: 370498 - DNA, 201 bp, Homo sapiens
ctcttcagtatgtcgtttaagtctgcaggtatgccttgatttctttctgttgtagatcagtacttactgtatggcacttgctgattttgcgtgcttatgtycttgatatgtggcctctttcagttcagggaccaacttttttttcttcttgaggagtcttgctctatcgcccaggctggagtgcagtggcgcaaccttggc

SEQ ID NO: 370499 - DNA, 201 bp, Homo sapiens
gggttggggtggagaagatgacgacctctggaacaggtacctctgccgttctttcggtgtcttctagaaatgctaccttagactgcagaccaatactatcygataggaatataatgcaagccatgtgtgtaatttaacatgttctagtagctacagtttaaaaggttaaggaaaaaaatgaaattgaccagctgtgatggc

SEQ ID NO: 370500 - DNA, 201 bp, Homo sapiens
gaagaaactattgtctgggcagaccagcctcttggtcgttggactgcatttactttggggaaaggaattaattaatcctgattttgaagtgactgaattawttttttccaaatctactttgtacatttttcttcttttggtggtaaaatatgaaatttgccatgtatctattttagtaatttaagtaattaagtgtacagt

SEQ ID NO: 370501 - DNA, 201 bp, Homo sapiens
cttttcacttcaccagtgttctctgtactaaatgcccatttcattggaaccactccaaactgaagggtggaatattagtgatatgtctacatagatttagstgcgccatcacataaggcttgtactgtacaagcttgggtgaacaatcctgtgtgtgagtggaataaagtaatatttttatggagtaagtaaacagtaacc

SEQ ID NO: 370502 - DNA, 201 bp, Homo sapiens
ccagcctcagcctcctgagtagctgggacaacagatgcatgccaccacgcctggctaattgtttttggtagaaataaggtttaactctgtttcccaggctrgtctcaaactcctggcctcaggtagttctcccacgtcagcctccccaaagtgctggaacttattaaattataattctagtttttatgtacagttttttta

SEQ ID NO: 370503 - DNA, 201 bp, Homo sapiens
taaaatatgaaatttgccatgtatctattttagtaatttaagtaattaagtgtacagtttagtggcataaattacattcataatgttatgcagtaatcacttttttttttttttttttttgagacggagtctcgcccaggctggagtgcagtggcgccatctggtctcactgcaagctccgcctcccgggttcgtgccatt

SEQ ID NO: 370504 - DNA, 201 bp, Homo sapiens
cttgctttcactttacggaaaaaaaaaagtaccatttaaatcatttgaagtatacaatttagtggcgttaagtacattctcaatattacgcaaccattacyactattcgtttccagaacttgatttcttcattccaaacagaaactctgcacctattaaaaattagtccccttctcaacctctattattagtccacctatt

SEQ ID NO: 370505 - DNA, 201 bp, Homo sapiens
attatatgtaatttttgttttatcctttcagctgcgtaagaaaaactcaatttccactctttttgcagacaattcttcaaaaatagattgcaaagttttcwtgtattcattttaccatttgttcttaagaagacttactttaacataattaccaacaaatgtttgcacctagcatttctgctcagagaatggtgtgaaagg

SEQ ID NO: 370506 - DNA, 201 bp, Homo sapiens
ccaaagtgttgggattacaggcatgagccaccacacccgaccctaaatgcagttcttgattccaaagactaaagaatactttacgggcatagaaaaacccygcagtgctttaacttcttatgtgaacattgctagggtctttattccctctgtaacaattcctggcccatttacaggatttttaatattagtatactttga

SEQ ID NO: 370507 - DNA, 201 bp, Homo sapiens
cgtgatccgcccacctcggcctcccaaagtggtgggattacaggcgtgaaccaccatgcctggcccccagaactttttattatgaaaaaattcaaacttayagaaaagttgcaagaataacacaataaaagcattatcttccatctggagtcaacagttaccactattttgctttttttgtttgaactgtggctctgcttt

SEQ ID NO: 370508 - DNA, 201 bp, Homo sapiens
ccaggcgtggtggtgggtgcctgtaatcccagctactctggcggctgaggtgggagaatcacttgaacccggaggcggaggttgcagtgagctgagattgygccactgcactccagcctgggtgatagagtgagactatgtctcaaaaaaaaagtctttagtgttgattgctgtagtgtgagagcagaggaaaaacagttg

SEQ ID NO: 370509 - DNA, 201 bp, Homo sapiens
ttaggggaattattagggtctggagcaatgaagaggggaggaatctcttactaaggcagaaggttgtgtttttgtgcttcccccgaccccatacaaaaatktattgattattgttttaaaaaaaatgaaaagaaaaagaccctgcccaaaggcagcattcctaaagggtgctcataaagtagatgctgtgtgaaaaggggt

SEQ ID NO: 370510 - DNA, 201 bp, Homo sapiens
ctactcgggaggctgaggcaggagaatggcgtgaacccctggggggcgcagcctgcagtgagctgagatcgcgccactgcactccagcctgggtgacagcragagtccgtctcaaaaaaaaaacaacaacacaagccaaaaaaaaaaaaacacttcaaaaagatccaagtaaaaggaatcaaacaaagtgtgggcagcata

SEQ ID NO: 370511 - DNA, 201 bp, Homo sapiens
gataaacaaaatgtgtgtatccatacaattggagcactgtttggcaggagaaagcaatgaaatactgatacgtgccaaaacacggatgaacttcgaaaacrttacgttaaagaagccagacacaaaggttgtgtatcatatgattccaggtgtctgaaatgtccagaataagcaaatctatagtgacagaaagtagataaa

SEQ ID NO: 370512 - DNA, 201 bp, Homo sapiens; identical to SEQ ID NO: 80165

SEQ ID NO: 370513 - DNA, 201 bp, Homo sapiens; identical to SEQ ID NO: 80166

SEQ ID NO: 370514 - DNA, 201 bp, Homo sapiens
agctgaaaaagaggcagagcacttacattttcattagtactgtatccccttgaatgtaagccttctgaaggggaattctacttaggatggaaattttgttygtgagaaaggggaacaataaaaaaaggatgtggagtagttacatttagctgtttgcccttcctactaatttttttttttttttttgatagagagtctctg

SEQ ID NO: 370515 - DNA, 201 bp, Homo sapiens; identical to SEQ ID NO: 80176

SEQ ID NO: 370516 - DNA, 201 bp, Homo sapiens
ttgattcgatttaaattaaaagtttttggcaagaatactcagaaggtaatcttagtttgttctagttggtgataacccagtttgggcacttggttaagtgrtacctatctgatctctccattgtaaatgcacgtttccccctttgcagttatgtgatctgtgggaagaatttgtttttgattttctttccaaagtgtagcc

SEQ ID NO: 370517 - DNA, 201 bp, Homo sapiens
gccttagaagctagaaattttcaagtgctttctctggcatcttttgcctttttatggaaagcatggctctgatttcctatgtttgacagtttgggtgttartaccagttggaatgctgccttcttggaagcacttaaattcccaacgagtagataacccattagtctgttacaagcttccaggctaacaataatgtgatta

SEQ ID NO: 370518 - DNA, 201 bp, Homo sapiens
cagtttcttcattggaattgatattagtttctacctgatagtgaagaacttagcaaagtccctgtggtggcaagcatatgcagtcagtgttattgctaccrtgattgatattctgactattgggagattataatctcagatgtgttttcaggatgaattcacaaacacagtcatatgttgcataagtatggggatacatcc

SEQ ID NO: 370519 - DNA, 201 bp, Homo sapiens
atggtaggctagatagaggaaacttgcttgatgaagttaaagctagaagcaccaagagctttaggatcattatgaatcatttggggtaggataatttgggrgtagaataacagtttgagattaggggaattattagggtctggagcaatgaagaggggaggaatctcttactaaggcagaaggttgtgtttttgtgcttcc

SEQ ID NO: 370520 - DNA, 201 bp, Homo sapiens
agcagcctggctgccctaccccatggtgatgtgagcctccccgctttcctgtctggggaaggtcctggtgctgtctgcaccatgcccccccccaccccccmcccccctccccccaccatctcttccaggtagcatttcacaccccttatttgctgtgcctcctcccagctgctctaggagctccccaagggtggggctagg

SEQ ID NO: 370521 - DNA, 201 bp, Homo sapiens
agtgagccgagatcacaccactggattccagcctggtgacagagcgagactccgtctcaaaaaaaaaaaaaaaaaattttagctgggtgtcatatcacgtkcctgtattcctagctactagggatgcagtgagctgtgatggagccattgcactccaacctgggcaacagagcaagaccctgtctcaaaaacaaaacaaaa

SEQ ID NO: 370522 - DNA, 201 bp, Homo sapiens
gttttcatttatcttgggtaaatacctaggattaaggctgctaggtcatatggtaagtacatttttacttttttagaaactgcctagtgtttttcgaagtractgtatcattttacattcctcagaatgtatgagagagtgccagttgcttcatattgccaccacacttattttaatttaaaaaagtttagctgtcctgat

SEQ ID NO: 370523 - DNA, 201 bp, Homo sapiens
gtttcttcttatttatttttgagacagggtctcactctattgcacaggctgaagtgcagtggcgtgatcgtggcccactgcagcccagacctcttgggctyaagcgatcctcccacctcagcctctggagtagttgggactccagacaggcgtgaccccacccagttaattttttcttatttttagtagagatggggtctc

SEQ ID NO: 370524 - DNA, 201 bp, Homo sapiens
cctgcaccccattggaggagggcacacagctctcagcagcagagacgactctgatgcggccctagaagatgatgctcaccagctggaggaggggtggccastcacagcgtaatgatcttggagccgtcacctggtaatcactcagcagcccaatcaggcttggcttagttgggctttctgcctacaagtggcagtcaagct

SEQ ID NO: 370525 - DNA, 201 bp, Homo sapiens
ttatccagaaggattgcaaaaggggctttcaaagtgtgttccattgagttatttgcactgattttgttgtttgacaaccaataagcttttccagctggagmtggaaagaggcttgttaaggccaatgtcacctttattgctgtagaaatttcattatgtttaaaatagtaacaggcagtagaccacttcggtgcgcaccta

SEQ ID NO: 370526 - DNA, 201 bp, Homo sapiens
ctggatagtgttgacctcgagtacaggtttcaaaaccagttttactcaaaaagttcttgttctgtttttagcatgttttttagcaatatatcttggtagaktctaacaaccttagctagtaagatagtcatagagctctaagaataggagccttgctcattaacattcctttctgctattaggcatattgaaaagaaccta

SEQ ID NO: 370527 - DNA, 201 bp, Homo sapiens
ctttcctgggctctttcctgtccctctgccactcttctcaccttgcctcctgccactgtcccacccccaccccaccgctgcgttttagctgcactaatctyggtacttgaaagttcctacaatgggttgcatatgcatgggctctcttcctttgcacatgctgttccctcactgggtgccttcccccatttcttcacctgg

SEQ ID NO: 370528 - DNA, 201 bp, Homo sapiens; identical to SEQ ID NO: 80190

SEQ ID NO: 370529 - DNA, 201 bp, Homo sapiens
ctcagcctcccaagtagctggggttacaggtgcctgccaccacacccagctaatttttgtatttttagtagagatggggtttcgccatgttggccaggctrgtcttgaactcttgacctcagatgatccacctgcctcagcctcccaaagtgctgggattataggcatgagccaccacacccagttcaaacaatgtaaatc

SEQ ID NO: 370530 - DNA, 201 bp, Homo sapiens; identical to SEQ ID NO: 80192

SEQ ID NO: 370531 - DNA, 201 bp, Homo sapiens
actgaatatgtaaatgagttaccccctttttgatgttgttaccttcatgaatgccagaaagcaaatgtcttctgtttcttcagtaacttgaattcattttsagctttgatttgttgctatgatagtgtgttcttaaagtcactgctgtagaggaaaccttttgttttctccagctacagcttaagctcatgaaatggaccc

SEQ ID NO: 370532 - DNA, 201 bp, Homo sapiens
tcttcactcggaggctgacgcaggaggtgggataccggccaggccacactttctgggggtcccttgcctgcctccttcaggacctgcggtggcccagggtsgggtggaggaagagtggggaggcaggaaagctcacgtgggcccgccaggccgccgcctcccgatctggaggctggacgtgcttgtggaactcggcatctg

SEQ ID NO: 370533 - DNA, 201 bp, Homo sapiens
tgacacatttatctttgcaactgaatatgtaaatgagttaccccctttttgatgttgttaccttcatgaatgccagaaagcaaatgtcttctgtttcttcrgtaacttgaattcattttgagctttgatttgttgctatgatagtgtgttcttaaagtcactgctgtagaggaaaccttttgttttctccagctacagctt

SEQ ID NO: 370534 - DNA, 201 bp, Homo sapiens
gggctcgtcccccttcgctgacccctcaaatagtggcttcttcaggacttggccccagccccacttctgttcacgtgttctgcacttcactgagtgcgctyacccgtccactggccttcacttccacctagtcccaaagctgttcccgcgaacccagacctccctctgggatccgtactcctgtttccagctgcctgtttg

SEQ ID NO: 370535 - DNA, 201 bp, Homo sapiens
catgcccagccaattcacccattttaaatgtacaacaatttttagtatgttcagagtcgtgcagccatcaccacagtcaattttaggacatttttatcacytcaaaaagaaaccacatgccctttagctctcctccctgtccctgggcaaccattactgtccctgtagatttgtctattgtggacatttcatataaatgga

SEQ ID NO: 370536 - DNA, 201 bp, Homo sapiens
acaagcctctgctaccggcccctcccatcatcatttaagcaatcagagcttctcctccttcccacaaaacaccagcaacttcagccagagttcctcctcaygtcccccgcagctgcgtccgcacctcttttgccatggccagacccttgcgagtgagccgtgctcgctcattttctccacttcttcaccgcctgtccacgg

SEQ ID NO: 370537 - DNA, 201 bp, Homo sapiens
ctttttctgggtttactatgatctacttaaccagtttcctactattggccttttcatgtttctcttggcagaaatttctatagctttattaggatattatscaacatcatgccacaagacctttaaaaaatccaatggcagtattttttcttatttaagatctactctgaaagctgcctagcattctggtttttactttta

SEQ ID NO: 370538 - DNA, 201 bp, Homo sapiens
actttgggaggcccaggctggcggatcatgaggtcaggagtttgagaccagcctggcaaacatggtgaaaccccatctctactaaaaatacaaaattagcygggcgtggtgatatgcgcctgtaattccagctactcaggaggctgaggcaggagaatcgcttgaacccgggaggcggaggttgcagtgcagtgagctgag

SEQ ID NO: 370539 - DNA, 201 bp, Homo sapiens
aattgataaaacagtcttctggaaaataattttactggttacggtgtattcctttttctgggtttactatgatctacttaaccagtttcctactattggcyttttcatgtttctcttggcagaaatttctatagctttattaggatattatgcaacatcatgccacaagacctttaaaaaatccaatggcagtattttttc

SEQ ID NO: 370540 - DNA, 201 bp, Homo sapiens
atttttagttttcctcacaagtttgaaatttcctttgtcatctggtgcatagtaagtattttcctttttttttttaaatttaattacttatttgtagatcrataaacacatgttccggattcatttatgtaactgttaactgttcaaagtcaacagctacatagacactcttttgtttaaagtttcttttgttaaaaaaaa

SEQ ID NO: 370541 - DNA, 201 bp, Homo sapiens
attgcactccaacctgggcaacagagcaagaccctgtctcaaaaacaaaacaaaacaaaatcactgggaaaagtaaatgcatttcagataatctcaaatawatttttctgatgcagggatatttccttgaactctgcattttatggtggtcattaacaggcaggcaacaaacccaaagatttttgccaaaacacagatgtt

SEQ ID NO: 370542 - DNA, 201 bp, Homo sapiens
tctctaaaaaaatatatatacagttttaatctctttagtcattatgctgttctgagggccatcacagtttaagcagagagcctagtgttagaaatttatarggtgctttttcttaatatatacaagtttgtgtgacagagagtaaatattgggctctttttggctcgcagagtggagccaggagttagcaatgagtctcac

SEQ ID NO: 370543 - DNA, 201 bp, Homo sapiens
cacacacacacgacacacacacacacgacacacacgacacacacacacacacacacacacacacacacacacacacacacacacacacacacacacacacmcacaccccggtcatcccccctgagaaggaggtgacggaacttgagttctgaagcatggctcttggggtgggggtgtctggtggccttgtgacctgccgca

SEQ ID NO: 370544 - DNA, 201 bp, Homo sapiens
ctggagcccaggaggttgaggttgcattgagccacaatcacaccactgcactccagcatgcgagacagagtgagactttgtctcaaaaaaaaaaaaaaaaagatgtaaactttacataaagctgtactttgccaagactaacatgcctttggagatggagaggaaccaaaagccacagcaagcagctggcaggctaagccg

SEQ ID NO: 370545 - DNA, 201 bp, Homo sapiens
gggcatcctttttcaaactcttttagcacagcgaagtcgagggcactgggtggagggtgcttgcttgccctcagggtgagtcacagtgacctcagaggagyttccccaaaacgtccccgccctgtgatggggaaaagccggaatctctcggtcccaggtggtcatgtggcccaggccggacaagcgtcccgaaagccccgg

SEQ ID NO: 370546 - DNA, 201 bp, Homo sapiens
ctggcccccaagtgactttgccctagctgtcatcaaaatcacccctggcattttgagggacttgtctctttttttttttgagatggagtcttgctgtgtcrcccaggctggggtgcagtggcgtgatctcagctcactgcaagctccgcctcccgggttcatgccattctcctacctcagcctccggagtagctgggacta

SEQ ID NO: 370547 - DNA, 201 bp, Homo sapiens
gtggtatgtgcctgtggtcccagctacttgggaggctgaggtgggaggattgcttgagcccaggagatggaggttgcagtgagctgataccacgccattgsactccagcctgggcgacaacgcgaaaccctgtctccaaaaaaaaaaaaaaaaaagaggccgggcatgttggcttacgcctgtaatcccagcacattggca

SEQ ID NO: 370548 - DNA, 201 bp, Homo sapiens
gtgtgtatgtatgcatttatttctttttaacacagtgcaaatacataggtgtgtgtgtatgtgtgtatatatagatttttttttttttttgagagagagaraacttgtgctgggattctacactttgtaacctgattattaatacatttgaggatgttttcggtggcccatgcgtcggggatggttggatagtaagatggg

SEQ ID NO: 370549 - DNA, 201 bp, Homo sapiens
ccgattttcacccttttatacatggaaagtttgccagatagtcactgtttccacaaaatggcagaagtgaattaaaactttgcttttaaagtttgacttgsaattagtatatcttggcagcttatttgatgattttttaagacaatctcagcttccttacatgaaatagagacccctttcctgctccctatgcagggagat

SEQ ID NO: 370550 - DNA, 201 bp, Homo sapiens
gctgtggttaagagcacagatttggaatctgactcaatactgcagcacctaccagtggtgtgacaggggctgtgatgtctagaagcctcagttttctgatytgtaatcagagaagatagtggtaatgacagctaattccgagggaagttggaggattaaatgagagagtatttggggtgttcagcctagttcatggctcat

SEQ ID NO: 370551 - DNA, 201 bp, Homo sapiens
aaaggccctttcttagccttttgcttctggtagaactacccttggggaacattgacctctactgctaggctaggctgacatccaactcaactaaggtaagyaatgacacttcatagaatcactcaattttatagacagaagggactctgactttacagtttaggaggaagaaatggctcacttaatgccagagtcaggtct

SEQ ID NO: 370552 - DNA, 201 bp, Homo sapiens
cgctgacatagtcacttagctggcctgggtgattgcgtccaggtcggggggtcgctttccagaagctcccatctcagggaatcagcagctttctaatcacrgaatgttggtgatcttagcagctggagacaggggcctataggaggactgcagcagctgcttccaggcgatagggaagacctcctccttcctaggtgaagt

SEQ ID NO: 370553 - DNA, 201 bp, Homo sapiens
tgaggctggtatggaggggatgagtgtcagcaggattggctcatgggaaagctcttgagctgggcactggcctccacacgaggaggtggctgtgtgtgcaygcacacacacgaggaggtggctgtgtacacacacaaacacacacacactctctctctctctctctctctctctctctgtctctctctctctcaccccagg

SEQ ID NO: 370554 - DNA, 201 bp, Homo sapiens
ggggggttgaggagacttgtgcgaagctatgcagtgtttcagatgaaagatggtgtgagtgacgggacactgcagtaagtgcgggggtgcaggaagactcycgggctcccagcttgccacacaggttgggcagtggtgccttttacagagaatcaagtctgcacggagggccaggtgtgcaggccgtgccttcactgacag

SEQ ID NO: 370555 - DNA, 201 bp, Homo sapiens
aatgtttgaatttgttgccatccttaaagatggagatttcctgtaaggaaaaccagaaggaagactggtccatgttagatcctcaatcccacagggctacygtcagcctttgtagacaggctgagccgagactgcgcctctaatcccagctgcttgggaggttgagacaggagaatcgcttgaacctgggaggcggaggtt

SEQ ID NO: 370556 - DNA, 201 bp, Homo sapiens
gtttaagcttgggagggagtaactctgctcagctaactgccctgcctgtgtgcacgcgtacactgtaccattgtcttcttatttacaagacttttcagtcrccgtaacaaaaagtcttcttgacagattagagatggagagggggagtgacggagaaactttcctctgggattcccacgaagcctgtggtgggggaagcag

SEQ ID NO: 370557 - DNA, 201 bp, Homo sapiens
gaagtatgttatattttacatacagtaaggcacggtacagtgtaaattgtaccatgataccttttcactgccttttggacttgaatcccatactgtcttcytttattacatctagaacagtggatgtaaccataaacagaagtggatttcctctctccctttcttttctgccattcttccttcaggaggctgaacgctttt

SEQ ID NO: 370558 - DNA, 201 bp, Homo sapiens
cttccccgactcaacaggacagccctcttaaagcctcagcctcaggcagtcagctcagcagggggcctagggaaagagtggccacctttgtctcccttccrgcaggaatcacagtcctaccctatcttttgtcccatgtcagaaaatagttttgtttcatatcttgtatcaggttttctagttatgtagagcaggacagtg

SEQ ID NO: 370559 - DNA, 201 bp, Homo sapiens
cttctggaaggaaatcctagcttcatatgaggcacagtagaggcgtgctaaattgtttcaaagtgtcctccaagacctttggtatctggaattgagtaaawcttttccataatcccccccaaagtatttgagtttatttgcaaaccaatactgtcttaaattagaatacctaaaaatgaagccaaatatatgccatcaaga

SEQ ID NO: 370560 - DNA, 201 bp, Homo sapiens
ttcaaagtgtgttccattgagttatttgcactgattttgttgtttgacaaccaataagcttttccagctggagctggaaagaggcttgttaaggccaatgtcacctttattgctgtagaaatttcattatgtttaaaatagtaacaggcagtagaccacttcggtgcgcacctaagcctacgtctcagggagatggccacc

SEQ ID NO: 370561 - DNA, 201 bp, Homo sapiens
atgaaagcttaacaagcaaagagggagcacaacctgctcgaagccaccagtgggactggaacccagagaacaaaggcgagcatggtgccagatgagcccakaggcctccccaggagtcgaatcattcagggtgggggctagctgcattttaagtggaaataggggtccaggtgaaggcagcacaatcagatttgtcttttg

SEQ ID NO: 370562 - DNA, 201 bp, Homo sapiens
caaaaaggtattgactgtcttttgtgtgggaggctctgctttaagccccggacataaggcagcgaacaagatggacacaggcttcatcctcatggactgargcacgacagtttcccatgctgtgaaggagaagtcaagcaccatgacaacctttaaatgggcaggcctgcgtgaagggatcagggcaggtgtgcctgaggg

SEQ ID NO: 370563 - DNA, 201 bp, Homo sapiens
agatgatccacccgccttggcctcccaaagtgctgggattacaggtttgagccaccgagcccagtctaatctgtttttaaataacaaaagaaaacagcgawttgcaaagagcaactcatagattgaaagccctttgttttgaaaaaccaaatcattgtgttttaaaattctttgtgcagtaaagattgatatgccaaacaa

SEQ ID NO: 370564 - DNA, 201 bp, Homo sapiens
tcaacaaaaaggtattgactgtcttttgtgtgggaggctctgctttaagccccggacataaggcagcgaacaagatggacacaggcttcatcctcatggamtgaagcacgacagtttcccatgctgtgaaggagaagtcaagcaccatgacaacctttaaatgggcaggcctgcgtgaagggatcagggcaggtgtgcctg

SEQ ID NO: 370565 - DNA, 201 bp, Homo sapiens
aaaggaattgaatgtcagatgataggcagccaagtcaaaattgcagcttctaggaggtgggcttagtggggcagtcagtgttcagctgaggacactcttttcacaagtgggctttaaaatagcaggtcttgatgtccatggtttggtgatttctgagctaaaaacaagattcttgttcacaaccacaatcgggggtgatca

SEQ ID NO: 370566 - DNA, 201 bp, Homo sapiens
tcccagctactctggaggctgaagcatgagaatcatgagaatagcttgaactcgggaggtggagcttgcagtgagctgagatcacgccactgcactccagyctgagtgatagagggagactttgtctcaaaaataaataaataaaaataaacttaatttgttgttgacatggtataaaataaataaatacataattttaaa

SEQ ID NO: 370567 - DNA, 201 bp, Homo sapiens
taataacaatattaccaccagtagtaataataatttattaagcttaatatggtcgggcccagtggctcatgcctataatcccagcactttgagaggccgargtgggtggatcacttgaggccaggagttcaagaccagtctggccaacatggtgaaaccccatctctactaaacatacaaaaattagctggtcgtggtggt

SEQ ID NO: 370568 - DNA, 201 bp, Homo sapiens
tttctttttggtaaagtagaaaccaaaaaccccaaaaccctacctcccagggtgctttgagagtcacactagatgaaagaacgtaggcaaagcaccacccrccacactaaataaatgaagtgctgctgcttgttattaatgataaaaatgtcatttattattaataacaatattaccaccagtagtaataataatttatta

SEQ ID NO: 370569 - DNA, 201 bp, Homo sapiens
ctgcctgtttggatgccgtggggatgctgtcatccctatgcctttgcatcccccttgcccaagaaatcctactttgaattgccccgtggcctggctagccsgtactaagcacttgctgggtacacaccctgttaaagcacattacatgtcccgtgtcactgaatcctctggcccgtgacaggtttagagaggctgagagtc

SEQ ID NO: 370570 - DNA, 201 bp, Homo sapiens
tcagggcaagagagaagcagcaaaagtcctttacagaaagtataatagcctaggctgggcgcggtggctcacacctgtaatctcagcactttgggaggccsaggctggcggatcatgaggtcaggagtttgagaccagcctggcaaacatggtgaaaccccatctctactaaaaatacaaaattagccgggcgtggtgata

SEQ ID NO: 370571 - DNA, 201 bp, Homo sapiens
ccaaaacacagatgtttgagaccagtctggacaacatagcaagaccccattctcccaccttcccgcaaaaaactccaaagcacgtggagaaaagagccccrgataatgtatcaaaaatgagctaagagaatcttagaggccagtgtgtgttctgttagataatagaatttccatttacctgaatactgacttactgccttt

SEQ ID NO: 370572 - DNA, 201 bp, Homo sapiens
ggaactgggcggtgtatgataaatatatctaagcaaaagtctcccttccatcattggtcaaagtcaagtctccgtgctgacactagaaaaccaggccattmctaacaactcagtttagagtgggcctttcatactccacccacaaaacagcagataagtggggaaaaaatacgctaccttctgtaattaattcagctctag

SEQ ID NO: 370573 - DNA, 201 bp, Homo sapiens
caggaccttaagggcttcgtgtggctggacgccaagtacctgaaccccttcttcactcggaggctgacgcaggaggtgggataccggccaggccacacttyctgggggtcccttgcctgcctccttcaggacctgcggtggcccagggtggggtggaggaagagtggggaggcaggaaagctcacgtgggcccgccaggcc

SEQ ID NO: 370574 - DNA, 201 bp, Homo sapiens
ctggagtgcaatggcatggtctcagctcactgcaaccttcccctcccgggtccaagcgattctcccacctcagcctcccaagtagctgggactacaggcaygtgccaccacactccgctaatttttgtatttttagcggagacggggtttcactatgttggccaggctggtctcgaactcctgacctcgtgatccgcccac

SEQ ID NO: 370575 - DNA, 201 bp, Homo sapiens
tgtagttctagctacttgggaggttaaggtgggaggatcactggagcccaggaggttgaggttgcattgagccacaatcacaccactgcactccagcatgygagacagagtgagactttgtctcaaaaaaaaaaaaaaaaagatgtaaactttacataaagctgtactttgccaagactaacatgcctttggagatggaga

SEQ ID NO: 370576 - DNA, 201 bp, Homo sapiens
aaaaaacaaacaaacaaaagggtactatgagaaaagcatccagcattgggtaatgtgacatcctttccttttctttccctgcccctagttgttgttttcamatttgcccagtttttgccctgtttttgcccttcctttgcaggaggagcttaccaaatactgcctgatggcaagaggtgctcaacaggccttaaaaaacaa

SEQ ID NO: 370577 - DNA, 201 bp, Homo sapiens
caaagattagccaggtgtggtggcgcacgcctgtaatcccagctactcgagaggctgaggcaggagaatcgcttgaacctgggagacagaggttgaagtgrgccaaactcacatcactgcattccagcccgggcgtcagagtgagactctgttttaaaaaaaacaaacaaacaaaagggtactatgagaaaagcatccagc

SEQ ID NO: 370578 - DNA, 201 bp, Homo sapiens
gccacgtggcctatatatttattttattttattttatttttttttttttgctggggagtggtggggagcagagtctcactatgttatccaggctggagtgyaatggcgtggtctcagctcactgcaacctccgcctcccaggttcaagcagttctcctgcctcaacctcctgagtagctagaattacaggtgcctgccacc

SEQ ID NO: 370579 - DNA, 201 bp, Homo sapiens
atggtgatgcgtgcctgtagtagtcccagctactcaggaggccgaggcaggaggatcacataaacctgggaggcagaggttgcaatgagccaagatcgcavtattgcactccagcctgggtgacaagagcaaaactctgtcccccccccaaaaaaaagggtgggggggtagtgcagtgggccctcaatagccacaggttcc

SEQ ID NO: 370580 - DNA, 201 bp, Homo sapiens
aagtaggtttcctatattttgtagggtattgtgttacagtaagcttagcagttgacaagtctgtaatacagtgctgtgattttcaccctttttttttttttacagttttttgtttgtttgtttgtttgtttttgagacagagtcttgctctgtcacccaggctggagtgcagtgccgcaatctcggctcactgcatcctcc

SEQ ID NO: 370581 - DNA, 201 bp, Homo sapiens
ctcaaaaaaagaaaaaaaaaaatacatgaggagaagtccaacagatcttatttttcctatggcgtggtgggtaggataatggccctccaaagatggccacrtgctaattgctggtccctgtgaatatgttacagggcaaggacgaattaagattgcagatggaaatagggtgctaatcagctgactttgagacgggcagat

SEQ ID NO: 370582 - DNA, 201 bp, Homo sapiens
atatgaggaaggcttctcagaaggaacgtcttgtgagccaggcctgggaggcttattttcagacagaagatacagaaaaggggcatgtcagacttaccccygcctccccctccaccttttttttttttttagtacagaagaaaaatatgctcctgggagctgttgtcacctttccttggttatcagaatcatacctggttt

SEQ ID NO: 370583 - DNA, 201 bp, Homo sapiens
cttgtgagccaggcctgggaggcttattttcagacagaagatacagaaaaggggcatgtcagacttacccccgcctccccctccaccttttttttttttttagtacagaagaaaaatatgctcctgggagctgttgtcacctttccttggttatcagaatcatacctggttttgaagaggtatacttcataaacgatcatc

SEQ ID NO: 370584 - DNA, 201 bp, Homo sapiens
ggtcaaaactgattaatctgtttttttttttttttttttttgagatggagttttgctcttgttgcccaggctggagtgcaatggcacgaactcggctcacygcgaactcggctcactgcaacctcggccccctgggttcaagcgattctcctgcctcagcctcccgagtagctgggattacaggcgtccataaccacacca

SEQ ID NO: 370585 - DNA, 201 bp, Homo sapiens
tctcaactcctaaaaaaagctctcagggtagaggggagcaatcgaggcaagaaatattttccttagaggctagaaagctggcggggggttggagggtcacrcacaaagttgagggtcctgtaacccccgcttattattccacagggcactaggggaatgaagctggcctggagcggggccccactgcctcttggaggcaac

SEQ ID NO: 370586 - DNA, 201 bp, Homo sapiens
tttcctccctgccttggtgagcagtggcactggcccctacccacttctctgctttggcttggccttgacggccattgccttgcaactcccagtgtgagatrtttttttttttgttttgttttttttgagatggagtctcactctgtcacccaggctggagtcctgtggcatgatctcggctcactgcaacctccaccttgt

SEQ ID NO: 370587 - DNA, 201 bp, Homo sapiens
ctttaatcagtcatcagaggcccaggagtcctcacgtggccatccacggctaacactggagtcagggctggcaagaccatggcctccaatctccatgctcrgctgggcccctcacccagtgcagtgctgctgggaggaaacttccagatggctgtgaggcctggctctgcagaacttccaccacactaagaggccctttgc

SEQ ID NO: 370588 - DNA, 201 bp, Homo sapiens
tctttcctccctgccttggtgagcagtggcactggcccctacccacttctctgctttggcttggccttgacggccattgccttgcaactcccagtgtgagwtgtttttttttttgttttgttttttttgagatggagtctcactctgtcacccaggctggagtcctgtggcatgatctcggctcactgcaacctccacctt

SEQ ID NO: 370589 - DNA, 201 bp, Homo sapiens
ttttctgtattcagattaattttctttctgtactaaggaataaaaaacatactactgtgttgtgctgtttcttttcactgatcacctttaaaatccttgtyttggccacgcatggtggctcatgcctgtaatcccagcatttggggaagctgaggtgggaggattgcttgaggctaggagtttgagaccagcctgggcaac

SEQ ID NO: 370590 - DNA, 201 bp, Homo sapiens
gaaggtcctggtgctgtctgcaccatgcccccccccaccccccacccccctccccccaccatctcttccaggtagcatttcacaccccttatttgctgtgyctcctcccagctgctctaggagctccccaagggtggggctaggactgcctgtcccctccgtatggcaccaaggaagccaggaaacttctaacagaggaat

SEQ ID NO: 370591 - DNA, 201 bp, Homo sapiens
ggaggataatttggcaatattttcagagttaaaaatgcttatgctttgtaaacctgccatttgtagtctctggatctgccctagggagatagtctgggtttgtttttttttttgtgaatgtcttccacagggagatactcttaacacagagtggcatgtacaagcatgttcaatgcagcaccactgttaatagcaaacagc

SEQ ID NO: 370592 - DNA, 201 bp, Homo sapiens
gtactcctgtttccagctgcctgtttggatgccgtggggatgctgtcatccctatgcctttgcatcccccttgcccaagaaatcctactttgaattgcccsgtggcctggctagccggtactaagcacttgctgggtacacaccctgttaaagcacattacatgtcccgtgtcactgaatcctctggcccgtgacaggttt

SEQ ID NO: 370593 - DNA, 201 bp, Homo sapiens; identical to SEQ ID NO: 80189

SEQ ID NO: 370594 - DNA, 201 bp, Homo sapiens
atacacacacacactatatatatgccatatataatatctggtggccagttgtgtgaaatacattcattttctctgttgggtagattgatttgacctaactwtgagcctcaatctcaagaggtaaagtggtagtttgccaatttaatgctgcacaaaggattatttaagtaataataacaataatatcacattgtattttac

SEQ ID NO: 370595 - DNA, 201 bp, Homo sapiens
cggcccctcccatcatcatttaagcaatcagagcttctcctccttcccacaaaacaccagcaacttcagccagagttcctcctcacgtcccccgcagctgygtccgcacctcttttgccatggccagacccttgcgagtgagccgtgctcgctcattttctccacttcttcaccgcctgtccacggggctggaattggcct

SEQ ID NO: 370596 - DNA, 201 bp, Homo sapiens
cttgctttgtgtcacctcctacccgagattgtgattgtgtcacctcctaccgagactgtgaactcctaccctacaatgagtaggtctggagttctacttgrgcgtctttattttataaaaagttcccatggtgattctggtgaaccaacagagggttaagagtcgtttatctagggagtaacagagcaatcataaattgtg

SEQ ID NO: 370597 - DNA, 201 bp, Homo sapiens
atatatatatatatacacacacacacactatgtatatacacacactgtatatacgcactatatgcactatatatacacacagtatatgtatatacacacactatatatacagtgtgtatatatatatatactgtgtatatatatatatactgtatatatatatatactgtgtatatatatatatactgtatatatatatat

SEQ ID NO: 370598 - DNA, 201 bp, Homo sapiens
taaatatattaagctaatcatgtggaagttaaccagaggccccttcacatttgtcatgtggcgtctgcagtcatttgctctgaatttttgccactttgccrcagttggggcccttgctaatgacagtgttcagcagattgacagattcttgtgtttatcatcttccctgggtgggatcgtgtttatttgcagaagtatttg

SEQ ID NO: 370599 - DNA, 201 bp, Homo sapiens
tgagttagtgtctctgcttatgtggaggttagcatgtattaccaaaacagaatgatgctttctttttaagtaaatttaaggcattgtttgcctgttgcatrttattttatttctgattagatatccaaacattgaatttttttttttttttttttttttccccctgagatggaatcttgttctgttgcccaggctggagtg

SEQ ID NO: 370600 - DNA, 201 bp, Homo sapiens
aggcttcaggaattcatttattttcctttttcttaaaccctctaatgctctaggccccagggccttgcaggcattgtgagatctgagttggggatcacacrgcagtgctttctgttctgttctctccctctctaggcatcatggccatcctgttctcaggcatcgtgatgtcccactacacgcaccataacctctccccag

SEQ ID NO: 370601 - DNA, 201 bp, Homo sapiens
gggaagatgataaacacaattctgcctgtttactgaacaccttcattagcaagggtcccaactgtggcaaagtggcagaaattcagagcaaatggataccrtgatgtatccagatcctggagttgatgctgccagggaaaagcatccactagatctgaatgtcttctaaatgtgctcatttggaaagatcacacaaatatt

SEQ ID NO: 370602 - DNA, 201 bp, Homo sapiens
gaatggctttattcaccttcctcggggaaggaccagggattttagattcattctcaggaataggtgagaagagccaaagactcacccatgggcatgagagmatgttctctgcagcctcatggttagtggtaggcccagaggaggccaagggcagtaggcaagacaacggatagagaagagtagtgaattccagctatgtgg

SEQ ID NO: 370603 - DNA, 201 bp, Homo sapiens
gcggaggttgcattgagctgagatggcaccattgcactccagcctgggtgacaagagtgaaactccatctcaaaggaaaacaacaacaaaaacactcttgmgcttcaaagagccctaaaggagcaggtaaagaagtctcctaccctctcattttccttcgcccaccatgtcaggtgtgtcttacaggaagcatggctggaa

SEQ ID NO: 370604 - DNA, 201 bp, Homo sapiens
attgccattttcaatgcacttcatgtggaccccgtgctcaacatgctggtctttggagaaagtattctcaacgatgcagtctccattgttctgaccaagtragtacgggggcagagaacagacttttttcatgtgacagaactaaaggtccttgtaacaaaggggcagatatttccacacagcatgtgtacagttgcttgt

SEQ ID NO: 370605 - DNA, 201 bp, Homo sapiens
ctgctgtcgatccagtggccactattgccattttcaatgcacttcatgtggaccccgtgctcaacatgctggtctttggagaaagtattctcaacgatgcrgtctccattgttctgaccaagtaagtacgggggcagagaacagacttttttcatgtgacagaactaaaggtccttgtaacaaaggggcagatatttccac

SEQ ID NO: 370606 - DNA, 201 bp, Homo sapiens
ttcctaacaactcagtttagagtgggcctttcatactccacccacaaaacagcagataagtggggaaaaaatacgctaccttctgtaattaattcagctcyagcgtgtagtattgctttctgttaaatatggcctttgactttaatgctttaatatgtggaccaagtgacacacattacagaatctccccttccctctgtc

SEQ ID NO: 370607 - DNA, 201 bp, Homo sapiens
tggtactgttctattctctctctgtgtatttatttttggtaaggatttctgccatagaatcttactctgagttaatttgtatctctgaaatgaatcaaaastatcctaaagacttttgaagatccctagtggggcattgctgattggaatgatttagtttaagcttgggagggagtaactctgctcagctaactgccctgc

SEQ ID NO: 370608 - DNA, 201 bp, Homo sapiens
  misc_feature (1)...(201): n = A,T,C or G
taggtttgccctttggttgttcttaattttagtaacattgatcattatgctggcttttttgtaattacttggctatcagtggagttatttatattattatnttatatatcccattactttttaatttttttattagatacaggttgatgcctttacatctgagtttttgcaaaagcataagtctcatgctgtttcaagtga

SEQ ID NO: 370609 - DNA, 201 bp, Homo sapiens
actgaccaagccggtgcctacgaggagggcgggatgggcgggcctgggcccaggtgggccttgctttcccctggagatcggtccctcgagctgggaatctmctgcccagcgcaggcccggagagctgtcttgcggaaaatacaaaccatatttactttcccagttttcggtaatctcatggttactgagccctcttccgcc

SEQ ID NO: 370610 - DNA, 201 bp, Homo sapiens
agcttcttttgctggttggccaggactgaccaagccggtgcctacgaggagggcgggatgggcgggcctgggcccaggtgggccttgctttcccctggagrtcggtccctcgagctgggaatctactgcccagcgcaggcccggagagctgtcttgcggaaaatacaaaccatatttactttcccagttttcggtaatctc

SEQ ID NO: 370611 - DNA, 201 bp, Homo sapiens
tggcagagcagaaagacagaaggcttgtatgttgtcaaggacactgctggagcagttaattaaccagtcctggaactgacctccctctggatctcatgacrtggggcaatacatgttctgtatctgccatttctggttgggtattttgttacaacagaaataatgctgttataacttcatgaactgagaaaagcagatttc

SEQ ID NO: 370612 - DNA, 201 bp, Homo sapiens
agcggaagccggaagcaaaagcgggtcctgctagccccgcggctccgaactcggtggtcctggaagctccgcaggatgggggagaagatggcggaagaggmgtgagtgggctttttcccgggcggcggaggcggcggggctgggccccggcgggtgacagcgagcgcctcaggccgccctccggccccggaaggcggagct

SEQ ID NO: 370613 - DNA, 201 bp, Homo sapiens
ggcctgggcccaggtgggccttgctttcccctggagatcggtccctcgagctgggaatctactgcccagcgcaggcccggagagctgtcttgcggaaaatmcaaaccatatttactttcccagttttcggtaatctcatggttactgagccctcttccgcctcctccaggaagtcgtccgggttctccacacccacctcct

SEQ ID NO: 370614 - DNA, 201 bp, Homo sapiens
ctcaggtgtgccatgcatacacttacacacacacacacaaacactcacaccctggtactgttgagttaaatatatgtaagaggatagagaagggcctgatrtaatatttcccaaactttccaagatagttggttaccttgggctaggaagagagagaacgaagatgggggtggaagtggggtatgatctaaaggggctttt

SEQ ID NO: 370615 - DNA, 201 bp, Homo sapiens
tggaggtacccaggccccagctgtagggagagctgaggttctgcagcctgcccacctcttcttcctacaagccaccgcccctgccaccaggctgccttccygccctgtcttcaccctcaggacccctgtgcaaagctaggccctctgaccgaagcagaggctgctgtaggctccagcccagagcatcccctgctgatcacc

SEQ ID NO: 370616 - DNA, 201 bp, Homo sapiens
tcaattttaggacatttttatcacctcaaaaagaaaccacatgccctttagctctcctccctgtccctgggcaaccattactgtccctgtagatttgtctmttgtggacatttcatataaatggaatggtaaaatatatggtcttttgtgtctggcttctttcacttggtgtattttcaagattcttccatgttctggcag

SEQ ID NO: 370617 - DNA, 201 bp, Homo sapiens
gccctttggttgttcttaattttagtaacattgatcattatgctggcttttttgtaattacttggctatcagtggagttatttatattattatgttatatrtcccattactttttaatttttttattagatacaggttgatgcctttacatctgagtttttgcaaaagcataagtctcatgctgtttcaagtgaacatggg

SEQ ID NO: 370618 - DNA, 201 bp, Homo sapiens
tatatatatatatatacacacacacacactatgtatatacacacactgtatatacgcactatatgcactatatatacacacagtatatgtatatacacacactatatatacagtgtgtatatatatatatactgtgtatatatatatatactgtatatatatatatactgtgtatatatatatatactgtatatatatata

SEQ ID NO: 370619 - DNA, 201 bp, Homo sapiens
gtgcacgcttgtaatattagcttgtctctctctctctctctctctctctctctctctctctctctctctatatatatatatatatatatatatatatatayacacacacacactatgtatatacacacactgtatatacgcactatatgcactatatatacacacagtatatgtatatacacacactatatatacagtgtg

SEQ ID NO: 370620 - DNA, 201 bp, Homo sapiens
gtaattaaagttgtgaatttttatttttgctttgtttttaatgaacacttgtctttcagaataggattgtgtgataatgtctaaatggcaaaaacaaaacrtgattttgcacaattaacaaaactactgcaagaaaaataaaacatttcttggtaacaaaaaaaattaatacatttgaaacatttttcatgtaaccttact

SEQ ID NO: 370621 - DNA, 201 bp, Homo sapiens
atgagccaccacacccagttcaaacaatgtaaatctgatggtgttttaaaaattgctgttattaggtaacttgctaattcatgaataaatgaactcaagtraattaagggaaattagcccatagtttattctagacctcagaactcctgacctggaattcatttgccactttttgttactcttttagttaattcaaatgaa

SEQ ID NO: 370622 - DNA, 201 bp, Homo sapiens
acgaggaggtggctgtgtgtgcacgcacacacacgaggaggtggctgtgtacacacacaaacacacacacactctctctctctctctctctctctctctcygtctctctctctctcaccccaggatagaaactgcccagaaacagctgcctggctttttttcttcttccaagcttgtcttatctcaaaccccttccagtca

SEQ ID NO: 370623 - DNA, 201 bp, Homo sapiens
accacgcccagctaattttttgtatttttagtagaaacagggtttcaccatgttagccaggctggtcttgaactcctgacatcaggtaatccgcctgcctyggcctcccaaaatgctgggattacaggcgtgagctaatgcaccccgcctaattttatatatatattttttagtagagacggggtttcttcatgttggtca

SEQ ID NO: 370624 - DNA, 201 bp, Homo sapiens
atttccaaaaatgtattccttggaaataaaatattaatgatggtttggtgaaaatggctccatagtcaagcaaggcatggggctcacacctgtaatcccarctgcttgggagactgagaggatcacttgagcccaggagttcaaggctgcagtgggctatgatcttaaaaaaaaaaaaaaaaagaaagaaagaaaaacaaa

SEQ ID NO: 370625 - DNA, 201 bp, Homo sapiens
tgtatttcattttagtgtgtttgcctgagatgtgagtgagaaattcatgtgatagatgtctcacgtctccctaaaatgtacaaaacgaagctgtgccccarccaccttgggcacatgtcgtcaggacctcctgaggctgtgtcatgtcttaaatttgagtaatctttctcatatcttaaatttatgttaaagtttacattt

SEQ ID NO: 370626 - DNA, 201 bp, Homo sapiens
cagtgaaataatggatctaagtgggaagtaacagccttaatagctgctaattccccaaagggagagaactcgacataatatgcctcctgatgagagaataygcatcaagtattcttaccacagagatcagacccaaatccaagcaaaccccaacagccagctaccatgcaatacatgcacacattcaacaccctttcacga

SEQ ID NO: 370627 - DNA, 201 bp, Homo sapiens
gtttattggtgctggtagaaaatggtagcctcaagccctcagttgacaagtgtggccagagagaaccccactctcaatcctttgtagaccaggtcattccygccaggctctgtgctaacggaggagagtaggttattagtcccatttaagagccagagaaattaaggcagtggagagtagcagggctactggtttaaaaac

SEQ ID NO: 370628 - DNA, 201 bp, Homo sapiens
aaaaaagggtgggggggtagtgcagtgggccctcaatagccacaggttccacatctgccaaccctatccctggatgtcagtgatggtccacacctttttakctttggtgctgtgaaggggactttacatggcttattttcactcaccctcctaacagttctgtgagtggctactattagtcccactgtacagaagcggaaa

SEQ ID NO: 370629 - DNA, 201 bp, Homo sapiens
aaaaaattagccaggcatggtgatgcgtgcctgtagtagtcccagctactcaggaggccgaggcaggaggatcacataaacctgggaggcagaggttgcartgagccaagatcgcactattgcactccagcctgggtgacaagagcaaaactctgtcccccccccaaaaaaaagggtgggggggtagtgcagtgggccctc

SEQ ID NO: 370630 - DNA, 201 bp, Homo sapiens
cttgaattcctgacctcgtgattcacccgcctcggcctcccaaagtgctgggattacaggcatgagccaccgcgcccggccgattttcacccttttatacrtggaaagtttgccagatagtcactgtttccacaaaatggcagaagtgaattaaaactttgcttttaaagtttgacttgcaattagtatatcttggcagct

SEQ ID NO: 370631 - DNA, 201 bp, Homo sapiens
tatagaaaaatccaaaatgtttgaatttgttgccatccttaaagatggagatttcctgtaaggaaaaccagaaggaagactggtccatgttagatcctcartcccacagggctactgtcagcctttgtagacaggctgagccgagactgcgcctctaatcccagctgcttgggaggttgagacaggagaatcgcttgaacc

SEQ ID NO: 370632 - DNA, 201 bp, Homo sapiens
tttttaatggttctttccccagcttcttgtttcatccgacatatttactgatcagtatcagtcaaagactcaaggggactttacagtagatgtccaagagytctctttctgtgcagcttccccgactcaacaggacagccctcttaaagcctcagcctcaggcagtcagctcagcagggggcctagggaaagagtggccac

SEQ ID NO: 370633 - DNA, 201 bp, Homo sapiens
tgttcatgttttcttctatattctggagcatatgaaacatagaaatttctgatagctgttttaatgtccttgtttgctaattccgtcatctctgtcaactstaggtctgttttgttgttgatttttcttgtgcttataggtcacattttcttgctctttgcttgttattaagttttgattggatgtcagtcattgtgaagt

SEQ ID NO: 370634 - DNA, 201 bp, Homo sapiens
acaggaatggcttttctaatcatttccctgatttctgctctttcaaacagggtaacttctttcaaaatattggttccatcaccctgtttgctgtttttggracggcaatctccgcttttgtagtaggtggaggaatttattttctgggtcaggtaagaaaatcatctttgaaacactttgaaagtcttacattcttagagc

SEQ ID NO: 370635 - DNA, 201 bp, Homo sapiens
agggcgggatgggcgggcctgggcccaggtgggccttgctttcccctggagatcggtccctcgagctgggaatctactgcccagcgcaggcccggagagcygtcttgcggaaaatacaaaccatatttactttcccagttttcggtaatctcatggttactgagccctcttccgcctcctccaggaagtcgtccgggttct

SEQ ID NO: 370636 - DNA, 201 bp, Homo sapiens
aggccccagggccttgcaggcattgtgagatctgagttggggatcacacggcagtgctttctgttctgttctctccctctctaggcatcatggccatcctkttctcaggcatcgtgatgtcccactacacgcaccataacctctccccagtcacccagatcctcatgcagcagaccctccgcaccgtggccttcttatgtg

SEQ ID NO: 370637 - DNA, 201 bp, Homo sapiens
cagtcccagtctgaatcatgagcttgagcttgttgtacatgctgctattttaagacttaataaggcatttcagaagtcatcatttgcttctattttgagcsttttttgactttcttttagtctttatggtaacagctgtacatttgtaagaatacatttaggcattctttggaataggcattttgacaaaaaatcagactg

SEQ ID NO: 370638 - DNA, 201 bp, Homo sapiens
atttttttttttggtgggggaatctctcattctgcttgattttattatcaggtagttatttaaacattatatgtttccactaggccaggccctgagagaayaattattttggctctttattgattaatttatttcttaattacacaaattccatgcccttaagatactcattttctatttacaggaagaagaaatgtttcg

SEQ ID NO: 370639 - DNA, 201 bp, Homo sapiens
tactgcatttgtactggatgtgttacacagtctgcattagcttcatccaagaagcttcagcttgaagagccagatgttttcacctaagacttagtttgttsctatcaacaggtgcttgtactatttggcagagcggtaaacattttccctctttcctacctcctgaatttcttccgggatcataaaatcacaccgaagatg

SEQ ID NO: 370640 - DNA, 201 bp, Homo sapiens
tatttttagtagagacggggtttcactatgttgaccaggctggtcttgaactcctgacctcagcctcccaaagtgctgggattacaggcatgagccaccaygcccagccaattcacccattttaaatgtacaacaatttttagtatgttcagagtcgtgcagccatcaccacagtcaattttaggacatttttatcacctc

SEQ ID NO: 370641 - DNA, 201 bp, Homo sapiens
gtttaagcagagagcctagtgttagaaatttataaggtgctttttcttaatatatacaagtttgtgtgacagagagtaaatattgggctctttttggctcrcagagtggagccaggagttagcaatgagtctcactctgcaaatcctgctgggtgtgagctgtgttctaaaccttgtggcagtgttaaatatattaagcta

SEQ ID NO: 370642 - DNA, 201 bp, Homo sapiens; identical to SEQ ID NO: 80193

SEQ ID NO: 370643 - DNA, 201 bp, Homo sapiens
gtgtgggatggtgaatctgtaacccctactctctgtgctctgtccctgcaggggacaaggaccacatgtgcagtgtcaaaagtcgcctgtggaagctgctrtccccagccaggctggccaggcgggcccaccggagcaaatggctggagagttacctgctgcacctggaggagatgggtgtgtcagaggagatgcaggcac

SEQ ID NO: 370644 - DNA, 201 bp, Homo sapiens
agacggggcctctcctcactctgtgcaggtccacacgatgggaccagatctccagcccacatccctttttccttgtgtcactctcatgtgaggtcatgtcttttttttttttcttttctttttttaagacacagagtctcactctgttgcctaggctggagtgcagtggtgtgatcatagctcactgcagcttcaaactcc

SEQ ID NO: 370645 - DNA, 201 bp, Homo sapiens
ctgcaggggacaaggaccacatgtgcagtgtcaaaagtcgcctgtggaagctgctatccccagccaggctggccaggcgggcccaccggagcaaatggctrgagagttacctgctgcacctggaggagatgggtgtgtcagaggagatgcaggcacgggccctggtgctgcagctgtgggccacacaggtgggtgtgaatg

SEQ ID NO: 370646 - DNA, 201 bp, Homo sapiens
ttgatagacatttgagtagtcccccatttggagctgttaggaagaggttgttgtgaacattcttgtacgtatctttcagtgcacacgtgcatttcttttarctgttggcctgttttttgttttgtttttgtttttgtttttttgagacagagtcttgccctgttgcccaggctggaatgcagcggcacaatctcggctcgc

SEQ ID NO: 370647 - DNA, 201 bp, Homo sapiens
tccccagccaggctggccaggcgggcccaccggagcaaatggctggagagttacctgctgcacctggaggagatgggtgtgtcagaggagatgcaggcacrggccctggtgctgcagctgtgggccacacaggtgggtgtgaatgtgcaagtgggtgtgtgcaggtgtgcatgtgtggttgcgatatgaacgcatgtgtgt

SEQ ID NO: 370648 - DNA, 201 bp, Homo sapiens
ctttcctgggactcagtggtagcaccctctctaaaccttgccacagtccccactactccctattgcctctccagcatgcagctattctagttaccactgtrcttcctctgctgttttttcctgtgttgagaaataattctgtgaatttgtgtctatttcaaaaaccagaaaacaaaaactagggcaaggccacgtgctttt

SEQ ID NO: 370649 - DNA, 201 bp, Homo sapiens
atgaaccagttattccaaggctacttgggcagcacgacacgtggagacttcaggagaagtggccttagcccaggggctcacaaaaagatgaggcacaaggmaaggccctgcacctccttagactcacagagctcaaatttgcaagtctcctctttgactagagaagccgggatgggctggggagaggagggaatggttggg

SEQ ID NO: 370650 - DNA, 201 bp, Homo sapiens
gagcatggcagccgttttgtgacgatgtggacaagagactctcacagaaatcaaacaaggaccctgagatagctaggctgttgctgagacaggtcctggcwtcacctacttctggattttgtgttaaatgagaccaataaatgtcataccttttttatactttactaagaagccacagtggacaagagcttgggttctgag

SEQ ID NO: 370651 - DNA, 201 bp, Homo sapiens
ctgtttcccactgggttggctccagtctcaggctggcagtagctgttggcagctcaaggctgacttcctcctggctctgtgagactctgaatctcttacartgttcccaccaagagtcccaagactgtgtctcattggctttctttgggtcatgtgtccatcctgaaccaatcacagggctcagagggatgctctgattgg

SEQ ID NO: 370652 - DNA, 201 bp, Homo sapiens
tgaaggaagtgaggggtgaaccatgtaaatatatagaatgaagtttcccaggcagggagcagcaagtgcaaaggccctgaggcaggactaagggtgacacrgtggggaggcagagctgccggaccacacaggtccctgtaggccatggggagggctttggcttttactgtgagtgagacaggtgcctgctgtagggctctg

SEQ ID NO: 370653 - DNA, 201 bp, Homo sapiens
gcccaggaaggcctcactgaaaggtgacatctgagcagagactgaaggaagtgaggggtgaaccatgtaaatatatagaatgaagtttcccaggcagggarcagcaagtgcaaaggccctgaggcaggactaagggtgacacggtggggaggcagagctgccggaccacacaggtccctgtaggccatggggagggctttg

SEQ ID NO: 370654 - DNA, 201 bp, Homo sapiens
gctgggcaggagctggggacaagatgtcctctgaggttgagtcgttgacagcgtccagaattcaggcaggtgggaaaacttttcaagggccttttgggagyggagccaagagggtacttggcctaggagtttctggcacaggctctgtgacctcccagcctgagtttgaatcctgattttgacacttcctggcaagtcagt

SEQ ID NO: 370655 - DNA, 201 bp, Homo sapiens
gcaacatagtgagattccacctcttaaaaaaaatcctttgagtacttaccgtagacctcaaagattctgtgttgtgtcgattaccatttggggggtcaggrggacagggggcagagagtcaaggaaacatatacaaggtgattttagatgatgatatgtagagtatgaaacagggctgtgaatagagagactttcgggtct

SEQ ID NO: 370656 - DNA, 201 bp, Homo sapiens
atttcgaacatttgctttcttcccacgaccacatttcaggagggggctttatgcagactccccctttaactacacagctttgctcatctgcagggccccakgttgagccaccaagctcagttttccagaatcttctcttcctcactcccatatgcactgaattccttgaatctctacagtatatgatgtttcactggaaat

SEQ ID NO: 370657 - DNA, 201 bp, Homo sapiens
agtgactgatagaatttgaagatacaaagcatatagggaactttttgcttcccaaactacatcaagaatgattatatttggaagcaaatctttagatatcrcaccagttagctattgttgcataacaaacatccataacaactcatcagcggcatacacccatcagcatttatttaactcacgggtctgtgggtctggctc

SEQ ID NO: 370658 - DNA, 201 bp, Homo sapiens
gaggcaggagaatcacttgaacctgggaggcggaggttgcagtgagctgagatcgcgccattgcactccagcctgggcaataagagcaaaactccatctcaaaaaaaaaaaaaaaattgtctaacttcttcttgggattgcagcccagcaagtctcagcctcattttacccagctcctattcaacatggagtcactctggt

SEQ ID NO: 370659 - DNA, 201 bp, Homo sapiens
tggccttgaagtaggtattttgggccacagggcagttttggccatgtcctgaggctggagatagacactggtcatgcctgggtgtttggcagcagtgggarcccaggcctactggcccctctgtcttggcccgagctgtgtccctggcagagacgagtcagctctgccctcataatggcataacaggggcccttctccttg

SEQ ID NO: 370660 - DNA, 201 bp, Homo sapiens
gaaaaaatctttttctcaaaaaacaagaacctaggagagaaaaaagaaagcataaaggcatacacacacacacacacacacacacacacacacacacacamacacatacacatgcatacacacacatacacacgcatacacacacacataaacacacacacatacataaacactgctgacaaaaagagttaaactctgtaa

SEQ ID NO: 370661 - DNA, 201 bp, Homo sapiens
ctggagatagacactggtcatgcctgggtgtttggcagcagtgggaacccaggcctactggcccctctgtcttggcccgagctgtgtccctggcagagacragtcagctctgccctcataatggcataacaggggcccttctccttgcaggggaatatgggtcccgctgccttctggctcctgctcttccttctcaagaat

SEQ ID NO: 370662 - DNA, 201 bp, Homo sapiens
caggcacgggccctggtgctgcagctgtgggccacacaggtgggtgtgaatgtgcaagtgggtgtgtgcaggtgtgcatgtgtggttgcgatatgaacgcrtgtgtgtgtgcatgtctgtgcacctgtgcaggtgtgcacatgactatgcctgtgtgtgcatgtgtatgtaggtgtgcatttgtgagtgtgtgctgatgtg

SEQ ID NO: 370663 - DNA, 201 bp, Homo sapiens
actgcgtcatcatggacccccaaagccctccccaacatggactcctgtcttccagggtccatcagtgtgtcctccgacctagggtctccctaagcctcctrtcttcacacacctggcatctccatactccagcctcagctaggggtcaagtgacagaaaacctaacttcaattgactaaggtgaaaaggtactttgagaca

SEQ ID NO: 370664 - DNA, 201 bp, Homo sapiens
agatggtctgtgcttctttgggaggctgtggcaggaggactgctcgaggccaggagtttgagatcagcctgggaaacatagggagacctccatctctaccaaaaaaaaaaaaaaaacctagctgggtagcacatgcctgtggccccagctccttgggaggctaaggcagaaggatcacttgagcctaggaggtcgaggctg

SEQ ID NO: 370665 - DNA, 201 bp, Homo sapiens
gatggtctgtgcttctttgggaggctgtggcaggaggactgctcgaggccaggagtttgagatcagcctgggaaacatagggagacctccatctctaccaaaaaaaaaaaaaaaacctagctgggtagcacatgcctgtggccccagctccttgggaggctaaggcagaaggatcacttgagcctaggaggtcgaggctgc

SEQ ID NO: 370666 - DNA, 201 bp, Homo sapiens
aatcccaactactcaggaggctgaggcaggagaatctcttgaacccaggaggtggagattgcagtgagccaagattgcgccgttgcactccagcctgggcracagagtgagactctgtctccagaaaaaaaaaaaaaaaaaaaaaagaaagaaagaaagaaaaaactgcagggattgagggaaaagggggactggggccaa

SEQ ID NO: 370667 - DNA, 201 bp, Homo sapiens
cggtggtgtgggagcctcgcaccaggctcgacttccatgcctatgccatcttcctcatggagaggatttttgatgtgcagcttccacattacagccccagwgatgaaaaggccaggatgaaactgtgagtggctggagatggcacctgtgggagggccagggtgggcgactcatttctactcatgtggcccaagttattct

SEQ ID NO: 370668 - DNA, 201 bp, Homo sapiens
tttgtttcctgcctcaggactcttctccacagagagctccaggcactcacagaagccatgtataccaacctccatgcagtgctgttgggcgatgctacagmagcaggcagtggctggcacgagatgggtctcctcgacttctcctacagcttcctgctcaggtgaggctgtgcagcccccaccctcctgctggggcccggc

SEQ ID NO: 370669 - DNA, 201 bp, Homo sapiens
acccaggaggtggagattgcagtgagccaagattgcgccgttgcactccagcctgggcgacagagtgagactctgtctccagaaaaaaaaaaaaaaaaaaraaagaaagaaagaaagaaaaaactgcagggattgagggaaaagggggactggggccaacactcaaaaacctcatcagtgacataataaaaaaaaaagaga

SEQ ID NO: 370670 - DNA, 201 bp, Homo sapiens
agaagccatgtataccaacctccatgcagtgctgttgggcgatgctacagaagcaggcagtggctggcacgagatgggtctcctcgacttctcctacagcytcctgctcaggtgaggctgtgcagcccccaccctcctgctggggcccggcactttgacctgtgtcagccatgagcagtggccaagggaaccgtgaggact

SEQ ID NO: 370671 - DNA, 201 bp, Homo sapiens
ctacttgggaggctgaggtgggaggatcacttgagcctggtgagacagaggttacagtgagccaagatcacgccactgcactccagcctgggtgacagagyaagactccatctcaaaacaaaaacaaaaacaaaaaaccaatacatttttttagccctcacatggctgtttcagtagttagccatttccctctgacagatg

SEQ ID NO: 370672 - DNA, 201 bp, Homo sapiens
ttttcatacctcctcagtctcccagatgttttaaaaattactcttacataaaaattactcttacatacatagacatgagcttgtagctaatacagagccaygtaagagagagttagtttacattcgtgtctgaaaattccggaaaccttgggaactttttgatttttaaacaatatggtagttgagttttcaaacaataag

SEQ ID NO: 370673 - DNA, 201 bp, Homo sapiens; identical to SEQ ID NO: 80220

SEQ ID NO: 370674 - DNA, 201 bp, Homo sapiens; identical to SEQ ID NO: 80221

SEQ ID NO: 370675 - DNA, 201 bp, Homo sapiens
ggacccctgaccctctgtctgccgcccccagagccggctacctgactctttacggaattgaggcgctgccacgcacccatgaaagccaggcccaggaccgygtccactcagctgatgtcttccacacctttcgccagctcgaccggctgctccccaaactggcccgtggctccctgtcagtgggtaagcaccatgggggcc

SEQ ID NO: 370676 - DNA, 201 bp, Homo sapiens; identical to SEQ ID NO: 80224

SEQ ID NO: 370677 - DNA, 201 bp, Homo sapiens; identical to SEQ ID NO: 80226

SEQ ID NO: 370678 - DNA, 201 bp, Homo sapiens
gaatctctgtgtgtgtgtgtgttcctttttgtgttttaaggtttgagttgctttaaaagtttttacaagtagttcgtgctgattataaaaaattcaagccrtatagaataatttacagggaagaataaaagagcgctccactttctccccagcctcagcccaccacttccctctacagaggcaaccaccatcactagcttg

SEQ ID NO: 370679 - DNA, 201 bp, Homo sapiens; identical to SEQ ID NO: 80230

SEQ ID NO: 370680 - DNA, 201 bp, Homo sapiens
gcatgtgggtatatttatgatatgtgtgtgcatatgtgtagactcggcgtgtctcagctcttttaatgctcacaatcgctctaggaggctaggactttacmtattccatttgacagatgagaaaactgagacctggagagcctgagtcatttgcccagaggcctgtgttggggtcaggacagggctggtcccagagtctgc

SEQ ID NO: 370681 - DNA, 201 bp, Homo sapiens; identical to SEQ ID NO: 80233

SEQ ID NO: 370682 - DNA, 201 bp, Homo sapiens
gctgggattacaggcacgcaccaccacgcctggttattttttgtatttttagtagagacagtgtttcgccatgttggccaggctggtcttaaactcctgayctcaggagatctgcctgcctcggcctcccaaagtgttgggattacaggcatgagccaccacgccctgcctagcctgtacttctataacttagatatatca

SEQ ID NO: 370683 - DNA, 201 bp, Homo sapiens
tctttcaggttaaattttattttattttttttgagacggagtcttgctttgtcgccctggctggagtgcaatggagcaatctcagctcactgcaacctccycctcctgggttcaagcgattctcctgcctcagcctcccgagtaactgggactacaggcatgcaccacgaccatgcctggctaatttttgtattttcagta

SEQ ID NO: 370684 - DNA, 201 bp, Homo sapiens
aggagagaaaaaagaaagcataaaggcatacacacacacacacacacacacacacacacacacacacaaacacatacacatgcatacacacacatacacaygcatacacacacacataaacacacacacatacataaacactgctgacaaaaagagttaaactctgtaaaatatttgaggagatttattctgagccaaata

SEQ ID NO: 370685 - DNA, 201 bp, Homo sapiens
ggctgattccgtgtgcaggggccgtaggaaccactgggcggcgccattccctgggccatgtgcccccaacttccctgatgagcagaatcctctcaggcccytcttcataacgtaggtccctcagccccatccaggtccataggaatccaggtctccaggggagagcttggaaaactgcatgtctgacaagtgtcctgagaa

SEQ ID NO: 370686 - DNA, 201 bp, Homo sapiens
ttatttaataatatagcgtttattaggactgtgtcagtcatctctgtgctttagatgttaataacgcatttgatctgtatataaccctctgtggtgggtamttttattatcccaatttacaggcaagaaaactgagatgctgagatgtgaggtgacttgttcaaggtcaggcactctgctacagcactgggcctcttaact

SEQ ID NO: 370687 - DNA, 201 bp, Homo sapiens
tgatggccctactctctccccagccttctgatatctccctagctcccaccttccctcacaacttctcttggggtcagacctggataccctcatgttcaaasgtctctgagggaccacagagaccacatgtcatcgtgtgtcctttttcaccttgctatgtgactgtgtgggcgaggcaggcaccctctctgagcctcttca

SEQ ID NO: 370688 - DNA, 201 bp, Homo sapiens
ccatgcagatagcgtgctgagtgagagcctcaggcttacagctgcccccttcatcacccgcgaggttgtggtggacctggccatgcccatggcagacgggmgagaattcaacctgcgacgtggtgaccgcctcctcctcttccccttcctgagcccccagagagacccagaaatctacacagacccagaggtaaatggcag

SEQ ID NO: 370689 - DNA, 201 bp, Homo sapiens
ctagaacatgaggggatgttcattcacactgagtgctttgtgatagctcagccattttccttatttcagattgttataatgtcagtttctcaacacttttsccttgccccagactttgagaagaagtaaactttcacaattgctaacagattgggtgtttactgtgtgtcagaccctaaactacatgctcatctatccatc

SEQ ID NO: 370690 - DNA, 201 bp, Homo sapiens
gctaatacagagccacgtaagagagagttagtttacattcgtgtctgaaaattccggaaaccttgggaactttttgatttttaaacaatatggtagttgarttttcaaacaataagctcactgtatttttcttcaacctccagacatcttttcagctgaaatttacaactgtgtagtcaatcatttgccttaaaacaagaa

SEQ ID NO: 370691 - DNA, 201 bp, Homo sapiens; identical to SEQ ID NO: 80236

SEQ ID NO: 370692 - DNA, 201 bp, Homo sapiens
ctgtgcagtgtaaccaaaggaaattggcattttctttttaaaaaatattttaatttcttttattttacattacaaaagtaatatatatcatagaatataargaaatacagagaaatatatacttaaatgtaaaaaatatgtatttcccttcttctccagttctacagagttctctgaccaaggtttggagtgtgccttgcg

SEQ ID NO: 370693 - DNA, 201 bp, Homo sapiens; identical to SEQ ID NO: 80237

SEQ ID NO: 370694 - DNA, 201 bp, Homo sapiens
cagatcctacacaaggagcagagaggccttagacttagatgcaagatacccctttcttggcttctaatcatatcctcagtcatggctcagtgtagactccrtatcatggaggctcagtataggggagcttccagcttctgccacactcttccagacggggcctctcctcactctgtgcaggtccacacgatgggaccagat

SEQ ID NO: 370695 - DNA, 201 bp, Homo sapiens
aaattggcattttctttttaaaaaatattttaatttcttttattttacattacaaaagtaatatatatcatagaatataaagaaatacagagaaatatatrcttaaatgtaaaaaatatgtatttcccttcttctccagttctacagagttctctgaccaaggtttggagtgtgccttgcgaattgttttcatggctttac

SEQ ID NO: 370696 - DNA, 201 bp, Homo sapiens; identical to SEQ ID NO: 80238

SEQ ID NO: 370697 - DNA, 201 bp, Homo sapiens
tgaggctcagagaggtgaagtgacttgctcaaagtctactgctagtaagtggcaggactgggatttgaacccaggtccactgacttcacagcgcattctcyttcatctaagataccaaggctgataagaccctgtgtccgcccctgcagagttcacacagtccaatggcgatcttcagtgatctgtctccaggaggaatac

SEQ ID NO: 370698 - DNA, 201 bp, Homo sapiens
tcagctgaccgtagctacccgtctgcagctgctgccgcatgttcagaacttcatgttaggaactggccgaacttcactgttcccacttggttattttaatrcctgtggggccgagagcctcataaattatctcccttgaaccccaggagctttggccaccaggatcacaaacagattggaccaggggttatgacatctgcc

SEQ ID NO: 370699 - DNA, 201 bp, Homo sapiens; identical to SEQ ID NO: 80239

SEQ ID NO: 370700 - DNA, 201 bp, Homo sapiens; identical to SEQ ID NO: 80241

SEQ ID NO: 370701 - DNA, 201 bp, Homo sapiens; identical to SEQ ID NO: 80242

SEQ ID NO: 370702 - DNA, 201 bp, Homo sapiens
tgcctggccagccctgggtgtgggatggtgaatctgtaacccctactctctgtgctctgtccctgcaggggacaaggaccacatgtgcagtgtcaaaagtygcctgtggaagctgctatccccagccaggctggccaggcgggcccaccggagcaaatggctggagagttacctgctgcacctggaggagatgggtgtgtc

SEQ ID NO: 370703 - DNA, 201 bp, Homo sapiens; identical to SEQ ID NO: 80245

SEQ ID NO: 370704 - DNA, 201 bp, Homo sapiens; identical to SEQ ID NO: 80247

SEQ ID NO: 370705 - DNA, 201 bp, Homo sapiens
actgaggcaggagaatggcatgaagccgggagatggaggttgcagtgagctgagatcctgccactgcactccagcctgggcgacagagcgactccatctcaaaaaaaaaaaaaaaaaagggcaaacaagtgaaacaagtgggtgaccctgatgccgtctgaatggtgatccagtttgggttaaaataagcaaggctctcca

SEQ ID NO: 370706 - DNA, 201 bp, Homo sapiens
catacatttttcttggtgtgagcttgttctgggaatggggtcagaaaaggaccttcttcctatttcaggtatttaaatacaaccgattcctgaaccctgayggatcagagaagaaagacttttacaaggatgggaaacggctgaagaattacaacatgccctggggggcggggcacaatcactgcctggggaggagttatg

SEQ ID NO: 370707 - DNA, 201 bp, Homo sapiens; identical to SEQ ID NO: 80249

SEQ ID NO: 370708 - DNA, 201 bp, Homo sapiens; identical to SEQ ID NO: 80250

SEQ ID NO: 370709 - DNA, 201 bp, Homo sapiens; identical to SEQ ID NO: 80208

SEQ ID NO: 370710 - DNA, 201 bp, Homo sapiens; identical to SEQ ID NO: 80209

SEQ ID NO: 370711 - DNA, 201 bp, Homo sapiens
acccagccaaggatttagctgtgcctgcagatacctgtatgaattgagtgaattcaaaaagtgacattctttgctttccacaggtcaggaccctgtaaacracagggtatatgaagccagtttttccaaggtgcttttattagctctatagttcagccttattttctcaaagtagtctgaaaatatgtcattccagttaaa

SEQ ID NO: 370712 - DNA, 201 bp, Homo sapiens
ggaaaaaaaaaagaagggaaaacattgaaaacattcttttggagacttggagccaggagaatttttagaattcagtccaaattgtggaaaataataaaaayggaaaaacattagacaagtctagactctaataacaggtgtactatagttaattttgaaacatgacttttctctctccaattccccaattttattaaagac

SEQ ID NO: 370713 - DNA, 201 bp, Homo sapiens
gtaagcagataaacaaaaaagaaagaacgaacctggaaaactgatagaggccatattactctcaagtccgtatatcagtaggcaggtatgaaaatgatttstgcatataaagagattgcttttattttcttccaaagtttaagttcagtttatagggctttaagaaaagcacagcttaacttttagtgatttcacatcagg

SEQ ID NO: 370714 - DNA, 201 bp, Homo sapiens
gaatggttgggagaggcacttcctaggccctcaaatttcatctttggttctgctcccatccttcccagccttggccctcaaatctggccatttgctcctgyccacgagctgtcccaccctttgggttatactgggggcagccaggtagagggaaaaagggagcaggagacaggggcagagggaggtagagagggaggggga

SEQ ID NO: 370715 - DNA, 201 bp, Homo sapiens
gatcgagaccatcctggccaatatggtgagaccctgtctctactaaaaaatacaaaaattagctgggcgtggtggtgcacgcctgtagtctcagctactcrggaggctgaggcaggagaattgcttgaacccgggaggtggaagttgcagtgagccgagatcacgccactgcactccagcctggcgacagagcgagactct

SEQ ID NO: 370716 - DNA, 201 bp, Homo sapiens
atttgcaagtctcctctttgactagagaagccgggatgggctggggagaggagggaatggttgggagaggcacttcctaggccctcaaatttcatctttgsttctgctcccatccttcccagccttggccctcaaatctggccatttgctcctgtccacgagctgtcccaccctttgggttatactgggggcagccaggta

SEQ ID NO: 370717 - DNA, 201 bp, Homo sapiens
ttaacaacataataaaatgaaaccaattataacgatatactgtaatgaaaacaaaataagggttacctgaacacaagtactaccataccatgacagttgamgtgataactgagacagtggctcccaagtgactaatgggcaggtgtggtctacagtgtggatacaccggacagagggatgattcaccccccaggcaagatg

SEQ ID NO: 370718 - DNA, 201 bp, Homo sapiens
ggggattccatacacaaaaatctagatttccaacttcttctgaaaaatgggaagatctagcaatactttcctgggactcagtggtagcaccctctctaaaycttgccacagtccccactactccctattgcctctccagcatgcagctattctagttaccactgtacttcctctgctgttttttcctgtgttgagaaataa

SEQ ID NO: 370719 - DNA, 201 bp, Homo sapiens
tcagctcactacaatctccgcctcccgggttcaagctattcttgtgcctcagcctcctgagtagctgggattacaggtacacaccaccatgcctggctaattttttttttttttttttgtattttagtagagacagggtttcaccatgttgcccatgctggttctctaactcctgagcccaggaaatctgcccaccttggc

SEQ ID NO: 370720 - DNA, 201 bp, Homo sapiens
gctcggccccgccagacaaagggggcggctcccgcccgggctgcagcccaagggtctcggagcccgcggccggcccggcccgagtcccgctccagtatccygggcaaggcgagaccctcggaggtgggagtcccggggccccgcacgtgggtgagggggccaggccgtgctccccctgccaagaaggtgcaaggtgggaag

SEQ ID NO: 370721 - DNA, 201 bp, Homo sapiens; identical to SEQ ID NO: 80210

SEQ ID NO: 370722 - DNA, 201 bp, Homo sapiens; identical to SEQ ID NO: 80211

SEQ ID NO: 370723 - DNA, 201 bp, Homo sapiens; identical to SEQ ID NO: 80212

SEQ ID NO: 370724 - DNA, 201 bp, Homo sapiens; identical to SEQ ID NO: 80213

SEQ ID NO: 370725 - DNA, 201 bp, Homo sapiens
tgaggaactgctaaactctttttcacagcaactgcagtattttacattcccaccagcaatgcataagggttccaatttctccacgtcctcaccatcacttrtttcctatgttttaaatagtagccatcctcatggttgtgaatggtatcacactgtggtttttacatgcattttctaatgactaatggtgttgagcattgt

SEQ ID NO: 370726 - DNA, 201 bp, Homo sapiens
gaatataaaaagataattcttaatgtcatgtagttcccagttcaaattcaaatttctgcaattacagcaagaattttcgagccccattcggtgaacatgarggtggtgagctgagagttaggagtatggcttgtgggccccttgaaactaattgatttgccttgtgagtatcagaagcattcttcctgcttcccaggcctc

SEQ ID NO: 370727 - DNA, 201 bp, Homo sapiens
atttttgttttaaactttatatttgtgcatataaatagcattaccgtggagctttaaaacaatgtatattaaggctcatgtatggttcatgaaaatatttwaaaaaaaaaaaaagaagtagaaaagaaaacaatatctaaatagtgtcattcttcagtgcccggctttatccccttaccagtctgcccttgggaactctct

SEQ ID NO: 370728 - DNA, 201 bp, Homo sapiens
atctgccctgtcctcctgtccagcccctgtgcaatcataagctgggttaccttctgagcctgtttcctcaactgtaaaatgagggttctgattataactayaccccaggagtgtcaggataaatgaattggatctttctaagttcttaacccactgtctggctcattgtaggcatttgaaaaatgttaattattaccataa

SEQ ID NO: 370729 - DNA, 201 bp, Homo sapiens
ggctggaggatccagaggagtcgccgtattaatcagcacaggctcagctctgcacctgccgagtctcagtggcttttaccaacagaggtgtagttccactyacacggtatcagctgtgggattggagggcttccccactctgtgcacagactcgggccaggctctttccctctttcggctccaccgtctcaatgtgaagcc

SEQ ID NO: 370730 - DNA, 201 bp, Homo sapiens
cccaggagtgtcaggataaatgaattggatctttctaagttcttaacccactgtctggctcattgtaggcatttgaaaaatgttaattattaccataattrttaatatcattattgtgcatgcattgtgctaagtgagtgggcacgttacataaacctttagcctcagtttcctcaagaaaatggagtcaattatgaacat

SEQ ID NO: 370731 - DNA, 201 bp, Homo sapiens
ttccatcacccttatcatacagctgaggtttaaaaagatgaagtgactttcccaaggtcatacaaaaattatactccacatctaggcccctccaaaattcrtgcttatcccagtaagacaccactacttctgggagtgagcaactccgtctttacctttagaatttaatttaaaacttttaaattaggaaacatttcaact

SEQ ID NO: 370732 - DNA, 201 bp, Homo sapiens
tccttggcacagcccaatgcagtcagtagcattattgcttccattttacagatgaggaaatagaggcatggagaagctaagtcacacagccagcaagaagygtggctgggatttgaagccaggaagtatggtgctaaagtttgggctcatcgtgaccatgccctcctgcctcttatgcaaaaatcactgcttctgggtcca

SEQ ID NO: 370733 - DNA, 201 bp, Homo sapiens
aatcaatttagatgtttctttttccaaggttaaggacatgcccagtagagaggtctgtgcctttctccaaagacgactttgagggtttcaatacttaaagsgggggaaaggtgggctgtaagagaaagagggaaggtatggtaatccccatgtcacaagagaaaaggaacgggtagggcgatagtcaatgatgtatttctc

SEQ ID NO: 370734 - DNA, 201 bp, Homo sapiens; identical to SEQ ID NO: 80214

SEQ ID NO: 370735 - DNA, 201 bp, Homo sapiens; identical to SEQ ID NO: 80217

SEQ ID NO: 370736 - DNA, 201 bp, Homo sapiens
agtgggccaggccgccagccccgccagccccgccagccccgccagccccgcgatggcttgggccgcgctcctcggcctcctggccgcactgttgctgctgytgctactgagccgccgccgcacgcggtgagtgtcctgctccgctcggccccgccagacaaagggggcggctcccgcccgggctgcagcccaagggtctcg

SEQ ID NO: 370737 - DNA, 201 bp, Homo sapiens
ctccttccttcctcttgtctttctctggtatgaccctttaaaggtgtggtcacatcacttactggctcctgctgcaaaccctccagtggatccctgccacrcgtggcataggagccggactcccaccttggccttggccctcgtggtccacaaagtcatctccagcatcatcgcctacgtctcgtccccacattctccact

SEQ ID NO: 370738 - DNA, 201 bp, Homo sapiens
tcttgggtctgttgggtaagcatgatttaacgtgttcccttgatcgtaaacatcctgcgcttaagaatgcctagcttcctggcccagcatggtggttcacrcctctaatcccagcacttggtgaagcggaggcaggtggatcacctgagatcaggagttcgagaccagcctgaccaacatgatgaaatcctgtctctacta

SEQ ID NO: 370739 - DNA, 201 bp, Homo sapiens; identical to SEQ ID NO: 80222

SEQ ID NO: 370740 - DNA, 201 bp, Homo sapiens
caaagaggagagaaagctgaaaatagcaagatgcaataaaagttgaacttttgagttaaaaaaattaaaatctcatgtaatgttattaacagtaaaataayaccttaagaaaattttgttctaaccaattctttagtgtattagtgcatttttaatatcaaaacccaatctctagaaagactattataaataatttccttt

SEQ ID NO: 370741 - DNA, 201 bp, Homo sapiens; identical to SEQ ID NO: 80225

SEQ ID NO: 370742 - DNA, 201 bp, Homo sapiens; identical to SEQ ID NO: 80227

SEQ ID NO: 370743 - DNA, 201 bp, Homo sapiens; identical to SEQ ID NO: 80228

SEQ ID NO: 370744 - DNA, 201 bp, Homo sapiens; identical to SEQ ID NO: 80229

SEQ ID NO: 370745 - DNA, 201 bp, Homo sapiens
cactgggtgtatgaatgaagctcttgtgagtagctgtggccacacatgagtgtcccaggaggacccctgaccctctgtctgccgcccccagagccggctayctgactctttacggaattgaggcgctgccacgcacccatgaaagccaggcccaggaccgcgtccactcagctgatgtcttccacacctttcgccagctcg

SEQ ID NO: 370746 - DNA, 201 bp, Homo sapiens; identical to SEQ ID NO: 80232

SEQ ID NO: 370747 - DNA, 201 bp, Homo sapiens
ttttttcactgccgactgttcagtgcccagaatggtctttggcgcacagtaggattagtagttgctcactgggtgtatgaatgaagctcttgtgagtagckgtggccacacatgagtgtcccaggaggacccctgaccctctgtctgccgcccccagagccggctacctgactctttacggaattgaggcgctgccacgca

SEQ ID NO: 370748 - DNA, 201 bp, Homo sapiens
tttggcgcacagtaggattagtagttgctcactgggtgtatgaatgaagctcttgtgagtagctgtggccacacatgagtgtcccaggaggacccctgacmctctgtctgccgcccccagagccggctacctgactctttacggaattgaggcgctgccacgcacccatgaaagccaggcccaggaccgcgtccactcagc

SEQ ID NO: 370749 - DNA, 201 bp, Homo sapiens
accatttggggggtcaggaggacagggggcagagagtcaaggaaacatatacaaggtgattttagatgatgatatgtagagtatgaaacagggctgtgaatagagagactttcgggtctgctctagctggggtggtcagggaggcctccctgagatatttgagatgagccctggatgataagaaagctagattcagagact

SEQ ID NO: 370750 - DNA, 201 bp, Homo sapiens
aaatcataaaaattaaaagaaacacaatctgtgacccccatccctcaggtctcccttcttctgccaggctacatcctcagagggtctccccctgggggatractacaatggcctccagtagctctaggcaatttagcaatcccatggaggagggcttcccttcccctaaattctagcacagctcccaagactgatactcac

SEQ ID NO: 370751 - DNA, 201 bp, Homo sapiens
ccaccccgccccaaagcgggctggggtgggcggagtgggaggggcgcggcgggtgggggcggggaactttacctgggagtgggccaggccgccagccccgycagccccgccagccccgccagccccgcgatggcttgggccgcgctcctcggcctcctggccgcactgttgctgctgctgctactgagccgccgccgcacg

SEQ ID NO: 370752 - DNA, 201 bp, Homo sapiens
caggtgatcctctcatcttagcctcctgagtaggtgggactacaggtgtgtgccaccatgcccagttaattttaaaaattttgtagagatggcatcttgcyatgttgtccaggatggtctcaaactcagctcaagcaatcctcccaccgcagcctcccaaagtgctggaattaccggtgtgaaccaccacgcctggctttg

SEQ ID NO: 370753 - DNA, 201 bp, Homo sapiens
ggactacaggtgtgtgccaccatgcccagttaattttaaaaattttgtagagatggcatcttgctatgttgtccaggatggtctcaaactcagctcaagcratcctcccaccgcagcctcccaaagtgctggaattaccggtgtgaaccaccacgcctggctttgcaagaatttttaattcacaggaagaatgaattctca

SEQ ID NO: 370754 - DNA, 201 bp, Homo sapiens
taccttgatttgacagtcattaacattatttaaaaaatattagacataggctgggcacggtggctcacacctataattccagcactttgggaggctgaggygggccgatcaagaggtcaggagatcgagaccatcctggctaacacgatgaaaccccgtctctactaaaaatacagaaaattagccaggcgtggtggcagg

SEQ ID NO: 370755 - DNA, 201 bp, Homo sapiens
agctcaaattccagggtggcaaattcaggatctcttatggttgtgtgtgcacacacacacacacacacacacactcacactcacatctgtgcagttgggtaaaaggcggtcttggtcacctccctaacttgccacagctttttcctgcaggcagagatagccaagcgcccatgtgttccactcctgcttggtaattaatga

SEQ ID NO: 370756 - DNA, 201 bp, Homo sapiens
ctgcagccagacctgtctggattagaaacccaagtcctctatgttggaccctctggcatgtgacttagccctctgcacctcagtttcctcctctgtaaaatgggcctggcagtaataattgcttcctcataaggttagggggaggattcattgagtcactgggataaagtcctcagtgtggtgtctcccacaccatcagcg

SEQ ID NO: 370757 - DNA, 201 bp, Homo sapiens
tgcagccagacctgtctggattagaaacccaagtcctctatgttggaccctctggcatgtgacttagccctctgcacctcagtttcctcctctgtaaaatgggcctggcagtaataattgcttcctcataaggttagggggaggattcattgagtcactgggataaagtcctcagtgtggtgtctcccacaccatcagcgt

SEQ ID NO: 370758 - DNA, 201 bp, Homo sapiens
aggagttgtacaacaaaataaaacttagctctcaaattgtagctctcttagatctcaaattttcagagattcgggattctctgcagcagggagctcccagmcctactggtttgaccaatgaagacagataccaagctgttaccaaacaccaacaggagatttgtcaaaggccagggccacctacatggagtcccttcatgg

SEQ ID NO: 370759 - DNA, 201 bp, Homo sapiens
aagtccacggctgagcataaattcaaagggcaggggaaatacgctctggctcttgaataggaggaacagcaaattcacatggtaaggagcgtggattctgsgattggggaagaattggggccaacaatgtgatcattctcagatgtgaacagtcttaactgatataccctgttcctattactgacactgttttgctgatta

SEQ ID NO: 370760 - DNA, 201 bp, Homo sapiens
acaaaagattgttacctaacaatcttccataagaatctatattattatctttaaagcaaaacttattcttaaactaagaaggcttttgttcataaaatatygggacagcaggatgtttcctgggtctgttaagtcctggatctgttaagtcttgggtctgttgggtaagcatgatttaacgtgttcccttgatcgtaaaca

SEQ ID NO: 370761 - DNA, 201 bp, Homo sapiens; identical to SEQ ID NO: 80240

SEQ ID NO: 370762 - DNA, 201 bp, Homo sapiens
cagtcgactgggaagaaaaaatctttttctcaaaaaacaagaacctaggagagaaaaaagaaagcataaaggcatacacacacacacacacacacacacayacacacacacacaaacacatacacatgcatacacacacatacacacgcatacacacacacataaacacacacacatacataaacactgctgacaaaaaga

SEQ ID NO: 370763 - DNA, 201 bp, Homo sapiens
ggcttttgttcataaaatatcgggacagcaggatgtttcctgggtctgttaagtcctggatctgttaagtcttgggtctgttgggtaagcatgatttaacrtgttcccttgatcgtaaacatcctgcgcttaagaatgcctagcttcctggcccagcatggtggttcacgcctctaatcccagcacttggtgaagcggagg

SEQ ID NO: 370764 - DNA, 201 bp, Homo sapiens
acagtgacactcctcactctatccctggcaacttcccacagatactggttgggggcaggtatgtcaccgttctcctggacccacactcctacgacgcggtkgtgtgggagcctcgcaccaggctcgacttccatgcctatgccatcttcctcatggagaggatttttgatgtgcagcttccacattacagccccagtgatg

SEQ ID NO: 370765 - DNA, 201 bp, Homo sapiens; identical to SEQ ID NO: 80246

SEQ ID NO: 370766 - DNA, 201 bp, Homo sapiens; identical to SEQ ID NO: 80251

SEQ ID NO: 370767 - DNA, 201 bp, Homo sapiens
tttttttttcttaaaatatgtgttccctttccccattttttgatacaattcctaaaaataaaaaggtgaggggaggtagtagtacttttgccagcacaacrctatagtccagtgaggatggtaaaccattttgccttttttacccttagcaagttgaactagttgttagaccactaattgttaaaatccttgtttttaaat

SEQ ID NO: 370768 - DNA, 201 bp, Homo sapiens
ccatgctcttagagtttggggtttgctatttggttcacaggaacagggacagctgaaaccaccgttggcacgatgccctttcagccttcagtcaccagtcyaggaaaactttctaataaaaagtttctctttccaggttgcccgacatgtgagtgccattccttggggcatttctgccactgcagccctcaggcctgctgc

SEQ ID NO: 370769 - DNA, 201 bp, Homo sapiens
tgtgatttttatctatgtttgatgtggttgcttcaagtactatgctcaccactgaacacttggcttcattaatagacaaaaaccaaattttaaatttgtcycagttttcccaattttgggaagagaggccaaatgttagaccacacacaattccagcggatttcaggccaacaaagccttgatgtgtctagcccacttagc

SEQ ID NO: 370770 - DNA, 201 bp, Homo sapiens; identical to SEQ ID NO: 80253

SEQ ID NO: 370771 - DNA, 201 bp, Homo sapiens
gccgggcggggtggcgggcgcctgtggtcccagctactcgggaggctgaggccggagaatggcgtgaacccaggaggcagagcttgcagtgagctgagatygtgccactgcactccagcctgggcgaacagagcgagactccgcccttgactctgttatctttcctgctaagaagacccagcagcctagtatttaaggact

SEQ ID NO: 370772 - DNA, 201 bp, Homo sapiens
ctgtttctgatgaacttaagattatttttcatgtttagtatcattctgcttcttaggggatttatgtagaccttggtaaagcatttttaaaaccagaagaycctggctgggcatggtggctcatgcctgtaatcgtagcactttgggaggccaaggcgggaagatcacttgagttcagaagttcaagaccagcctgggcaa

SEQ ID NO: 370773 - DNA, 201 bp, Homo sapiens
attctaacagtcatgtttgcattttgattagaatggtggtttgggccacatgaacatcgcactcttgtcagacttaactaagcagatttcccgagactackgtgtgctgttagaaggttctggtcttgcactaaggtaagatcctgtttctgatgaacttaagattatttttcatgtttagtatcattctgcttcttaggg

SEQ ID NO: 370774 - DNA, 201 bp, Homo sapiens; identical to SEQ ID NO: 80254

SEQ ID NO: 370775 - DNA, 201 bp, Homo sapiens
cgtccccgccttcattgagcccaacgtgcgcttctggatcaccgagcgccaagtacggcccgggcccggcgcgactaggggcagggagggggcgggccggsccgcgtggagtcgggctgacccgggtgaccttggccaggccacgtgggcgccccctgtctccgtttcctcctctcggagttgtgccgggaacgcgcacca

SEQ ID NO: 370776 - DNA, 201 bp, Homo sapiens
agcatctgtcatcagtaagagatgataagttttttgcacaacagtgaaaaccccacctttaagcatatgattacgcttaataaatattttattaaaaggaraattaaagacctaaaagggaagaagttagactgttctagttctggtactgttgaggcactgatgaggataaatgatcatgcagaggtctcttcataattg

SEQ ID NO: 370777 - DNA, 201 bp, Homo sapiens
tttaaatgctctaatgagaatttctatcctttttttccagcacctttgtgtgtcctacagaaattgttgcttttagtgacaaagctaacgaatttcacgaygtgaactgtgaagttgtcgcagtctcagtggattcccactttagccatcttgcctggataaatacaccaagaaaggtatggcattgtacccctagctttt

SEQ ID NO: 370778 - DNA, 201 bp, Homo sapiens
tagctccctccacttggctcccctggtcccgctcgctcggccgggagctgctctgtgcttttctctctgattctccagcgacaggacccggcgccgggcamtgagcaccgccaccatggggaagggggtgagtgtccggcgcgcccggggagggggctcggggagccctcgaggggaagaggaggaagtcgggagggcgac

SEQ ID NO: 370779 - DNA, 201 bp, Homo sapiens
ccgcggcagccctagctccctccacttggctcccctggtcccgctcgctcggccgggagctgctctgtgcttttctctctgattctccagcgacaggaccyggcgccgggcactgagcaccgccaccatggggaagggggtgagtgtccggcgcgcccggggagggggctcggggagccctcgaggggaagaggaggaagt

SEQ ID NO: 370780 - DNA, 201 bp, Homo sapiens
agcacacaaagccaaagaaaattctgtccttccagatctctagctcatagatccccaaaatttttgtgtcctatggaaaatgctaagttggtgtgggctcyaactcatattttaaagcctttaattgcaatgatgtgtttattcaattcagcaaatactcaaagtgctagcgttcttggctcaaaaaactgacttgcatca

SEQ ID NO: 370781 - DNA, 201 bp, Homo sapiens
gcatcggcccgagccgccggccgccctcccaccctcccgccccgcggcagccctagctccctccacttggctcccctggtcccgctcgctcggccgggagmtgctctgtgcttttctctctgattctccagcgacaggacccggcgccgggcactgagcaccgccaccatggggaagggggtgagtgtccggcgcgcccgg

SEQ ID NO: 370782 - DNA, 201 bp, Homo sapiens
aaaaaaagatgcctttaaaaattcagttagatgtttgcccagatgagggctaacacttaaaatatacagattcctgggaatgttattcctaaattgcattyaaaaataaaagtgaactcaacatcttatagcacaataggcttggcactcatccatgctccatgccagtaccctcagtcattgttttcggattattttagc

SEQ ID NO: 370783 - DNA, 201 bp, Homo sapiens
ctaccatgtgacatgcacagaatttgggcatttatatgctaccgtttcttttccctgaaactttttgaaagtagatgttattttcttttccctattttatrgcagttgagagccagtaagtgggaacaccaggacttgcagttggcttcaaagccatgcttatgccttgaccttttgatgataaattttccctttattttt

SEQ ID NO: 370784 - DNA, 201 bp, Homo sapiens
agggatttttgatcaatagacctcattcctttgttcctttgtgactttacagtgaatctctttatctggttttagacctcacttactagttcctttgtgasttatgatgaaatatatctgcacgtgatctctttccagttttattcaaaccctatttagtaatgactattggctgtctcagtgatttgataagttgattca

SEQ ID NO: 370785 - DNA, 201 bp, Homo sapiens
ggttttagacctcacttactagttcctttgtgacttatgatgaaatatatctgcacgtgatctctttccagttttattcaaaccctatttagtaatgactrttggctgtctcagtgatttgataagttgattcatgatagttcgtgctttgtccttgggacttgtattgtttgggagcctgataatcagtgtaagattttg

SEQ ID NO: 370786 - DNA, 201 bp, Homo sapiens
ctacatgtggcccactccagtgaatttggagaaggatttctccttggagtcttaagaggatatttttaaatttaagtgaacaatgtattttatttgcaackattagttatgactgaaacacacataatacgttttgattttcttttttcatttcagcacagtgaaattataatctggacacgagttcctaattattgcttt

SEQ ID NO: 370787 - DNA, 201 bp, Homo sapiens
atctcctcattaaccccaaaaggaagtggcactggcagggccattctgaagcctaccggtagcttcagtattgttcttaatgctcttggatggagagaatrtatcttgagccaatgtattaatagtagattgctttgcttatgtagtaggcaatatatgggtatacattttcctgactattatcttaatgactattccaaa

SEQ ID NO: 370788 - DNA, 201 bp, Homo sapiens
agtctggcatgggtgttggagctgctgtcctgctactggagagaagtccctttgccaaacagcatgtacagccaaagagctggcccttaaaaagtgctttyatcaactctttttgtttttttagtcatcctatgtaattgtgtaaaatccgtggcttccttcaggttagatacaattaggtacagttctccctccccttct

SEQ ID NO: 370789 - DNA, 201 bp, Homo sapiens
ttaaattgccctacaaacgtgactgaagaatgcctaaaatgtgattggtttcattaattgggaaatgagatgtatcactgcagatttctatgggactttartaggagaactgagaacacagcctttgaagttaatgcattgttgttctgttgtgttttcttgcctccatcaggtgtctcttttgacaagacttcagctacc

SEQ ID NO: 370790 - DNA, 201 bp, Homo sapiens
tgtggttccgtgaaggagatgagagaaagatacgccaaaatcgtcgagatacccttcaactccaccaacaagtaccaggtctgaagatcgatgggtacacrgagggcgagggcaagctgggggacaaagaggggaggtacatgagcaggaagaggaaatattctccctttggagttttataagctttagctttaaattttg

SEQ ID NO: 370791 - DNA, 201 bp, Homo sapiens
atgtttcccatccctgccagagctgtccaattctagattacactgaaagtacatgtccagtacatgataatgtgcagtagagagaactgtaaaacctactcactcattttaaaactctccatttatatattttgggggagggatgtggaacctagtcaggtctgaactttctcacgttgctatgaattgagtgtatgagag

SEQ ID NO: 370792 - DNA, 201 bp, Homo sapiens
agaagtccctttgccaaacagcatgtacagccaaagagctggcccttaaaaagtgcttttatcaactctttttgtttttttagtcatcctatgtaattgtrtaaaatccgtggcttccttcaggttagatacaattaggtacagttctccctccccttctttttaaggcaccgcacgtggtattgttgtctacactgggga

SEQ ID NO: 370793 - DNA, 201 bp, Homo sapiens
gtgattggtttcattaattgggaaatgagatgtatcactgcagatttctatgggactttaataggagaactgagaacacagcctttgaagttaatgcattrttgttctgttgtgttttcttgcctccatcaggtgtctcttttgacaagacttcagctacctggcttgctctgtccagaattgcaggtctttgtaacaggg

SEQ ID NO: 370794 - DNA, 201 bp, Homo sapiens
tgtttcccatccctgccagagctgtccaattctagattacactgaaagtacatgtccagtacatgataatgtgcagtagagagaactgtaaaacctactcactcattttaaaactctccatttatatattttgggggagggatgtggaacctagtcaggtctgaactttctcacgttgctatgaattgagtgtatgagagg

SEQ ID NO: 370795 - DNA, 201 bp, Homo sapiens
gctgctacagaagaggaacctcaaaacgataatgtgagttctgtaattcagcatatggatttgtagtacacatcagatatcttctccgtctttgtctcccwcttcttctcaattaccactcattacttaatggttatgaactcattacttaatggttatgaacagctgttgccttcaaggctcatccattcttccttcgtt

SEQ ID NO: 370796 - DNA, 201 bp, Homo sapiens
caattaccactcattacttaatggttatgaactcattacttaatggttatgaacagctgttgccttcaaggctcatccattcttccttcgtttccatttcstctctctaccacccacgttgtagatgctcttacaagtgggatgcccacctgcatgtgctgctgtgagcaggcagctctgctcaggccccggccgccaccc

SEQ ID NO: 370797 - DNA, 201 bp, Homo sapiens
tgtaaataaaaaagtgaataatatctttgttttgtattcaggtaattaggattatgactatttttattttcttgttttggacactaccttctctttgttgrtatactaacggtgtaaattgtttcttttccaaagcaagcccttgtgattcgaaatggtgagaaaatgagcataaatgcggaggaagttgtggttggggat

SEQ ID NO: 370798 - DNA, 201 bp, Homo sapiens
agggcaaaaagggcaaaaaagacagggacatggatgaactgaagaaagaagtttctatggtaagtactaggaggaatattgtattccatccttattaaaawtccatgatttttaatcccccaggcctcactgtattcttcaaagaactgctatatattaaaagagatcatagcagctgtacagatctcatctagtcgtaga

SEQ ID NO: 370799 - DNA, 201 bp, Homo sapiens
ttttaacaaacctcatagctagctctgctgttcgggcagcttgatttgaggggtacagtagcccatgataaggctggtgtattcacatgacatttttcttyttttcctcacatataggtggataactcctcgctcactggtgaatcagaaccccagactaggtctccagatttcacaaatgaaaaccccctggagacgagg

SEQ ID NO: 370800 - DNA, 201 bp, Homo sapiens
tcagtagttaactgtgactgtacttggcttctcctttcaggctgattatttcattgtcactggtgatgtgcaatttctctttctttatttgaactgtgttygtgtgcatataaattggtaccttactctatttccagacctacctggtggttctgtgccttcccctactctcttctcatcttcgtatatgacgaagtcaga

SEQ ID NO: 370801 - DNA, 201 bp, Homo sapiens
tgtttgtgtgtgtgtttgtcctgtgacttattgtgagcgtccaaatgttcagaagaatatttcatgttgggatttttccacatggggattaaaatgtgggyggagagtgactaaagccctgctgataattggctaacaaggaagcctgtgccggcagctaatttttaaggtcattgtaaatttcttcccctcctctcctca

SEQ ID NO: 370802 - DNA, 201 bp, Homo sapiens
ataactcctcgctcactggtgaatcagaaccccagactaggtctccagatttcacaaatgaaaaccccctggagacgaggaacattgccttcttttcaacmaattgtgttgaaggtaggccatttttgggcactttgagcatggcgtggtatttctcttgggcattaacaaaatcaaaaccataggcacaatctcttgttt

SEQ ID NO: 370803 - DNA, 201 bp, Homo sapiens
aaaaccctcactctgttataaaaatatagactttaaaaattttccaaagtaaacactccagagaaaggtaggcgggctgaataggctgctgttgtccttcytactgcccagcgtcactgaaattttcaaaggctcctgtcctcctcgcaggtttctgccacctctttctgccagatgaacagtttcctgaagggttccagt

SEQ ID NO: 370804 - DNA, 201 bp, Homo sapiens
tgtccctcctggccctgtcttgtataagcagtgatctcatcccttctcatctcttcccttccccatttaggactctgacgcagtacagttaatctgtgcayaggaaagaagagctgtttgaagaggttattcggtaaatgcagagaatgtctttgtagtataaattattgctctatataaaactgcttgtaagtttttgtt

SEQ ID NO: 370805 - DNA, 201 bp, Homo sapiens; identical to SEQ ID NO: 80271

SEQ ID NO: 370806 - DNA, 201 bp, Homo sapiens; identical to SEQ ID NO: 80274

SEQ ID NO: 370807 - DNA, 201 bp, Homo sapiens
ttaatgactattccaaattatgactaccttaaaaactaccaaaatcccctgctccagaattttcagtttcagatgaggttcataattcatggcctcacttytcccacattctcctacaggttggacgtgataagtatgagcctgcagctgtttcagaacaaggtgataaaaagggcaaaaagggcaaaaaagacagggaca

SEQ ID NO: 370808 - DNA, 201 bp, Homo sapiens
cattactttgagtagctcttgttaatgctgggggctatgtttgttgtcacttctcagttctgttatttggtgtagggcctgtgtgaatacttgcctgtgayggttctcaggcttcataaatagtctcaataggaaaggagcagtgtctgtaatgagtgctcagtgggggcatgcatcgcactatttccatcgctaggaaaa

SEQ ID NO: 370809 - DNA, 201 bp, Homo sapiens
aatatatgggtatacattttcctgactattatcttaatgactattccaaattatgactaccttaaaaactaccaaaatcccctgctccagaattttcagtwtcagatgaggttcataattcatggcctcacttttcccacattctcctacaggttggacgtgataagtatgagcctgcagctgtttcagaacaaggtgata

SEQ ID NO: 370810 - DNA, 201 bp, Homo sapiens
gggggctatgtttgttgtcacttctcagttctgttatttggtgtagggcctgtgtgaatacttgcctgtgacggttctcaggcttcataaatagtctcaawaggaaaggagcagtgtctgtaatgagtgctcagtgggggcatgcatcgcactatttccatcgctaggaaaagtgattggtattaacccgttttccctttt

SEQ ID NO: 370811 - DNA, 201 bp, Homo sapiens; identical to SEQ ID NO: 80276

SEQ ID NO: 370812 - DNA, 201 bp, Homo sapiens
tgtcacttctcagttctgttatttggtgtagggcctgtgtgaatacttgcctgtgacggttctcaggcttcataaatagtctcaataggaaaggagcagtrtctgtaatgagtgctcagtgggggcatgcatcgcactatttccatcgctaggaaaagtgattggtattaacccgttttcccttttctggggtagggtgct

SEQ ID NO: 370813 - DNA, 201 bp, Homo sapiens
tagattgctttgcttatgtagtaggcaatatatgggtatacattttcctgactattatcttaatgactattccaaattatgactaccttaaaaactaccaraatcccctgctccagaattttcagtttcagatgaggttcataattcatggcctcacttttcccacattctcctacaggttggacgtgataagtatgagcc

SEQ ID NO: 370814 - DNA, 201 bp, Homo sapiens
gggccattctgaagcctaccggtagcttcagtattgttcttaatgctcttggatggagagaatgtatcttgagccaatgtattaatagtagattgctttgmttatgtagtaggcaatatatgggtatacattttcctgactattatcttaatgactattccaaattatgactaccttaaaaactaccaaaatcccctgctc

SEQ ID NO: 370815 - DNA, 201 bp, Homo sapiens
gttatttggtgtagggcctgtgtgaatacttgcctgtgacggttctcaggcttcataaatagtctcaataggaaaggagcagtgtctgtaatgagtgctcmgtgggggcatgcatcgcactatttccatcgctaggaaaagtgattggtattaacccgttttcccttttctggggtagggtgctatcgtggctgtgactgg

SEQ ID NO: 370816 - DNA, 201 bp, Homo sapiens; identical to SEQ ID NO: 80278

SEQ ID NO: 370817 - DNA, 201 bp, Homo sapiens
tcaaggctgtctgattgagaatgcggactcataagcacaatattgcactctaagttaataatgtaaagttagtttcattctttcagtagggaagatggaakgctgcagaatagggattttgatagcaaaaatctcctcattaaccccaaaaggaagtggcactggcagggccattctgaagcctaccggtagcttcagtat

SEQ ID NO: 370818 - DNA, 201 bp, Homo sapiens
tcagtttcttcatcataaaatgagggagcttgatgtttcatctataaggtttcatttcattcagaagccactcttccaagggaagaaaagaaggctttttyttaaaaaaaaaaaaaaaaaaggacttttcctcctttgcttacccattttccaaggtgtctctctcatatctgagatttccttctgcgcctcagacttggt

SEQ ID NO: 370819 - DNA, 201 bp, Homo sapiens
tggaggttgcagtgagccaaggttgtgccattgcactccagcctggacaacaagagtgaaactccatctcaaaaaaaaaaaaaaaaaaaaaaaaaaaaaarggagagaagaacaaggttgagagcgtttttcttgacacaagcactttaagctccaagaggaggcctcgagtcagctcagaacaacatgccaacagtgact

SEQ ID NO: 370820 - DNA, 201 bp, Homo sapiens
cagccacctgctgacttcgcttggttttttttcttttaagaaattgcatgaaatttcttttttttttttaagctcatggcagctttttctttcttttttgktttttttttttttatcatttagtgaagagtcaagggtatgggatattgattttttgcatgtcagtagaaactttaaattgccctacaaacgtgactgaag

SEQ ID NO: 370821 - DNA, 201 bp, Homo sapiens
cttgtcacatgttgcttttcctccaagttgtgccaatttgagaatgctagccagtagcatgtggtgtcttcacagtcccaccagcatcagatttttatcctttttttttttttttttttttgctggttttagtaattttcaagtatttttatgtaactctgtagaaggaaaaatagacattgtgtatgctagtgattgtat

SEQ ID NO: 370822 - DNA, 201 bp, Homo sapiens
gctactggagagaagtccctttgccaaacagcatgtacagccaaagagctggcccttaaaaagtgcttttatcaactctttttgtttttttagtcatcctwtgtaattgtgtaaaatccgtggcttccttcaggttagatacaattaggtacagttctccctccccttctttttaaggcaccgcacgtggtattgttgtct

SEQ ID NO: 370823 - DNA, 201 bp, Homo sapiens
ttatttttcttaatagattgcttttctggaaggaaggggaagcctcatgtatgggttccccttattatttcttcaaacttcagaagaaggttggagagatktaattttagacaaatttcttccacattaggatatagcaagaatctgtatagaattccagcctggttgagtgaagtaataatcttcctaatattttttagg

SEQ ID NO: 370824 - DNA, 201 bp, Homo sapiens
aaaatccacaagttggttgaaaaacaatctttgttttataaagcaggagaaactgatgcatctagaacctttccaaacgtccagttagtgatcaagtgttrgtgtgcctgactccatttctgacccttcctgtgtggtctttagaaggataaataagaaaacatgagttctatatttctgaaatcttggtttctctattaa

SEQ ID NO: 370825 - DNA, 201 bp, Homo sapiens
gggaagcctcatgtatgggttccccttattatttcttcaaacttcagaagaaggttggagagatttaattttagacaaatttcttccacattaggatatarcaagaatctgtatagaattccagcctggttgagtgaagtaataatcttcctaatattttttaggtctgtctgacacttactgccaaacgcatggcaagga

SEQ ID NO: 370826 - DNA, 201 bp, Homo sapiens
catttctgacccttcctgtgtggtctttagaaggataaataagaaaacatgagttctatatttctgaaatcttggtttctctattaaaaatctgttttttrttcagtcaaaaaattaattgaatgtccctaattattgtgtagagccacgggccctaacttgtcttttcccttccagctgtacctgggtgtggtgctatca

SEQ ID NO: 370827 - DNA, 201 bp, Homo sapiens
gacctacctggtggttctgtgccttcccctactctcttctcatcttcgtatatgacgaagtcagaaaactcatcatcaggcgacgccctggcggtaattaygggcattctgactttggttggaggaggagtgggaggggctatagttctattggttttttgtttccctcaaggtgtctaggctccctcagtggtcagtctg

SEQ ID NO: 370828 - DNA, 201 bp, Homo sapiens
ctaatattttttaggtctgtctgacacttactgccaaacgcatggcaaggaaaaactgcttagtgaagaacttagaagctgtggagaccttggggtccacrtccaccatctgctctgataaaactggaactctgactcagaaccggatgacagtggcccacatgtggtttgacaatcaaatccatgaagctgatacgacag

SEQ ID NO: 370829 - DNA, 201 bp, Homo sapiens
actctcttctcatcttcgtatatgacgaagtcagaaaactcatcatcaggcgacgccctggcggtaattatgggcattctgactttggttggaggaggagygggaggggctatagttctattggttttttgtttccctcaaggtgtctaggctccctcagtggtcagtctgattagctaaggtgactggaccagcaaactg

SEQ ID NO: 370830 - DNA, 201 bp, Homo sapiens
gatatttattattgcaaacattccactaccactggggactgtcaccatcctctgcattgacttgggcactgacatggtgagtgtcacaacagtcacagatsgatagtagtgaggtgtgagctgtgtcttcattcactggcactatgctcccagcatccatgaggctggcgttgggaaaagaaattctcaggaccagtatcc

SEQ ID NO: 370831 - DNA, 201 bp, Homo sapiens
tttgccacccacaggctgggtggagaaggaaacctactattagccccccgtcctgcacgccgtggagcatcaggccacacactctgcatccgacacccacmccctctttgtgtacttcagtcttggagtttggaactctaccctggtaggaaagcaccgcagcatgtggggaagcaagacgtcctggaatgaagcatgtag

SEQ ID NO: 370832 - DNA, 201 bp, Homo sapiens
ttggttttcatccctgtttccctctgtaatgctggagcgaggaagactcactgtagtgtgtcttgtctgtctctttgccacccacaggctgggtggagaargaaacctactattagccccccgtcctgcacgccgtggagcatcaggccacacactctgcatccgacacccaccccctctttgtgtacttcagtcttggag

SEQ ID NO: 370833 - DNA, 201 bp, Homo sapiens
tgtgtcttgtctgtctctttgccacccacaggctgggtggagaaggaaacctactattagccccccgtcctgcacgccgtggagcatcaggccacacactytgcatccgacacccaccccctctttgtgtacttcagtcttggagtttggaactctaccctggtaggaaagcaccgcagcatgtggggaagcaagacgtcc

SEQ ID NO: 370834 - DNA, 201 bp, Homo sapiens
ggagcgaggaagactcactgtagtgtgtcttgtctgtctctttgccacccacaggctgggtggagaaggaaacctactattagccccccgtcctgcacgcygtggagcatcaggccacacactctgcatccgacacccaccccctctttgtgtacttcagtcttggagtttggaactctaccctggtaggaaagcaccgca

SEQ ID NO: 370835 - DNA, 201 bp, Homo sapiens
gttcagttgctctgggatggttaacagaaaagtactctgctcatcctataaaccaagtcttatgaaatccaaactgaagatgagtagggattccattacaragtctgcagactgatttcctctgcgtctctaggccctgggcacatggagtagcaatctgttttaagacatttttatttgttctgttaatgactcagtagt

SEQ ID NO: 370836 - DNA, 201 bp, Homo sapiens
gttggcactattctttatctccacgctgtggaagaggaaattgaaatgtagaagttagtaacttgcctaaggatacactgctggtaagtggtaaagcccargattttaactcaaggctgtctgattgagaatgcggactcataagcacaatattgcactctaagttaataatgtaaagttagtttcattctttcagtaggg

SEQ ID NO: 370837 - DNA, 201 bp, Homo sapiens
ctcacaccatagcagggagctggtgatcacggaggctgcctggagcctgtcagcaggctagagactgtgtggctcagcctccaggccccttggaagccttygggctcagcttttttcagtccccaggaccaggcctcagaacacagagctgatatcccaaatgctgttgtcagagatcaaatttggggaatgcataaactg

SEQ ID NO: 370838 - DNA, 201 bp, Homo sapiens
atccttctggcccttcttgcccgtcaaaagcttttgtctgtgggctttggaaatagtccagtttttaaggtgttttatttttcagagttaatggtttcttractaatcagactatgaaaatgccttctctaggttctttaatagttataccaagtgttattcccattttaggaatgaagaaactaaggctgacaggcaaag

SEQ ID NO: 370839 - DNA, 201 bp, Homo sapiens
cgtctggaccatctctcaatcccctgttgccagcacttccttcagctcatcttatccctaaagtaaccaaaacccatcagcctcattcacttcctgtgggktatgtgcagacatcgtctgtggtgcaagatgagactggcatccagagtcagtctcattgtcccaacctgtctttatagctttctcttgtaccccttaccc

SEQ ID NO: 370840 - DNA, 201 bp, Homo sapiens
catcacgtggtgaattttgacagtgagaaaacctcagcatttgtttatacgtaagataaccccaaagcatacattttgcttttaaattatcacgtggtccwgaacagtgcagtggagaaaggagaagaacttgggatcaagtagggggatagaatatggtagaatcctgttattatttttcttaatagattgcttttctgg

SEQ ID NO: 370841 - DNA, 201 bp, Homo sapiens
cctgggttcaagcgattctcctgcctcagcctcctgagtagctgggattacagacgtccgccaccatgcctggctaattttttgtatttttagtaaagacrgggtttcactgtgttggccaggctggtctcaaactctggacctagggtgatccacccacctcagcctcccaaagtgctgggattataggcgtgagccacc

SEQ ID NO: 370842 - DNA, 201 bp, Homo sapiens
aaccccgtctctacaaaatatacaaaaactagccaggcatggtggtgcacacctgtaattccagctgctcaggaggctgaggcacaagagtcgcttgaacytgggaggcagaggttgtggtgagccaagatcacgctacttgcgctccagcctaggtgacagagtgagaccctgtctcaaaaacaaaaataataataagat

SEQ ID NO: 370843 - DNA, 201 bp, Homo sapiens
catctgaatgcttagacgtcagatgggaggagcactgaagatgttaaggtttgccttgtggttccctttctccagggcacctggacgatgacggattaccrcacgggttctgcacagtcacctactcctccacagacagatttgaggggaactttgttcacggagaaaagaacggacgggggaagttcttcttctttgatg

SEQ ID NO: 370844 - DNA, 201 bp, Homo sapiens
acacagggtctgttttttggttttttttcagtgtaccagaggttaaccaacctgtatttcaggaacattttttttagtgaaatatgttaatttactttaattttttttttctgagatgggttctctgtcatccaaactggagtgcagtggcataatgtcagctcactgcaacctctgcctcccagtctcgagcgatcctcc

SEQ ID NO: 370845 - DNA, 201 bp, Homo sapiens
tttatatttaggtccaatttgggttgctttaaatgtcttttttgtttttttaagttaaaaatggagacagtctaaatgcaatgtgggattctggattggatcctggaagagaaaaaggacattagtggaaaaactggtgaaatctaaataaagtctagagttttgtacatagtaatgtatctgtgttggtttcttaatttt

SEQ ID NO: 370846 - DNA, 201 bp, Homo sapiens
ttggcgcattttacaaattgacctcatgcagagcaaggaggactagtgtttcccttcaagttagataacacttggaagagataggactttgcaaccgggayatgctgttggaaacctggtggttctgtgtgaatgatcttaaccacaaagccttcttccacttccctgccagggacctgggggttcctacctttttagagg

SEQ ID NO: 370847 - DNA, 201 bp, Homo sapiens
gtaaagttgattgagcctgagctgtgactggaaaatataaatgcatattggcatctcgagcccaacatcttgcgtggagcacaatgtatgagtgaacccartggaatccatatttgaaaaaagtattattttccttttagaagtacacatgtcacactaaacattttttctgagtataaaattactaagtgtagaaaatct

SEQ ID NO: 370848 - DNA, 201 bp, Homo sapiens
tttttaaaatttcctctcggttattgtattgctatggctgacaaaaggaagggaacacagtggaaggaagggaacagaatttaggccccaggaggcggaargtccaaaacctagaccccagaaccatgaagaaaagccaaaactgttaagtctctaagaacagttttctatattcaaacactaacaggaatttttaatgaa

SEQ ID NO: 370849 - DNA, 201 bp, Homo sapiens
tcccctcagctgcccccaagcgaactcagtcaggcctccccctcccccttcctgcttggctgggatgcagccgccacgctgtgcaggcgcgccgcgagtcygcaccgagattgctgggtgacacttaactttctgaattccatgccgttggctgtgggtgatatcaccgcctcagtgtcgtgtttctccgccccttctctt

SEQ ID NO: 370850 - DNA, 201 bp, Homo sapiens
atggagagatgatagaaggcaaactggctacccttatgtccactgaagaagggaggcctcactttgaactgatgcctggaagtaagttgaatctgcttcakatgggttgctccaattccaaagcaggttgttagggctgatttgagacaagcttcttttcttttcctctctgtatagttctctttaatcgtgtttattagt

SEQ ID NO: 370851 - DNA, 201 bp, Homo sapiens
agtccatgattatttttgttttcaatgaagaaaaaagaaaagaaaaaaaatcataactttttttcccccggctggccttaaggattttaaaagtttgctcmcatatgtattatggaaagcaaggaaaaatatagtgtggaagctaagctaaataaaggtcagtgagtaaactttcgatatgagcagagctttttagagcag

SEQ ID NO: 370852 - DNA, 201 bp, Homo sapiens
tataatattttctggtttttggtttctcccatcaggatggaggaagccttgtaggagaagtaaatgaagatggggagatgactggagagaagatagcctaygtgtaccctgatgagaggaccgcactttatgggaaatttattgatggagagatgatagaaggcaaactggctacccttatgtccactgaagaagggaggc

SEQ ID NO: 370853 - DNA, 201 bp, Homo sapiens
agtcagctctctttgtcttaattctggggcctaatctgaagggacaatggcaatgtggggcaacattttcccacagtggatcacagaagtgtcagagcatragcagatacctgtgatgccttttgaaacctcaccttggaactgacatggtggcactttactcacttttcactggtcaaagcaagtcacatggccaagcca

SEQ ID NO: 370854 - DNA, 201 bp, Homo sapiens
atgagccattgcacctggctagaaaatattttgcttaatactttattttgttcataacttaagtcaaaatactctttttttgttttgagacagagtcttgytctgttgcccaggatgaggtgcagtggtgccatgtcggcttactgcaacctctgcctcgtgggttcaagtgattcttctgcctcagcctcccaagtagct

SEQ ID NO: 370855 - DNA, 201 bp, Homo sapiens
cagcagatttgtttgaatttggtgttggttacctgcttgctttatggggctgatacacagagtactgatgggctagactaaaattctgaaccagtgtgccragaatgagctacttgttagcttcaagatgctgatcccctcagccctagggtaagatagcaaagtggggcctgagacttcctgggcacctgtcttctcata

SEQ ID NO: 370856 - DNA, 201 bp, Homo sapiens
atccaaactggagtgcagtggcataatgtcagctcactgcaacctctgcctcccagtctcgagcgatcctcccaccttagcctcccaagtagctggtaccracaggtgcacaccaccacccctggctacttttttgtatttttggtagaggtggggtttcaccatgttgcccaggctagtcttgaactcccgagctcaggt

SEQ ID NO: 370857 - DNA, 201 bp, Homo sapiens
cccacgaggaggagccagtgagcagaggagagaaagcagccgtttctttccccacactccctgacgcctgatacagcagaggaggaaatttctgtaatggrccatagcaggaacaaggggagaaaaaagtgatgattttccctacagtccacacttgtaagctcaccctaaggacagtgtatttctttcaaaaatttacct

SEQ ID NO: 370858 - DNA, 201 bp, Homo sapiens
tcagctcactgcaacctctgcctcccagtctcgagcgatcctcccaccttagcctcccaagtagctggtaccaacaggtgcacaccaccacccctggctamttttttgtatttttggtagaggtggggtttcaccatgttgcccaggctagtcttgaactcccgagctcaggtgatctatccgcctcagcctcccaaagtg

SEQ ID NO: 370859 - DNA, 201 bp, Homo sapiens
caggcatggtggtgcacacctgtaattccagctgctcaggaggctgaggcacaagagtcgcttgaacctgggaggcagaggttgtggtgagccaagatcaygctacttgcgctccagcctaggtgacagagtgagaccctgtctcaaaaacaaaaataataataagataaatgagttaatatctctgatgtcctttgacct

SEQ ID NO: 370860 - DNA, 201 bp, Homo sapiens
cagcttaagaaagctatttgaattggtctgattccctgaaaacaatatatgcatgtatttctgagccaggtttggttatagggagaaaaaaacagaaaagmcaataaatctgggcattaataggcttaaatagtatttagttatttgggatctgaagaagaatctccaaaggaagcttgtccaaaagtggaaattttagca

SEQ ID NO: 370861 - DNA, 201 bp, Homo sapiens
gaacttgttctcagtttccatcagtagcttttttcttctctattttctccagcagagtaaaaggattcccaggaaccatgagattgggtattaaatctccrtctttcttctcagtcttacccacgtccatgaagcaccttttcctagcagtcgatgataatttaggaggctgcgctgaatccatgtcagggctgacacagc

SEQ ID NO: 370862 - DNA, 201 bp, Homo sapiens
tcaaactatcaggatgctaatgatatcagcagggtggagcattcagtcttccttacttgcccctactggccatgatcatggatgtatgtatatacatagayatacatacatacatacatacatacatagatatatagatatacttaaataaatccccatatgtcttccaaggagatggaagggatttcatttgactggata

SEQ ID NO: 370863 - DNA, 201 bp, Homo sapiens
aacctaaaatcagaatactcatgctttaccagatggtttgccctacaaataaggaatgaatgagaacataaccttattttaaaaattgtttttaaagtagmtattgtgtccattcccgcctcctctattaaaagggaagaagaaattatcctgagattcagtaactgggacttctttacatccactcggtcccgagataaa

SEQ ID NO: 370864 - DNA, 201 bp, Homo sapiens
atgttcctgaacttgcaaatatatattacaaggagagagatggagaagtgctggtaaaatcacgtgagcatccctgtgagctttcttctggtataggaccrtgggtctcaaactatcaggatgctaatgatatcagcagggtggagcattcagtcttccttacttgcccctactggccatgatcatggatgtatgtatata

SEQ ID NO: 370865 - DNA, 201 bp, Homo sapiens
cacctttttgtaaagcagagttttgcttacaaactgtaaattttaaattgtcagatattttacttcctttcttttgggtggatacttgagtgccatagagrcccatttcagtatgttggtattggcctgggcatgttggctcacatctgtaatcccagcactttgggaggctgaggcaggaggattgtttgagcccgggaa

SEQ ID NO: 370866 - DNA, 201 bp, Homo sapiens
ctgcaggcaaagtgcgttgttttaaagggggtaacatttctcaggctctcaatgatctgatgcaatgaggggtgagaacagcaataaaaaccttctaaatracttttgtaaaatttcattttaattataattccaaccttcatttccccgttgcccccaaccccacctttttgtaaagcagagttttgcttacaaactgta

SEQ ID NO: 370867 - DNA, 201 bp, Homo sapiens
agaaagagcaatgactatatccctagtgcactttctatccattaaaaatgcttctaagtatttttctttctatgtaagtgccatgattcatttttaaattwacatcccttttcctagaaggcaaaaaaaaaaaaaaaaaggcagcatttgggatcactcaaaagtcatcctacatcattggctttgagtagctagctgttc

SEQ ID NO: 370868 - DNA, 201 bp, Homo sapiens
acactctattgcgttcagcacactctcccagatgtcacaatctggcatcttagtaccccgaagcaagattctgccaccttgttggttcttctgcttcatcrgtttctcagcttgttgcctctcctcatgagattgatgaaaaaatgcttggcaaagttcttcaaagccacatcattgcagtcccagtaataagacataaac

SEQ ID NO: 370869 - DNA, 201 bp, Homo sapiens
ttctttcttttcagtctgtcccttatctacactctgaaaatgatgatgataatgaacaggaaaatgtaaataaaagaggattataagagaagctctaggcmtggaaattcaacacagggtctgttttttggttttttttcagtgtaccagaggttaaccaacctgtatttcaggaacattttttttagtgaaatatgttaa

SEQ ID NO: 370870 - DNA, 201 bp, Homo sapiens
ggccaacagggcgaaaccccatctctactgaaaatacaaaaattagccaggcatggtgacaggcacctgtaatcccagctgcttgggaggctgaggcaggwgaatcgcttgaacccgggaggcagaggttgcagtgagctgagatcacgccattgctctccagcctgagtgacagagcaagactgtctcaaaagaaaaaaa

SEQ ID NO: 370871 - DNA, 201 bp, Homo sapiens
gcccactcccagagggtcacatcctgttctacttcatgtcttatttatgaggatggctaaactctagctcttgagtcttgatgtggctttttctggtaccytctctgggattcttcttattccttagcaacagatctgtttatgaataagcgtactatctgaaattggttttctctttgcctcgtgttttgtaagcatggc

SEQ ID NO: 370872 - DNA, 201 bp, Homo sapiens
cagatgaacaggattgggagccttcggcaaatgaacatagccatagtgttaacctcgtttctggtcccaagaggacttgttgtaggaaggagatactgctytcttcataggatgcttcacagggaaatactaaataaacaggttggcagagaggtctagacttccctcttgggaagaaatcttcatctactttcatgctag

SEQ ID NO: 370873 - DNA, 201 bp, Homo sapiens
gaggcaggaagattgcttgagcactccagcctgggtgacagagcaagaccctgtttcaaaaaaaaaaagttggtatcactgcttttctttcctatgactcytttaacctatccagagggaaacttttcctgccccatttccactgcaatttttttatagctcttttttctgaaaagtgtcacttttaaccttattctgcaa

SEQ ID NO: 370874 - DNA, 201 bp, Homo sapiens
gactataaaacagtggaatctcaaccacacttcagttaagcatgagagattggaggcatcaattccaaatatgaggactctcgggagagtacttggtaaaytgtgacatgccctgcagataatattactgataatgactctcagttccaggtaaaaagcaagcttatttaaagttcatattctggaatgtgtctaagtctg

SEQ ID NO: 370875 - DNA, 201 bp, Homo sapiens
gctggatgaggagctatgcatcatgtttttcttacccaggtgaaaagctctgggttcctaaactgttattatccctactggtgctatattaataatgggastgcagaagagaaatttcttgggactcatgtcctagacatactatatataatattttctggtttttggtttctcccatcaggatggaggaagccttgtagg

SEQ ID NO: 370876 - DNA, 201 bp, Homo sapiens
gctaaactgattatttggatattaatacctaaatcaaaagtaggacactgaatttatatgcctaaatttaacttgatcgcaacaacatttcactaaaaaamgctcttagcaatacactgagtggctttttttaatgaaaagaaaaaagcaaatttaatttatttcaatgagagaaatggcatcagatatttagaaaataat

SEQ ID NO: 370877 - DNA, 201 bp, Homo sapiens
gaaaagatgaaatcattgtcgggcgacggacaagtctcccgacccgggactcgaacgtgcgccgtccgggaggcgggcagccctcccctcagctgcccccragcgaactcagtcaggcctccccctcccccttcctgcttggctgggatgcagccgccacgctgtgcaggcgcgccgcgagtccgcaccgagattgctggg

SEQ ID NO: 370878 - DNA, 201 bp, Homo sapiens
tatttcattttattttttaagggacaggatttcactctgttgcccagactggagtggactggtgttatcatagcccactgcagccttgagctcctgagctsaagcaatcctcctgcctcagcctccccagtagctaagactacaggcatgcaccacaatgcccagctaaatatttttaaatttttttgtagaaacagggtc

SEQ ID NO: 370879 - DNA, 201 bp, Homo sapiens
tataggagtctcagaaaggcagtgtccagacatccttttgtttgcctctgaaaaagtgcagataactctctttacttgtgtacactaaattaattcttaaktacatttgaactgaatattttcctaacacactagaaatccaaaatttaatattgagaagggagatcttatgaatagtgggtaggagtgtcttgctaaaga

SEQ ID NO: 370880 - DNA, 201 bp, Homo sapiens
accctgatgagaggaccgcactttatgggaaatttattgatggagagatgatagaaggcaaactggctacccttatgtccactgaagaagggaggcctcaytttgaactgatgcctggaagtaagttgaatctgcttcagatgggttgctccaattccaaagcaggttgttagggctgatttgagacaagcttcttttctt

SEQ ID NO: 370881 - DNA, 201 bp, Homo sapiens
accaactcacctcatgacacatttctcaaaatgtatccccttcattaagtgatgcatgtcgtatatttgaaattactccaaaatgaaaagtttattttttwaaaaaaaggaagcagtaatctttgaactacaaactgtgatatctatgcccttgatctatgttctgaaaggagacagtgttataatatttagaaatgagga

SEQ ID NO: 370882 - DNA, 201 bp, Homo sapiens
ccctgtctttaaaaaaaaaaaaaaaattgttgagagtgagaattctaaagggaattattatttttttagaatttctggttgctttagctgggtgtggtagwgtgtgcctacagtcccagctactcaggaggctgaggcacaagaaccgcttgaacctgggaagtggaggttgcagtgagccaagatagcaccactgcattc

SEQ ID NO: 370883 - DNA, 201 bp, Homo sapiens
ccagggtgaattaggccaaagtgtcattccaagctgcacacagcttaacaacaaccctttaaaggggtggtaacaaacaatcataaatgctacttaagacyactcctttaaaacaaaccaggttgttgatttcattgcaaggacatgatttttctcaccaaaaggaagacagcacaggagacaagagaagatttcatttgt

SEQ ID NO: 370884 - DNA, 201 bp, Homo sapiens; identical to SEQ ID NO: 80329

SEQ ID NO: 370885 - DNA, 201 bp, Homo sapiens
aatgtaggaaatccacagagatagaaagtagattagtggttccctagggctggggaggggtgataaggagtgtgtgctaatgggtatgggatctcactgcrgtctcattttggactgattaaaatgttctaaggcgggtgttctaaaattagatgatggtgatggttgccgaattttgtatgtatttgtgatattcagtgg

SEQ ID NO: 370886 - DNA, 201 bp, Homo sapiens
ggggacgttatacaatctcgttgtttgtatcataggatgttatgattttgtaacagcgaatactggaaaatactctttagcgtatttatttggttccactmcatacagtacgtcgtgatgtttttcagtgtggtgtggtatgataccagaatgttttaaactaagcatgtgagtaaataatttttagctgttggttgaatc

SEQ ID NO: 370887 - DNA, 201 bp, Homo sapiens
ctctgatgtcctttgacctttggggagaaaggtcctctctaaggctcgctttcttgttttctgcaggttgacagcagggactgggcccttaatgggaacaycctctcccttgatgaagaaacggtcattgatgtgcctgagccctataaccacgtatccaagtactgtgcctccttgggacacaaggcaaatcactccttc

SEQ ID NO: 370888 - DNA, 201 bp, Homo sapiens
ggctgaggcacaagaaccgcttgaacctgggaagtggaggttgcagtgagccaagatagcaccactgcattccagcctgggtgacacagagactctgtctyaaaacaaacaaacaaacaaaaacaaacaacaacaacaaaaaccttctggttgcaaataaacattcacttcaaattaacttaacgcagaaaagaaaggggg

SEQ ID NO: 370889 - DNA, 201 bp, Homo sapiens
cagtgagccaagatagcaccactgcattccagcctgggtgacacagagactctgtctcaaaacaaacaaacaaacaaaaacaaacaacaacaacaaaaacyttctggttgcaaataaacattcacttcaaattaacttaacgcagaaaagaaaggggggatttattggcaagattcctgcagacctcaggtgttttgaaat

SEQ ID NO: 370890 - DNA, 201 bp, Homo sapiens
tgagccaagatagcaccactgcattccagcctgggtgacacagagactctgtctcaaaacaaacaaacaaacaaaaacaaacaacaacaacaaaaaccttytggttgcaaataaacattcacttcaaattaacttaacgcagaaaagaaaggggggatttattggcaagattcctgcagacctcaggtgttttgaaatgtt

SEQ ID NO: 370891 - DNA, 201 bp, Homo sapiens; identical to SEQ ID NO: 80331

SEQ ID NO: 370892 - DNA, 201 bp, Homo sapiens
cctatagaccgatctttagtctaatgttctgccatgtttgtatctctcctctgccccttccagttataattattgacctgctgactggccagtgggttagsgggtacagggtcctgtgactgtagggtccaatggttggggaaggagagaaattaatgcaaatatctcacataaaacactccttgacctgtcgcctcacca

SEQ ID NO: 370893 - DNA, 201 bp, Homo sapiens
gttctgccatgtttgtatctctcctctgccccttccagttataattattgacctgctgactggccagtgggttagggggtacagggtcctgtgactgtagsgtccaatggttggggaaggagagaaattaatgcaaatatctcacataaaacactccttgacctgtcgcctcaccagcttctccatttctctgtgtgcttt

SEQ ID NO: 370894 - DNA, 201 bp, Homo sapiens
catgtagctggcactcagtaaatttgtcataaaaattttagtctaaggagctagatggaattcataggaaaatttccactcaatagaacatacattccacrcacaattttggttatttataaaaagtgacggctgggcacagcagctcacgcctgtaatacccgcactttgggaggctgagccaggtggatcactagaggt

SEQ ID NO: 370895 - DNA, 201 bp, Homo sapiens
tggaggggtattatgtggatgatgccttgcagggccagggagtttacacttacgaagatgggggagttctccagggcacgtatgtagacggagagctgaayggtccagcccaggaatatgacacagatgggagactgatcttcaaggggcagtataaagataacattcgtcatggagtgtgctggatatattacccagtaa

SEQ ID NO: 370896 - DNA, 201 bp, Homo sapiens
atagtaaatattttaggctttgcaagccatataatatctgttgcaactactcaattctgcctttgtagagctaaagcagtcataggcaatactaagcaaaygggtatggctgtgtcccaataaaactttacttacaaaaatgagcagcagccagactggaccctcaggccatagttaactgacccctgttatgaacccttt

SEQ ID NO: 370897 - DNA, 201 bp, Homo sapiens
caaactcacacaggaacattttgaatgctgctgagagtccaaagtcaatagggttgccaggatgagcaaataaaaatctagttaaatccaggacacccagttaaattggaatttgctcaacaaaaaaagtaagtataattatatcccattcactatttgggacattcataaactaaaaaattatttgttgtttatctgaaa

SEQ ID NO: 370898 - DNA, 201 bp, Homo sapiens
cgcttttttttaaccccaacccatgccatagaagtaattactattggcagagaatttgcacatcttaactaaacatattcaaggtaaaatatagaaatagscatttttaaagttttattttaattgacacataattctacatttttctggggtaaagtgtgattttgatacataaacacattgtgtaatgatcaatcaggg

SEQ ID NO: 370899 - DNA, 201 bp, Homo sapiens
agcttacattatccacaaaggtccagacaaatagacaaatgaaatagacattacaaaattagcttctgggctccaatgactagaaaattctttttcattgtttttttttttttttttttgagacagagtctcgctcagtctcccaagctggagtgcaatggtgagatctcggctcactgcaacctctgcctcccaggttca

SEQ ID NO: 370900 - DNA, 201 bp, Homo sapiens
gcagagcagttaaggctcttaaccactgtgcctttgggtcatcttcaacaatcaacacctgaaattgaattctttcttttcagtctgtcccttatctacactctgaaaatgatgatgataatgaacaggaaaatgtaaataaaagaggattataagagaagctctaggcctggaaattcaacacagggtctgttttttggt

SEQ ID NO: 370901 - DNA, 201 bp, Homo sapiens
cttctggatggaaaaaaaaaagaaagaaagaaagaaacatctctggcaccctagcttaaattattcattactttttggtaaccctgttcaatttaaaaagmgtttaagaatcacctactgtgtccctaccacttatcaaggtatagaattatatgatagcctcttccctaaagtactcaatgacccctagcaatgaagtaa

SEQ ID NO: 370902 - DNA, 201 bp, Homo sapiens; identical to SEQ ID NO: 80332

SEQ ID NO: 370903 - DNA, 201 bp, Homo sapiens
attttcatgtatctttctttaattgttctattttgaccatgatttatgaacctaaaggcaagacttttcacaatcctagaatggtgaacaagaaggagatrtttcttcagattggctttgcgggggctatggaatattagggtcatgtggtttttagcctaattatgaggtggagatgaggtcattcattcagctttattt

SEQ ID NO: 370904 - DNA, 201 bp, Homo sapiens
cagagcagttaaggctcttaaccactgtgcctttgggtcatcttcaacaatcaacacctgaaattgaattctttcttttcagtctgtcccttatctacactctgaaaatgatgatgataatgaacaggaaaatgtaaataaaagaggattataagagaagctctaggcctggaaattcaacacagggtctgttttttggtt

SEQ ID NO: 370905 - DNA, 201 bp, Homo sapiens
actattaataatgatgctggggcaggtagcttaagccttgaatgtctggggcaatctgggacacatggtcactcagttgtagctaactaaacaattagagyagcacagaatctttaaaagcccctagaagcatctcaggctctaacttgcacagtgccaggagtgtgtgtgtgcacatgcagtaaaccgtacctgtgcgtg

SEQ ID NO: 370906 - DNA, 201 bp, Homo sapiens
cgtgtgtccttggagccagaggaggggccagccaggagctaaagatgttcccagtgtctaggggtgggaagtgggatgactcacagcctgtcggtgaccargatctgagacccggcttctgggctaagatctgcttcaactccgtgacttcccctttcatgaaggggagatggcttcccctttcagggcctcagctttctg

SEQ ID NO: 370907 - DNA, 201 bp, Homo sapiens
agttttttctttttcagcctctctagggacaagacattggtctctgggatgaatgggaggagcctctactattgacacagccacagcaaacaatgcatgarctttgctggagcaaagaagggtgtgggcctgttgggagaggcaggtgccagcaagagatgctgagtaccccgcccctctttccttaccactgtgctggac

SEQ ID NO: 370908 - DNA, 201 bp, Homo sapiens
ctgtctccagagaaactgagaggtgtcacacctgtcagaaagcagcatcccctagcaatctgtcttctggcagaattttagcagaaatcttttcaatatcwgaagcaactgcctggctgttattgaccttagaaactcaaagaaagggctttttttgtttgtttgtttgtttttgtttatttgttttgtttttagacagga

SEQ ID NO: 370909 - DNA, 201 bp, Homo sapiens
tttgggggggtggtttctgcccagatcaatagcaatgatgacaatggtgtgcttgctgggaattggagcggcacttacaccggtggccgggacccaaggarctggaacggcagcgtggagatcctcaaaaattggaaaaaatctggcttcagcccagtccgatatggccagtgctgggtctttgctgggaccctcaacaca

SEQ ID NO: 370910 - DNA, 201 bp, Homo sapiens
ctctgtctctacacatgttgtgaaatcttcagcaaccctaaatcccttaattagagggagagaaaaggcaagtgatcaattggcttcttttaaaagcccayatctgcatgcttcgtcttcactgcggtctgaggcgcagagtgtggccaagcaggaatttcatcctgtgtgtagctgggtggctccacctatgaattgaaa

SEQ ID NO: 370911 - DNA, 201 bp, Homo sapiens
agtaccagtcatctcattagcatacaagaagtcactcatcattttggaggttccaaggctttcaggaactttgtgccaagaaaaagcagagatcaaatacrtgtttctcattatgccacacctgggttcaggatcctggctctgccaatttccaggtatgtgacctcagttaaactacctggtctctctgagcctttgttc

SEQ ID NO: 370912 - DNA, 201 bp, Homo sapiens
tctgtctccagagaaactgagaggtgtcacacctgtcagaaagcagcatcccctagcaatctgtcttctggcagaattttagcagaaatcttttcaatatmagaagcaactgcctggctgttattgaccttagaaactcaaagaaagggctttttttgtttgtttgtttgtttttgtttatttgttttgtttttagacagg

SEQ ID NO: 370913 - DNA, 201 bp, Homo sapiens
acggcacgcttgtacatgaagtgtggaaggactctgccacaatgtccctggaccctgaggaaggtaacgcatcccgcagttggaggagatccacgaatccraggtagccaatggccttctggggctgcagggtgtctgctgggctccaggttagtcagctacgaatggagcagccagcggcccctgtggttaagccatgta

SEQ ID NO: 370914 - DNA, 201 bp, Homo sapiens
agacgaccagcttatggtaaaaggatacaactcagaagcagccagatggaaaagatgcctgagacaaggtgtggggaggggcacagagcccccatgccccyctcccagcacttccatgagttcagcctggaagctcctcaggccccatcctttggggtttgggtttttatgaagacttcatttataggcatgattcattaa

SEQ ID NO: 370915 - DNA, 201 bp, Homo sapiens
tgagctcagatagacctttgctcagtcaataaacatattctgagccccatactgagtgcctgcttcatgctgggccttggggatgcaacagaggacactgyagatgggctggaggtgtggggatgtaggacaagtattttcaacaatgttatgacgtagaaacaagcatagggggccagggagcaaaaactcgggggcgga

SEQ ID NO: 370916 - DNA, 201 bp, Homo sapiens
caacatgaccgagccttgaaaacattatgctaagtaaaataagtcagacccaaatcacatattgtgtggttccatttgttaatttatgaaatgcccagaayagggctgagcgaggtggctcacaactgtaatcccagcactttggaggctgaggtgggcggatcatttgaggtcgggagttcgacaacaggatggccaaca

SEQ ID NO: 370917 - DNA, 201 bp, Homo sapiens
ctgtagtcccagctactgagagaggctgaggcaggagaatggcgtgaacccgggaggcggagcttgcaatgagtcgagattgcaccactgcactccagackgggcgacagagcacgactgcatctcaaaaaaacaaacaaacaaacaaaaaagatatagttagactaaagaccattgtcctgtgaaacttttgtttctgta

SEQ ID NO: 370918 - DNA, 201 bp, Homo sapiens
aaggttcagaagccatccccactccccctcactcggatcccctggcttctccttccagaggcagaacatcccataaagatctcgtacgctcagtatgagargtacctgaagtcagacaacatgatccggatcacagcggtgtgcaaggtcccagatgagtctgaggtggtggtggagcgggacatcatcctggacaacccc

SEQ ID NO: 370919 - DNA, 201 bp, Homo sapiens
tcagcactttgggaggccaaggagggtggatctgttgagatcaggagttcaagaccagcctgaccaacatggtgaaaccccgtctctagtaaaaatacaarattagtcgggcatgatagtacatgccttaatcccagctacttgggaggctgaggtgggagaatcgctggaactcaggaaacggaggtaaagccgtgagcc

SEQ ID NO: 370920 - DNA, 201 bp, Homo sapiens
aaggccttggctctaacgaaagactggagttcattgtctccacaggtacctgctcattcccctccttgcccaaacacacacatacttgagtagcccttgtkcattcaaggactgatggggaccacactggggccactggcattgggttctagccttgctctgtcattgattcagtgtggccttgggcaagttgctgtccat

SEQ ID NO: 370921 - DNA, 201 bp, Homo sapiens
tgggaggtcaaggcgggtagattatctgaggtcaggagttcgagaccagcctggccaatacgacaaaatctcatctactaaaaatacaaaaattagtgggrcatgctggcacgcgcttgtagtcccagctacttgggaggctgaggttacagtgaggcaagagaactgcttgaacccaggaggcaggggttgcagtgagct

SEQ ID NO: 370922 - DNA, 201 bp, Homo sapiens
attatgctaagtaaaataagtcagacccaaatcacatattgtgtggttccatttgttaatttatgaaatgcccagaatagggctgagcgaggtggctcacractgtaatcccagcactttggaggctgaggtgggcggatcatttgaggtcgggagttcgacaacaggatggccaacatggcgaaaccctgtctctattaa

SEQ ID NO: 370923 - DNA, 201 bp, Homo sapiens
acgaaagactggagttcattgtctccacaggtacctgctcattcccctccttgcccaaacacacacatacttgagtagcccttgtgcattcaaggactgayggggaccacactggggccactggcattgggttctagccttgctctgtcattgattcagtgtggccttgggcaagttgctgtccatctctgagcctgagag

SEQ ID NO: 370924 - DNA, 201 bp, Homo sapiens
gttttttactaaacattatatcatgagcattctccctatgtcattaaaaaatcttcaaaaataagatcatttcaaatacgtcgtaagtgcatcatattctmttatatggaatggaacctatgtaaagtcaggttacataaaatggaatctactgttaacctgtttcccttttttaaccccagctgcctggattcaaatccc

SEQ ID NO: 370925 - DNA, 201 bp, Homo sapiens
agaggacagcgactcctcccctgcctccttcctatagctgccgggtggctctggtcaggtaatttatgtgaaggagcttttataagtgtagatgataaacrggcctaaggtagtgaggtctcagtccctgctgcacattagaatcaccaggaaagctttaaagaaaatgctggccgggtgcaatggctcacgcctgtaatc

SEQ ID NO: 370926 - DNA, 201 bp, Homo sapiens
cttcgaggcaagttctttcctccacctaagccttcacctaatcgagacattcttgtctctattgaacggatcaatgcctagctcactcagagcagggcacsgatttttaaactggagaaggtgatctgtatgaaaagataataatttgggtaaaaccccattatctaacctggtactgactggcaattagcactgaggacc

SEQ ID NO: 370927 - DNA, 201 bp, Homo sapiens; identical to SEQ ID NO: 80338

SEQ ID NO: 370928 - DNA, 201 bp, Homo sapiens
agtgagccccacttttcctcctcctccagctcggagcagtctcgcacatcccacagccaccctaacagggagcaaggctcgttggtgctgccggggctcamgcttggtgtcagaaaaggcagagatgatgagtgcaaatgcgagctctggagcctgcagtcctccactgtggagtggggtgacaacgaccaaggcacctgg

SEQ ID NO: 370929 - DNA, 201 bp, Homo sapiens
ggagttaatgagctaatgcacgtaaacactttgaaagatggctggcacacaaatgcccagtaaacttcaactaatagtatgatcaccaccaccacagtcaycccaggtctgacctagtgtggcgtgcaaaatacccctcatattcttcctgcaggtttccctgttgggaggcaccctggagctcagttttttctttttcag

SEQ ID NO: 370930 - DNA, 201 bp, Homo sapiens
ctccaggacctgtgtctaagtcattgctgccttggttggctacagggcggcagcttggggtcatatctggtcaggcaaaattgactttcagtctgggcttkagtccagcctctgcctgagtgtttgatattgcgtaagtgacttcacctgactggacttccaaagccctcatctgtgaaatggggacagcaacaccatttt

SEQ ID NO: 370931 - DNA, 201 bp, Homo sapiens
caagtaaaccaaggcccagagagaagggaacagctggccaccgccagagtcaaggctaggcctcagaacctgggactcccagcccatgcccctccaaggcrtcctggtacatcaccagccagcaacagcatcttcaaagtggctgagaacaaagacccctctttctctgctcatagggcttcctttactttgcagcattca

SEQ ID NO: 370932 - DNA, 201 bp, Homo sapiens
gaccgagccttgaaaacattatgctaagtaaaataagtcagacccaaatcacatattgtgtggttccatttgttaatttatgaaatgcccagaatagggcygagcgaggtggctcacaactgtaatcccagcactttggaggctgaggtgggcggatcatttgaggtcgggagttcgacaacaggatggccaacatggcga

SEQ ID NO: 370933 - DNA, 201 bp, Homo sapiens
ctgatgaatgcatcgacaaaacatggaatattcatataatagactctcattcagccataagaaaagaatgagctactgatgcatcctccaacatgaccgarccttgaaaacattatgctaagtaaaataagtcagacccaaatcacatattgtgtggttccatttgttaatttatgaaatgcccagaatagggctgagcga

SEQ ID NO: 370934 - DNA, 201 bp, Homo sapiens
agcacagaaaattcatggttccctgttgcccttggggtttagtccacattctccactggtcaccacccacagcagctctctctgccacaccaagctccccsttaggcaggctgcctctgccatccctatcccgggcctctgcttcctcctctggcctccctctgtctcctgccccatcaggggttgggtcccaggctctcc

SEQ ID NO: 370935 - DNA, 201 bp, Homo sapiens
gaatggaagaagaggaagaaaacaggcaaagggcatttgccaactgtttatataaagaggttttctaaaaaaaaaaaaaaaaaaaaaaaaatttaaaacargtattcaaacaaatattaccatgtgcacattcatagcagcactactcacagtagctaaaatgtagggacaatccagatgtccatcagctgatgaatgcat

SEQ ID NO: 370936 - DNA, 201 bp, Homo sapiens
agaactcactactgcactgagggcctggcaaggctgggcatggcctgtcctgggcaaggatccctctgtgtccagactgtccattctcattggccttgccrcttacaggcactccaaggagaaggggtaggacacacaggctggaggagccttcagagatcctggtccagcctctcattgcacagttcagataaacgacag

SEQ ID NO: 370937 - DNA, 201 bp, Homo sapiens
ttgaactcctgacctcaggtgatcttcctgcctcggcctcccaaagtgttgggattacaggtgtgagccaccgtgcccagccactttttagcatttctgtyagccctcattaactctagacttctgtaaaataaaaatgcatctatgtctagagaaaaggtgtgggaagtagagtctggttgggggctagggatagtccca

SEQ ID NO: 370938 - DNA, 201 bp, Homo sapiens
gaaggggtgcagaactcactactgcactgagggcctggcaaggctgggcatggcctgtcctgggcaaggatccctctgtgtccagactgtccattctcatwggccttgccacttacaggcactccaaggagaaggggtaggacacacaggctggaggagccttcagagatcctggtccagcctctcattgcacagttcaga

SEQ ID NO: 370939 - DNA, 201 bp, Homo sapiens
ctcacagcctgtcggtgaccaagatctgagacccggcttctgggctaagatctgcttcaactccgtgacttcccctttcatgaaggggagatggcttcccmtttcagggcctcagctttctgacctgtcatgtgggcatactagattacatcactgtttttcaagctgccagttgccatccattagcaggttgtgaaatca

SEQ ID NO: 370940 - DNA, 201 bp, Homo sapiens
aggccctgtcttgcctgactctgccatgacagcccaggacctcctggaaggggtgcagaactcactactgcactgagggcctggcaaggctgggcatggcytgtcctgggcaaggatccctctgtgtccagactgtccattctcattggccttgccacttacaggcactccaaggagaaggggtaggacacacaggctgga

SEQ ID NO: 370941 - DNA, 201 bp, Homo sapiens
ctttggaggctggagcaccagtgactcaggagatggggaagggctgcgcaaccttccatctctaaggaggccctgtcttgcctgactctgccatgacagcycaggacctcctggaaggggtgcagaactcactactgcactgagggcctggcaaggctgggcatggcctgtcctgggcaaggatccctctgtgtccagact

SEQ ID NO: 370942 - DNA, 201 bp, Homo sapiens
agagctgagtcttagactgagcctggcaagaaaggagtaaggtgggcccagggaacttagtagccgagggagagtatggagaggaagtgagcctggaacaraatcttgaaaccaaatggcctggaagaggtgggattaaagccctggtgacttagaaggctgagtctctttggcctaggagagagtgggtgaggccagcgg

SEQ ID NO: 370943 - DNA, 201 bp, Homo sapiens
gttgcagtgagctgagatcacaccactacactccagcttgggcaacagagagagactccatttaaaaaaaaataaagaaagaaaggaagaaagaaaggaawggagggagggagggaaggaaggaaggaaaagaaagagaaagagaaagaaatagaaagagaaagaaagaaagagaagaaagaaagaaagaaaaaaagaaag

SEQ ID NO: 370944 - DNA, 201 bp, Homo sapiens
  misc_feature (1)...(201): n = A,T,C or G
ccggatcacagcggtgtgcaaggtcccagatgagtctgaggtggtggtggagcgggacatcatcctggacaaccccaccttgaccctggaggtaatggggntccccatcctgtgggaaggggttctgcccccagccagcccagctcccaggagccccactgtccctgtgagccacagctctcccagagggcaaaggagagt

SEQ ID NO: 370945 - DNA, 201 bp, Homo sapiens
gggtagattatctgaggtcaggagttcgagaccagcctggccaatacgacaaaatctcatctactaaaaatacaaaaattagtggggcatgctggcacgcrcttgtagtcccagctacttgggaggctgaggttacagtgaggcaagagaactgcttgaacccaggaggcaggggttgcagtgagctgagatcacaccact

SEQ ID NO: 370946 - DNA, 201 bp, Homo sapiens
aacgcatcccgcagttggaggagatccacgaatccgaggtagccaatggccttctggggctgcagggtgtctgctgggctccaggttagtcagctacgaakggagcagccagcggcccctgtggttaagccatgtattaatgctttggaagtttctgtctctatgaacagagtgatgccaaccaaatgtcagggtggtgcc

SEQ ID NO: 370947 - DNA, 201 bp, Homo sapiens
taccacctcacacagtttgaccgtctaaaaaaaggcagattttcagtgtccatcttatagaagcagaaagtgaggctgggagagatttgtgacttgcttcrgagataaagtatcatagatagtagtggtagtgctgagtcttggtcctaggtttcctgatactgagtccagagccaccccctgttttctatgttgtattgt

SEQ ID NO: 370948 - DNA, 201 bp, Homo sapiens; identical to SEQ ID NO: 80345

SEQ ID NO: 370949 - DNA, 201 bp, Homo sapiens
catcattggaatgtagctctgaataatgggcagggtgttcagtgcagctggacatcgcatctccttaggcagaggacaagctttgccttgtttgtgtttgygtttcttttacacatccgtcgccacccgtaaagccaaagcagacaggactcgggtctcgtgtttctcagtgtagctgtatccagctgtcagcagtgtcag

SEQ ID NO: 370950 - DNA, 201 bp, Homo sapiens
acatttgtttcatttcaagtaatccatatgacttacaaactttcttaaagagaataagaaaagcaacacatcttctcttagcatatatatatatatatatmtcatatatatatatatatatacacctattgcataccttggttgacatcaaaagttcagagtttattctggattccggatgaaaacaattatttttttgag

SEQ ID NO: 370951 - DNA, 201 bp, Homo sapiens
ttttccttcaccaactgcagcagcctctccttcccagcacagaaaattcatggttccctgttgcccttggggtttagtccacattctccactggtcaccamccacagcagctctctctgccacaccaagctcccccttaggcaggctgcctctgccatccctatcccgggcctctgcttcctcctctggcctccctctgtc

SEQ ID NO: 370952 - DNA, 201 bp, Homo sapiens
tagaccacaaaaccaggccaaaaacaatctgaacattgtttccaaagggtgatgtcctcccaattgatccatcatctgtgacaagcaaactcaggtttttrgtggcttttatcctttcctctgggtacatttacagagttgggtcaataggagagagtggtaagcggcattaaaaaaagaaaaaaaagcatggaaatctca

SEQ ID NO: 370953 - DNA, 201 bp, Homo sapiens
tttaaaaaaaaaggacacttgccctcccacatttttcggagtcgggaggaagcagcggtatctttagcccctgtgagcccatcctcctgggaatctgcccrgccagagagagtcctggggcctccttgccccctgctccggagcccaccctgaccgggggacgcttcccacaggacctggcccaaggagggctcagtcaag

SEQ ID NO: 370954 - DNA, 201 bp, Homo sapiens
tcccctccctcagcctgattttccttatttgtaaaaagaggacagcgactcctcccctgcctccttcctatagctgccgggtggctctggtcaggtaattyatgtgaaggagcttttataagtgtagatgataaacgggcctaaggtagtgaggtctcagtccctgctgcacattagaatcaccaggaaagctttaaagaa

SEQ ID NO: 370955 - DNA, 201 bp, Homo sapiens
aaggccctaggatcttggtaggagctgagagatgggagtcagaaggagtcagccttcccctccctcagcctgattttccttatttgtaaaaagaggacagygactcctcccctgcctccttcctatagctgccgggtggctctggtcaggtaatttatgtgaaggagcttttataagtgtagatgataaacgggcctaagg

SEQ ID NO: 370956 - DNA, 201 bp, Homo sapiens
  misc_feature (1)...(201): n = A,T,C or G
gagtcgggaggaagcagcggtatctttagcccctgtgagcccatcctcctgggaatctgcccagccagagagagtcctggggcctccttgccccctgctcnggagcccaccctgaccgggggacgcttcccacaggacctggcccaaggagggctcagtcaagcccggggctgcagatcctcccaccagctcaccctgcct

SEQ ID NO: 370957 - DNA, 201 bp, Homo sapiens
ctcatctccaaaatggggttattgcagtatccacctcatgggtgcttacgattacctggaaattttttcatgagcctgttttctctttgtcttggggggayttaagaaaaaccctatgagaggaattacattttctaatcaggggcgattcccaggggaccctctccattaagcgcctcagcacaagtcctccccactccc

SEQ ID NO: 370958 - DNA, 201 bp, Homo sapiens
  misc_feature (1)...(201): n = A,T,C or G
tcccacatttttcggagtcgggaggaagcagcggtatctttagcccctgtgagcccatcctcctgggaatctgcccagccagagagagtcctggggcctcnttgccccctgctccggagcccaccctgaccgggggacgcttcccacaggacctggcccaaggagggctcagtcaagcccggggctgcagatcctcccacc

SEQ ID NO: 370959 - DNA, 201 bp, Homo sapiens
gtgtgtctcagtttcctcatctccaaaatggggttattgcagtatccacctcatgggtgcttacgattacctggaaattttttcatgagcctgttttctcyttgtcttggggggatttaagaaaaaccctatgagaggaattacattttctaatcaggggcgattcccaggggaccctctccattaagcgcctcagcacaa

SEQ ID NO: 370960 - DNA, 201 bp, Homo sapiens
atggcccctctgggctcagagtcttgtgactccagctgctcattgtttgaaatgaggaccagctgcctcctgtctgcccggctccatggccttcttccacytgggacagcggctactccctgttccttagagacagcccatgagcagcttcattccaccgggaatgacagctgcccgtatttcagcgtttgttcctgtagg

SEQ ID NO: 370961 - DNA, 201 bp, Homo sapiens
ccatggaagcggtcaggaattgctcttgggttctggcctccttctcttctgtaaatcttctaggtgcttcctggaccctcctcatatttttgtgtctggcrctgggaccaaggcaatatctactctctctctctctgaaaaggagatggcccctctgggctcagagtcttgtgactccagctgctcattgtttgaaatgag

SEQ ID NO: 370962 - DNA, 201 bp, Homo sapiens
ggaaggcgaaacatggctggtgagtgcatggcatcttctccatcaggtccttgccagaagcctgtgcttcccctgggccagcctgccaagccagagtgtcyggccaggacagctgcctgccttgggggctctgaaggccagacttcctattttagggtgctagccagaggcggctctttctcagtggtggttgggtccctc

SEQ ID NO: 370963 - DNA, 201 bp, Homo sapiens
gggctgtggctggaaatgaaggtagtggaggaaggcctggcagtgatccgcaccaagtggcctggcatccccagagtgggtgggagagcagtttgtgagcrcagaggagggccccagtgtggaggggaggcaagattccccatccccaaagccacttggaagccctgggttagtggcagagttctcagggatacacacctg

SEQ ID NO: 370964 - DNA, 201 bp, Homo sapiens
acatttttcggagtcgggaggaagcagcggtatctttagcccctgtgagcccatcctcctgggaatctgcccagccagagagagtcctggggcctccttgycccctgctccggagcccaccctgaccgggggacgcttcccacaggacctggcccaaggagggctcagtcaagcccggggctgcagatcctcccaccagct

SEQ ID NO: 370965 - DNA, 201 bp, Homo sapiens
agatggaatctcgctctgttacccaggctggagtgcagtggcatgatctcaactcactacaagctctgcttctcaggttcaagtgattctcttgcctcaayctcctgagtagctgggattacaggcgtgcgccaccatgccaggctaatttttaaatttttagtagagacggggttttgccatattgtccaggctggtctc

SEQ ID NO: 370966 - DNA, 201 bp, Homo sapiens
ttttgtatttttagtagagacagggttttgccatgttggccaggctggtcttgaactcctgacctcaggtgatcttcctgcctcggcctcccaaagtgttrggattacaggtgtgagccaccgtgcccagccactttttagcatttctgttagccctcattaactctagacttctgtaaaataaaaatgcatctatgtcta

SEQ ID NO: 370967 - DNA, 201 bp, Homo sapiens
gaaaagagaggagaagagaagagaagaaaagaaagaaaatgccagtgtcatccctaaccaaagattctaattgaatttgcctgggatgggtctcagaccartagaacattccaggtgattcttctgggcagctggggttgagagcctctggtctcagagattctaaactctctcttaggaagagaagtccttctgtcctct

SEQ ID NO: 370968 - DNA, 201 bp, Homo sapiens
acattttaaaatggtttaaatggcaatttttatgttgtgaattttacctcgattttttaaaagagagagttcctggaagttaatacctgtaacttctgccraaagcttttggcctaaatttaccccatggccaccgagccagagtggagcctgggaaagtagtgcctgcacatatgggggatttcattaccaggaaagaag

SEQ ID NO: 370969 - DNA, 201 bp, Homo sapiens
tcatggctgccctggcccgcccctccttaagctgtaagctggctgcaggcgttcctgacctcagaaagggcagggggatctaggatgctggctctgatgcsgggcctggttctcccacatagctggcctgcaattgcacccttttactgtcctggttagtttggactgtgcttcaggatgggggagttggtcccctacctt

SEQ ID NO: 370970 - DNA, 201 bp, Homo sapiens
ccttgagtccaggagtttgagaccagcctggacaacatagagagaccccatctctacaaataatttaaaaaattttaaaaaaaaaggacacttgccctccmacatttttcggagtcgggaggaagcagcggtatctttagcccctgtgagcccatcctcctgggaatctgcccagccagagagagtcctggggcctccttg

SEQ ID NO: 370971 - DNA, 201 bp, Homo sapiens
ctgtgccaggtgcagtgggaaatatggaggtgaatgagatgtggttctgtcctcggtagcttttagtctgatattttttggtaccaccggttttttaggtragcagcatgcaaggcagactgttattaagctgcatgacaaatacaaaacaagtgctacggggaccaacaagagaaggagattagtcttgtctggaatttg

SEQ ID NO: 370972 - DNA, 201 bp, Homo sapiens
caacagaatgaggctggtggggagaaaatcaattttgaaaaggtggtggagagacaggcgaatacattcagtcccttaaatttgtcccacttgcagttccyagctcagctccgagtcactcagccaggaagttcccaatcagtgtttcttggatgaatgaatttattcactgaacacctaagggagaagagctgtgccagg

SEQ ID NO: 370973 - DNA, 201 bp, Homo sapiens
gattaaatgtctctgttaacaaccagagatgttctaaagtcacaacagaatgaggctggtggggagaaaatcaattttgaaaaggtggtggagagacaggygaatacattcagtcccttaaatttgtcccacttgcagttcccagctcagctccgagtcactcagccaggaagttcccaatcagtgtttcttggatgaatg

SEQ ID NO: 370974 - DNA, 201 bp, Homo sapiens
acataacatctggaacataaaaaagcaattctgaacctggcttctcatttgagctttgtgaccaactgcttgtgtgttctctgccacccctgagcctcaarttttcaagatgaaagctttgaaatgaatgcgttttgaggttccttccagtaccgacttttctttctccacaaaaagaaaccagagccagggagtggacag

SEQ ID NO: 370975 - DNA, 201 bp, Homo sapiens
ctccctccaggaggtggctgaggcccaggaaggggtggaaccttacacacagtgaatccatcgcagagccagctaggtctcagcagtgccctttccaccaygtcctgctgccagagctgagctcctacataagtgcacataacatctggaacataaaaaagcaattctgaacctggcttctcatttgagctttgtgaccaa

SEQ ID NO: 370976 - DNA, 201 bp, Homo sapiens
ccccagtcttcctctgcaggtcattcccaggactgagctcagatagacctttgctcagtcaataaacatattctgagccccatactgagtgcctgcttcaygctgggccttggggatgcaacagaggacactgtagatgggctggaggtgtggggatgtaggacaagtattttcaacaatgttatgacgtagaaacaagca

SEQ ID NO: 370977 - DNA, 201 bp, Homo sapiens; identical to SEQ ID NO: 80336

SEQ ID NO: 370978 - DNA, 201 bp, Homo sapiens
ggaggtcacaggaggcccgtccagcccaaggtccgtgtgtctcgtatcaacactgatctgtgccctccccatcagcgtgccgaccctagggcccaaggagsggtcccgggtccgttttgatatcctgccctcccggagtggcaccaagcaactgctcgccgacttctcctgcaacaagttccctgcaatcaaggccatgtt

SEQ ID NO: 370979 - DNA, 201 bp, Homo sapiens
gtgtcagcagaggagagtagcctgggttgagctggggggacccaacccctggaaaaagagttaagggagctacagtgtgagccagggtgtgagcagctgtrgggcctggggctgcccttttcaacacctgtggggcctcccagagacggaggttcaagctttaagggaagaaacaggacccataagcaggaaagccaagga

SEQ ID NO: 370980 - DNA, 201 bp, Homo sapiens
agtgaacatgacagcctggaccatcatctacaacggcacgcttgtacatgaagtgtggaaggactctgccacaatgtccctggaccctgaggaaggtaacrcatcccgcagttggaggagatccacgaatccgaggtagccaatggccttctggggctgcagggtgtctgctgggctccaggttagtcagctacgaatgga

SEQ ID NO: 370981 - DNA, 201 bp, Homo sapiens
ggggatttcattaccaggaaagaaggaacgagtgaacgttgggatagatatttatctggcagtccaccacattagaattgctgctggcactgatgttctcrggaaaaaaaatctgggaaattgccccaggcctgacactggagttaagcattaactcagggaggtggcacggaatcagagtttggagatgtcacactgtgg

SEQ ID NO: 370982 - DNA, 201 bp, Homo sapiens
cagtgaacatgacagcctggaccatcatctacaacggcacgcttgtacatgaagtgtggaaggactctgccacaatgtccctggaccctgaggaaggtaaygcatcccgcagttggaggagatccacgaatccgaggtagccaatggccttctggggctgcagggtgtctgctgggctccaggttagtcagctacgaatgg

SEQ ID NO: 370983 - DNA, 201 bp, Homo sapiens
cagtaggcaaagaagtcaacctggtcctactgctcaaaaacctgagcagggatacgaagacagtgacagtgaacatgacagcctggaccatcatctacaayggcacgcttgtacatgaagtgtggaaggactctgccacaatgtccctggaccctgaggaaggtaacgcatcccgcagttggaggagatccacgaatccga

SEQ ID NO: 370984 - DNA, 201 bp, Homo sapiens
aaaaaaaaaaaaaaaaaaatttaaaacaggtattcaaacaaatattaccatgtgcacattcatagcagcactactcacagtagctaaaatgtagggacaayccagatgtccatcagctgatgaatgcatcgacaaaacatggaatattcatataatagactctcattcagccataagaaaagaatgagctactgatgcatc

SEQ ID NO: 370985 - DNA, 201 bp, Homo sapiens
aggtacatcagcaccaaggcggtgggcagcaatgctcgcatggacgtcacggacaagtacaagtacccagaaggtaggagggacgctggcggggcagtgcygcgagaggttctattgtgggaggatggctctgaggctggagaggagaaaagtcctcacctcccccgcactggcagccagttctgcctgaatgataggatt

SEQ ID NO: 370986 - DNA, 201 bp, Homo sapiens
tctctgtctctacacatgttgtgaaatcttcagcaaccctaaatcccttaattagagggagagaaaaggcaagtgatcaattggcttcttttaaaagcccrtatctgcatgcttcgtcttcactgcggtctgaggcgcagagtgtggccaagcaggaatttcatcctgtgtgtagctgggtggctccacctatgaattgaa

SEQ ID NO: 370987 - DNA, 201 bp, Homo sapiens
tggttggctacagggcggcagcttggggtcatatctggtcaggcaaaattgactttcagtctgggcttgagtccagcctctgcctgagtgtttgatattgmgtaagtgacttcacctgactggacttccaaagccctcatctgtgaaatggggacagcaacaccattttgatagtcagtatttcgtgactattaaaaaaca

SEQ ID NO: 370988 - DNA, 201 bp, Homo sapiens
cttggggatgcaacagaggacactgtagatgggctggaggtgtggggatgtaggacaagtattttcaacaatgttatgacgtagaaacaagcatagggggycagggagcaaaaactcgggggcggaaggtgaactctagccctaccagccataattgtgtgacctcgagcaagtttcctctgatctctgagccctcgcttc

SEQ ID NO: 370989 - DNA, 201 bp, Homo sapiens
cctccatggaaaaggcctgtgcccctacaacacacacaaacacacacacactcacacaatcacacacactctctctctctctctcagacacacacacacaygagctagatcccctagaaggcatctatggctctgcactcattgtgtagagaatatctccaaccagtctgggcgtggtggctcacgcctctcatcccagtg

SEQ ID NO: 370990 - DNA, 201 bp, Homo sapiens
gcttcacataaggaactaatagaaactgattaattatactgcccatcttgaaagaattctgtctccagagaaactgagaggtgtcacacctgtcagaaagmagcatcccctagcaatctgtcttctggcagaattttagcagaaatcttttcaatatcagaagcaactgcctggctgttattgaccttagaaactcaaaga

SEQ ID NO: 370991 - DNA, 201 bp, Homo sapiens
cctggctctgccaatttccaggtatgtgacctcagttaaactacctggtctctctgagcctttgttcctcattgtaagatttcactgaccacatacataasatgttctgtggactgcgcatagcagttggcataaagaaggctgatgacaaaagtgagccccacttttcctcctcctccagctcggagcagtctcgcacat

SEQ ID NO: 370992 - DNA, 201 bp, Homo sapiens
gcatttcacaggttgttggggaaggtgggagaatgtaagtgtggtctgcagacgtcaacatggtcactcttccttgtgtacctgtgttcctggaaggtcamcaccttctcctagatctatcttcaggtcaagccttttgtgaactgctcagtcagccctggctcagaggcttgcagtcggttactcagctctgtgtgccct

SEQ ID NO: 370993 - DNA, 201 bp, Homo sapiens
tacatgactgtacgatcctgtggggttccttaccttaccccacaccttgatctctggctgtctcagccaaacttcctaaacaatggagaatgggcaggtcygttgtgggggtgggggagggggtccctgaaggactcccagcaatgccccagcccttatgcgacaggacagatcaccctgcctgatgttgcccagatcttc

SEQ ID NO: 370994 - DNA, 201 bp, Homo sapiens
atgccgaccgcatcacctggctgtacgacaacaccactggcaaacagtggaagaattccgtgaacagtcacaccattggcaggtacatcagcaccaaggckgtgggcagcaatgctcgcatggacgtcacggacaagtacaagtacccagaaggtaggagggacgctggcggggcagtgccgcgagaggttctattgtggg

SEQ ID NO: 370995 - DNA, 201 bp, Homo sapiens
caccaccatgcccggctaatttttgtattttagtagagacaggctttcaccatgttggtcaggctggtcttgaactcctgacctcaggccatccacctgcytcagcttcccaaagtgctgggattacaggcgtaagccactgcacccggccaaaatgttttatatatatttgggcatttatattcctaaccataagtatgc

SEQ ID NO: 370996 - DNA, 201 bp, Homo sapiens
agcaagaccctgtttccaaaaatattcatccagaatatctaaacctagatcaacctgctcaaaagttgtaagttaagatgcaaaaagtcgtgatcaggcasagtggttcacacctgtaatcccaggactttgggaggctaaggcagagaatcacttgagcccaggagtgtgagaccagcctggacaacatagtgagacctc

SEQ ID NO: 370997 - DNA, 201 bp, Homo sapiens
ctttgcagcattcactcccaggctccttctcaggagcccaggaaggtggggcttgcaggtctgtgggaggcccctcgtgccactctgtgtcttcctcagcmctggtaggagcacctgtgcggactccaagcctgtccctcaccctgtagccccctgtgcctgatccccacagcccagggtgaagggtgctggaaccaggga

SEQ ID NO: 370998 - DNA, 201 bp, Homo sapiens
tgtcctggttagtttggactgtgcttcaggatgggggagttggtcccctaccttaggggctagagagtcagtgactgggcagccagtctgggggctgagamgggcagtcgttcaggccttgggccatgtaaccaaatggatctggcattgtatctaaacccctccattgatcagtggtgacactgagcaggtcccttaatc

SEQ ID NO: 370999 - DNA, 201 bp, Homo sapiens
ttcaggccttgggccatgtaaccaaatggatctggcattgtatctaaacccctccattgatcagtggtgacactgagcaggtcccttaatctgagtctcakttgctccaactctgtcactgggacaataaattacttcccttgcagagtgtcatttcctcagggaagcctttcctgagctcccaaattaggctcccaaatt

SEQ ID NO: 371000 - DNA, 201 bp, Homo sapiens
acttacacccttcccccacaccaccatcccttgcctcctaggacttcaggttctcctttctgcctcacagctctaggagtccagagtatcaactggcagamggccttcaaccgacaagcgcatcacacagacaagttctccagccaggagctcatcttgcggagaggccaaaacttccaggtcttaatgatcatgaacaaa

SEQ ID NO: 371001 - DNA, 201 bp, Homo sapiens
ctgtttgatatcccattccatggctctgccaccatttatctgccaattcccttattgatgaacttttgctccaacatttttgctgttacaaacaatgcctyggtggacacctttagatatacatgtatgtgcacttacgtgagtttttccatgggagaaattccctgatgtggacttactggctcagtgagtatgtagatt

SEQ ID NO: 371002 - DNA, 201 bp, Homo sapiens
taattataaaaaaattcaaaatacatacagaaataaaaatcatttctgatcttattcacatatcttcaacacttggtagttttccattcatcttttctctmtgagttattgttatttacagaattgggatgatacattttccaaggcatgagtagaagacggagcatataatagacacatcccactttttcccacacctcg

SEQ ID NO: 371003 - DNA, 201 bp, Homo sapiens
tgacattttctaggcctttcttttaatcagattcacagcagccagtggggtaaatttttttctaagccactctgctcatgccaatggtttggcttaagagkcacgcagttccggagtattcactctcttcagagtgaggacacttttcgggggagcttagtttgggatgcttctttgagatgtcctccttcgggtccactg

SEQ ID NO: 371004 - DNA, 201 bp, Homo sapiens
agggccagatcaggggacctcagtgacattttctaggcctttcttttaatcagattcacagcagccagtggggtaaatttttttctaagccactctgctcrtgccaatggtttggcttaagaggcacgcagttccggagtattcactctcttcagagtgaggacacttttcgggggagcttagtttgggatgcttctttga

SEQ ID NO: 371005 - DNA, 201 bp, Homo sapiens
agtttgtgagcgcagaggagggccccagtgtggaggggaggcaagattccccatccccaaagccacttggaagccctgggttagtggcagagttctcaggratacacacctgaaccacaggcttctgcctgcaaatgaccagaacctctgttttggggactaatggctctgtccctctggggcagtgagctttcttgccaa

SEQ ID NO: 371006 - DNA, 201 bp, Homo sapiens
ggcttgcgcaaggcaatttatcctcctggtcccaagtttcttcatatgtgaaatataagggttggcctaggactagatgatttcttaagtcctttgccagyttaaatgtttaaattctcgggagcttcagcccactccactttctataagggagctagccctcccaagggagccctgctgttccttcctccttgaatccca

SEQ ID NO: 371007 - DNA, 201 bp, Homo sapiens
tatcctgtacattaggaactgcagggacgtggaaagcttaagtctcagttcctccactgaaagcatttttatggtgctgttaggaggcacggggtggggargccactagtagaggctaattagcaacacagcatggtgtgtgatgcccaggcaagtgactgagacagggataccaggaactcggaggaaatcctcaaggaa

SEQ ID NO: 371008 - DNA, 201 bp, Homo sapiens
ggataatttctagtcatctatctccaaatttattgactctttcctctgtcatctctatcctgctattaagtttatttatcatttaatttcagatatttgtsctttttccagttaaaatttttccatttggttctttttttcatattttctatttctctgcccaaagtttatctcttttcattagttatgagcatattttcc

SEQ ID NO: 371009 - DNA, 201 bp, Homo sapiens
acacagagatatctatgtatctatataaagtacccatctatctattgttttaatccatttcaaaggctacacacacacataattgctcacatgcatgtatrtggctagataatcgtatgacagatgtaatcttattttcagatgttcaattttgagatagtctacataaaatgtttgtattacttatcattcccagaataa

SEQ ID NO: 371010 - DNA, 201 bp, Homo sapiens
tctagcatgtatgttggatatattttctctgctttattgatttttttcaatcatttgtctcactttgccttcaaattggataatttctagtcatctatctycaaatttattgactctttcctctgtcatctctatcctgctattaagtttatttatcatttaatttcagatatttgtcctttttccagttaaaatttttcc

SEQ ID NO: 371011 - DNA, 201 bp, Homo sapiens
aattgctttccacaaggtcatagcaatttaaactcccaccagtggggtatgacagtgcttgttttcccacctggaaatgagcaccacaacgagtatcaccrtatgctttaatctctgtcagtctaataggtgtcatctatgtatctctgtcatgttatctctttgtcattttaattttcttttcatagtactgaggttaaa

SEQ ID NO: 371012 - DNA, 201 bp, Homo sapiens
cttacaaactttcttaaagagaataagaaaagcaacacatcttctcttagcatatatatatatatatatatcatatatatatatatatatacacctattgyataccttggttgacatcaaaagttcagagtttattctggattccggatgaaaacaattatttttttgagatggagtttcattcttgttgcccaggctgga

SEQ ID NO: 371013 - DNA, 201 bp, Homo sapiens
tatatataacacatacaccaaactgttaatggtggatatctaagaaaatagaattattgtagactttctccaaagttttatgtataattttttaatgaacrgctttatcatacatctacatatatacacataggtttttttctttttccttttttatttccataggtttttggggaacaggtggtattcggttacataagt

SEQ ID NO: 371014 - DNA, 201 bp, Homo sapiens
aacataaaacttagtttgtatgcactatatatataacacatacaccaaactgttaatggtggatatctaagaaaatagaattattgtagactttctccaawgttttatgtataattttttaatgaacggctttatcatacatctacatatatacacataggtttttttctttttccttttttatttccataggtttttggg

SEQ ID NO: 371015 - DNA, 201 bp, Homo sapiens
ccactggatgagccggtgagggactgcgtgctgatggtggagggaagcggcctgctgttgggtaacctgaagatcgagtgagtcctgggcctaagtggccsgtgcaggagggcgggagggggcgggggggccctccagatcccctgggtgggacagacagagctccctctgaccttgggttctttactcttttgggggtct

SEQ ID NO: 371016 - DNA, 201 bp, Homo sapiens
cagtgacatcacccccttcactcagtcaccctgcccagccctcaccaaggtgcaggcaggggctgagcagctggagtcctgactcggcagcccctctcccmcataggtgctgaacgaggctcgtgtgcggaagcctgtgaacgtgcagatgctcttctccaatccactggatgagccggtgagggactgcgtgctgatggt

SEQ ID NO: 371017 - DNA, 201 bp, Homo sapiens
tgcaggtctgtgggaggcccctcgtgccactctgtgtcttcctcagcactggtaggagcacctgtgcggactccaagcctgtccctcaccctgtagccccctgtgcctgatccccacagcccagggtgaagggtgctggaaccagggagtataggtctgaagggtaaaaggctggacaaggacaggcagacaaacggacag

SEQ ID NO: 371018 - DNA, 201 bp, Homo sapiens
tataatagacacatcccactttttcccacacctcgaaaccaatcacttcaccattagttttagtcatgtgttttttactaaacattatatcatgagcattctccctatgtcattaaaaaatcttcaaaaataagatcatttcaaatacgtcgtaagtgcatcatattctattatatggaatggaacctatgtaaagtcagg

SEQ ID NO: 371019 - DNA, 201 bp, Homo sapiens
catttgtttcatttcaagtaatccatatgacttacaaactttcttaaagagaataagaaaagcaacacatcttctcttagcatatatatatatatatatawcatatatatatatatatatacacctattgcataccttggttgacatcaaaagttcagagtttattctggattccggatgaaaacaattatttttttgaga

SEQ ID NO: 371020 - DNA, 201 bp, Homo sapiens
actccagcgtgggcgacagagcgagacactgtctcaaaaaaaaaaaaaagtaatataaaataatggaattaagattgaacatattctgaaaggtctcaacwgccaaactaaggaattggggctctattaggccatgaggagccactgaagctcccttcccagaggaaggacatggcacaatccacagggcaacagatagtt

SEQ ID NO: 371021 - DNA, 201 bp, Homo sapiens
cccgtctctattaaaaatacaaaagctagccgggcatggtggcacgcataacaccagttactcaggaggctgagccaggagaattgcttgaatccaggagrcgaagcttgcagtgagccaagatcacgccactgcactccagccagggcgacagagagagactctgtatcagaaaataataatagtaataaataataataa

SEQ ID NO: 371022 - DNA, 201 bp, Homo sapiens
ctcagcctttccaagccacacccttttgttcctttattacagcaatccccatttgagtctacagagttctcagatttggtcagtttagaaaactttcaagratgccctccaccttttagtttatccaccagacaaaggcattagaataaagcacctcgggcggggtgccttggatatcagaaagatgtgtgcttggaccat

SEQ ID NO: 371023 - DNA, 201 bp, Homo sapiens
taaggaagctaagggtaatgtccctgttacccaagaagctcagcagcttgccccacagatcaatgggaagtcccacatctgtccatctgcctgcccttctwtttgttcatgtattcagaagactttcattggccacctattatgtgtcagaccctgggatccacactaaggataaaggagatgaataagacagatccatct

SEQ ID NO: 371024 - DNA, 201 bp, Homo sapiens
atatgcaataacacaggactcaactttctgtgttaacactgtgttagctatgatcatccaacttacatatattttctaattatagaagtaatgagtaattsacatgatagaaaataaaaacattatagaaataagtaacataaaacttagtttgtatgcactatatatataacacatacaccaaactgttaatggtggata

SEQ ID NO: 371025 - DNA, 201 bp, Homo sapiens
tacaggagagaagctggtctagactgtttgctgatccccaacctgcacggggcattcctgcttctctctcaggccaccacagagggcaggggatggttagycacctgccccagcactcacaccctaactcaaaataaatgttaaataagtgcgatcacacagcaccgactctacctgactgctgttgcacctaaggtggtg

SEQ ID NO: 371026 - DNA, 201 bp, Homo sapiens
tcctctcctttcctacacattctgacagggtgggctgtgatgagtgacatgtcaagggctttgggattggggagacaggatcattggatccttgaattggrggctggcagagcaatcctagggttaagggacaggacgatgactgagggaggcagccagtgaagggtttagaaccacactggaagcttgatgagcacgctc

SEQ ID NO: 371027 - DNA, 201 bp, Homo sapiens
tttttttttaaccagcctgcccttccccttgggtgctctgccaggagcaaattgagtgtgaaacttggtgtccttattcactttctcatccctcccttgcycctctcacccacctgggaccatcttcccacactccttcccttgccttctccttggtgagttctaaccgatcatgaaggcctgttcaaaaagactccctgg

SEQ ID NO: 371028 - DNA, 201 bp, Homo sapiens
cccttttcaacacctgtggggcctcccagagacggaggttcaagctttaagggaagaaacaggacccataagcaggaaagccaaggaaagtaatattaaayccagcaagtggctgggcacagtgacttacatctgtaatcccagtgctttgggaggccaaggcaggaagatcacttgaggccaggagttcgaggccagcct

SEQ ID NO: 371029 - DNA, 201 bp, Homo sapiens
ggggagacaggatcattggatccttgaattggaggctggcagagcaatcctagggttaagggacaggacgatgactgagggaggcagccagtgaagggttyagaaccacactggaagcttgatgagcacgctctcagctggcagcccctactcagggatgcagggcaggctgtcccctttgtccagctcccctgaagacgg

SEQ ID NO: 371030 - DNA, 201 bp, Homo sapiens
acagggaacctctgggctctagaagtttagaaggacattggtagactggggtgtcagcagaggagagtagcctgggttgagctggggggacccaacccctrgaaaaagagttaagggagctacagtgtgagccagggtgtgagcagctgtagggcctggggctgcccttttcaacacctgtggggcctcccagagacggag

SEQ ID NO: 371031 - DNA, 201 bp, Homo sapiens
gacaggacgatgactgagggaggcagccagtgaagggtttagaaccacactggaagcttgatgagcacgctctcagctggcagcccctactcagggatgcrgggcaggctgtcccctttgtccagctcccctgaagacggctcttttggaagagatgttttccttccaggagctcgctctctcccctctgtcggaatccaa

SEQ ID NO: 371032 - DNA, 201 bp, Homo sapiens
tctagtcgctggtgtctgctttttgtatcaaatagtggatagcgtctttatgggtaaccacgctgagagagaagagtatgttcaggaagatgccggcatcmtctttgtgggaagcacaaaccgaattggcatgattggctggaactttggacaggtaaaagggtcataaggaagctaagggtaatgtccctgttacccaag

SEQ ID NO: 371033 - DNA, 201 bp, Homo sapiens
aatgaattacggctgtttcttggcagaaacacaacagctttcatcttttggtctgaataaatagtccaaattgcttttctgaccccaaacccagccttcayctgttctgatcactgagcaaggaccgtgtggtattagagctccgctcagactataaatggtgcacagggaacctctgggctctagaagtttagaaggaca

SEQ ID NO: 371034 - DNA, 201 bp, Homo sapiens
ttctttgttcatttattccttcatccatttatttacctaattatcctaatacagtcaagcagtgtgctaggcatcagaatataaagatcaagagggggccrggtgcagtggctcatgcctgtaatcccagcactttgggatgccaagacgtgcagatcacttgagcccaggagtttgagacaagcttgggcaacatggcaa

SEQ ID NO: 371035 - DNA, 201 bp, Homo sapiens
acaaagaacatttgaggactggcaggtgtcattcttcagttcagatcccagccaagagacggtgtggctcttagataagtcagccactcctgcagcaaccycattcattttcggccaacaccaagcacagaagcataccccgccaggcagagggagaaagctgtgtgggtttgcccctgggtggctggctccaatctggat

SEQ ID NO: 371036 - DNA, 201 bp, Homo sapiens
gaacccgggaggcggagcttgcaatgagtcgagattgcaccactgcactccagactgggcgacagagcacgactgcatctcaaaaaaacaaacaaacaaasaaaaaagatatagttagactaaagaccattgtcctgtgaaacttttgtttctgtatcatatgtgtgccaagatgtcaaatgtatttctttctaggggttg

SEQ ID NO: 371037 - DNA, 201 bp, Homo sapiens
gtcctccactgtggagtggggtgacaacgaccaaggcacctggtttctctacaccttggcttccttgtctgtaaaacaggacgtctacaagtgcctgcctyatggagttaatgagctaatgcacgtaaacactttgaaagatggctggcacacaaatgcccagtaaacttcaactaatagtatgatcaccaccaccacagt

SEQ ID NO: 371038 - DNA, 201 bp, Homo sapiens
  misc_feature (1)...(201): n = A,T,C or G
atacatgggtccacattttgaccctgccattgttagatgcttaacttctctgagcccaagtttccctttttataaaacgggcataaaaatggtacctattncacagtgctgtgaggatttccacgagacgatgctcaccagggcttagcataaccgccgtcacagggcaaactcactcgatgcatgttgtcatgctgcact

SEQ ID NO: 371039 - DNA, 201 bp, Homo sapiens
gagcatgacttgtctgttaccctcattttcagttgttctttgaaacattaaaaagtgatttatggggctgggagtggtggctcacacctgtaatctcagcrctttgggaggccaaggagggtggatctgttgagatcaggagttcaagaccagcctgaccaacatggtgaaaccccgtctctagtaaaaatacaaaattag

SEQ ID NO: 371040 - DNA, 201 bp, Homo sapiens
ccccaggtctgacctagtgtggcgtgcaaaatacccctcatattcttcctgcaggtttccctgttgggaggcaccctggagctcagttttttctttttcakcctctctagggacaagacattggtctctgggatgaatgggaggagcctctactattgacacagccacagcaaacaatgcatgagctttgctggagcaaag

SEQ ID NO: 371041 - DNA, 201 bp, Homo sapiens
ttgacatcaaaagttcagagtttattctggattccggatgaaaacaattatttttttgagatggagtttcattcttgttgcccaggctggagtgcaatggyacaatcttggctcactgcaacctcaggctcccaggttcaagtgattctcctgcctcagcctcccaagtagctgagattacaggcatgcaccaccatgccc

SEQ ID NO: 371042 - DNA, 201 bp, Homo sapiens
ctgtcttttcccaccacacaggctctgaccaggaaagacaagtgttccaaaaggctttggggaaacttaaacccaacacgccatttgccgcgacgtcttcratgggtttggaaacagaggaacaggagcccagcatcatcgggaagctgaaggtcgctggcatgctggcagtaggcaaagaagtcaacctggtcctactgc

SEQ ID NO: 371043 - DNA, 201 bp, Homo sapiens
tgcttgaatccaggaggcgaagcttgcagtgagccaagatcacgccactgcactccagccagggcgacagagagagactctgtatcagaaaataataatartaataaataataataaataaataaaataaaaataaataaaataaataaagtgatcttttcgtaagaccatacaccaaaaaagagtttcaaaccatggact

SEQ ID NO: 371044 - DNA, 201 bp, Homo sapiens
aattctcgggagcttcagcccactccactttctataagggagctagccctcccaagggagccctgctgttccttcctccttgaatcccatgcaggggagagctaaaccaagagccagtttctgcctggcgtgaaattactaagctattcttataagggcaaccggagtttggacagaaaacctctgacatgaatctttgta

SEQ ID NO: 371045 - DNA, 201 bp, Homo sapiens
tacacatacacacacacacacacacacacacacacacacacaggagccaggcatcgtgacacatgcctgtagtcccagctacttgggaggctgagctgggrgaattgcatgagtccgttagttgcaggctgcagtgatctgtgattgcgccactgcacttcagcctgggtgacacagcaaaagcctatctccaaaaaaaaa

SEQ ID NO: 371046 - DNA, 201 bp, Homo sapiens
ggcgtgaccttggctcactgcaacctccgcctcccagattcaagtgattctcctgcctcaccctcttgagtagctgggattacaggtgtgaaccaccatgmccagctaattatttgtatttttagtagagatggggtttcaccatgttggccagtctggtctcaaactcctgatctcaggtgatctgcctgcctcagccac

SEQ ID NO: 371047 - DNA, 201 bp, Homo sapiens
tgaggtgggcggatcatttgaggtcgggagttcgacaacaggatggccaacatggcgaaaccctgtctctattaaaaatacaaaaaaattagccgggcgtrgtggtgcatgcctgtaatcccagctactcaggaggctgaggcaggagaatcacttgaacccggaaggcggaggttgcagtgagccaagatcgtacctctg

SEQ ID NO: 371048 - DNA, 201 bp, Homo sapiens
tttaatgatagatgccactggaagtaggaaatgtgtagacatatatctgtaactgcatagagcactagatagatagatattatatagataaaaatagacaytgttacaactgtttaaggttatatcatataccaagttattaccggatggcaattggcaatgatgtctatatctgtagatacacagagatatctatgtatc

SEQ ID NO: 371049 - DNA, 201 bp, Homo sapiens
aagatggctggcacacaaatgcccagtaaacttcaactaatagtatgatcaccaccaccacagtcaccccaggtctgacctagtgtggcgtgcaaaatacscctcatattcttcctgcaggtttccctgttgggaggcaccctggagctcagttttttctttttcagcctctctagggacaagacattggtctctgggatg

SEQ ID NO: 371050 - DNA, 201 bp, Homo sapiens
tagattacatcactgtttttcaagctgccagttgccatccattagcaggttgtgaaatcagtttagtggactgtgaccagccattaagaaaaaaaaaaaaagcagaagagaaaatatcagagtatattgatacatagtaagcattagccgtgtgaaaccttgtgtcagttccagatccatgtatgtaaagactattagata

SEQ ID NO: 371051 - DNA, 201 bp, Homo sapiens
ctccagcgtgggcgacagagcgagacactgtctcaaaaaaaaaaaaaagtaatataaaataatggaattaagattgaacatattctgaaaggtctcaactsccaaactaaggaattggggctctattaggccatgaggagccactgaagctcccttcccagaggaaggacatggcacaatccacagggcaacagatagttg

SEQ ID NO: 371052 - DNA, 201 bp, Homo sapiens
tggcacctgcctgtaatcctagctacttggtaggctgaagcagtagaattgcttgaacctgggaggtggaggttgcagtgagacaagatcgcaccactgcwcttcagcctgggcgagagtgagactcagtctcaaaaaaaaaaagaaaaaagggaatcactgcacaatacaacaaaatatgtttaaatccatgagttcata

SEQ ID NO: 371053 - DNA, 201 bp, Homo sapiens
gtgggcagatcacgaggtcaggatatcgagaccatcctgactaacacagtgaaaccccgtctgtactaaaaaacacaaaaaattagccgggtgtggtggcrggtgcctgtagtcccagctgcttgggaggctgaggcaggagaatggcattaacccgggaggaggagcttgcagtgagccaagatagcgccactgcactct

SEQ ID NO: 371054 - DNA, 201 bp, Homo sapiens
ttgtgatttttgcacattgattttgtatcctgaagaatatattttcaatactggagataggtttcccaaagacaattgtgtgtgtgtgaaggtcttttaaycaaaaaaaagataatttttgagactttattctcaggttgttcttgaggtaatatacgttcttgattcctccagtatcctaaagtagttgttcatatgtcc

SEQ ID NO: 371055 - DNA, 201 bp, Homo sapiens
aatgcaaaaaattagccaggtgtggtggtgcatgcctgtaatcccagctactcaggaggctgaggcaggagaattgcttgaacccgggaggcagaggttgyggtgagcccgagattacgctacagcactccagcctggaggacagagtgagacaccatctcaaaaaaaaaaaaaaaaaaaaatagagacagacttctggca

SEQ ID NO: 371056 - DNA, 201 bp, Homo sapiens
ataccctgccattgggggctggtgtggatattggaggaagaatatattttcttttctttttttttttttttaatttaagttctagggtacatgtgcacaaygtgcaggtttgttacataggtatacatgtgccatattggtttgctgcacccatcaactcgtcatttacattagttatttctcctaatgctatccctcccc

SEQ ID NO: 371057 - DNA, 201 bp, Homo sapiens
tgttttttaaaaaaattctgggccgggtgcggtgtctcatgcctgtaatcccagcactttgggaggccgaggtgggcagatcacaaggtcaggagatggaraccatcctggctaacacagtgaaaccccgtctctactaaaaatacaaaaaattagccgggtgtggtggcgggcgcctgtagtcccagctactcagaaggc

SEQ ID NO: 371058 - DNA, 201 bp, Homo sapiens
aaaatttttgtaatctcaacattgaccacagtaatgatttgtgatatatgatttcaaatggtcttcctgagtatatacatgtatatatatgaagatgtacrtacatgtttgtgtgtggagagagggaatcacatcatgcatactactgttttttaaaaaaattctgggccgggtgcggtgtctcatgcctgtaatcccagc

SEQ ID NO: 371059 - DNA, 201 bp, Homo sapiens
tttgcatttctctgatgaccagtgacgatgaacattttttcatgtgtctgttggctgcataaatgtcttcttttgagaagtgtctgttcatatcctttgcmcactttttgatggggttgtttttttctcgtaaatttgtttgagttatttgaagattctggatattagccctttgtcaaataggtagattgcaaaaatttt

SEQ ID NO: 371060 - DNA, 201 bp, Homo sapiens
atacctctctgaacatgcataaggacacatagtgggttaagaacaaagccgtgggtatacatgagcgtggcttagcaatcccagttcggggaatttatcckcaaaaactatttctaaagaaaataggtctttaggccaggcacagtggctcacgcccgtaatcccagcactttgagaggccaaggtgggcagatcacctga

SEQ ID NO: 371061 - DNA, 201 bp, Homo sapiens
gtaccagtatataaaactccagaacgggcgcagtggctcacgcctataattccagcactttgggaggccaaggcgggcagatcacctgaggccgggagttsgagatcagcgtgaccaacatagagaaaccccatctctactaaaaatacaaaattagctgagcatggtggcacttgcctgtaatcccagctactcgggagg

SEQ ID NO: 371062 - DNA, 201 bp, Homo sapiens
ttcccatgatcgggaacttaattttgtttttagaataagttttcacagtgtctcacttagttctcagagtgtacagatgtttatctgtaaaagggaagctrctgtttttatattttgtgtggtcagatgtcatctttatctttttcttctttccttctaaaggtgaataccagagaagaagttgaagatctttgccgccta

SEQ ID NO: 371063 - DNA, 201 bp, Homo sapiens
ggttgctttgactctgaacatatgtctcttcccttccatcctttgactggaaaggaaggctccagttagcttataaatgtggcatggtcccagtgagaackggaaagaattgttttaaaaatgaaactgtactccatggattacaaggaagttagatcacatggtcattcatgttcggggaccttactttactttggtaag

SEQ ID NO: 371064 - DNA, 201 bp, Homo sapiens
gggaatgcaccaagtcaggcccagaggggccagatcaggtgtttgggaatttaaagcaaaacttaggccacacagagccaagacactactacaagcagacytgacactccagcaggcctgtgagccttcagactttaggccattctgcagagccagatgggtcctcagtggcttaggaaggcccctcccttacagctgcgt

SEQ ID NO: 371065 - DNA, 201 bp, Homo sapiens
agaccaggcaatttaaagtcaatgttgtggaggggtgtgcattattttggtttttagttttactaataattcttatgtctgcctaaagataaggatttttrtaaaagaaattgtacattatgtatcatttctattgagggtaggtgggtggctggtattctccttccccaaatactttagtacaacccccagaggagcttt

SEQ ID NO: 371066 - DNA, 201 bp, Homo sapiens
ttcagaactggaagaaatctttgatactatccactcattaatttaaagtaaaagaattaagacccacagagggtaaacctgttgttgcccaaggttccacagcttgttgttggcagaagactcctgatcccagctatacctctctgaacatgcataaggacacatagtgggttaagaacaaagccgtgggtatacatgagc

SEQ ID NO: 371067 - DNA, 201 bp, Homo sapiens
gcagagggtaaagaccaggcaatttaaagtcaatgttgtggaggggtgtgcattattttggtttttagttttactaataattcttatgtctgcctaaagakaaggatttttataaaagaaattgtacattatgtatcatttctattgagggtaggtgggtggctggtattctccttccccaaatactttagtacaaccccc

SEQ ID NO: 371068 - DNA, 201 bp, Homo sapiens
gtctattttttaggcctttttgacagccccccaggttcagatgatgcaaagcttattgatatattttatcccggagatcagcagtctgtgacatttggaaycaagtctagagtgggaatgggtggcatggaagccaaggtaagaatctggtgccttaactgcctataacaattttaaagcccaaactatattgtatccttt

SEQ ID NO: 371069 - DNA, 201 bp, Homo sapiens
tttctgaaaaggagttcatgatcttccctttcaaaaatatgctccattttatttttccccaagacatcaacattcttattctccattccagcagctagacyctggcatttcagaggtactcaacaaattttttatcgagtgagtgaattatttttctatatgtatgtttcctgtgttttatataccattaaggctactgtt

SEQ ID NO: 371070 - DNA, 201 bp, Homo sapiens
aatacagaagaagagtccacacactgtttcacgagaaggagtgtatcatgatttgtagtaatcgaagaacatgtttatgggaacagggtgactcagctctyctggggaggatggatgaggagttagcaggaagagagggtaccaagtgaggggaaagcagcagggtgggtctggggcatggacaggaagcagaggctggga

SEQ ID NO: 371071 - DNA, 201 bp, Homo sapiens
agagccagccacatgctggttcataaaccagcatttgggatctactcgatagcccaccctacctccatcccttgtgaagagatgaaagagacagtacggtracttacagtcccctttcctttctcaatgcccaggtatcagtgctgcagaatcagggcagagagatgatgctggtgaccagtggagccgtagcctttggca

SEQ ID NO: 371072 - DNA, 201 bp, Homo sapiens
ggtcatgttgtaagtcccttttgacccagacacagagagttttgtacacctgcagaaggtcacaaagctagcaggtgtacagctggagttcaggcctaggmagtctggctctggagcccataagtaggaagtttaggcaggtcacctgcatgggagatctggattccaactcagtctttccacaacaccgtgattgatgaa

SEQ ID NO: 371073 - DNA, 201 bp, Homo sapiens
tccagacatccaggcatcccacagataaagcaagagctattccatggcagctgaaatcttacactaccttgtaattaaattttcagtttttaaaaaacaakttcctgaggtgttaatattgggaaattgctaacctgaaacttgatacaatttttttcttatattttctattctaaattatcaagcctgagcaacaaagtg

SEQ ID NO: 371074 - DNA, 201 bp, Homo sapiens
ggtttttgaactcctgacctcaagttatccacccgtctcagcctcccaaagtactgggattacaggcgtgagccaccatgcccggcccaccttgcacatcsttaacgttcaaggcttcctgcttcaatccctgttccaactgtcttgagggcccattgctggcaagtggccagtcagatcatgctggagggaggaaagtag

SEQ ID NO: 371075 - DNA, 201 bp, Homo sapiens
gtacccctcagtcgtacacatggcaagtccttcgcccaccgcagtgagctgaagcatgccaagagaatcgtggtgaagctcggcagtgccgtggtgacccraggggatgaatgtggcctggccctggggcgcttggcatctattgttgagcaggtgattgccaagatagaaattatgctgtactaaaattgggtttttaag

SEQ ID NO: 371076 - DNA, 201 bp, Homo sapiens
ggacccctttattgtcagtatcactgatggcttcctataagtacatctgttaggaaaaagaactttcagtagttaatggaaattagaatgcaactgtcggycaggcacagtggctgacacctgtaatcccagcactttgggaggcccaggcaggtgaatcacgaggtcaagagattgagaccatcctggccaacatggtga

SEQ ID NO: 371077 - DNA, 201 bp, Homo sapiens
gggtttcaccatgttggtcaggctggtatcgaactcctgacctcaggtgatccacccacctcagcctcccaaattgctgagattacaggcgtgagccaccrtacctggccaactcagttctctttgctaatggtgctaaggaagccatatagtttagttgctaaaatccagtggtttgttctggagtcaaaccacctcagt

SEQ ID NO: 371078 - DNA, 201 bp, Homo sapiens
tcctgtctacctgagcaagaaaggctgggaaatgtagtctttcgactggtggcagtgtgcctggctaatacttggggatctggtaattgtgtgagaaaggkcgaatgggtaagtagtaagcagctaagcaggaggtgttgggcccataagaagtattgaaggggttctgtgcctgacattcagcttttactcttttacttt

SEQ ID NO: 371079 - DNA, 201 bp, Homo sapiens
tcctgggtttttaaaactagcccttctgcttatgaagtaacttcgtagcttaaaacaactgtctgtttaggtcacaattctgtgggatggtattttggackgggctcagctgcacagtggttctgtgtctgtgtcaggtctcagattgacttagggctgattgttggggatgaaggggcctctgctgggatgatacatcat

SEQ ID NO: 371080 - DNA, 201 bp, Homo sapiens
aatggcacagccaggttgcctcggagataggaaaccccacaatggtaggacaaaagaaggtgccgtgggcctaagtaccagcatcaaaacaaacaggccarccagaagtacaaggttaccttctacagcagaccttgaaataaaaagcttcagaagggcacttctgtccctttccattaggtataaaatttccagccctct

SEQ ID NO: 371081 - DNA, 201 bp, Homo sapiens
ggagttcttcctgcagcacgtagacagtgcctgtgtgttctggaatgccagcactcgcttttctgatggttaccgctttggactgggtaagaaagactctrgttgggaagaaagaagttccttgtgaagcactgtgtggtctaggggtatgttgaggtgggaaagacacctccccttgactgtcacatgcttggtcaagat

SEQ ID NO: 371082 - DNA, 201 bp, Homo sapiens
tgtgtatcagttagttcctttttattactgagaagtatgtaatgctatgagtgtatcacagttagtgtaaccattcacccattaaaggacatctgggttgytctcattttttggctgttatgaataaggctggtatgaacattgatgtacaggattttgtgtgaacatagttttcatttctgtgggataaatgcctaagag

SEQ ID NO: 371083 - DNA, 201 bp, Homo sapiens
aggcaggtcacctgcatgggagatctggattccaactcagtctttccacaacaccgtgattgatgaagctaacttgtcttcttcctgttgagatttttcayaagcctgagtatttaatacgtgagaacacatggagaggccccagtggggacccagaccctgccctgatctgtcaccagtcaatggctggaaacagggatg

SEQ ID NO: 371084 - DNA, 201 bp, Homo sapiens
aaccgagatttgtagccatattctcttcctccacaggattaagatgttagccagttgtaggcattgccactgccttccaggggtacaagagttattttgtmatcctgtgggcatcaggaagaaagacatggcagcagcctctggcctttcctcttgcttttcatggctggctggcaaggatcaagctgacatttcaaatag

SEQ ID NO: 371085 - DNA, 201 bp, Homo sapiens
cccacacggatgtcatcgtcacagaggacggtcagtgtccagatgcttcccgcatacagtgtctgcctttgctgctttctgatcctgctcctcttagcccsccttgggctgcagaaaaacatcatttgagtaggcttatggtaatgtttagtagtggttgcatttggtactttgatgagtgctttcacatcactttattgt

SEQ ID NO: 371086 - DNA, 201 bp, Homo sapiens
ttcaggcctaggcagtctggctctggagcccataagtaggaagtttaggcaggtcacctgcatgggagatctggattccaactcagtctttccacaacacygtgattgatgaagctaacttgtcttcttcctgttgagatttttcataagcctgagtatttaatacgtgagaacacatggagaggccccagtggggaccca

SEQ ID NO: 371087 - DNA, 201 bp, Homo sapiens
ccaaggcagaaccaactctgcacattcattcattcattcatttattccacaaatatgtatgcagggacactcctgggtgtcagatactggagcctcaatgrtggaggatgccagtagggccccaatgaggaatttacagtcagctaattagggcaccagagcagtaccacccgtattaacagccaacatttaccaagcact

SEQ ID NO: 371088 - DNA, 201 bp, Homo sapiens
  misc_feature (1)...(201): n = A,T,C or G
ccccttgggctgcagaaaaacatcatttgagtaggcttatggtaatgtttagtagtggttgcatttggtactttgatgagtgctttcacatcactttattntattgtcacagctggaggaggaggggcagggatgattagctctgcttcgaagatgactaaccctgtcagaggcactatcatttaatgcgtgcagcaaatc

SEQ ID NO: 371089 - DNA, 201 bp, Homo sapiens
tgttttaaaaatgaaactgtactccatggattacaaggaagttagatcacatggtcattcatgttcggggaccttactttactttggtaaggaagcctgtygattgggcacctgtgtttgccaagcaccacagtgaactggattagacaggaggaaagctctcctttagccaggactaaatccctccccagacctaatttg

SEQ ID NO: 371090 - DNA, 201 bp, Homo sapiens
atttcagttgtttttatgttgttgcccctggacttcctctgttccaggtaaaaattcatgcaggccccaaatttgcctcctatctgaccttcagcccctcygaagtgaagtcactccgaactgagtatggggacctggaattatgcattgaagtagtggacaacgttcaggatgccattgaccacatccacaagtatggca

SEQ ID NO: 371091 - DNA, 201 bp, Homo sapiens
cctgatttataagtgaggaaacagaggcttagaaaaattgggtaactcttacatatgtaactaacctgcacattgtgcacatgtaccctaaaacttaaagtataataataataataataataataaagaaaaattgggtaactctccacaagacacacagcaagtgcagagctcgaacccaaatctgaccaacttcaaagg

SEQ ID NO: 371092 - DNA, 201 bp, Homo sapiens
ctgatttataagtgaggaaacagaggcttagaaaaattgggtaactcttacatatgtaactaacctgcacattgtgcacatgtaccctaaaacttaaagtataataataataataataataataaagaaaaattgggtaactctccacaagacacacagcaagtgcagagctcgaacccaaatctgaccaacttcaaaggc

SEQ ID NO: 371093 - DNA, 201 bp, Homo sapiens
tttcaactggtgatgaccgtggatgtgggagcaaggcctggcactctcagaagagtaggtttaaaaactgtggtgtgcattcttcttggattaacatctcygtttttttaatggtgtacctttcttctagagagcagaaattatccatcatctggctgatctgttgacggaccagcgtgatgagatcctgttagccaacaa

SEQ ID NO: 371094 - DNA, 201 bp, Homo sapiens
gatttataagtgaggaaacagaggcttagaaaaattgggtaactcttacatatgtaactaacctgcacattgtgcacatgtaccctaaaacttaaagtataataataataataataataataaagaaaaattgggtaactctccacaagacacacagcaagtgcagagctcgaacccaaatctgaccaacttcaaaggcct

SEQ ID NO: 371095 - DNA, 201 bp, Homo sapiens
tacagttacataatctcctacagattatacagtctcctacagattgtatccatcatgccccttcccccccttttttttttcttatgactcctgattattaytattagccatggtttgctaattataataatcaggagtcataagaaaaaaaaaggaggaaaagtaagaagtgacctagaggttggcagtgagagaggaagg

SEQ ID NO: 371096 - DNA, 201 bp, Homo sapiens
cagaggcttagaaaaattgggtaactcttacatatgtaactaacctgcacattgtgcacatgtaccctaaaacttaaagtataataataataataataataataaagaaaaattgggtaactctccacaagacacacagcaagtgcagagctcgaacccaaatctgaccaacttcaaaggccttgttcctcatcgtttttg

SEQ ID NO: 371097 - DNA, 201 bp, Homo sapiens
ggggtgtcttcaagtacctaggactgaattttttcactttgattaaatgcattaaataaataatttacaaggaagaaccagatgtaaaaacttacctggamataaactaactaatgatattaaatatgtaagactctatgtaacatgttaattcaaagtactggcccctgtacagttacataatctcctacagattataca

SEQ ID NO: 371098 - DNA, 201 bp, Homo sapiens
acatcttttcatgtgtttatatcctcttcagtgaaatgttagttcatgtctttagctcattctttttgtttttttttgttttttgagatggagtcttgccytgtcacccaggctggagtgtagtggcgcaatctcagctcactgcaacctctgcctcccgggttcaagcgattctcctgcctcagttcctgagtagctggg

SEQ ID NO: 371099 - DNA, 201 bp, Homo sapiens
taattatttgggggttaatggttcagatagtaggcacatacacacttaaatatgtacatacctaaatacagatttaatgagtgttgcattccaacatttgsttatgtctgtgtatgtgggttttctcattaatattgtatgaacagtgtgttcatgttgtaaactctgcaagggcagggcctatatatttttcataattca

SEQ ID NO: 371100 - DNA, 201 bp, Homo sapiens
gcccaggagctcaaggttgcagtgaactgtgataaagtcgctgcactacaacctgggcaacagagcaaaaccctgaccacccccccacccgcccctgcagaaaaaaaaaaacaaaaaacacccagaacaacagcaatgatcaaacccacctcccagattgagtccatcagataaattttaaaaatatttatcaagagacta

SEQ ID NO: 371101 - DNA, 201 bp, Homo sapiens
ataggaacaggtaagttggggtaagtgtgagccaccctggagaaaaaaggcattttggttcatcaacaggttttctatttattcattctccccaccccccygagatggagtcttgctctgtcacccaggctggagtgcagtggcatgatctcagctcactgcaacctccgcctcctgggttcaagcgattctcctgtctca

SEQ ID NO: 371102 - DNA, 201 bp, Homo sapiens
tcctggggcttcctaggagagctggaactcagcctgggccttgacaactgatgggatttgcacaaacagaggggaaaagttccatgctactaagtacacagtgtgactggtgcccctgcagttgtgcaatccagtggttctggggaagggacaggctctaggagtgtattccaggtagaggacaggcaggaatgagtatgg

SEQ ID NO: 371103 - DNA, 201 bp, Homo sapiens
cccatgtggaaagtcagagatacgacacctacatgtcaatatctttacctgtaagaagtcttagtcctgtgttatccactgtaatttgaagtcccaggatrggaacaggtaagttggggtaagtgtgagccaccctggagaaaaaaggcattttggttcatcaacaggttttctatttattcattctccccacccccctga

SEQ ID NO: 371104 - DNA, 201 bp, Homo sapiens
cctggggcttcctaggagagctggaactcagcctgggccttgacaactgatgggatttgcacaaacagaggggaaaagttccatgctactaagtacacagtgtgactggtgcccctgcagttgtgcaatccagtggttctggggaagggacaggctctaggagtgtattccaggtagaggacaggcaggaatgagtatggc

SEQ ID NO: 371105 - DNA, 201 bp, Homo sapiens
agccagactccctttgcagtatggcattctgtgtatgctggggtcttcctgttacagcaggacgcacccacataccccacctcgtccttcccccatcattrtcccctgccctctgaggtggtgaggcccatcggatctttgtatttaagtggtgagccatataccgagcatgtgtttgtgggtgaactgtgctgggactga

SEQ ID NO: 371106 - DNA, 201 bp, Homo sapiens
aaggagccacttactttttctctcttttctataatatagaggaggtgggagtttccctaatacagaggagtttggagcaggagagtcagatttttactccragggtaaggggaagtagagggaaataaaatgaattgtccagtatttttcattactcactttttaaaaaatgtattctgcagatactttggttagtgacca

SEQ ID NO: 371107 - DNA, 201 bp, Homo sapiens
ccatgggtaggtgtgggcctcggccgagggatggcggctgcatcgggccgccagggcgcgctgcaagaccgtggcgcgctcccatatgccggtgcgcggcsgccccgggatctacggatggctacgggccctgacctccccggcctcccctgggtacaccatgtaaggaactgggccaagtggagacttcaggcatccgcg

SEQ ID NO: 371108 - DNA, 201 bp, Homo sapiens
gaggatcacttgagcccaggaattcaagatcaacctgggtaatatagtgagtccctgtttctacaaaaaatagaaaagtcagctggacatggtggtatgcrcctgcggttccagctactcggggctgaagcagaaggttcacttggagctgggagttccaggctgcagtgagctgttatcgtgccactgcactccagcctg

SEQ ID NO: 371109 - DNA, 201 bp, Homo sapiens
aaaaaagaattggatagcacccagatatgtgtatttcattctaatcttctaatctgtgtggggccccagaaacctaaagtttaactcccctgctcttagcrtcttttgtatactgggaagtttagcgtttttctccctcatgcattttccatctatttaatccttttagattttggtgaccaatttggatttccatgatga

SEQ ID NO: 371110 - DNA, 201 bp, Homo sapiens
tatagttttcagagtgagtcatgctgtgtagttacaggagtcaaacctgctgactccatctttattcctagtgagccacagagttatctgagttacaagtytgattcaaatttgctctgccttttttctttttcttaattttattttccgttttatcttttatagacagaggtccaagataacttttcatcactatgatgt

SEQ ID NO: 371111 - DNA, 201 bp, Homo sapiens
ggacaacgttcaggatgccattgaccacatccacaagtatggcagctcccacacggatgtcatcgtcacagaggacggtcagtgtccagatgcttcccgcwtacagtgtctgcctttgctgctttctgatcctgctcctcttagccccccttgggctgcagaaaaacatcatttgagtaggcttatggtaatgtttagtag

SEQ ID NO: 371112 - DNA, 201 bp, Homo sapiens
tcctgcttcaatccctgttccaactgtcttgagggcccattgctggcaagtggccagtcagatcatgctggagggaggaaagtaggactagttcagttgtygaggctacaggagccactttgggctgtggttttacaggctcacctttctgttctatcctagaacttgcttatttcagttgtttttatgttgttgcccctg

SEQ ID NO: 371113 - DNA, 201 bp, Homo sapiens
gttcaaggcttcctgcttcaatccctgttccaactgtcttgagggcccattgctggcaagtggccagtcagatcatgctggagggaggaaagtaggactasttcagttgtcgaggctacaggagccactttgggctgtggttttacaggctcacctttctgttctatcctagaacttgcttatttcagttgtttttatgtt

SEQ ID NO: 371114 - DNA, 201 bp, Homo sapiens
caaagtggaatgtgttgtgtgctaaagagggttcaaaggtaagacagaccacatggcactatgctgactgaactgtttctggcaaccttttattcacgtgtcaaggtgttcccaagcatatattattttttggatttgatttgaaaagatggtgcagaaacgtttcaaaccaaaaacttatgtacattcactgcctccccc

SEQ ID NO: 371115 - DNA, 201 bp, Homo sapiens
aatcaaatgagtagccacagtttcaggtgctgaaagcacctgaccaagtactgcttacctctaaagcaaacctgggacttcgctagggtacagggagtagsaatgtatatgtggcacctccctttttccacacgagtctagtgcctaggtaccatatgcaggaactgggatctttattgtcaagtattcattttaggaaaa

SEQ ID NO: 371116 - DNA, 201 bp, Homo sapiens
caatattagtgtacttaatgcagtgatatttgggattcagtaatttgtagaatgtctccctggattatgtttttactatattgttaaggttgtaaacaaaycaaaagccagtaagtttcaaatataaagttgtgctgtgtcctaaattcatgcctgcaagaaaatataatagatgccctcaaggcaaaaatggacaatctg

SEQ ID NO: 371117 - DNA, 201 bp, Homo sapiens
gctgaagcagtagaattgcttgaacctgggaggtggaggttgcagtgagacaagatcgcaccactgcacttcagcctgggcgagagtgagactcagtctcaaaaaaaaaaagaaaaaagggaatcactgcacaatacaacaaaatatgtttaaatccatgagttcataattatacttaaaaaaaaaacttcattggccatt

SEQ ID NO: 371118 - DNA, 201 bp, Homo sapiens
tgagcagatgccagcaccatgcttcctgtacagcccacagaactatgagccagttaaacctcttttctttataaattacctagcctcaggtatttctttayagcaatgcaagaatggcctaacacagttttataagaaactgtcaaactgtctttgcagagtgacagtaccattttacattcctactagcactgtatgagt

SEQ ID NO: 371119 - DNA, 201 bp, Homo sapiens
tgcacaatacaacaaaatatgtttaaatccatgagttcataattatacttaaaaaaaaaacttcattggccatttttggaggccactagagaagctactcatattgaaaatggatgagtaaaggggaagagacacacatttgtcctgcttttcatagacaaactgtacctcagggtaaccaaatagttggtaaaggagagt

SEQ ID NO: 371120 - DNA, 201 bp, Homo sapiens
agtagagatggggtttcaccatgttggtcaggctggtatcgaactcctgacctcaggtgatccacccacctcagcctcccaaattgctgagattacaggcrtgagccaccatacctggccaactcagttctctttgctaatggtgctaaggaagccatatagtttagttgctaaaatccagtggtttgttctggagtcaaa

SEQ ID NO: 371121 - DNA, 201 bp, Homo sapiens
gcacaatacaacaaaatatgtttaaatccatgagttcataattatacttaaaaaaaaaacttcattggccatttttggaggccactagagaagctactcatattgaaaatggatgagtaaaggggaagagacacacatttgtcctgcttttcatagacaaactgtacctcagggtaaccaaatagttggtaaaggagagtt

SEQ ID NO: 371122 - DNA, 201 bp, Homo sapiens
gcctggctaaattttgtactttttgtagagattgggtcttgccatgttgcctgggtggtcttgaacctcctgggctcaggcattgtgcctgccttggcctyccaaagtgctgggattacaggcatgagccaccatgcccagccaattgttttaattaaaaaataaattaaaatgtctgatttttgtctgccacctgctaaa

SEQ ID NO: 371123 - DNA, 201 bp, Homo sapiens
tacctaaatctcctgaatttttttgaattatattcttaatcaactgtacaactacacactagagacatctcaataacagtcacttcaggaaacaactgaawaaaaaatctaactcccaaattattttattttgaaattcctttacctgtaaagatgtaaaatagctgttattttatattatggatattattttacatgtac

SEQ ID NO: 371124 - DNA, 201 bp, Homo sapiens
ccaggtgctttcagttgttttccttaaataacagctttatggagatgtaattcacataccatacaattcacttatttgaagtttacaattctgtcctggcrtggtggctcacacctataatcccaacactttgggaggccaaagcgggaggatcacttgagcccaggaattcaagatcaacctgggtaatatagtgagtcc

SEQ ID NO: 371125 - DNA, 201 bp, Homo sapiens
tagactgttttccaaagtaaggccccttgtaccatttcacattctcaccagcattgtatgaaggttctaatgtgtttacatcattgctgttattcagttgttttttttttttttttttttttgaggcagagtcttatcctgtcacccaggcaggagtgtagtggcacaatatcggctcaccgcaacctccacttcccaggt

SEQ ID NO: 371126 - DNA, 201 bp, Homo sapiens
atcctttccccatttcttgtttttgtcaggtttgtcaaaaatcagatggttgtagatgtgtggtgttatttcttaggcctctgttctgttccattggtctrtctctctgttttggtaccagtaccatgctgttttggttactgtagccttgtagtgtagtttgaagtcaggtagcatgatgcctccagctttgttcttttt

SEQ ID NO: 371127 - DNA, 201 bp, Homo sapiens
aacatcctggagggcccccttgtgcccttcccagtcaatatgtagcccccttccccacaaactacttttttgacttctgtcacattaaattacttttgcctttttttttttttttgagacatggtcttgctctgttgcccagactggaattcagtggcacaatcttggctctcggctcactgcagcctcagcctcctaggc

SEQ ID NO: 371128 - DNA, 201 bp, Homo sapiens
tttattacaaagtggaatgtgttgtgtgctaaagagggttcaaaggtaagacagaccacatggcactatgctgactgaactgtttctggcaaccttttattcacgtgtcaaggtgttcccaagcatatattattttttggatttgatttgaaaagatggtgcagaaacgtttcaaaccaaaaacttatgtacattcactgc

SEQ ID NO: 371129 - DNA, 201 bp, Homo sapiens
aatacaaaaattagctgcgtgtgcctgtaatcctagctacttggaaagctgaggcatgagaattgcttgaacccaggaggtggaggttgcagtgagcagasattatgccactgcattacggcctgagcgacagaatgagaccctgtctcaaaaaaaaaaaaaaaaaaaaaagaattggatagcacccagatatgtgtattt

SEQ ID NO: 371130 - DNA, 201 bp, Homo sapiens
cagcctggccaacatggcgaaaccctgtctctactaaaaatacaaaaattagctgcgtgtgcctgtaatcctagctacttggaaagctgaggcatgagaaytgcttgaacccaggaggtggaggttgcagtgagcagagattatgccactgcattacggcctgagcgacagaatgagaccctgtctcaaaaaaaaaaaaaa

SEQ ID NO: 371131 - DNA, 201 bp, Homo sapiens
tgattactttcagtttttaatgtaaaccatgggacagattgtggattttttttgtttttgtttttcctttgttgggacagattgttttaagttggagccaytgtagaagtctaggctatctgggtaccatattcttatatgttactctgttcttctctgctgttcccttcttcctggaggggccactcttggctctaatat

SEQ ID NO: 371132 - DNA, 201 bp, Homo sapiens
ctgaggcagtaagatcacttgagcccaggaagttgacgctgcagtcaactgtgatcatgccaccgcactgcagcctgagtgacagaaacagagaccctgtygggagaggggggggaaagaagaagaaatattttttttagtttaatttaaaattaaattcagatctattaaatggtgtatctgaagtcacatagcaagtgc

SEQ ID NO: 371133 - DNA, 201 bp, Homo sapiens
attgtgcaaccaaaaccacagtcatttgtagaacactttccctttcatcacccaaataagaaattccataaccattagcagtcactccccacttctacccmaactccccatccctaggcagtctccagtatattttctgtttctatggattaacctgttctggaaattttatttaaatggcatcatatactatggtggccc

SEQ ID NO: 371134 - DNA, 201 bp, Homo sapiens
tgctatagtcactgaagatggtgcgatgagcatggcttgtatatttcagtggctagaagactgcatgtttggaaaagggattgccagtagacagtgtgttytgcagacagaaggggcctgcaagagccgtcatctacatatttgggttcattggttttgcctgatcctagcttggttttgcctgagcttggctgtgttctt

SEQ ID NO: 371135 - DNA, 201 bp, Homo sapiens
gtggttgcattcaacagggtgaggtgctatagtcactgaagatggtgcgatgagcatggcttgtatatttcagtggctagaagactgcatgtttggaaaarggattgccagtagacagtgtgttttgcagacagaaggggcctgcaagagccgtcatctacatatttgggttcattggttttgcctgatcctagcttggtt

SEQ ID NO: 371136 - DNA, 201 bp, Homo sapiens
actaacttccataaatttctcagactaaccccacatgctcacacacaatcttagttaactccagtaatagtctgctttagagcaagagcagtgacaacacmgccctattccattttgtctaacacactttcactcactcaccaaatatttaagggcctactatggccaggccctgaatcagatcctagaatacagagatat

SEQ ID NO: 371137 - DNA, 201 bp, Homo sapiens
cagacccttaaccatcctcactttgactgtttcagtgcctgctttctttactatttgcttccagctttccctacctcatcctgccctacacagcaagaacrctcttccgtaaacattagagagattgcattatttattgttgagcctcaaggtttgttgccatttagtttcttgctatctccattcacccatttatctttt

SEQ ID NO: 371138 - DNA, 201 bp, Homo sapiens
cctatggtgtacctagcagtcttgggcattggggatactgtggtgaacaaatcagacatgattccagtcctcatgggacttacgaatttttggtggctacycctaaatgttctagaaccttctttctacattgtttcatttttacctaaatctcctgaatttttttgaattatattcttaatcaactgtacaactacacac

SEQ ID NO: 371139 - DNA, 201 bp, Homo sapiens
tcagttcttgttacactaataacttaggattccaagtgctaacacttctgaagacagagaagttaaatgtctttatttcactggcttctttgatttcaggkggcttgcttctctttgcacctggttggttgccttttatagcagatatttattaagctttgaagggaaagaggaatgctggtgattggttggtttttcact

SEQ ID NO: 371140 - DNA, 201 bp, Homo sapiens
tagctttattacaaagtggaatgtgttgtgtgctaaagagggttcaaaggtaagacagaccacatggcactatgctgactgaactgtttctggcaaccttwtattcacgtgtcaaggtgttcccaagcatatattattttttggatttgatttgaaaagatggtgcagaaacgtttcaaaccaaaaacttatgtacattca

SEQ ID NO: 371141 - DNA, 201 bp, Homo sapiens
  misc_feature (1)...(201): n = A,T,C or G
aacttaattttgtttttagaataagttttcacagtgtctcacttagttctcagagtgtacagatgtttatctgtaaaagggaagctgctgtttttatattntgtgtggtcagatgtcatctttatctttttcttctttccttctaaaggtgaataccagagaagaagttgaagatctttgccgcctagacaaaatgataga

SEQ ID NO: 371142 - DNA, 201 bp, Homo sapiens
ctgcgactgttcacacacacacatgtataaccaccagccgtatcaagatacagaacagtccaacatcctggagggcccccttgtgcccttcccagtcaatrtgtagcccccttccccacaaactacttttttgacttctgtcacattaaattacttttgcctttttttttttttttgagacatggtcttgctctgttgccc

SEQ ID NO: 371143 - DNA, 201 bp, Homo sapiens
cccaccacttcctagcttacacaggtgccctccctccttttcttcctattgatgtgtaacatacgtacagtaaagtatacagatcctgtgaaccactctgygactgttcacacacacacatgtataaccaccagccgtatcaagatacagaacagtccaacatcctggagggcccccttgtgcccttcccagtcaatatgt

SEQ ID NO: 371144 - DNA, 201 bp, Homo sapiens
tagtagtagaactagagagagaactaaggtgaccatgacctgatatttgcacatattcttgcaggccctactgttgagcagcagggagaaatggcgcgatmtggaggaaggatgttggccaccttggaacctgagcaggtaataaccttaggtgataatattgttatagttttcagagtgagtcatgctgtgtagttacag

SEQ ID NO: 371145 - DNA, 201 bp, Homo sapiens
tgtctattttttaggcctttttgacagccccccaggttcagatgatgcaaagcttattgatatattttatcccggagatcagcagtctgtgacatttggamccaagtctagagtgggaatgggtggcatggaagccaaggtaagaatctggtgccttaactgcctataacaattttaaagcccaaactatattgtatcctt

SEQ ID NO: 371146 - DNA, 201 bp, Homo sapiens
gcattgcacctgaaagattttttttaaatttggaagataccaaaaagagcaggtgttttttgtgtctcaaaatattcctaactctgcattattatttgctwacataaaaactaagatggttgaggcctagaaaggagccacttactttttctctcttttctataatatagaggaggtgggagtttccctaatacagaggag

SEQ ID NO: 371147 - DNA, 201 bp, Homo sapiens; identical to SEQ ID NO: 80372

SEQ ID NO: 371148 - DNA, 201 bp, Homo sapiens
ggccagatcaggtgtttgggaatttaaagcaaaacttaggccacacagagccaagacactactacaagcagacttgacactccagcaggcctgtgagcctwcagactttaggccattctgcagagccagatgggtcctcagtggcttaggaaggcccctcccttacagctgcgtcttggcactatttatttacaagaatgt

SEQ ID NO: 371149 - DNA, 201 bp, Homo sapiens; identical to SEQ ID NO: 80373

SEQ ID NO: 371150 - DNA, 201 bp, Homo sapiens
accaagtcaggcccagaggggccagatcaggtgtttgggaatttaaagcaaaacttaggccacacagagccaagacactactacaagcagacttgacactycagcaggcctgtgagccttcagactttaggccattctgcagagccagatgggtcctcagtggcttaggaaggcccctcccttacagctgcgtcttggcac

SEQ ID NO: 371151 - DNA, 201 bp, Homo sapiens
accctgttctccacggtggggggtgccatgtggccctggccacttaactcagttctctttgctttatttgtttgtttgcgacggagtctcactctgttgcycaggctggagtgaagtggtgcaatctcggctgactgcagcctccgcctcccaggctcaagaaagtctcttgcctcagcctcctgggtagctgggactaca

SEQ ID NO: 371152 - DNA, 201 bp, Homo sapiens
tgctgggaaatacaaggtgtcattagagagtggccccactttattaccctaaactgcctcccagaattctgggagcatttcccccactggactgtcctatrggataccagctcttcctttgcactagccccaaagtctcaaagggaaattctactgtaaaaacaaaaaactagcacctctttactataagacatagttgac

SEQ ID NO: 371153 - DNA, 201 bp, Homo sapiens
ttattacaaagtggaatgtgttgtgtgctaaagagggttcaaaggtaagacagaccacatggcactatgctgactgaactgtttctggcaaccttttattcacgtgtcaaggtgttcccaagcatatattattttttggatttgatttgaaaagatggtgcagaaacgtttcaaaccaaaaacttatgtacattcactgcc

SEQ ID NO: 371154 - DNA, 201 bp, Homo sapiens
attacaaagtggaatgtgttgtgtgctaaagagggttcaaaggtaagacagaccacatggcactatgctgactgaactgtttctggcaaccttttattcacgtgtcaaggtgttcccaagcatatattattttttggatttgatttgaaaagatggtgcagaaacgtttcaaaccaaaaacttatgtacattcactgcctc

SEQ ID NO: 371155 - DNA, 201 bp, Homo sapiens
atagaaggtaatattcctgtcacacctgtaaggtgcaactgggactggaacccaaatcaacctaccataccacagtgcaggagcaaatttccaaatatctyagcctgtggttcactttgttctctgaccacaagtctctgttagcctgctgctgtcattcatgaataactggcttggcccatgtgaaaaggacccctttat

SEQ ID NO: 371156 - DNA, 201 bp, Homo sapiens
ttacaaagtggaatgtgttgtgtgctaaagagggttcaaaggtaagacagaccacatggcactatgctgactgaactgtttctggcaaccttttattcacgtgtcaaggtgttcccaagcatatattattttttggatttgatttgaaaagatggtgcagaaacgtttcaaaccaaaaacttatgtacattcactgcctcc

SEQ ID NO: 371157 - DNA, 201 bp, Homo sapiens
actgggatctttattgtcaagtattcattttaggaaaatgccagaagtcaagcccttgtgttgataacccactaaacgccttgcacattcttttttattcttttttttttctttgagacggagtcttgctctgtgccccaggctggagtgcagtggcacaatcttggctcactgcaacctctgccttccaggttcaagcag

SEQ ID NO: 371158 - DNA, 201 bp, Homo sapiens
ctgcttgaacctcccaagtagctgagattacaggcacctgccaccatgccctgctaatttttttagtaaagacggggtttcaccatgttggccaggttggtttttgaactcctgacctcaagttatccacccgtctcagcctcccaaagtactgggattacaggcgtgagccaccatgcccggcccaccttgcacatcctt

SEQ ID NO: 371159 - DNA, 201 bp, Homo sapiens
tcccgaaagttcgatagttttatattttatacttaaatccatgatccattttttttttgttttcttgagacaagatcttgctctgttgttacccagggctrgagcatagtggcacgatcaaggctcactgcagcctcaacctccagggctcaagtgatcctcctatgtcagcctcccaggtagctaggactatgggttgca

SEQ ID NO: 371160 - DNA, 201 bp, Homo sapiens
ctgcattccagccagcaggaagaaggaaaaaccataggcagaggagtgtctgccagctgccccttctaagtgacattccaggaagacccccctgcccagtrcttgaccaaaactagctcatggcctaccctctctaaaagggatctgggaggtgtagcttttttatttgggcacattgcagctccaagaaagtaagggttc

SEQ ID NO: 371161 - DNA, 201 bp, Homo sapiens
cataggattagacatgccaccagaacagcctcctttacccgggttaagccttagaacctgagaagccatctactgagtctgcgttgcatttcctacctgcrgacttttattctgggcttcatttcttggaggaactaggccttctgcattacacactccctgcaaatattaggttggcacaaaagtaattgtggtttttgc

SEQ ID NO: 371162 - DNA, 201 bp, Homo sapiens
gggccccttctttccaagagtatggagcctgcactggtgggtggcgtgggtggcggtggtggcagcgccgggatgccgcgggttttagctggccgcacgcygactctcaggggcctgggtccctagttccccgcggccctccaggcgttcatcatcccctcctcaaagccagactccctttgcagtatggcattctgtgta

SEQ ID NO: 371163 - DNA, 201 bp, Homo sapiens; identical to SEQ ID NO: 80395

SEQ ID NO: 371164 - DNA, 201 bp, Homo sapiens
acatttgtcctgcttttcatagacaaactgtacctcagggtaaccaaatagttggtaaaggagagtttcccttttggaattattccagattataaatgacraaggaatcattgagttagagtgtcagcattttgcatctcctaatggaataatggatcttggcaatgatcatcaacagatgctaacatcacaaaaagaaag

SEQ ID NO: 371165 - DNA, 201 bp, Homo sapiens; identical to SEQ ID NO: 80378

SEQ ID NO: 371166 - DNA, 201 bp, Homo sapiens
gagacattggccagccaaaaggaaaggagtggccagggtacgacctggagtagggaagggaaaaagttcccggaaagaagagaattggatgagaggtctcrgtggaaataaaggttttctggcattggtcaaggaaactcgcgttgtgttctcttacctgtgttgtcccttagctgaatcagttgatttgggctatgaaga

SEQ ID NO: 371167 - DNA, 201 bp, Homo sapiens; identical to SEQ ID NO: 80400

SEQ ID NO: 371168 - DNA, 201 bp, Homo sapiens
tagaagggttttaggaaattctgtgtgctccctgtagctgtggggcttgctgcctgtaacccaggagtaggtggactgtctcttatcctcctgggcattcyctccaggatgcagcttgggctctgctgtgggcagggccctgactgctgcctcctggttggggcctgcaggtgagtgcttccacggctggctggagcccct

SEQ ID NO: 371169 - DNA, 201 bp, Homo sapiens; identical to SEQ ID NO: 80401

SEQ ID NO: 371170 - DNA, 201 bp, Homo sapiens; identical to SEQ ID NO: 80402

SEQ ID NO: 371171 - DNA, 201 bp, Homo sapiens
acagaaatattactctgagggccgaatgaagtaataatacgtgcagaagctcactgaaaatctcaaggagctagacaaatgaaagagattattcttctacrattagggctgaagcttgacatgcggatgcccctgggagggggaacaccctcttctgaaatccacacgtgggcccggagggctgggccaatggatcggctg

SEQ ID NO: 371172 - DNA, 201 bp, Homo sapiens
ggtgactggggagacctgataccaagctgtggtttcagtagctttctcctctactgaggcctgctccagagactgtgggactctaatgctgagctgtttgsggggggggtgggcatttcttaacagcaaccctggtggttaggaatatcctcacacctggtttcctccagtgaaggcccacaaggccggaattgattccaa

SEQ ID NO: 371173 - DNA, 201 bp, Homo sapiens
gttcaaagtacaaaagagtattcagtgaaaggtccttttcctgctcctgaatctcccctggtcaggtgcttccttcacctggtcagtgctatcagttctcrttctccaataagattttcaaatcccttggggaaaggaattgagcctttgtgtccctctgtgtaccagacggggtaaactgtcccaccccatcacccaagg

SEQ ID NO: 371174 - DNA, 201 bp, Homo sapiens
tccatccacactgctactaactctcctgggtcagactccgaatgggtcatccagctgccaagcaggtccctttccaagataccctccaccgctgtcatatkgctcttcctgtaatgctgggctcccagcttaacgctttattactccccatgccttgggtcaagggcaaatgctcctcagcatgatgaacaaggcccttag

SEQ ID NO: 371175 - DNA, 201 bp, Homo sapiens
tcatggcctaggaagaagcctggtcggtatcctttttcccagggagagagagcagcatttgcccaagtccttggacctggggtctggtgctctgggaataraatagagctgcttatggggagactgtctcacctagcccactgaaggcctcatcctgtctcctcttacatcaggtgtggcagtgtgggggccagctggaga

SEQ ID NO: 371176 - DNA, 201 bp, Homo sapiens
ctgcacctgctgtgcctactgggtaactcagccccgtacaagagtgggttggggcccagttgagagaggctttggtaggtccggtaagccacagggagtcrtggagcctaaccctagccttattcttggttgcattaaatatccaaacgtggatcccagtatccctcatactgtctatggtatcacccaacagctccccag

SEQ ID NO: 371177 - DNA, 201 bp, Homo sapiens
ctattctgggtttttaaaatttatttatttttattttttgagacagggtctcgctctattgcctaggttgtagtgcagtggcatgatcataactaactacrgcctcaacctcctgggctcaagcaatcctccagcatcagcctctcaagtagctgagattacaggcctatgccaccacacccagctaactggtctcttttt

SEQ ID NO: 371178 - DNA, 201 bp, Homo sapiens
gcagagactgctaagctttgtccatgaattttgtggggaaggagcataatccttgtaacaaccctaggaggtaggtgctactactagaagaggaagaactrgaatttgtgcccaggtcccttgccattgatgtctagtgcttaaccagtgagcttatgtgtccagaactctgcacagaaagttctgcaagcattcatcctc

SEQ ID NO: 371179 - DNA, 201 bp, Homo sapiens; identical to SEQ ID NO: 80405

SEQ ID NO: 371180 - DNA, 201 bp, Homo sapiens
tttttttcgtggggagacggagtcttgctctgttgcccaggctggagtgcagtggcatgatcctagcctactgcaacctctgcctcccgggttcaagtgaytctcctgcctcagcctcccaagtagctgggattacaggcatgcgctaccacgcccagctaatttttgtatttttagtagagacagggtttcaccatgttg

SEQ ID NO: 371181 - DNA, 201 bp, Homo sapiens
ctgcctgggacttccagtctccacatctttaaagcatttgtatccttgagtgggaggaaggcaaatgccaggaaggggatcaaagggtggagtcggggaggctcagggaggacaggcctggtccccaaattccctactcaacctccacgggtatgagtgtggtaaacagagtagtggtctaggagttgagagatcgggttc

SEQ ID NO: 371182 - DNA, 201 bp, Homo sapiens; identical to SEQ ID NO: 80407

SEQ ID NO: 371183 - DNA, 201 bp, Homo sapiens
acacatccacattgttgcatggagaagtggttcattcttggtcatcactgtagagcactgcacggtatgggtattttgcactttatttattcattctgctrgtggacttaaaggttttaccagtttgttgccatttaagtcagtgttggcttaaatgttcttgtacatacctcttggtttgcatctaccagagtttgtctg

SEQ ID NO: 371184 - DNA, 201 bp, Homo sapiens; identical to SEQ ID NO: 80409

SEQ ID NO: 371185 - DNA, 201 bp, Homo sapiens
tgtggaagaaggaactcagcctggcaccaggacctggcacggggtgactggggagacctgataccaagctgtggtttcagtagctttctcctctactgagkcctgctccagagactgtgggactctaatgctgagctgtttggggggggggtgggcatttcttaacagcaaccctggtggttaggaatatcctcacacctg

SEQ ID NO: 371186 - DNA, 201 bp, Homo sapiens
ctcagctactcaggaagctgacatggaggatcgcttgaacaaacgaattcaaggttgcagtgagctatgatcatgccaccacactctagcttaagcaacaragcaagaccctgcctcaaaaaaaaaaaaaaaaaaaaaaaagagaaaatatactggttgggcgcagtggctcacacctgtaatcccagcactttgggaggc

SEQ ID NO: 371187 - DNA, 201 bp, Homo sapiens
tattgagggcttagtgtgacaggtgctctgccaaacattttacctacattatctgatttaatcctccccacaaccctgtgagttaggtattagttgccccyactttatagatgaggaaattgaggcttagagggattaagtaaattacccaagggtcacacagctgctaatgatcaaaactaacactttgtgggaacttac

SEQ ID NO: 371188 - DNA, 201 bp, Homo sapiens
tggggagacctgataccaagctgtggtttcagtagctttctcctctactgaggcctgctccagagactgtgggactctaatgctgagctgtttgggggggsggtgggcatttcttaacagcaaccctggtggttaggaatatcctcacacctggtttcctccagtgaaggcccacaaggccggaattgattccaaccttta

SEQ ID NO: 371189 - DNA, 201 bp, Homo sapiens
agggctgtgaacctgaggttcttgagacttgagccaagtatgatagccctagaacaaggggccacttgaagctatcaggaattcctcagcagagaagggcrctggggccaggcacagtggctcatgcctataatcccagcactatggaaggctgaggtgggtggatctcttgaggccaggagttcaagaccagcctggcca

SEQ ID NO: 371190 - DNA, 201 bp, Homo sapiens
ggcaacagttagtaactacaatcttaccatgcctttgtttctaactgtgctccctctttcttgctggagtgggaaggtagatggaaagtagcagggaagaygaagcctgcaggacggttcaaagctgtcatggcaaacactcccccattctgcaggcctctgtgtgggcttagccgggacagttccagaactgatgaggtg

SEQ ID NO: 371191 - DNA, 201 bp, Homo sapiens
gtggggtgaacctgaaattgagacaggattaaaaacgacctgtctgagagtgggacaggggctggcttgtttcacggacttcaatgcttctggcagcaatsgggaaattgggcaggctggctagcagaggaggctgggcacagaccctgagcccaggggatggtacattgagtagccagtggccccgggtgaaagttctgc

SEQ ID NO: 371192 - DNA, 201 bp, Homo sapiens
cacagagtagctggagtggatgaagttggaagaaaggttgcaggaaattgactgtgatagtggtgtcaaatcacagggagttaatgagaaaatggattagwgaggaactgtacgctgtaaagggaagagccttttcttctcattgagtatggaaatcatagtcacttttctcagatgtcaaatttggcctttattacctac

SEQ ID NO: 371193 - DNA, 201 bp, Homo sapiens
tgccctggaattgcctgtttcctggtcagccttgcttctgggtggtttgttccttaggacaaatggtcaagccggctgggctcgccactgtgcctggtccrtggtaggtgcttggtgcaagtattttcttaatataattaaaaagctgctgggcatgttttcaccttaaagaattctatctgcagaggaggttacaaaggg

SEQ ID NO: 371194 - DNA, 201 bp, Homo sapiens
tagagacatcttcccttcaaaaagctttccccgctcctcaaatccaggagatttggcccttctttgggacccacaccccagcactacctctgttagatcayggatcacctgccctggaattgcctgtttcctggtcagccttgcttctgggtggtttgttccttaggacaaatggtcaagccggctgggctcgccactgtg

SEQ ID NO: 371195 - DNA, 201 bp, Homo sapiens; identical to SEQ ID NO: 80398

SEQ ID NO: 371196 - DNA, 201 bp, Homo sapiens
aggggctgggccaggctggtccctcctgccttcgctctctgctggtcgcggtggcctgtagctcctccctcggtaggacccccctccaccttggcgcttamgagatgaatgaggagcccagacctctggaacttggaggggtgagagggggacaagccagagccagggctccacaccctcttcccctcacccacccatgcc

SEQ ID NO: 371197 - DNA, 201 bp, Homo sapiens
agatgctcaaagagatttcttttgtttgatttttgacggtgctgctgaatctgatgttataaaagaagccacatttgtaccccagtccagaatgaatccasctccccacttgagatcacgatggccacatactcccaaggtctcagacaccaggcctctccacaggcaggagcttgtgcgtttaaacaatagcattaaata

SEQ ID NO: 371198 - DNA, 201 bp, Homo sapiens
cttgaacccaggaggggaaggttgcagtgagccgagattgcaccactgcactccagcctgggcaacagagtgagactccctcttaaaaaaaaaaaaaaaaactggtggaactgatccttagggggctggcttgattgacagaaatccttcggtgacatttcggaacgactgcagctgagggaacaactgcactgtcacaac

SEQ ID NO: 371199 - DNA, 201 bp, Homo sapiens
catcccaggcgacagcttgagaaacatctctcaggcagaggtggcatcagggacatcccatctggaactgaactagaaagggtggctatttcccagtgtgyctcttcctcttttctgctccccctgtccatggcagtagggcttgggcagtcagcctggacagctcaaaacaaactactgggcacaacttctcagaggcaa

SEQ ID NO: 371200 - DNA, 201 bp, Homo sapiens
tcagcctcccgagtagctgggattacaagcatgcgtgcccagctaattttgtattttcagtagagacagggtttctccatgttggtcaggctggtctcgawctcccaacctcaggtgatccacctgcctccgcctcccaaagtactgggattacagccatgagccagcgcgtctggcctaatttttgtatttttaatagtg

SEQ ID NO: 371201 - DNA, 201 bp, Homo sapiens
ggtacgagaacaatgcaccatggagtatgtagccaggaggtgccatttctgcctggcgtggctagggctggtctgcagtggaagccagattggagctgggmcttaaaggatgagtgtctaagagagaagagtggatgaagggcattcccacaagagaatggcataagcacagtcctaaagacatgaatgtgtttgttaaag

SEQ ID NO: 371202 - DNA, 201 bp, Homo sapiens
accgtggcagagataaaccaaaatggcagttagtaaaacatagtaaggtttggaattcggtatgtttcaagatggactgcttcagaatagagctattcttsgtttgttttttgttttgagacaagtcttgctatgtcactcaggttggagtgcagtggcatgatctcagctcactgcaacctccacctcctgggttcaagc

SEQ ID NO: 371203 - DNA, 201 bp, Homo sapiens
ctcaggaaacctataatcatggcagaaggggaagcaaacatgtccttcctcatgaggtgtcaggagagagaagaatgagagccgagcaaaaggggaagccyctcataaaaccatcagatttcgtgagaacttactatcacaaggatagcatggtggaaactgccccatgattcaattatctcccactgggtcccttccatc

SEQ ID NO: 371204 - DNA, 201 bp, Homo sapiens
aacacaggaccctgcagtctccctgtgcttaagtcagagtgaaccaacatcagaaagcctgggatcgtgtagtcatggcctaggaagaagcctggtcggtrtcctttttcccagggagagagagcagcatttgcccaagtccttggacctggggtctggtgctctgggaatagaatagagctgcttatggggagactgtct

SEQ ID NO: 371205 - DNA, 201 bp, Homo sapiens; identical to SEQ ID NO: 80406

SEQ ID NO: 371206 - DNA, 201 bp, Homo sapiens
cgtgggggttctaaactgttaacttttcaccctaaactttgtgactctgtgagctgcaagtgcccaggtaggcaactcctctgactagctagacaagtgasataatgccaggctggcataggcagcatctaacaggcagagtagcctgtgttcagtagggcagagttggcagtagccccagtatcccctccagagcacccg

SEQ ID NO: 371207 - DNA, 201 bp, Homo sapiens
tggggccctccccacacctggtactcccagggaccaggagaactttgtccgtactttcatacttccaggtgtgtggaccagaagttccggcgctgcccccmactggccaccaccagcgtgatcattgtgttccacaacgaagcctggtccacactgctgcgaacagtgtacagcgtcctacacaccacccctgccatcttg

SEQ ID NO: 371208 - DNA, 201 bp, Homo sapiens
atctactaaaaatacaaaaattagccaggcgtggcagagcatgcctgtagtcccaactactcgggaggctgaggcaggagaatcgcttgaacccaggaggyggaggttgcagtgagccgagatcatgttactgcactccagcctgggctacagagtgagactccatctcaaaaaaaaaaaaaaagagcagttgagtccctt

SEQ ID NO: 371209 - DNA, 201 bp, Homo sapiens
agcaaagtggtggactggccacaatgacactgtcccttccagagcacctaaaggagaagctggagcagtacgtgaagcagctgcaggtggtgagggtggtrcggcaggaggagcggaaggggctgatcaccgcccggctgctgggggccagcgtggcacaggcggaggtgctcacgttcctggatgcccactgtgagtacc

SEQ ID NO: 371210 - DNA, 201 bp, Homo sapiens
gctgccctttgtgcttctgccaccctgggctagtcactttgagtcttactttccccatctataaacactggggacaatactccctgtttcatagagttgtkaactatcatagagaagattaaataaagaagtcaccatgaagacacctacctcacccacaccggcacacactccagctcagtgctgggttattgtgtgcgt

SEQ ID NO: 371211 - DNA, 201 bp, Homo sapiens
gtgactggggagacctgataccaagctgtggtttcagtagctttctcctctactgaggcctgctccagagactgtgggactctaatgctgagctgtttggrgggggggtgggcatttcttaacagcaaccctggtggttaggaatatcctcacacctggtttcctccagtgaaggcccacaaggccggaattgattccaac

SEQ ID NO: 371212 - DNA, 201 bp, Homo sapiens
ttactgcaacctccagctcctaggttcaatcaactctcctgcctctgtctcctgagtagttgggattacaggcacatgccaccatgcctggctaatttttrtatttttagtagagaaggggtttcaccatgttggccaggttggtcttgaactcctggcctaaagtgatctgcccaccatggcctcccaaagtgctgggat

SEQ ID NO: 371213 - DNA, 201 bp, Homo sapiens
aatgaagtaataatacgtgcagaagctcactgaaaatctcaaggagctagacaaatgaaagagattattcttctacgattagggctgaagcttgacatgcrgatgcccctgggagggggaacaccctcttctgaaatccacacgtgggcccggagggctgggccaatggatcggctggaaccccggaagataccatccagg

SEQ ID NO: 371214 - DNA, 201 bp, Homo sapiens
agaagttccggcgctgccccccactggccaccaccagcgtgatcattgtgttccacaacgaagcctggtccacactgctgcgaacagtgtacagcgtcctrcacaccacccctgccatcttgctcaaggagatcatactggtggatgatgccagcacagagggtgaggctggaggggcccagaggagggggccggggtctc

SEQ ID NO: 371215 - DNA, 201 bp, Homo sapiens
gggcagatcacctaaggtgaggggtttgagaccagcctggccaacatggtgaaacctcatctctactaaaaatacaaaaattaattgggcgtggtggtgcrcgactgtagtcccagctactcaggaggctgaggcaggtgaatcgcttgaacccaggaggggaaggttgcagtgagccgagattgcaccactgcactccag

SEQ ID NO: 371216 - DNA, 201 bp, Homo sapiens
acctgggaagcagaggttgcagtgagctgagatcgcaccattgcattccagcctgggcaataagagcaaaactctgtctcaaaaaaaaaaaaaaaaaaaaraagaaagaaagaaagaaagaaatatgctttgattccaattgcctagcaggagccagtagcattgcaggcatttccctagctccagttccttaatggtgcc

SEQ ID NO: 371217 - DNA, 201 bp, Homo sapiens
gagaatgtaggctgtggttcagaggagtggaggatggtctgggggagtctctggatggggccctccccacacctggtactcccagggaccaggagaacttkgtccgtactttcatacttccaggtgtgtggaccagaagttccggcgctgccccccactggccaccaccagcgtgatcattgtgttccacaacgaagcctg

SEQ ID NO: 371218 - DNA, 201 bp, Homo sapiens
ccccacccatcactgacgtcgcaggcttcaatgtccaagggccatacaactggaagacaaagctccagtgtttgaggaatgaatgtgctccttggcccacrtgccccggtagcatgcatggcttgccgaggctcttcatgtagcgcccccaccccaggaggactgctgacagtcccctcccggcctcccatctcaagccaa

SEQ ID NO: 371219 - DNA, 201 bp, Homo sapiens
cttcagcccagacaggaaggtcaaagactggtggaactggctgggtgtggtggctcacgcctgtaatcccagcacttagggaggccgaggcgggcagatcrcctaaggtgaggggtttgagaccagcctggccaacatggtgaaacctcatctctactaaaaatacaaaaattaattgggcgtggtggtgcgcgactgtag

SEQ ID NO: 371220 - DNA, 201 bp, Homo sapiens
ttctgtggaatggctcagtacagcaggtgttgggggtttaaaattcaggcctgctagaggcctgagagcccctagcttggtgcccacaggggattgggtayacagcaaagtggtggactggccacaatgacactgtcccttccagagcacctaaaggagaagctggagcagtacgtgaagcagctgcaggtggtgagggtg

SEQ ID NO: 371221 - DNA, 201 bp, Homo sapiens
ccgggcatggtggcaggcgcctgtaattccagctacttgggaggctgaggcaggagaattgtttgaacctgggaagcagaggttgcagtgagctgagatcrcaccattgcattccagcctgggcaataagagcaaaactctgtctcaaaaaaaaaaaaaaaaaaaaaaagaaagaaagaaagaaagaaatatgctttgatt

SEQ ID NO: 371222 - DNA, 201 bp, Homo sapiens
aagacaagactcagggcctgtgggggaggaagcaggttggcttccaagtgctcctctgcagttccagcactctctgagcctctcagggtgctacttgtgcyggtttaagacccctgggagaggccagagcctcttccaaagtgataggaagccagcctgagcacgactgaaattccttccagaaagtggctgcaggagcca

SEQ ID NO: 371223 - DNA, 201 bp, Homo sapiens
acccacaagcagtggtcctgaaacattagcatgcatcagaatcaccaggaaggcacggtaaaacgctagggcccatccccagagttcctgattcagaaggmctcaggggaggtctgaaaacttgcatttctcacgagtctccaggtgatgctgatggtccagggctcacatttgagaaccactgcttataaggaaactccc

SEQ ID NO: 371224 - DNA, 201 bp, Homo sapiens
  misc_feature (1)...(201): n = A,T,C or G
aaggagggggaggtgggttaggaggggagtccacaaacagctttccccgccaggctccgctcctcctctcccagaagatgcacacacttctccctctgtcnctccagatccccgacgtttgctggtggcctcttctccatctccaagtcctactttgagcacatcggtacctatgataatcagatggagatctggggaggg

SEQ ID NO: 371225 - DNA, 201 bp, Homo sapiens
actcaggggaggtctgaaaacttgcatttctcacgagtctccaggtgatgctgatggtccagggctcacatttgagaaccactgcttataaggaaactccyacgtgctgagggcttcttccagggacctggcatcctgggaggttccctgcctgccccacagaggggttcagtcctgccctttccagcctctggggctctg

SEQ ID NO: 371226 - DNA, 201 bp, Homo sapiens
gaataacaacatactttcccacctaaaacccaaaagaagaaaccagtgggagggatgtcttcagccagcccaccagcatagaaaagggtcacctgccagtyaccccaactcccagcggcccaatcctaggctcctccatgagcctctgacctctgttcaccttcctaggcagccagtgtgctaagggcccaagtgactacc

SEQ ID NO: 371227 - DNA, 201 bp, Homo sapiens
cgtggcagagataaaccaaaatggcagttagtaaaacatagtaaggtttggaattcggtatgtttcaagatggactgcttcagaatagagctattcttcgyttgttttttgttttgagacaagtcttgctatgtcactcaggttggagtgcagtggcatgatctcagctcactgcaacctccacctcctgggttcaagcag

SEQ ID NO: 371228 - DNA, 201 bp, Homo sapiens
gaggtggattaggtggattgcttgagctcaggagtttaacaacagcctgggcagcatagcaagaccccatctcttaaaaaagaaaaagaaaaaaaaaaaaacctgctcagagtcccagtagaaaggaactcaggtgaatgccacagggagaaatcccacagatcctgaacagccagctgctctgtctccattagaaggaga

SEQ ID NO: 371229 - DNA, 201 bp, Homo sapiens
cgcctgtaattccaactctttgggaggccgaggcgggcagatcacttgaggtcaggaattcgagaccagcctggccaacatggtgaagccccatcttcacmaaaaatacaaaaaattagcggggcgtggtggcaggtgccaataatctcagctacttgggaggctgaagcaggataattgcttgaacccaggaggtggagg

SEQ ID NO: 371230 - DNA, 201 bp, Homo sapiens; identical to SEQ ID NO: 80403

SEQ ID NO: 371231 - DNA, 201 bp, Homo sapiens; identical to SEQ ID NO: 80404

SEQ ID NO: 371232 - DNA, 201 bp, Homo sapiens
ttttttgtagagacagggtctcgctgtatcaggctgaactcaaagtcccggcttcaagtgatctcccacctcagcctcccaaagtgctgggattacaggcrtgagccaccactcccagcctaaaaaaccatttttcgaaagttgcctgtaccagcggaggcagaaattgcagtcactattctgtggtggctcatctgcaaa

SEQ ID NO: 371233 - DNA, 201 bp, Homo sapiens
gggggtggagggtggtcagtttgcccacaaagcttacagcagaccccttctagcagccgacaacccattgcagcactctcagaaaggatgttaactctgtgctctgagctcgcccccaggcccacacacacaatttacaggcactgggtgaggttcatagttctggacacaccaaagagcctcgaggacttttgcgccttc

SEQ ID NO: 371234 - DNA, 201 bp, Homo sapiens
tgggggtggagggtggtcagtttgcccacaaagcttacagcagaccccttctagcagccgacaacccattgcagcactctcagaaaggatgttaactctgtgctctgagctcgcccccaggcccacacacacaatttacaggcactgggtgaggttcatagttctggacacaccaaagagcctcgaggacttttgcgcctt

SEQ ID NO: 371235 - DNA, 201 bp, Homo sapiens
tggtggcaggcgcctgtaattccagctacttgggaggctgaggcaggagaattgtttgaacctgggaagcagaggttgcagtgagctgagatcgcaccatwgcattccagcctgggcaataagagcaaaactctgtctcaaaaaaaaaaaaaaaaaaaaaaagaaagaaagaaagaaagaaatatgctttgattccaattg

SEQ ID NO: 371236 - DNA, 201 bp, Homo sapiens
aagacccctgggagaggccagagcctcttccaaagtgataggaagccagcctgagcacgactgaaattccttccagaaagtggctgcaggagccaacttcrggtagacaagagcaaccacagggtaacaccagggtcacattcctgggtaggcaccttgatggatcatgcgaatgaacagtgattgggccccagctgtgtg

SEQ ID NO: 371237 - DNA, 201 bp, Homo sapiens
cctgtagcccaaattgagcttgatctcacctgaccttccactgtttccaggagcaccttttatcagctttctctgttaaaagcaactggcaacttctccccaaatctacagtttctcatgcagtgtaaatcaccagggctaggcgcctactaaaactgtggcttaatagtccctgaggggcaggggccctgaaacagaatg

SEQ ID NO: 371238 - DNA, 201 bp, Homo sapiens
tgctcctgccatgtctcaccggcccccaccccagcattccatcttgcttatacttccccgggtccgcttcgataccctaacgcttagcccagtccctcttmgaagcaacctggtatctaaattctaggaattagatgtttttgtcaatttatcttatcttgagtccacacctccctgcctgtgtctgaaagccagaatctt

SEQ ID NO: 371239 - DNA, 201 bp, Homo sapiens
tcttgagtccacacctccctgcctgtgtctgaaagccagaatctttttataaccttctaaatgttccctgtagcccaaattgagcttgatctcacctgacyttccactgtttccaggagcaccttttatcagctttctctgttaaaagcaactggcaacttctccccaaatctacagtttctcatgcagtgtaaatcacca

SEQ ID NO: 371240 - DNA, 201 bp, Homo sapiens
ttttttattgagatgggctctcaatacgttgagcagactggtcttgaactcctgggcccaagcgatcctcccacctcagcctcccaaagtgctgggattayaccatgcttggccaagaaatatttataaaatacgtatagggtctaaagaattacagtccaccagcagccgccatccactttgagaaaaaaacactttgaa

SEQ ID NO: 371241 - DNA, 201 bp, Homo sapiens
gcgcctggcagaggtctggatggacagctacaagaagattttctataggagaaatctgcaggcagcaaagatggcccaagaggtgagaggaaatggttctyggagaggtttagatgaagagaagtacggcccccagaccctgttcatgggcctaatggctgggacccacctcatctctaccatctggcgcctcccttcacc

SEQ ID NO: 371242 - DNA, 201 bp, Homo sapiens
tacgcatagagtctctgcatccctttggaggggaagggagggaaaggagatttggaggaaaagcctcttacggaggctttggaggctttggaggaatggcyctgagagcctcggcactggggagtgggacataattgtctggggagtcacaggagatggaccgataagcaggggactccaaagctaaggcggggtttttgg

SEQ ID NO: 371243 - DNA, 201 bp, Homo sapiens
aagacagtcagctttgctgctaagaggagtataaagagggcttggtccaagcaagaaggcagtggtctactccatcggcaacatgctggtcctttatggtaagtggatatggtccagcaaccctggtcctttatggtaagtggatcatgtggcctgaggtctatagggagggggacttgggcaggaaggtcagcaaatttt

SEQ ID NO: 371244 - DNA, 201 bp, Homo sapiens
agacagtcagctttgctgctaagaggagtataaagagggcttggtccaagcaagaaggcagtggtctactccatcggcaacatgctggtcctttatggtaagtggatatggtccagcaaccctggtcctttatggtaagtggatcatgtggcctgaggtctatagggagggggacttgggcaggaaggtcagcaaattttc

SEQ ID NO: 371245 - DNA, 201 bp, Homo sapiens
gtcagctttgctgctaagaggagtataaagagggcttggtccaagcaagaaggcagtggtctactccatcggcaacatgctggtcctttatggtaagtggatatggtccagcaaccctggtcctttatggtaagtggatcatgtggcctgaggtctatagggagggggacttgggcaggaaggtcagcaaattttccctaa

SEQ ID NO: 371246 - DNA, 201 bp, Homo sapiens
atgatgttttgtccgtgggttatctccactaccgtgaacttcctgtgcgcagagctgggcaagctctcggggaaacacagcagccatgctgaggagcctgrgcttcctccctccttcctgtcagggccagcacccggggctgcaggtgcactatgagtctcaaagggcaggacccagaccaggcccctcccttcccagaac

SEQ ID NO: 371247 - DNA, 201 bp, Homo sapiens; identical to SEQ ID NO: 80397

SEQ ID NO: 371248 - DNA, 201 bp, Homo sapiens
ggaagacaaagctccagtgtttgaggaatgaatgtgctccttggcccacatgccccggtagcatgcatggcttgccgaggctcttcatgtagcgcccccaycccaggaggactgctgacagtcccctcccggcctcccatctcaagccaaccagagcctaagaggagaggcagaggacctgggggattctaggggtaggcc

SEQ ID NO: 371249 - DNA, 201 bp, Homo sapiens
aaaaaaaaaaaaaaaaaaaaaaagaaagaaagaaagaaagaaatatgctttgattccaattgcctagcaggagccagtagcattgcaggcatttccctagytccagttccttaatggtgccatgcactttaggaacccagaggtaatcagagaaagttgcttccaggggcaccagggcagagaacaggacaagaccctcaa

SEQ ID NO: 371250 - DNA, 201 bp, Homo sapiens
attgcctagcaggagccagtagcattgcaggcatttccctagctccagttccttaatggtgccatgcactttaggaacccagaggtaatcagagaaagttscttccaggggcaccagggcagagaacaggacaagaccctcaaaagaaagagggaagtgtgcaggagactgggctgctcaagatgacctcacctcagtaat

SEQ ID NO: 371251 - DNA, 201 bp, Homo sapiens
agaaagagggaagtgtgcaggagactgggctgctcaagatgacctcacctcagtaatgctgcccacagtcctacagtgggtggaacagctgactcctaccygtagcagcatggaagaactcagggcagagaaggggaggccctgatgtgtgtcaggtgccctgtgaggtcagaaacatatttgcccaagttcagctggaag

SEQ ID NO: 371252 - DNA, 201 bp, Homo sapiens
aaccattgcctcgaacagacctcaggaccaggaggggcagctaaccctagggctgagggcctctcagtgcagggaggcagtgagtatcatgaaggcaggcwgctgactcagccctgtcactaacttcgatatataatcttagccaaaacacataaacactccctgggtggggagcaaatgagaaggtgtatatgaagtgtt

SEQ ID NO: 371253 - DNA, 201 bp, Homo sapiens
acggggaaaaataaaaacctcccacattctgtgatcaaaagggtcaggggtgggaggagggctttggagaagataatttgctcttctgttcacagtatgartacagaggacttgagatgagtgctgtgtttgatggagagaaagtgcttatgaggaagaaaggacggtcatttggccaaacagcctctcagccccatttcc

SEQ ID NO: 371254 - DNA, 201 bp, Homo sapiens
tggagtacggtggtgctatttctgcttactgcaacctccagctcctaggttcaatcaactctcctgcctctgtctcctgagtagttgggattacaggcacmtgccaccatgcctggctaatttttgtatttttagtagagaaggggtttcaccatgttggccaggttggtcttgaactcctggcctaaagtgatctgccca

SEQ ID NO: 371255 - DNA, 201 bp, Homo sapiens
ctgaaaagttctgttacagccactgtctcatgtccccaaacattctctggccctaaatctagcttatgtattgtgtcaagcacgtggagacgtgagacgtsaaacgaggtcctgtccccgtggaactcacacgctaaatgtaagcaaatcatagcaagcctggagatgctccaagaggtgctggatgagttagaaggagca

SEQ ID NO: 371256 - DNA, 201 bp, Homo sapiens
aaattagccaggcgtggcagagcatgcctgtagtcccaactactcgggaggctgaggcaggagaatcgcttgaacccaggaggcggaggttgcagtgagcygagatcatgttactgcactccagcctgggctacagagtgagactccatctcaaaaaaaaaaaaaaagagcagttgagtcccttacatggtgggtgaggga

SEQ ID NO: 371257 - DNA, 201 bp, Homo sapiens; identical to SEQ ID NO: 80412

SEQ ID NO: 371258 - DNA, 201 bp, Homo sapiens
agtcagctttgctgctaagaggagtataaagagggcttggtccaagcaagaaggcagtggtctactccatcggcaacatgctggtcctttatggtaagtggatatggtccagcaaccctggtcctttatggtaagtggatcatgtggcctgaggtctatagggagggggacttgggcaggaaggtcagcaaattttcccta

SEQ ID NO: 371259 - DNA, 201 bp, Homo sapiens
tgagagggcaggaaaggaatggggaagtgtcctctttgtgccttgtggggttcccttggcttttgtcaattgcaccccatcgcattgtccctggtagcacygttaagaggtctgtggcccagactgaccttttgctttgtcatcttttaggatcagctcatcaggaactcaggatctggtacctgcctgacatcccaggac

SEQ ID NO: 371260 - DNA, 201 bp, Homo sapiens
cagtcagctttgctgctaagaggagtataaagagggcttggtccaagcaagaaggcagtggtctactccatcggcaacatgctggtcctttatggtaagtggatatggtccagcaaccctggtcctttatggtaagtggatcatgtggcctgaggtctatagggagggggacttgggcaggaaggtcagcaaattttccct

SEQ ID NO: 371261 - DNA, 201 bp, Homo sapiens
gaaacttgggaacaaataacacctagaaactgaggcagcaagatgcaccttagtctaggaagccttcttgaaagaggggagtctctggtaagaatttgaamgaaaagaaatatggcttgcttagcaagaatataagggaaaggctttgaggaagaaaagatagccagtgagtgccaagcatctggttgggcttgagggtga

SEQ ID NO: 371262 - DNA, 201 bp, Homo sapiens
cttagcaagaatataagggaaaggctttgaggaagaaaagatagccagtgagtgccaagcatctggttgggcttgagggtgagcagcaaacaggaagcaamccggccagcccctctgtgtttctgccacagtcaaacagtgctcaaggaatatgaatacggctgtcctgattgtgaaagagagagaggggcccgaggcaaa

SEQ ID NO: 371263 - DNA, 201 bp, Homo sapiens
cttgtaacaaccctaggaggtaggtgctactactagaagaggaagaactggaatttgtgcccaggtcccttgccattgatgtctagtgcttaaccagtgarcttatgtgtccagaactctgcacagaaagttctgcaagcattcatcctctagggcatggatccacatgcctgggggtggagcctggtgaacgcccatgcc

SEQ ID NO: 371264 - DNA, 201 bp, Homo sapiens
gtgcccctggtttatcgagaatggagaatggcgatgacttttaccaagcatactgcctgtaaacatatggttaacaaggcacatcctgcacagccctagayctcttaagccttgattccataaacacatgtttctgtgagctcaaggttggggcaaagttacagattaacagcatctcagggcaaaacaattgttcagggt

SEQ ID NO: 371265 - DNA, 201 bp, Homo sapiens
gcatactgcctgtaaacatatggttaacaaggcacatcctgcacagccctagacctcttaagccttgattccataaacacatgtttctgtgagctcaaggytggggcaaagttacagattaacagcatctcagggcaaaacaattgttcagggtacagatcaaaatggagtatcttatgtcttccttttctactcagacac

SEQ ID NO: 371266 - DNA, 201 bp, Homo sapiens
ggcttcactcatgttgtctctgctacctggaatgtcacacgatccacacacatgcacacacacatgcacatgtgcgagcatacacacacacacacacacamacacacacacacacacacacacacacacctcccttcctggcctcttacctagctgattcctagtcattcatccttaggtttttgtactgtgtcacttccg

SEQ ID NO: 371267 - DNA, 201 bp, Homo sapiens
tctcagggcaaaacaattgttcagggtacagatcaaaatggagtttcttatgtcttccttttctacatagacacagtaacagtctgatctctctttctttwccctacatatcccccttttctttttgacagaactgccatagtcatcatggcccattctctttggtctctgtctcttcagagctgttggatacacctgtag

SEQ ID NO: 371268 - DNA, 201 bp, Homo sapiens
ttcttggatgatataaatctctgtccagggactgtgagtcttctacattcttcccttttgtttcagatatgtaaagacaccccgccacacaatccaagtgratcacattgagtacatggatgagattgccatgccagcaggggtgaaacccaacctgctcttcctctttctctcagatccaaagctggccatggaggtttt

SEQ ID NO: 371269 - DNA, 201 bp, Homo sapiens
tgatttccagaccaaattctaatatggtgcgaggccacagtaagcttccataattccggatgttcaggaccagtaacaggactaactaactttggtcaagrtggtgaaattcccttttcaccccatttccatggatagggtgattctaaccttctataaacctggtccagccttttagttaaatcactatcaaaggcagga

SEQ ID NO: 371270 - DNA, 201 bp, Homo sapiens
tataacttgataagcatatttttccatcacttaattttcaattttacttcattttattttaggtttgcctgcataaaatctgattttactttattgttcartgtaaaaccttctatctttcttattttaaaaattgtgctgaggtgtaatgtatgcattaaaatacataaagtaagctgatcttatgtgtacagcttgata

SEQ ID NO: 371271 - DNA, 201 bp, Homo sapiens
atcattaatttggtttgccaatttttgatctatttgggtctcagagttccacaattctgagtagctgtgactgcaataagacccatattcactgcaatcamagtaaaaatgaatcttttggatctagttagaattccttttaatacttctgttaacatatggacagatggcgaagcctcccacggtcagtccatggacaca

SEQ ID NO: 371272 - DNA, 201 bp, Homo sapiens
taatttctaatttaattccactgttattgaagaacatactgtgactttattttattttacttttattttttattgttttgagacagagtctcactctgtcrcctaggctggagtgcaatggcacaatctcagctcactgcaacctctgcctcctgggttcaagcaactttcctgcctcagccttccgagtagctgggacta

SEQ ID NO: 371273 - DNA, 201 bp, Homo sapiens
caatttattcacttagtctcctgttgataaaattttgtgtctggtttctttcacccatcatttgtgtatgtcaaatgtattcattatatgagaatagcttyaattcatctaaaaactttaattgttgcatagtattccattgtttgaatataccacaatgtatttactctttcttttttggtagaaatttgggttgttttt

SEQ ID NO: 371274 - DNA, 201 bp, Homo sapiens
agaacatactgtgactttattttattttacttttattttttattgttttgagacagagtctcactctgtcacctaggctggagtgcaatggcacaatctcrgctcactgcaacctctgcctcctgggttcaagcaactttcctgcctcagccttccgagtagctgggactaaaggcgtgcgccaccatacccagctaattt

SEQ ID NO: 371275 - DNA, 201 bp, Homo sapiens
gcatagatattctcatttgttaaaaatttgttcaagtcttctgtccgttgtcaatctaattcgtctatcttttttctttggtaagaattgttttttatatyttgtatatgagtcttttgttgcatgcatttgttgtgaatatctcctagtatgtgttatgtgtttttattgtcataaagatagtataacttttgacagagg

SEQ ID NO: 371276 - DNA, 201 bp, Homo sapiens
atattgacaatttatgttttctctttttgggggtagttaatcttgctagggatttattaattttcttaatcctctaaaataacaaacaatatcatgccatgtactgctcatttaatttatatttcaatgatttcagcttatatttttattattttctttttcttcatttttatgtttattttattgtatatctaggttgtt

SEQ ID NO: 371277 - DNA, 201 bp, Homo sapiens
gagaaatgggatggggcccggagagctaacctgacccagagagagaggatcatcaagcccctgagcactcgcattactagtgaggacagccacccatcctmacagctctcttggataaagatggccccagtgagcctggcatttctggctgctggcttggcatactttcgatatactccttacggtaaatggaaataaatg

SEQ ID NO: 371278 - DNA, 201 bp, Homo sapiens
cttattttgttttctcataaaagttatatgccttaaatggacattttcattgtctacactataatttttcttaatattaaattatctaaaaagatacaaargttttgacttctgactagtgaattaatgagattgtttatttcccaacatatttgttatacttttcccagccaatgaaaatgatttcatttgagtggtctt

SEQ ID NO: 371279 - DNA, 201 bp, Homo sapiens
caaactttgcaacacagagaaaaccattcgttgaaaaggccttcaagtgttgcactcatcaatacttggaagaagaagtgaattcattaaaatgtattttrtgcctattgtattagtcatattgctaagcatttccaataggattatgtacaatgtaaatggagagcaatttaaatggcaacactgctgcttcttcttatg

SEQ ID NO: 371280 - DNA, 201 bp, Homo sapiens; identical to SEQ ID NO: 80439

SEQ ID NO: 371281 - DNA, 201 bp, Homo sapiens
atggacatcttaaaggatagggatcccttcaaacatcatcagttcagtcaccatgaagggacagtgagcatggaaacttggattgtgagtctgccctgccrttcaatgattgagtgatgctgggtttgtcaattcagctttctggttctcagtttcttcacctctaaagtgagtagaaggagtttaaactttttgtgattc

SEQ ID NO: 371282 - DNA, 201 bp, Homo sapiens
ctgtcatcggtcttatccaaccactgggcatcatcttacctattgcagagctccaatctcgttgggctacacgagtgttcaaaggtatgtgaataaatgtyggataaaggcctaatatttcacctaaagttaatactctgttttttcttaacactagttctctcttttcagcaaaatgcacccctcttattcctaggaatc

SEQ ID NO: 371283 - DNA, 201 bp, Homo sapiens
ctgagtagctcctcctttcttaaaacagaagactgtctggacaaggcagtaacgtgacaccgttttctctaataagagtgagtgaaaatccactgcatggmgtttctgagaaggcaaatgttttcaacataaatctttgcctctcctctttctcattgtccctctttggaatgttgtttcaatgcttggaggtacagttct

SEQ ID NO: 371284 - DNA, 201 bp, Homo sapiens
attgtatatctaggttgttttttaaaaaaattattttaggttcagcagtacatgtgcatgtttgttatataggtaaattgcatgtcacagggatttggtayacagattattacttttacttgtgtgttggtgggggaagggtggctctctgctggagttctcctatagttggatgcaggcagcccaagaaggagctatgat

SEQ ID NO: 371285 - DNA, 201 bp, Homo sapiens
taacagatcctcccactggttgttactgagtagctcctcctttcttaaaacagaagactgtctggacaaggcagtaacgtgacaccgttttctctaataasagtgagtgaaaatccactgcatggcgtttctgagaaggcaaatgttttcaacataaatctttgcctctcctctttctcattgtccctctttggaatgttg

SEQ ID NO: 371286 - DNA, 201 bp, Homo sapiens
tcagtctaggtcttacctacctataacagatcctcccactggttgttactgagtagctcctcctttcttaaaacagaagactgtctggacaaggcagtaaygtgacaccgttttctctaataagagtgagtgaaaatccactgcatggcgtttctgagaaggcaaatgttttcaacataaatctttgcctctcctctttct

SEQ ID NO: 371287 - DNA, 201 bp, Homo sapiens
tgttccatatagctaacccagactcaaagtcttgctcttccagatgaaccagaatataactttctatgtgttgagttagcaatgtgaaaaatactcctaayaataagaaatgttcttccaccacaggcattgagaaatttgaaggctgttatttccatagtcgggaatacaaaagtcccgaggacttttcagggaaaagaa

SEQ ID NO: 371288 - DNA, 201 bp, Homo sapiens
aatactaactacaccacaaataaataaccagctagagaaaataatgaactcaagatttaatcatgcgcactgtggcctgcagcctcagcacagatgatcaycaaggggccttactttatgcaattatgtgtatgtgtaaaagggaagttaccttaaagacagttcagcttctggcaattaacatgtatttcggtcaagtaa

SEQ ID NO: 371289 - DNA, 201 bp, Homo sapiens
tggtcacattgaataacaaacaactaaatgcccaatatttctgttaacaggacaaaactaaacaacaaaaataggcaaacacataacatttgtttattackttctatagttttaaatagattctaattaatgataacaattagccctggcccactttcaactggttttagttttgtgtccattcatcttatctcacttcct

SEQ ID NO: 371290 - DNA, 201 bp, Homo sapiens
agtttaaactttttgtgattcttggatgatataaatctctgtccagggactgtgagtcttctacattcttcccttttgtttcagatatgtaaagacacccygccacacaatccaagtggatcacattgagtacatggatgagattgccatgccagcaggggtgaaacccaacctgctcttcctctttctctcagatccaaa

SEQ ID NO: 371291 - DNA, 201 bp, Homo sapiens
aatgattgagtgatgctgggtttgtcaattcagctttctggttctcagtttcttcacctctaaagtgagtagaaggagtttaaactttttgtgattcttgkatgatataaatctctgtccagggactgtgagtcttctacattcttcccttttgtttcagatatgtaaagacaccccgccacacaatccaagtggatcaca

SEQ ID NO: 371292 - DNA, 201 bp, Homo sapiens
cctggagccaggttatcaatgactgctgatcatctatcccctggttaactacaaagacacacggagggtaaaagttaaaaattttccatcctgccaacatmgtatacacagaagtattttactggatgacaattcttcattttaaaaaatggacatcttaaaggatagggatcccttcaaacatcatcagttcagtcacca

SEQ ID NO: 371293 - DNA, 201 bp, Homo sapiens
ggtcctacaacatgaacaaaagttcaatacatgcagtagaggtgccagctcccacacatctctaagatgacactttgtgcattcctgcatcagaaagacakgctacccttgccctgtgttgtacagcaggtgtgcacagggctgctgctatctcataaaataagtttttgcaaattagaaaaagggcagcccttcctcagg

SEQ ID NO: 371294 - DNA, 201 bp, Homo sapiens
catgagcccagaatttaagaaataacaaactagaaggggagttgtcttgcaaataaggtacttctttggtcatgtaacaaaaaatatctctgaaacaaggsaacaggaaaggcttggccacttttgcagagagcagaagaaaggaatatagatagaaaagatacaaattcatatcttaataaataaccttgccacattatt

SEQ ID NO: 371295 - DNA, 201 bp, Homo sapiens; identical to SEQ ID NO: 80432

SEQ ID NO: 371296 - DNA, 201 bp, Homo sapiens
gatccatagtcatatatcatttttccctcaattctaagtagtttaaaatattttagcactaaaacaaataagcattatggcacagaatcaaaatatacacragttttcaagacaatgtaagactagaaaaaatgtagagctgaggtagccactaaagcacttaggtgtaaaattacccacttctgccattagaggcaaaaa

SEQ ID NO: 371297 - DNA, 201 bp, Homo sapiens
tgggcggatcacttgaggtcaggagcaccagaccagcctggccaacatggtgataccctgtctctcctaaaaatacaaaaattagccgggtgtggtggtgyacgcctgtaaacccagctacttgggagactgaggcaggagaatcacttgaacccaggaggcggaagttgcagtgagccgagatcacatcactgcattcca

SEQ ID NO: 371298 - DNA, 201 bp, Homo sapiens
aaaatctaggtatttaataacgaccatttttacttgttttatgtttatgtattttgtatagaaaggtatatagattaaaaacaccatcactcatagttctmtcacatgagtttaataattagtaacaatctgatatatttcttctgtaatttttatcttattttgttttctcataaaagttatatgccttaaatggacatt

SEQ ID NO: 371299 - DNA, 201 bp, Homo sapiens
tggagtgggactaagtgatctattctatttacttgtgctgacagtggacatactcgggaatctctcatccactgtcctcaatgctcacgttcttagcgtamcttcaccttggagaaaggcacccatgttgggcggcgggtgaagggggccagcccgtccacacctgtgggtatttctcgtcacgcgggacaagagactgag

SEQ ID NO: 371300 - DNA, 201 bp, Homo sapiens
actagatgacttttaaatttccctttcaactcaaagatgtgggtctaaaattcttcctaggttgtaagtgagagcccaaaatctaggtatttaataacgaycatttttacttgttttatgtttatgtattttgtatagaaaggtatatagattaaaaacaccatcactcatagttctctcacatgagtttaataattagta

SEQ ID NO: 371301 - DNA, 201 bp, Homo sapiens
atacggaaaacagaatagaagcacagaacaaggactattgtatataagagaagcaggtgttaatgtaaggtaagaaagaactttctaataatcagagcttwttgaaaatgaatatactgtctatgaaacagcagcagcctcatcatggtgtgtggttgagacttgataaacgaagtgagctgtactgtaaagaggattcct

SEQ ID NO: 371302 - DNA, 201 bp, Homo sapiens
gtgagactctgtctcaaaaaaacaaaaacaacaacaacaaacaaaaaaccagttaagtgaaatgaggaaatttctttggtgaaagagaaggctagataagrtgacagttgtctcaaagtcatcatacggaaaacagaatagaagcacagaacaaggactattgtatataagagaagcaggtgttaatgtaaggtaagaaag

SEQ ID NO: 371303 - DNA, 201 bp, Homo sapiens
tcaaacttagctccacacgtttctatatatgcttggcttgtctagacctatatctctgttcacttctttccctctacctcattttcagtctaggtcttacstacctataacagatcctcccactggttgttactgagtagctcctcctttcttaaaacagaagactgtctggacaaggcagtaacgtgacaccgttttctc

SEQ ID NO: 371304 - DNA, 201 bp, Homo sapiens
atgaggagacaggaaggccttctctatgtacatcagcaagagaatgcattactggtttctatatcttggacagaaagaagtagtcctcttcaccttttacygcctgtagaacagcgaccacaaggagcattctgataaccagacatcagccccaatgagctatcaaaaatgtaccatcccatgtaaatgaatcggtatcca

SEQ ID NO: 371305 - DNA, 201 bp, Homo sapiens
acttatattatgacgtatataatatatatcattgcacctaaatgggtcagacaagtgtctggagaacagcttcaggaacctccaagatgagaatgggagartggcagatcttggaaagaacttggtgtggactttggtaaatgtcaaagtcagcccttcatgaagaatgcctggcactagcactgcacaggttaagaaaaa

SEQ ID NO: 371306 - DNA, 201 bp, Homo sapiens
  misc_feature (1)...(201): n = A,T,C or G
agatttaatcatgcgcactgtggcctgcagcctcagcacagatgatcaccaaggggccttactttatgcaattatgtgtatgtgtaaaagggaagttaccntaaagacagttcagcttctggcaattaacatgtatttcggtcaagtaatctcatacactcgctaatataaatcacttatattatgacgtatataatatat

SEQ ID NO: 371307 - DNA, 201 bp, Homo sapiens
  misc_feature (1)...(201): n = A,T,C or G
tgttaaatctgcataatgggtagcatatgaataaaataatatcttgtaaaatgttctctctctctccttcactggtttgctctatctctgcctccctcatntattccttagtactagacgtggatcatggattttacaccgtgtttgggataatgggtatcccatggatagttcatttttcactcggttcaatagttttct

SEQ ID NO: 371308 - DNA, 201 bp, Homo sapiens
cttccatttatgcttgattattcaatattctttcttctcttaaaaaattaataatactcagagtttattaaaaaaatgagatactttcacattcaggattrctggccacatttaataaagccttaattaataaagcgccctacctatgaggatgttcagatatcctgattatcgttacttatttgtctttatttgtcatca

SEQ ID NO: 371309 - DNA, 201 bp, Homo sapiens
tgtatcagcttctttttgacttgcttcctggctgagagacataccctacagagacacttgtgggacatatatattttaataggtttcaggggacagagatrcaaacacgcctagagtgagacaatgtccgagaatgccagacacagattagggctgttctgaagctctcagcagagccagggacaacatgagggtattagg

SEQ ID NO: 371310 - DNA, 201 bp, Homo sapiens
cacacggcaaaggcagtcactatgggagtgggaactaaagagagagcaaatgcctctgatgaagatagaagagtctcagataagttatattactcagactyatggggttttggggaggagggattaaacctgaggactgtgatagtgtatcatcttgttctcagactgaagtgcaaagtgtgaggaagcacccagattttt

SEQ ID NO: 371311 - DNA, 201 bp, Homo sapiens
aaccctcccctgcagaaactcccaagccactgctaaaaaatacaaaagatagatgatagatagatagatgatagagatagatagatagattagatagatagatgatagatagatagatagatagatagatagatagataatagatagatatattccatctgggattgtgtaatgtaagtgctaaaaaaagactttaaacaa

SEQ ID NO: 371312 - DNA, 201 bp, Homo sapiens
tacccgattacttttcttctctaaaatattttatttagattcccttgttattgtaaagcttattttattaagagaagctttcttctatagaaaaatacttmagagaaaatgcctagtatctacaaatctgtgaccatcaatacttccaaggagatgatgtgcttcagtgacttccctgtccctgatcattttcccaactac

SEQ ID NO: 371313 - DNA, 201 bp, Homo sapiens
accctcccctgcagaaactcccaagccactgctaaaaaatacaaaagatagatgatagatagatagatgatagagatagatagatagattagatagatagatgatagatagatagatagatagatagatagatagataatagatagatatattccatctgggattgtgtaatgtaagtgctaaaaaaagactttaaacaaa

SEQ ID NO: 371314 - DNA, 201 bp, Homo sapiens
ttggtatacagattattacttttacttgtgtgttggtgggggaagggtggctctctgctggagttctcctatagttggatgcaggcagcccaagaaggagstatgatgaaagacctgggaagcaccctagctgggcatccatggttgcactgccagcgggtgcagccaggctgggaccccaggtgaggccagcagatgggg

SEQ ID NO: 371315 - DNA, 201 bp, Homo sapiens
ccctcccctgcagaaactcccaagccactgctaaaaaatacaaaagatagatgatagatagatagatgatagagatagatagatagattagatagatagatgatagatagatagatagatagatagatagatagataatagatagatatattccatctgggattgtgtaatgtaagtgctaaaaaaagactttaaacaaag

SEQ ID NO: 371316 - DNA, 201 bp, Homo sapiens
tgcagaaactcccaagccactgctaaaaaatacaaaagatagatgatagatagatagatgatagagatagatagatagattagatagatagatgatagatagatagatagatagatagatagatagataatagatagatatattccatctgggattgtgtaatgtaagtgctaaaaaaagactttaaacaaaggatgtata

SEQ ID NO: 371317 - DNA, 201 bp, Homo sapiens
agctccaatctcgttgggctacacgagtgttcaaaggtatgtgaataaatgtcggataaaggcctaatatttcacctaaagttaatactctgttttttctyaacactagttctctcttttcagcaaaatgcacccctcttattcctaggaatcctgacaaactctgaattttctcttctagggctgatcaaattaccctca

SEQ ID NO: 371318 - DNA, 201 bp, Homo sapiens
cagaaactcccaagccactgctaaaaaatacaaaagatagatgatagatagatagatgatagagatagatagatagattagatagatagatgatagatagmtagatagatagatagatagatagataatagatagatatattccatctgggattgtgtaatgtaagtgctaaaaaaagactttaaacaaaggatgtatagc

SEQ ID NO: 371319 - DNA, 201 bp, Homo sapiens
cctgtctcagaattggacaaatgtacaatcaggttttataccgagacattctgttcccggggcaggcaggagacagaggccttcctcttatctcaactgcwagagaccttcctcttttactaatcctcctcagcacagacccttcataggtgtcaggctgggggatgatcaggtctttcccatcccacaatatctcaggct

SEQ ID NO: 371320 - DNA, 201 bp, Homo sapiens
actccaaactcatggactacttcgggatgtatgccacacactttggcctcctgaattacattcgttttaaggtaaaatctaaatgaatcattgcatagtaratgtgtgtgtgcatgtgagcacacatgcatgtatgtgtgcagacacactcagttgtacacacatgagctatatttggcatcttcaggtatgatcagagga

SEQ ID NO: 371321 - DNA, 201 bp, Homo sapiens
ggagacagaggccttcctcttatctcaactgcaagagaccttcctcttttactaatcctcctcagcacagacccttcataggtgtcaggctgggggatgaycaggtctttcccatcccacaatatctcaggctatctcagggagaagaaaccttggacaatacctggctttccagggcagaggtccctgtggctttccaca

SEQ ID NO: 371322 - DNA, 201 bp, Homo sapiens
  misc_feature (1)...(201): n = A,T,C or G
tttttaattttaatgcatatccttgacttattactttctacctgaagaaggcaaagctcttataacagtttagcctcattttctgacctttgtgttattangtattttacttgaatattttataaaccccacaagatattactgttactaatgttttagtcaatatttttatgtttatccacatatttatgattcctagtg

SEQ ID NO: 371323 - DNA, 201 bp, Homo sapiens
ctgggggatgatcaggtctttcccatcccacaatatctcaggctatctcagggagaagaaaccttggacaatacctggctttccagggcagaggtccctgyggctttccacagtgcattgtgcccctggtttatcgagaatggagaatggcgatgacttttaccaagcatactgcctgtaacatatggttaacaaggcaca

SEQ ID NO: 371324 - DNA, 201 bp, Homo sapiens
aggctgggaccccaggtgaggccagcagatggggtactcagatcagactgtcctgatcctacaggcaagaccaccctgctctgtccaagtccaatgtcacmctaaagctaaagtctcctagaagaacacagtgagccttgggagatgggtgctccagccatgctccactatgcctaaccctctgggctctgaatttgcttg

SEQ ID NO: 371325 - DNA, 201 bp, Homo sapiens
agaacaggcatacaaggattaatacacaatgtacaatagtggaacttttgatagttttaacccaagtgatggggttaagatttgtaaggccatcagtagcytttacgattgcctcagttcctggcaccaaatttaaatgggctttcgatgcctcaaaaatttgttcttttaattttgaaatatctaaagtaagattacctt

SEQ ID NO: 371326 - DNA, 201 bp, Homo sapiens
tgatagtataatatggcttatgattctttgttcctatagttgatttccagaccaaattctaatatggtgcgaggccacagtaagcttccataattccggakgttcaggaccagtaacaggactaactaactttggtcaagatggtgaaattcccttttcaccccatttccatggatagggtgattctaaccttctataaac

SEQ ID NO: 371327 - DNA, 201 bp, Homo sapiens
ggtgattctaaccttctataaacctggtccagccttttagttaaatcactatcaaaggcaggattaatgggccagacggatggggcctgtgaatatgagtrggtctggcctgtacaatcataatataattggcctcgaggggcccagtctataatagttccaaattcattgttttgtaatacgaccgcagtatcagccaca

SEQ ID NO: 371328 - DNA, 201 bp, Homo sapiens
gctggtcttgaactcctggcctcaagtgatcctctcacatgggcctccaaaagtattgaaattacaggcatgagccaccacacccagcacactgaaacttstctagcaaggatcacaaatggacacaaccttcgtacatctaatggatgtccttatctcactgaacttcttatgtttctccatattcttctgcatttatca

SEQ ID NO: 371329 - DNA, 201 bp, Homo sapiens
gtgattctaaccttctataaacctggtccagccttttagttaaatcactatcaaaggcaggattaatgggccagacggatggggcctgtgaatatgagtargtctggcctgtacaatcataatataattggcctcgaggggcccagtctataatagttccaaattcattgttttgtaatacgaccgcagtatcagccacac

SEQ ID NO: 371330 - DNA, 201 bp, Homo sapiens
caacatctcaataattagcattgttatgttagtgcaacacattttatagattaatattcacatgataaaataaatttttgtcttcagaaaaacctacttgrtcatttgaaaatatttttagtcattgctagattacattgctagattaatttttttctgatatttctaacttgctaaaatataattttcatcaatgtttat

SEQ ID NO: 371331 - DNA, 201 bp, Homo sapiens
tcatcttgttctcagactgaagtgcaaagtgtgaggaagcacccagatttttctatcaatggacaatgggatgttgttgtggagactgaagagaaacaagrgactttggtctttgatggggtcttagtttgcagtggacaccacacagatccctacttaccacttcagtccttcccaggtatgtcgctaagaatctgtttg

SEQ ID NO: 371332 - DNA, 201 bp, Homo sapiens
tttggttaaccaattgagctttgagtgttctactagttctttcaattatggcctgtccttgagaattataggggattcctgttgtatgtgtaattttccamtgatttaagaatttttgaaatgttctactacagtatcctggcccattatccgttttaattttttctggaattcccatgacagcaaaacaagataataaat

SEQ ID NO: 371333 - DNA, 201 bp, Homo sapiens
ctttgtatttccctcatgcgtacagatgctgaacatcttgtaatatgcttattggcatagatattctcatttgttaaaaatttgttcaagtcttctgtccrttgtcaatctaattcgtctatcttttttctttggtaagaattgttttttatattttgtatatgagtcttttgttgcatgcatttgttgtgaatatctcct

SEQ ID NO: 371334 - DNA, 201 bp, Homo sapiens
acatgtgtgattccatttgctataatgcattaggacacagacctctgggattaactcctgcctcctgagtgggcaggtgtagaacttgacactgggtgcartgttgtacaatattttttgcctgtttccatgtgatatcaaatttatttttaatcatgttgcatttacatgagtcaaggcatgaagttcctgtgcctccag

SEQ ID NO: 371335 - DNA, 201 bp, Homo sapiens
gttcatttgttttagttaaaggccctggtaaattagtatgtggtcgaatatgagtaatataaaatgggaaatttctttttcttacagtttgttgtaacaarttaaacagctggtttaacagatcatctacaccatatttgattagggctgtctcaacatcctttgtagcctgtactacatatgcagaatctgatacaatgt

SEQ ID NO: 371336 - DNA, 201 bp, Homo sapiens
tttttattattttctttttcttcatttttatgtttattttattgtatatctaggttgttttttaaaaaaattattttaggttcagcagtacatgtgcatgyttgttatataggtaaattgcatgtcacagggatttggtatacagattattacttttacttgtgtgttggtgggggaagggtggctctctgctggagttct

SEQ ID NO: 371337 - DNA, 201 bp, Homo sapiens
atgttgacttttttctatttctttttgaatgtttatcatatatttaaaaaaggtttgtgtctattatatcttcttagtggatagttccttttatccatatraaatatctttttgttccttttacctttaattatattgtgtgctattaatcacaggtatgcatgaatttaaaattaaaagtaaaattaaaatattactaaa

SEQ ID NO: 371338 - DNA, 201 bp, Homo sapiens
aggacagccacccatcctcacagctctcttggataaagatggccccagtgagcctggcatttctggctgctggcttggcatactttcgatatactccttayggtaaatggaaataaatgaaagaacactgagggggaaaagcatggaatagtttctactcatcctgatcgttatatcttttaaagtcaatagcatatgtcc

SEQ ID NO: 371339 - DNA, 201 bp, Homo sapiens
ataatagagaaaaataaaccaggaaatgagagtttcacgaatataaattaaataagtggtcatgaaaagcctcaaaatgatttttgacaaagaattgtaawgtaagaaagaaagctgagaagagatctggggaaggggattcagaggaatcttcaagtgcagagctgtgaggtgggagcatgccttgtatgttagagaaaa

SEQ ID NO: 371340 - DNA, 201 bp, Homo sapiens
ttaagttcctgggtggtctcatcttcttttggtgcttcattctgccatctttggaagtgcccttgaagtccagcacttctggtcagtattttccagttctrataataccagagagccactctgctcaccagtcatggctggctttctcacggggtgtgcatgaatgagcagatttcgttctcttgctcctggctcttgtgc

SEQ ID NO: 371341 - DNA, 201 bp, Homo sapiens
aggttgatagtataatatggcttatgattctttgttcctatagttgatttccagaccaaattctaatatggtgcgaggccacagtaagcttccataattcyggatgttcaggaccagtaacaggactaactaactttggtcaagatggtgaaattcccttttcaccccatttccatggatagggtgattctaaccttctat

SEQ ID NO: 371342 - DNA, 201 bp, Homo sapiens
ttagggcaacagactgaaggtccttgtgacaagtaattttttttaaatgggatggatgacagtgacagagctctaaatttctactaaccagctgagacacratggccaaaaagcgattgctgtgattggagctggaattagcggactgggggccatcaagtgctgcctggatgaagatctggagcccacctgctttgaaag

SEQ ID NO: 371343 - DNA, 201 bp, Homo sapiens
atattcttctgcatttatcacttctggcttcactcatgttgtctctgctacctggaatgtcacacgatccacacacatgcacacacacatgcacatgtgcragcatacacacacacacacacacacacacacacacacacacacacacacacacctcccttcctggcctcttacctagctgattcctagtcattcatcctt

SEQ ID NO: 371344 - DNA, 201 bp, Homo sapiens
cacactgaaacttctctagcaaggatcacaaatggacacaaccttcgtacatctaatggatgtccttatctcactgaacttcttatgtttctccatattcytctgcatttatcacttctggcttcactcatgttgtctctgctacctggaatgtcacacgatccacacacatgcacacacacatgcacatgtgcgagcata

SEQ ID NO: 371345 - DNA, 201 bp, Homo sapiens
tcatggctcaatgtagcctcaaactcctaggctcaagctatcccaccacttcaacctcccaagcagctaggactacagatgtgcaccaccatgcccagctmaatttaaaaatgtttttgagagatggggtctctctatgttgctcaagctggtcttgaactcctggcctcaagtgatcctctcacatgggcctccaaaagt

SEQ ID NO: 371346 - DNA, 201 bp, Homo sapiens
gaaacttctctctctctctttctctctctctccttctttttagagacagggtctcattctgtcgcccaggctggagtgcagtggtacaatcatggctcaakgtagcctcaaactcctaggctcaagctatcccaccacttcaacctcccaagcagctaggactacagatgtgcaccaccatgcccagctcaatttaaaaat

SEQ ID NO: 371347 - DNA, 201 bp, Homo sapiens
ggattaaacctgaggactgtgatagtgtatcatcttgttctcagactgaagtgcaaagtgtgaggaagcacccagatttttctatcaatggacaatgggaygttgttgtggagactgaagagaaacaagagactttggtctttgatggggtcttagtttgcagtggacaccacacagatccctacttaccacttcagtcct

SEQ ID NO: 371348 - DNA, 201 bp, Homo sapiens
ttctgttatttcagtcagcttttatcagatcattaaataagagagaaaaaaatcaatatgttggatttactttgctttcataggcttttctacagtgtaawtactggtcagtgtgtctacttaatctggtcttattttcttctcaaactattgtaagacggcttctaccctcctactccactgaaacttctctctctctct

SEQ ID NO: 371349 - DNA, 201 bp, Homo sapiens
ctggtgaaacacaagcaaagcctctcccccatgttatcatctttcctatttcccaagtcttatttttgttgtctttccaccaaatcagttttccttcatgygggctgttctttttaccagtaaaatgttgttctgcggaagtagtggtctgatttctataaatgtttaaaaaatttaaagtatagagtgctagattaagtt

SEQ ID NO: 371350 - DNA, 201 bp, Homo sapiens
aaggaacaatgattttatctgggtcacttccacacaattttattattcgtaatcttgtctgaccagttaatgtagccatttgatctaagtacaatgtaaargtcttaattgtactatgaagaaggaatgaccactccacaaaatccactggaacaataatgcctgttggcaaatgtgcagtagcaaaaatcaaaagttgga

SEQ ID NO: 371351 - DNA, 201 bp, Homo sapiens
cgtaatcttgtctgaccagttaatgtagccatttgatctaagtacaatgtaaaagtcttaattgtactatgaagaaggaatgaccactccacaaaatccaytggaacaataatgcctgttggcaaatgtgcagtagcaaaaatcaaaagttggagtgggactaagtgatctattctatttacttgtgctgacagtggacat

SEQ ID NO: 371352 - DNA, 201 bp, Homo sapiens
aatattagaaagatatagtggttgaggattctttcaactgatcagatgatattgtgctcaaagttagagatgtcacactattttttcccctgacttagcawgggtatagggtagggtaggatgatctattgctgggcttctcccatgtaatctcatcttctcttctgtggtcacacctgctgactgactggccactgcatg

SEQ ID NO: 371353 - DNA, 201 bp, Homo sapiens
gaacaataatgcctgttggcaaatgtgcagtagcaaaaatcaaaagttggagtgggactaagtgatctattctatttacttgtgctgacagtggacatacycgggaatctctcatccactgtcctcaatgctcacgttcttagcgtaccttcaccttggagaaaggcacccatgttgggcggcgggtgaagggggccagcc

SEQ ID NO: 371354 - DNA, 201 bp, Homo sapiens
gtatttaataacgaccatttttacttgttttatgtttatgtattttgtatagaaaggtatatagattaaaaacaccatcactcatagttctctcacatgartttaataattagtaacaatctgatatatttcttctgtaatttttatcttattttgttttctcataaaagttatatgccttaaatggacattttcattgtc

SEQ ID NO: 371355 - DNA, 201 bp, Homo sapiens
aggaattatgtaatgactctaatattcttgcttatattatggattaactgaggaattatatgaatatatgtcaatttcagattaagccatgaaatttatcmgattctcttcagggtagctgagattccatgtggtcatcaaaaatattagaaagatatagtggttgaggattctttcaactgatcagatgatattgtgctc

SEQ ID NO: 371356 - DNA, 201 bp, Homo sapiens
gttgggcggcgggtgaagggggccagcccgtccacacctgtgggtatttctcgtcacgcgggacaagagactgagaaaataaataagatacggagacaaartatagagaaagaaaagtgggcctaggggactggcactcagcatacggaggacctgcactggcaccagtctctgagttccctcagtatttactgattacta

SEQ ID NO: 371357 - DNA, 201 bp, Homo sapiens
gacctgcactggcaccagtctctgagttccctcagtatttactgattactattttcactatctcagcaagaggaatgtggcaggagaacagggtgacagtrgggagaaggtcagcaagaaaacatgtgagcaaaggaatctgtgtcacaaataagctcaagggaaggtactatgcctggatgtgcacataggccagattta

SEQ ID NO: 371358 - DNA, 201 bp, Homo sapiens
ggaattagcggactgggggccatcaagtgctgcctggatgaagatctggagcccacctgctttgaaagaaatgatgatattggacatctctggaaatttcragtaagtttagatttcatttggttttaggcatgtaactttaaaaaaaaatagctagaacaatttgatgctggtttcctcagaggaaacatacagcacatc

SEQ ID NO: 371359 - DNA, 201 bp, Homo sapiens
gcaagaggaatgtggcaggagaacagggtgacagtggggagaaggtcagcaagaaaacatgtgagcaaaggaatctgtgtcacaaataagctcaagggaargtactatgcctggatgtgcacataggccagatttatgcttctccacacccaaacatctcagtggagtaaagagtaatagagcagcattgctgccagcatg

SEQ ID NO: 371360 - DNA, 201 bp, Homo sapiens
gttatttcagtcagcttttatcagatcattaaataagagagaaaaaaatcaatatgttggatttactttgctttcataggcttttctacagtgtaattacyggtcagtgtgtctacttaatctggtcttattttcttctcaaactattgtaagacggcttctaccctcctactccactgaaacttctctctctctctttct

SEQ ID NO: 371361 - DNA, 201 bp, Homo sapiens
tggcaggagaacagggtgacagtggggagaaggtcagcaagaaaacatgtgagcaaaggaatctgtgtcacaaataagctcaagggaaggtactatgcctrgatgtgcacataggccagatttatgcttctccacacccaaacatctcagtggagtaaagagtaatagagcagcattgctgccagcatgtctcacctccct

SEQ ID NO: 371362 - DNA, 201 bp, Homo sapiens
tgaattccaggatggattgtggacacacatgcacacaaatatacccgttcacatacatgtaccatcatgtaggattcctccattgcccctacttttttctytttcctgatcaagagatatcagccagctgcatgttttcccttgcaggcctaaacccaggcctgggccttgaacattttcagccactgataaaggtattta

SEQ ID NO: 371363 - DNA, 201 bp, Homo sapiens
gtaatagagcagcattgctgccagcatgtctcacctccctccacagggattctcctatctcagaattgaacaaatgtacaatcgggttttataccaagacrttccattcccggggcagacaggagacagaggccttcctcttatctcaactgcaagaggccttcctcttttactaatcctcctcagcacaaacccttcata

SEQ ID NO: 371364 - DNA, 201 bp, Homo sapiens
caatgatcactctggcatttagtgcttctttcttcagaatcctagtcagtttcatctcagaacaatttgaaaccctcccctgcagaaactcccaagccacygctaaaaaatacaaaagatagatgatagatagatagatgatagagatagatagatagattagatagatagatgatagatagatagatagatagatagata

SEQ ID NO: 371365 - DNA, 201 bp, Homo sapiens
acaccgtggttagatctagagggaaaatctgatcctcttcctccttacatccccttcagccaggacagacagtacccttcgagaatttccctgcaccgacrcttccagccttgctcccagacacctgggataagcctacactccaggcataccagctgcttctaagtccctgaataggtcacgttcatgttgactccacat

SEQ ID NO: 371366 - DNA, 201 bp, Homo sapiens
tgccagcatgtctcacctccctccacagggattctcctatctcagaattgaacaaatgtacaatcgggttttataccaagacattccattcccggggcagrcaggagacagaggccttcctcttatctcaactgcaagaggccttcctcttttactaatcctcctcagcacaaacccttcataggtgtcgagctgggggtg

SEQ ID NO: 371367 - DNA, 201 bp, Homo sapiens
gccttcctcttatctcaactgcaagagaccttcctcttttactaatcctcctcagcacagacccttcataggtgtcaggctgggggatgatcaggtctttcccatcccacaatatctcaggctatctcagggagaagaaaccttggacaatacctggctttccagggcagaggtccctgtggctttccacagtgcattgtg

SEQ ID NO: 371368 - DNA, 201 bp, Homo sapiens
gattctcctatctcagaattgaacaaatgtacaatcgggttttataccaagacattccattcccggggcagacaggagacagaggccttcctcttatctcractgcaagaggccttcctcttttactaatcctcctcagcacaaacccttcataggtgtcgagctgggggtggtcaggtctttcccatcccacgaggccat

SEQ ID NO: 371369 - DNA, 201 bp, Homo sapiens
tggagactgaagagaaacaagagactttggtctttgatggggtcttagtttgcagtggacaccacacagatccctacttaccacttcagtccttcccaggyatgtcgctaagaatctgtttggtagaaaagtactttccagataacccacagagcaaaatgattgagcatgaactttattactagtctctggtcacattga

SEQ ID NO: 371370 - DNA, 201 bp, Homo sapiens
gagactgagaaaataaataagatacggagacaaaatatagagaaagaaaagtgggcctaggggactggcactcagcatacggaggacctgcactggcaccrgtctctgagttccctcagtatttactgattactattttcactatctcagcaagaggaatgtggcaggagaacagggtgacagtggggagaaggtcagcaa

SEQ ID NO: 371371 - DNA, 201 bp, Homo sapiens
tttcccatcccacgaggccatatctcaggctatctcagcagggagaaaccttggacagtacccggctttccggggcagaggtccctgtggctttccgcagygcattgtgcccctggtttatcgagaatggagaatggcgatgacttttaccaagcatactgcctgtaaacatatggttaacaaggcacatcctgcacagcc

SEQ ID NO: 371372 - DNA, 201 bp, Homo sapiens
ctgaagagaaacaagagactttggtctttgatggggtcttagtttgcagtggacaccacacagatccctacttaccacttcagtccttcccaggtatgtcrctaagaatctgtttggtagaaaagtactttccagataacccacagagcaaaatgattgagcatgaactttattactagtctctggtcacattgaataaca

SEQ ID NO: 371373 - DNA, 201 bp, Homo sapiens; identical to SEQ ID NO: 80440

SEQ ID NO: 371374 - DNA, 201 bp, Homo sapiens
agccttgattccataaacacatgtttctgtgagctcaaggttggggcaaagttacagattaacagcatctcagggcaaaacaattgttcagggtacagatmaaaatggagtatcttatgtcttccttttctactcagacacggtaatagtctgatctctgtttcttttccctacagcatgtatcttaaactcagcagttgc

SEQ ID NO: 371375 - DNA, 201 bp, Homo sapiens
gtttggggaaggttttacataggaaataaccaagagaaaggggaggtcacttctgcagtgtaaacagcattttcaacaaatgacattttcatgaagaaacrgcatgagtttacaaagtcactacaaatgattcagcaagattgaagcactgttcgcatgttgaagggggccagcccctccacacctgtgggtatttctcat

SEQ ID NO: 371376 - DNA, 201 bp, Homo sapiens
ctggtgttctcattgttaataagaatagtgaaaatttagggcaacagactgaaggtccttgtgacaagtaattttttttaaatgggatggatgacagtgayagagctctaaatttctactaaccagctgagacacaatggccaaaaagcgattgctgtgattggagctggaattagcggactgggggccatcaagtgctgc

SEQ ID NO: 371377 - DNA, 201 bp, Homo sapiens
actttcattaagaagctgaaattaaatttggatttccttctttccaaaggttggtctctcatctttgccttatactatatattgttttgtggtgggaaacrtggggataggcattaacatattttatctaattataattacatgatgtagtattctgattgcccgactatgttagcaagtaaaagaaaagtagggaagttt

SEQ ID NO: 371378 - DNA, 201 bp, Homo sapiens
tttctttgaatgtttcctgtgagattaagttcttaattcgtagtttattttccctcatacaaaactttagcccaattctgccctgtgaagtcaaccgtgayactgcttttagaaaatattgacagcatgcaaatttccacgactgtgtcagacttgctaataccaagcagaggggaaagataaacaaggagtcctgtttgt

SEQ ID NO: 371379 - DNA, 201 bp, Homo sapiens
aagagagagcaaatgcctctgatgaagatagaagagtctcagataagttatattactcagactcatggggttttggggaggagggattaaacctgaggackgtgatagtgtatcatcttgttctcagactgaagtgcaaagtgtgaggaagcacccagatttttctatcaatggacaatgggatgttgttgtggagactga

SEQ ID NO: 371380 - DNA, 201 bp, Homo sapiens
gggatggatgacagtgacagagctctaaatttctactaaccagctgagacacaatggccaaaaagcgattgctgtgattggagctggaattagcggactgrgggccatcaagtgctgcctggatgaagatctggagcccacctgctttgaaagaaatgatgatattggacatctctggaaatttcaagtaagtttagattt

SEQ ID NO: 371381 - DNA, 201 bp, Homo sapiens
cctgatcattttcccaactacatgcacaactccaaactcatggactacttcgggatgtatgccacacactttggcctcctgaattacattcgttttaaggkaaaatctaaatgaatcattgcatagtaaatgtgtgtgtgcatgtgagcacacatgcatgtatgtgtgcagacacactcagttgtacacacatgagctata

SEQ ID NO: 371382 - DNA, 201 bp, Homo sapiens
caggctttcaccatcttggccaggctggtcttgaactccggacctcgtgatccacccacctctgcctcccaaagtgctgggattacaggcgtgagccaccrcgcccagtccccttttcccatttatttactaaagtcctaataccttctttaccaatttgttggatcttttcctaacttagagatagggatgaaccctttg

SEQ ID NO: 371383 - DNA, 201 bp, Homo sapiens
ccaatatggtgagaccctgtctctacaaaaaaaatacaaaaaaattagctgggtgtggtggtgggcgcctgtaatcccagctactcaggaggctgaggcaygagaatcgctggaacctgggaggcggaggttatagtgagccaagattgtgccgctgcactctagcctaggcgacagagcgggactctatctcaaaaacga

SEQ ID NO: 371384 - DNA, 201 bp, Homo sapiens
aaaataaaaatgtttcttcagttgtacagaaactaatcagaaataattagtccacgtatctgggcagacatcattggaaggcaaaggaccaaggaaacttsaattagtgactttttaaaaatgcagttcaagcaactagaactgaaaaaaagccaagcccctaggtggggtaaagtcccaagataataaaatatgtggttc

SEQ ID NO: 371385 - DNA, 201 bp, Homo sapiens
  misc_feature (1)...(201): n = A,T,C or G
agcttttttcaaaactagtacaagttgagagaaaattgttgagaagcttcaaaacctgctttgcatttttattttatgggcttccctaaacccagtagatngagtgccaattaggaatgcctcgaacatctataagccttgtaggcttatacttgccttatataggctttgtagactatcacagtagtagatcatctattg

SEQ ID NO: 371386 - DNA, 201 bp, Homo sapiens
ccacagccctcctgctcagtgccgtgatgatgctgcgccacatgggactttttgaccatgctgcaagaattgaggctgcgtgttttgctacaattaaggayggaaaggtaacaggaatcttgatttacttgtgctgggtaaaatgcattgcttccatgtgttttatctgagtgaaagggacagtgacagataatagttctc

SEQ ID NO: 371387 - DNA, 201 bp, Homo sapiens
gttttatctgagtgaaagggacagtgacagataatagttctcaggcgggcccaagcatttgatgttgaacaaggattcttaacgtgggtcccagattgaayagggtatgtgtgcacatgtgtgcattttctgaggtgaggatctagatatttcatccaaaaaaagttaagcagcactgatgtatagacatcagtgtacagt

SEQ ID NO: 371388 - DNA, 201 bp, Homo sapiens
ttattcaggtccttttcccgttttgttttgtttttttttttcccgagacggagtcttactcagtcacccaggctggagtgcagtggtgtgatctcgcctcrctgcaacttccacctcccaggttcaagtgattctcctgcctcagcctccccagtagctgggactacaggtgtgcaccaccatgcctccctaagttttgta

SEQ ID NO: 371389 - DNA, 201 bp, Homo sapiens
actcctgatctcagatgatccatccgccttggcctcccaaagttgctgggattacaggtgtgagccattgcacccagcctatgtttgtttttatatacacycatatataaacatatatatatgtttggtttatctcttcatttccctccaggtatttattatgtatccttccttccttaaaatattttaccaaaaattgac

SEQ ID NO: 371390 - DNA, 201 bp, Homo sapiens
cccagcatcagaattctgtgctttaaaagctgataccacatttttggaacattctaagactgtgggtcagtgacttcctatttgttttgatccccgccccrccttttatggaatctgatttggatttcataattcctatactcccatataacatctatgccgtgaaagatttataagaccatagtacattttttcctccat

SEQ ID NO: 371391 - DNA, 201 bp, Homo sapiens
cttgagggagccttgttaaaaatagaaagtacccttgagcctgttattttatttcacaatctcattttggtgagacagcttttttcaaaactagtacaagytgagagaaaattgttgagaagcttcaaaacctgctttgcatttttattttatgggcttccctaaacccagtagatcgagtgccaattaggaatgcctcga

SEQ ID NO: 371392 - DNA, 201 bp, Homo sapiens
ttgcagagtctctcctctgttgattcctgcctcccctttgatgacccccggggaggtatgtttgttttcttaacagcatttgaatcttcctgagacatctsataaagtggatttctctgtcaaaatattcttttttaagccttcaaaaacaaaaattcttactgtcttctttgatgatttcttatgttcaggttcagacag

SEQ ID NO: 371393 - DNA, 201 bp, Homo sapiens
gtgtggtggtgggcgcctgtaatcccagctactcaggaggctgaggcatgagaatcgctggaacctgggaggcggaggttatagtgagccaagattgtgcygctgcactctagcctaggcgacagagcgggactctatctcaaaaacgaagttgaaaaagtttgttcatcattgcagtatgaatgccagtttcctttaagt

SEQ ID NO: 371394 - DNA, 201 bp, Homo sapiens
gcatattttgtattgctgaggaaagatggttaagactccagcttccccagaagaggactgttagtttttgtctctcccttgatgatgctacttttcccgaygtgtaggttcatgggacggctccagacattgcaggcaaggacatggcgaatcccacagccctcctgctcagtgccgtgatgatgctgcgccacatgggac

SEQ ID NO: 371395 - DNA, 201 bp, Homo sapiens; identical to SEQ ID NO: 80446

SEQ ID NO: 371396 - DNA, 201 bp, Homo sapiens
ctctcctttgtctgtgcttctctctctctctctctccccccccgacacacacagacataagatgttggccaaatggtgattttcattttttttttttttttgaggcagagtcttgctctgtcgcctaggctggagtgcagtggcacaatctcggctcactgcaacctctacctcccaggttcgagtgattctcctgcctcc

SEQ ID NO: 371397 - DNA, 201 bp, Homo sapiens
ttaaagtattactggatgatgccaaataacagtatctctatttaatcttcaactatatatatcttttgcttaatttttacatttgtatatttatttatttacttaatttttttgtgacagagtctcgctctgtcgcccaggctggagtgcagtggtgtgatcacagctcactgcagccttgacctcctgagctcaagcagt

SEQ ID NO: 371398 - DNA, 201 bp, Homo sapiens
attaaagtattactggatgatgccaaataacagtatctctatttaatcttcaactatatatatcttttgcttaatttttacatttgtatatttatttatttacttaatttttttgtgacagagtctcgctctgtcgcccaggctggagtgcagtggtgtgatcacagctcactgcagccttgacctcctgagctcaagcag

SEQ ID NO: 371399 - DNA, 201 bp, Homo sapiens; identical to SEQ ID NO: 80448

SEQ ID NO: 371400 - DNA, 201 bp, Homo sapiens
cattaaagtattactggatgatgccaaataacagtatctctatttaatcttcaactatatatatcttttgcttaatttttacatttgtatatttatttatttacttaatttttttgtgacagagtctcgctctgtcgcccaggctggagtgcagtggtgtgatcacagctcactgcagccttgacctcctgagctcaagca

SEQ ID NO: 371401 - DNA, 201 bp, Homo sapiens
acattaaagtattactggatgatgccaaataacagtatctctatttaatcttcaactatatatatcttttgcttaatttttacatttgtatatttatttatttacttaatttttttgtgacagagtctcgctctgtcgcccaggctggagtgcagtggtgtgatcacagctcactgcagccttgacctcctgagctcaagc

SEQ ID NO: 371402 - DNA, 201 bp, Homo sapiens
tctatgaaatttagtcaggtctgttgttaatctccaccgattgtcactttaacagtgtgtgtctcagtgtttgctactgccattatttctttctttctttyttttttttttttaaatttagagatgaggtctcgctctattcccaggctggtcttgaactctggggctcaagcgatcctcccaccttcacctcccaaagtg

SEQ ID NO: 371403 - DNA, 201 bp, Homo sapiens
taccagttctcaaggactaagttattaaagtttataataaacctttaaaatttatatttctggcatatgatgttaattggagagagaaaaaaaaaaaaaaacacgtaccagtggtaatatcttggtgtggtgggattactgggtaacttttattttatattttgtatcttttcctagtcccagcaaactgacagtaatgac

SEQ ID NO: 371404 - DNA, 201 bp, Homo sapiens
gtcacttgaacccaggaggtggaggctgcggtgagaggagatcatgctcctacctgggtaacagcaagactctgtctcaaaaaaaaaaagattttttttttaaaacccatctcagaacccatgtacaacactatttacatgtttttaagttaaaaaggaaatgagttgtggattaagatggcccacgacctgaagtccaaa

SEQ ID NO: 371405 - DNA, 201 bp, Homo sapiens
gctatatccccaagatcctagaacattaatcagcacctagtaggtgtggaacaaacgtcttaccttaacagcgagtcaatgaaccagggaggggaggaagmagctttcccggagatgccggcccctcagtttccgggttcgcctggcgctcagccaggccagtcacagagagacgagcccggcgattcgccagcggaatgt

SEQ ID NO: 371406 - DNA, 201 bp, Homo sapiens
gagcagaaggtggctcagaggctgaccccaggatggtggaggtgctgagctggatgccggtttcaatcaggacagttcctctgttgagtttccatttcagrttgtggccaggcatggtggctcatgcctgtaattctagcactttgggaggccaaagtgggcggatcacttgaggtcgggagttcaagaccagcctggcca

SEQ ID NO: 371407 - DNA, 201 bp, Homo sapiens
tgaggcaggagagtcacttgaacccaggaggtggaggctgcggtgagaggagatcatgctcctacctgggtaacagcaagactctgtctcaaaaaaaaaaagattttttttttaaaacccatctcagaacccatgtacaacactatttacatgtttttaagttaaaaaggaaatgagttgtggattaagatggcccacgac

SEQ ID NO: 371408 - DNA, 201 bp, Homo sapiens
agatctcagctcaaggtgaggtcatttctgtttcctgcatgtccctccagctgctgacattttacctcttcaaggactgattcaaatgccatctccattgygcaatcttccttgatcaccccccaacttccatctgagacttctgagtttctccctcactagatctggagggtaggagtgggtcttgttcattttttgttc

SEQ ID NO: 371409 - DNA, 201 bp, Homo sapiens
gagtatcatttggttctttttaaaacctctgaactcaggtaaagagtaggattgcagagtctctcctctgttgattcctgcctcccctttgatgacccccsgggaggtatgtttgttttcttaacagcatttgaatcttcctgagacatctcataaagtggatttctctgtcaaaatattcttttttaagccttcaaaaac

SEQ ID NO: 371410 - DNA, 201 bp, Homo sapiens
atccatgtatcagtactatatgatgtttctgtgaaccatattcctctgctacttatgatattctaactatagccactgttaagagcccttgtgaaaagaartaagtgggcaggtgttagctgggagtgatgactgggcacagataatgtagagaatccctctgggcctgctagagaatgacatctcttcttgcatgccagg

SEQ ID NO: 371411 - DNA, 201 bp, Homo sapiens
agtgcatattttgtattgctgaggaaagatggttaagactccagcttccccagaagaggactgttagtttttgtctctcccttgatgatgctacttttccygatgtgtaggttcatgggacggctccagacattgcaggcaaggacatggcgaatcccacagccctcctgctcagtgccgtgatgatgctgcgccacatgg

SEQ ID NO: 371412 - DNA, 201 bp, Homo sapiens
tatagcattttatctccattcatttagaatttgggaaaattggccatatttataatgtatgttgaaattactggctgacatgcacaaatctgttaggttasttgcgcatttgaaagaattatcttacagctggctatgtaagtttgtcacattaatatcttgagggagccttgttaaaaatagaaagtacccttgagcctg

SEQ ID NO: 371413 - DNA, 201 bp, Homo sapiens
caccgattgtcactttaacagtgtgtgtctcagtgtttgctactgccattatttctttctttcttttttttttttttttaaatttagagatgaggtctcgytctattcccaggctggtcttgaactctggggctcaagcgatcctcccaccttcacctcccaaagtgcttggattataggcgtgagccaccgcacctggct

SEQ ID NO: 371414 - DNA, 201 bp, Homo sapiens
gagtgattctcctgcctcccctgagtagttggtattattacaggtgcacaccaccacacctggctaatttttgtatttttagtagggacggggtttcgccrtgttggccaggctggtctggaactcctgacctcaagtgatctgcccaccttggcctcccaaagtgctgggattacaggcatgagccactgagcccagctg

SEQ ID NO: 371415 - DNA, 201 bp, Homo sapiens
atttaaactgaataaggcctggccatctgtgaaggtaacgccattcttttatgaagtaactactcatagtaagatgttttattcatttgggacattttttycccccagtaaaaaacattaaagtattactggatgatgccaaataacagtatctctatttaatcttcaactatatatatcttttgcttaatttttacattt

SEQ ID NO: 371416 - DNA, 201 bp, Homo sapiens
ctttctgtattgtggaagaaaagcagattttctggtgactggatgacatttattattacatgttgggagaacaggaagaagtagccaaagcgttcttttgrctctgcttatgccaaaaatgcaggatggggcttgcacttcaagctcaaggatagccatgctagcatttcaaacgcattctgaaagctaataagatgatca

SEQ ID NO: 371417 - DNA, 201 bp, Homo sapiens
gccttgctttctgacacagtaagatgctcgaggctcatctgtattttcctaacctttgccctggaatcagccatttatccaaggaatgctacttccttttrgtggagaatgataattaaaaactaaaatctgggtgctaggtgagatgttttatttttaaaaacattctttgaaatgcttttcttccgctagtgacttgtg

SEQ ID NO: 371418 - DNA, 201 bp, Homo sapiens
ctatatgatgtttctgtgaaccatattcctctgctacttatgatattctaactatagccactgttaagagcccttgtgaaaagaaataagtgggcaggtgktagctgggagtgatgactgggcacagataatgtagagaatccctctgggcctgctagagaatgacatctcttcttgcatgccaggaaccttctggacctt

SEQ ID NO: 371419 - DNA, 201 bp, Homo sapiens
catctctcttctgtcggagtctcctcttttctcctctgtttttttttttttttttgagacggagtctctttctgttgcccaggctggagtgcagtggcgcsatcttggctcactgcaacctccgcctcccgggttccagcaattctcttgcctcagcttcccgagtcactgggactacaggcacatgccaccatgaccggc

SEQ ID NO: 371420 - DNA, 201 bp, Homo sapiens
gaaattggaagctcgttatatgggaggaatttttttagagacaaggtctctctgttccccaggctggagactcctgggctcaggccatcctttttttttttcttattctcactcagtcacctcaggctggagtgttgtggtatgatcacggctcaccacagccttgaactcctaggctcgattctccctcctcagctggtg

SEQ ID NO: 371421 - DNA, 201 bp, Homo sapiens
ccttgtgtgccaacgcttcctcaggtgagggggaacaggtagccggcaagaaagggtttgtggaaagtgggggagggaaatgtggagaggtgcttaagagstctccaccctcctatttttttccaccatccttttccaggtctgggcctaacagcctccactgcctgggctcactcagggagcgcctcattatttgggcag

SEQ ID NO: 371422 - DNA, 201 bp, Homo sapiens; identical to SEQ ID NO: 80460

SEQ ID NO: 371423 - DNA, 201 bp, Homo sapiens; identical to SEQ ID NO: 80456

SEQ ID NO: 371424 - DNA, 201 bp, Homo sapiens
tcaggatttacaagagggagaagattgggagcaagaagatgaggacatggaccccagattagaacacagttcctcagttcaagaaggtgagttaatgagasgagggtaaaaatgccagtggaaaagacttataatcacttgtgttttcttgcttccttcctagattctgaatccccaagtcctgaagatataccagactac

SEQ ID NO: 371425 - DNA, 201 bp, Homo sapiens; identical to SEQ ID NO: 80452

SEQ ID NO: 371426 - DNA, 201 bp, Homo sapiens
ctgtttatgtcacacagatattttcctcaacagaaacgttcagtgcctgtagccactgtagaactggaagaaaagaggttcagaactctgcctttagtgcyaagccccctacaaggcctgaccaatcaggatttacaagagggagaagattgggagcaagaagatgaggacatggaccccagattagaacacagttcctca

SEQ ID NO: 371427 - DNA, 201 bp, Homo sapiens
cagggagcgcctcattatttgggcagccatggattctatcccagccccatcatcagttcagggacacaacctgactgaagatgccagacatcctgagagtyggcagaacacaggaggctattctgaaggagatgcagtatcacagccacagatggcactagaggaggtgggtgaggccagaaattgcagggagttgtgata

SEQ ID NO: 371428 - DNA, 201 bp, Homo sapiens
ggggaacaggtagccggcaagaaagggtttgtggaaagtgggggagggaaatgtggagaggtgcttaagagctctccaccctcctatttttttccaccatycttttccaggtctgggcctaacagcctccactgcctgggctcactcagggagcgcctcattatttgggcagccatggattctatcccagccccatcatca

SEQ ID NO: 371429 - DNA, 201 bp, Homo sapiens
caattattaaagccttttatactacaaaggatttctaaagaacaataaccctggaatgtgaagataggtcttttaatcaagacctatgactgtcatttttytcaatttaaatataggtactttagaccaggcgtggtggctcacgcctgtaatcccagcactttgggaggccaaggcaggtggatcgcctaaggtcgggag

SEQ ID NO: 371430 - DNA, 201 bp, Homo sapiens
ttcttagcctcaaacaacttgctaagggttacacgaaaaaagtcctgtagtaaagaccacctgaatcagaatgatgtgctagagatggcaaattttgtttkcagcttggacagattttgtgtccagggcatttctggggctaactggcagtacagattacacatatagatagttcttatacatctctggaactcatgttct

SEQ ID NO: 371431 - DNA, 201 bp, Homo sapiens
ctggggctaactggcagtacagattacacatatagatagttcttatacatctctggaactcatgttctctcttaggaacaactcttcccaattatataatmatgctgttagctttgagggggtgtcaataatttgtaaaaactgggggtgtcactaagtttgtcagatctgagtgatgctttttactacaggggtcatgca

SEQ ID NO: 371432 - DNA, 201 bp, Homo sapiens
ctcatgaacaagtttacccaatgtatagacagtcccttctaactatcttgttggttccttaagaatctgtaaaacaataaatggttccttaagaagaggtaaaaaaaaaaaaaaaaaaattaaagtaactatcctgttaccatgtgtggtataaaagcaggaaagaatgggaacatttggcttccaaattgtctacaattg

SEQ ID NO: 371433 - DNA, 201 bp, Homo sapiens
atgaagtaagtgaattgtcccatatccccacaaatatatacacagacgtaaacacacaaccttaaacatagttctttaattgggtttatttatttatttawttattttttgagacggagtttcgctcttgttgcctgggctggagtgcaatggcgtgatctcggctcaccgttcaagcgattctcctgcctcagcctcccg

SEQ ID NO: 371434 - DNA, 201 bp, Homo sapiens; identical to SEQ ID NO: 80463

SEQ ID NO: 371435 - DNA, 201 bp, Homo sapiens
ggtcatttttatacctaatttttcccaagggtttattgagtactttcaaggcattatgctacatgcccagaaactattgctgccttcaaggaacatccctytatctagtagagggagattgtatgcatgaacatatataaaaatgaaagtgtaagtgtatgtagaactatatatggagtggttggaagtacaaaagaggga

SEQ ID NO: 371436 - DNA, 201 bp, Homo sapiens
tgttgccgctgacactcttgcagcgcccgcagggcagcgtcgttgagcctgagcagtaagaggctagtccgggcagcttgcgtgaagcagagccggagctstcctctcagaggctcctggagctcctccatggcgacgagttcgagtgcaagcagcacgggggccacaggcgagggccaccaccgccacctcctctgttca

SEQ ID NO: 371437 - DNA, 201 bp, Homo sapiens
gtttagagagccccaaaagtggctcagatgtaaagccagggttaagaaccatctgccttggaagatttaagggaaacatataaacttgtacaaaggacacmgaagcagtcagttttaattttttagccatgttggtaaaagttcattttcagtacatgggtaacacccaggccctttcccattatatccaggtatgctaca

SEQ ID NO: 371438 - DNA, 201 bp, Homo sapiens
tttctggggctaactggcagtacagattacacatatagatagttcttatacatctctggaactcatgttctctcttaggaacaactcttcccaattatatratcatgctgttagctttgagggggtgtcaataatttgtaaaaactgggggtgtcactaagtttgtcagatctgagtgatgctttttactacaggggtcat

SEQ ID NO: 371439 - DNA, 201 bp, Homo sapiens
agaaagatgagttttctgaatgagcaatttggagttaaagaagtctcctgttgaggtctttatttcttcacattccactacattttttttgtgtgtgtgtktgtgtatttttttttttttgagatggagtctcgctttgttgcccaggctagagtgccatggcactatcttgactcactgcaacctccgcctcttgggttc

SEQ ID NO: 371440 - DNA, 201 bp, Homo sapiens
ttgagcccgggaggcagaggttgtagtgagtcgagatcgggccactgcactccagcctggggaacaacgcaagactccgtctcaaaaaaaaaaaaagattraaaaaattaaaaatagaaggccaggcacggtagctcatgactgtaatcccagctctttgggaggccaaggtaggctgatcacttgaggtcaggagttcta

SEQ ID NO: 371441 - DNA, 201 bp, Homo sapiens; identical to SEQ ID NO: 80468

SEQ ID NO: 371442 - DNA, 201 bp, Homo sapiens; identical to SEQ ID NO: 80469

SEQ ID NO: 371443 - DNA, 201 bp, Homo sapiens
aatcagcggctgccacacagcggcccaagccgggtttgggggttgggacctccggctgcaggtccgcctgggccagacgcgcgagcgcaagcagcgggttwgtggtcgcgcgcccgacctccgcagtcccagccgagccgcgacccttccggccgtccccaccccacctcgccgccatgcgcctccgccgcctagcgctgt

SEQ ID NO: 371444 - DNA, 201 bp, Homo sapiens
cccgcctcgccgctgcctccgacgtgctagaactcacggacgacaacttcgagagtcgcatctccgacacgggctctgcgggcctcatgctcgtcgagttyttcgccccctggtgagtccattctgccgaggcgggggaagaaaggcggggctgggccgggggcgagagcgcggggaactgttgggcctacgcagcgccgg

SEQ ID NO: 371445 - DNA, 201 bp, Homo sapiens
agttgaaacaattaactcataaatctgttgcctcagccttgacaactactatatattcaacagaaatctctcatctgtctcttctttattctcattgctgscattccggtccaagcttttattgtctgccatgtgaaatatattatcttctagatggctttactcttgtctctattttctccctttctgtcagtctttgac

SEQ ID NO: 371446 - DNA, 201 bp, Homo sapiens
ctgtctcaaaaaaaaaataaagaaaagaaaaaaaagattggaaacaaatgtccatcagttttgcaattgtgtctgcttaaataaactgtggcacatttatrgtgaaacactatgcattgtaaacaatgtttctgttaaaaaaaaaacttttttttttttttttgagacagagtctcactctgtcacccaggctggagtgca

SEQ ID NO: 371447 - DNA, 201 bp, Homo sapiens
aatgaaaaagctgaagcccagaaggattaaattgagacctggtccaacgtgtttggaattagttggggaactatgattagaaccacgttctcttaattttytaacccaaaatttagtaaaccctatacccaattattgcacttaagattaaggtggttagcatcttagtgttaatgagaaggtcttgttgctgaatctgtg

SEQ ID NO: 371448 - DNA, 201 bp, Homo sapiens
ttgggaggccgaggcaggcggatcacctgaggtcgggagttcaagaccagtctgaccatcatggagaaacccccgtctctactaaaaatacgaaattagcygggcatagtggcacatgcctgtaatcccagctactcaggaagctgaggcaggagaatagcttgaacccaggaagcagaggctgcagtgagccacgatcct

SEQ ID NO: 371449 - DNA, 201 bp, Homo sapiens
tgggcctgtgaaggtgaggtgctcacagcctcatcaagctatgagcaattgcctgtcctcatttctttgttccaaaactgtggggtctaaatgaagacttygttggccatctctttttttttttgtccttactcccgagtcataaaataagcattggcaggccaagcggtggctcatgcctgtaatcccagcactttggga

SEQ ID NO: 371450 - DNA, 201 bp, Homo sapiens
tttagaccaggcgtggtggctcacgcctgtaatcccagcactttgggaggccaaggcaggtggatcgcctaaggtcgggagttcgagaccagcctgaccamcatagagaaaccccgtctctactaaaaatgcaaaaaaattagccaggcacggtggtgcatgcctgcaatcccagctactcaggaggctgaggcaggagaa

SEQ ID NO: 371451 - DNA, 201 bp, Homo sapiens
gagaatcgcttgaacctgggaggcggaggttgcggtgaaccaggatcgtgccattgcactctggcctgggcaacaagagcgaaactctgtctcaaaaaaaraaataaataaagaaaaataaatacatataggtactttaaggattatgatccttaatgaattctgaaaactaatgaaaggatggcaggttggaattcttac

SEQ ID NO: 371452 - DNA, 201 bp, Homo sapiens
cagccaatcagcggctgccacacagcggcccaagccgggtttgggggttgggacctccggctgcaggtccgcctgggccagacgcgcgagcgcaagcagcsggttagtggtcgcgcgcccgacctccgcagtcccagccgagccgcgacccttccggccgtccccaccccacctcgccgccatgcgcctccgccgcctagc

SEQ ID NO: 371453 - DNA, 201 bp, Homo sapiens
tgaggaactgtgttctaatctggggtccatgtcctcatcttcttgctcccaatcttctccctcttgtaaatcctgattggtcaggccttgtagggggcttrgcactaaaggcagagttctgaacctcttttcttccagttctacagtggctacaggcactgaacgtttctgttgaggaaaatatctgtgtgacataaacag

SEQ ID NO: 371454 - DNA, 201 bp, Homo sapiens
tctgtgttttccaggtagtggtagcagagaattttgatgaaatagtgaataatgaaaataaagatgtgctgattgaattttatgccccttggtgtggtcaytgtaagaacctggagcccaagtataaagaacttggcgagaaggtaagtgtgaaccctattctgaggataacatttgagcgggagcagtaagtttatgtat

SEQ ID NO: 371455 - DNA, 201 bp, Homo sapiens
tatcacaactccctgcaatttctggcctcacccacctcctctagtgccatctgtggctgtgatactgcatctccttcagaatagcctcctgtgttctgccractctcaggatgtctggcatcttcagtcaggttgtgtccctgaactgatgatggggctgggatagaatccatggctgcccaaataatgaggcgctccctg

SEQ ID NO: 371456 - DNA, 201 bp, Homo sapiens
taaacatagttctttaattgggtttatttatttatttaattattttttgagacggagtttcgctcttgttgcctgggctggagtgcaatggcgtgatctcrgctcaccgttcaagcgattctcctgcctcagcctcccgagtagctgggattacaggcatgcgccaccaccccggctaattttgtatttttagtagagatg

SEQ ID NO: 371457 - DNA, 201 bp, Homo sapiens
cgcctagcgctgttcccgggtgtggcgctgcttcttgccgcggcccgcctcgccgctgcctccgacgtgctagaactcacggacgacaacttcgagagtckcatctccgacacgggctctgcgggcctcatgctcgtcgagttcttcgccccctggtgagtccattctgccgaggcgggggaagaaaggcggggctgggcc

SEQ ID NO: 371458 - DNA, 201 bp, Homo sapiens
tctactagctcaaaggtagtattatagtttgagattcttcctagtgagacaacattaacaaattcataggactaaactgagaatttggcttttttaatacrtatataggtgtggacactgcaagagacttgcacctgagtatgaagctgcagctaccagattaaaaggaatagtcccattagcaaaggtaagtacaggtgg

SEQ ID NO: 371459 - DNA, 201 bp, Homo sapiens
ataaagaacttggcgagaaggtaagtgtgaaccctattctgaggataacatttgagcgggagcagtaagtttatgtatgtattcagcattggctaatttgkttggttcctaagtactgatagatttttttcccaattacttgctgtttactcactttctcgtgactgccccctagtgctccagcctgtgcagtgcctgaga

SEQ ID NO: 371460 - DNA, 201 bp, Homo sapiens
tcgccgctgcctccgacgtgctagaactcacggacgacaacttcgagagtcgcatctccgacacgggctctgcgggcctcatgctcgtcgagttcttcgcyccctggtgagtccattctgccgaggcgggggaagaaaggcggggctgggccgggggcgagagcgcggggaactgttgggcctacgcagcgccggggccct

SEQ ID NO: 371461 - DNA, 201 bp, Homo sapiens
tccagccaacaagaagctaaatccaaagaaatatgaagtaagtgaattgtcccatatccccacaaatatatacacagacgtaaacacacaaccttaaacayagttctttaattgggtttatttatttatttaattattttttgagacggagtttcgctcttgttgcctgggctggagtgcaatggcgtgatctcggctcac

SEQ ID NO: 371462 - DNA, 201 bp, Homo sapiens
cctagctacttgagaggctaaggcaggagactcgcttgaacctggaaggtggaggttgcagcgagctgagatcacaccactgcactccagcctgggtgacrgtgagaccctgtctcaaaaaaaaaaataaaaatgaaaataaaattactaggccaggcgtggtggctcacgtctgtaatcccagcactttgggaggctgag

SEQ ID NO: 371463 - DNA, 201 bp, Homo sapiens
ggatggctgacacgaaggggcacccgagacagcgcctgggctttttcccgcccgcggttccaccgctctgaaaccgatttctaacagagaggtaattgggsccctgcggttgtggtggcagcagtgaaagttggctgtcaccgactggagcgcccccagttggtgggcagggatacgggcgcgggtagtggcaggaaagtt

SEQ ID NO: 371464 - DNA, 201 bp, Homo sapiens
tttgtgtccccacccccaccccgagacagagtcttattctgtcacccaggctggagtgcagtggcgcgatgtcagctcactgcaacctccacctcccaggktcaagcaattctcctgcctcagcctcccgattagctttgattacaggtgcccaccaccacgcctggctaatttttgtattgtcagtagagacggggtttc

SEQ ID NO: 371465 - DNA, 201 bp, Homo sapiens
catcttatacccttttgtaccttctgaattgtgaatgatgaataattgccttctcaaaaattataaataagttgtgttgtcataacttttattttgacttytaagatggaattgtcagccacttgaagaagcaggcaggaccagcttcagtgcctctcaggactgaggaagaatttaagaaattcattagtgataaagatg

SEQ ID NO: 371466 - DNA, 201 bp, Homo sapiens
gctgcactgagctgtgattgaaccattgcactctagcctgggcaatagagcgaaaccctgtctcaaaaaaaaaaaaagtagtaaagtatatggtaaataaraattaaagatggaaagcagaagtacagctataaaggttaaaataatcattgaggctgggcacggtggctcacgcctgtaatcccagcactttgacaggct

SEQ ID NO: 371467 - DNA, 201 bp, Homo sapiens; identical to SEQ ID NO: 80470

SEQ ID NO: 371468 - DNA, 201 bp, Homo sapiens
gctgttcccgggtgtggcgctgcttcttgccgcggcccgcctcgccgctgcctccgacgtgctagaactcacggacgacaacttcgagagtcgcatctcckacacgggctctgcgggcctcatgctcgtcgagttcttcgccccctggtgagtccattctgccgaggcgggggaagaaaggcggggctgggccgggggcga

SEQ ID NO: 371469 - DNA, 201 bp, Homo sapiens
attattaaagccttttatactacaaaggatttctaaagaacaataaccctggaatgtgaagataggtcttttaatcaagacctatgactgtcatttttctyaatttaaatataggtactttagaccaggcgtggtggctcacgcctgtaatcccagcactttgggaggccaaggcaggtggatcgcctaaggtcgggagtt

SEQ ID NO: 371470 - DNA, 201 bp, Homo sapiens
taaggtaggaggatcacttgagcctaggagttcaaggctacagtgagctataatcacaccattgcactccagcctgagcaacagagcgaaaccctatctcaaaaaaaaaaagatgggagacagttcttctgctatctgcctactgagacttttcttttttttttttaaggggtatcatcttatttcgtccttcacatctca

SEQ ID NO: 371471 - DNA, 201 bp, Homo sapiens
gcagcgccggggcccttcattcctgtgggcccctgctgcggcgggcacatttctcattcccgggagctggaggcgcctcgccgagagcgggggagtcggtrctgatcggcccaaggaaaacccgaaggctgcgctcacgcagggcctcatccttatctcggtgctcttgtggcacttcctatttgcagagggttttgccac

SEQ ID NO: 371472 - DNA, 201 bp, Homo sapiens; identical to SEQ ID NO: 80465

SEQ ID NO: 371473 - DNA, 201 bp, Homo sapiens
gggttctttaaaaagttacacttttaagctgatctttctgttttcagggtggccgtgaattaagtgattttattagctatctacaaagagaagctacaaayccccctgtaattcaagaagaaaaacccaagaagaagaagaaggcacaggaggatctctaaagcagtagccaaacaccactttgtaaaaggactcttccat

SEQ ID NO: 371474 - DNA, 201 bp, Homo sapiens
gaaaaaagggaagcttgtggaaagtgaggtactaccatctgcaaaccactcttcccacatgaacagcagtttatctgctggaattacaggtgcgcaccacyacacccggctaatttttgtatttttagtgtttgaagaatgagattgttttaagtcttcaattgactaagtgtccctctgtcactgaaaacttgaaatgta

SEQ ID NO: 371475 - DNA, 201 bp, Homo sapiens
ggcagaaccactgattccttcttggcttaagagttctgcagtatgggcccacataactgcttgaaattaataaatgtttctttccccagttttcctaccakatacttctctccagccaacaagaagctaaatccaaagaaatatgaagtaagtgaattgtcccatatccccacaaatatatacacagacgtaaacacacaa

SEQ ID NO: 371476 - DNA, 201 bp, Homo sapiens
aagtgaattgtcccatatccccacaaatatatacacagacgtaaacacacaaccttaaacatagttctttaattgggtttatttatttatttaattatttwttgagacggagtttcgctcttgttgcctgggctggagtgcaatggcgtgatctcggctcaccgttcaagcgattctcctgcctcagcctcccgagtagct

SEQ ID NO: 371477 - DNA, 201 bp, Homo sapiens
cttgtatattcatgtgtcctgtactggttcttttctttttgattttgtagtctttcaggagaaacatgaaacctgatgggaggtttagcagctggcttctragggtagcatttattaaaccatttactgaacccctatgatgtaccttgcacagttataggcaaatagagaaagaccaatccctaaagagtctggcattct

SEQ ID NO: 371478 - DNA, 201 bp, Homo sapiens
  misc_feature (1)...(201): n = A,T,C or G
ctcagcggatggtctgggtggacctggaggtgagtgaggtcggcggggggcttggggaggcgagtgaggtttcgctcgtggaaccgaggagtcgagcccgncctgggagagcgttgggggtctgggtctcaggtgtggcaggtgagcgcggccggccacgggcggtgcagggcaagtccggaggcaggagtcctgcgggtg

SEQ ID NO: 371479 - DNA, 201 bp, Homo sapiens
tcacaccaaatggcataagtaatgatgactgtcaatagcctcacattaagattgctcaggttttgctacataataggttctgtaagtactgtgggttttcrggtgtgttttggatttcagttttgtggataagatattgtgtgcctttatttagccagaggctataattttggcagcttcggctctgacatatatccaagt

SEQ ID NO: 371480 - DNA, 201 bp, Homo sapiens
taagctaatcacatttacccaaacctgatttagaaatatagaggtgcttttaggaattgtttgaattttaaaaaatcatctccatttcaaatacaacttaygaattttgatatcctgttgtataatactagaaatatagagatgcagtatgcttcgtgtctttctaggaaattcagttcatgaagataagaagtttcttga

SEQ ID NO: 371481 - DNA, 201 bp, Homo sapiens
acatctggagcccatagatcctaaagagcagctttttgaggaatgcagggctgtcgtggatacttaacttccctggttccagagagattttgtggatctgrggacagactccagtaactacctacctattagagtcatgcaatggaacaacttcgtccaagctcttggaaagacaaagacaactttgtacaatgccctgtt

SEQ ID NO: 371482 - DNA, 201 bp, Homo sapiens
cgtggatacttaacttccctggttccagagagattttgtggatctggggacagactccagtaactacctacctattagagtcatgcaatggaacaacttcrtccaagctcttggaaagacaaagacaactttgtacaatgccctgttgaaacactcaagtgagaagaaaggaagcttctcacgctagaagaaatcctattc

SEQ ID NO: 371483 - DNA, 201 bp, Homo sapiens
  misc_feature (1)...(201): n = A,T,C or G
cttgaagaaaaaaaaatggtgcaaagatggcagttgcaatttgaacttgagctctaaaaatggtctatttgtggttatatttgcccattttaaaagtgaantttcatttctggatgcctttgaaaactgactttacatgtgtttttggtggggggctggggattctctcttgcagtctggccttaccaaggcagtgaagga

SEQ ID NO: 371484 - DNA, 201 bp, Homo sapiens
cacttaactcccaaattcctgactgcttgaaataatgtcccttaactcttttttctcggggaaaagataaagttcaactagcataaacataacattctttyactgttaggaattctggtcaggattccagtgttccattctgagagggttatatagcctttattgctgtttcaaaactcttagatagcttggtttatagga

SEQ ID NO: 371485 - DNA, 201 bp, Homo sapiens
tcatatgttcttttttttttttaaacaatcttttacaaatgtaaaaatcattcttagctttctagctattaataaatagctgaagtgtggggccatagttkgctgacccttgatagatatctgtgtcatctatttgtaggattagagttttcagtggtgtgtgtatgttcgtatgttctattttgccttaatgaacagtgc

SEQ ID NO: 371486 - DNA, 201 bp, Homo sapiens
tgttctacttttgatgatgctagacagtgacacttacagtaacatccattgttcttaagtcgttttttaaaagttgtacttttaaaatgattttcatctcytggttttggacagttcattcattgtggtatgtttgcttatagggcacttgatgacattagtgaaagcatcaaagagcttcagttttaccgaaataacatc

SEQ ID NO: 371487 - DNA, 201 bp, Homo sapiens
ttgctgtgtaggtaaaagaggtgaggacgtatttctagattaatgactgcgtttgtggagtaccaggcttatcctccccacatatcaactgtaggagaatyatgagactttgtacttctcatcataacaacttttttaactttgtataaataaagccctgagttttagatttggttgtttttttctgttacttgggattta

SEQ ID NO: 371488 - DNA, 201 bp, Homo sapiens
ttgacaaatacatgccccagttcatgaaacatcttcattatagaataattgatgtgagcactgttaaagaactgtgcaggtaagggctatatttaggatcyattaaattacctcatttagcatgttttaattgagaatttgtggaaagtaattggatagagctgtagaactaaggctaccaagtgggttcatatcttcctc

SEQ ID NO: 371489 - DNA, 201 bp, Homo sapiens
caccgtggtctcgatctcctgacctcgtgatccgcctgcctcggcctcccaaagtgctgggattacaggcgtgagccaccgcgcccggcctgaaaggaggmttttctgccatcttggggagaagaatgaactggagaaagggcagggcatggaaatgaggggcttgtatgataaaaatgtgagagggtcagttgacagaca

SEQ ID NO: 371490 - DNA, 201 bp, Homo sapiens
atgctagacagtgacacttacagtaacatccattgttcttaagtcgttttttaaaagttgtacttttaaaatgattttcatctcctggttttggacagttyattcattgtggtatgtttgcttatagggcacttgatgacattagtgaaagcatcaaagagcttcagttttaccgaaataacatcttcaagaaaaaaatag

SEQ ID NO: 371491 - DNA, 201 bp, Homo sapiens
aaagtatccttatctcttactttctctgatatgtatatttagtccttaaaacagcttaagctttccctctgaaagtaaggttattcctgttgtttcttggkgactgatggcgtttcccatccacagggtcctaacctgattataaaacaaccagatgagttgctggacagcatgtcagattggtgtaaggagcatcacggg

SEQ ID NO: 371492 - DNA, 201 bp, Homo sapiens
ggtgctaatacttgctcccccgccccttacctctggcagaacagccccgttcttaacatgacacagactggtaccagtctgcaccgatctgcagccaaggrgttggggacccctactttatgtggaaaatggctaaaattgtaaatttttatattatctatattttatcacaatttaaaaaataaaaattaaaaaatatgt

SEQ ID NO: 371493 - DNA, 201 bp, Homo sapiens
ctgactaagtacttggaaatctgtacttgtaagctaatcacatttacccaaacctgatttagaaatatagaggtgcttttaggaattgtttgaattttaaraaatcatctccatttcaaatacaacttatgaattttgatatcctgttgtataatactagaaatatagagatgcagtatgcttcgtgtctttctaggaaat

SEQ ID NO: 371494 - DNA, 201 bp, Homo sapiens
cagaagaatatgaatttgcaccaaagaaggctgcttctcataggtaagtttgagttctaccaagcgttttccagtctgacacacacttaactcccaaattmctgactgcttgaaataatgtcccttaactcttttttctcggggaaaagataaagttcaactagcataaacataacattcttttactgttaggaattctgg

SEQ ID NO: 371495 - DNA, 201 bp, Homo sapiens
tgatacatacatacaatgaaatattattcagcttgaaaaaggaagaacattctgacacatgctacaacatggatgaactttgaggagatgacagtttaagwgaaataagccagatatgaaaagacaaatactgcataagtctacttgtaagaggtacgtagagtagtcaaattcttagagacaaaaagtagaatcgtggtt

SEQ ID NO: 371496 - DNA, 201 bp, Homo sapiens
tgtcaaaagtttttaaaaaacaaagcatttaaagaaaattgcttttctgaaatgttctacttttgatgatgctagacagtgacacttacagtaacatccawtgttcttaagtcgttttttaaaagttgtacttttaaaatgattttcatctcctggttttggacagttcattcattgtggtatgtttgcttatagggcact

SEQ ID NO: 371497 - DNA, 201 bp, Homo sapiens
atatatccaagtcctggaaagaaagcagatggttgccttagccacacaaataattgtcataaaactcttgcactaaaatttgtgcagggaattctctagargtggcccttggcccatgattcagagtttattgatttacttgcacactgttctaataatcttggttacctgatttctcagaatacaacagatgagaaacaa

SEQ ID NO: 371498 - DNA, 201 bp, Homo sapiens
gaggtagatcctctggtatggttaggtactgtttgataattgatgtttattatgatgactgagtcatgacttatgttcaagtgtgtcagtctgttttgttsagggacatcatcaagtattgggcaatgtttctcaaactgtgttccatgaactgtttataagtattctacaaatgtggtcgattaagttttagaaatacta

SEQ ID NO: 371499 - DNA, 201 bp, Homo sapiens
actttttaaagggcactggaaatataaccatcattttttccagcttctttatttaaaaaataagaaagttgaggtctatatgggttaaggtaatgtgctasgtcatggtaggggtggtactagaaccaaagtaatccatctcacagcctagtgaaaattaaaaattaaacattattttttaattaaccatgccagaaattt

SEQ ID NO: 371500 - DNA, 201 bp, Homo sapiens
ttcttagctttctagctattaataaatagctgaagtgtggggccatagtttgctgacccttgatagatatctgtgtcatctatttgtaggattagagtttycagtggtgtgtgtatgttcgtatgttctattttgccttaatgaacagtgctggaatgaagggggaacacttaaagtatccttatctcttactttctctga

SEQ ID NO: 371501 - DNA, 201 bp, Homo sapiens
tagctgaagtgtggggccatagtttgctgacccttgatagatatctgtgtcatctatttgtaggattagagttttcagtggtgtgtgtatgttcgtatgtyctattttgccttaatgaacagtgctggaatgaagggggaacacttaaagtatccttatctcttactttctctgatatgtatatttagtccttaaaacagc

SEQ ID NO: 371502 - DNA, 201 bp, Homo sapiens
agtgtggggccatagtttgctgacccttgatagatatctgtgtcatctatttgtaggattagagttttcagtggtgtgtgtatgttcgtatgttctatttkgccttaatgaacagtgctggaatgaagggggaacacttaaagtatccttatctcttactttctctgatatgtatatttagtccttaaaacagcttaagct

SEQ ID NO: 371503 - DNA, 201 bp, Homo sapiens
attgctgtttcaaaactcttagatagcttggtttataggaatgatgaaacaatctgtaatctttctagtaatgaaccgtgttaactttcttcccacagaasatatggacttgcagccttttgaaattagaacactttttgtgtgcaattctataatacagttgcctactttgacacttgttatagtttttctgattgtttc

SEQ ID NO: 371504 - DNA, 201 bp, Homo sapiens
tgtgtcattgactttctaaagagaccaggcctgttctaccaggatttttaaaagggtgacattgccagagggaagttaatgtttctctgaaggtatatgtrcgtttgtatatgtaagtcgatgtggtagctaatactgttcttaaacatttataaaaataagttttggcattaagtactagagcatatattgtgtaaatgt

SEQ ID NO: 371505 - DNA, 201 bp, Homo sapiens
ttcagtctgtcgcgaacgcattgtggattgtcaagtattactcaagtcagtcttttggataaggttagacatcaactttcagagaagggggattgctgctytcctgttaatagttgtttcttcccagaggttaatatccttggactttgaacaccgtcttttttgactgtggacatgctattaacagtcaggatcataact

SEQ ID NO: 371506 - DNA, 201 bp, Homo sapiens
gagctgtagaactaaggctaccaagtgggttcatatcttcctcatcccattcttgcttgtataggaccttaacttaccctggactggtgagaattgggagmaacaacgtcagacatgttcccagtaaataagccaatgcctggcacaaaataagtgctcaatacattttctggattaactaatattatgtggaagtcttgt

SEQ ID NO: 371507 - DNA, 201 bp, Homo sapiens
agacagcacacgaaatactatttttctcctaatatgctgtttccattatgacacagcagctcctttgtaagtaccaggtcatgtccatcccttggtacatrtatgcatttgcttttaaaccatttcttttgtttaaataaataaataagtaaataaagctagttctattgaaatgcaaacctttttgtaccatctattctt

SEQ ID NO: 371508 - DNA, 201 bp, Homo sapiens
ttctcaaactgtgttccatgaactgtttataagtattctacaaatgtggtcgattaagttttagaaatactaaaatttattaattttagaaaattaataawtattagaaatataggacagcttccttttgggaattcataatacacattagtatattaaatgctttgcaactttttatttcagtaaaaagtttactctagt

SEQ ID NO: 371509 - DNA, 201 bp, Homo sapiens
ttgctcatagaaaatatatagaagaaagagaggagagggtagaagatagaggccccggcaaagaagcaacttgagaatcatgactcaaatgccattttcartgttaatggattacttgaaggaggtaattgttcagtatatttgagacagcttcctttgagagttccatttctgctgtgtatagacgctggtatccagaag

SEQ ID NO: 371510 - DNA, 201 bp, Homo sapiens
tctcaaactgtgttccatgaactgtttataagtattctacaaatgtggtcgattaagttttagaaatactaaaatttattaattttagaaaattaataaatattagaaatataggacagcttccttttgggaattcataatacacattagtatattaaatgctttgcaactttttatttcagtaaaaagtttactctagtt

SEQ ID NO: 371511 - DNA, 201 bp, Homo sapiens
ctcctaatatgctgtttccattatgacacagcagctcctttgtaagtaccaggtcatgtccatcccttggtacatatatgcatttgcttttaaaccatttyttttgtttaaataaataaataagtaaataaagctagttctattgaaatgcaaacctttttgtaccatctattctttagtagtttaattattgggaaaaga

SEQ ID NO: 371512 - DNA, 201 bp, Homo sapiens
ttactttattgtaagaatataacatatatattgttcctgatgtttgtataaaaaatatattatctcttacatataacatacaaaatctatgttaattgackttatattatcagtaaggcttctggtcagtagtaggctattagtagttaagttttgcgggagtcaaaaattatatacagatttttggttgcacaagggttt

SEQ ID NO: 371513 - DNA, 201 bp, Homo sapiens
tcaagcatgtggaatgatagatttgtccttctgttcatgagaggtcatttacaaatttataaggagctaaactgactaagtacttggaaatctgtacttgyaagctaatcacatttacccaaacctgatttagaaatatagaggtgcttttaggaattgtttgaattttaaaaaatcatctccatttcaaatacaacttat

SEQ ID NO: 371514 - DNA, 201 bp, Homo sapiens
agtgagaagaaaggaagcttctcacgctagaagaaatcctattctaccagcctgatatattgtgcctccaagaggtagaacagtattttgaaaccttccarccactcctcaggaggctgggctatcaaggcacattttttttcccccaagccctggtcatcttgtctaggtatagaatacaacagtggaccagacagctgt

SEQ ID NO: 371515 - DNA, 201 bp, Homo sapiens
agcagtgttaaactcgcctatgttacacagtacctggcgcggcgtagacactcagtaaatgttagctaatcttgtatgccaggagcattggccaccatatytaatgtaattacaaggcaaattttagccccttttttaccaaagactggatgaacccagtccctggtggtctagtggctaggagaaaaaaaaaaaaaaatg

SEQ ID NO: 371516 - DNA, 201 bp, Homo sapiens; identical to SEQ ID NO: 274880

SEQ ID NO: 371517 - DNA, 201 bp, Homo sapiens
tttcttatagcacgactgaaaatgtagctgtttatatctgggacaacctccagaaagttcttcctgtaggagttctttataaagtaaaagtatacgaaacygacaataatattgtggtttataaaggagaatagctattggggttagcattgcacaaagcccagtttctttctgtgtttgaaaaagattttgatccccttg

SEQ ID NO: 371518 - DNA, 201 bp, Homo sapiens
gggaaacaacagatgttggagaggatgtggagaaataggaatgcttttacactgttggtgggagtgtaaatgagttcaaccattgtggaagacagtgtgaygattcctcaaggatctagaactagaaatatcatttgacccagccatcccattactgggtatatacccaaaggattataaatcatgctactttaaagacac

SEQ ID NO: 371519 - DNA, 201 bp, Homo sapiens
aagaaaagaggtttatttggttctgcaggctgtacaagaagcatggcaccagcatctgcttctgttgaggcctcagggaccttccactcatggtggaaggygaagggcgagcaagcaggcaactcacagggcaagtgagggagcaagagagaggagaggaggtgccaggctttttttaacaaccagctcgcccattgacta

SEQ ID NO: 371520 - DNA, 201 bp, Homo sapiens
cctcagggaccttccactcatggtggaaggcgaagggcgagcaagcaggcaactcacagggcaagtgagggagcaagagagaggagaggaggtgccaggctttttttaacaaccagctcgcccattgactaatagagcgagaactcactcattgcttcagggagggcaccaagccattcataagggatccacttccatgag

SEQ ID NO: 371521 - DNA, 201 bp, Homo sapiens
ttggaatatcctgatttccttcagttaacaaattctccatttcttttaagacatagctttctccttgagacttactgtctttctttttttttttttttttwaataggcacagaaccaatgcaaacttttctttttggtagaggtaggggtctcactatgttgttcaggctggtctcagacacctcctgccttgacctccca

SEQ ID NO: 371522 - DNA, 201 bp, Homo sapiens; identical to SEQ ID NO: 80484

SEQ ID NO: 371523 - DNA, 201 bp, Homo sapiens
tgagtgaatgaagaaacagcactatgctcaaaatactttaggaaagttatacagatagggccagcatgcatttatggggcaggggttggggggcaggcggrgagagagagagagggagacagagacaggagaagaggagggggaggggaggacaggggaggagaggggaggggaaagaaagaaaaagaaaaagagaaaaga

SEQ ID NO: 371524 - DNA, 201 bp, Homo sapiens
ataataaatataaggaacagagaagggggtttgaatgtgatacttgtgtcatgctgacttttttttttttttttggtcagtaaatttctaagtgatgaagraaacttgaaactgtttgggaaatgcaacaatccaaatggccatgggcacaattataaaggtgagagaaaaactgatgacatttcagcccttcaataagga

SEQ ID NO: 371525 - DNA, 201 bp, Homo sapiens
atgttgccaacttgtgcttgtatgttgctaacttgtgcttggatgttgatctgttgaaagtcatgctgttttttttgtattttgttttctttccatagttrtggtgacagtacatggagaggtatgtgcagaaaatatttgtgtggtttttgcagattgctgggctctctttcagccagtgtggtggattctgtgttgaaa

SEQ ID NO: 371526 - DNA, 201 bp, Homo sapiens
tgaggtttagaggcataagtggaacaatttggaatttgagtcgtaaatggagtcaatgatattttcccttggttttgtctctaggaggcgattatgcagcyccttgatcataagaatctggatatggatgtgccatactttgcagatgtggtgaggtgggtggcactgtatcttgccttatgtggattgtaaaacaagaat

SEQ ID NO: 371527 - DNA, 201 bp, Homo sapiens
gtgaggtttagaggcataagtggaacaatttggaatttgagtcgtaaatggagtcaatgatattttcccttggttttgtctctaggaggcgattatgcagycccttgatcataagaatctggatatggatgtgccatactttgcagatgtggtgaggtgggtggcactgtatcttgccttatgtggattgtaaaacaagaa

SEQ ID NO: 371528 - DNA, 201 bp, Homo sapiens
tgagtcgtaaatggagtcaatgatattttcccttggttttgtctctaggaggcgattatgcagccccttgatcataagaatctggatatggatgtgccatrctttgcagatgtggtgaggtgggtggcactgtatcttgccttatgtggattgtaaaacaagaattgatttgaatactttgattgttgtgtgatttctgaa

SEQ ID NO: 371529 - DNA, 201 bp, Homo sapiens
agtcgtaaatggagtcaatgatattttcccttggttttgtctctaggaggcgattatgcagccccttgatcataagaatctggatatggatgtgccatackttgcagatgtggtgaggtgggtggcactgtatcttgccttatgtggattgtaaaacaagaattgatttgaatactttgattgttgtgtgatttctgaagt

SEQ ID NO: 371530 - DNA, 201 bp, Homo sapiens
ctttcgaaactagaatttctattttctgtaaatattaaacatgaaattttattgtttgcattttgaattttttttgtttttgtttttttttcttatagcaygactgaaaatgtagctgtttatatctgggacaacctccagaaagttcttcctgtaggagttctttataaagtaaaagtatacgaaactgacaataatatt

SEQ ID NO: 371531 - DNA, 201 bp, Homo sapiens; identical to SEQ ID NO: 80495

SEQ ID NO: 371532 - DNA, 201 bp, Homo sapiens
acttgtgcttggatgttgatctgttgaaagtcatgctgttttttttgtattttgttttctttccatagttgtggtgacagtacatggagaggtatgtgcaraaaatatttgtgtggtttttgcagattgctgggctctctttcagccagtgtggtggattctgtgttgaaaactgttccagtcagtattgcttcattgttg

SEQ ID NO: 371533 - DNA, 201 bp, Homo sapiens
ctgcacgttgtgcacatgtaccctagaacttaaagtataataataattaaaaaaaaaaaagaaaaaagaaaaagagaaacgagggtcttgccctattgccsaggttggactcctgggctgaagtgatccctctccttctcaatagctggggctacaggagtgcgtcaccacgcccgcctggctcaattcctgctccttttg

SEQ ID NO: 371534 - DNA, 201 bp, Homo sapiens
  misc_feature (1)...(201): n = A,T,C or G
tgcaagacattttctacttctacaggcagagattgagcagcatcttgatgctccctagtgcgttaacataagcagaatttacacccttttcagccttggcngagtgcctctgcttagccaacattcctactaagctcctttgtctcgattgtgtcttgctttggttgctaaaaaaaaaatcttaactaaaataacagatgt

SEQ ID NO: 371535 - DNA, 201 bp, Homo sapiens
tttttttgtttttgtttttttttcttatagcacgactgaaaatgtagctgtttatatctgggacaacctccagaaagttcttcctgtaggagttctttatraagtaaaagtatacgaaactgacaataatattgtggtttataaaggagaatagctattggggttagcattgcacaaagcccagtttctttctgtgtttga

SEQ ID NO: 371536 - DNA, 201 bp, Homo sapiens
tcttatagcacgactgaaaatgtagctgtttatatctgggacaacctccagaaagttcttcctgtaggagttctttataaagtaaaagtatacgaaactgdcaataatattgtggtttataaaggagaatagctattggggttagcattgcacaaagcccagtttctttctgtgtttgaaaaagattttgatccccttgga

SEQ ID NO: 371537 - DNA, 201 bp, Homo sapiens
ccagtagtattgcttgttcagaaaggtactgctcagtattggaccagcttgctgtgtagctggacacctgcaagacattttctacttctacaggcagagaytgagcagcatcttgatgctccctagtgcgttaacataagcagaatttacacccttttcagccttggctgagtgcctctgcttagccaacattcctactaa

SEQ ID NO: 371538 - DNA, 201 bp, Homo sapiens
cttccatgctgaggtcaatgattatctctgggatgaaggcaaatgtgcaaatgtgggcacagtctctgcacattgtactgcctttaataatttgccagccrtttaatatggagagcctatcacagtaatattcacctttgtttattctttagattgaccctgctacgggaatggttatgaatctggctgatctcaaaaaat

SEQ ID NO: 371539 - DNA, 201 bp, Homo sapiens
gtaacaaacctgcacgttgtgcacatgtaccctagaacttaaagtataataataattaaaaaaaaaaaagaaaaaagaaaaagagaaacgagggtcttgcyctattgccgaggttggactcctgggctgaagtgatccctctccttctcaatagctggggctacaggagtgcgtcaccacgcccgcctggctcaattcctg

SEQ ID NO: 371540 - DNA, 201 bp, Homo sapiens; identical to SEQ ID NO: 274893

SEQ ID NO: 371541 - DNA, 201 bp, Homo sapiens
gctggacacctgcaagacattttctacttctacaggcagagattgagcagcatcttgatgctccctagtgcgttaacataagcagaatttacacccttttmagccttggctgagtgcctctgcttagccaacattcctactaagctcctttgtctcgattgtgtcttgctttggttgctaaaaaaaaaatcttaactaaaa

SEQ ID NO: 371542 - DNA, 201 bp, Homo sapiens
tggtcagtaaatttctaagtgatgaagaaaacttgaaactgtttgggaaatgcaacaatccaaatggccatgggcacaattataaaggtgagagaaaaacygatgacatttcagcccttcaataaggatgaaagagtattcagcaaatgtagacataaagaatgggaaaacttacggacacagtgtgaatgctttgagcct

SEQ ID NO: 371543 - DNA, 201 bp, Homo sapiens
gtttgcattttgaattttttttgtttttgtttttttttcttatagcacgactgaaaatgtagctgtttatatctgggacaacctccagaaagttcttcctktaggagttctttataaagtaaaagtatacgaaactgacaataatattgtggtttataaaggagaatagctattggggttagcattgcacaaagcccagtt

SEQ ID NO: 371544 - DNA, 201 bp, Homo sapiens
tgctcagtattggaccagcttgctgtgtagctggacacctgcaagacattttctacttctacaggcagagattgagcagcatcttgatgctccctagtgcrttaacataagcagaatttacacccttttcagccttggctgagtgcctctgcttagccaacattcctactaagctcctttgtctcgattgtgtcttgcttt

SEQ ID NO: 371545 - DNA, 201 bp, Homo sapiens
tgtcttgctttggttgctaaaaaaaaaatcttaactaaaataacagatgttttggggtaaatatttaagtatagcttttggggacagatctaataatttaygttgccaacttgtgcttgtatgttgctaacttgtgcttggatgttgatctgttgaaagtcatgctgttttttttgtattttgttttctttccatagttgt

SEQ ID NO: 371546 - DNA, 201 bp, Homo sapiens
ccgagcaccgcagacagcgccgggaagatgagcacggaaggtggtggccgtcgctgccaggcacaagtgtcccgccgcatctccttcagcgcgagccaccrattgtacaggtagggtgtgcacacaggtacagcggcgggcggtgggcgccgggccccggaacgtcaccggggcggggccggcgggcgtgctgacgtcggg

SEQ ID NO: 371547 - DNA, 201 bp, Homo sapiens
catgtgagtaaggggacaagaatttaaggcccagtagtattgcttgttcagaaaggtactgctcagtattggaccagcttgctgtgtagctggacacctgmaagacattttctacttctacaggcagagattgagcagcatcttgatgctccctagtgcgttaacataagcagaatttacacccttttcagccttggctga

SEQ ID NO: 371548 - DNA, 201 bp, Homo sapiens
gccgagcaccgcagacagcgccgggaagatgagcacggaaggtggtggccgtcgctgccaggcacaagtgtcccgccgcatctccttcagcgcgagccacsgattgtacaggtagggtgtgcacacaggtacagcggcgggcggtgggcgccgggccccggaacgtcaccggggcggggccggcgggcgtgctgacgtcgg

SEQ ID NO: 371549 - DNA, 201 bp, Homo sapiens
ccatggtttgtgacgtatacgtaagtaataaaatcaacatgatttctgactctccctttggtgagctaaagtaataaattgggaaacttttcaaagatcaktacaaataataaatataaggaacagagaagggggtttgaatgtgatacttgtgtcatgctgacttttttttttttttttggtcagtaaatttctaagtga

SEQ ID NO: 371550 - DNA, 201 bp, Homo sapiens
gcaccgcagacagcgccgggaagatgagcacggaaggtggtggccgtcgctgccaggcacaagtgtcccgccgcatctccttcagcgcgagccaccgattktacaggtagggtgtgcacacaggtacagcggcgggcggtgggcgccgggccccggaacgtcaccggggcggggccggcgggcgtgctgacgtcgggcccg

SEQ ID NO: 371551 - DNA, 201 bp, Homo sapiens
aaagcaaaaacctagaaagaatgaggcaatttaatccttgctgatgatgaggaaaaacattatgttaatatacacgagcattagggagtaatagtctttayatatatatatttttccttctatgagcccaagatcattcttaaattattcctcatagcaaaaatttagaactacttacataatttcagtctaggtctgctt

SEQ ID NO: 371552 - DNA, 201 bp, Homo sapiens
ccagcatctgcttctgttgaggcctcagggaccttccactcatggtggaaggcgaagggcgagcaagcaggcaactcacagggcaagtgagggagcaagasagaggagaggaggtgccaggctttttttaacaaccagctcgcccattgactaatagagcgagaactcactcattgcttcagggagggcaccaagccattc

SEQ ID NO: 371553 - DNA, 201 bp, Homo sapiens; identical to SEQ ID NO: 80510

SEQ ID NO: 371554 - DNA, 201 bp, Homo sapiens
cagtagaactttctgcaatgatggaaatattttatatctgcactgtgtaatatggtaggtacttgtggctattgagcacttgatatgtggctagtgacacraggaagtgaatttttaatttaaatgtaaatttaaactgaaatagccatgtgtggctaccatataggatactacagatctagatcaatcttgcctttagat

SEQ ID NO: 371555 - DNA, 201 bp, Homo sapiens
gtttttccttctatatctcatttataatctaccagaaattctagcactgtcagaaatgtatatatgtatgtatacattcgactttaccaataattttgtttatttatttatttatttttgagacagggtctctctctgtcacccaggtttgagtgcagtggggcgatctcaactcactgcaacttccacctcccaggttga

SEQ ID NO: 371556 - DNA, 201 bp, Homo sapiens
accctgggggaaggaatgctgacatcatgaagcttccataaaaacctaagaggaattaaaaaaataaaaactaaaataaacctaagaggacttgaagccarttggtcagaagttccataggccccagcttgctatttgtgtctggaggagggtggggtgcagtcttggggaccaagccctcaacctatgatctgacactat

SEQ ID NO: 371557 - DNA, 201 bp, Homo sapiens
gtaggtcttgtaagtaatgagcaagtgccaggaacaacagaaatttggcattatgtttttaatctttcccactgaggctaaatttggcttcagaattattstcaagataatactgtctagtcatagaatcatgaggctgaaagtcattgcttggcaatcttcttgccttcaggtgtaccaagaagcaaattatacattcat

SEQ ID NO: 371558 - DNA, 201 bp, Homo sapiens
atattaagtaaacagtaaaaaaggcatttctagaaaaaaaccactgtagtaaccttgagttacttgaaaaaaaggaattccgaagttgtacacaagaccarttttatctagcttaaaagttaagggccttatatggacaactatggactgcatttaaagagaattcctatattaaaagcttctaatagttaacagaacata

SEQ ID NO: 371559 - DNA, 201 bp, Homo sapiens
ggagaggaaaggaggagaatgaaagggagaatttcagctgtatctgtagtgttgatagtaaaactgaagcggataagagtgcaacttctactgcatcctarcttgtgcagccctgggcaagtttcctactctttctttgtctcagttttcttatctgttaaatgagaatattaatagtacctgcttcagggttgtgaggat

SEQ ID NO: 371560 - DNA, 201 bp, Homo sapiens
caccttcagtggctgtgccaaggacatttgggggtggcgatcattagtgagctactgaaatgttttaagctgggacagtgtagaggaggttcatggcatcytgggttttggaacagtccctctgatcacagtgcagaggccagttaggaggcattctctgggcaccattggtatgcagtgaacaccatacttagtggccat

SEQ ID NO: 371561 - DNA, 201 bp, Homo sapiens
aagttaatacttaaagcaaaaatgtttagggtcatcattacccttaaaaatcctttaagggagcactgagtccatttctctggaatttgtgcatcctaggraaaaaaattgtgattttcaaaaaatcccttaagaagacagcaaaggcaacatattatctcagtgtctttaacacaaccagtctttgctccactattggaa

SEQ ID NO: 371562 - DNA, 201 bp, Homo sapiens
taaatagtgtgtctccagaggagcatggctcgtgtaatttaaggttcaaattctctttttagataaattctaatctacctcatcaagcttaacaacttatkggccaacagccagtgctgcttacataaacaaaatgtgatatgtcctagaagcaggcgtggtgtctttgtggtagagggtggaattaaaccaacaaaaacc

SEQ ID NO: 371563 - DNA, 201 bp, Homo sapiens
ttgagtgcagtggggcgatctcaactcactgcaacttccacctcccaggttgaagcgattcttgtgcctcaggctcccaagtagctaagattacagatgtrctcctccactcccagctaatttttgttttttgtttttagtagagatggtgttttgccatgttggcaaggctggtctcaaactcctgacctcaagtgatcc

SEQ ID NO: 371564 - DNA, 201 bp, Homo sapiens
acagcccatcttgaactgaccttggttccctcctcattgagttctaattaattatctctggccaggatttaagtcaatagccaattaaaagtttattctcrtgacattattaaaatttgatcctgaagttttaatttttccattttaaagataggattgcagtttttaaggactgggaaaaaaaagttctcatatgtgctg

SEQ ID NO: 371565 - DNA, 201 bp, Homo sapiens
gattgcttgatctcaggagttcgagaccagcctggacaacatggtgaaaccccatctctacaaaaaatacaaaaattagctgggcatggtggcacgtgccrgtagtcccggctacttgggagactgaggtgggaggatggcttgaacccaggaggcggaggttttagtgagccgagatcatgccactgcactctagcctga

SEQ ID NO: 371566 - DNA, 201 bp, Homo sapiens; identical to SEQ ID NO: 80499

SEQ ID NO: 371567 - DNA, 201 bp, Homo sapiens
cttaactcttcccagtccctcctacccttgccccattacttctccctccatattggtgatgggtaatgcgtcctctcagtcccctggactgagaaatctaycctctgtagttcccagactggctggctcatgtttcatttagaaaaggcacagagtgatagagctgtgggtatgaaaggacttttcatagtggctaaacta

SEQ ID NO: 371568 - DNA, 201 bp, Homo sapiens
ttaggcacttttgcatctgtgtaaatatatctgattctcttcttttttatttttctctctcttcttccttccttcttcttcttttttttttttttactttmcagagtctcactcttttacccaggctggagggcagtggtgcaatctccacgcactgcaacccctgcctcccgtgttcaagcgattctcgtgcctcagcct

SEQ ID NO: 371569 - DNA, 201 bp, Homo sapiens
tcccgggttcaagtgattctcctgcctcagcctccagaatgctgggattacaggcacatgccaccacacccagctaatttttgcatttttagtagaaacgrggtttcgccatgttggccaggctggtctcgaactcctgacctcaggtgatctgcctgcctcagcttcccaaagtgctgaatttacaggcatgagcccact

SEQ ID NO: 371570 - DNA, 201 bp, Homo sapiens
attgagcacattggctaaatctaaactaataagtattcaactttacatatgatcattattttacttccccaaattcctttgcagatgagacaaacagatcrggatgtaataacagcattaactcacagaccttggagcctaagccatacaggagatgggaaaccacgctatgatactttctggaaacattttatatttgtt

SEQ ID NO: 371571 - DNA, 201 bp, Homo sapiens; identical to SEQ ID NO: 80501

SEQ ID NO: 371572 - DNA, 201 bp, Homo sapiens; identical to SEQ ID NO: 80502

SEQ ID NO: 371573 - DNA, 201 bp, Homo sapiens
tagaattatgctcagtgtgatgagatgcttgtcctgagaggaggataaggaggaaactaagatcagccaaaggaataacaaattcaggtctcccatctttyactctcagggaatagaaattgattagaatggctgggataattgcctgtaatgtttaaattatccttatcttttttttttttttttttttgagttggagtt

SEQ ID NO: 371574 - DNA, 201 bp, Homo sapiens
aatgggggaggcaagccttaaacaagtaaacacataaatgagataactttaagagagtgaaaggtgcaatgaagaaatcgggggaactcgaaggaaagagktacgctattttatttagatggaatagtcaagagaaatcgtctccgaagaagcaacatttgaacagaaaccggaattataaggagccaggcaggtgcagaa

SEQ ID NO: 371575 - DNA, 201 bp, Homo sapiens
agttaagggccttatatggacaactatggactgcatttaaagagaattcctatattaaaagcttctaatagttaacagaacatataccttttacatagatktatccctttgtataatttatatcccttatgtatagttttttattcattgattttagcagttatacttttatcagaaaatcatttattttcttcaaatgta

SEQ ID NO: 371576 - DNA, 201 bp, Homo sapiens; identical to SEQ ID NO: 80503

SEQ ID NO: 371577 - DNA, 201 bp, Homo sapiens
tgtggtctgttctttcttgccagaagttatctacaaggtaacattcgggatttttcttgtacatattaggtgagctggtgtagataattgcaatgggctgygtaagcacaggatagatgcctattaaattgaactgcatcagggtcacagttgagaagctcctcttttaaattaaccagagaaattccagaaggggaatgt

SEQ ID NO: 371578 - DNA, 201 bp, Homo sapiens
ttgtttaatggaagtgtacaatgcaggaatctatatcatttaaggaaacagtgcattatggaactttttaaccttttatggaaactttacaaaaccagcayaaaatggaagagtcaagtttctattatttacataaagcatttacaaaagatattaagtaaacagtaaaaaaggcatttctagaaaaaaaccactgtagta

SEQ ID NO: 371579 - DNA, 201 bp, Homo sapiens
tctcttaccctccttccagtgcctgtttttgcatatgtaaaatgggggttttaaaagtgcctatcacaagggtggttgtgaggcacagttgaggtaactcytgtacagtgcctggtacaaaagcccttagcagaagtaagattagggggaggaggagtgaaaatgtcacaaatcactggggaggcctttatgtcagtcccc

SEQ ID NO: 371580 - DNA, 201 bp, Homo sapiens
tctgccgaaggaagtcatactgtaggcaggaaagaatattggtaacacttgagaattatgagtccaagttgctagaattgttcttgagtgtcatcagataytgtattgctctgcttatgcaagggaaaggctggtttgaatattataatgacattgcagctaataaaatgtcaggttcaaagttaatacttaaagcaaaaa

SEQ ID NO: 371581 - DNA, 201 bp, Homo sapiens; identical to SEQ ID NO: 80505

SEQ ID NO: 371582 - DNA, 201 bp, Homo sapiens; identical to SEQ ID NO: 80504

SEQ ID NO: 371583 - DNA, 201 bp, Homo sapiens
  misc_feature (1)...(201): n = A,T,C or G
acctcacaatcttctttgatgtcaaaggccatgcacacaaggtacagtttaaattgtggacttcactttgttaaaaagacatcttatttcattgacggtcntttccgaagttacatatattttgttatttattctttttaaaacttatttttataaattgtatttgtttaatggaagtgtacaatgcaggaatctatatca

SEQ ID NO: 371584 - DNA, 201 bp, Homo sapiens; identical to SEQ ID NO: 80507

SEQ ID NO: 371585 - DNA, 201 bp, Homo sapiens
gcgtgttacaatcgtaaatctttttttgtttgtttttgagacggagtcttgctctgtcgcccagtggtatgatctcggctcatcgcaacctctgcctcccrggttcaagcaattctcttgcctcagcctcctgagtagctgggattacaagcacacaccaccatgcctggctaattttttttgtattttagtagagacggg

SEQ ID NO: 371586 - DNA, 201 bp, Homo sapiens
ttattcatgtaatatcaattatccagacaatgatcgattctcttggaaaattaagtatttgacccaacagttaagttatactttttcctaaaagatgatcyagacctgttttcctaggatctgaaaaacattagtctgccgaaggaagtcatactgtaggcaggaaagaatattggtaacacttgagaattatgagtccaa

SEQ ID NO: 371587 - DNA, 201 bp, Homo sapiens
gaggctgcagtgagctaggatcgtgccactgcactacagcctaggggacagagtttgactccaatctttaaaaatttcataataataataatatccctttrtgttgtgggaagatctctggagagccatgagatctctgtctcttgatctttatcccaaatccattttacctttgattcagccaggccaaattaaggattt

SEQ ID NO: 371588 - DNA, 201 bp, Homo sapiens
ctatccaaaagaaaggaaactagtgtatcaaaggcatacttgcacccccatgtttattgcaacactattcacaatagccaagatacagaatcaacctaagkgttcatcagtggatgaatggataaactgtggtaaatatactcaatggaatactatgtagttagccataaaaaaggatgatatcctgtcatttacagcaac

SEQ ID NO: 371589 - DNA, 201 bp, Homo sapiens; identical to SEQ ID NO: 80506

SEQ ID NO: 371590 - DNA, 201 bp, Homo sapiens
tcgaataggacccaagtaagatcggcgtgttacaatcgtaaatctttttttgtttgtttttgagacggagtcttgctctgtcgcccagtggtatgatctcrgctcatcgcaacctctgcctcccgggttcaagcaattctcttgcctcagcctcctgagtagctgggattacaagcacacaccaccatgcctggctaattt

SEQ ID NO: 371591 - DNA, 201 bp, Homo sapiens
agtttttccttctatatctcatttataatctaccagaaattctagcactgtcagaaatgtatatatgtatgtatacattcgactttaccaataattttgtttatttatttatttatttttgagacagggtctctctctgtcacccaggtttgagtgcagtggggcgatctcaactcactgcaacttccacctcccaggttg

SEQ ID NO: 371592 - DNA, 201 bp, Homo sapiens
ttcctgaatgatggagcactcagaaagggcatggaagctctatgcccctttccccatacctcaccctacgcatgtcttcatctgtatgctgtgtaacataytttataataaacctgtaaacatgtttgagttccgcaagccactctaacaaattaattgaacccaaggaggaggaggtgggaaccccaatttatagctagt

SEQ ID NO: 371593 - DNA, 201 bp, Homo sapiens
caacgtacagaaatcagtagcatgtctatacgtaaataatgaactagctgtaaaagaaatcaagaaagtaatcccatttacatagctaccaaaaaaaaaaataacaaaatacctaggaataaatataaccaaagaggtgaaagagctcttacaaggaaaactacaaaacactgatgagaaaacttaagaggacacaaatgg

SEQ ID NO: 371594 - DNA, 201 bp, Homo sapiens
caagtttttccttctatatctcatttataatctaccagaaattctagcactgtcagaaatgtatatatgtatgtatacattcgactttaccaataattttgtttatttatttatttatttttgagacagggtctctctctgtcacccaggtttgagtgcagtggggcgatctcaactcactgcaacttccacctcccaggt

SEQ ID NO: 371595 - DNA, 201 bp, Homo sapiens
ttaaaacgtataagacattcccccagaggagcacaagagcagagactaaaggaactccatccacatctctccatttctctgttgtcctctcccattctctygtcacaatcccttctctcccttcccacctcacttccccatccccctcctcacccctacaactcttcagccatttgctctggaaagggtcaaaactaaaca

SEQ ID NO: 371596 - DNA, 201 bp, Homo sapiens
gttgcacttaaataaatacacaatacagttaacagatttatgtattcctaagaattcctcctgcatagcattctattagggaaattacaatctgaaaattmagtctttgagttttccaaaggtggcatatactctgccctttgggaagtagggttattaataatgttattaattcaatagaaattcagtgatttcttaaaa

SEQ ID NO: 371597 - DNA, 201 bp, Homo sapiens
ggtgtgagccactatgccctgccggcaactgtaaatcttaaaacttgcaggttctgtctctctctctctctgttttttttgtttgtttgttttggggggggtccttgttttgtatttactgaagaaaccggattattgttttgtagagtttacccaagtccaaattttgctgattatgccatgatatggcttaatattttt

SEQ ID NO: 371598 - DNA, 201 bp, Homo sapiens
agagagggcttttcagtggattaggcacttttgcatctgtgtaaatatatctgattctcttcttttttatttttctctctcttcttccttccttcttcttcttttttttttttttactttacagagtctcactcttttacccaggctggagggcagtggtgcaatctccacgcactgcaacccctgcctcccgtgttcaag

SEQ ID NO: 371599 - DNA, 201 bp, Homo sapiens
agagtgaaaggtgcaatgaagaaatcgggggaactcgaaggaaagagttacgctattttatttagatggaatagtcaagagaaatcgtctccgaagaagcracatttgaacagaaaccggaattataaggagccaggcaggtgcagaaggtcctgagatgggaataatataggggtgttcaggtaacagaagaggcagtgt

SEQ ID NO: 371600 - DNA, 201 bp, Homo sapiens
ctaacatgggtaagaacggaactgaaagaaaccgggttctggtgacactgtgagttcctgcgttaggcaaggcctaaagcaagaattattcttggaatttygtttaagccagtttggatccaatttgcaactgaaaaagtaatggacacatgagcaattcttacacttgtcttaggatatttcaccagaaataaattagtg

SEQ ID NO: 371601 - DNA, 201 bp, Homo sapiens; identical to SEQ ID NO: 80508

SEQ ID NO: 371602 - DNA, 201 bp, Homo sapiens
tgtctgaaagaaaaaaaaaaaaaggctgaatcctagatgccaactggaaggcttaagacatctatccccttttgcaaatcagtgggaaaatgcactaaagsaaaaaaaggtaacagaaaaatccctgaatatttttgcaaagttctctacataaaaatgttaccagccctccaaaatatgtccaggggccccttttcactc

SEQ ID NO: 371603 - DNA, 201 bp, Homo sapiens
caataaagcaaatatagtaataaagggagtcacaaattttttggtttcccagtgcatataaaagttatgtttacactatattgtaatctattaagtattgkgtatgtatatatatatatatatatatatgcacatacacacacatatataggttttcatccatggttcctggctcataactctcagcccttgctacagtat

SEQ ID NO: 371604 - DNA, 201 bp, Homo sapiens; identical to SEQ ID NO: 80509

SEQ ID NO: 371605 - DNA, 201 bp, Homo sapiens
gatggctcatacctgtaatcccagcactttgggagctgaggtgggtggatcacttgaggccaggagtttgagaccagcctggccatgatggggaaaccccrtctctactaaaaatacaaacattagttgggcatggtggcacatgcctgtaatcccagctattcaggaggctgaagcaaggagaattgcttgaacccagga

SEQ ID NO: 371606 - DNA, 201 bp, Homo sapiens
aaaaaccactgtagtaaccttgagttacttgaaaaaaaggaattccgaagttgtacacaagaccagttttatctagcttaaaagttaagggccttatatgkacaactatggactgcatttaaagagaattcctatattaaaagcttctaatagttaacagaacatataccttttacatagatgtatccctttgtataattt

SEQ ID NO: 371607 - DNA, 201 bp, Homo sapiens
ggcattgtctgtcctcatgtgacatcattctcatggttcttttcgggtttctcacactggcattgtttcggcggggaactcttctcctgcagcacacggamcctgactactcggctgcctatgtcgtcatagaaactgatgcagaagatggaatcaaggggtgtggaattaccttcactctgggaaaaggcactgaagttg

SEQ ID NO: 371608 - DNA, 201 bp, Homo sapiens
ataattgttaaaaatgttagtgaggtggcagcgagctggaacttcatctgcttccatttaaaatgttaacatcttacatgtagtttctaggcaatttaaarccctttttggtgtaagaatgagtataaatacacaaattaagatcatctggttgggaggctgaggcaggcagatcatctgaggtcaggagttcaagaccag

SEQ ID NO: 371609 - DNA, 201 bp, Homo sapiens
ttgggaggctgaggcaggcagatcatctgaggtcaggagttcaagaccagcctgaccaacatggtgaaaccccgtctctactaaaaatacaaaattagccrggcatggtggcacatgcctgtaatcccagctacttgggaggctgaggcaggagaatcactcgaacccaggaggcagaggttacagtgagccaagatcacg

SEQ ID NO: 371610 - DNA, 201 bp, Homo sapiens
acctggctttgtagacagctgaatggggagaaaccaacctgtttttccttctgtcctcataccactactctcagtacctcacttctgacaccagatgtgtrtggttttccttctcacgccaaccagttctccacttctctgtggacaccaactgggtgtcctgctattttactcaattctgacagcacatacctggaacta

SEQ ID NO: 371611 - DNA, 201 bp, Homo sapiens
tacaccaccttgtactttgctcccatttctggtctctggattttaatccctttccttccttctgagatggaactggaagctgagaagtgatttgttaactsaagtgcagagcttcataatctcctttggttaaatttctacctattagtgtcagactatattctggttcagtagttctcaaaattttgggaggaaagtcct

SEQ ID NO: 371612 - DNA, 201 bp, Homo sapiens
cccaggacgctggtatcctgcatagatttcaggtacatcactgatgtcctgactgaggaggatgccctaggtgagtttggaagctttctgggatacacgaygtgcacacacagtagtggcatgctttgtttcctaaaagagtgagtgatgctttttatttcttccagaaatactgcagaaaggtcaaattggtaaaaaaga

SEQ ID NO: 371613 - DNA, 201 bp, Homo sapiens
gcacgtaaaactagcaaaatctgacaactctgaggaatgcaccaatgtgaatgtatacaggatgttacccaagatattatcactgggggaaactgggtagwgtgtccagggaaactttctgtgcattaaaaaaaaaaaaaaaaaaaaattcctgtgaatctgtaaaacaaaattaaaaacaaaaagggacaaactttccta

SEQ ID NO: 371614 - DNA, 201 bp, Homo sapiens
gtatgacctctgactgcagagtttgcttcagccactgctgaaaggaagtttggctttaggattacactgtagggagagccctgggggagcagggcagtccrtgagagtatcctgatcacctgggtttgacatcctagtaatttgtggctgggtgtgtgtgtgcagggccggatcaggagaacagctggactctccagggga

SEQ ID NO: 371615 - DNA, 201 bp, Homo sapiens
aaaaatacaaaaattcgcgcgcctgtggtcccagctctggggctgaggaatgggaactcacttgaacctgggagatggaggttgccgtgagcggagatcamaccactgcactccagcctgggcaacagggtgagactgtgtctcaaaaaaaaaaaaaaaataagtctctattacagatgcaagtatttcactctaagtact

SEQ ID NO: 371616 - DNA, 201 bp, Homo sapiens
cctcagcatagcttttgagaaaatccatagaagctgtatcacaaacaacctgtatagatctgttagtgcgtataccacagggccagaaaaccttccagaaraggaaggtttcaaagtaaaagctggttcatttcttacttacacatatcaaatttaaaagctaatcagagactaaactctgcaatttgttttcccatatta

SEQ ID NO: 371617 - DNA, 201 bp, Homo sapiens
aagtgacagaatttggcctctctccttgcaatcatctctagcctgttagaaaatccttggctgttagtctgtttctctgtgtcaaatgacagctacaaggrtgcttttcacctgcctttcacccggggccactgtcgagctttgacaacctgtagtgggcgagtaaccaagggcaatgagagggaggagacatgagttccc

SEQ ID NO: 371618 - DNA, 201 bp, Homo sapiens
tcatcttagaaactgggtcattttatcagagtctagagtcagatatagaaaaagtttgtggctatttctccaatttatatgactaaggtcgggtatctttytcaaagtgtctaattgaaattgaaaaggcagcaatttaaagttgctattgcaagggcagaaaatggtcttaagaaagccagctttcaaattgaataaaca

SEQ ID NO: 371619 - DNA, 201 bp, Homo sapiens
ggctcagggctgacctccctgtgaagagtctctttttgcagatgatggatgccaaccagcgctgggatgtgcctgaggcggtggagtggatgtccaagctsgccaagttcaagccattgtggattgaggagccaacctcccctgatgacattctggggcacgccaccatttccaaggtaggaaaacggctgctgctgctgt

SEQ ID NO: 371620 - DNA, 201 bp, Homo sapiens
  misc_feature (1)...(201): n = A,T,C or G
agaagcagtagcctttgtccagggctaaatacaactcgtttcaagattaaagaacattgggaatttaaaaagttaattgtcagaggaagtacacttctgtngtcttgcagtaggcgagctcaaacaaaaataagcaaagggactaatagttttacgttttttaattctgcagaactagttaagtaagtttggggttaagga

SEQ ID NO: 371621 - DNA, 201 bp, Homo sapiens
ccattctcctgcctcagcctctccagtagctggactacaggcacctgccaccacgcccggctaattttttttttatttttagtagagatggggtttcaccrtgttagccaggatggtctcgaactcctgacctcaggtgatccacccgccttgacctcccaaagtgctgggattacaggcgtgagccaccgtggccagcct

SEQ ID NO: 371622 - DNA, 201 bp, Homo sapiens
accacctcccaggttcaagcgattctcctgcctcagcctcccaggtagctgggactataggtgcctgccaccatgctgggctgatttttgtattttttgtrgagacaggatttcatcattttgcccagactggtcttgaactcctgagctcaagcaatccgcctgcctcagcctcccaaagtgatgggattgcaggcataa

SEQ ID NO: 371623 - DNA, 201 bp, Homo sapiens
aattttaaaaagagaaagataggccaggcgtggtgattcaggcctgtaatcccagcactttgggaggctgaggcgggcagattgcttgagtcaagcagttyaagaccagcctggtcaacatggtgaaaccctgtctttactaaaaatacaaaaattacctggccgtggtgatgcatggctgtaatctcagctactcaggag

SEQ ID NO: 371624 - DNA, 201 bp, Homo sapiens
cccagctaatttttgtattttttgtagagagaggattttgctatgttgcccagcctggtcttgaactcctgggctcaagaaatccacaggctgggccagaygcagtggctcatggctgtaatcccagcactttgggaggccgaggcgggcggatcacaaggtcaggagattgagaccatcctggctaacatggtgaaaccc

SEQ ID NO: 371625 - DNA, 201 bp, Homo sapiens
ctctttttgttagggccgtgtgctgggcctcagcagaggcgttagggggtctcactcagctgttggtggcactgagtgacagcatttcctccctgggagcygcagccctgctgtgaggttggctcagggctgacctccctgtgaagagtctctttttgcagatgatggatgccaaccagcgctgggatgtgcctgaggcgg

SEQ ID NO: 371626 - DNA, 201 bp, Homo sapiens
ttccagttcactattttcatggcgaaaagggctttggccccgcccaatctcggaggtctcccttggggaagagcagattctttaagatgcatactgagccrtgtatacgtcattctttttttatttgcattttctattttcttaaacagaagacacagaacataacttttttcagagctggatgtgatctcaaatggtgat

SEQ ID NO: 371627 - DNA, 201 bp, Homo sapiens
gccaggcgtggtgattcaggcctgtaatcccagcactttgggaggctgaggcgggcagattgcttgagtcaagcagttcaagaccagcctggtcaacatgstgaaaccctgtctttactaaaaatacaaaaattacctggccgtggtgatgcatggctgtaatctcagctactcaggaggctgaagcacgagaattgcttg

SEQ ID NO: 371628 - DNA, 201 bp, Homo sapiens
aggtcttgctctgtcacccaggctggagtgcagtggtgcaatcacggctcatacagccttgaccttccagactcaaatgattgtcccacctcaccttcccragtagctgggcccacaggcacaagccaccatgcctagctaatgtttcttttttttgagagacagagtctcgctctgttgcccaggctggagtggagtggc

SEQ ID NO: 371629 - DNA, 201 bp, Homo sapiens
acaagccaccatgcctagctaatgtttcttttttttgagagacagagtctcgctctgttgcccaggctggagtggagtggcacattcttggctcactgcarcctccacctccaaggttcaaacgattctcctgcctcagtttcccaagtagctgggactacagatgtgtgccaccatgcccagctaatttttgtattttta

SEQ ID NO: 371630 - DNA, 201 bp, Homo sapiens
tggccaggctggtctcaaactcctgacctcaggtgatccacccactttggcctcccaaagtggtaggattgcagatgtaagccaccacacctgacctgggtttttttttttttttttttttgagatgtagtttcgctcttgttgcccaggctggagtgcagtagcacaatctctgctcactgcaacaaccacctcccaggt

SEQ ID NO: 371631 - DNA, 201 bp, Homo sapiens
tataattgcaccactgcactcaggtgacagagcaagaccctgtctcaaaaaaagaaaaaagaaaagatactatccagtcactttgacaccaagaataagawcaggccattgtagcctctactgtacaattccagcagggaaggagctcaacactgaattctaaagctatgcacttgactgttttctttctccttgaccttt

SEQ ID NO: 371632 - DNA, 201 bp, Homo sapiens
agatgcccagctgaggcagtgacaaaatggccctcccaaccctacctgccaaaaaaaccccaagcccctggcagctgctgcagccatgtgaaaaaatacawacgcttcttgaaaaatagatcacaaaatgtggtgattttaatctattcatctgacttttgaccagaggaacccaaataattctggatatttacagagtct

SEQ ID NO: 371633 - DNA, 201 bp, Homo sapiens
cactcaggtgacagagcaagaccctgtctcaaaaaaagaaaaaagaaaagatactatccagtcactttgacaccaagaataagatcaggccattgtagcckctactgtacaattccagcagggaaggagctcaacactgaattctaaagctatgcacttgactgttttctttctccttgaccttttcatagcaggggtgaa

SEQ ID NO: 371634 - DNA, 201 bp, Homo sapiens
ggccaggctggtctcaaactcctgacctcaggtgatccacccactttggcctcccaaagtggtaggattgcagatgtaagccaccacacctgacctgggtttttttttttttttttttttgagatgtagtttcgctcttgttgcccaggctggagtgcagtagcacaatctctgctcactgcaacaaccacctcccaggtt

SEQ ID NO: 371635 - DNA, 201 bp, Homo sapiens
gtgttgggcaggagactgctcctcctccggaggaaagtgaagacaggaggctgtcacatcgtctctgacatggagagtggcttccgggccatccgtagggraaggacacagagctcttgagcccccttctagattcaaggttggcgttttacggggatggaggaggtagccaccaaaagggaatgatttgcaggccaccag

SEQ ID NO: 371636 - DNA, 201 bp, Homo sapiens
cttgtttcactgggagaaatttaaaagtgacagaatttggcctctctccttgcaatcatctctagcctgttagaaaatccttggctgttagtctgtttctytgtgtcaaatgacagctacaaggatgcttttcacctgcctttcacccggggccactgtcgagctttgacaacctgtagtgggcgagtaaccaagggcaat

SEQ ID NO: 371637 - DNA, 201 bp, Homo sapiens
ttgcagatgtaagccaccacacctgacctgggtttttttttttttttttttttgagatgtagtttcgctcttgttgcccaggctggagtgcagtagcacartctctgctcactgcaacaaccacctcccaggttcaagcgattctcctgcctcagcctcccaggtagctgggactataggtgcctgccaccatgctgggct

SEQ ID NO: 371638 - DNA, 201 bp, Homo sapiens
tgctgagtgtttgcctggggccaggtcctccttccgggaagtcattttagctggaaagaacagggtgggggcgggtggcaagggatcagagcatgagcgtytgagggcttcgtcaggggcagtgaggagcctctaaaggactctacatttaggaatgacagagtcaaacaatttaacaaagccctaaaggtccctgccagg

SEQ ID NO: 371639 - DNA, 201 bp, Homo sapiens
gcctcctaggttcaagcaattctcctgcctcagcctcccgagtagctgggattacaggtgcccactatcacgccagctaattttttttttttttttgagayggagtctcgctctgtcacccaggctggagtacagtggcgcgatctcagctcactgcaagctctgcttcctgggttcacgccattctcctgcctcagcctc

SEQ ID NO: 371640 - DNA, 201 bp, Homo sapiens
tgggaggccaaggagggaggattgcttgaagccaggagctcaagatcaacctggtcaacatagtgagaccccatctctacaaaaataaaaataaattagcygggcatagtggcacatacctggagtcccagctactcaggaggctgaggcaggaggatcacataagccggggagactgaggctgcagtgagctatgatggc

SEQ ID NO: 371641 - DNA, 201 bp, Homo sapiens
cagcccccacaagtagctgggattacaggcatgtgccaccacacccagctaatttttgtatttttagtagagacagggtttcaccatgttgatcaggttgrtctcatactcctgacctcaggtgatccgcccgcctcagcctcccaaagtgctgggattacaggcatgagccaccgtgcctggcctcacaacccaaatttc

SEQ ID NO: 371642 - DNA, 201 bp, Homo sapiens
tgcagtaggcgagctcaaacaaaaataagcaaagggactaatagttttacgttttttaattctgcagaactagttaagtaagtttggggttaaggatcctktcttactaacacagatgtacctgagcaaacagttttcccattggtgctctggtgtgtcaatcatgtaatctcccctcctagctcctcaggtaggagggtg

SEQ ID NO: 371643 - DNA, 201 bp, Homo sapiens
gagcgcagtaatttgacaccagcctgggcagcatgtcgaaactgcgtctctacaaaaaataccaaaattaaccaggtgtggcggcacatgcctgtaatccyagcttctcgagaagctgaggtgggaggattacctgagccggggaggtcaaggttgcggtgagccgtgatagtgccactgcactcaagcctgggtgacaga

SEQ ID NO: 371644 - DNA, 201 bp, Homo sapiens
ccctcccgccctcccgccgcgcgctcgggatcccgaccagtcctgaccgcacgggggccgcggccacggggcgcaggggccatggtgcgcggcaggatctyccggctctcggtccgggacgtgcgcttccccacgtcgcttgggggccacggcgcggacgccatggtaagcgcggacgccatggtaagcgcggacgccatg

SEQ ID NO: 371645 - DNA, 201 bp, Homo sapiens
cagtaatttgacaccagcctgggcagcatgtcgaaactgcgtctctacaaaaaataccaaaattaaccaggtgtggcggcacatgcctgtaatcccagctyctcgagaagctgaggtgggaggattacctgagccggggaggtcaaggttgcggtgagccgtgatagtgccactgcactcaagcctgggtgacagagtgag

SEQ ID NO: 371646 - DNA, 201 bp, Homo sapiens
gtttgagaccagcctggccaacatggtgaaacctcgtctctactaaaaatacaaaaattagctggtctcgatcttctgacctcgtgatccgcccacctatrgtcccagctactcggagaggctgaggcaggagaatggcgtgaacccaggaggaggagcttgcagtgagccaaaatcgcaccactgcactccagcctgggt

SEQ ID NO: 371647 - DNA, 201 bp, Homo sapiens
cagaccagaccttcatttccccactaatcagacacctcccttgatggtttgcaattcacatgcatgggagtctgtagtttgccatttcgatttttttctamctctcatttagctttaatccgggaatttttgatgattttcatcttggaatttccttcctaaatattaataaatgatttaatcacctgtgggcaataagaa

SEQ ID NO: 371648 - DNA, 201 bp, Homo sapiens
taagaagcagtagcctttgtccagggctaaatacaactcgtttcaagattaaagaacattgggaatttaaaaagttaattgtcagaggaagtacacttctrtagtcttgcagtaggcgagctcaaacaaaaataagcaaagggactaatagttttacgttttttaattctgcagaactagttaagtaagtttggggttaag

SEQ ID NO: 371649 - DNA, 201 bp, Homo sapiens
agatgaggaaagaaagtcaccctacaagtaaaaagtgatctctgtcagccaggctgtttctgctgttaatttcaacaacacatgggtgttactctggtctrtgctataaccgtaatgcttgtgaaacagatcagcaatgactgacttcctggtcagaccaaggggctctctccagtgtgtgaccctgtgctcctttcccac

SEQ ID NO: 371650 - DNA, 201 bp, Homo sapiens
tgggattacaggcatgagccaccatacccaacctcagcatagcttttgagaaaatccatagaagctgtatcacaaacaacctgtatagatctgttagtgcrtataccacagggccagaaaaccttccagaagaggaaggtttcaaagtaaaagctggttcatttcttacttacacatatcaaatttaaaagctaatcagag

SEQ ID NO: 371651 - DNA, 201 bp, Homo sapiens; identical to SEQ ID NO: 80540

SEQ ID NO: 371652 - DNA, 201 bp, Homo sapiens; identical to SEQ ID NO: 80541

SEQ ID NO: 371653 - DNA, 201 bp, Homo sapiens
gcttatttttctgtttagttttccagagtgctggggacagatcctaaaatttcttcacttgttccctcttgcatttcctgttgaagtagctgaaataattstaatgtgtgacaaatacaggggttacagacctgacattcctttttctacttcagcttatactttgcccttatttctgtttgttttagataaagtaagctg

SEQ ID NO: 371654 - DNA, 201 bp, Homo sapiens
ccagagtgctggggacagatcctaaaatttcttcacttgttccctcttgcatttcctgttgaagtagctgaaataattgtaatgtgtgacaaatacagggsttacagacctgacattcctttttctacttcagcttatactttgcccttatttctgtttgttttagataaagtaagctgctaaaagttgaagggctaccag

SEQ ID NO: 371655 - DNA, 201 bp, Homo sapiens
atctcctttggttaaatttctacctattagtgtcagactatattctggttcagtagttctcaaaattttgggaggaaagtcctctcatggtcactgttccraaaaaggtaacatcaaagattttaaaaagatgaaccttggtagtgtagttctgtaacttgattgtagtggttacaagagtctacacgtgctaaaattgca

SEQ ID NO: 371656 - DNA, 201 bp, Homo sapiens
aggaggaggagcttgcagtgagccaaaatcgcaccactgcactccagcctgggtgacagagcgagactccatctcagaaaaaaaaaaaaaattagcagggygcggtgatgtgtgcctgtaatcccagctactcaggaggctgaggcaggagaatggcttgagcctgggaagtggaggttacggtaagccaagtttgcgcca

SEQ ID NO: 371657 - DNA, 201 bp, Homo sapiens
cgccttctgggttcgagagatcctcttgcctcagcctcctgagtagggactacaggcacaaaccaccacacctggctcatttctctgttttcagtagagayggggtttcaccatgttggccaggctggtcttggtcccaaagtcctgggtttacaggcatgagccatcacacccagccctctttttcatttctaaaaagtg

SEQ ID NO: 371658 - DNA, 201 bp, Homo sapiens
aagctgagaagtgatttgttaactgaagtgcagagcttcataatctcctttggttaaatttctacctattagtgtcagactatattctggttcagtagttytcaaaattttgggaggaaagtcctctcatggtcactgttccgaaaaaggtaacatcaaagattttaaaaagatgaaccttggtagtgtagttctgtaact

SEQ ID NO: 371659 - DNA, 201 bp, Homo sapiens
tggtgcagcacctgattatatttgactacatatcagtttctgcaagccttgaaaataggtcagtaatgtggcattaatactttctgtttcagtagggtccytcaatccaggccagagcttgtaaattctgccttcatgaccagaacacactaagaccttgtccgctggcatgtcctataactctcaggcggagttggtttt

SEQ ID NO: 371660 - DNA, 201 bp, Homo sapiens
tctccattattccatgacatagaacaaaacaaaaaatgagtgaattaatctcgaagctttacttcttcattttcccccactggtgtctgaacttttgccartgtattttcagccctgctataaactgctataagtgagatcactccaattttatgcaacagttttctgaacctttggcttgttcaatttgaagctgcttgt

SEQ ID NO: 371661 - DNA, 201 bp, Homo sapiens
gtaatgtggcattaatactttctgtttcagtagggtccctcaatccaggccagagcttgtaaattctgccttcatgaccagaacacactaagaccttgtcygctggcatgtcctataactctcaggcggagttggttttgctttcacagagacccaccaatgaacggtcattttgcctcctaagatagggtctggtagctg

SEQ ID NO: 371662 - DNA, 201 bp, Homo sapiens
ttttgaagtttggacctaaatattgtacttaatgtaaaattaacaaaaaatatttatggccagggtggtggcttatgcctgtaattccagaattttcggargctgaggcaggtggatcacttgaagtcaggagtttgagactagcctggccaacatgatgaaaccccatctctactaataatacaaaaattagctgggtgt

SEQ ID NO: 371663 - DNA, 201 bp, Homo sapiens
aactgggtagtgtgtccagggaaactttctgtgcattaaaaaaaaaaaaaaaaaaaaattcctgtgaatctgtaaaacaaaattaaaaacaaaaagggacraactttcctactaaaatccaacagctaagcattcataccactgtaaactaaaaccataattttattaggccttttaagcgacaagaaataattgaatact

SEQ ID NO: 371664 - DNA, 201 bp, Homo sapiens
ttctctaaggacctcatctcctcctccctgaattggaaagtgctctagaggataaagtactaaatgggcaatctctttatggagaaataatgtgagtagtrttagagatgtaagagaaggtcaggccgggcgcggtggctcactcctgtaatcccagcactttgggaggccaaggcaggcagatcacgaggtcaggaggtc

SEQ ID NO: 371665 - DNA, 201 bp, Homo sapiens
tcagtagggtccctcaatccaggccagagcttgtaaattctgccttcatgaccagaacacactaagaccttgtccgctggcatgtcctataactctcaggyggagttggttttgctttcacagagacccaccaatgaacggtcattttgcctcctaagatagggtctggtagctgactcactttattttttaagtacattg

SEQ ID NO: 371666 - DNA, 201 bp, Homo sapiens
aaaaaattcctgtgaatctgtaaaacaaaattaaaaacaaaaagggacaaactttcctactaaaatccaacagctaagcattcataccactgtaaactaaraccataattttattaggccttttaagcgacaagaaataattgaatactaggcaggatttaaagcatcattaagcccggggactggcctcacatcctacgg

SEQ ID NO: 371667 - DNA, 201 bp, Homo sapiens
taatccttaaataagtttagatttaactaacccaaagtccaggaggatgttcttacaaaaatagctatatcaagggctggcacctagacattaaactgtamtttgaaaataagcaacatgttgcataacttgttggaataattccttgttctgtttaacacttgtcataaattagcagaataaaaatagtcgtgcaacacc

SEQ ID NO: 371668 - DNA, 201 bp, Homo sapiens
gctaatgcttcctagatgcccagctgaggcagtgacaaaatggccctcccaaccctacctgccaaaaaaaccccaagcccctggcagctgctgcagccatrtgaaaaaatacaaacgcttcttgaaaaatagatcacaaaatgtggtgattttaatctattcatctgacttttgaccagaggaacccaaataattctggat

SEQ ID NO: 371669 - DNA, 201 bp, Homo sapiens
gaaattttcatcatcttagaaactgggtcattttatcagagtctagagtcagatatagaaaaagtttgtggctatttctccaatttatatgactaaggtcrggtatctttttcaaagtgtctaattgaaattgaaaaggcagcaatttaaagttgctattgcaagggcagaaaatggtcttaagaaagccagctttcaaat

SEQ ID NO: 371670 - DNA, 201 bp, Homo sapiens
catagccttatgcacaattcttctttatgaatgcattcacatcttctgcctggctttttggagtctccattattccatgacatagaacaaaacaaaaaatkagtgaattaatctcgaagctttacttcttcattttcccccactggtgtctgaacttttgccagtgtattttcagccctgctataaactgctataagtgag

SEQ ID NO: 371671 - DNA, 201 bp, Homo sapiens
acagagctgtgagctgtttctgcttcttctgcaactctaattgtcccttgtttgtaagttgagtactttatgaagccgctgcctttctccatactgcaaaycctacagcacagcccccaaaggttgcataaaactcagcgagcttacaagataatgttaggccattggacccactctctgttaacagcccagactttaaac

SEQ ID NO: 371672 - DNA, 201 bp, Homo sapiens
gtgctaatgcttcctagatgcccagctgaggcagtgacaaaatggccctcccaaccctacctgccaaaaaaaccccaagcccctggcagctgctgcagccrtgtgaaaaaatacaaacgcttcttgaaaaatagatcacaaaatgtggtgattttaatctattcatctgacttttgaccagaggaacccaaataattctgg

SEQ ID NO: 371673 - DNA, 201 bp, Homo sapiens
ttaatctgaaatctacttctgttcctttcttctctgtgaattgcccttgttatttctccttcagctgtccttaccctcagatacgttttccgctgtcggcygcctcttcttcgtgtgctctctcccctcgtggcctcctgcctttctgacagctccttcttcctccactggccccttcttccctctctgaggctcaggcct

SEQ ID NO: 371674 - DNA, 201 bp, Homo sapiens
ttggtctttgataggatcccggctactcaacagaaatgaaggaggaatctgtaaagaaacaccagtatccagatggtgaagtttggaagaaactccttccygctcaagaaaattaagtgctcagccccaacaacttttttctttctgaagtgaaagggcttaaaatttcttggaaatagttttacaaaaatggatttaaaa

SEQ ID NO: 371675 - DNA, 201 bp, Homo sapiens
ggccaaggcaggtggatcgcttgagcccaggagttcgagaccagcctgagcaacatagtgagacctcgtctcaacaaaaaaatacaaaaattagctgggcrtagttgcatgcacctgtggtcccagccactcaggaggctgaggtgggaggatctcttgagtccaggaggtcgaggctgcagtgagctgtaattgtgtcac

SEQ ID NO: 371676 - DNA, 201 bp, Homo sapiens
cgcgcctggcctagatttaattttttcataaaactttcacatttgtttgtttgtgatgttttcaggtgctaatttcttgacctagtatagaagcataaacaagagttcaatcctttttaaatagttgtctgtgctgtgaatgccctcgcccaccatgtgctcaacaaggacctcaaggacattgttggtgacttcagaggc

SEQ ID NO: 371677 - DNA, 201 bp, Homo sapiens
agggaggtgctgtccacgttgggaggagcgcagctggagcatgggccgggacaccgcagaaggagatctgcagagccctggtcaggaacggggctggtggyggcagctcagcagtgctcaccttctcctctgcagatacacagagccctcccgcacgcatgtgttcccctggacatcctttgccagtcttgagccttcaca

SEQ ID NO: 371678 - DNA, 201 bp, Homo sapiens
gcgcctggcctagatttaattttttcataaaactttcacatttgtttgtttgtgatgttttcaggtgctaatttcttgacctagtatagaagcataaacaagagttcaatcctttttaaatagttgtctgtgctgtgaatgccctcgcccaccatgtgctcaacaaggacctcaaggacattgttggtgacttcagaggct

SEQ ID NO: 371679 - DNA, 201 bp, Homo sapiens
attggaaagtgctctagaggataaagtactaaatgggcaatctctttatggagaaataatgtgagtagtgttagagatgtaagagaaggtcaggccgggcrcggtggctcactcctgtaatcccagcactttgggaggccaaggcaggcagatcacgaggtcaggaggtcgagaccatcctggctaacatggtgaaacccc

SEQ ID NO: 371680 - DNA, 201 bp, Homo sapiens
agaccccacaggttaagggctcagtcttacaggactgccctatggcagatgccagtcacaagtccacgttgtcacctgtgcttctgactggctttgcctcmgattagaggttcccacaaaccccgctttgagttgaatcatttggtggaatggctcacggaattcagggaaacactacttatgtttactcatttattataa

SEQ ID NO: 371681 - DNA, 201 bp, Homo sapiens
tgctgccaacactggggattacagttcaacatgagatttgggcagggacacaaatccaaaacaaatccaaaccatatcagcctgcctgtcacagctgttcwataacaggcgatggaagtcaggcagcagagctcggtcacttgccccaagcctcagaactacaaagtggctgacgcagaacctgaacacagattgacctga

SEQ ID NO: 371682 - DNA, 201 bp, Homo sapiens
tttagatgtgattcattatttggccattggccatcaattcagccttcagccccctcgcctccccagctatctgggaataggctaaagtttccaaccccacmatcatgcctttcaggtctttctggtccccagccccgtcctgaagctacgtaggggacctcagcagggctctctcgttcacgtacaaaagacactcctatc

SEQ ID NO: 371683 - DNA, 201 bp, Homo sapiens
acataaaatatagattttaggcttttattgaagaattctgacatcaccaggcccaaattcctccaggtggctggaggtgaaatgtgactgtccccttagaygagacacctgctctccaggttgctggtctctgcccagctagtaaattgcacacacaaaccccacattccaaggtggcatctgcttttcctagggacaggt

SEQ ID NO: 371684 - DNA, 201 bp, Homo sapiens
ttggaaagtgctctagaggataaagtactaaatgggcaatctctttatggagaaataatgtgagtagtgttagagatgtaagagaaggtcaggccgggcgyggtggctcactcctgtaatcccagcactttgggaggccaaggcaggcagatcacgaggtcaggaggtcgagaccatcctggctaacatggtgaaaccccg

SEQ ID NO: 371685 - DNA, 201 bp, Homo sapiens
attcagccttcagccccctcgcctccccagctatctgggaataggctaaagtttccaaccccacaatcatgcctttcaggtctttctggtccccagccccrtcctgaagctacgtaggggacctcagcagggctctctcgttcacgtacaaaagacactcctatcactcaggagatgccaagggttttaggggctgtgtgt

SEQ ID NO: 371686 - DNA, 201 bp, Homo sapiens
gtcatcaagggatgcccaaattttgggacaataataacctccttacttggaaaatgaaatggtaacttcacagtggagaaagcaaatggacactaagttayccaagtggtaaaagttaacaatcctaataataaaacaaaatgacataatcacttatgtagtattgatgccaaaaaatgtattacctgaatctagtcatga

SEQ ID NO: 371687 - DNA, 201 bp, Homo sapiens
tggcggcaggagagactcaggcagtaagtctctcctggcagggagccaaggagtaaaaggcacccacgggctaggatccccctggctcatagggatgcatragagaagtttccccttaggccaggctctttctctaaaggcaggatgtgagtcctcattagaattataggccatcagagttgaaagaggcttgggagattg

SEQ ID NO: 371688 - DNA, 201 bp, Homo sapiens
gagaggaaaacacaggtgtttttcctgctattcttaaaactcttcaataggttagcaactgttttttttaaacttaacctttaggtgggtttctattgctrccttttaattcttgagatgtgtccctggacggaagacctaaatatctttctctctctctctttttttttttttttgagacagagtcttgctctgttgccc

SEQ ID NO: 371689 - DNA, 201 bp, Homo sapiens
gactcaggcagtaagtctctcctggcagggagccaaggagtaaaaggcacccacgggctaggatccccctggctcatagggatgcataagagaagtttccycttaggccaggctctttctctaaaggcaggatgtgagtcctcattagaattataggccatcagagttgaaagaggcttgggagattgtttatttcgggca

SEQ ID NO: 371690 - DNA, 201 bp, Homo sapiens
tgctattcttaaaactcttcaataggttagcaactgttttttttaaacttaacctttaggtgggtttctattgctaccttttaattcttgagatgtgtccytggacggaagacctaaatatctttctctctctctctttttttttttttttgagacagagtcttgctctgttgcccaggctggagtgtagtggtgcgatct

SEQ ID NO: 371691 - DNA, 201 bp, Homo sapiens
tttttttttttgagacagagtcttgctctgttgcccaggctggagtgtagtggtgcgatcttggctcactgcaacctccgccttctgggttcgagagatcytcttgcctcagcctcctgagtagggactacaggcacaaaccaccacacctggctcatttctctgttttcagtagagacggggtttcaccatgttggccag

SEQ ID NO: 371692 - DNA, 201 bp, Homo sapiens
ttcctatgcgttcttaagttggagaggcactgaattcttgttaatgcctcagctaaataaaggcttgaggagtgagaacttgaaggaggcagcatgaagcygcggaaagaggtgttggcatctgatagaactgaaatcacatcttgccttttcccctcatccgctgcaagtacttgctgtgtgatcaattactcaacctct

SEQ ID NO: 371693 - DNA, 201 bp, Homo sapiens
tggcgacagcggccgtcctaaacgcggtgtgggacttgtgggccaagcaggagggaaaggtaacccctctcacaaacgctcaggaggctcctgggagctgyacgacactgactttccctacgcacagaggaaagacagacacactgcagcccccaaaaggaaatacagataattgctttggtgtttttttctcctctgaga

SEQ ID NO: 371694 - DNA, 201 bp, Homo sapiens
gcttgaggagtgagaacttgaaggaggcagcatgaagccgcggaaagaggtgttggcatctgatagaactgaaatcacatcttgccttttcccctcatccsctgcaagtacttgctgtgtgatcaattactcaacctctctgaacttcattttctctcagtagaaataatatgagctttggtcctcctccaagttgccata

SEQ ID NO: 371695 - DNA, 201 bp, Homo sapiens
ttacacatatcaaatttaaaagctaatcagagactaaactctgcaatttgttttcccatattaaagaactgaagagctcagtgtggtaggctggcaagtcrcccttcccgagacagcccaccttcaggcccgtgatgtgcgcaatcatgtacgtgagcagggcgtagctggcgatgttgaaaggcacaccgaggcccatgt

SEQ ID NO: 371696 - DNA, 201 bp, Homo sapiens
ctaaaattgcaaatacacacatacacaagtgcacgtaaaactagcaaaatctgacaactctgaggaatgcaccaatgtgaatgtatacaggatgttacccmagatattatcactgggggaaactgggtagtgtgtccagggaaactttctgtgcattaaaaaaaaaaaaaaaaaaaaattcctgtgaatctgtaaaacaaa

SEQ ID NO: 371697 - DNA, 201 bp, Homo sapiens
tttttttcttttccaagtcaatttcctgccacagccaaaatttctctcgttttttttttttttttttttttttgaggcagagtttcgctcttgtcgcccaractggagtgcgatggcgtgatcttggctggctcactgcaacctctgcctcccaggttcaagcgattctcatacctcagcccccacaagtagctgggatta

SEQ ID NO: 371698 - DNA, 201 bp, Homo sapiens
ttctgtaacttgattgtagtggttacaagagtctacacgtgctaaaattgcaaatacacacatacacaagtgcacgtaaaactagcaaaatctgacaactytgaggaatgcaccaatgtgaatgtatacaggatgttacccaagatattatcactgggggaaactgggtagtgtgtccagggaaactttctgtgcattaaa

SEQ ID NO: 371699 - DNA, 201 bp, Homo sapiens
tgctttcaagggccttttttttcttttccaagtcaatttcctgccacagccaaaatttctctcgttttttttttttttttttttttttgaggcagagtttygctcttgtcgcccagactggagtgcgatggcgtgatcttggctggctcactgcaacctctgcctcccaggttcaagcgattctcatacctcagcccccac

SEQ ID NO: 371700 - DNA, 201 bp, Homo sapiens
tagatttaactaacccaaagtccaggaggatgttcttacaaaaatagctatatcaagggctggcacctagacattaaactgtaatttgaaaataagcaacrtgttgcataacttgttggaataattccttgttctgtttaacacttgtcataaattagcagaataaaaatagtcgtgcaacaccgggggtatctggtatgc

SEQ ID NO: 371701 - DNA, 201 bp, Homo sapiens
gaggaatgggaactcacttgaacctgggagatggaggttgccgtgagcggagatcacaccactgcactccagcctgggcaacagggtgagactgtgtctcaaaaaaaaaaaaaaaataagtctctattacagatgcaagtatttcactctaagtacttatgatatcctgatagagttttgttgttgttgttgtttttaaat

SEQ ID NO: 371702 - DNA, 201 bp, Homo sapiens
gccatggtaagcgcggcttgcggcccgggtccctcccgcccccgactgcagctctgcgggccccgggcagcttcccgacttcgaacccattgcttctgtamagtgggaggcgcgcctgggggagacactcgcttttcatgccttggagcaattgtataagtatccagaaactttccactctcctgggttttttctttgctg

SEQ ID NO: 371703 - DNA, 201 bp, Homo sapiens
gggagaggtctcagcacgaggccccgccgaaatgttggtaagtggtcagccaagtgggccgctcactcccggttcacccactgtgtttctgtcagtgaagyaaacatccccatttggcaggagaagaagctgccggaggtcacactgctagtgattggtggcccaggggtagggcagccttctttcctctgcagttcactg

SEQ ID NO: 371704 - DNA, 201 bp, Homo sapiens
agttcactgctccagaaccatctccagcctcatagctcaccgtggacagccctgcggtgtggcgctgatgtacagagtgatgccaggcgttcatctccccrctgagctcctgctgagtgtttgcctggggccaggtcctccttccgggaagtcattttagctggaaagaacagggtgggggcgggtggcaagggatcagag

SEQ ID NO: 371705 - DNA, 201 bp, Homo sapiens
cgaggccccgccgaaatgttggtaagtggtcagccaagtgggccgctcactcccggttcacccactgtgtttctgtcagtgaagcaaacatccccatttgkcaggagaagaagctgccggaggtcacactgctagtgattggtggcccaggggtagggcagccttctttcctctgcagttcactgctccagaaccatctcc

SEQ ID NO: 371706 - DNA, 201 bp, Homo sapiens
ttccgtcagggtggggagaggtctcagcacgaggccccgccgaaatgttggtaagtggtcagccaagtgggccgctcactcccggttcacccactgtgttyctgtcagtgaagcaaacatccccatttggcaggagaagaagctgccggaggtcacactgctagtgattggtggcccaggggtagggcagccttctttcct

SEQ ID NO: 371707 - DNA, 201 bp, Homo sapiens
acaacagatcttgtgataactatctcgaacagcaccaaggaacgggtgccaaaccattcatgaaggaccacttcccatgatccaatcacctcccagcaggscctgctgccaacactggggattacagttcaacatgagatttgggcagggacacaaatccaaaacaaatccaaaccatatcagcctgcctgtcacagctgt

SEQ ID NO: 371708 - DNA, 201 bp, Homo sapiens
tgtggacaccaactgggtgtcctgctattttactcaattctgacagcacatacctggaactagcctcagaccccacaggttaagggctcagtcttacaggrctgccctatggcagatgccagtcacaagtccacgttgtcacctgtgcttctgactggctttgcctcagattagaggttcccacaaaccccgctttgagtt

SEQ ID NO: 371709 - DNA, 201 bp, Homo sapiens
tcccctcatccgctgcaagtacttgctgtgtgatcaattactcaacctctctgaacttcattttctctcagtagaaataatatgagctttggtcctcctcmaagttgccatatctcagaaggaccagcacagggcaggattcagagcagctgctgtaagtgctgtttgccctccctctgcatacccgggggaggctgcagc

SEQ ID NO: 371710 - DNA, 201 bp, Homo sapiens
ggctgaggtgggtggatcacctgaggtcagaagttcaaaaccagcctggccaacatggtgaaaccccgtctctactaaaaatacaaaaaattatctgggcrtggtaatgcgtatctgtagtcccagccactcaggaggctgaggcaggagaatcacttgaacccaggaggcaggggttgcaatgagccgagatcacgccac

SEQ ID NO: 371711 - DNA, 201 bp, Homo sapiens
ggatcatgtagttgaagcctccagctggtacagaagagaacagcaggtgcctgagaatgtgcggcactctgcaagctggggctctttgcaaagcagcaggrggacctcagccaaggaggcgcacagggagggtaggctgctgttcgagggggcagatgctggcctccccgtggtggtgtcccctcctccacctgccagtgc

SEQ ID NO: 371712 - DNA, 201 bp, Homo sapiens
taatgcgtatctgtagtcccagccactcaggaggctgaggcaggagaatcacttgaacccaggaggcaggggttgcaatgagccgagatcacgccactgcmctccaacctgggtgacagaacaagagtccgtctcaaaaaacaacaaaaaaattattttggatccaagccctcgttctgaaagtacacaagcaaatgcaaa

SEQ ID NO: 371713 - DNA, 201 bp, Homo sapiens
tggtacagaagagaacagcaggtgcctgagaatgtgcggcactctgcaagctggggctctttgcaaagcagcagggggacctcagccaaggaggcgcacarggagggtaggctgctgttcgagggggcagatgctggcctccccgtggtggtgtcccctcctccacctgccagtgcccacactgaggccagcaacacactc

SEQ ID NO: 371714 - DNA, 201 bp, Homo sapiens
cttggtgaggcactttccattctttgagggctttgagtattaggtgggtcttttcttctcttttttttttttgagatgaagtttcactctcgtcacccagrctggagtgcagtggcgcaatctcggctcagtgcaagctccacctcccggattcaagccattctcctgcctcagcctccctagcagctgggattacagaca

SEQ ID NO: 371715 - DNA, 201 bp, Homo sapiens
gagtgccctcctctccctccaggccacctcctttccacactgctcatctgcacttctcccttctgactctcgcctgtgcaggtaaagacctctggccatcmtaagaccttctctggatgaacctcgatggttgatgaccctgcatcctgaaacagggcaggatgcagagggaccatcatctcttttgacccagtcactgtg

SEQ ID NO: 371716 - DNA, 201 bp, Homo sapiens
gagggggcagatgctggcctccccgtggtggtgtcccctcctccacctgccagtgcccacactgaggccagcaacacactcttctgacagcagagtcatarggtgtggacatagaggcccatgtctcaagagaacagctggacatccacagagattaaggagctccctacaagtgtctggatgtggtgtaaaggagacctc

SEQ ID NO: 371717 - DNA, 201 bp, Homo sapiens
gggtggcatctagatggagattggaccagagcccagggccagcgagcacttctcatggcccagcccagggcactgctggacatccagtggctcctcaagcrattcacggctcctcctaaagactgtacctggagccagagtccccgtctcagcagctgctctctggctctttttgttagggccgtgtgctgggcctcagca

SEQ ID NO: 371718 - DNA, 201 bp, Homo sapiens
gtattaggtgggtcttttcttctcttttttttttttgagatgaagtttcactctcgtcacccagactggagtgcagtggcgcaatctcggctcagtgcaasctccacctcccggattcaagccattctcctgcctcagcctccctagcagctgggattacagacacccgccaccacacctggctaatttttgtatttttaa

SEQ ID NO: 371719 - DNA, 201 bp, Homo sapiens
gacagaccatccctgtggccttcctctcactgagttaattcaagacaaagctctcctttgtaaaccagaccctttccattcagtctatcacagtgtggctyactcggcaccccttttcagccccgctctcctcttcagttctcactgtggcttttttgttcttaattccttttcatggcccggcaaaaacggagttaatta

SEQ ID NO: 371720 - DNA, 201 bp, Homo sapiens
tacctgagcaaacagttttcccattggtgctctggtgtgtcaatcatgtaatctcccctcctagctcctcaggtaggagggtgtcagggggccattactgmagaaatgttggaacttcagctgagataaatgtaaggatcagtcatttctgatttgtatttttataaaccagttcttacgtgtaaaatattttcataaagt

SEQ ID NO: 371721 - DNA, 201 bp, Homo sapiens
aatagagacagggtttcgctatgttgatcaggctggtcctgaactcctgacctcaggtgatccgcctgcctcagcctcccaaagtgctgggattataggcktgagccactgcacccagccaggtgggtctttaatatcagcaaccctttgcttccatgtaatttccagccagaggtcccagttcccaagagccaggctgtt

SEQ ID NO: 371722 - DNA, 201 bp, Homo sapiens
gctcctcaggtaggagggtgtcagggggccattactgaagaaatgttggaacttcagctgagataaatgtaaggatcagtcatttctgatttgtatttttrtaaaccagttcttacgtgtaaaatattttcataaagtcacagtaagatgtttttatgaggctttggaggcttttttgcataagttaaaatagaaattttg

SEQ ID NO: 371723 - DNA, 201 bp, Homo sapiens
ttttctctcagtagaaataatatgagctttggtcctcctccaagttgccatatctcagaaggaccagcacagggcaggattcagagcagctgctgtaagtbctgtttgccctccctctgcatacccgggggaggctgcagcagtgtatctggtgagtcagagaaggctgtggggagatttaaagggtctcttcccagcaca

SEQ ID NO: 371724 - DNA, 201 bp, Homo sapiens
aaatgtaaggatcagtcatttctgatttgtatttttataaaccagttcttacgtgtaaaatattttcataaagtcacagtaagatgtttttatgaggcttyggaggcttttttgcataagttaaaatagaaattttgagttcttgacccaggatcactatttatacatgaattaatgctgctttttttttttaatgaagtc

SEQ ID NO: 371725 - DNA, 201 bp, Homo sapiens
tgccatatctcagaaggaccagcacagggcaggattcagagcagctgctgtaagtgctgtttgccctccctctgcatacccgggggaggctgcagcagtgtatctggtgagtcagagaaggctgtggggagatttaaagggtctcttcccagcacaggaagcctggcacccagagcctaaggccagccaccctctctggag

SEQ ID NO: 371726 - DNA, 201 bp, Homo sapiens
gccatatctcagaaggaccagcacagggcaggattcagagcagctgctgtaagtgctgtttgccctccctctgcatacccgggggaggctgcagcagtgtatctggtgagtcagagaaggctgtggggagatttaaagggtctcttcccagcacaggaagcctggcacccagagcctaaggccagccaccctctctggagc

SEQ ID NO: 371727 - DNA, 201 bp, Homo sapiens
cctaggtgagtggattgccggagctcaggagtacaagatcagcctggcaacatggaaaaaccccatctgtaccgaaaaatacaagaaaaaaaagtgttagsattatatggctcatgcctataatcctaacactttgggaggctgaagcaggtggatcacttgaggccaggagtttgggaccagcctgggctacatagcaag

SEQ ID NO: 371728 - DNA, 201 bp, Homo sapiens
tttattatggaaagaactggcacagttacatttgccagtggcaacatccttaaaaattaataactgataggtcacggacagatttttgacctagttccttyttcttttagagcaaaaagaacttttacctcggcatccagcccaacccctaaagactgacaatatccttcgagctcctttgaaagcaccctaaacagccat

SEQ ID NO: 371729 - DNA, 201 bp, Homo sapiens
gtcacggacagatttttgacctagttcctttttcttttagagcaaaaagaacttttacctcggcatccagcccaacccctaaagactgacaatatccttcragctcctttgaaagcaccctaaacagccatttccattttaatagttggatgcggattgtacccttcaatctgaaagtcttcagctttgaagtcatcaatt

SEQ ID NO: 371730 - DNA, 201 bp, Homo sapiens
gggtttgacatcctagtaatttgtggctgggtgtgtgtgtgcagggccggatcaggagaacagctggactctccaggggaaacagcttagctacaggcacwtccaattccgaagggccctggaaagtgcaaaatgttgacggcgctgtgttttcacagagaagcaaatgctggcacaaggataccctgcttacacgacatc

SEQ ID NO: 371731 - DNA, 201 bp, Homo sapiens
atggtctcagcctaacctgcagattgaggtctgaggccacccactgagctggaaggaagaggattttttttttttcatggatttttcctgccttaaggaaraggattttggaatcaacaaagacatgaggccaggtgcagtggctcacacctgtaatcccaacactttgggaggccgaggcgggaggatcatctgaggtca

SEQ ID NO: 371732 - DNA, 201 bp, Homo sapiens
ctggctttttggagtctccattattccatgacatagaacaaaacaaaaaatgagtgaattaatctcgaagctttacttcttcattttcccccactggtgtstgaacttttgccagtgtattttcagccctgctataaactgctataagtgagatcactccaattttatgcaacagttttctgaacctttggcttgttcaat

SEQ ID NO: 371733 - DNA, 201 bp, Homo sapiens
aagactgcctatataatggcgcagtatatataatcccataagcttataatggagctgaaaaactcattgcccagtgacgttgtagagattgtaatgtggtrcaacgcattacctttcctatgtttaagtatgtttagatactggccattgtgttccaattgcctgcagcgttcagaacagtagcatgctgtacaggtttgt

SEQ ID NO: 371734 - DNA, 201 bp, Homo sapiens
ccccattttgtgttgatcttacacctttaactctgatggagcagtcttggttccagttctaggagggacaccttgatgcatcccacataaattcatgggtygtactggaggtgtggagtcggggactcagggaccagttctctgtttctctcagcaaatcagcacatgatctacattatgtgggatactctgccaaagcct

SEQ ID NO: 371735 - DNA, 201 bp, Homo sapiens
tcgctggagagaacagccgagatatgtgaaacaaagaccggaggatactgggccagggcactgaatgccaagcacagtagaaaagttcattgaggagaacrttgggtgtgggctgggacgagggagatggccagagctgactccataaggaaagctaagcctcaggtgagggaagggtgagcaggagccatggagcgacca

SEQ ID NO: 371736 - DNA, 201 bp, Homo sapiens
agtccattgagacagagggtgtgtgggaggtgaggaatgggcagggagaaacccaggcagggatgggagcgaggaggcttttccaggaatctgagagagakaaagggagagggcagcttgaatagagcagattcaggaaatattgaaaaggaggaaaaacatttggcccctagtctgccatatatgcttaaaatggtagaa

SEQ ID NO: 371737 - DNA, 201 bp, Homo sapiens
aatccattctgagcatactgtcctctggttttcatagtgtcctgggagagagctcttatcacttagcacattctgtagagatgtccatttctccaagcacrataagatcagggatgaggggctgtcccttaagctgggcacagccatcacctggcttccaagaaggatagtggtacacagagagccagggcctaggaggga

SEQ ID NO: 371738 - DNA, 201 bp, Homo sapiens
tattgaaaaggaggaaaaacatttggcccctagtctgccatatatgcttaaaatggtagaacaaataagtcaaatggcctttcctcctcccccttcctccrtttctccctttctcttctctttggagataaataaccaagagtacttaaattagaaattttaagaagcataaaatgttggcttgaaaaggtgccttagaga

SEQ ID NO: 371739 - DNA, 201 bp, Homo sapiens
gagtccaggtggcaggtgacggaggtagtgttcaggggccaggtgagaggacagagagcagcagggctgtgttcaggtgcagagtccagtacctcaccagstgaggactctaccaggtgagcaatggtctcagcctaacctgcagattgaggtctgaggccacccactgagctggaaggaagaggattttttttttttcat

SEQ ID NO: 371740 - DNA, 201 bp, Homo sapiens
ggtagtgttcaggggccaggtgagaggacagagagcagcagggctgtgttcaggtgcagagtccagtacctcaccaggtgaggactctaccaggtgagcartggtctcagcctaacctgcagattgaggtctgaggccacccactgagctggaaggaagaggattttttttttttcatggatttttcctgccttaaggaag

SEQ ID NO: 371741 - DNA, 201 bp, Homo sapiens
cacaagagaaaaccccccgggtttagttgccaagaagctgctttcaagggccttttttttcttttccaagtcaatttcctgccacagccaaaatttctctygttttttttttttttttttttttttgaggcagagtttcgctcttgtcgcccagactggagtgcgatggcgtgatcttggctggctcactgcaacctctgc

SEQ ID NO: 371742 - DNA, 201 bp, Homo sapiens
tctcaaagacagtaccaatgggatagtgctaaaccattcaggagaaatccacctccaagatctaataatcacctcccaccaggccccacctccaacactgsggattacacttcaacatgaaatttgtgcagaatgtctaaaccatctcagggggtaacttcactctgtccaaaaggctcagggaaggcttcagagcagaag

SEQ ID NO: 371743 - DNA, 201 bp, Homo sapiens
agcaattcttatgcctcagcctcccgagtagctgggattacaggcacacaccaccacgcccggctagtttttatatttttagtaaagatgaggtttcaccrtgtttggtcaggccggtctcctgacttcaaatgatctgcccaccttggcctctcaaagtgctaagattataggcatgaaccaccactctgagccaggcta

SEQ ID NO: 371744 - DNA, 201 bp, Homo sapiens
cctagggtgtgtgagtatgttgaccacctgcatgagcatttcaagtatcccgtgatgatccagcgggcttcctacatgcctcccaaggtaagctgtggccygagggcccctgtagaagagatgctgccagccactgccacgcctgtctcgtgaactagactgtggagcaccaagctttgactcctgtttgtttgcaatatc

SEQ ID NO: 371745 - DNA, 201 bp, Homo sapiens
agctacaaggatgcttttcacctgcctttcacccggggccactgtcgagctttgacaacctgtagtgggcgagtaaccaagggcaatgagagggaggagayatgagttcccatagcaaaaaaggctcattgtgatgtgcacagcacgtctactcgcttttcaatatatatatgtatatatttttgagacagagtctcactc

SEQ ID NO: 371746 - DNA, 201 bp, Homo sapiens
ccccagggagcacagggcacatgccagggacaggctgccacgtggggctggattatggggtctgtccactcagaggatgcagccagtcagagtgagccacygcagcttctccgatgaaagaacggcatagtggccaggcatagtggctcacacctgtaaccccagcactttgggaggccgaggtgggtggatcacctgagg

SEQ ID NO: 371747 - DNA, 201 bp, Homo sapiens
ccatatctcagaaggaccagcacagggcaggattcagagcagctgctgtaagtgctgtttgccctccctctgcatacccgggggaggctgcagcagtgtatctggtgagtcagagaaggctgtggggagatttaaagggtctcttcccagcacaggaagcctggcacccagagcctaaggccagccaccctctctggagca

SEQ ID NO: 371748 - DNA, 201 bp, Homo sapiens
catatctcagaaggaccagcacagggcaggattcagagcagctgctgtaagtgctgtttgccctccctctgcatacccgggggaggctgcagcagtgtatctggtgagtcagagaaggctgtggggagatttaaagggtctcttcccagcacaggaagcctggcacccagagcctaaggccagccaccctctctggagcat

SEQ ID NO: 371749 - DNA, 201 bp, Homo sapiens
tagcactttgggatgcctaggtgagtggattgccggagctcaggagtacaagatcagcctggcaacatggaaaaaccccatctgtaccgaaaaatacaagaaaaaaaagtgttagcattatatggctcatgcctataatcctaacactttgggaggctgaagcaggtggatcacttgaggccaggagtttgggaccagcct

SEQ ID NO: 371750 - DNA, 201 bp, Homo sapiens
aataggctaaagtttccaaccccacaatcatgcctttcaggtctttctggtccccagccccgtcctgaagctacgtaggggacctcagcagggctctctcrttcacgtacaaaagacactcctatcactcaggagatgccaagggttttaggggctgtgtgttgtgtgttaggaaataggggggcagcgatgggggcagag

SEQ ID NO: 371751 - DNA, 201 bp, Homo sapiens
gaggctgaggcaggagaatggcttgagcctgggaagtggaggttacggtaagccaagtttgcgccattgcactccagcctgggcgacagagcaatactccwtctcaaaaaaaaaaaaaaaaaaaaacacaacagcatagtgacagctgaagcacagataatgtgactggtggctacatgtagagtccattgagacagaggg

SEQ ID NO: 371752 - DNA, 201 bp, Homo sapiens
cctcctctggctctggaatcagtggagttccaacccagtctctaccactttctagctttgtgatccaggaacagttcaaacccggcacacagttttatcattttttataaaatggggataacgctggctcctctcccattggattgagaccaggaatcatttaagtcagtgttttgcacagcacctgacaggtactcagag

SEQ ID NO: 371753 - DNA, 201 bp, Homo sapiens
agtggctcacacctgtaatcccaacactttgggaggccgaggcgggaggatcatctgaggtcaggagtttgagaccagcctggccaacatggcaaaacccygactctattaaaaatacaaaaattagccagcatggtggcgtgcacctctaatcccagctactcaggaggctgaggcacgagaatcgcttcagcctggggg

SEQ ID NO: 371754 - DNA, 201 bp, Homo sapiens
tcccaacactttgggaggccgaggcgggaggatcatctgaggtcaggagtttgagaccagcctggccaacatggcaaaaccctgactctattaaaaatacaaaaattagccagcatggtggcgtgcacctctaatcccagctactcaggaggctgaggcacgagaatcgcttcagcctggggggtggaggttgcggtgagc

SEQ ID NO: 371755 - DNA, 201 bp, Homo sapiens
gagtttgagaccagcctggccaacatggcaaaaccctgactctattaaaaatacaaaaattagccagcatggtggcgtgcacctctaatcccagctactcrggaggctgaggcacgagaatcgcttcagcctggggggtggaggttgcggtgagctaagatcatgccactgcactccagcttgggtgacagagcaagactc

SEQ ID NO: 371756 - DNA, 201 bp, Homo sapiens
  misc_feature (1)...(201): n = A,T,C or G
cttgtggcacggcccctgtggcattgtctgtcctcatgtgacatcattctcatggttcttttcgggtttctcacactggcattgtttcggcggggaactcntctcctgcagcacacggaccctgactactcggctgcctatgtcgtcatagaaactgatgcagaagatggaatcaaggggtgtggaattaccttcactctg

SEQ ID NO: 371757 - DNA, 201 bp, Homo sapiens
tggcttacagttctgcaggctgcacgggaagcatagcggcttctgctcagcttctggaaacttacaatcatgatggaaggtgaagggggaacaagcacttsttatggccaagagcaggaggaagagagagtgaggggggaaggtgctacacacttttaaacaacagatcttgtgataactatctcgaacagcaccaaggaa

SEQ ID NO: 371758 - DNA, 201 bp, Homo sapiens
ggctgcacgggaagcatagcggcttctgctcagcttctggaaacttacaatcatgatggaaggtgaagggggaacaagcacttcttatggccaagagcagraggaagagagagtgaggggggaaggtgctacacacttttaaacaacagatcttgtgataactatctcgaacagcaccaaggaacgggtgccaaaccattc

SEQ ID NO: 371759 - DNA, 201 bp, Homo sapiens
atctgacaactctgaggaatgcaccaatgtgaatgtatacaggatgttacccaagatattatcactgggggaaactgggtagtgtgtccagggaaactttytgtgcattaaaaaaaaaaaaaaaaaaaaattcctgtgaatctgtaaaacaaaattaaaaacaaaaagggacaaactttcctactaaaatccaacagctaa

SEQ ID NO: 371760 - DNA, 201 bp, Homo sapiens
caccgaacctggcccagaactcttagaagtagaatctcagggttgaaagagtttttaggattttcgacagttatggtagagtattattggtcactataagwtgttagtgggaatggaactactggctgttttccaactgactgttccgtcagggtggggagaggtctcagcacgaggccccgccgaaatgttggtaagtgg

SEQ ID NO: 371761 - DNA, 201 bp, Homo sapiens
acaggcatgagccaccatacccaacctcagcatagcttttgagaaaatccatagaagctgtatcacaaacaacctgtatagatctgttagtgcgtataccrcagggccagaaaaccttccagaagaggaaggtttcaaagtaaaagctggttcatttcttacttacacatatcaaatttaaaagctaatcagagactaaac

SEQ ID NO: 371762 - DNA, 201 bp, Homo sapiens
agttgccatatctcagaaggaccagcacagggcaggattcagagcagctgctgtaagtgctgtttgccctccctctgcatacccgggggaggctgcagcartgtatctggtgagtcagagaaggctgtggggagatttaaagggtctcttcccagcacaggaagcctggcacccagagcctaaggccagccaccctctctg

SEQ ID NO: 371763 - DNA, 201 bp, Homo sapiens
caaatgattctcgtacctcagcctctggagtagctgtgattacaggtgtgcaccaccacacctggctaatttttgtatttttggtagagacggggtttcamcatgttgtccaggctggtctcgaactcctgagctcaggtgatccacctgcctcggcctcccaaagtgccggattacaggcatgagccactactccgggct

SEQ ID NO: 371764 - DNA, 201 bp, Homo sapiens
ggggttctttcaacctcttggattccaagcgcacatgatgattcttctgtcgtcagggttggttttgatggtgtcaatcactctttgcagttggtcaactmcctgtcctgaataatctgtagaattgtcaaaaagagaggacaggtacatacattaatcacacatgtcatgagatggccttagaggtcatctattacagtc

SEQ ID NO: 371765 - DNA, 201 bp, Homo sapiens
ttacaagagtctacacgtgctaaaattgcaaatacacacatacacaagtgcacgtaaaactagcaaaatctgacaactctgaggaatgcaccaatgtgaawgtatacaggatgttacccaagatattatcactgggggaaactgggtagtgtgtccagggaaactttctgtgcattaaaaaaaaaaaaaaaaaaaaattcc

SEQ ID NO: 371766 - DNA, 201 bp, Homo sapiens
ttgcactcctgcctaggtgacagagcaagactctgtctcaaaaaagaaaaaaaaaaaaaatatatatatatatacatacattgctcttgttgaaacatttkggatctttcaggaggacattccttttctccattcagagccctttgttttctttggggtatagcaacagttccttctatgggagctcttgtggcacggccc

SEQ ID NO: 371767 - DNA, 201 bp, Homo sapiens
tggcagctcagcagtgctcaccttctcctctgcagatacacagagccctcccgcacgcatgtgttcccctggacatcctttgccagtcttgagccttcacrtggcttaacagcagggccgtttcctccttcagctataaatgtttttaaacattaggagttgcagttcaaaacttaggaaaataacaccaggctgccttct

SEQ ID NO: 371768 - DNA, 201 bp, Homo sapiens
gttcttaagttggagaggcactgaattcttgttaatgcctcagctaaataaaggcttgaggagtgagaacttgaaggaggcagcatgaagccgcggaaagwggtgttggcatctgatagaactgaaatcacatcttgccttttcccctcatccgctgcaagtacttgctgtgtgatcaattactcaacctctctgaacttc

SEQ ID NO: 371769 - DNA, 201 bp, Homo sapiens
gcctcatgcccagcgagaacaaagaagaaatacagtctgggcttcctgacggccactgatgaataattattggcatagagtggctgcgttgccaggtttasagatcctgaaggccaaggctgactcttctgttggtgttattttcaattctatttccagtgccacaatagagtgatatttaagcaactcctacaggcgaag

SEQ ID NO: 371770 - DNA, 201 bp, Homo sapiens; identical to SEQ ID NO: 80546

SEQ ID NO: 371771 - DNA, 201 bp, Homo sapiens; identical to SEQ ID NO: 80535

SEQ ID NO: 371772 - DNA, 201 bp, Homo sapiens
acagtgaacagaaagggatgaaagccaggattcctgggatgaacagacagtggcaattaggatgtgaagacaggtcacaacctattactatgtctaaaaaygaccagagcagagagccagagagaataagcctgaagtcacctccactcaaaagcagccaaactccctcaaaggagtaacttttaaaacctggatctaacc

SEQ ID NO: 371773 - DNA, 201 bp, Homo sapiens
caactcatttctgtaagactgatgatctaaatgactcaagactgaatttagctgaataaaatgttctactaaggagatgaggtcctgagatttgggtcctragagctatctcttctctaaggacctcatctcctcctccctgaattggaaagtgctctagaggataaagtactaaatgggcaatctctttatggagaaata

SEQ ID NO: 371774 - DNA, 201 bp, Homo sapiens
cacaacctattactatgtctaaaaacgaccagagcagagagccagagagaataagcctgaagtcacctccactcaaaagcagccaaactccctcaaaggartaacttttaaaacctggatctaacctggaaggggctaaaaagtgtctggttctgagtttttttccttaaggctcatgaagcagatgaacttacattttta

SEQ ID NO: 371775 - DNA, 201 bp, Homo sapiens
caccatgcccatcctagagatgtgtttataattttaaagtaaaacattttattcagttaaattcaggcttgagtcatttagatcatcagtattttgaggtraacaactcatttctgtaagactgatgatctaaatgactcaagactgaatttagctgaataaaatgttctactaaggagatgaggtcctgagatttgggtc

SEQ ID NO: 371776 - DNA, 201 bp, Homo sapiens
caaagtgctggcattacaggagtgagcgccaggtccaagaaatcctttcaaagtaaaataccacaggacatggtggctcacacctgtaatcccaacacttmaggaggccgaggtgggaggattgcttgagcccagagttccagaacctccccacccactgccccatgcaacatagcaagaccttgtcactacaaaaaattt

SEQ ID NO: 371777 - DNA, 201 bp, Homo sapiens
ttttaaaactatgtacaagttttacagagagaggatatattaggctgttctttttttttttttttttcttttctttttggaaacaagagtcttgctctgtygcccagcctggagtgcagtggcgcaatctcgctcactacaacctccacctcccgggttcaagcaattcttatgcctcagcctcccgagtagctgggatta

SEQ ID NO: 371778 - DNA, 201 bp, Homo sapiens
aattgcttgaacctgggagttggagtttgcagtgagccgagattgcgccgctgcactccagcctgggtgaaaaagcgagactccatcccaaaaaaaaaaaraaaaaagatacagaagacagaatcccacatacaaggagcacacgaacttattggggaagtagacataaaagaaatgatcatagtgcagtctgagaattac

SEQ ID NO: 371779 - DNA, 201 bp, Homo sapiens
caacagacttttgaagtttggacctaaatattgtacttaatgtaaaattaacaaaaaatatttatggccagggtggtggcttatgcctgtaattccagaaytttcggaggctgaggcaggtggatcacttgaagtcaggagtttgagactagcctggccaacatgatgaaaccccatctctactaataatacaaaaattag

SEQ ID NO: 371780 - DNA, 201 bp, Homo sapiens
ccagcctggccgacagagaaagactccatctcaaaaaaaaaagaaaaggaaaaacatttgcacttcaattctccttcaagttaaaatgagttaaaatgccyccttttggacaatcccctggcttgaatgtggctcttccctctctggtactggtgcttagtacctcacagcacctgacatgttaagtgcccatggttgctg

SEQ ID NO: 371781 - DNA, 201 bp, Homo sapiens
gttaaaatgagttaaaatgcccccttttggacaatcccctggcttgaatgtggctcttccctctctggtactggtgcttagtacctcacagcacctgacawgttaagtgcccatggttgctgaggcagatgcctgccttgtcctgcccacctgcccaccacttctccctaaactgaagccccacatttggagcagtcatct

SEQ ID NO: 371782 - DNA, 201 bp, Homo sapiens
atgcctgccttgtcctgcccacctgcccaccacttctccctaaactgaagccccacatttggagcagtcatctttatcttggacacagcattgagcagatrcctgttccacagtcaaccttttatcaagagaaggtaccaaacccaaaagtataacatctaattcttacctgaattttcagtggctcgatgtgattcaggt

SEQ ID NO: 371783 - DNA, 201 bp, Homo sapiens
tagtgtagcttttccatttttttgtagcaacagcatcttgttatgttgcccaggctggtattgaactccagacctcaagcaattgctcctgtctcagtctyccaaagtgctgggattacaggcatgagccaccatacccaacctcagcatagcttttgagaaaatccatagaagctgtatcacaaacaacctgtatagatc

SEQ ID NO: 371784 - DNA, 201 bp, Homo sapiens
gaactccagacctcaagcaattgctcctgtctcagtctcccaaagtgctgggattacaggcatgagccaccatacccaacctcagcatagcttttgagaaratccatagaagctgtatcacaaacaacctgtatagatctgttagtgcgtataccacagggccagaaaaccttccagaagaggaaggtttcaaagtaaaag

SEQ ID NO: 371785 - DNA, 201 bp, Homo sapiens
agctgtatcacaaacaacctgtatagatctgttagtgcgtataccacagggccagaaaaccttccagaagaggaaggtttcaaagtaaaagctggttcatktcttacttacacatatcaaatttaaaagctaatcagagactaaactctgcaatttgttttcccatattaaagaactgaagagctcagtgtggtaggctgg

SEQ ID NO: 371786 - DNA, 201 bp, Homo sapiens
attaaaagtctctattacatggccaggcacagtggctcatgcctgaaatcccaacactgggacgccagggtgggcagatcacttgaggccaacttgagttygagactagcctggccaacatagtgaaaccccgtctctgctaaaaatacaaaaattcgcgcgcctgtggtcccagctctggggctgaggaatgggaactca

SEQ ID NO: 371787 - DNA, 201 bp, Homo sapiens
taatgttacaattgtttctgtaaatgaaatggatatcattgatgacatgccttttgatgatcagtaaatatattcaggactatctgttgatcactatagcratgataaagcaaaaagccaataaaatatgacattccttttctgatatctgacgtaacagatggctgtgctcatgcaggcagggtggcatgaggggaagca

SEQ ID NO: 371788 - DNA, 201 bp, Homo sapiens
taaatgtaatacgtgatcccagatgggatatggattagggtaaaataaaatacattattggaaaaaactggtgacatttgattatggactggcctttagayagcaatattctatcaatgttatattccctgagtgtgattattgtactacggttatgtaagaaaatatccttgttttcaggaactatacactgatgtattt

SEQ ID NO: 371789 - DNA, 201 bp, Homo sapiens
ctcagcctcccgagtagctgggattacaggcacacaccaccacgcccggctagtttttatatttttagtaaagatgaggtttcaccatgtttggtcaggcyggtctcctgacttcaaatgatctgcccaccttggcctctcaaagtgctaagattataggcatgaaccaccactctgagccaggctatttttgcattgcta

SEQ ID NO: 371790 - DNA, 201 bp, Homo sapiens
ggtggcatgtgcctgtaatcccagctacctgggaggctgaggcagaagaattgcttgaacccgggaggtggaggttgcagtgagctgagatcgcaccacgrcacactccagcctggccgacagagaaagactccatctcaaaaaaaaaagaaaaggaaaaacatttgcacttcaattctccttcaagttaaaatgagttaa

SEQ ID NO: 371791 - DNA, 201 bp, Homo sapiens
ttcttccagtgctcctcgcaaacttaggctctaaacccatcagcgattcttgtcacaatttcactgacaaaatctactttatccttgtctcacagagagtrttgtatcttatgtagaatatagtattccatatactttccaactaacagaggaccatggattcctttctatcacctcagcagcatgtttccaacacttcca

SEQ ID NO: 371792 - DNA, 201 bp, Homo sapiens
catctaaatcatttgtatagctgaaaggaacctcatttggtgattttattttttgggtggggagtatggaatgtattttattgttctgcatctgggtttgsttccttagatgtcttggttcttggatggaggtgggtgtgtcccacctccctcagttgtggtcccatggacctgttcggattgttttccaggtacaaagtg

SEQ ID NO: 371793 - DNA, 201 bp, Homo sapiens
gtttccaacacttccacctaaaattactttagagtttagcagctcaacacacgactgacttggaaacatcaggaaacctctgtaatgattacaccaccttrtactttgctcccatttctggtctctggattttaatccctttccttccttctgagatggaactggaagctgagaagtgatttgttaactgaagtgcagagc

SEQ ID NO: 371794 - DNA, 201 bp, Homo sapiens
tcttttccttgcttaatctaagcatattattagagaagtcacaccatgctgaagctaatgagggcaaaatggtagtccatagattattttaaaataacccyttaaggttataaaagtttaaaaaaaaaaaaaaaaaactctatcctaaatggtcattatattttgaggataagatgcagttaaaatgagaaaaatagggca

SEQ ID NO: 371795 - DNA, 201 bp, Homo sapiens
tttacgactcacattttgctggaaatggtagaatgcataataggcaatagcagcaaaatgattttgttgggttcccgccagtggaaaccctagagcacagygctcgctggcttcctctgtaccctgaacgcgacggggttggcgctgagggagaacgggaagcccggggctgggagttttgagtggtgatcccgcttccac

SEQ ID NO: 371796 - DNA, 201 bp, Homo sapiens
catgcccgttctataagcaggtcttctcaaatgtaacctcctcaagggcagacgtatctgtaaccccctagcaagctgcaccagctctgacacgtacttgrtgctcagcgatgcatcacactgatttcctgccactggactgtgataccagactcagggctcccagccatcacatacagctccctcagccacgacacccca

SEQ ID NO: 371797 - DNA, 201 bp, Homo sapiens
tgatggacctgactttcccagttggcggcaggagagactcaggcagtaagtctctcctggcagggagccaaggagtaaaaggcacccacgggctaggatcmccctggctcatagggatgcataagagaagtttccccttaggccaggctctttctctaaaggcaggatgtgagtcctcattagaattataggccatcagag

SEQ ID NO: 371798 - DNA, 201 bp, Homo sapiens
cttccctcccctgcccccgtctagagcggtgtttcccaaatacagtgggttctgtgcagggttttcagggagcctgttccccactgggtcctcactgcccstcgtagtccactgatgagattggccgcgctagaaaagcagagttgtatgggtatgtagtgaatgtgtgaaagtatgctgggaagtgaggaacggcaatgt

SEQ ID NO: 371799 - DNA, 201 bp, Homo sapiens
cgagctttgacaacctgtagtgggcgagtaaccaagggcaatgagagggaggagacatgagttcccatagcaaaaaaggctcattgtgatgtgcacagcamgtctactcgcttttcaatatatatatgtatatatttttgagacagagtctcactctgtcgcccaggctggagtgcagtggcacaatctcagctcactgca

SEQ ID NO: 371800 - DNA, 201 bp, Homo sapiens
atttgcaccatcagcgctctcagtagttgtagaaaaaaatcttggcccattgagagattttaaattgttaagcatataaaagaagtgtgtgagtttgtgartgtgtgtatgtgcgaatggcaagggaaccttccttgaactttcaatggacactgcccaggtggctgctgttactgctcttcacagggctggcggtcagtt

SEQ ID NO: 371801 - DNA, 201 bp, Homo sapiens
tctcctgcctcagcctcccgagaagctaggattacaggctcccaccaccatgcccagccaatttttgtatttttagtagagacagggtttcaccatgttgrccaggctggtctcgaactcctgacctcaaatgatccgcctgtctcagcctcgcaaagtgctgggattacaggtgtgagccatcacacccggccttttcaa

SEQ ID NO: 371802 - DNA, 201 bp, Homo sapiens
cgagactagcctggccaacatagtgaaaccccgtctctgctaaaaatacaaaaattcgcgcgcctgtggtcccagctctggggctgaggaatgggaactcrcttgaacctgggagatggaggttgccgtgagcggagatcacaccactgcactccagcctgggcaacagggtgagactgtgtctcaaaaaaaaaaaaaaaa

SEQ ID NO: 371803 - DNA, 201 bp, Homo sapiens
aggaatgggaactcacttgaacctgggagatggaggttgccgtgagcggagatcacaccactgcactccagcctgggcaacagggtgagactgtgtctcaaaaaaaaaaaaaaaataagtctctattacagatgcaagtatttcactctaagtacttatgatatcctgatagagttttgttgttgttgttgtttttaaata

SEQ ID NO: 371804 - DNA, 201 bp, Homo sapiens
acagatgcaagtatttcactctaagtacttatgatatcctgatagagttttgttgttgttgttgtttttaaatattcagggtctcactctgttgcccaggmtggagtgcaatggcgtgatcatgactcactacagcctcaaattcctgggttcaaatgatcctctcgccttggcctctggagttgttggaattacaggtgt

SEQ ID NO: 371805 - DNA, 201 bp, Homo sapiens
aaaaatgttagtgaggtggcagcgagctggaacttcatctgcttccatttaaaatgttaacatcttacatgtagtttctaggcaatttaaaaccctttttkgtgtaagaatgagtataaatacacaaattaagatcatctggttgggaggctgaggcaggcagatcatctgaggtcaggagttcaagaccagcctgaccaa

SEQ ID NO: 371806 - DNA, 201 bp, Homo sapiens
tggaacttcatctgcttccatttaaaatgttaacatcttacatgtagtttctaggcaatttaaaaccctttttggtgtaagaatgagtataaatacacaamttaagatcatctggttgggaggctgaggcaggcagatcatctgaggtcaggagttcaagaccagcctgaccaacatggtgaaaccccgtctctactaaaa

SEQ ID NO: 371807 - DNA, 201 bp, Homo sapiens
aaaactctgtctcaaaaaaaaaaaaaaaaaaaaaaaatcctctgggcccaacctcatgatctgaaggtgaaagtgcagcaaaatgtgacttgcccaacgtcacacaatcaaccatgtggctgggggaagttcccagggtcctgcctccctcaggtgcctctgcacaaaaccagattgcttccctctaagagtatggttagt

SEQ ID NO: 371808 - DNA, 201 bp, Homo sapiens
aaactctgtctcaaaaaaaaaaaaaaaaaaaaaaaatcctctgggcccaacctcatgatctgaaggtgaaagtgcagcaaaatgtgacttgcccaacgtcacacaatcaaccatgtggctgggggaagttcccagggtcctgcctccctcaggtgcctctgcacaaaaccagattgcttccctctaagagtatggttagta

SEQ ID NO: 371809 - DNA, 201 bp, Homo sapiens
tctgtctcaaaaaaaaaaaaaaaaaaaaaaaatcctctgggcccaacctcatgatctgaaggtgaaagtgcagcaaaatgtgacttgcccaacgtcacacaatcaaccatgtggctgggggaagttcccagggtcctgcctccctcaggtgcctctgcacaaaaccagattgcttccctctaagagtatggttagtataaa

SEQ ID NO: 371810 - DNA, 201 bp, Homo sapiens
tgtctcaaaaaaaaaaaaaaaaaaaaaaaatcctctgggcccaacctcatgatctgaaggtgaaagtgcagcaaaatgtgacttgcccaacgtcacacaatcaaccatgtggctgggggaagttcccagggtcctgcctccctcaggtgcctctgcacaaaaccagattgcttccctctaagagtatggttagtataaatg

SEQ ID NO: 371811 - DNA, 201 bp, Homo sapiens
tttcttttttacttcaagcctgtctggaagttacttgtggacatggtgagtagcattgttaatgttacaattgtttctgtaaatgaaatggatatcattgwtgacatgccttttgatgatcagtaaatatattcaggactatctgttgatcactatagcgatgataaagcaaaaagccaataaaatatgacattccttttc

SEQ ID NO: 371812 - DNA, 201 bp, Homo sapiens
acgtaaaactagcaaaatctgacaactctgaggaatgcaccaatgtgaatgtatacaggatgttacccaagatattatcactgggggaaactgggtagtgwgtccagggaaactttctgtgcattaaaaaaaaaaaaaaaaaaaaattcctgtgaatctgtaaaacaaaattaaaaacaaaaagggacaaactttcctact

SEQ ID NO: 371813 - DNA, 201 bp, Homo sapiens
cctttcttttttacttcaagcctgtctggaagttacttgtggacatggtgagtagcattgttaatgttacaattgtttctgtaaatgaaatggatatcatkgatgacatgccttttgatgatcagtaaatatattcaggactatctgttgatcactatagcgatgataaagcaaaaagccaataaaatatgacattccttt

SEQ ID NO: 371814 - DNA, 201 bp, Homo sapiens
gaggaggagaaagaggagacaggatggcggaaggcgcaggcagcagtagaggggggtgtggggacctggtggctgacagccagcattagagctgccaacgygtttactgtcaggaaaaaatggggactttacacatatgtcttacaaatcctttcttttttacttcaagcctgtctggaagttacttgtggacatggtgag

SEQ ID NO: 371815 - DNA, 201 bp, Homo sapiens
ttgttccaggtggttgttaacaggactcatttttttggtctttgataggatcccggctactcaacagaaatgaaggaggaatctgtaaagaaacaccagtmtccagatggtgaagtttggaagaaactccttcctgctcaagaaaattaagtgctcagccccaacaacttttttctttctgaagtgaaagggcttaaaatt

SEQ ID NO: 371816 - DNA, 201 bp, Homo sapiens
tcactgcactccagcctgggcaacagagtgagaccttgtctctaaaaaaagaataataaattttaaaaaacaaaatataacccaccttataattgattcasgcctcttcccctcctgtcacgttgccaggatcccaggacgctggtatcctgcatagatttcaggtacatcactgatgtcctgactgaggaggatgcccta

SEQ ID NO: 371817 - DNA, 201 bp, Homo sapiens
gtgttgagattacaggcatgagccaccatgcctggccagttattataaatattaaatggaacaaaatccataaagtgcctagtggagtaggtgtgccattrtgggagagttaaggctacttattattgtgccagacacacagtgggcaatagtcaataaatgactattgaacaaacaatgttgattgtgcatgattcagaa

SEQ ID NO: 371818 - DNA, 201 bp, Homo sapiens
gggattacaggtgtgagccatcacacccggccttttcaaaatatttcacaccaaatcggtttccagttcactattttcatggcgaaaagggctttggcccygcccaatctcggaggtctcccttggggaagagcagattctttaagatgcatactgagccgtgtatacgtcattctttttttatttgcattttctattttc

SEQ ID NO: 371819 - DNA, 201 bp, Homo sapiens
attttattcagttaaattcaggcttgagtcatttagatcatcagtattttgaggtaaacaactcatttctgtaagactgatgatctaaatgactcaagacygaatttagctgaataaaatgttctactaaggagatgaggtcctgagatttgggtcctaagagctatctcttctctaaggacctcatctcctcctccctga

SEQ ID NO: 371820 - DNA, 201 bp, Homo sapiens
ctcaaatgatccgcctgtctcagcctcgcaaagtgctgggattacaggtgtgagccatcacacccggccttttcaaaatatttcacaccaaatcggtttcmagttcactattttcatggcgaaaagggctttggccccgcccaatctcggaggtctcccttggggaagagcagattctttaagatgcatactgagccgtgt

SEQ ID NO: 371821 - DNA, 201 bp, Homo sapiens
ctctaaaaaaagaataataaattttaaaaaacaaaatataacccaccttataattgattcaggcctcttcccctcctgtcacgttgccaggatcccaggaygctggtatcctgcatagatttcaggtacatcactgatgtcctgactgaggaggatgccctaggtgagtttggaagctttctgggatacacgatgtgcaca

SEQ ID NO: 371822 - DNA, 201 bp, Homo sapiens
ccgcttcccaagtagctgggattacaggcacctgccaccatgcccagctaatttttgtatttttagtagagatggggtttcaccatgttggccaagctggyctcaaactcttgacctcaggcaatccaccggccttggcctcccaaagtgctaggattacagacgtgagccaccgcgcccagcctggggcaccactttcaa

SEQ ID NO: 371823 - DNA, 201 bp, Homo sapiens
gttacaattgtttctgtaaatgaaatggatatcattgatgacatgccttttgatgatcagtaaatatattcaggactatctgttgatcactatagcgatgrtaaagcaaaaagccaataaaatatgacattccttttctgatatctgacgtaacagatggctgtgctcatgcaggcagggtggcatgaggggaagcagtga

SEQ ID NO: 371824 - DNA, 201 bp, Homo sapiens
ccccatctctacaaaaataaaaataaattagccgggcatagtggcacatacctggagtcccagctactcaggaggctgaggcaggaggatcacataagccrgggagactgaggctgcagtgagctatgatggcatcactgcactccagcctgggcaacagagtgagaccttgtctctaaaaaaagaataataaattttaaa

SEQ ID NO: 371825 - DNA, 201 bp, Homo sapiens
gtgttgcgtgtaggtcctagctactcaggaggctgagacaaaaagattgcttgaggctaggcattcaagattacagtgaggtgctgggtgcagtgtctcakgcctgtaatcccagcaattttggtggccgaggcaggtgtatcacttgagctcaggagctcgagaccagcctgggaagcatggtgaaaccctgtctctacc

SEQ ID NO: 371826 - DNA, 201 bp, Homo sapiens
tagatcccgccactgcactccaggctgggtgacagagtgaaaccctgtctctaaaaaataataattaaaggtaccaaaaataaataattgatggtaatgcygacccaaattaaatttaaccttcaaattacttatgaaaaatgtagtatatcataagaaagtcaatagtaagaaatttcatgttaagacagtgttttcata

SEQ ID NO: 371827 - DNA, 201 bp, Homo sapiens
aattcaaggcattttctatacttgtcaataatgaaaaggcatttctccttttaaaaattctatgaagtcagccttcttattccttaggaacatgaactagygtggtttggttttgaatctgattgttcaaacactttacaaagtgaataggaaaataatttgggaacatttatatttaaacttgtcaatctatgattctgt

SEQ ID NO: 371828 - DNA, 201 bp, Homo sapiens
acaccagcctgggcagcatgtcgaaactgcgtctctacaaaaaataccaaaattaaccaggtgtggcggcacatgcctgtaatcccagcttctcgagaagytgaggtgggaggattacctgagccggggaggtcaaggttgcggtgagccgtgatagtgccactgcactcaagcctgggtgacagagtgagaccctgccta

SEQ ID NO: 371829 - DNA, 201 bp, Homo sapiens
cactccagtctctccctcttctgacccctttactttctgcactgctgctgctgctaccttgcctgagatattcctccctcccagactcttcactccccttsccactgctgaggagctccccttccttgaccggccagctcacattctgtcttcatcataaagcgctctccctcttcaagaagcacattcagctaacagcgc

SEQ ID NO: 371830 - DNA, 201 bp, Homo sapiens
gacagctccttcttcctccactggccccttcttccctctctgaggctcaggcctcagtgtctttccggtctccctacacactcccatgaagaccctctccrcattctgacttcggtgccaccctttatgccggagactcccagatctcatttccggatctgcctccttaacttataggtctggatacttcctgtttggttt

SEQ ID NO: 371831 - DNA, 201 bp, Homo sapiens
gacaagaaataattgaatactaggcaggatttaaagcatcattaagcccggggactggcctcacatcctacggacaccctacaactgaggtgcaggcaacsacctgcagaacacttacctgcacaagtaacttggcccacgcagcagcttttttcattgtgataaagtacacataatattaaacttgccatttttgtgtgc

SEQ ID NO: 371832 - DNA, 201 bp, Homo sapiens
gcaattcagaagcattaagcacgttcctgatgttaggcaaccatcaccatcacccatctccatcaccatcaccatcaccatcaccatcaccatcaccatcwccatcaccatcaccatctccatcaccatcaccatcaccatctccatcaccatcaccatcaccatcaccatcaccatcaccatcaccatcaccatcaccat

SEQ ID NO: 371833 - DNA, 201 bp, Homo sapiens
atcaccatcacccatctccatcaccatcaccatcaccatcaccatcaccatcaccatctccatcaccatcaccatctccatcaccatcaccatcaccatcwccatcaccatcaccatcaccatcaccatcaccatcaccatcaccatcaccatcaccatcaccatcaccatcaccatcaccatctccatcaccatcaccat

SEQ ID NO: 371834 - DNA, 201 bp, Homo sapiens
gtcctgttttatatcttcaatgcaattgttttaagagatactgttttctaatttgtttccaattttttattactagcacatcaactatagattttaaattraccttgtatcctacaaacttgctaagctcaatattagttccagtagcttttttcgttaagtccaatgaagacagttttcaacaaagatgaataatcatgt

SEQ ID NO: 371835 - DNA, 201 bp, Homo sapiens
catcaccatcaccatctccatcaccatcaccatcaccatcaccatcaccatcaccatcaccatcaccatcaccatcaccatcaccatcaccatcaccatcwccatcaccatcaccatctccatctccatcaccatcaccatcaccatcaccatcaccatcaccatcaccatctccatctccatcaccatctcccgaacttt

SEQ ID NO: 371836 - DNA, 201 bp, Homo sapiens
atggaaggcattgttctatctcctcacctgattccatatctctgtattctgccccaaaatgcctccactggaagccataaactgggcccaagtccccttcytctctggtggagaatcccaggctgtccaaaaagtctcgggatccattggcatcccagattttcactcccttggaagacagctctttagcatttgtggatc

SEQ ID NO: 371837 - DNA, 201 bp, Homo sapiens
cttagatgagacacctgctctccaggttgctggtctctgcccagctagtaaattgcacacacaaaccccacattccaaggtggcatctgcttttcctaggsacaggtgggaggggctgggctctgtgacatccagtaagaggtgacaccaacagtgacaggaaagtggaagtccaggagtgagatgtttcattctttctcc

SEQ ID NO: 371838 - DNA, 201 bp, Homo sapiens
aagaggtgacaccaacagtgacaggaaagtggaagtccaggagtgagatgtttcattctttctccacctctgcagagctgggagtggagtgtgaccctggyactgcgcttcacagcagcgccacctacagcacgctgtggctcagcctcgaaagggagattaaagccacaacaaagcaatgggggcattttgtcccttgtc

SEQ ID NO: 371839 - DNA, 201 bp, Homo sapiens
gtcccagccactcaggaggctgaggtgggaggatctcttgagtccaggaggtcgaggctgcagtgagctgtaattgtgtcactgcactccagcctgggtgwgagagagagaccctgtctcaaaagacagcctggtttactgtagaataattcaagaaatggaatttgcctctgggcctgagtgatgtctaacacagggtaa

SEQ ID NO: 371840 - DNA, 201 bp, Homo sapiens
aacctctgcctcccatatgcaaatgattctcgtacctcagcctctggagtagctgtgattacaggtgtgcaccaccacacctggctaatttttgtattttkggtagagacggggtttcaccatgttgtccaggctggtctcgaactcctgagctcaggtgatccacctgcctcggcctcccaaagtgccggattacaggca

SEQ ID NO: 371841 - DNA, 201 bp, Homo sapiens
aggtggatcacctgaggtcaggagttcaagaccagcctggccaacatggtgaaacttcgtctctattaaaaatacaaaaatcagccaagtgtggtggcacrtgcctgtaatcccagctacccgggaggctgaggcaggagaatcgcttgaacttgggaggctgcagttgcagtgagctgagatcgcaccattgcactcctg

SEQ ID NO: 371842 - DNA, 201 bp, Homo sapiens
aaaagtgacagaatttggcctctctccttgcaatcatctctagcctgttagaaaatccttggctgttagtctgtttctctgtgtcaaatgacagctacaaggatgcttttcacctgcctttcacccggggccactgtcgagctttgacaacctgtagtgggcgagtaaccaagggcaatgagagggaggagacatgagttc

SEQ ID NO: 371843 - DNA, 201 bp, Homo sapiens
aaagtgacagaatttggcctctctccttgcaatcatctctagcctgttagaaaatccttggctgttagtctgtttctctgtgtcaaatgacagctacaagratgcttttcacctgcctttcacccggggccactgtcgagctttgacaacctgtagtgggcgagtaaccaagggcaatgagagggaggagacatgagttcc

SEQ ID NO: 371844 - DNA, 201 bp, Homo sapiens
ggctggcggtcagttgtccagcaagtcagtccttctgcagacttctgagtgctgccatgtatcaggcaccaaagtaattttaaaaagagaaagataggccrggcgtggtgattcaggcctgtaatcccagcactttgggaggctgaggcgggcagattgcttgagtcaagcagttcaagaccagcctggtcaacatggtga

SEQ ID NO: 371845 - DNA, 201 bp, Homo sapiens
attttaaaaagagaaagataggccaggcgtggtgattcaggcctgtaatcccagcactttgggaggctgaggcgggcagattgcttgagtcaagcagttcragaccagcctggtcaacatggtgaaaccctgtctttactaaaaatacaaaaattacctggccgtggtgatgcatggctgtaatctcagctactcaggagg

SEQ ID NO: 371846 - DNA, 201 bp, Homo sapiens
ctgctctctggctctttttgttagggccgtgtgctgggcctcagcagaggcgttagggggtctcactcagctgttggtggcactgagtgacagcatttccyccctgggagccgcagccctgctgtgaggttggctcagggctgacctccctgtgaagagtctctttttgcagatgatggatgccaaccagcgctgggatgt

SEQ ID NO: 371847 - DNA, 201 bp, Homo sapiens
tgtctcctggaattaaatgtctcacagaaagatcactgcaagtatatagcaaaggcacaaaagcattcactgggaaagggaaacaccaaattcaggactgwgagtgataaatgggacccttgagggtacataggaggcttcagtaataatggtaaccgtttttctcttcaggggggtagtgagtagacaggtgctgtcttt

SEQ ID NO: 371848 - DNA, 201 bp, Homo sapiens
cagctaaaggcaaagtaaaacaggagagaaacagaagccaactcatatggtggagaccaggagagagagccactgggctgcagtgatgtccataacagccyctgcagcgatggcacggagctgagggagactatccatcggtgcaaggtttctgcaggtgtccatttacggctgaagcaatgctcttccatcagagctgaa

SEQ ID NO: 371849 - DNA, 201 bp, Homo sapiens
agactatccatcggtgcaaggtttctgcaggtgtccatttacggctgaagcaatgctcttccatcagagctgaagggatctgggctacctcgtggcaccarattacaaatacagcaggaataattctgtttgccacaggaaactggtgcttctggtacaccctcctatattaaaagtctctattacatggccaggcacagt

SEQ ID NO: 371850 - DNA, 201 bp, Homo sapiens
agctgccaacgcgtttactgtcaggaaaaaatggggactttacacatatgtcttacaaatcctttcttttttacttcaagcctgtctggaagttacttgtrgacatggtgagtagcattgttaatgttacaattgtttctgtaaatgaaatggatatcattgatgacatgccttttgatgatcagtaaatatattcaggac

SEQ ID NO: 371851 - DNA, 201 bp, Homo sapiens
aacatagtgaaaccccgtctctgctaaaaatacaaaaattcgcgcgcctgtggtcccagctctggggctgaggaatgggaactcacttgaacctgggagawggaggttgccgtgagcggagatcacaccactgcactccagcctgggcaacagggtgagactgtgtctcaaaaaaaaaaaaaaaataagtctctattacag

SEQ ID NO: 371852 - DNA, 201 bp, Homo sapiens; identical to SEQ ID NO: 80560

SEQ ID NO: 371853 - DNA, 201 bp, Homo sapiens
tcccagcactttgggaggccaaggccggaggattgcttgagcccaggagttcaagaccagcctgggcaacacagcaagaccgtgtctgaaaaaacaaaacmaaaaaaaaacagattaaagatttttaagatctgtatgatcatctcagaagccaagaaaattcaataaaatctaatattcaatacaaaaagtagaaaggaa

SEQ ID NO: 371854 - DNA, 201 bp, Homo sapiens
tgtaatcccagcactttgggaggccaaggccggaggattgcttgagcccaggagttcaagaccagcctgggcaacacagcaagaccgtgtctgaaaaaacmaaacaaaaaaaaaacagattaaagatttttaagatctgtatgatcatctcagaagccaagaaaattcaataaaatctaatattcaatacaaaaagtagaa

SEQ ID NO: 371855 - DNA, 201 bp, Homo sapiens; identical to SEQ ID NO: 80567

SEQ ID NO: 371856 - DNA, 201 bp, Homo sapiens
ttactgagtgcacatatcaaaaattacttaagtatgtcctatttggggacttttaggttgcttccacttcttgtccttttaaaaccttgttatgagtaacmaagtgtaccttttaagatattcttcagaattatttttcataggctattctactctacagttttttaaacttttaaattggcttgtgctccacttgaaggt

SEQ ID NO: 371857 - DNA, 201 bp, Homo sapiens
atccgtatttcataatgtatgcctatttttgtgtttggattttctctcagtcacaactatttagctatatagacttcctttcatttctctttttttaacaratttttattgtgaaatataacgctcatatagaaaagtacataaagcgaataataatgaaacaaatactgtataaccactatctagctcctgaaatgggac

SEQ ID NO: 371858 - DNA, 201 bp, Homo sapiens
ctgtctgtgatcattttcccttttagacttttcttcagtgcaggtctgtgttttgcctaaaaatcgttacttctcctttattttttttcctttctttcttycaaactcctgttaatattggtattttgacctcctcccaataggtataagattctagattggcactagatacaggatttcatctcacgggaaataatcttt

SEQ ID NO: 371859 - DNA, 201 bp, Homo sapiens
ttttgactgctctttatggatttggcattttgtagttttgattatgacacaagttatacataagtttaggtgtcactggacttgctttgcatctttttttkgtttttttactaggtcttaacttgcagagtcagtttaatctggaaaatgtcactgttttcaatacaaatgagcaggaaagcaccctgggtcagaaggtga

SEQ ID NO: 371860 - DNA, 201 bp, Homo sapiens
tctgatgactgcttcatgacaggctatacatttttttttcaatttagcacactgaagatagagaagaaggaatggatgtagaagaaggcgaaatgggagaygaggaagctccaacaacgtggtgagttttcagagcctaagctttttgatttacagagataatctcctaatttattgagtatcctctctggagtgaggaga

SEQ ID NO: 371861 - DNA, 201 bp, Homo sapiens
cactacttcaaaatttattctgtaagacacctcaaatacccaccaagccaattaaagataaaagggaagagatcaaaagtcttttacaggtaggagatggyaattagcaacatggaataatattgtgattggtattaagtgttaaattagatgtgaagttcttagcaattgagacaaaaagggacatataatggttgcatg

SEQ ID NO: 371862 - DNA, 201 bp, Homo sapiens
tagagtgtatgaaatgagctaaaggggagagtgtagattcagaagagaagaaaatactgaaatcccgaagaaaacccatgtttaagggagaatgaagggasaagaggagaagattgaagagtaacctgtgagattagagaaaaactagaaaagcatgcactcatggaagccaagcatatcaagtaggatgaggacagtaaa

SEQ ID NO: 371863 - DNA, 201 bp, Homo sapiens
aatttattctgtaagacacctcaaatacccaccaagccaattaaagataaaagggaagagatcaaaagtcttttacaggtaggagatggtaattagcaacrtggaataatattgtgattggtattaagtgttaaattagatgtgaagttcttagcaattgagacaaaaagggacatataatggttgcatgagtctcattct

SEQ ID NO: 371864 - DNA, 201 bp, Homo sapiens
actagaaaagcatgcactcatggaagccaagcatatcaagtaggatgaggacagtaaagagtgttcacaggatttaacaacaaataagtcattggtgatcytgacaaaacactttcttcccccgccccaagaccgattgttgctctgctgcccaggctggagtgcagtggcatggtctggactcattgcaacctccgcctc

SEQ ID NO: 371865 - DNA, 201 bp, Homo sapiens
aaagtcttttacaggtaggagatggtaattagcaacatggaataatattgtgattggtattaagtgttaaattagatgtgaagttcttagcaattgagacmaaaagggacatataatggttgcatgagtctcattctctgttagaggtagccccatttttaagagacaaactttcctggtacatttcaagaggtatttatt

SEQ ID NO: 371866 - DNA, 201 bp, Homo sapiens
taaaatcccaataaggacagaacaaggaaaaatgtgtatgtatattcatctcacatataaatagaatgttttctatttatagaaataaaaaatgtcttacmaactcacaaattaagtaatttttttaaaaatagagacatacagtttatcctaggaatgtaagtatggttcatcagaaagatgaatataatgccagattaa

SEQ ID NO: 371867 - DNA, 201 bp, Homo sapiens
atattgtgattggtattaagtgttaaattagatgtgaagttcttagcaattgagacaaaaagggacatataatggttgcatgagtctcattctctgttagrggtagccccatttttaagagacaaactttcctggtacatttcaagaggtatttattatattcaatcttacatgttgtaactgagtaacattttgttactc

SEQ ID NO: 371868 - DNA, 201 bp, Homo sapiens
cattccatttcagcctcctcatcctctgcctaactcaaattttggagtaacatcaggaattggtcttagcctctttatctagaaccttctgggtgacaccrcagtctcatggctttaaataggaattgaagagtagtggtttaaaggcaagaggcctctggtcagaatgcataggttcgatcccctctaccacttacttac

SEQ ID NO: 371869 - DNA, 201 bp, Homo sapiens
gcctattccaaactccttcccagggcctaaaagacctccttggtctggctcatactctcctgtgtggccatgcctcccctctgctttaaccacagcaggcytcttggtcctgtctttccctttcctgtcaggaccttcacactttactgtctcacttgcttgaaccactttttccccaaggttgccgtggcttaaagtccc

SEQ ID NO: 371870 - DNA, 201 bp, Homo sapiens
tccagttttgggaagaaactaagaaaaaatattgccagtcttctgccaagggctatggttttataggaagttgtgagcctagggataacaaagacagcttkgtgtccatctgcttgctcagtgaccagatatgtgatatgctcagtatacttatgaaacagctgctccaagaagtcatcataagacttcttctagactttt

SEQ ID NO: 371871 - DNA, 201 bp, Homo sapiens
gaaccttctgggtgacaccacagtctcatggctttaaataggaattgaagagtagtggtttaaaggcaagaggcctctggtcagaatgcataggttcgatyccctctaccacttacttactaggcaactaaggctaatttaataattaaaccgccagttccctttcctcatctgttaaatagtaacagtacccatttcaca

SEQ ID NO: 371872 - DNA, 201 bp, Homo sapiens
gtttctcacctgatggtataccaccctgatcattgttatacttcattagggaacagttcatggattccaaatagctagatggatgattcctgttgtatacrtactgcatccagccagtactgcacacacttgttgacttgttaaaattaaacaaaatgaacggaaactttgaaaatgtgtttgctgcatatgagcctgcct

SEQ ID NO: 371873 - DNA, 201 bp, Homo sapiens
attgaagagtagtggtttaaaggcaagaggcctctggtcagaatgcataggttcgatcccctctaccacttacttactaggcaactaaggctaatttaatwattaaaccgccagttccctttcctcatctgttaaatagtaacagtacccatttcacagggttattctgaggattaaataagacagtgcactttgaaccct

SEQ ID NO: 371874 - DNA, 201 bp, Homo sapiens
caaaattgaagacgattggggttctttgttgataggtacattatttaatttgatcgacttctcaacttctcccattttatctcaactgtttctgacatagwgaggaatttaaaacattgcttaataataactttaaaaacactacattttatgcaataaaattgggaagtaatggtgctttaaaagggaatgaaaatacat

SEQ ID NO: 371875 - DNA, 201 bp, Homo sapiens
ggagaatataaaaaataattgtttacttttaaaataaagtctactaaaggtggttaataaaacttattggccccatagctttccatttctgttgtatactyagaattgcgcataatttatattctcttcattttctaggtcctgatgttcggcgagacaaacctgtaacaggagaacaaatagaggtatttgccaacaagc

SEQ ID NO: 371876 - DNA, 201 bp, Homo sapiens; identical to SEQ ID NO: 80570

SEQ ID NO: 371877 - DNA, 201 bp, Homo sapiens; identical to SEQ ID NO: 80572

SEQ ID NO: 371878 - DNA, 201 bp, Homo sapiens; identical to SEQ ID NO: 80573

SEQ ID NO: 371879 - DNA, 201 bp, Homo sapiens; identical to SEQ ID NO: 80574

SEQ ID NO: 371880 - DNA, 201 bp, Homo sapiens; identical to SEQ ID NO: 80575

SEQ ID NO: 371881 - DNA, 201 bp, Homo sapiens
ctgaggcaggagaatcgcttgaacccggacagcggaggttgcagtgagccaagatcatgccagtgcacaacacctgggcaacagagggagactccatctcaaaaaaaaaaaaaaaaaatcatactagccctgaaaaggaccatgaaattggagatcatctagttcagtgtttctcaagcttcttgtgaaatgcagattctt

SEQ ID NO: 371882 - DNA, 201 bp, Homo sapiens
accaaggtgtcatgaacttatatgtatttaacaatataccctcaaaatatattaagcaaaaacttacaaaattatgaaaagttggcccacaattacagtaygtatttttaactgcttctgatggatcaggttgactaaagattagttaagtatatggaagatttgaacaatgacagtaataagcttggtgtagtatagaac

SEQ ID NO: 371883 - DNA, 201 bp, Homo sapiens
agatcttctgataacttactgcaacttctccattggtagttgctgcttcaccttgcactattatgttacggagagggcttttttctttaaacctcgtaaaycaacttctgctagcttcgtacttgtcttctgtggtgtcctcacctgtctcagccttcacagaattaataagagagttaaagcctttctctggctggtttg

SEQ ID NO: 371884 - DNA, 201 bp, Homo sapiens
ttaccaaaatgtgacagaggaagtgagcatatgctgttggaaaaatggtgctgatagacttgcacgatgcagggttgccattcaatttatttaaaaaaacaagaaactgtgaagaacaacaaaacaaggtatgcccatactccaaaggtacttttaagaaatgaatttttgaaaggatttgaaaatcaaatgtgttaattt

SEQ ID NO: 371885 - DNA, 201 bp, Homo sapiens
aaaaggcagatagatcaccttgggaagggtaaccagatgctattttattcttgctcaatgtggaagggtggttttgagcatttgggaaacacttgacagakcactttctcatttaactattagagtaacactgtgaagtaggctaagttggttattcctggtacatgaggtagaagctgacaccccccaaaaagttgtgac

SEQ ID NO: 371886 - DNA, 201 bp, Homo sapiens
taccaaaatgtgacagaggaagtgagcatatgctgttggaaaaatggtgctgatagacttgcacgatgcagggttgccattcaatttatttaaaaaaacaagaaactgtgaagaacaacaaaacaaggtatgcccatactccaaaggtacttttaagaaatgaatttttgaaaggatttgaaaatcaaatgtgttaatttt

SEQ ID NO: 371887 - DNA, 201 bp, Homo sapiens
gtgggagaatcgcctcagcccagggaggtcaagctgcagtgagccttgatcatgccactgtactccagcctgggcgacagagtgagaacctgtctcatttaaaaaaaaaaaaaaaaaaaaaatttcatgtaaatgggcctacaagtcatcaaaaatttaaaaacttttaactttatttccaacttacagaaataatgtttt

SEQ ID NO: 371888 - DNA, 201 bp, Homo sapiens
tgtatcgaaaattctggtcacttcaggattacttcaggaaccctgtgcaatgctatgagaagatttcatggaaaacttttctcaaggtaagttgccattgmcagactatcagaagcccagtattttatagacagtgatagagctaaaacttaatcttgtctaacatacttttcactatgtaattctgcctcttacattttt

SEQ ID NO: 371889 - DNA, 201 bp, Homo sapiens
tttaccttgtttccttttcacccatgatacataatgacctgaagaactagaccttccctggtgtgttagtactgcttgtaagtcatagtatccacaattaytggagccaatatctaaagaaagatgtaaatccattaatattagacaatgaatagacatgtgccttctcaagctaagtaacaagaataactctaaagttca

SEQ ID NO: 371890 - DNA, 201 bp, Homo sapiens
cgggagtcttgggaatgaaaaatacaataattgaaaccaaaactcagcacacagaattaaactatacactggacatagatgaacaaagaactagtgaactgaagaaggtgatgagaacttcatccagcaagcagcacagacagattttttttttttaagtggaagagcagttaaaagccatggtgaatagattgggaattt

SEQ ID NO: 371891 - DNA, 201 bp, Homo sapiens
cagaggtgtgtccgcctcagcgtccgctccgggccccgtcggaggttgaggggtagggaaagacgcactacccgcctcttctttgtgggctgggccgtccrcctccgcccaccctccagcgggtccccggactgcgtgctgggcgcctcggctccccgcttggagtgcccacctgcagactactgctggttgggtccatcc

SEQ ID NO: 371892 - DNA, 201 bp, Homo sapiens
gggagtcttgggaatgaaaaatacaataattgaaaccaaaactcagcacacagaattaaactatacactggacatagatgaacaaagaactagtgaactgaagaaggtgatgagaacttcatccagcaagcagcacagacagattttttttttttaagtggaagagcagttaaaagccatggtgaatagattgggaatttc

SEQ ID NO: 371893 - DNA, 201 bp, Homo sapiens
cagaaagttgttgaaagcttagtatattctttctaatcacagctactatctgaaaacccccccgatggagaaagattttcaaagatggtagaggtatgtgwtttttatgcttacatcctcttcttagcacgaaatagaacttcagaggattccactaaccaaaatgtaatcgctttgtttttcccagcatatattaaacac

SEQ ID NO: 371894 - DNA, 201 bp, Homo sapiens
ggagtcttgggaatgaaaaatacaataattgaaaccaaaactcagcacacagaattaaactatacactggacatagatgaacaaagaactagtgaactgaagaaggtgatgagaacttcatccagcaagcagcacagacagattttttttttttaagtggaagagcagttaaaagccatggtgaatagattgggaatttcc

SEQ ID NO: 371895 - DNA, 201 bp, Homo sapiens
cagtaagagttgtgtatttttaagagttacaggtccacatttctcaggacatgacagctatttcaaaactctggatgtcttaattgatatatatatatatwtttttttttgagacggagttttgctctgtcgcccaggctggagtgcaatggcgtggtcttggctcactgcaacctctgccacctgggtttaagcgattct

SEQ ID NO: 371896 - DNA, 201 bp, Homo sapiens
gtaagagttgtgtatttttaagagttacaggtccacatttctcaggacatgacagctatttcaaaactctggatgtcttaattgatatatatatatatatwtttttttgagacggagttttgctctgtcgcccaggctggagtgcaatggcgtggtcttggctcactgcaacctctgccacctgggtttaagcgattctcc

SEQ ID NO: 371897 - DNA, 201 bp, Homo sapiens
actgaaggaaaatgaaagtaagaactgaattttcttggttatttaacaaaattgaagacgattggggttctttgttgataggtacattatttaatttgatsgacttctcaacttctcccattttatctcaactgtttctgacatagtgaggaatttaaaacattgcttaataataactttaaaaacactacattttatgca

SEQ ID NO: 371898 - DNA, 201 bp, Homo sapiens
ggaacaagaaatcatgaaacaaaagcaggctgaaatgaagtaggacagtcgatacaactaatcgggagtcttgggaatgaaaaatacaataattgaaaccmaaactcagcacacagaattaaactatacactggacatagatgaacaaagaactagtgaactgaagaaggtgatgagaacttcatccagcaagcagcacag

SEQ ID NO: 371899 - DNA, 201 bp, Homo sapiens
agtgaactgaagaaggtgatgagaacttcatccagcaagcagcacagacagattttttttttttaagtggaagagcagttaaaagccatggtgaatagatkgggaatttccaacatctgtctagtaggatttccaaagaagaaaatggagggaatggtagagaaactggattgcaaagaattgaaggaaatctcaaatcct

SEQ ID NO: 371900 - DNA, 201 bp, Homo sapiens
gttggcaaatctggcctatcatctatttttgtagataatttttattgggccaggtgcagtggctgtaatcccagcactttgggaggccaagacgggaggaytgcttgaaaccaggagtttgagaccagcctgagcaacaaagtgatacccccatctctacaaaaaaattttaaaatgagctgagtgtggtggcatatgcct

SEQ ID NO: 371901 - DNA, 201 bp, Homo sapiens
gaaaactggaactcgtggaaaaatgaaggttgcccaagttttgtgaaagaaaggtaaatacatactgaaagaaaggtaaatacatactcatcacaagaacracgagaaaggcttttgaaaatgtgctccgatatgattatagcatgtaaaaatacatgtatatatttcacataaaaaatgtaagttgaactttgtaagagt

SEQ ID NO: 371902 - DNA, 201 bp, Homo sapiens
acagaaaagagtataataacactaattagatataggctttagggttacccagtccttcagaataatacacttctcactttccatctgagactcaatgaccmaaatgatcagatggaatactcagtggctagcagttaccagggtgaggttacccacagttatgtactgttgaccctagtgtggtcattaggccattcattt

SEQ ID NO: 371903 - DNA, 201 bp, Homo sapiens
accgctgcactctagcctgggcaacagagtgagactccatctcaaaaagaaaaaaaaaggaatactatttaaatttataatttagttgtttttatacaatkgtttacacattctttttctcagaaaccaaatgttttctatttcaattgagtaagttatatggaaggtactattccaggtagaaaactattgtacagttta

SEQ ID NO: 371904 - DNA, 201 bp, Homo sapiens
tcaatttgtttcttccttaggaattgtgtgtatactagaaagcctcttaagagaggcagtagatagaatagtgctttttctcttaggtgagtttatgttcyaagttcttgttagtacacatcctgatttcaaggattattcctgttaactaagcgtgacttggaatcacccttgtttcaaaatataagaaaaaaaaaactc

SEQ ID NO: 371905 - DNA, 201 bp, Homo sapiens
aggtactattccaggtagaaaactattgtacagtttagtcctctagaccctaatttaatatctaacacatttgtgaaaattaaaagtttaaattgtttaamgtttaaagcgaaatatttgtaaacatactaactgtggaacctgtattttttttttcctaatctggggagaaaatgggtatattcaaaacatttggtgttt

SEQ ID NO: 371906 - DNA, 201 bp, Homo sapiens
tattttgtgtatgtcatcataatcattttctttgtgtgcgttttgctgcaatctctggtgctttgaaagcctgctaagagtaactgttaggactatccaaratcatattggcggccgggcgcagtggctcacgcctgtaaatgcagtacttcgggaggccgaggcgggcggatcacctgaggtcaagagttcaaggccagc

SEQ ID NO: 371907 - DNA, 201 bp, Homo sapiens
tgtttaaagtttaaagcgaaatatttgtaaacatactaactgtggaacctgtattttttttttcctaatctggggagaaaatgggtatattcaaaacattkggtgtttaggcttgatttcttaattgtctgggcagattttaacagctcgtccaggattatgtaagcacttagtggtgcctttcaacaatttaaaaaggaa

SEQ ID NO: 371908 - DNA, 201 bp, Homo sapiens
gtgttcttttcagagacttaatacttttttgagaaatatgcaactcctgcagtcatgctacagaaagactaccctcttgcctactccctgacacacaattyatatgggttttcacataaaagaaaaaaaaaagcctaacagtcacaggaaaattattaaattattaggccaactagaggtcatacaagagcactttgaagg

SEQ ID NO: 371909 - DNA, 201 bp, Homo sapiens
caaacaatattaacagtaaaaattgacatagagatatttcaaatgattaagaggatattatgaacaactacgaataaattttgaagcctaataaaatgggrattgtttagaaaattttaatgaccgaaatagactctcaaaaaaaaaaaaaaaatagaaaaccaaataaatgaacaaccattaaggaaataccagccagaa

SEQ ID NO: 371910 - DNA, 201 bp, Homo sapiens
agaatacagtcttctgtggacggattcagctctttttggccaggcttttccctctgtctgagaaatcaggtaagcttttatgcattaaatgagttttctgyaggaaaatcttttccagtttttaatagattaaaatctgtcatgataatgagaaaaatggttctaaaaagttgaaagacatcatagaaattgtcactttat

SEQ ID NO: 371911 - DNA, 201 bp, Homo sapiens
gggaatattatccagaagcattgtgttttgttacatgaatctggtcagacttttccttagggatagtccggaaacaatgcttggcaaggatgatacaaactttttttttttttttgagacactttttttttggcccactgtaacttccacctcctgggttcaagcgattctcgtgcctcagcctcccaagtagctgggatt

SEQ ID NO: 371912 - DNA, 201 bp, Homo sapiens
ttttttttgagacactttttttttggcccactgtaacttccacctcctgggttcaagcgattctcgtgcctcagcctcccaagtagctgggattacaggcrcccaacaccacgcctggccaatttttgtatttttaatagagacaggttttttgccatgttggccaggctggtctcgaactcccagcctcaggtgatctgc

SEQ ID NO: 371913 - DNA, 201 bp, Homo sapiens
tcaaatgattaagaggatattatgaacaactacgaataaattttgaagcctaataaaatgggaattgtttagaaaattttaatgaccgaaatagactctcaaaaaaaaaaaaaaaatagaaaaccaaataaatgaacaaccattaaggaaataccagccagaatgacactttttgaatgacatcaggcccagaggttttta

SEQ ID NO: 371914 - DNA, 201 bp, Homo sapiens
ccacgccagcacaaatgaactgaaatatttttcagcaaagacttacctacattaaagaggtatgatttaaattagacaaggactcttaggaggaactcacygcttcaactcattttagcatgcaacatgagaaaaataacttatctaggaatacagcacaaagttctttaaaactataatggtaatgaagacaatgccagc

SEQ ID NO: 371915 - DNA, 201 bp, Homo sapiens
cgtgtctgaaaaaacaaaacaaaaaaaaaacagattaaagatttttaagatctgtatgatcatctcagaagccaagaaaattcaataaaatctaatattcmatacaaaaagtagaaaggaatgttctctgagttgataaaggactgattttaaaaaccctattgcaaacatcatacacaattatgaaactttagaaagtat

SEQ ID NO: 371916 - DNA, 201 bp, Homo sapiens
agaccattacaaattttagatcctctagaaatgagaactctcattatttttacaacagtgtatagtcatgattacacaaaagcataacaaagtcatatttataaatgttaatagacctttgaaaagaaaatgttctctgatgaggacaataattttggactcctggacagactctgtagagggcaaaaaattattacctgg

SEQ ID NO: 371917 - DNA, 201 bp, Homo sapiens
ctggccaacatgatgaaaccctgtgtctaataaaaatacaaaaattagccaggcatggtggcactcgcctgtaatcccagctactcgggacgctgaggcaygagaattgcttgaacccaggaggcagaggttgcactgagccgggatcgtacctatgcactccagcctgggcgacagagcaagactcagtctcaaataaat

SEQ ID NO: 371918 - DNA, 201 bp, Homo sapiens
ctcattcctaaagtgatagttcaaattattatctccaaagagggttttgtggagaataagaaaaatgatgtgtataattgacagtgaattttgaaaatgcytaaaataatcaaattgtctaaacagatatgtcagagaggaaggctcttaactgtttaggcaaagcctcacagcaggtgttaacttgggaagagtccccag

SEQ ID NO: 371919 - DNA, 201 bp, Homo sapiens
cgcgatcttggctcatcgcagcctccacctcctgggttcaagtgattctcttgcctcagcctcccgagtaactgggattacaggcatgcgccaccatgccygggtaattttatatttttaatagagacaaggtttctccatattggtcaggctggtctcaaactcccaacctcaggtgatctgcccgcctcagcctcccaa

SEQ ID NO: 371920 - DNA, 201 bp, Homo sapiens
gataagaaaaagtaatttaaagatgtagaaaactgaatagtgaatgagcttataaaagttgctaagcatctctagtgcagataaaatatgagataaccatttcacacttagcaaactggccaaaattgaaaagcctaacaatactagtattggcagagatgtgggaaaatgagaacttttatacactgttgaaatataaat

SEQ ID NO: 371921 - DNA, 201 bp, Homo sapiens
ataagaaaaagtaatttaaagatgtagaaaactgaatagtgaatgagcttataaaagttgctaagcatctctagtgcagataaaatatgagataaccatttcacacttagcaaactggccaaaattgaaaagcctaacaatactagtattggcagagatgtgggaaaatgagaacttttatacactgttgaaatataaatt

SEQ ID NO: 371922 - DNA, 201 bp, Homo sapiens
gtagctgggattacaggcgcccaacaccacgcctggccaatttttgtatttttaatagagacaggttttttgccatgttggccaggctggtctcgaactcscagcctcaggtgatctgcctgcctcagccttccaaagtgcagggattacaggcgtgagccaccacgcccagccagatgatataaactttatagttggaga

SEQ ID NO: 371923 - DNA, 201 bp, Homo sapiens
taagaaaaagtaatttaaagatgtagaaaactgaatagtgaatgagcttataaaagttgctaagcatctctagtgcagataaaatatgagataaccatttcacacttagcaaactggccaaaattgaaaagcctaacaatactagtattggcagagatgtgggaaaatgagaacttttatacactgttgaaatataaattg

SEQ ID NO: 371924 - DNA, 201 bp, Homo sapiens
ctttcatctctgtaatagagccgtgaccccatccaatgggaatattatccagaagcattgtgttttgttacatgaatctggtcagacttttccttagggayagtccggaaacaatgcttggcaaggatgatacaaactttttttttttttttgagacactttttttttggcccactgtaacttccacctcctgggttcaag

SEQ ID NO: 371925 - DNA, 201 bp, Homo sapiens
tattgagaagaatactgtatatctactccgtgtaatttgccatataatgtggcatttttatcttatatctgataattgttctatcataatatgaagttttmattttttttttttttttgagagggagtctcactctgtcacccaggctggagtgcagtggcatgatcttggctcaccgcagcctccgcctcttgggttcaa

SEQ ID NO: 371926 - DNA, 201 bp, Homo sapiens
attctctgttagaggtagccccatttttaagagacaaactttcctggtacatttcaagaggtatttattatattcaatcttacatgttgtaactgagtaacattttgttactcagtgtgtgtgtgcacatgcacttcagaaacattctttatcaaatgtatggaactatacaaatattggttcttgttctttcatgaatgt

SEQ ID NO: 371927 - DNA, 201 bp, Homo sapiens
tgcttggtctctgcattgtgtgaagaggcctctagttaggacttttggtcattttttaaaaaaaagttcctggcagtaagaaactatccatatagtcattstgccttaaatgttttgtactttttatgtccatttgagaggttgaatctttatgtagtaacggctaaggtgggtctcttataagatatactatagcctagc

SEQ ID NO: 371928 - DNA, 201 bp, Homo sapiens
attatgaacaactacgaataaattttgaagcctaataaaatgggaattgtttagaaaattttaatgaccgaaatagactctcaaaaaaaaaaaaaaaataraaaaccaaataaatgaacaaccattaaggaaataccagccagaatgacactttttgaatgacatcaggcccagaggtttttaaggcatatcttatcaaca

SEQ ID NO: 371929 - DNA, 201 bp, Homo sapiens
ggtttcagtccaaagacctggctcccgccctagccttctgagctaccaagtgcttgttcccgccgtctcttcaccaccccttaacccaccgtgtctaactsctaagcgatcgatgagatcctaagcgggaaaaggcagatagatcaccttgggaagggtaaccagatgctattttattcttgctcaatgtggaagggtggt

SEQ ID NO: 371930 - DNA, 201 bp, Homo sapiens
aactacgaataaattttgaagcctaataaaatgggaattgtttagaaaattttaatgaccgaaatagactctcaaaaaaaaaaaaaaaatagaaaaccaawtaaatgaacaaccattaaggaaataccagccagaatgacactttttgaatgacatcaggcccagaggtttttaaggcatatcttatcaacacttcaaaga

SEQ ID NO: 371931 - DNA, 201 bp, Homo sapiens
agggaggtcaagctgcagtgagccttgatcatgccactgtactccagcctgggcgacagagtgagaacctgtctcatttaaaaaaaaaaaaaaaaaaaaawtttcatgtaaatgggcctacaagtcatcaaaaatttaaaaacttttaactttatttccaacttacagaaataatgttttgtatgtaaaaaattcaaccag

SEQ ID NO: 371932 - DNA, 201 bp, Homo sapiens
aagcctaataaaatgggaattgtttagaaaattttaatgaccgaaatagactctcaaaaaaaaaaaaaaaatagaaaaccaaataaatgaacaaccattarggaaataccagccagaatgacactttttgaatgacatcaggcccagaggtttttaaggcatatcttatcaacacttcaaagaataaataatttctaccat

SEQ ID NO: 371933 - DNA, 201 bp, Homo sapiens
aaaaaaaaaaaaaaaaaatcatactagccctgaaaaggaccatgaaattggagatcatctagttcagtgtttctcaagcttcttgtgaaatgcagattctkgttcagtaagtgtggaagggagcctgagattttgcatttctaccagcttcctaggtgatgccactgtagctgctgctggtagtaaaaatctacaaaaacc

SEQ ID NO: 371934 - DNA, 201 bp, Homo sapiens
atgaccgaaatagactctcaaaaaaaaaaaaaaaatagaaaaccaaataaatgaacaaccattaaggaaataccagccagaatgacactttttgaatgacwtcaggcccagaggtttttaaggcatatcttatcaacacttcaaagaataaataatttctaccataaatgaaaattttcagaagttagaaaaagagaagcc

SEQ ID NO: 371935 - DNA, 201 bp, Homo sapiens
atcagaagacagtgggatgagtgcttgaaaatgtctttcacattctctattatttctttctgccattagatgtttgctggacctcctcaactatcattaastcatcgtttccaactcttgctccttctgtattgctttctgggtgatttcttaatcattaatccagtaattcttactttccctatgtccagactgctgtta

SEQ ID NO: 371936 - DNA, 201 bp, Homo sapiens
ataggtttttatttaaagtgagaaatgtgagactcatccttttacttgacacttagaatccattgcaggattattagttggcctaaattcaatattgtctygtctcagggaataaggaggcccaaggagagagagagagtcatgggaacggttggtcggtgaagcagtcagaacacacacagcatttattgattgaatttg

SEQ ID NO: 371937 - DNA, 201 bp, Homo sapiens
tggttgagcccctgagttcaaggctgcagtgagctatgatggtgccattgcactccagcctgagaagcagagtgagaccctgtcgctaaaaataataatawtgaaatgtttgacccatgacatagtgtaaatgatataattttttaaataaccaaagaaaaatggaactagatagtagatattatgaaagaaagggtacaa

SEQ ID NO: 371938 - DNA, 201 bp, Homo sapiens
cctcaaagatcactgatcacagatcatcataacagatataataataatgaaaaagtttgaaatattgtgagaattaccaaaatgtgacagaggaagtgagyatatgctgttggaaaaatggtgctgatagacttgcacgatgcagggttgccattcaatttatttaaaaaaacaagaaactgtgaagaacaacaaaacaag

SEQ ID NO: 371939 - DNA, 201 bp, Homo sapiens
ggagttaccagtttataaatggtaattcaaactgtagagtgtatgaaatgagctaaaggggagagtgtagattcagaagagaagaaaatactgaaatcccraagaaaacccatgtttaagggagaatgaagggacaagaggagaagattgaagagtaacctgtgagattagagaaaaactagaaaagcatgcactcatgga

SEQ ID NO: 371940 - DNA, 201 bp, Homo sapiens
tgttatccgtatcttctttagccattatttcttcatatgtgagaaagtagtagcctcagttttactttaaaaaaaaattttttttttaaatttagagtctkgctatgttgctcagactgatctcgaactcctgagctcaagtgatcctccttctcagcttcctgagtagctgggactataataggctttgtgccaccatgc

SEQ ID NO: 371941 - DNA, 201 bp, Homo sapiens
ccagggcttgccaggagttgtcgtctttattagcaggtggaggtctctgctccaaaattccgtcattcccttctcacctccctcagacctcctccaaagcygatttgcagactaagccagtaatacatatctcacaaggtgtggagctctgcaggacattcaagctaaaagatgcaaagaaaatttttaagcaaaaaggag

SEQ ID NO: 371942 - DNA, 201 bp, Homo sapiens
agtctcagctacttgggaggctgaggcaggagaatggcgtgaacctgggaggcggagcttgcagtgagtcgagattgcaccactgcactccagcctgggcracagagcgagactccgtctcaaaaaaaaaaaaaaaaaaaagatccatctatatgtttataagaaatataccttaaaaataaagatatggaaaggttgaaa

SEQ ID NO: 371943 - DNA, 201 bp, Homo sapiens
gtaccgctcagggaacacatgcccacaatcttgtcctgccaccactttatgagtatttattattaagagtatatgccatcctcactggttatttttgtacygctcagggaacacatgcccacaatcttgtcctgccaccactttatgagtatttattattaagaatatatgccatcctcactggttatttttgtaccgctc

SEQ ID NO: 371944 - DNA, 201 bp, Homo sapiens; identical to SEQ ID NO: 80561

SEQ ID NO: 371945 - DNA, 201 bp, Homo sapiens; identical to SEQ ID NO: 80562

SEQ ID NO: 371946 - DNA, 201 bp, Homo sapiens; identical to SEQ ID NO: 80563

SEQ ID NO: 371947 - DNA, 201 bp, Homo sapiens; identical to SEQ ID NO: 80564

SEQ ID NO: 371948 - DNA, 201 bp, Homo sapiens; identical to SEQ ID NO: 80565

SEQ ID NO: 371949 - DNA, 201 bp, Homo sapiens; identical to SEQ ID NO: 80566

SEQ ID NO: 371950 - DNA, 201 bp, Homo sapiens; identical to SEQ ID NO: 80568

SEQ ID NO: 371951 - DNA, 201 bp, Homo sapiens
ttctaatcacagctactatctgaaaacccccccgatggagaaagattttcaaagatggtagaggtatgtgttttttatgcttacatcctcttcttagcacraaatagaacttcagaggattccactaaccaaaatgtaatcgctttgtttttcccagcatatattaaacactgaagaaaactggaactcgtggaaaaatga

SEQ ID NO: 371952 - DNA, 201 bp, Homo sapiens
ttctcatttaactattagagtaacactgtgaagtaggctaagttggttattcctggtacatgaggtagaagctgacaccccccaaaaagttgtgacttcastggtttttctgactttagacactctgttctttttatgttgctcgtcacagcaacgtaagtatgaagaacacttttaagttgcctgactctattcgtctct

SEQ ID NO: 371953 - DNA, 201 bp, Homo sapiens
cagtaaatgctggttattatgattttatagaacctaagcactgtcttccttctattaaaaccacccctcagacacatgggtgtattagtagttaattctcmtagccctgcctttgccctgtgccactggctgagttatggcttcagcacttctgtccttgattagcttatagccttcatcttgctaatataaccattttct

SEQ ID NO: 371954 - DNA, 201 bp, Homo sapiens
tcttatctcctcctctgtagccctgtgctttctttccaaaagcaatcctcagtggcatagataggttctagaaactgcaacattaagtgaaatgatgtatratgaaatcaattttcccataggctaacaaacaaaagttaggttcttatggcctatttctggtcacaaaaacaatcaccaaactcctagataaagatcaaa

SEQ ID NO: 371955 - DNA, 201 bp, Homo sapiens
tgtttctcctctgttggtagataaatcattcatcatgtgaaaacgttttagctattatttctcttgctattgggggagtaactgaaggtaagtatggttcygttttgttttgtttaaagtaatcttggacatgacatgctttatttaaaacgtcttctccccatacttctccacctatctgattttgtttattcttcaagt

SEQ ID NO: 371956 - DNA, 201 bp, Homo sapiens
ctttgttctccagttgttttgttcattcagtaaattttcattgagcatctactatgtgcctggtactgagctaggacctggagattcaatggtgaataaarcatattcccctgcttatgtggagctaatggaagaaacagatgtatgcatgccttactatggtgtaagtactatggtcgaagtgggaatgaagtgtagtta

SEQ ID NO: 371957 - DNA, 201 bp, Homo sapiens
ttttggaggtttggtatagcatagtaggaagatgagggactttgaagtgagacgtgggtttgaattaaatctttatggccttgggcaaatcagtgagacayggtagtctctgtttaatatgtacatgtacttgttccgagaattcaatgaataatgtatgtaaagtgttcagatcctagccatcaatatttattggatgtc

SEQ ID NO: 371958 - DNA, 201 bp, Homo sapiens
acttactggctctatgatcttggtgaagttatttaacctctctgtgtctcagttttcccattctataaaatgcaaataatgatatgctctacctcataggrttgtaaggattaaatgtgttagtatatgtaaagtacttagtgtgcctgacatatagtaaatgctctagatcttgtcaagaattattgtcatcattactga

SEQ ID NO: 371959 - DNA, 201 bp, Homo sapiens
aactcctcaaagtgctgataaaataattttagaaatcacaaaaaaataaagattcacaaaaggaatcaaaactacaaacagaagagtaagcctatgaactratacggttctagggcagcagtactaatgattgccagctttgagaaccagggaacttgggttttaatagtcacaaaagttcgttgaacttgcaaaatgggc

SEQ ID NO: 371960 - DNA, 201 bp, Homo sapiens
tcataggattgtaaggattaaatgtgttagtatatgtaaagtacttagtgtgcctgacatatagtaaatgctctagatcttgtcaagaattattgtcatcrttactgagtgcacatatcaaaaattacttaagtatgtcctatttggggacttttaggttgcttccacttcttgtccttttaaaaccttgttatgagtaac

SEQ ID NO: 371961 - DNA, 201 bp, Homo sapiens
aaaacagacaacctacaaaggagcaaagttaaactaacagttgacttcaagaacaacaaaaatcagaagacagtgggatgagtgcttgaaaatgtctttcmcattctctattatttctttctgccattagatgtttgctggacctcctcaactatcattaactcatcgtttccaactcttgctccttctgtattgctttct

SEQ ID NO: 371962 - DNA, 201 bp, Homo sapiens
ccccataacccctggtctgtggaaaaattgtcttccatgaaaccagtccctggtgccaaaaaggttggggatccctgctttagaagtcttttgctgacagwcatgtcagtcttagcatatgggtgtgctttcactcgtcctgtaaaggtaaatactatagccaaaaccttttcatatgattgtaaaattgacttgtaatgg

SEQ ID NO: 371963 - DNA, 201 bp, Homo sapiens
gttaaactaacagttgacttcaagaacaacaaaaatcagaagacagtgggatgagtgcttgaaaatgtctttcacattctctattatttctttctgccatyagatgtttgctggacctcctcaactatcattaactcatcgtttccaactcttgctccttctgtattgctttctgggtgatttcttaatcattaatccagt

SEQ ID NO: 371964 - DNA, 201 bp, Homo sapiens
taatacatttagaatttaacaaaataattaacaggcttggtcttacagaaaccacaagtttttgtaaattatgtgtgaatagcaaaagcaaaaatacttamaactcctttaaacacacttctaaataacccttgaatcaaagaagtcataatggaaattggaaaatgtagagctaaataataatgaaaacactacatgttc

SEQ ID NO: 371965 - DNA, 201 bp, Homo sapiens
aacaggcttggtcttacagaaaccacaagtttttgtaaattatgtgtgaatagcaaaagcaaaaatacttacaactcctttaaacacacttctaaataacmcttgaatcaaagaagtcataatggaaattggaaaatgtagagctaaataataatgaaaacactacatgttcagacttttgagatctaactcagtagaaca

SEQ ID NO: 371966 - DNA, 201 bp, Homo sapiens
caggagaatcacttgagctcaggaggtcaaggctgcagtgagccatattcatgctcctgcattccagcctggctgacagagtcagatcctatctcagaaamcaataaataagaataataatttttattggaacacagccaccctcattcatttagattgtctctgactgcttttgctctgtaacagcagagataaatagtt

SEQ ID NO: 371967 - DNA, 201 bp, Homo sapiens
gattcctgccaaatctgtgagagtgaatcaacccagtagaaaaatgtacaaatgaatagtcagattcagaagtagaaaccttaataaacctctgagaagayggggaacttcactagtaactggaagtacagttaaaaactacagcaagcagtttccagctaagagattcagtaatttaaaaatacccagattttataagaa

SEQ ID NO: 371968 - DNA, 201 bp, Homo sapiens
actttatgagtatttattattaagagtatatgccatcctcactggttatttttgtaccgctcagggaacacatgcccacaatcttgtcctgccaccacttyatgagtatttattattaagaatatatgccatcctcactggttatttttgtaccgctcagggaacacatgcccactttggaggaattctttgaagaagcca

SEQ ID NO: 371969 - DNA, 201 bp, Homo sapiens
aggagttaccagtttataaatggtaattcaaactgtagagtgtatgaaatgagctaaaggggagagtgtagattcagaagagaagaaaatactgaaatccygaagaaaacccatgtttaagggagaatgaagggacaagaggagaagattgaagagtaacctgtgagattagagaaaaactagaaaagcatgcactcatgg

SEQ ID NO: 371970 - DNA, 201 bp, Homo sapiens
ggcagtagatagaatagtgctttttctcttaggtgagtttatgttccaagttcttgttagtacacatcctgatttcaaggattattcctgttaactaagcrtgacttggaatcacccttgtttcaaaatataagaaaaaaaaaactccccctgatccccatttctctccaactattagttctgttctctctacccttcaaa

SEQ ID NO: 371971 - DNA, 201 bp, Homo sapiens
gtgaggctgatttgaaatcttctcagataacatatttgcaagtttgttattaagatagtgggtccaggcacagtggctcacacttgtaatcctagcacttygggaggctgaggtgggcagatcgcttgagcctaggagttcaagaccagcctggacaacatggcaaatcctcattcctacaaaaaagtacaaaaattagca

SEQ ID NO: 371972 - DNA, 201 bp, Homo sapiens
tatacataagtttaggtgtcactggacttgctttgcatcttttttttgtttttttactaggtcttaacttgcagagtcagtttaatctggaaaatgtcacwgttttcaatacaaatgagcaggaaagcaccctgggtcagaaggtgaggctgatttgaaatcttctcagataacatatttgcaagtttgttattaagatag

SEQ ID NO: 371973 - DNA, 201 bp, Homo sapiens
cagtatctcacagcagctgttaacctatcctgttccccttaatgttttcttctcttggcgtccatgagaatccaaatccatggttcttctgtttgcccttkgccctcgttgcccactccacctcacattccatttcagcctcctcatcctctgcctaactcaaattttggagtaacatcaggaattggtcttagcctcttt

SEQ ID NO: 371974 - DNA, 201 bp, Homo sapiens
cttctgtttgccctttgccctcgttgcccactccacctcacattccatttcagcctcctcatcctctgcctaactcaaattttggagtaacatcaggaatkggtcttagcctctttatctagaaccttctgggtgacaccacagtctcatggctttaaataggaattgaagagtagtggtttaaaggcaagaggcctctgg

SEQ ID NO: 371975 - DNA, 201 bp, Homo sapiens
aacatcaggaattggtcttagcctctttatctagaaccttctgggtgacaccacagtctcatggctttaaataggaattgaagagtagtggtttaaaggcmagaggcctctggtcagaatgcataggttcgatcccctctaccacttacttactaggcaactaaggctaatttaataattaaaccgccagttccctttcct

SEQ ID NO: 371976 - DNA, 201 bp, Homo sapiens
aactaacacatatgagaataactttaatttagatactcatccagatgggttaaaggtatcaagatttaaaaagctgtaagtggtcaggcgcagtggctcaygcctgtaatcccagtactttgggaggcaaaggtgggcagatggcttgagctcaagagtttgagaccagcctcggcaacatagcttaaccctgtctctact

SEQ ID NO: 371977 - DNA, 201 bp, Homo sapiens
aaacaaataaaccaaatgagcaaggtaattgtaggtggtggttaaataccatgaaaaaaataagaaggtaactgtggggccaggatggtgggagctacttmatctagattggtgatgaataaatgcctctctcagaaagtgacattgaggctttcaaataaatgatgagacagaagcagtcctggaaaactaatttttcgc

SEQ ID NO: 371978 - DNA, 201 bp, Homo sapiens
ctggggagatataactaacacatatgagaataactttaatttagatactcatccagatgggttaaaggtatcaagatttaaaaagctgtaagtggtcaggygcagtggctcacgcctgtaatcccagtactttgggaggcaaaggtgggcagatggcttgagctcaagagtttgagaccagcctcggcaacatagcttaac

SEQ ID NO: 371979 - DNA, 201 bp, Homo sapiens
tctggcacctgagcaccaaggctgctgagtcccacgatggagtagaaggcagattccaaatttgtgaaagggcgatccagcgaggcttttagtctctccaygtcatgcttggtgaggtagtgagtgggcgtcagagcccaggtgctggctatgattgtcagggccaacaggaagacagtgcttgaaccttggggggaaaca

SEQ ID NO: 371980 - DNA, 201 bp, Homo sapiens
tatcctcagtaaccatcagtgtcctataggattacagtcttagtaatttctttttcctcttcaggtgccagaaattatgggagttatctgtgcccagttayccataatcagccagcctagagtccgccaacaaatcataaataccgtgagtttatttatatccagacccaagtacacagatatagtgctcagcttccttct

SEQ ID NO: 371981 - DNA, 201 bp, Homo sapiens
ttcagcagaatatgctttggaaaattgtggcttaccacgttagactgtagcaggcttccctctgtggctgaactgaagggaagcctggaaggatattgctscagtaacttcttgggggaaaactcttcctctaaccttttgtgagatttatctgaacagactgacaagctatgccatttatttctcacatcagaacagtac

SEQ ID NO: 371982 - DNA, 201 bp, Homo sapiens
cagttttgtccaaagtatatttggcaggaagttactcccatatatgtctcatgacattagagttccggcttctaagaaatttggaagggctgcctattgtytacctctcagagatttatattgtagtgattaagctgatcaaagaccctgagaagtcttgtggttaaaaagttttttaactagattcaacccatgattccc

SEQ ID NO: 371983 - DNA, 201 bp, Homo sapiens
agggaagggtacgtgcaggccttgatctcttcttcagtggcgaataaactggttggtaaagcagttacccaagaggactttattcccctctgtttgaagakatcagaaagagtcacaagccaactttaaagaatcttgatgacccttaagcagttccccagatgtagtaagactcagtcagctgtgatccctctagtgccg

SEQ ID NO: 371984 - DNA, 201 bp, Homo sapiens
agaagagtagaaaggacaggaacagcatttgaatttctcagcaaggccaacgctacattctcatgactcaagcagtagttcccagacagtccccataatcrtatgcctaggttcaggggacagccctgcctttttatagctgtgaaactgtaggaaattacttcacttctcaatgcctcagtttcctcccctataaaacaa

SEQ ID NO: 371985 - DNA, 201 bp, Homo sapiens
gtgccctggagataaccagatgcagatgagtagagccctgggagagctgtcagggctaaagatagagtcttaggctttgtcccttctggactataaagccrcaagaataaatgtgctccttgagaaaataaggaagaaagcagcagcccaccagcaagatcggagtcagaccaaagctggaaagtaagaggagaaaaactc

SEQ ID NO: 371986 - DNA, 201 bp, Homo sapiens
tctgaatggtctggatggtttgagcacagagtgtgtgatggggaagagatgaggccaaaaagttaagtcaggaccaggttatgaatagccttgaagtccaygctgaggcaatgggaacttgattcgataaaacctggggacttcaggggtggggggcaaggggagggagaccaataggacaaatacctaatgcgtgtgggc

SEQ ID NO: 371987 - DNA, 201 bp, Homo sapiens
actggcatgagccactgcacctggccacattcagcttttttacttagcagaatagcacattataaattccttagatacttgatttttaatggttgtgttcmtagactggctgtaggataattccttttactactgtcatgcaattatttccaaagcgcggtccttagaccaccgctgggtctataccccaaagaaaggaaa

SEQ ID NO: 371988 - DNA, 201 bp, Homo sapiens
cagaaagatctggccaggccagcactttgggaggccgaggcaggtggatcacctgaggtcaggaatttgaggccagcctggccaacatggtgaaaccccgyctctactaaaaatacaaaaaaattagctgggtgtggtggcaggtgcctgtaatcccagctacttgggaggctgaggcaggagaatcgcttgaacctggga

SEQ ID NO: 371989 - DNA, 201 bp, Homo sapiens
tgcacagaaggtcatgtacttattagtccctcttcttaaccgagggaatgataaacataaactcacatctgcaggcttttttgtggaggtaagactcattstttagaagctggattcaggaagcctatgaagcagcaatccctgccttcctaggctacatcgagttagtggcatgttgggatctgtttcaagagtgagata

SEQ ID NO: 371990 - DNA, 201 bp, Homo sapiens
cccgcgggcgacagccctctccccaaagccacgcgcaactcctcacccggcggcgccattcctccgagcaggtcccgccggagtccgagccgcgggctgasttccgctcgggaaagtggctccaagagcccgccacaggggacgccagggactcgcggcaggctctgcgggccaggatgagttctaagcacaggtcagtgt

SEQ ID NO: 371991 - DNA, 201 bp, Homo sapiens
tcacttgagcccaagaggttgaggctacagtgagccgtgattgtgcccctacctggatgacagagtaagatgctatctccaaaaacaaaacaaaaccacargactcaaataaaacagccttgtacatctttgtccacttctctgattgttaacttagactcaagtccttgttcaggacactttctatcataccatatttcc

SEQ ID NO: 371992 - DNA, 201 bp, Homo sapiens
tacccaactgattaaaaaaagaaaagatgattctggcagaagtggatcaagtcaattgaagtcagaggggattgcaagcccggggcttcagctaagagacsctgctttcatccatatgaaggcgtatggctccaggaatggagagtcacagaaaccgtgcagagcagggggtggctgatgctataactgataggaggtagg

SEQ ID NO: 371993 - DNA, 201 bp, Homo sapiens
taactgtggggccaggatggtgggagctacttaatctagattggtgatgaataaatgcctctctcagaaagtgacattgaggctttcaaataaatgatgasacagaagcagtcctggaaaactaatttttcgcatctcctctttattcctaggatctgtagtcaggaagaagtagtgatcccctgtgcctatgacagtgat

SEQ ID NO: 371994 - DNA, 201 bp, Homo sapiens
gatcatatagtaatgatatgacttctgggtgtcccaccctgcgtttcggaggcgttccgagggagaaagggtgattgctgtgatctgggcagtcacccagraagttcctgctacacacatactctactaacaaaaaataccctctcacttttgaattccctgtggaggccagcataactgtgaacaaataataaaccttca

SEQ ID NO: 371995 - DNA, 201 bp, Homo sapiens
aaaaaaaaaaaaaaaaaggatgctgggatatctctcttagactctaaggatgaggtttaaacaagcctccagaaaagtaagtttcaggacagctccagagstctcagaggcaggggcttcgctaccatcaccatgactcaaccctctagcaactcccgctttgtgcctgtcactgtaagattccaaattctgcaagagaaa

SEQ ID NO: 371996 - DNA, 201 bp, Homo sapiens
caagttctgaggtgcctatccaaacatctcaacttgaaggtgagcggcccttcagttgcagaggaggaaagatccaaagccattccctcactgccgatttmtcctcctctttataactccccaggctggttctgtgtccccttcgtgctcatgtactatcatagcacttagcattgtcttcttatctgctcttctcctgag

SEQ ID NO: 371997 - DNA, 201 bp, Homo sapiens
ataaacccctatccctgtcactgtcctgctgccaggcatctggggcctaagagcagggctggctgaaggaccttttgtggttcttgctggccacccagtckctgatcgtcactggcctaatgaatgggtactttctcaactctcaagttctttccctctcattgcaggtactggtacaagaggaacgcccgcattctctgt

SEQ ID NO: 371998 - DNA, 201 bp, Homo sapiens
tttgcatgtattacctcatttaattcttataataaccctgttttacagaaaaggaaacttaggtttcaggaggcaaactagcttgataaaggtcatacaartagtaagtggtagagccaagattcaaactagtctcaaattgagatttaaagtccatagtcttaaccattctgctacagctcagtcccaaaggttttttgt

SEQ ID NO: 371999 - DNA, 201 bp, Homo sapiens
acttactctagcataccaagatgcctaaatggattctgaaaataaaagaatggattaaaagcatgagtaactcccaattttcttcccactgtaatgttctyccacaatgtttatgtaactctcaggccctacatttgaatcaatgacagagaagttattacatattatttttctttagaagatatctcttctaggcaggat

SEQ ID NO: 372000 - DNA, 201 bp, Homo sapiens
taagcagtatggaagaacaggctgagacaaaaataagggcaataggaacctacttgaaactctggttgtcagagaacacctgtatgagaccatgagtgctrtttaaatctaaaggaggcttgaaagatgtgagagtaactcatgtgagtatagggagtactacagatagatggggacagcatgtgcatgacacaggaaaga

SEQ ID NO: 372001 - DNA, 201 bp, Homo sapiens
gtagagatcggattttgctatgttacccaggcttgtctcaaactcttggtatcaggcaatcctttcgccttagcctcccaaaggcaatgggaatacaggcrtgagacacaacacgtggccaggcagcatcttaagaagtcagttacacaatctaccacacaacccaaccattctgctcctagagggtttctttgtttttaa

SEQ ID NO: 372002 - DNA, 201 bp, Homo sapiens
gtctcgtcgggaggggatagcttagaagggatttttttttcctctttagaaaattgtggcagtttctggccgggcgcagtggctcacgcctgtaatcccaraactttgggaggccgaggcgggcggattacctgaggtgaggagttcgagatcagcctgggcaacacggtgaaaccccgtctctactaaaaatacaaaatt

SEQ ID NO: 372003 - DNA, 201 bp, Homo sapiens
tctggtttttttgatgggtttgtttgttttttgagatggagtcttgctatgtcacccaggctggagtgcagtggcacaatctcggctcactacaacctccrcctcccagttgaagtgattctcctgccttagtgtcccgagtagctgggattacaggcatgtgccaccatgcccggctattttttgtatttttagtagaga

SEQ ID NO: 372004 - DNA, 201 bp, Homo sapiens
tcacgcctgtaatcccagaactttgggaggccgaggcgggcggattacctgaggtgaggagttcgagatcagcctgggcaacacggtgaaaccccgtctcwactaaaaatacaaaattagccgggcgtggtcacacatgcctgtaatcccagctactcgggagcctgaggcaggagaatcgcttggacctgggaggcggag

SEQ ID NO: 372005 - DNA, 201 bp, Homo sapiens
ctcctcactgagaatgggatgactgtgtgctggtaagttggagggacctgttcaaatcacccacactgttttcgtttgatttagctttgccatgcaggctrcaaagactctcctcctcagaacatgctgcttgcaggaattcaacatcatggaaaagaataaaggatgggctctcctgggaggaaaagatggccatcttca

SEQ ID NO: 372006 - DNA, 201 bp, Homo sapiens
gccgaggcgggcggattacctgaggtgaggagttcgagatcagcctgggcaacacggtgaaaccccgtctctactaaaaatacaaaattagccgggcgtgktcacacatgcctgtaatcccagctactcgggagcctgaggcaggagaatcgcttggacctgggaggcggaggatgcggtgagccaagatcgcgccattgc

SEQ ID NO: 372007 - DNA, 201 bp, Homo sapiens
taataagaaggtcattatgtcagagtatcgcaagtgctgtgatagcaatttattcatgtggtttgtagatacacttagaaaggacactggaccagccaggygcagtggctcacacctgtaatcccagcactttggtaggccaaggtgggcagatcacgaggtcaggagttcaacaccagcctggctaacatggtgaaaccc

SEQ ID NO: 372008 - DNA, 201 bp, Homo sapiens
aggtcaggagttcaacaccagcctggctaacatggtgaaacccccatctctactaaagatacaaaaaattagccgggcatggtggcaggtgcctgtaatcscagctacttgggaggctgagacaggagaatagcttgaacctgggaggcggaggttgcagtgagccaagatcatgccattgcactccagcctgggcaacag

SEQ ID NO: 372009 - DNA, 201 bp, Homo sapiens
aaatttgcagtaattttgcaaattggttaaatacagccatttagaaaattatatcaatttaggatgaaataaagtatattgaaaacaaaactcattatttyctaattatttcactacattttacgttttgtgtgcttttgtggttgcttatatctgttgtaactgtgtggtggaaatatatgacagtatgccattgaacat

SEQ ID NO: 372010 - DNA, 201 bp, Homo sapiens
cctgtcttaaaaaaaaaaaaaaaggttctatgataaataggaattttatatatatatgtatgtatgtataattagaaaagaggccgggtgcagtggctcaygcctgtaatcccagcattttgggaggccaaggcaggcagatcatctgaggtcaggagttcgagaccagcctggccaagatgataaaaccccatctctact

SEQ ID NO: 372011 - DNA, 201 bp, Homo sapiens
tggtgcgtgcctgtggtcccagctagttgggaggctgaggcgggaggattgcttgagcccaggaggttgaggttgcagtgagctgagatcgtgccactgcrctccagcctgggtgacagagcgagactccatgtcaaaaaaataataataataatagtaataataaaataaaaaagaaaaagagaatgttagtactgagag

SEQ ID NO: 372012 - DNA, 201 bp, Homo sapiens
tacaaagacaaagaagacaaaatccctatttatgcagccaagcaaggtataataaaatgtcacaggaactgtgacaagtttaaataggcatatggggggcwgagagcagagattgagtggtcagttccatggcaaaggatccagaagggcattgcaaaggagctgatgcactcaagcaagtacttcttggtgttttagttt

SEQ ID NO: 372013 - DNA, 201 bp, Homo sapiens
gacaaagaagacaaaatccctatttatgcagccaagcaaggtataataaaatgtcacaggaactgtgacaagtttaaataggcatatggggggcagagagyagagattgagtggtcagttccatggcaaaggatccagaagggcattgcaaaggagctgatgcactcaagcaagtacttcttggtgttttagttttctcat

SEQ ID NO: 372014 - DNA, 201 bp, Homo sapiens
gaaggtgagcggcccttcagttgcagaggaggaaagatccaaagccattccctcactgccgatttctcctcctctttataactccccaggctggttctgtrtccccttcgtgctcatgtactatcatagcacttagcattgtcttcttatctgctcttctcctgagcagcttggggccagttgctgtgttgattaatcttt

SEQ ID NO: 372015 - DNA, 201 bp, Homo sapiens
acttgaaaagctgaaattcctaggagatctgtcttctctcagccaagctttaccttatgatgaaaccgcaaaatcattcattcacagccacatagcagacrttgtgcataccttaaatgtaagtattatgaccttatcacaaatgattgggatcacacaaattcagtgacttggccaaagcattttttagtggcttcacct

SEQ ID NO: 372016 - DNA, 201 bp, Homo sapiens
ctcccccaggcatttttgttcaagtgaaaaagaagagtgagatcttggaatccactttaaactgaagatcaaccagacctgtaaaatcaagaagaaaaaargaagccagaaagtattaatattttatattttcttttcagatatcactcatgacaagaaagatcagcaaaacttgaaaagagcattgacaaaatgtcgaga

SEQ ID NO: 372017 - DNA, 201 bp, Homo sapiens
taattcttatccctttcccctgaatttttgttaatcatgacatttatcatcatttgatacataatacattttacatatttattttgtttactttgtgtttycccaactagatcatcacctccacaagcagggatattctcttttgttgactgcttatatccccagtgccagtcatagttcctggcatataacagacactgt

SEQ ID NO: 372018 - DNA, 201 bp, Homo sapiens
taatcctgacattttgggaggctgaggcagaaggattacttgagccaagagttcacagccagcctgggcaacatagtgagacccctgacttcacaaaaaawtttaaaaattatcagagtgtagtagcaggtgcctgtagcctcagctactcagaaggctgaggcaggaggatcacttgagcccaagaggttgaggctacag

SEQ ID NO: 372019 - DNA, 201 bp, Homo sapiens
tgtgaccatgtagacgagggttctctctaatggagtttatagtctgataggagacagtcaaacaaataaaccaaatgagcaaggtaattgtaggtggtggktaaataccatgaaaaaaataagaaggtaactgtggggccaggatggtgggagctacttaatctagattggtgatgaataaatgcctctctcagaaagtga

SEQ ID NO: 372020 - DNA, 201 bp, Homo sapiens
gggtttcgccatgttggccaggctcgtctcaaattcctgacctcaagtgatccacccacctcaccctccaaaagtgctgggattacaggcgtgagccactrcgcctggccatgatccatatttttaacttttgaaaactgtttatgtagaaaagaggaagccaaatccgtgtttttgagtaagcactttgatttcatatat

SEQ ID NO: 372021 - DNA, 201 bp, Homo sapiens
atgcacagatgctagcagtggacatttggattgcttccacctttttaccatggtaaacaagactgggctgggtgcatggcttgcacctataatcctgacaytttgggaggctgaggcagaaggattacttgagccaagagttcacagccagcctgggcaacatagtgagacccctgacttcacaaaaaaatttaaaaatta

SEQ ID NO: 372022 - DNA, 201 bp, Homo sapiens
gcaaatagttatgaagcatttattgttctagtgatgcatcagtaatcaagacaaacaagataccttcccccagggaacttattttctagttggagagaaartatcctcagccaagggctcaaagataaattttccatctacgaatttccagcaaatattaggtcacaatgaaacatgagaaaaacaagacactacaaggag

SEQ ID NO: 372023 - DNA, 201 bp, Homo sapiens
tggagtctcattctgttgccccggctggagtacagtggtgcaatctcggctgactgcaacctccgcctaccaggttcaagcaattctcctgcctcagcctsccgagtagctgggattacaggcatgtgccaccacgcccagctaatttttttgtgtttttagtagagacggggtttcaccatgttggccaggctggtcttg

SEQ ID NO: 372024 - DNA, 201 bp, Homo sapiens
agcccagaagttggaggctgtagtgagctatgattgtacttacgaatagctactgcactccagcctcaggaacatagtgagacccccatctttaaagaaakagagagagagggagagggagacagagagaggaagagaaggaggagggagggaggggagggaagggaaagggagaaagaggagtgagggaaggaaagaagg

SEQ ID NO: 372025 - DNA, 201 bp, Homo sapiens
aatcagccagcctagagtccgccaacaaatcataaataccgtgagtttatttatatccagacccaagtacacagatatagtgctcagcttccttctgtgtyatccagtgccgtataacaggtaacagaaccccgtacagcctctggattaaattggattatgtgacacagctctgggtattgtgaaacatggttgccctca

SEQ ID NO: 372026 - DNA, 201 bp, Homo sapiens
tggcagtttcttaaaaagtgaaacatgcacttaccatatgacccagcagtttcactcctaggtaaaacaaaacatatgtccacacaatgatgcatgcacaratgtttacagcagctctatatgtaaaagccaaaccctagaagaagcccaagtgttcattagcaggtgaacggataaagaaattgtggtattgtatatcca

SEQ ID NO: 372027 - DNA, 201 bp, Homo sapiens
ttttaacagcagcatagtatttcttacctatccattcactcctaatgagactgacaacatgctaggtaggtattggggatacaaatgtgaccatgtagacragggttctctctaatggagtttatagtctgataggagacagtcaaacaaataaaccaaatgagcaaggtaattgtaggtggtggttaaataccatgaaaa

SEQ ID NO: 372028 - DNA, 201 bp, Homo sapiens
atgagctctgccagtttataatgactacatttgataccctgaaaaacctgaaacatccctgcatccagcgatcagcaggagaattactgctaactttggcraaaaatacagagtcccaatttgagaaggtaaactttcagtggcaatttcctgggttcaaaaagccagtagaacctcttcatccctgcagctattgaagtc

SEQ ID NO: 372029 - DNA, 201 bp, Homo sapiens
agtttgagaccagccttgccaacatggtgaaaccccgtctctactaaaaatacaaagattagccaggcatggtgataggcgcctgtagtcccagctactcyggaggctgaggcaggagaatcacttgaacttgggaggcagaggttgcagtgagccaagatcacaccactgcactccagcctgggcgacagagccagactc

SEQ ID NO: 372030 - DNA, 201 bp, Homo sapiens
ctacttgggaggctgaggcaggagaatcgtctgaacctaggaagcggaggttgcagtgagccgagatcgcactattgcactccagcctcggcaacaagcgygaaactctgtctcacaaaaaaagagaaaaaaagagttaatggaattaaatgaaataaataaaaagtccaaattatatatattcataatagttgatagctg

SEQ ID NO: 372031 - DNA, 201 bp, Homo sapiens
catggtgaaaccccgtctctactaaaaatacaaagattagccaggcatggtgataggcgcctgtagtcccagctactctggaggctgaggcaggagaatcrcttgaacttgggaggcagaggttgcagtgagccaagatcacaccactgcactccagcctgggcgacagagccagactctgtctcacaaaaaaaaaaaaaa

SEQ ID NO: 372032 - DNA, 201 bp, Homo sapiens
gacaccatctcggctcactgcaacctccgcctcccgagttcaagcgattctcctgcctcaccctcccaagtagctaggattacaggtgcccaccatcatgyctggctaatttttgtatttttagtagagatggggtttcaccatgttggccaggctggtctcgaactcctgacctcaggtgatctacccgcctcagcctcc

SEQ ID NO: 372033 - DNA, 201 bp, Homo sapiens
ggctggagtgcagtggcacaatcttgactcgctgcaacctctgcctcctgggttcaagcaattctcctgcctcactcagcctcccgagtagctgggattayaggcgtgcactaccatgcctggctaatttttgtatttttagtagagacggggtttcgccatgttggccaggctcgtctcaaattcctgacctcaagtgat

SEQ ID NO: 372034 - DNA, 201 bp, Homo sapiens
agctgaggtgggtggatcacttgaggtcaggagtttgagaccagcctggccaacacagcgaaaccccatctctactaaagatacaaaaatcagctgggtgyggtggctcacacctgtaattccagctactcgggaggctgaggcaggagaatcgcttgaaccagggaggcagaggttgcagtgagctgagattgtgccatt

SEQ ID NO: 372035 - DNA, 201 bp, Homo sapiens
aaaagaaacgaagtctcactatgttgcccaggctggtctccaactcctgaactcaagcagtcctcctacctcagcctcctaaagtgcagggactacaggtrtccaccaccgtacccagctgagctgaaagttttctatcacctagtgacattgtagccatcataacattacagtacaatgcattattcatgtttgtggtga

SEQ ID NO: 372036 - DNA, 201 bp, Homo sapiens
ccccgtctcaactaaaaatacaaaaagtagctgggcgtggtggcgcgtgcctgtagtcccagctacttgggaggctgtggcaggagaatcgcttgaacctyggaggtggaggttgcagtgagccaagatcgcaccactgcactccagcctgggtgacagggcgagactccatctcaaaaaaaaaaaaaagatgcggtccat

SEQ ID NO: 372037 - DNA, 201 bp, Homo sapiens
tagtcccagctacttgggaggctgtggcaggagaatcgcttgaacctcggaggtggaggttgcagtgagccaagatcgcaccactgcactccagcctgggygacagggcgagactccatctcaaaaaaaaaaaaaagatgcggtccatattttctagaagagtagagtttttctggggagatataactaacacatatgaga

SEQ ID NO: 372038 - DNA, 201 bp, Homo sapiens
taatttaaccttctatgaacctggcattgtgcaagtccctgaggaattcctagaagaagagccagaaagaatcctttccttcagagcgaacagatacacayataaagaactgatgatagcacacataagattgaagtgacctctaagaagaagaaactttttaagtgctatgagaactcttacgaaagacatggtgaagaa

SEQ ID NO: 372039 - DNA, 201 bp, Homo sapiens
aaacaggcttcgagcagctacgttccgactctttcctcagcttctcatgacactgcttatccagattcatcacagcatcggcctcaccatgtctgatgtcracatcccaagtggcctgtacacagaacaggaagtgccttcagaggtcacccctttgtggtactgcccatcattatttcattgacattaagtaacacgtac

SEQ ID NO: 372040 - DNA, 201 bp, Homo sapiens
tgtggcaggagaatcgcttgaacctcggaggtggaggttgcagtgagccaagatcgcaccactgcactccagcctgggtgacagggcgagactccatctcaaaaaaaaaaaaaagatgcggtccatattttctagaagagtagagtttttctggggagatataactaacacatatgagaataactttaatttagatactca

SEQ ID NO: 372041 - DNA, 201 bp, Homo sapiens
ataattgaactggactcttcaaaaaaattaacatcatggaagtaaaactggtggtgagggaactgtcctagataaaaagatattcaaaaacatacccaaaygcactgcgtgaccttgattggatcctggttcaaaaacaaaagctataaaagaaagcttggagaaaatttaaatatggactctatactagaatattaaatt

SEQ ID NO: 372042 - DNA, 201 bp, Homo sapiens
atgatcatgcctttacattccagcctgggcgacagagggagatcttgtctcaaaaaacaacaacaaataaaacaaattaaaaacaacaacaacaaatgatragcaccctttttttaacctattaaaataacaaagatgcaaaaagaataacacgataagagcaggtgagatgggcatttgtatcagttgggtgcttttagc

SEQ ID NO: 372043 - DNA, 201 bp, Homo sapiens
caggacatgcaccccgcccttaagcagcacagtctggtagccccatagatgcataagtattctaaagctaagtagggagttctgtggaagcccctaggtcrggacttaattaaatgaagggtcaggaagtgatttctgaaagcagagctgcccccaagctgatgaatgctaagagccagatgcagatcaaagtggctggag

SEQ ID NO: 372044 - DNA, 201 bp, Homo sapiens
tggctcatgcctgtaatcccagcactttggaaggccgaggtgggtagatcgcttgagcctaggagttcaagaccagcctgggcaacatggcgagaccccawctttacaaaaacaaatttaaaaattagccaggtgtggtggcacatgcttgtggtcccagctattcgggtggctgaggcaggaggattgcttgagctcagg

SEQ ID NO: 372045 - DNA, 201 bp, Homo sapiens
ccaacaggacccgctcagtgaggccattgttgagaaactgatccagtccatccagaaggttttcaatggtgagctaaaggtatgcacaagcaatttttatsagttatccaacttattcctccattttaacaaatattttaaacatattatttcttgattatacaaataattttatattataggttataaaacatgtttgtt

SEQ ID NO: 372046 - DNA, 201 bp, Homo sapiens
ttagcctccctttatttctcacagcacttggtcccctggttacagtcagtcaaagaccatgagcgggaacgggccacggccagcatggctcaagttctgargtgcctatccaaacatctcaacttgaaggtgagcggcccttcagttgcagaggaggaaagatccaaagccattccctcactgccgatttctcctcctctt

SEQ ID NO: 372047 - DNA, 201 bp, Homo sapiens
gttaaattaagcttgaactagaatccttgaaaaaaggcactattggccagcggcactggctcacttctgtaatcccaacacttggggaggctgaggcaggyggatgcttgagcccaggagttcaagactagaccaggcgacatggcgaaaccctttctctacaaaaaagaaaatacaaaaattagccaggcatggtggcgt

SEQ ID NO: 372048 - DNA, 201 bp, Homo sapiens
tccgcctgccgcagcctcccaaagtgctgggattactgctatgagccaccatgcccagcctactggtgctgatgatggccattttatattaagtggttgargtgtgcctctctgagaagctgacatttccacagagacaggaacccatgcgtctgtgggtgggaagagcggtccaagcagagaaatagaccaaagcccagt

SEQ ID NO: 372049 - DNA, 201 bp, Homo sapiens
tggaaaatcttgacaccattattaaggtaaacaagatatcaagggagagtgggaaatgattcctattaactggtgaaagtgggagatgaaaatgtggaagkattcagtggtaagaggcaacgtagtaaagagtatcagctatcaactttgagtcagagacttgggttcaaatgctgactctgccattcattggttacacgt

SEQ ID NO: 372050 - DNA, 201 bp, Homo sapiens
aaagagtcacaagccaactttaaagaatcttgatgacccttaagcagttccccagatgtagtaagactcagtcagctgtgatccctctagtgccgaggcgyctgtttgaaatgaagatgtattcctttttacctcatgccacaaacaacctactagtacctttacactggtactgcaactttgagtaaagtcttagggtca

SEQ ID NO: 372051 - DNA, 201 bp, Homo sapiens
aacaacctactagtacctttacactggtactgcaactttgagtaaagtcttagggtcacatgaagagcctccaaagtgtcccatgctaggggaacttcacrtggggccagggagtgttgctgatcctgtgccttttcagtgtctttacaggcagacgtttcaggcattctctgagatgctccagagtttggtggtaaaaga

SEQ ID NO: 372052 - DNA, 201 bp, Homo sapiens
agctatgccatttatttctcacatcagaacagtacactagcctgtctaccctttcctttttagttgatctctgcttatcagtatcaaatcaaaccgtcttyccagcttgctgttcccaaactgtcttttcttagttaccaagatgtccatttgctgttgggctctgaagatcgagctgagttgttcagtcttaccatcaag

SEQ ID NO: 372053 - DNA, 201 bp, Homo sapiens
aaaaagaaacaaacaaacaagcaaataaaaaaacagtttgagaccagtttgggcaatgtggtaaaactcaatctcttaaaaaaaaaaaaaaaattagccgsatgtggtggtgcatgcctgtagtcccagctactcgggaggctaaggtgggaggatcagctgagtccaggagacagagattgcagtgagccgagatcaagc

SEQ ID NO: 372054 - DNA, 201 bp, Homo sapiens
gagcttttgggaggctgaggtaggaggatcacttgagtccaggaattcgagacccacctgggcaacacagcaagacctgcctctacaaaaaaaaaattttrattagccaggtgtggtggctcgcatctgtggtcctagtgactagctgtggaccacagatgggagccaccacacctgactaatgaaaaagaaaaagaccaa

SEQ ID NO: 372055 - DNA, 201 bp, Homo sapiens
ctgaagcaagggaattgattgaacccaggagacagaggttgcaatgagccaagatcacgccactgactccagcctgagtgacagagcaagacaccgtgtcwaaataataataataaaatttaaaaaataaataagtaaataaaagaaaatatggagcaataggaatcctactctgcttgttggcaaataaatggatacaac

SEQ ID NO: 372056 - DNA, 201 bp, Homo sapiens
ggttgaggcaggcaaattgcttgggcccaggagttcaagaccagcctgggcaacatagtgagaccccatctctacaaaaaaatttttttaaattagccagscatggtggcacacacctgtgttcccagctacttgggaagctgaggcaggagggttgcttgagcccagtaagacaaggctgcagggagccatgatcatgcc

SEQ ID NO: 372057 - DNA, 201 bp, Homo sapiens
ttacaccacagacttagcatatgcagccaggaatggtggctcagtctgtaatcccagagcttttgggaggctgaggtaggaggatcacttgagtccaggarttcgagacccacctgggcaacacagcaagacctgcctctacaaaaaaaaaattttgattagccaggtgtggtggctcgcatctgtggtcctagtgactag

SEQ ID NO: 372058 - DNA, 201 bp, Homo sapiens
cctgggtacttgagattagggagtggtgatgactcttaaccagcatgctgccttcaggatctgtttaacaaagcacatcttgcaccgcccttaatccattyaaccctgagtggactaagcacatgtttcagagagcacagggttgggggtaaggtcacagatcaacaggatcccaaggcagaagaatttttcttagtacag

SEQ ID NO: 372059 - DNA, 201 bp, Homo sapiens
ttccgctcgggaaagtggctccaagagcccgccacaggggacgccagggactcgcggcaggctctgcgggccaggatgagttctaagcacaggtcagtgtscgcggccccgctgagcttcgacgcttccagcagccgcggccgggatcccagtcctcccgctcacagggccttgcagttcccgaggacagacccgcctctc

SEQ ID NO: 372060 - DNA, 201 bp, Homo sapiens
ttggaagttcattttcctacatcatttcaggtctttgaaggttttcttgattcaaatgagctctgccagtttataatgactacatttgataccctgaaaamcctgaaacatccctgcatccagcgatcagcaggagaattactgctaactttggcgaaaaatacagagtcccaatttgagaaggtaaactttcagtggcaa

SEQ ID NO: 372061 - DNA, 201 bp, Homo sapiens
gtcacagatcaacaggatcccaaggcagaagaatttttcttagtacagaacaaaatgaaaagtctcccatgtctacttctttctacacagacacggcaacyatccgatttctcaatcttttccccacctttcccccctttctattccacaaaaccgccattgtcatcctggcccgttctcaatgagctgttgggtacacct

SEQ ID NO: 372062 - DNA, 201 bp, Homo sapiens
gaattctccagcacaacataagtacctgccctccttacgcattcagtccccatgttctggaaaggccttttacagtagttcctaaagagaaggatacatgrtccataggcagagatgaagcaacactgacttaataattagaatcctaacactagatcagacccatcattgccatccatctgcatagccagggagtggcta

SEQ ID NO: 372063 - DNA, 201 bp, Homo sapiens
cacacaaaccacaatcactttgggatattattaaaatgcaggttctcagctgggcgcagtggctcacacctgtaatcccagcactttgggaggccgaggcrggtggatcacgaggtcaggagatcgagaccatcttggctaacatggtgaaacaccgtctctactaaaaatatgaaaaattagccgggcgtggtggcgggc

SEQ ID NO: 372064 - DNA, 201 bp, Homo sapiens
taagtatacagttcaatgagttttgacaaatatatattatctgggtctctaacttttttcatattctcaaagaaatctaaagaataaagaataaaaaaggwaatgctgaagaagcatttagtaatcaaactaggagcgtaattcttcagtggccttttttgtcttgataaagtttgggggttcttaatattatgattataa

SEQ ID NO: 372065 - DNA, 201 bp, Homo sapiens
taccctttttttattgttgttattttatttttatttttcttatcctttttttaagatgcagatatcccagaaagggataaggctttaagctattattaatygtttgcacccaaatgatgcatttattgttgtcctaactgacaagcaaggcacaaaaacctaggcagtcgagtggtttggctgctacaggagcttattttc

SEQ ID NO: 372066 - DNA, 201 bp, Homo sapiens
tggcacaaccctgactctactaaaaaataaataaataaataaataaatacagaaattagccaggtgtggtggtgcacacctgtaatcccagctactcaggwagctgaggcatgagaatcacttgaacccaggaggaggaggttgcagtgagcagagatcgcaccactgcactccagcctgtgtgacagagaaagactctgt

SEQ ID NO: 372067 - DNA, 201 bp, Homo sapiens
acattccatttcatagactgtcccctgcctttttatgatgtatgcttcttaccatgtctgtatgtcaatgtgaccccacctctttcaaacctgactcaaaytcttcttttctgggtgtgttgaacttattttactcttcttgttccttgattctgcctcaagattcttgcattgttggtactatatttatttactttttta

SEQ ID NO: 372068 - DNA, 201 bp, Homo sapiens
tgtggtccctggctcctggctcctagtctccctgtggcttctgggatacagaacaacttggagagagagaaagcttaccatagcgaaggtaaatgtccaaygtgtcccgagactggtttctcagacctttccacaggctgtaggagtctgttgttttaggtctgcccatggtaacttttgggttaaagctcctctgttgcc

SEQ ID NO: 372069 - DNA, 201 bp, Homo sapiens
attgcagatcataccgagtttttagtaactaatagtgtagttgcaaaatttcacccattgtcatcattgtgtattagcatttaattaaataccatcccagrgtggaacatgacggcactgaaattcttgaatctgaccaaaattaaagtccagatcccaacttttattttctttcagtatgataaaatagcatgctttaaa

SEQ ID NO: 372070 - DNA, 201 bp, Homo sapiens
taacaataacaaatctgtcctggtgaaatgctggtcattgggaaatacaaccaccagaggcagagcaatgtaggataactttctggtttcataagacgttytgaaagcctacatgatatagaccagctgccagatgattgatttggttttggcctccccattctataatttcaagtcaccaggcagagctgcttctgatcc

SEQ ID NO: 372071 - DNA, 201 bp, Homo sapiens
atgttttgtgtccctagtcattggtctagaatgttcttaccctgctccggatcactgctgaatttagtttaaactgttcacactgacatgcaagtttccgwaagtctgtggccagtagctcagccagagagagcaaaagtggtgaaaggttttggggagggaagcttgatagttttcagaactggggtttacaaggctgcc

SEQ ID NO: 372072 - DNA, 201 bp, Homo sapiens
ctgccagcttttcattgtgtgtgtttattttattgcctaattacaaaagcaactgtagcaacttggaaagtacaacaaaataccaaggaagaaaattaaartcatccataatcctacccattcagagaatatcagtggtagaatgttggtatattttcttctcttttctgtgtgtgtgtgtgtgtgtgtgagtgagtgtgt

SEQ ID NO: 372073 - DNA, 201 bp, Homo sapiens
gctgtcctctaggctggggcagagggagagtcgtgtctcaaaaagaaaacctttccttgacagcttccgcagagccctgtataaccagcttcagccgctgyggcttgggcctcgggttgctggcggctgaattcaggtcggcttcttcattggccacttgggctttttccttccaggctgtttcatgaacagctcagcatt

SEQ ID NO: 372074 - DNA, 201 bp, Homo sapiens
cgtatgcattatgtattttgataagtgttaacacgattgcagttgtattcgctcatactgagaggaacagtacctgagggttagaaatacattttgatagytctacttaaaattcactttcctttgaaaacagctcatttcacaatgtttaaatatcgttgtttaggtcttttgagacaatgtatggctatttgcaaggtg

SEQ ID NO: 372075 - DNA, 201 bp, Homo sapiens
gcctataatttcttataagtgaaaatgtaaagggcgtatgcattatgtattttgataagtgttaacacgattgcagttgtattcgctcatactgagaggarcagtacctgagggttagaaatacattttgatagttctacttaaaattcactttcctttgaaaacagctcatttcacaatgtttaaatatcgttgtttagg

SEQ ID NO: 372076 - DNA, 201 bp, Homo sapiens
ttactgatggaatgctggtcagggaaatgatggttgatccgttgttaacaaaatataggtaaatgtgtttttcttatgatagctttcctagtttccaaagyccccaggtagacggagaagcaggtgtgttagtagctgggattcacgtctgtgttcagctgccccaaagcttttctcttgaccttggctgttgggaccctt

SEQ ID NO: 372077 - DNA, 201 bp, Homo sapiens
ccttggtggaacgctgggcagatgcggcggcctgacttcggtcttggcgccgcggccggcgccctggggccagcagacctgctcgcaggcctgacctcggygagctgggcgctgccgcctctgtgcggggggagctctggctcaggctccccagtggtcccgagggatttgggggtgctcccctagcgtgagcagaaactc

SEQ ID NO: 372078 - DNA, 201 bp, Homo sapiens
ttgcagtctggtttctttgtctaatcaaccccaactgtagtgtcttctcttctgttgcagcacctgtctctgaaagccaaaagggccaaggtccaggaccygtgagaggagcccacagctacagctgcagggactgctggcgtcctctcctccatgctgctgcccctggtcccaggtggggtgagctggcaccagctcctg

SEQ ID NO: 372079 - DNA, 201 bp, Homo sapiens
atctaccctccacgctcaagaggtaggcggaggagcgcgcccttttctccaaaatggctgagcagggtcacgtgggctcgggggcggggccggtgcgctcsccggagcctggaagtgggtcacgtggctcagacgggggcggtagctgtgggggcgtggccgtcacacggcgcgatccgtctgggcagcggctcttcgggg

SEQ ID NO: 372080 - DNA, 201 bp, Homo sapiens
gggaggagcatgttttgtgtccctagtcattggtctagaatgttcttaccctgctccggatcactgctgaatttagtttaaactgttcacactgacatgcwagtttccgtaagtctgtggccagtagctcagccagagagagcaaaagtggtgaaaggttttggggagggaagcttgatagttttcagaactggggtttac

SEQ ID NO: 372081 - DNA, 201 bp, Homo sapiens
aaacaggttcaggaggttgagtaacttgtccagggtcacatgattagggagaattcaaacccagggcaccccctgacttggaaactcacagtctttctagwatattaaactgcctctcacagattctgcaatgttggaaatgttaaatcttttaggatttttacgagtttgttaaaagcaaaaagaataaaatgagtttta

SEQ ID NO: 372082 - DNA, 201 bp, Homo sapiens
gggtgcggtggtgcgtgcctgtaatcccagctactcgggatgcccaggcaggagagtcgcttgaacctggaaggcggaggttgcagtgagctggcatctcrccactgcactccagcctgagcaacagagactccatctccaaaaacaaaagctgataatagaagagatagattggggctgtaggttagagacaagggagga

SEQ ID NO: 372083 - DNA, 201 bp, Homo sapiens
aggcatcagctaatcagcgagcaggacgtggtggtcgtagtcgctcgggaaaatgttatcgcctttatacaggttagtgtggctttccctaagggtttttsactttcttatagtcagcctgggcaacagagtgtagcaaatgtttactcctaatggtagaacttaacataaaatacaggccttcctcacaaggccctgtgt

SEQ ID NO: 372084 - DNA, 201 bp, Homo sapiens
tggatgatggtgtttagaaaactcagcctctgatgtagaatgtcagaactgcatttgctcacaactctaaaggatggggaggagcatgttttgtgtccctwgtcattggtctagaatgttcttaccctgctccggatcactgctgaatttagtttaaactgttcacactgacatgcaagtttccgtaagtctgtggccagt

SEQ ID NO: 372085 - DNA, 201 bp, Homo sapiens
atggtagaaagtgacatttctggggaaaaaaaaaagtgtcactaggaggtgtcctttctgttttcccagcaagcttgtaccctccatgtgggcagaggccrtatctttatctccatccttgagcatgggtacctggtgtgttgagacgcttggtaaattgacttccttggtcctaaagagaggataatttttcttgactat

SEQ ID NO: 372086 - DNA, 201 bp, Homo sapiens
  misc_feature (1)...(201): n = A,T,C or G
tgattagggagaattcaaacccagggcaccccctgacttggaaactcacagtctttctagtatattaaactgcctctcacagattctgcaatgttggaaangttaaatcttttaggatttttacgagtttgttaaaagcaaaaagaataaaatgagttttattcttctttctgtggggaacgtaggtgatagtggccacca

SEQ ID NO: 372087 - DNA, 201 bp, Homo sapiens
gttgataaatgggctaaggattagaacaaaaaattcacaaaagaagaaatatgccgatagtaatcaaataaatgtaatataaaagaaggtaacagaaggtracactttttgccaaaacattgctagtaagaatgcagtgaaactgccatttttatatattgttgatggctttggaaatagtaccacctttatggaacttac

SEQ ID NO: 372088 - DNA, 201 bp, Homo sapiens
atagaatgattttatttaatatatttaggaaaaaacagttttcaggttgataaatgggctaaggattagaacaaaaaattcacaaaagaagaaatatgccratagtaatcaaataaatgtaatataaaagaaggtaacagaaggtaacactttttgccaaaacattgctagtaagaatgcagtgaaactgccatttttata

SEQ ID NO: 372089 - DNA, 201 bp, Homo sapiens
taaagagtgaggttgcagagcagtcagatgtgtgcaaggttgttaacatctgttttgagagatggggcaaaaaagggccagttcccatctttagatcttaygccgttgaacagcacatgggggaagagagaagaatgatctttacaacatagccttagtcgagaacatatctgttttctaactccctctctctgggttgtt

SEQ ID NO: 372090 - DNA, 201 bp, Homo sapiens
agtgtctgtgaatgggggatctgtgtgtgtgagtcatctctgtgtgggttgtgggtccgtgtgtgaggggcctacgtgaggtatgggatgtgagttcgtakgtgagtgaaagaaagaaagaggatataagtgggcgaaagagggcaagaatgaggactatgtgggagtggcaggggggttgggtgtggcttaggaaacatt

SEQ ID NO: 372091 - DNA, 201 bp, Homo sapiens
gtgtcattaagttctcatttgccctttagtgtaaagagtgaggttgcagagcagtcagatgtgtgcaaggttgttaacatctgttttgagagatggggcawaaaagggccagttcccatctttagatcttatgccgttgaacagcacatgggggaagagagaagaatgatctttacaacatagccttagtcgagaacatat

SEQ ID NO: 372092 - DNA, 201 bp, Homo sapiens
cccttgacatgtttacaattcaaggtgagatttgggtgggaacacagccaaaccatatcactcatttagtatgagaagggcacaggacacgggatgccatygataccatcctggcacatctgtggcctgtccggtcctggaggtggtagaaagtccagacagtgagggggcaatggagatggcagagaaccaggagagttg

SEQ ID NO: 372093 - DNA, 201 bp, Homo sapiens
gtgtgagcagccaaaaggtgccaagttcttatactcatggagttcttttgactagactgtgctgataattcctcttctattaatgtgttctttctccaaayagataggcaacagcagccttcttaatttagccagattgccttacttggagttttatgtggctcccaatattttagtcacaagtgaactgactgtctctgg

SEQ ID NO: 372094 - DNA, 201 bp, Homo sapiens
  misc_feature (1)...(201): n = A,T,C or G
cttgtcagagctgcgactgtaagagaacaattgaaaaagcttcttgtcaagtttcaagtgcccaggaagtctagtgaaggtgagaagaaaccgtcccagcnggtgacctcccttgcttcattctgttgagttgtcttcctaaagttctcatgctgggctggtgcgaggcagtgtggcgtgctctgtaccaacactgggttt

SEQ ID NO: 372095 - DNA, 201 bp, Homo sapiens
gtgtggcttttttagaggctcactgagagcttctctttgattcttagtgtcatcatgctggatgaagcccacgagaggaccttgtacactgacattgccaytggcttgctaaaaaaggtatgacttcactgccagcttttcattgtgtgtgtttattttattgcctaattacaaaagcaactgtagcaacttggaaagtac

SEQ ID NO: 372096 - DNA, 201 bp, Homo sapiens
gcagtttgtccattttgcagatgagagagctgactcagagatgaggaggcctagaccttgcctctgtcctcccttagggacccctttacattttagtccayactgtgctattgtcctgggaagggatgtctcccccttcccagccagtaataatcctccttagcctttacagtgcaggcaagggatactgctttctccatg

SEQ ID NO: 372097 - DNA, 201 bp, Homo sapiens
taagaattgcctcattgtcaaagaagagtgacttaggtttacttttgatgcaaagtgattgtatgaggactaaatacccagaagctctttgatggtctagrtgagatgatgtgtggcttttttagaggctcactgagagcttctctttgattcttagtgtcatcatgctggatgaagcccacgagaggaccttgtacactg

SEQ ID NO: 372098 - DNA, 201 bp, Homo sapiens
aactgtgtgccttccaacacaatggtacctgccttctgatttcttttgttgttcttatggcaggtctggacaaagactgtcgcctaactgaaccgcttggyatgagaattgcagagtttcctttgaatcccatgtttgccaaaatgctgcttgaatcaggtgggtagagcctgatagcttgaattgattttattttgactg

SEQ ID NO: 372099 - DNA, 201 bp, Homo sapiens
attttttggatcttgatccgtaacatttttatgtgattttgtttttcattgtgtatgttcttataagttgccccaagaccattatagaatgaagtgagatrcataagttaataattggctgggtgtggtggctcacgcctgtaatccctgtactttgagaggctgaggcgggcaaattgcttgaggtcaggagtttaagac

SEQ ID NO: 372100 - DNA, 201 bp, Homo sapiens
gcttaacagtcttcagatggttgggctttgttctgatttttatgtgttctgtggggttataggttggttatgttttcatttaaaatcagatattaaattcygttggaattcagtgtggatggtaaaacgcttaaagataacaatagtacactttttaaaattcaggtatgttaatgtcaccgtttttattaacctaagaat

SEQ ID NO: 372101 - DNA, 201 bp, Homo sapiens
ctgggttcacgccattctccttcctcagcctcccgagtagctgggactacaggcgaccgtcaccacacccggctaagttttttttttttttttttttttgkatttttagtagagacggggtttcactgtgttagccaggatggtctcaatctcctgactcgtgatccacctgcctcagcctcccaaagtgctgggattaca

SEQ ID NO: 372102 - DNA, 201 bp, Homo sapiens
ttaacattttctcattggctttgatcttttgaaattttttctgtaattttttggatcttgatccgtaacatttttatgtgattttgtttttcattgtgtaygttcttataagttgccccaagaccattatagaatgaagtgagatacataagttaataattggctgggtgtggtggctcacgcctgtaatccctgtacttt

SEQ ID NO: 372103 - DNA, 201 bp, Homo sapiens
ttgtccctggttagtgtgccctttgtttaggaacagggtgaatcttgtcatttcttttactttcctttttgctttggccaccaaatttagagctgaatttrtggctcaacttgaataattttggcatatctatgtttaacattttctcattggctttgatcttttgaaattttttctgtaattttttggatcttgatccgt

SEQ ID NO: 372104 - DNA, 201 bp, Homo sapiens
ttcctgttctgccttcatggtcccgggggatgggttttcttttcgagcgtggagatgaaaagttgtccctggttagtgtgccctttgtttaggaacagggkgaatcttgtcatttcttttactttcctttttgctttggccaccaaatttagagctgaatttgtggctcaacttgaataattttggcatatctatgtttaa

SEQ ID NO: 372105 - DNA, 201 bp, Homo sapiens
tccttcgcggataactgagatgttccagaagtcattgaggatttagagtctcatctgaaaaatggacacaccattacccagcacttaggtcttgaggctgyggtgagcaacataaatgcatgtgtttagcacagtgtctggcacatagagtagaacctgttaaaggttaaaggaaacagcatgtctacctgtggttcctga

SEQ ID NO: 372106 - DNA, 201 bp, Homo sapiens
gcgtatgttatttacccaccacggggcctggagtgggtctatgggggatgcaaagataaatcatccccgagccctgagtgctgcagtgtcctggggccccrgtgtggtagaaggttgagtctgtgaagtaaaaattagaaatgtctcaggagggtttaaggaaaatgaagaggtagtttaagatagggacctatcacgtct

SEQ ID NO: 372107 - DNA, 201 bp, Homo sapiens
agttatacagacctccaagtactacatgagagatgtgactgccattgaatcggcctggctgttggagctggctccacacttttatcaacaaggaacggtargaatgaactgagtctgtgccccagccacctgttcacagcctctccatgtttttaaatgtactttttttctccaatttaatgccctatgtgtgttccccct

SEQ ID NO: 372108 - DNA, 201 bp, Homo sapiens
tggctccacacttttatcaacaaggaacggtaggaatgaactgagtctgtgccccagccacctgttcacagcctctccatgtttttaaatgtacttttttyctccaatttaatgccctatgtgtgttccccctaggggtgcatagggtggaaaggccattaccatatccccaaaacattctgggaaagcactctagcgttt

SEQ ID NO: 372109 - DNA, 201 bp, Homo sapiens
ttagtgaaataggagtagcgactgtactttggataaatgttcaccgcaagataatttattaaagcttgaaaagtaagaaaaaagagtacaaaaaaattcargatgttacctatatttcaaattacgccttatagtttcctgttatgaaagaagaggaaattagcacatgtattcttctttccaccttccctttctccattt

SEQ ID NO: 372110 - DNA, 201 bp, Homo sapiens
gggtcattatcatatccatcacctcaaacatttatcatttctttgtggtgagaaccttcaaaatctcccttagctattttgaagtctatggcacattattrttaactatagtcactctgctgtgcagtagaacaccagaacttattcctcctatataactataactctgtgcttgttgaccaaccttttattctccctact

SEQ ID NO: 372111 - DNA, 201 bp, Homo sapiens
tttgtccaacgttatgtgtgagtcttccttggtgttgaattagttgcagtttgttcattctcattactgcatagcagggttcggcaagtcacagccagtgkgccagatgcagcccgctgcctgttttgtagagaaatctttgctggcacacagccactcctacttgttgatatattgccggtggctcctttcaggctacca

SEQ ID NO: 372112 - DNA, 201 bp, Homo sapiens
ggagagtcgcttgaacctggaaggcggaggttgcagtgagctggcatctcgccactgcactccagcctgagcaacagagactccatctccaaaaacaaaarctgataatagaagagatagattggggctgtaggttagagacaagggaggaatacggtagtacaaaagacatgttaaaatattccagagaggatatgaagg

SEQ ID NO: 372113 - DNA, 201 bp, Homo sapiens
ttgttatagcttaacagtcttcagatggttgggctttgttctgatttttatgtgttctgtggggttataggttggttatgttttcatttaaaatcagataytaaattctgttggaattcagtgtggatggtaaaacgcttaaagataacaatagtacactttttaaaattcaggtatgttaatgtcaccgtttttattaac

SEQ ID NO: 372114 - DNA, 201 bp, Homo sapiens
atcttttattctctcagcaactgtgtgccttccaacacaatggtacctgccttctgatttcttttgttgttcttatggcaggtctggacaaagactgtcgyctaactgaaccgcttggcatgagaattgcagagtttcctttgaatcccatgtttgccaaaatgctgcttgaatcaggtgggtagagcctgatagcttgaa

SEQ ID NO: 372115 - DNA, 201 bp, Homo sapiens
gtctgtgtgtgtgtgtgtgtgtgtatgcacatatatgccctattttaaacatgaaacatctatacatgttttagtatgccttgacttttttttttttttttacttattctttcattttaaaaaaaaactgttttgaattgacacataactgtgcatatttatgggatttagtgtaatgttttgatatatgtatatgttgta

SEQ ID NO: 372116 - DNA, 201 bp, Homo sapiens
tgtctgtgtgtgtgtgtgtgtgtgtatgcacatatatgccctattttaaacatgaaacatctatacatgttttagtatgccttgacttttttttttttttttacttattctttcattttaaaaaaaaactgttttgaattgacacataactgtgcatatttatgggatttagtgtaatgttttgatatatgtatatgttgt

SEQ ID NO: 372117 - DNA, 201 bp, Homo sapiens
caatagtacactttttaaaattcaggtatgttaatgtcaccgtttttattaacctaagaattgcctcattgtcaaagaagagtgacttaggtttacttttsatgcaaagtgattgtatgaggactaaatacccagaagctctttgatggtctagatgagatgatgtgtggcttttttagaggctcactgagagcttctctt

SEQ ID NO: 372118 - DNA, 201 bp, Homo sapiens
gtgtctgtgtgtgtgtgtgtgtgtgtatgcacatatatgccctattttaaacatgaaacatctatacatgttttagtatgccttgacttttttttttttttttacttattctttcattttaaaaaaaaactgttttgaattgacacataactgtgcatatttatgggatttagtgtaatgttttgatatatgtatatgttg

SEQ ID NO: 372119 - DNA, 201 bp, Homo sapiens
  misc_feature (1)...(201): n = A,T,C or G
tgttaggttcttgggaagagtggtctcttcggagtagtgggaacaggtgaggctcttgtggattgaggagagggtacaagcaggagaaggctgcagggggntttccttataattaagtccttgaatagaagtctttagaagtatcagttttttaaaaaattgggtattcaagagctcagtggagatcttttcttcttttaa

SEQ ID NO: 372120 - DNA, 201 bp, Homo sapiens
acaaactacatccaaaccatagcagcttctttcatttagtatcatgtttcacaggttccttcatgttgtaacgtatattcataccttatccccttttatcrctgaataatattctgttgtatggatataccacatattttttatccattcattagttgatagacatttgggttgtttccactttttggctgatataaataa

SEQ ID NO: 372121 - DNA, 201 bp, Homo sapiens
gcggcctgacttcggtcttggcgccgcggccggcgccctggggccagcagacctgctcgcaggcctgacctcggcgagctgggcgctgccgcctctgtgcsgggggagctctggctcaggctccccagtggtcccgagggatttgggggtgctcccctagcgtgagcagaaactctttgtgaccttgttaaagtggtccag

SEQ ID NO: 372122 - DNA, 201 bp, Homo sapiens
gtcttggcgccgcggccggcgccctggggccagcagacctgctcgcaggcctgacctcggcgagctgggcgctgccgcctctgtgcggggggagctctggytcaggctccccagtggtcccgagggatttgggggtgctcccctagcgtgagcagaaactctttgtgaccttgttaaagtggtccagcctcctcaggcctc

SEQ ID NO: 372123 - DNA, 201 bp, Homo sapiens
gccagatctgctccatctagtatcctagtagccgactgttggaactgcaggatagcactttacaatgatctctagtatgttctctttgttactccaggcaygttgtagcctgtcagtattgtgattcatttgcccattgtatgagctcacctccccaccctgagttgtctgtatttgaggcaacttgtccatgtggaggcg

SEQ ID NO: 372124 - DNA, 201 bp, Homo sapiens
tcatattcactttagggattttagtatcttcaggaatgggattggttctccccatatatataatccccctaatgatactttattgaaataggaagttgggwccataattagacacatgaaagctaattatgacagccagtatataaaacatgccagttcgtcagaagctattagtaagaatcaccagggctacactcctaa

SEQ ID NO: 372125 - DNA, 201 bp, Homo sapiens
  misc_feature (1)...(201): n = A,T,C or G
caggcatcagctaatcagcgagcaggacgtggtggtcgtagtcgctcgggaaaatgttatcgcctttatacaggttagtgtggctttccctaagggttttngactttcttatagtcagcctgggcaacagagtgtagcaaatgtttactcctaatggtagaacttaacataaaatacaggccttcctcacaaggccctgtg

SEQ ID NO: 372126 - DNA, 201 bp, Homo sapiens
ttgtttaggtcttttgagacaatgtatggctatttgcaaggtgtgttattctttttcagcttaggaatcatattttatacttgatagaaaattatcagacrgtggtgattgttggtgaaacaggatgtgggaagagcacacagattcctcaggtgagtacatatttaataagtgtctttacacttcgatttggctggaaga

SEQ ID NO: 372127 - DNA, 201 bp, Homo sapiens
tttgaatcccatgtttgccaaaatgctgcttgaatcaggtgggtagagcctgatagcttgaattgattttattttgactgtcagaggtgttgtttgcctgmattctgagcaccctggggaagagggtacaatatggtaaagaagtatatatatatctgtaacataacatttattgttttaaccattttatgtgtgtagttc

SEQ ID NO: 372128 - DNA, 201 bp, Homo sapiens
caaatgaaagtgtttgaaagggtgtcacgcagtgtcagaaaggtgagactatcctgatgaccaagggtgttggcagccgtctataatcataatgatgctcytttacttgttttgaaacttgctaaacacaaggcagacttctaggtccatatttctgtgtagtagatctaaaagcacacaataaataatacattgtgaaga

SEQ ID NO: 372129 - DNA, 201 bp, Homo sapiens
atggcaatgcatcctgctcttaaaacaaaaaaagtaaaaaacacctaagatacagcatgcaagggagatggtttaacctgaaaacaaattcagtacgttaagaaggctgttactgtatgtgtctgaagcattttataaagattcattaatctgaaataatattagctgacttttcttaaacactactctgtcctaggtcct

SEQ ID NO: 372130 - DNA, 201 bp, Homo sapiens
gcaccaaaagtaatacagagccttgttactttactcagtcatgtatttcatgttttgttgtattttgtggttccataattgtgtagaaaattgatttgatrtcattcatctaccatctagattgtcagggactcgttagcccctgcctgttctgtctgcagagggttaaatgtttttttaaatgtattagctgattccaaa

SEQ ID NO: 372131 - DNA, 201 bp, Homo sapiens
cctcatgggctgtgtgtctatttaatgagatacaaatttgtgaaagcttagagcacagcacttgccagtagtaggtgctcagtgattttttttttttttttggtcttttacctccctttccttttggtctgtcaaaaagatagtatttgtccagtctagttgatgaggttattgggagcagaactaaagtgatagagataa

SEQ ID NO: 372132 - DNA, 201 bp, Homo sapiens
tgggaaagtcttgctataagtatttaaaatgtgcttcagacaaaattcttctatgttccaaggaccatccgtgatgaccatgagctgcacatacaccctgygtcagtcctctatgcagagaagccgcctcgctggtaagctcatcctgctgcttagcctgtgcctgctttgaacagggccatgttcttgtttttctcctgt

SEQ ID NO: 372133 - DNA, 201 bp, Homo sapiens
cgagtagctgggattacaggcgcatgccaccatgcccaactaactttttgtatttttagtagagatggggtttcaccatgtcggccaggctggtcttgaaytcctgacctcaggtgatttgcctcccaaagtgctgggattgtaggtgtgaaccaccgcgtccggtcctattttcttttaaattaaactaaatgatattca

SEQ ID NO: 372134 - DNA, 201 bp, Homo sapiens
tattgaggtgactagctttatggacaggcttatttttatggaaattgtttttctttcacttaacactactgctaagagattggctatgtgtgtttgaagtwggataatatgttgtgttctgtttatgtgtcatgactttggtttgctgagcttgaagtccaggatacagatttttatttgtttccttggacaaattatgtg

SEQ ID NO: 372135 - DNA, 201 bp, Homo sapiens
catgatctttcttcccaaaggttgcagggagagtagctgaagaaaggggtgcagtgctgggccacgaggtgggctactgcatccgctttgatgactgcacygaccagctggccacgagaattaaggtaaagtgctcaagctgcttttcctagtggaaataaggaagaaggttattttgggagaattaaaaacatgtagtcc

SEQ ID NO: 372136 - DNA, 201 bp, Homo sapiens
aactttatttttaactacttttagactaatagaaaaattgcaaaaaacaatacagaattcccttatactcttcactactagtgcagagatcgaaagcaggmcattaacattggtacaataatagtaattagactataggccttatttaaatctcatcagttttcttactaaggttcttttttagttctaggatcctacatt

SEQ ID NO: 372137 - DNA, 201 bp, Homo sapiens
aattcccaaagttctgctgggacaagaactgtactttttcctttcttagtgattttaacacaatacgggagcatcttgggggagattgctctgcaaaagtrgtatcatatgtatacttagatgtgattttgtttgtagtaccttgcagaagccggctggacagctgaaggaagagtggtaggagtgacccagcctcgaaga

SEQ ID NO: 372138 - DNA, 201 bp, Homo sapiens
tgtcttctcttctgttgcagcacctgtctctgaaagccaaaagggccaaggtccaggacccgtgagaggagcccacagctacagctgcagggactgctggygtcctctcctccatgctgctgcccctggtcccaggtggggtgagctggcaccagctcctgtggaatgtttggttgctctgaagtgggctgcggcctgttc

SEQ ID NO: 372139 - DNA, 201 bp, Homo sapiens
aatggggcatagctgatgttcccataataaaggcaagtgaaattctgctcaaagatttgcaactccagctgaggaccctgtgtttaaagccttttgtgaasaattacattgcttgataacgaaaatatgggggcattttctcacagtcctttgtgggaatttacttgtacacatgctggcaaagaggttgcacttgaactt

SEQ ID NO: 372140 - DNA, 201 bp, Homo sapiens
tggtgctgctctgtaacactgcctaggaagaaagaggtaagcacagaagtctagagtaggcctttagacatctttataacatttcaatggttaagtttatrtttgtccaatttaataataaaaattgggggcttatatttttcttgtttacaatttcatttttctagaattcatttatattgtattttaccaataaaaagt

SEQ ID NO: 372141 - DNA, 201 bp, Homo sapiens
tgtgaccttgttaaagtggtccagcctcctcaggcctcgtcttcctcgttactgatgcttgtcctgcccaccccgcgagatggggaatcctaaagctcccyctcgtgtctcgttagcgccctggggttgcgctgtggcccgacagacaatgctgctcgctgctggaggcttgcaagcccaagttatggagtcagactgtcc

SEQ ID NO: 372142 - DNA, 201 bp, Homo sapiens
ccagtgatttaaaagaccttcagctggatttacataagatcagcctggagtgaatgtgtgttggagaaggtttccacccccttcttctcaagcatgtaatrggaactcgaaagcacatttcctgggctgatctgtagtgaggatgagagaatgttgacagcataggagtttttatttgggctggtttttctccagtcaaac

SEQ ID NO: 372143 - DNA, 201 bp, Homo sapiens
ctaaaaatgattctcacatattcagctcatctatatgttgtatgttttagaaggatgacaattatacatcttgaggctggtaatatttcaattctaatgayagaataatatgacctgaagaaactattaaaaataatgtttctcagagaagttattttacaattggctagtttattatgtctttagagatctgcacgactg

SEQ ID NO: 372144 - DNA, 201 bp, Homo sapiens
ccctctcaaaattttataatatttaatttttatgtaatcaaacaaaaaccatttcacacctttatagttcttcacacatcccaattcagatatttcagctrgaaagcagatcagcctgcagggactgataaaaatgcagtgtgtgttgtctttgctgaattaggttgataagaataaacctggtgaaagaaaggcttttcc

SEQ ID NO: 372145 - DNA, 201 bp, Homo sapiens
tgtttcaatgacctttattttaaaaacacatagcttgaaaatttatttttatactgatattagtttggatgtgccacttttggcaccaaacgtgtatgtcrtttttatttccattttataaacatgtaaataatagtgataacttgttaataatagtaaacctttatacctaaagtaaatgtcttccctcccacacctggt

SEQ ID NO: 372146 - DNA, 201 bp, Homo sapiens
  misc_feature (1)...(201): n = A,T,C or G
ttactgtatgctctgggaggtatgccagtttctctcatcattctctcttattatgtgttgtcttttgtgatattagtgaggtcatattcactttagggatnttagtatcttcaggaatgggattggttctccccatatatataatccccctaatgatactttattgaaataggaagttgggaccataattagacacatgaa

SEQ ID NO: 372147 - DNA, 201 bp, Homo sapiens
tgggacctccttagatggtgctggggcaggcatccagcattgggaagggtagggctggagccatttcaggagagggtttccaggtgtcttgaagcagcctrgggtggtgctgggagtggatcctgtgcattagagcacacggagcctagggcaggcaagggtttcacccgcctctctgttggctgcctatgtaggtgaccc

SEQ ID NO: 372148 - DNA, 201 bp, Homo sapiens
gtatgtcatttttatttccattttataaacatgtaaataatagtgataacttgttaataatagtaaacctttatacctaaagtaaatgtcttccctcccamacctggttttcgtgtctgtatgttaagatgttctaatgaattgttcgaagtgagggcctgacattagctaagaaacttaatgctgtggcatacagcagct

SEQ ID NO: 372149 - DNA, 201 bp, Homo sapiens; identical to SEQ ID NO: 80685

SEQ ID NO: 372150 - DNA, 201 bp, Homo sapiens; identical to SEQ ID NO: 80686

SEQ ID NO: 372151 - DNA, 201 bp, Homo sapiens; identical to SEQ ID NO: 80687

SEQ ID NO: 372152 - DNA, 201 bp, Homo sapiens; identical to SEQ ID NO: 80688

SEQ ID NO: 372153 - DNA, 201 bp, Homo sapiens
cacagaagccaaggccagatgacttggagcacagaccaagaaggaaaaggcaggccaagagacacaaagcaaagtgtgggtcaggactagaggagctggtraactgaggcacccacgccggtagtgcaggtagagtgacaacacgtgggagggagcacagtgaagtgaggctgggaggagagaggcaaaggatgcaaagga

SEQ ID NO: 372154 - DNA, 201 bp, Homo sapiens
aaggaaggagagggcatgggtagggggcagtgtaagatgctgtgctggaaagcacatcactgtgtctagtgcatggggggaggttgacggtactgcctccytctttgcagcctgacctcactgtctgggtggcccactgcagcgggagcgggtgccttgtgccaaacgttgtgcacaccgacttccctacctgcttcctct

SEQ ID NO: 372155 - DNA, 201 bp, Homo sapiens
ttgtttagaaagaggctggacttacaccagtagaactccaagtccacatagacccgccatttggttcaccagacaccattcccagggctgtattttagccrtctgactgtccagggatccccgggaatccttatgtgtgatgatggggctttagagactttgaactaaaatgccaaggcctcagctccgtgaattggtctt

SEQ ID NO: 372156 - DNA, 201 bp, Homo sapiens
aattgagggctgtgggctcagccacagaacatcatggcctctgttaccctaagtttcttcctgttcttgaaattgtgacggtttggaaagagatggggagratattgttacccacgtgacaggctgcagcaaccttgaccactaaggtcaaataagcagcattgatgaattttagcatgtgggcacccctggagggggcga

SEQ ID NO: 372157 - DNA, 201 bp, Homo sapiens
ttgagtataactatctcccctcaggggccctgccacccatatgctagtacctgcctcccatcataaggaaacagtgccttttaggcattgctgaaaagtakagggtctggacctcctgatactgggacttgttaccctttagacatcatttcaatcttcatatatcttcctcctgtggttagacttaaattgagggctgtg

SEQ ID NO: 372158 - DNA, 201 bp, Homo sapiens
ccttagtctatgcacatttcaaccagagtgatccagccaactacaatccagctatgctacacctttgtccacctagcaaagcccaggcttctcaccacagmagccttctgtgacctggctccttcctccctctctagccacatggtctgttccacattgcctgggactgttcacacaaactctgttctttgccatccttgt

SEQ ID NO: 372159 - DNA, 201 bp, Homo sapiens
ggaaaagtatagagattcatagaactaggaaggtcatccactcatgtaagcccccacctctgcactgcaacttactattaactgcagtatttatagtaaasagtattactttgataagtagtcaaaaacctccagaacatattctgcccattgatagtctaataaataggtccagtcttaaaccccccaaatgtcatgcag

SEQ ID NO: 372160 - DNA, 201 bp, Homo sapiens; identical to SEQ ID NO: 80694

SEQ ID NO: 372161 - DNA, 201 bp, Homo sapiens
acattgaacagagctttgactttgcaatgataaaagcagatcccagaaaaggggctaagtaccctgagatcaatgtgtcaggagatgctatggtatcacayagaaagaggcttggggccaggcacagtggctcgtgcctataatcccagcactttgggaggccaagggaggcagatcatctgaggtcaggagttcaagact

SEQ ID NO: 372162 - DNA, 201 bp, Homo sapiens
cacgtcttaaagatcccacctcttaatatagtcaaaatggcgactaaatttcaacatgaattttggaggggaaattcaaatcatagcacccctcaccactrctcctagtgtagacactcatcatcttttgtcaacaccagtagttcccaaactttagcaagcatcacattcatctggaaggccagtcattacacactgggc

SEQ ID NO: 372163 - DNA, 201 bp, Homo sapiens
taggtgtccttttcccaaaaagcaatgtactaatgttcataagccagggtgacctaaaaatgaaagttacaaatgaagcctttgagctggccttctggctyaatacaccaccaggaaatgcggatcctaatactcagctcaatgaatgatgatggccttagtttaatgtgcagaatactcagatttccacacacctcaaaa

SEQ ID NO: 372164 - DNA, 201 bp, Homo sapiens
tggttccttcaggagctgactgatggggctgatcactaaccagagtctcttgagaagggggataaactgagcctttggaagtaacttttcatcttcagttkgctggatccagaacttgcacaaaaaccgagaaatcttccattcattcactaggttattcctgggtgtctacatggcgcgttatgggaacacaggcattag

SEQ ID NO: 372165 - DNA, 201 bp, Homo sapiens
gaagtaatagtgtgagtgggatttatacagtttcctgctttaattgaaattagaaaaattcacccaacatcctttaggctatgagaactttggtttttttwaaaaaaaatcttcaatagatcatcgtccctgcgacgctgcaccaccaaaactccaagtcttgtttctctgcctgtcactactgggctctcaggagatgca

SEQ ID NO: 372166 - DNA, 201 bp, Homo sapiens
aattgctacgacgtcagttacaagacggaggagaaagaagacaagacatgaatttaaagaaacttgcttatccaaatcattcttcttttaagaaagctttrtattcattatagctgattataagagttaggacaaatttatgatgtggcagacttgtgttttagcttattagtgtgtctctgtgctgcactgaagcccttg

SEQ ID NO: 372167 - DNA, 201 bp, Homo sapiens
gtatttgtctctctccctctacattacaaactccattgtgcagactgtgccagtgtaaatcatcatggcagctctggcactatgcagtgataattggtacytggtaggcactcaataaataataaattcctagcacaacatctcttatataacagtagcccatctgataactcctaaagctgcaggctcagaaaacacttg

SEQ ID NO: 372168 - DNA, 201 bp, Homo sapiens
gccataaccacccaagcaactcagagttttagtagctgaacaaggtcactcttgggtgctagaggcagagaggcagccagtcctggcttcccaactcccawcacaaacctagttttcagtgtaccagctatatgcactcacttcttaataaaatgtcacagagaaatcgtgaggcagaatttagcaaaatgtttctgccct

SEQ ID NO: 372169 - DNA, 201 bp, Homo sapiens
tcagctttttgtggccaagtggggtggggtgcattctttgcatccccagcagctggcacagaagcttgtgtgcagaagacttgatggatttttgatagctrgataaacgagtctctgcctcttcaaaggacacgctgccaaagcttactgcagtgtttttctgtcgttggaggaaaactctagaaagaatgcaaaatgtat

SEQ ID NO: 372170 - DNA, 201 bp, Homo sapiens; identical to SEQ ID NO: 80688

SEQ ID NO: 372171 - DNA, 201 bp, Homo sapiens
tacttcgaaggtcaagatttaatacaattaataactcttactgcttcaaagaggtaattctcaagtgaaactggttctgtttttttgttttttgttttttktttttaatgtgagacaagatctcactctgtaacccaaactggagtgcagtggcagtcctggctcaatgcagactcaaaactccaggccccaagcgaacct

SEQ ID NO: 372172 - DNA, 201 bp, Homo sapiens
ttcttctctttttccttcttccagctcttatgtgtacttctctgcctctcctcaaccctctgatactggtgttctccagagttctgtctttggtcttctgytgtgagtgatggcaaggttttaactgcctttcctgtatgctggtgtcactctccctgagcttcatacttacatatcccagagcctgactttgcattttga

SEQ ID NO: 372173 - DNA, 201 bp, Homo sapiens
agttggtgacagaccccatcctctccccatgttacccaattccagggaactagtgcaagtggagaagccaggataacaagcattcctttattagtatctgrgcatacatgaatatttatcctgaataagaaactatttgaaagacagatctagaatgaaaccctttcctcagtgtgatccagatctactcctactggttaa

SEQ ID NO: 372174 - DNA, 201 bp, Homo sapiens
ctggattggagatccaagaacttaatcttagtaaatacattaggcaaacagctattttgcaaccaagttgacagctttttttaaaaaaaattttgttaccraattgactagtcactttggtgttgtaaagacatggacctttctgccagccctcccctcctccaaatacttaaaataattatatcaccatagagactcctt

SEQ ID NO: 372175 - DNA, 201 bp, Homo sapiens
tcatgacctagttacctgcctggattggagatccaagaacttaatcttagtaaatacattaggcaaacagctattttgcaaccaagttgacagcttttttwaaaaaaaattttgttaccgaattgactagtcactttggtgttgtaaagacatggacctttctgccagccctcccctcctccaaatacttaaaataattat

SEQ ID NO: 372176 - DNA, 201 bp, Homo sapiens
acagcccagtcacagtagcggaagccttggacagagttctagagattttacggaccacagaactgtactcccctcagctgggtaccaaagatgaagatccycacaccagtgatcttgttggaggcctgatgactgtgagtgatgaggcaaaacctgaaaagcaagagaggtatccggggcctctagagtgcagctgatgtg

SEQ ID NO: 372177 - DNA, 201 bp, Homo sapiens
aaaataaaaataaaaataaaaaaaatttaaaaagtggctgacatagcaagaaccaaagatgctagagacaagatgataattcacagggcatgtgagggacrgtaaccaataatataaagagaatatgaatcgagagatttttgagatggattgagcggatagatagaatattttagtctgagaggataagggatgagggaa

SEQ ID NO: 372178 - DNA, 201 bp, Homo sapiens
actatgtggcagacactgttctaaatgctatgcatatattaactcacttatttctcaaaacagcctataaatgagatgctatcattacccccacttcataracaaggataatgagacccagagaagttaagtaacatttccaagattacacagctgctgagtggcacagtagaaatttgaatcttgacgatttggctctgg

SEQ ID NO: 372179 - DNA, 201 bp, Homo sapiens
ggccacagtgtgatggttggcgctcagttcaccgtcactctaaacccgctggcatttggggtcatccccacactcacggggtggtccacaatcatctgaartgtgagccacaccattccacatagaagtggctgcccaccacaagatttcctccattttttggtctctcagctcctggcctggcttaccacacgtcagagt

SEQ ID NO: 372180 - DNA, 201 bp, Homo sapiens
ataacaaagcatttttatacctctggctaactacagtgtttttcctcttcatcgaaggaggctgcagcgaatggcaatgggatctgtgctggggagggcayctgtctgcaggcggttccggtggtgtggttttctggggtttagccctgatgtcaaaatcggcccatgggtttgcattttaacaaggtgtgacgtggtaag

SEQ ID NO: 372181 - DNA, 201 bp, Homo sapiens
tttacttttgtgtctgctgctggctggctcccgctaagacacagtcatcttaccgcactggctgcctgctgcccttccgggccacagtgtgatggttggcrctcagttcaccgtcactctaaacccgctggcatttggggtcatccccacactcacggggtggtccacaatcatctgaaatgtgagccacaccattccaca

SEQ ID NO: 372182 - DNA, 201 bp, Homo sapiens
ctcccgagtagctgggattgcaggcacatgccaccaagcccaggctaatttttgtatgtttagtagagatggggtttcaccatgttggtcaggctcatctygaactcctgacctcagataatccacccacctcgacctcccaaactgctgggattacaggtgtgagccactgcttccagccaggctaaaattcttaatgtc

SEQ ID NO: 372183 - DNA, 201 bp, Homo sapiens; identical to SEQ ID NO: 80695

SEQ ID NO: 372184 - DNA, 201 bp, Homo sapiens
cagctcaattcaagtgcataagtgctttccacaagacaaccagcagattttggtatgcagttcaagtgtacgtgtactcccatttcatcacattcatcatmcagaatattacagagacatgtacttcgaaggtcaagatttaatacaattaataactcttactgcttcaaagaggtaattctcaagtgaaactggttctgt

SEQ ID NO: 372185 - DNA, 201 bp, Homo sapiens
tgtcagtatattatatatggaatttaaaaaaggaaaagctgccttcgccgagtcccagtcctacctgtgtgctcggtgatcaccatcgaatgcctggcgarttaacccttgtgggcttcaccgtcatcttgaaccaagcctgatctgaccatctgttttccagattgaaggcagcgactgtgaatgcaaccctgctgggaa

SEQ ID NO: 372186 - DNA, 201 bp, Homo sapiens
tagtagaaatcaagaaataattgaagggttacatgtatgtgccactgccctacctgaaatgcattaaagtagctaaaagctctgcttttacacattttttwaaaaaaactgggagaaatttcctctaagattacatatcaaattgctcaaaataaaaacaaaactgctgtagcagttacctctagggaagaaaatggatgt

SEQ ID NO: 372187 - DNA, 201 bp, Homo sapiens
cctaattgtttttacacaatcaatttgatggtgtctttaaaagtggagaataacaatctttcaggttctatgtaaatggcctgtgatgtgtgtaccaactygtgtcctggccacatggctcaggacactgacatcaccactaggtgtggaccagtctttctaaacatggctgaacacacctgctcctgactacttcctact

SEQ ID NO: 372188 - DNA, 201 bp, Homo sapiens
agaactaggaaggtcatccactcatgtaagcccccacctctgcactgcaacttactattaactgcagtatttatagtaaacagtattactttgataagtartcaaaaacctccagaacatattctgcccattgatagtctaataaataggtccagtcttaaaccccccaaatgtcatgcagccttttggcttggcagagct

SEQ ID NO: 372189 - DNA, 201 bp, Homo sapiens
agatgaggtcacaaggctggggacctgatccaacaggattagtatccctataagaagagacaccagaaagctactccccactccctgccatgtgaggacasagcaagaagacagccatctgtaagccagcaagagagccctcaccaggaaccaaccctgccagaccttgaccttggacttgctagcctttggaactttgag

SEQ ID NO: 372190 - DNA, 201 bp, Homo sapiens
actgttttgatgttctcaagggaagggagaggggaatcaccttgtcagataaacgtccaccatgtgacaggtaccttctctcttttttaaaatactcataratcacataagggtcagctatcactggggaaaatggaatagcatctgcaagtcttgcttactgggaggacgagctcttcttgtgatctgcacacatttctt

SEQ ID NO: 372191 - DNA, 201 bp, Homo sapiens
atccacaacacggatcattggccttggtgacaaaaacttccttgccccagtataccttatcactacagggaaaaagtccgtgtgtacctaccgtgaagaarcaaggttgttacctgacacactaacaacacatcagatgcacttgcagaatccggcttgtctctggggaaagaaacaatctacttatgccagaaaacctct

SEQ ID NO: 372192 - DNA, 201 bp, Homo sapiens
attttaacaatggtagttttatgactaaaatttccacttgatttttaaaatgttttctagttctttgtcaaaatgttgtttcttgtcttttaattctttgracatattttcaagtctgtgtgtgtaaccctagtatctggatcttccacgtgtctgtttaatgttttttccctctcttggcttttggtcaacctttttttc

SEQ ID NO: 372193 - DNA, 201 bp, Homo sapiens
ggaatttaagtggaatttgccagttttttaagtggaaaattggcaggtctgacctattggataattgcctgggagttaagagaaaaaaaattttttaacgwaatgaagagattgtcctaatccacaagggcatctttctttgttgtcttctctgtgttttgagacgttttctttagagaaagatttgatgttgtatcattt

SEQ ID NO: 372194 - DNA, 201 bp, Homo sapiens
attcactgttggaacccaagggccaagaatgctggctggctcatgggaagtacccaactaatatgggtggaagtcatagcaaatattgttgccaaggtgcrgatgaatcaggagcttcctatttggatgggaagcaaaggagagagtataactgcactgagagggataccttctatcctcaagaattaagaaacccccaat

SEQ ID NO: 372195 - DNA, 201 bp, Homo sapiens
ctctgactctgaaacagaaaagtgttctaggcagaaatgacaactgagggctaatgagcattaactggactgcaagctcgatgagggcaggggctattgcmtgtttattcactgttggaacccaagggccaagaatgctggctggctcatgggaagtacccaactaatatgggtggaagtcatagcaaatattgttgccaa

SEQ ID NO: 372196 - DNA, 201 bp, Homo sapiens
ttctttatcaaaacacatctttctttcttcactttcatgtagaattgtttctcttatatttagtagttttaattacatatattaactactactttaactcktagtaaccctaatttccatggaaaaacctaggattacttaatttaacataacagattttaagatttcaaattactgaaaagaactttgaaactagtttta

SEQ ID NO: 372197 - DNA, 201 bp, Homo sapiens
ggcagaggatacgcaagaaaggctttttgttgtgttttgtttgttttttgttttgtttttaaataacatagggagccatgggacacagcttctaaaggagrgaggcgttttgattcagaaagaaaagctaagcacttaaaaatcacttgtttttgtgttaaagctatttgaaagaacaatttgcaaggcaaaagttttatt

SEQ ID NO: 372198 - DNA, 201 bp, Homo sapiens
aaaacagtttgatttttttccagtgatttttgatattagggtctgtcccactaggggtgagcaggcaaattactgtgtttataattgtttaaatcagttcytttttatgtggctattctactaacaatggaccagttagtgattagcacaatacagttaggattatttatttcattttccttttgatttggtcttctttaa

SEQ ID NO: 372199 - DNA, 201 bp, Homo sapiens
acacacacacacacacatctcagaataccagtgatcaacacgacttcatgatcaatatgaacactgaaaacagtttgatttttttccagtgatttttgatwttagggtctgtcccactaggggtgagcaggcaaattactgtgtttataattgtttaaatcagttcctttttatgtggctattctactaacaatggaccag

SEQ ID NO: 372200 - DNA, 201 bp, Homo sapiens
aaaatatcaagaatgattcccccagtatttacaaactattatttgattcaacaaagaagttcctcacatcactgacaaatgagtgaaatttctatgtacayctttgttatttgtctttcatcttacttttttttttttttttgacatggagtctcgctctattgcccaggctagagtgcagtggcgcgatctcggctcact

SEQ ID NO: 372201 - DNA, 201 bp, Homo sapiens
ttggatggttaatttggggcagggttgttgcttcattcattacaatttctatctgctgcagtctagagcattacttattaacaggaaagtcttccaatgcyatcattgaaagaggctgtggccatcctgtgcaatgggaatccctgtgtttgcacagagtgcagtgggccagcttatgtggctgccgtgccagcctgccat

SEQ ID NO: 372202 - DNA, 201 bp, Homo sapiens
ctggctcttgaagttagaaaacgacgacagaattggatggttaatttggggcagggttgttgcttcattcattacaatttctatctgctgcagtctagagmattacttattaacaggaaagtcttccaatgccatcattgaaagaggctgtggccatcctgtgcaatgggaatccctgtgtttgcacagagtgcagtgggc

SEQ ID NO: 372203 - DNA, 201 bp, Homo sapiens
tgctggggctcctgtgctcaagtttgtgaagtttaagtggttttcccaaatacttagcttcctcttaggggaaagggaaaatattagctgtcccactgtaycagatgataaaataaccttgcccttaacttaatttgacttttcagactgcctttatgttttgaaatctcatttggtcttcagtgagttcataaaaatgtt

SEQ ID NO: 372204 - DNA, 201 bp, Homo sapiens
tgggaatggaaatgactcccttctggtggagacagagctttcagggaagcctgctaaaccagcacaagcaagtgcagccccttggccatcagggtgccgtygcaggacagggctgagctacaggttcaccttcctcacctgagtagcagctcttcctcctgcaggcctaggagagcaaattctgggaataccaaaaatgat

SEQ ID NO: 372205 - DNA, 201 bp, Homo sapiens
tgctatttatgttttctaccccagttacttgaatctatttcattgaagaattaaaaaataaacaggcctgagactccaagcaggattgaacataccacagyggcactagctggaggcccagagtttgggccccgtgggttctcactgctcaggtacagtcagtgaaggtggagcccaggttggggctgtcctgggtcctga

SEQ ID NO: 372206 - DNA, 201 bp, Homo sapiens
tttcaccatgttggccaggatggtctcaatctcctgacctcgtgatccacccgcctcaacctcccaaagtgctgagattacaggtgtgagccactgcgccyggcctatgctcctttcttttataccacatgatgtttcacagctgaagccacatgctaccagttgagaacagcacccaattcattaatgccaagaccaagg

SEQ ID NO: 372207 - DNA, 201 bp, Homo sapiens
ttagaaccaggtattgagggattaaggtcctaggtacttaagagctatagtgagacaggtagaagcagaaatggcaggaaaacagtaagggggtatgtggrtaaggttttcttctcagttttgccaacagcatcctgatatttattcactttcatcagcaaggaaacaatgtggcccaagaatgatgcttttgaataattt

SEQ ID NO: 372208 - DNA, 201 bp, Homo sapiens
tagatcattttcttagaaccaggtattgagggattaaggtcctaggtacttaagagctatagtgagacaggtagaagcagaaatggcaggaaaacagtaasggggtatgtgggtaaggttttcttctcagttttgccaacagcatcctgatatttattcactttcatcagcaaggaaacaatgtggcccaagaatgatgct

SEQ ID NO: 372209 - DNA, 201 bp, Homo sapiens
atgtgtgagtagttggttccattttattgctaagtggtgttctactatatggataggacacattttgtttgttcattcatcagttggtggacattttggtkatttttaaatttttgctattataagtaatgctgctgtggacatttgcatacaagtttttgtgtggatgtgtgtttttgttatttctcatgaggagataca

SEQ ID NO: 372210 - DNA, 201 bp, Homo sapiens
agagccaacccacagctcactgtgagtcctgacacagtcacatccactctatcccagttctccacgttctggggctaatagttacagaagggagagtatcrtctgtcttataactgttgtgatttaattttgagctttgcttcaacttagacttccagattggttgggttattcaggattcaaatctctttcactaataat

SEQ ID NO: 372211 - DNA, 201 bp, Homo sapiens
tggattggagatccaagaacttaatcttagtaaatacattaggcaaacagctattttgcaaccaagttgacagctttttttaaaaaaaattttgttaccgrattgactagtcactttggtgttgtaaagacatggacctttctgccagccctcccctcctccaaatacttaaaataattatatcaccatagagactccttt

SEQ ID NO: 372212 - DNA, 201 bp, Homo sapiens
tgctctctccacctaagagaaggctgggtgacacaatgcaagccctaccattgatgaaggccagtcatatggaaatggtgccacaggcttgctttctgggmtaagcagtcctacatcccccttccccaggagcaggtcctggagcacagaatctgccttgacttccttttcgtggttaaagggccctcaaggagagaaaac

SEQ ID NO: 372213 - DNA, 201 bp, Homo sapiens
ctgactgctgatacactttttttatcacttcctctgtcccctgcctgctgtccttctccctatcctgaactcaaagcccaagggtggaatgggggagaaasacctgagcctcataagagactcaggaccctgtcttatcagtttattccattttttttctcagtttttactttcccactttctataaccttctctccacag

SEQ ID NO: 372214 - DNA, 201 bp, Homo sapiens
aatctagaaaagaaaaagtgagccaattattctacattcagccaaactggaccctcaaatataagaaccacagacaaaactgtgcgaacatgccagacctyggggaatgaatttcccattaacccttcttgaggaaccttctgacaattactgtgactggagaaactttagcataaggactggtggttgacacgtgagact

SEQ ID NO: 372215 - DNA, 201 bp, Homo sapiens
tactggttctctgactgtggctgggtggagttggcatctgtctcctaggttcctcctgcccccaacagtttgtggttatggtgataaaattattgtgtgayaaatatcatggcagacatataaacagaggaaaggggacagcaattgaaagagtatcaaacacactttaaggttctaactgtttcagttaccaaggctcag

SEQ ID NO: 372216 - DNA, 201 bp, Homo sapiens; identical to SEQ ID NO: 80687

SEQ ID NO: 372217 - DNA, 201 bp, Homo sapiens
ggaatgaggcctttttggacctcatcaaccttctctgaaattccccttgtggacttggggctcagcaagccctcctgcctccaaagttccaggccagatcrcctttccagactcaggcaagtagcagttgggctaccagccttggcagaagagatgggtgaattcatggctttttaggtgggagggtggccctgtgagaag

SEQ ID NO: 372218 - DNA, 201 bp, Homo sapiens
acaattcaatgttaatggacatttgagatgtttccatttggagctgtcatgaataatgctgctgtaaacattcttggacatatcttttggtgctcactggrcacattcctattgggtatttacctaagatagatagtgagtgtcactatatttccagtttgtgccccactgtcccagcttatgcctagacgtccagagtaa

SEQ ID NO: 372219 - DNA, 201 bp, Homo sapiens
atatctctacagttttgccttttccagaatgttatatggttggaatcatacagtatatggccttttcggattgacttgactcctttcacttagtaatatgygtttaaggttcctccatgtcttttcatgggttgacaaactatttctttttagtgctgagtaatattccatcattagaatgtaccacagtttatttatcca

SEQ ID NO: 372220 - DNA, 201 bp, Homo sapiens
ttggtgctagttcattgagtcatgctaaggtgttagcagttttacccactattgcttcttctcagtgtaaatgtcagtagttttggtatgagaattcgtgyttgtatgacattgaacagagctttgactttgcaatgataaaagcagatcccagaaaaggggctaagtaccctgagatcaatgtgtcaggagatgctatgg

SEQ ID NO: 372221 - DNA, 201 bp, Homo sapiens
attttctgactttttaatagccattctgactagtttgagatggtatctcattgtggttttgatttgcatgtctgattagtgatgctggacttttgttttgkttagtttttttttttttttttttttttttttgagacagtcttgctctgttgcccaggctggagtgcagtggcatgacctcagctcactgcaaccctcacc

SEQ ID NO: 372222 - DNA, 201 bp, Homo sapiens
caaaggttttaggggttttaattattttaattatttttaaaaatcttatgctgtagtctttgtcgtctctttggagggactccatgcttgttccttgatgkcttgaagcatgttgagccataaccacccaagcaactcagagttttagtagctgaacaaggtcactcttgggtgctagaggcagagaggcagccagtcctg

SEQ ID NO: 372223 - DNA, 201 bp, Homo sapiens
gaatttgagccctggtggagcaatgtccggcacgctcaggaaagtgtgaaatctagaactctctgtagtggcctgaggcaatagtcagacatggctggtaragctgtgctgcctcagaagtcatcctggataagctgctctggatccccatcgtggaagcataaaatgtcaagcagaaggatgttatgagaattggaacct

SEQ ID NO: 372224 - DNA, 201 bp, Homo sapiens
gcctaccctgactgaggtgggcacttcatatgtgaatgcaggtccacctgccgaggggctggaggtgtgcttgctgctgtaaacttgctctgtggaatgcrtgcgcaagccccaggccacagtgcccgtggaagcgccacttccctgctgcccttcatgacaccactgcccttgtgacttggcctctacctcagctccagt

SEQ ID NO: 372225 - DNA, 201 bp, Homo sapiens
catagtattttattagaagattcaacagcaagaaaataacattgcaaaaatgacctggcaatgccaaattgctggaagtttctaagcacttattgtcagtktttttcctaatctctttactgttgggtagcagttcacagactggccaggcgcggtggctcacgcctgtaatcccagcactttgggagtccaaggcgggtg

SEQ ID NO: 372226 - DNA, 201 bp, Homo sapiens
gatgcaggtattagtatccacattttacaaatatgcagactcaggcccagagaggttgaataactccaaggttatccagctggttagtgacaaaggtgggrtctgaatacaggtcttacttccaaagtctgcacttgaattacctcctgtaccacctgtgctacctctgtgcctctctgaaccaactttgggttttctgga

SEQ ID NO: 372227 - DNA, 201 bp, Homo sapiens
ggaaaatttggttcctctgacaaatctttttatttcccagcaaacctatatcactttatttgtagtgcacatcggttatgatttagcttgtggctgaggawctctctagactaatatatgaaggcataaaatttttcctccaaataaaaaatgttctatttttatcttaatttcttaatcagttggaaagtatatatccat

SEQ ID NO: 372228 - DNA, 201 bp, Homo sapiens
ttacttctggatttgttcctcttgacatgaaaaacatatattctctgcttcacatcaaaaatgtaggcttacttttaagtagctatatttttaaaatctgwgtcctgtttttgatctagtttttattatatcttgcattttacctgccatttctcttctttctcttttgttcattttacaggaaatgggagatcagagatg

SEQ ID NO: 372229 - DNA, 201 bp, Homo sapiens
tgtagctgccaattaagcagatttatgggaaaatttggttcctctgacaaatctttttatttcccagcaaacctatatcactttatttgtagtgcacatcrgttatgatttagcttgtggctgaggaactctctagactaatatatgaaggcataaaatttttcctccaaataaaaaatgttctatttttatcttaatttc

SEQ ID NO: 372230 - DNA, 201 bp, Homo sapiens
tcaccatgaaccttgacattccagttttcccacagcatgtgaaggccttaagttgttcagatataaccttgattctccaaggggtgctgtggtagaacgcrgaaggagatttttggaaaattgcatctatagagttaaatactatgaatgtttcttatcttgtcataaaatcacctgcatacattctttttataaagccat

SEQ ID NO: 372231 - DNA, 201 bp, Homo sapiens
cacggtggttgttctcaccatgaaccttgacattccagttttcccacagcatgtgaaggccttaagttgttcagatataaccttgattctccaaggggtgstgtggtagaacgcagaaggagatttttggaaaattgcatctatagagttaaatactatgaatgtttcttatcttgtcataaaatcacctgcatacattct

SEQ ID NO: 372232 - DNA, 201 bp, Homo sapiens
cgaaagtccctagctataggtgtccaaagtcgtggagacaaaatatcatttctggaagcgagagagtgagagaggggcccagaacagatctctgagcaacyccaatctgtagaggagggccaggggaggtgaatctgcaagggagcctgaggaagcctactcactgagacaggagaacattcaccaggagcccgcagggag

SEQ ID NO: 372233 - DNA, 201 bp, Homo sapiens
taaaggataaaattgtaaaatactggatgagagtattccttaaatacattacagcacatctcagatagaagctctagtattgatatggtgtggtcctcackgtgaagtgtccttacagtgaatttttaaaatttacattttggtttttctgtgagcccagagggatgccacttcctttaccgtaactctgactagttgctc

SEQ ID NO: 372234 - DNA, 201 bp, Homo sapiens
gatatggctttgggcaagtcttgatctggtaatttggaagtgttacaaaggatcttgtttctttccatttctccactctgctttccatggtgttgctttcrttctcacatggtgtcaagatgttacgagaaacaacctcactacacatttctttttgataaacagtgagaatatttattaaaagtagaatagctttttccc

SEQ ID NO: 372235 - DNA, 201 bp, Homo sapiens
tctctaatatcaacaaggggaagtcatttgtttccattgagattctttctgtttaaacacaggagagctcattcaaccttatttaataaggagaaaaaagscaattaattggctcacctaactgaaaaatccagagttagatatggctttgggcaagtcttgatctggtaatttggaagtgttacaaaggatcttgtttct

SEQ ID NO: 372236 - DNA, 201 bp, Homo sapiens
ttttacagcccatttgtgtatttgttttgagcattgcttgtccttttcttgaccctttttaattgggatgttcgcctgttttattattgtcttagtagagrttcaaaaaactctaataaggatgccaatccctttactatcatatattactaatattttttctcagttttgtatttaaatatttattatgctttttaatat

SEQ ID NO: 372237 - DNA, 201 bp, Homo sapiens
tgggcaatgaactgtccttagttttactttgtccagaaatgtcttaacttgaaagctgttgttcctgttttctgtttccgtagtttctcatgaaaatttascagtcatctgaatcattgtcccactgtgtgtattgtgtagtttttctcgggccgcttttgtctttggctttcagcagattaattacaatgtgcctaaaca

SEQ ID NO: 372238 - DNA, 201 bp, Homo sapiens
ctgaaataattattgtcatatttcttataacgaagatctgtgggcaatgaactgtccttagttttactttgtccagaaatgtcttaacttgaaagctgttkttcctgttttctgtttccgtagtttctcatgaaaatttagcagtcatctgaatcattgtcccactgtgtgtattgtgtagtttttctcgggccgcttttg

SEQ ID NO: 372239 - DNA, 201 bp, Homo sapiens
atgcctcattaagcaggaaagtagtcatgaggaaaggcatgcacttgagagccgtacctgggctctttatcttctgacagataggatcattcccaaggtcrtgagagtgcaggggattgggtgccaaccaggacactgaagagctcccggagcctgtgcatggtgtctagcccttctgtcttcaggcagtcacgtgcaagc

SEQ ID NO: 372240 - DNA, 201 bp, Homo sapiens
tacaatggggaaactttgagactcatgttacttcctgttgttagagtgcttgatttagtgctttaattactatacactactgaaacaaagtgaatatacaycaccttaggaaatcacttgttattttcttgaactgttttgtttcatctacaattacatctttatatcacatttcacaaaatactggtgattatgtggtgt

SEQ ID NO: 372241 - DNA, 201 bp, Homo sapiens
atactgtctgaaaaatcaagtggccttttcttcatccatacctggaacacgtttacttccccagtgtgcagaatgtatgtgtttctgcttagagagtcccrtccccattcccgtcatgctgggctttccaactggacatggaaatggatccccacagctgtgacctaagctttttcttagcaaggtcacacatctcctttc

SEQ ID NO: 372242 - DNA, 201 bp, Homo sapiens
aattactcaagtgattgtctcaaacctctatgtcatttgtttgtagagttctttagaagaacttagtacaattatctgaaagtgtctctaaggtatgacayttctgtgtgcattattgtactcagcatttaaaacatggcattgcactgatgtccttcctgtttcttaaaataagccaagtcttttctggcctcagggcct

SEQ ID NO: 372243 - DNA, 201 bp, Homo sapiens
aggaagagctaaccagagataccacttccttctgggaagaagcagcagggctgggagaatcctagcccagactttctctggaagctgctccagctcctgascaggcttatcttaccagccgggtgggagttaggaggactccggagtcacacagaaagccaaaaatctcctgaaaacaataccctttccagtgtagatcct

SEQ ID NO: 372244 - DNA, 201 bp, Homo sapiens
attctccagttatcaattggtggttagaaaacctgtatccttgggagaggtaatattgtgatggtgtcacattatgatattaatcatctcccagcctttgygatgaacaggaagaagcaggagcatgaggccagtataacagatgcctgtaaaggagaggtggaaggagagtcactgcctttaaagggaaacttggattct

SEQ ID NO: 372245 - DNA, 201 bp, Homo sapiens
tagtgagcaggtgagagtactttctctgaaactgaagagagaagtgtcctgatcctaaaacctttcagagagctgcctgactgcgctgctcaggaaaaaasgggtgctcaccctagcatgatagggatggccaagtgccttggggcacccagctgttcagcggcattgtggtgaaagggaagtacagtcgatcctcatttt

SEQ ID NO: 372246 - DNA, 201 bp, Homo sapiens
atttttctgttccctgcctccaacacacacacacacacagacacacacacacacacacacccccgccccccccccccccacacacacgaatgtttctgccycttgacaggggactgtgctctccagctgacctgtttgcataccctcctctcctggttcctgctttttgggtacagctccagcctcttcctgctaaaatcc

SEQ ID NO: 372247 - DNA, 201 bp, Homo sapiens
ataacttctctcatggaatactttggtggttatttttctgttccctgcctccaacacacacacacacacagacacacacacacacacacacccccgccccycccccccccacacacacgaatgtttctgccccttgacaggggactgtgctctccagctgacctgtttgcataccctcctctcctggttcctgctttttgg

SEQ ID NO: 372248 - DNA, 201 bp, Homo sapiens
aacaaaaagcaagatgatagatttaaacccaaccacatcaatagttgtattaaatgtaagtagtctaagtatctgaattaaaaggcagagattatcagatrggataaaagaaaagtcaagagccaactatatgctgtcaacaagacatccacttttaatataaagacacagaaagcttaaaagtatagaaaaggatgcacc

SEQ ID NO: 372249 - DNA, 201 bp, Homo sapiens
catgcgtcacctctgttctctgcttatctcaccactgttctctgcttgtctttctccatgtctaattgtagctgccaattaagcagatttatgggaaaatktggttcctctgacaaatctttttatttcccagcaaacctatatcactttatttgtagtgcacatcggttatgatttagcttgtggctgaggaactctcta

SEQ ID NO: 372250 - DNA, 201 bp, Homo sapiens
atggggggaactaagaacagagaagagaagtacaaaacaaaaagcaagatgatagatttaaacccaaccacatcaatagttgtattaaatgtaagtagtcyaagtatctgaattaaaaggcagagattatcagataggataaaagaaaagtcaagagccaactatatgctgtcaacaagacatccacttttaatataaaga

SEQ ID NO: 372251 - DNA, 201 bp, Homo sapiens
tgccagacggaaatccggggacagcatccaacagcacgtgaagatcaccccagtgattggccaaggagggtgagagcaaactgttcaactcttttagctgragataaagactcaaggccctcatgggcattgggcttgaaatgccagtatgagccttacatccacaaatgcagtagggttgtgctgaatgtagtatagatc

SEQ ID NO: 372252 - DNA, 201 bp, Homo sapiens
  misc_feature (1)...(201): n = A,T,C or G
tagcatccccaagtctcagatctctttcattgactacttcataacagacatgtttgatgcttgggatggtaagacagttactgttttgtcacccaaagaanattgttatactttacgaatattatctttagtgacacagggtgagcctaaaggtaaacaaaatatatttttaaaaatgtggctgtcagctttttgtggcca

SEQ ID NO: 372253 - DNA, 201 bp, Homo sapiens
tttctaatgaacgacttagaattcaaccagctagcctgggccacagccttgaagctaacctctcttttagttttgtttagaaactacattttgaggaattcttggttcttgaatcttgaatttaatcttaaatttttaagttagatttaacttattacttggtacacaaataaatgctaggactgtatatgattatgaggt

SEQ ID NO: 372254 - DNA, 201 bp, Homo sapiens
gcccgccaccccacccagctaatattatatttttagtagagagggggtttcaccatgttggctaggctggtcttgaactcctgacctgaagtgatcacccrctttggcctcccaaagtgctgggattacaggagtgagccacggcgcccgaccggctgttttacttttgtgtctgctgctggctggctcccgctaagacac

SEQ ID NO: 372255 - DNA, 201 bp, Homo sapiens
cataatatcaccactttacaccacatagtatcacacacacacactagttgagtacagtggtgcccacctgtagtcccagctacttgggaggctgaagcagraggatcacctgagttcaggatttgtgaccagcctggacaaaatagtgagaccccatctttttttaaaaaagaaaaaatatatatactgtatatgtaaagt

SEQ ID NO: 372256 - DNA, 201 bp, Homo sapiens
cactggcccactaaaagaaatattttcaagatactgagaaatgcaaaaaaaatgtaaaaaccaagcataatatcaccactttacaccacatagtatcacamacacacactagttgagtacagtggtgcccacctgtagtcccagctacttgggaggctgaagcaggaggatcacctgagttcaggatttgtgaccagcctg

SEQ ID NO: 372257 - DNA, 201 bp, Homo sapiens
tcaggcccagtgggattccaaatgagggaggttcacaggctgttggaatcatctctagtcttaggaataccatgacttcagttttctcagaagaagtaagmcaatgagagatacttaacattaataatttgaatagtagaaatataatgacacttgaaagagaattcgtatgccagaacaacaacaacaaaaaaagcctat

SEQ ID NO: 372258 - DNA, 201 bp, Homo sapiens
ctgccttcctgcggacccattcataagactgacatattcattcattccactgacatattcattcattccacaagtagttattgagcatctgacatgtcccrggtgctatgctagctcctggacatgcagtgatggccaacctggcctagctacatgtgggggacaaatggaggcacaaatagtaccttggtattctgagac

SEQ ID NO: 372259 - DNA, 201 bp, Homo sapiens
tagtagagacaaagtttctccatgttggtcaggctggtctcgaactcccgacctcaggtgatctgcctgcctcggcctcccaacgtgatgggattacaggygtgaaccatcttgcccagctagttctatctttagactaaaatttaagtatctataaaaaggaggaactgctgtttaatgaatgcaaatgtttaggtacat

SEQ ID NO: 372260 - DNA, 201 bp, Homo sapiens
catgatctttgctcactgcaacctccgcctcttgagttcaagcaattctcctgcctcagcctcccgagtagctaggattacagacatgcgccactatgccyggctaattttgtatttttagtagagacaaagtttctccatgttggtcaggctggtctcgaactcccgacctcaggtgatctgcctgcctcggcctcccaa

SEQ ID NO: 372261 - DNA, 201 bp, Homo sapiens
tggctggacatgaaattctgggttgaaaattcttttctttaagaatgttgaatattggtccccactctcttctagcttatagggtttctgcagagatatcygctgttactctaatgggcttccctttgtgggtaacccgacctttctcactggctgcccttaacattttttccttcatttcaaccttggtgaattcaccaa

SEQ ID NO: 372262 - DNA, 201 bp, Homo sapiens
acaggaagaaatagggcaaaagccatttgaggtggacaaaatagtatataaaaaataaagtttgatttttattaacacaatggtgaaaagagagaacttcmaggtagttccatctgttttttttttatttattttttattttttatttttttttgagatggagtttcattcttgttgcccaggctggagtgcaatggcatg

SEQ ID NO: 372263 - DNA, 201 bp, Homo sapiens
attctcttgggagggtcaaaccacagctggctgatctgttatcaaaggatttgtggtgcctcgaacatgtcctgttatttcacaatcagtgccctttgtamatatggttccttttatttcttctttgtctgacttgtcctttaaaacctccatttgagagctgcctcttccagaaagccttccttgaccacctccagctgc

SEQ ID NO: 372264 - DNA, 201 bp, Homo sapiens
tgatgtcggaggacctggtatttggtgctatgtggagtaactatacagctaatttcctaatggaggttattgttattaattcaatttatttttatagcaastttattgagaaataatttaccaccatacagttcacccctttaaagcatacaacttttagtatactcttagaagttgtgcaaccatcaccataatcaattt

SEQ ID NO: 372265 - DNA, 201 bp, Homo sapiens
agtagcaggaaacataagcctttattcactttacaaagcataaatagtaacagtatacttcatatgtacagtgtgaccagttaaaatggaaagatcctgcrtatgggaacaggggtggcactagtgagtgtgcctggtaaaaaaaaaacagggcaaaaaggcagaaaatggagagaagcaggggacagactgaatgattag

SEQ ID NO: 372266 - DNA, 201 bp, Homo sapiens
tctgggccagtgaatacaatgagccagggtgggttttcctatttttcaggccattggtttatctgggcttaaaggtcttctctcggtttggagtatgtgartttttaaactgttctgaaaccactcttcgggcctggttccaagtgatcgaagccaactaccactcttccaatgcctaccacaactccacccatgctgccg

SEQ ID NO: 372267 - DNA, 201 bp, Homo sapiens
atcatagacaaactcagaacttcgatgcagaagcagtgtgcaggtaccttctctaatttaatatgcttagtaaatgttcactttacatcttaaaacgaatwtcatttatagatatctttagtttatttcaaatatttttaaaatatgcgttgatgtttttaagcagtgtatacagatgtctgtggtgaaagctatagctcc

SEQ ID NO: 372268 - DNA, 201 bp, Homo sapiens
cattgtatcgttttttatagttattgacactttgcttctatcctatcaattctatctgtaatttatttcaaatcaatttcttgaacaggcaggtaatagcytattatattatttttcctatgggaaaatatgatcgtttattaatttggttttttaaaatttactaaacatctattacccagaaagcactatagaaaatgc

SEQ ID NO: 372269 - DNA, 201 bp, Homo sapiens
agccttgtagtatagtttgaagtcaggtagcatgatgcctccagctttgttatttttgtttaggattgtcttggctatgcgggctcttttttggttccatwtgaaatttaaagtagtgttttttccaattctatgaagaaagtcaatggtagcttgatgggaatagcattgaatctctaaattactatgggcagtatggcc

SEQ ID NO: 372270 - DNA, 201 bp, Homo sapiens
aatgggctgggaggatctctgaggagtattttgcacaggtgcgccatctttccagggaagctccacttcccctctgggaatgggaactaggtcatggaackcctgggggattctccagctgagtaactttttaccaattagttaaccactcctccctggaagaaagcagcttacccccacctggggtaggcttctggttcc

SEQ ID NO: 372271 - DNA, 201 bp, Homo sapiens; identical to SEQ ID NO: 80702

SEQ ID NO: 372272 - DNA, 201 bp, Homo sapiens
ctctacttcagtgcatctgaatccagctcattctttttaagaaaacataatattctatatccatagatttgccattattcagtcacgcatcttgtaatgawgaacatttaggttgtttccagttttttagtgctatgatcatgccactgtgctacagcctaggtgacagagggagaccttggctctaaaaaaatgaggaag

SEQ ID NO: 372273 - DNA, 201 bp, Homo sapiens
tctacatatacacaagccatgtgggggatttgagggtgtggtaaaaatgcttatatcttgataacctgaaagtccctctacttcagtgcatctgaatccarctcattctttttaagaaaacataatattctatatccatagatttgccattattcagtcacgcatcttgtaatgatgaacatttaggttgtttccagtttt

SEQ ID NO: 372274 - DNA, 201 bp, Homo sapiens
taatcatgtgagccaatttatataataaactcagctcgcttgctcgctctctccctctctctctacacacacacacacacacacacacacacacacacaaycccctgttggttctttgtctagagaatgctaatatagcaggtgttggtcgccatttaccaatgacgaaactgagacttagtaaagctctgtaagttcccc

SEQ ID NO: 372275 - DNA, 201 bp, Homo sapiens
cccaaccaggctctgctgcctgactctcttttctggaaaggtttctgctgctttcagacgttcatttttctccctatgcattaattgaagtttagagtatrtttcgtgtcctggctatgctacaggcagggctggcttcataggcatgccaccaacgcggctgcacagggccctattctcagaagggcctctcacctgggg

SEQ ID NO: 372276 - DNA, 201 bp, Homo sapiens
ggagataattttctatttcgacccttccattgaggtcactttttttacgaagtctaatctctgcaattatgacatcacattttattgtagagcaaagcatygtactttcagagggcaaatatcatttaagtgatagaactgatttttcccccaaaataaacacagctcaagaaaaagcagcaagaaaattaattggtatac

SEQ ID NO: 372277 - DNA, 201 bp, Homo sapiens
gcaggtcgatccgggccacaaatccctccgagcacacggtgatcctcgcagtggtttcgcgagtgtaagtgcacctcccattcccagatggaaggagtacygttcattctgaaatatttgtcagatgtaatctggtttttgagctatctaagcaatgggtgtgtcttgggtcctagaacaccagccttagatcttgatctt

SEQ ID NO: 372278 - DNA, 201 bp, Homo sapiens
aagttccccattctgactttgatacaagaagattggttgccctattatgtctgttgctgtttgtttgaggaagatacttttgtgacacctttttctgcccrtttccctttttgatactcctttttcctatataagaactatatttatttgatttggaaaggggtaaatataatcatcttatcattcctcctggcagaggta

SEQ ID NO: 372279 - DNA, 201 bp, Homo sapiens
ggtgagatggaaagaagaataaagaatggccccacctgagtagcagggcattgactgttccatgaattccaaggtggaaggagtatcacagagccctgagygaaggtttctgctggacaagagaagcagggaggatgagggtgtgctggaccgaggtgacataagagccaacgtctggctagatatgcagagagaggaatc

SEQ ID NO: 372280 - DNA, 201 bp, Homo sapiens
tgacttcttcccatgatgcttcttccccattttctcccccttctccctcttgaactccaagtaaataaatgttagactctcccactgtatccaccgcatcrctctctctcttcctttttttgtgtctgtgtcgtattccagatagttttctgatattttgtggtttaattctctgttcagttgtatcttagcagctgttaa

SEQ ID NO: 372281 - DNA, 201 bp, Homo sapiens
tctttgtctttggttccctgcagtttcactgtgatgtgtgtaggtgtgactttcttcttatataagtgccacactcctaagtaaaaatgcccatctttgcygcttaaagagcaagtcctcttgaagttctggggcatgccccccttctttattaatttatttctgcttgagttaaagcagagaaggtctctttcccatgtg

SEQ ID NO: 372282 - DNA, 201 bp, Homo sapiens
aaattagctgggcgtggtggtgcaggcctgtaatccaagctattccagagactgaggcaggagaatagcttgaacctgggagacggaggttgcagtgagcygagatcatgccactgcactccagcctatgcgacagagcgagtccactgtctcaaaaaaaaaaaaaaaaaaaaaagaagagatagacataagagatgtttt

SEQ ID NO: 372283 - DNA, 201 bp, Homo sapiens
gataaatttctgttgtttaaggcacccagtctatggtattttgttatggccactcaagtgtactaatacatgtagtttcccaggattaatccatttatatraccaatatctggctggagagacctttaaatcttcaacaacagaagcagaattcttcaaatgatgccactagtagttaatgaattctatccaaataagtag

SEQ ID NO: 372284 - DNA, 201 bp, Homo sapiens
cctaagcaccatgtgtagtaggtattcagtaaatgtttgctgtccaggggatccatgcaggaaggtctgaggttacaagcaggtaaacagaaaagcccacmgcacttcacccgcatggtggtgtttggatctattataacagcacgtctaagccaggcctgttcatcccccatgggacagctgagaaaacaaaggtaggtg

SEQ ID NO: 372285 - DNA, 201 bp, Homo sapiens
tcttttgattcttttctgtctttgcagcctttgcacatctgccagccctgatgcaacatttggctgacaactacaaacactggaagacactagatgacctraagtgcaaaagtttgaggcttccatctgacagctaaagccaagccacagagggggcctcttgaccgacaaaggacactgtgaatcacagtagcgtaaaca

SEQ ID NO: 372286 - DNA, 201 bp, Homo sapiens
attaaatccctactaggttccaggcatttttccaggtgctagggtaatagcagtgaattgaatggtagtgaacgtacatagaatatgatgtcaatcacaaraaagtagatatatctaataaactaacatagaagataagatatattagacatttcagaaatacttagtacatccaaaagaaaacagaaaaaggggaatggg

SEQ ID NO: 372287 - DNA, 201 bp, Homo sapiens
ctgttattcaatttatttaagaataatttattaaatccctactaggttccaggcatttttccaggtgctagggtaatagcagtgaattgaatggtagtgawcgtacatagaatatgatgtcaatcacaagaaagtagatatatctaataaactaacatagaagataagatatattagacatttcagaaatacttagtacat

SEQ ID NO: 372288 - DNA, 201 bp, Homo sapiens; identical to SEQ ID NO: 80690

SEQ ID NO: 372289 - DNA, 201 bp, Homo sapiens
gtcctcatgcttcgcccagggtgtgcctcctctaattctgatcccaaacttgtcccagacacccccaggcttataaatgctcctggggtctaagttcaccrgtttcttttgattcttttctgtctttgcagcctttgcacatctgccagccctgatgcaacatttggctgacaactacaaacactggaagacactagatga

SEQ ID NO: 372290 - DNA, 201 bp, Homo sapiens
cctccaaatacttaaaataattatatcaccatagagactcctttatatgcatggcagatcatgaacccattttccaaatgttagctaggagctgtgttackgggttgcaggacagaacttaattattacagcaaatggttactagatctataggttaaattttagtatcaggatttggccattggtagattacagtccaga

SEQ ID NO: 372291 - DNA, 201 bp, Homo sapiens
tcttctaactctctctctttaggtactgaataacttctctcatggaatactttggtggttatttttctgttccctgcctccaacacacacacacacacagacacacacacacacacacacccccgccccccccccccccacacacacgaatgtttctgccccttgacaggggactgtgctctccagctgacctgtttgcat

SEQ ID NO: 372292 - DNA, 201 bp, Homo sapiens
tttgaacatgtgaataagtttgtgaacagcatcaacaagccaatggcagctgaggtgagtactgctttccatgccataaggcacatccaagtacatttccrtaagagcctgctctggccctgaagcattttctctcccactcaaatgtaaggtggttatttacttggagttgataaagggctgaaaggactggccacttgt

SEQ ID NO: 372293 - DNA, 201 bp, Homo sapiens
cttctaactctctctctttaggtactgaataacttctctcatggaatactttggtggttatttttctgttccctgcctccaacacacacacacacacagacacacacacacacacacacccccgccccccccccccccacacacacgaatgtttctgccccttgacaggggactgtgctctccagctgacctgtttgcata

SEQ ID NO: 372294 - DNA, 201 bp, Homo sapiens
gaaaaaagtttgactatagaaataaagctatcagccgggcgtgttggctcacctctgtaatcccagcagtttgggaggccgaggtgggtggatcatctgargtcaggagatcgagaccagcctggccaacatggtgaaaccccatctctactaaaaatacaaaaagattaggtggccatggtggcccatgcctataatccc

SEQ ID NO: 372295 - DNA, 201 bp, Homo sapiens
taatttttgtatttttattaatagtagagatggagtttcaccatgttggccaggctggtcttgaactcctagcctcaagtgatccacctgtctcagccacycaaagtgctaggattaccacacctggccactgtggctcacttcttaattgttgggccattttccccaagtaccctgtttctttatcagaaaagtgatgaa

SEQ ID NO: 372296 - DNA, 201 bp, Homo sapiens
cataaatagtaacagtatacttcatatgtacagtgtgaccagttaaaatggaaagatcctgcgtatgggaacaggggtggcactagtgagtgtgcctggtaaaaaaaaaacagggcaaaaaggcagaaaatggagagaagcaggggacagactgaatgattagctcacagagaaaaaggaagagagaagagcctctttatg

SEQ ID NO: 372297 - DNA, 201 bp, Homo sapiens; identical to SEQ ID NO: 80686

SEQ ID NO: 372298 - DNA, 201 bp, Homo sapiens
ggagtttaccctttctgaatttgttactcatagtgacaaatctgtttaggtttgcccatacaatctttcttttctttccttcccaaaaagaggaccacttaaaaaattcttatttttctgccattatccctttggtctcattaattaatttatttttgtcttttaagagaacagttttaaattgcttcttgtgagggtgca

SEQ ID NO: 372299 - DNA, 201 bp, Homo sapiens
gtattaacagacatttgtagagcactttattctcatatgggctctgcgtgatagccattgtgtttcaggggtggaaactgagctgtgaaggcttaaaatarccagtccctattgctttattgcccagtaatgagtgccaacaagtaacaaggtcacgatcctctcacctcttccactccctgctcccaactcatcccagac

SEQ ID NO: 372300 - DNA, 201 bp, Homo sapiens
tcttctttctcttttgttcattttacaggaaatgggagatcagagatgctcagattttttcagcgtagtttcccctaacatcacagctctctcctgtctcttttattcacagtgagacactaaagacttcccagtgagcaaatttttcacataggtgaaacttactccattaaccgctaaaactttgaagaatgattattt

SEQ ID NO: 372301 - DNA, 201 bp, Homo sapiens
taaaactatgataaacaaaatgagagtttgattccaaatattccagaaatatagggaaggtcaccaagaaaagtccccactggagagctgcagaggtgcartgaaccagcaaggggagttctgctgggtttgcctttcaccatgccagggggaatggttggaagccgagtaacatcacaacagcaaaaaaggagaaaaaat

SEQ ID NO: 372302 - DNA, 201 bp, Homo sapiens
atcataaagccaagtgtctttgaagaattgtacttgagattcagaacaagactccatgttattttttaaagagagatacttcttttcttttttttgagacrgagtctcactctgtcgccctggctggagtgcagtggcgcgatcttgtctcattgcaagctctgcctcccgggttcatgccattctcctgtctcagcctcc

SEQ ID NO: 372303 - DNA, 201 bp, Homo sapiens
tctccatgaccacaactgtgaatgaaacagaagaacgtcattgcctcgtgttagtgttgaagtttcattcagcacacacatagtccattccatgatccacraagatttcactgaattacaattctttttgtatcatacacacagatatatatgctattgtttatgcatttagtttgaaagattagtttttttccctcaaag

SEQ ID NO: 372304 - DNA, 201 bp, Homo sapiens
ggagtgcagtggcgcgatcttgtctcattgcaagctctgcctcccgggttcatgccattctcctgtctcagcctcccgagtagctgggactacaggcaccygccaccacgcccggctaattttttgtgtttttagtagagacggggtttcactgtgttagccaggatggtctcgatctcctgacctcgtgattcccaaagt

SEQ ID NO: 372305 - DNA, 201 bp, Homo sapiens
aatgaaacagaagaacgtcattgcctcgtgttagtgttgaagtttcattcagcacacacatagtccattccatgatccacgaagatttcactgaattacarttctttttgtatcatacacacagatatatatgctattgtttatgcatttagtttgaaagattagtttttttccctcaaagcatattattaaccctcttag

SEQ ID NO: 372306 - DNA, 201 bp, Homo sapiens
ctaaacatagttttctttgtatttttcctgtctgtcatttgttgactccttaaatctgtaaatatatgccattcagcaaatttggaaaatttcccatctatttttttcccaaatgcttttatctcctctcacttttctccacctgggacttcaattactaatgttaggcattttgatactgcccacagatccctaggtctc

SEQ ID NO: 372307 - DNA, 201 bp, Homo sapiens
atgcatcatttaatgatggggatatgttctgagaaatgtgtcgttggatgattttgtcattgtgcaaacatcatagagtgtacttacacaagcctacgtgktatagcttactacacacttaggctacgtggtacagcctgttgctcctaggctacaaacctgtagagcatgttactgtactgaatactgtaaatactttta

SEQ ID NO: 372308 - DNA, 201 bp, Homo sapiens
tgcctcatcccctcacccttaggccacattggtttctcctaagcaccatgtgtagtaggtattcagtaaatgtttgctgtccaggggatccatgcaggaargtctgaggttacaagcaggtaaacagaaaagcccacagcacttcacccgcatggtggtgtttggatctattataacagcacgtctaagccaggcctgttc

SEQ ID NO: 372309 - DNA, 201 bp, Homo sapiens
agtgtacttacacaagcctacgtggtatagcttactacacacttaggctacgtggtacagcctgttgctcctaggctacaaacctgtagagcatgttactrtactgaatactgtaaatacttttaacacaatggcatttgtgaatttaaacatagaaaggcacagtaaaaatgcagtataaaaagagttaaaatggtgcac

SEQ ID NO: 372310 - DNA, 201 bp, Homo sapiens
gtggagagataagaaaaatatgcaattcctcttccttcctccagttaaattttgtgagatttacaaagccaaacaggaccccctaaccatacatcatggtragccgtggggagccagcctgaaggtcaacaccaggttcatagcttgggtgtataaggaacacaacgttgtgtgacatgtcagaaaaagatgaggccacag

SEQ ID NO: 372311 - DNA, 201 bp, Homo sapiens
ccctgcggtgaccctgtgtgacctgctgagggcctggctgctctgcatgttcatcaatatcacttttatgcagcaggtaccacatgccaggcctcgggctrgggctctgcacacatcacccttcatcctcatgagatccctgcagagcagcacaatacccatcttacagtggggaggtcaccacagcagtcagcaaagtct

SEQ ID NO: 372312 - DNA, 201 bp, Homo sapiens
atgccagccctttcagaggctcctgccctctgttccgcagcaggaggtgtgatgcggtcctggcactgcagtcacgcagggtgcctcggggtcccaaatgwgggccatgtcattctcacacgagcctccctctgtgtcatatcacaatgagtgcatccctgatggccctgtggggccacaaccatgaacattagtccagag

SEQ ID NO: 372313 - DNA, 201 bp, Homo sapiens
gactttgaaataataataataataaccaacctgtatatagttctcactttatactaagtacttttttaagtgctctctctctctctatatataaatttttwaaattctcactgcaaccccacaggatagatactgttatctcatttgattaagcaagacactaagcatcaagagatggagtgacctgcccaaggtcacgca

SEQ ID NO: 372314 - DNA, 201 bp, Homo sapiens
acgtgagggtgttatgtctgctacgacaccactaggcaataggaattaggttataatctcgcaggaccaccattgtatattgagtccattgttgaaatatygttatgagttgcattactgtatcttaaattgagtaatttataagcaacagaaatgtattgctgacagttctggaggctgagaagtccaagatcaaggtgc

SEQ ID NO: 372315 - DNA, 201 bp, Homo sapiens
caacaagaagggcactggggagtcagattggatgacacaagccaagccatgataggactgcaggaaacccaggcttgaagatcgtagcagacatacaaacyaatcagatgggttttagaaagacttagcttgggggtggggtaaaccggtggcagcagacctctgaaatggcacagtaggactccagctgtaggctcagct

SEQ ID NO: 372316 - DNA, 201 bp, Homo sapiens
cactccaccaccaccaccaccactgcaacaagaagggcactggggagtcagattggatgacacaagccaagccatgataggactgcaggaaacccaggctygaagatcgtagcagacatacaaactaatcagatgggttttagaaagacttagcttgggggtggggtaaaccggtggcagcagacctctgaaatggcacag

SEQ ID NO: 372317 - DNA, 201 bp, Homo sapiens
tccattatcccctgggaacacaatgttttatagggggtccttgagcagaaaaacacagcagcaaccctaacccttcgacgtcagtctctccaagtgcatckaagtttaagtgttttgcttccttcatcagtactttttctgtgatccttccttttcaacaagctctccagtaacagcacaagacaaaagttaaaatgaagc

SEQ ID NO: 372318 - DNA, 201 bp, Homo sapiens
aatatataggtttatgacttttgccacagttggaaatattccaaccattatttcttcaaatatttctttgtcttctctttctgaaattccatgacatgatkttaagaccttttgttattgttcaggttcctaagactctgtttttttagttcagtcttttctcttttgttcagattggataatttgtattgaatcatgtgc

SEQ ID NO: 372319 - DNA, 201 bp, Homo sapiens
tctttcaactgtcaaacatactttaaagaattcaagagaagaataatctactatagttacccaaatatttacaatctattgcttttccttcattcgtgatsttccaagttttctcctagtatcaatttcctttaatctgaaagcttttctttagaattcttttagagcaggtctgttgacaactgatttttaagtcttttc

SEQ ID NO: 372320 - DNA, 201 bp, Homo sapiens
gtgtggtgatggaggcaaaatcttgcctagagtggttcaaagagagaatgggggagagtaaatttagataactattttgaggagtttttccacaaaggaarggaaaaaaatgaaatgatattggctgggaaagtgttctataatgtcaatttagttcagttggatgatggtattgtttggtttttctatattcatgcttat

SEQ ID NO: 372321 - DNA, 201 bp, Homo sapiens
cagctgaggtgagtactgctttccatgccataaggcacatccaagtacatttccataagagcctgctctggccctgaagcattttctctcccactcaaatrtaaggtggttatttacttggagttgataaagggctgaaaggactggccacttgttttccttggggatgaaaataaactgtgtccacagcaactctgagct

SEQ ID NO: 372322 - DNA, 201 bp, Homo sapiens
gttcctagcctttatgtctctctgttcaaattccaaattcccagaaacagaatatcattagcctagctatagcctgggagatgggaacaaagagtccaatwtgggctacttggatctacttctttcctggagaaggtattatttttaagagctaggcagatatttttaaaaggtgattactatagtgttttactctgaagt

SEQ ID NO: 372323 - DNA, 201 bp, Homo sapiens
aattgcactgaaaatgataggttagtgctttcttttaagattcccatctctaatgggtttattagccacctcttttctctagtcattgtgtcgttaccaarctcccaaaaccaagtatgtaatgacgcacttagtttccttctgcctttctcacaaaggggctgatctttcaggctttgtttgttttgtctttttttttca

SEQ ID NO: 372324 - DNA, 201 bp, Homo sapiens
tgacgttaccctccaaagattgcttagattaatgggacgaaagttttgggtaaaagcttgggatacctgaaatttgcagctgtatacccctggctcttgaygtgagacttgacattgaaccttacaaagagggcaaccttaggtgatatcattggtcacaaatgcattacagaaaatgttttctcttagttaaattgatat

SEQ ID NO: 372325 - DNA, 201 bp, Homo sapiens
tctatggtattttgttatggccactcaagtgtactaatacatgtagtttcccaggattaatccatttatataaccaatatctggctggagagacctttaartcttcaacaacagaagcagaattcttcaaatgatgccactagtagttaatgaattctatccaaataagtagcaggtataatgatccatatttttacaata

SEQ ID NO: 372326 - DNA, 201 bp, Homo sapiens
tacaagtggtggtactaagacagtatacagttcaaattaggtagactggagcaatttaaataagaaaatatactactgcgcctgtaagccatttcagttgrgttaggttaatattctcctctgctcttctaacccgtatcatgattacttgttacacttaccttctcacactgatatcttcatttctgcaactataggaat

SEQ ID NO: 372327 - DNA, 201 bp, Homo sapiens
taagtggaaaattggcaggtctgacctattggataattgcctgggagttaagagaaaaaaaattttttaacgaaatgaagagattgtcctaatccacaagsgcatctttctttgttgtcttctctgtgttttgagacgttttctttagagaaagatttgatgttgtatcattttcagtgtgaagaagttccacattcattt

SEQ ID NO: 372328 - DNA, 201 bp, Homo sapiens
atgcctaccacaactccacccatgctgccgacgtcctgcacgccaccgctttctttcttggaaaggaaagagtaaaggtaggattttgatatcatgacctrgttacctgcctggattggagatccaagaacttaatcttagtaaatacattaggcaaacagctattttgcaaccaagttgacagctttttttaaaaaaaat

SEQ ID NO: 372329 - DNA, 201 bp, Homo sapiens
cagtgatcttgttggaggcctgatgactgtgagtgatgaggcaaaacctgaaaagcaagagaggtatccggggcctctagagtgcagctgatgtggaaacygttacctgtggttgcagaagtacctgttatatagactaacgttagcataaccagaagcaactgcgtcagaatttatgtataacatgtgcagtggtatttg

SEQ ID NO: 372330 - DNA, 201 bp, Homo sapiens; identical to SEQ ID NO: 80685

SEQ ID NO: 372331 - DNA, 201 bp, Homo sapiens
aaggcacccagtctatggtattttgttatggccactcaagtgtactaatacatgtagtttcccaggattaatccatttatataaccaatatctggctggaragacctttaaatcttcaacaacagaagcagaattcttcaaatgatgccactagtagttaatgaattctatccaaataagtagcaggtataatgatccata

SEQ ID NO: 372332 - DNA, 201 bp, Homo sapiens
aatctctctaaggcttccttgtgctggcctcctttgggtacttgtcattttgtggattatattctagaccatttttttctttccattttaatgcataatcracatcaggctgagtttttttctcatgactgtagatgacatgactatgttgtataaataatttctctttaatctgatatttgtcagggggaaatggcttct

SEQ ID NO: 372333 - DNA, 201 bp, Homo sapiens
gattttgattgtaacgtagggatattgtttgggggggataattcaccaaatataaaagactttatcttcctcatgccaacattataatcttgtgtttttcrtggagctatctggaaaaaaccagtggaggtatctggaaatgaacacagatagctgtcaatgtctgggtccaggcatgatagctgagtcttgggtgggtgt

SEQ ID NO: 372334 - DNA, 201 bp, Homo sapiens
gtgacaggtgaattaaccaacctgaactaccttgatttctctcgtgagtttgcctcttccatctgcctaccctgcaccagctgggttgtatcgtggagttycctttctattgaagtgaagccaagctgagtttttttcttgatcattgcagtgtattttcccacttgctttcattgctgtagttcctactcatagtggtgt

SEQ ID NO: 372335 - DNA, 201 bp, Homo sapiens
gagtgaaactctgtcagaaagaaagaaagaaagaaaaagaaagaaaggaaggaagggagggagggaggggagggaggggtggggaggggaaggagaggaaagagagagaaagaaagagagaaagaaaagtatacaggcaaggtattggttaggggtgaattattattttttggacagcctgtgcccttcttgcaggaatcc

SEQ ID NO: 372336 - DNA, 201 bp, Homo sapiens
  misc_feature (1)...(201): n = A,T,C or G
gcacttttttttctgagttttagaatttcatccttaagattagcttttttaataatgtcataattaagtgaaagatctattatgtttgcaaaatgagttcntttttaagttaactttggaactcaagtgaatctggtgcttatcattatggtacagaatctggtgattttgtgtgaaaacatttcatcctgtgcatgaata

SEQ ID NO: 372337 - DNA, 201 bp, Homo sapiens
tgatctgcccaaaagcgataagaaccgggcagaccttctcgacaccatcaatacatgcatcaagaagggaaaggtgggttacaccagcaaaaccaatccaygaaccctctccccaatgcacttttttttctgagttttagaatttcatccttaagattagcttttttaataatgtcataattaagtgaaagatctattatg

SEQ ID NO: 372338 - DNA, 201 bp, Homo sapiens
agtgaaactctgtcagaaagaaagaaagaaagaaaaagaaagaaaggaaggaagggagggagggaggggagggaggggtggggaggggaaggagaggaaagagagagaaagaaagagagaaagaaaagtatacaggcaaggtattggttaggggtgaattattattttttggacagcctgtgcccttcttgcaggaatcct

SEQ ID NO: 372339 - DNA, 201 bp, Homo sapiens
cacgtgattcaggtatggaaagaaaccacctctatcattaacattcaaaatgaacctttcaggtttaagccacactttttatcaagtactttcccatcatsctcatgtatcagcacattttcttaggagaaataaatatcaagctgtgcaaagaatactgatagacttaagaattagatattcaataaagaacaaaaaatt

SEQ ID NO: 372340 - DNA, 201 bp, Homo sapiens
taaaaatccagacacttctagtaaaaatgactcaaagtccaaccacttagcatttggggatgtatccttaaagacatttccaatgcatataaatggatactttttttttaatacaaaaacaggactgtgctatacatatacatcatgcttggtaacccatctccagttcagtaagctggattcttcaatttagtgcacacg

SEQ ID NO: 372341 - DNA, 201 bp, Homo sapiens
attattacttcagatcagaacctgcaatttctttgacagaaatggggtttaaaaaaattttatttttttgagacagattgtcactctgtcgcccaggctgkagtacagaggtaatcttggctcagtataatttctgcctctcaggttcaagtgattcttgtgcctctaagtagcgaggattacaggcatgtgccaccacac

SEQ ID NO: 372342 - DNA, 201 bp, Homo sapiens
gcggaggtgcgcatcgggcccatgagactgacgcaggaccctattcaggtacgcctcctttactcagccctgtgactcagattattttcttttttttttcttttttttttttttttgagatggagcctccttctgttgcccaggctggagtgtagaggctcagtctcggctcactgcaacctctgcctcctgggttcaagc

SEQ ID NO: 372343 - DNA, 201 bp, Homo sapiens
acacagcgaagcccacagcagaagcctcacatttgtctgccctgaaatctcccagtgcacacatacacaccttgttctcataccagaccaatgacatcaayagcccaccctgcctaggccctgtcatcagcactttcattaggttgtctcatttctattcaataagggtaggcaagagacatcattgccctatagtgcaga

SEQ ID NO: 372344 - DNA, 201 bp, Homo sapiens
  misc_feature (1)...(201): n = A,T,C or G
cagtcatgtttgaagcaagtcttgaagcataagatgttactcaggagaagaaggaagagaagactccgggtagcaggaacagccagggaaaaagcattgcnatgggcgaagagggactggaacatttaaggagctgaaagaaagtcggagtggccggagcttggtaagcaggtgagagaggaggaggatgtaggttgtaca

SEQ ID NO: 372345 - DNA, 201 bp, Homo sapiens
aatagggataatgcccaactccaaagagtttctctaacgggttattgagtgagacagtatgtttctagtgcattcagtatagtggctgccccttaaaaaaytcccattaaactatagctgtaatcagcatcactttcctagggacatttaaggaaagttctcagaccattttttttcagctcaaatgaccactcccctgat

SEQ ID NO: 372346 - DNA, 201 bp, Homo sapiens
gcatgatactgaaagcacagaggataaaatgtcagcagctgatccaaagttaggagtatgacaatttgccaaggcataggaaagatgctcacttcgtatcrtaacttatacaactagaagaaggtggcaagcactgtccaaactactcttgataaatttttttaaataaataaaacatcttaattttcaatgtttctaata

SEQ ID NO: 372347 - DNA, 201 bp, Homo sapiens
atcagaactaaaatatgtagtcatgtctccaaagccttcctacctggtttcctgtttagctgtattgttagaatatgttttatggctgccccgtgaaatgyatctgaaggcttcctcatgttgctggctcttagtggcccacctgcccacaggtctgcctcttggacctcagagagagccagacgtgtttctgttacagac

SEQ ID NO: 372348 - DNA, 201 bp, Homo sapiens
  misc_feature (1)...(201): n = A,T,C or G
atcacaaaggtgagtggcggctgctgcctgcactctgcagtcaggggccctcacacagggccgtgctctgaaaatacatcacactgacatcatggagctcngtctagtggaagaagcaaataacaggcaaataaacacatagcaaataaacacctcatcctaagtcacaatcagggcagtgaaggaaaacaagcgggttct

SEQ ID NO: 372349 - DNA, 201 bp, Homo sapiens
aaaaaatggccatgtcaaagaaatcagaaatactgatacacagaatattaaagctgaagagggaatgcattacttaagttttgttttgtttttattttttrgttgcaagtaataactgccttataccaaaaaagtacataagtaaataagaaatgtattagaaggatagtgcaattttttttttcagactccaagaaagag

SEQ ID NO: 372350 - DNA, 201 bp, Homo sapiens
tcatgtctccaaagccttcctacctggtttcctgtttagctgtattgttagaatatgttttatggctgccccgtgaaatgtatctgaaggcttcctcatgwtgctggctcttagtggcccacctgcccacaggtctgcctcttggacctcagagagagccagacgtgtttctgttacagaccaagcacaaaaatcccacat

SEQ ID NO: 372351 - DNA, 201 bp, Homo sapiens
caccttcattcgtctatttgtttggcagatattgattgaagtgggggcctaatatgtgtcagtcaatgtttgagacactgagttacagcagaaaaaaaaamaaaactaaaaattcttgttttctgagtacttacattttaactgggggagatcaccaagaaaaaaaatttaacaaccttatttggttggtactataattat

SEQ ID NO: 372352 - DNA, 201 bp, Homo sapiens
cacctccctgttttgcagtgtgcagctggatttgatttcagaaatgaggagaaggggctccctgcccactagccgcccctccacctgtaatctaacaaacracttctagaatagggaacagagtctttcattctccagttatcaattggtggttagaaaacctgtatccttgggagaggtaatattgtgatggtgtcacat

SEQ ID NO: 372353 - DNA, 201 bp, Homo sapiens
tgtgtgcgtgcacgtgcttgaggaaaccccaagttgggaaacatgaaaatgggagcatagactaactaattgaccatatttattcacctttagtatattawtcaattgatgaaatactcagaatggcctttgctgtaaaacgtccagcattttgcctccatttgctgtgtatatttcagcactgggcctaccagtgtatga

SEQ ID NO: 372354 - DNA, 201 bp, Homo sapiens
gcttcacacctgcctgagcccagcactgaaagggctgcctcctgccccagccatttaactgaatttattgttctgattctactggtagtgtccccaaactrtagcaaacattgatcaatagatagtggcaattggaaaggagacatgagaaatccagttgtggagatgtgcataatacaagccgccactgttgaatggagt

SEQ ID NO: 372355 - DNA, 201 bp, Homo sapiens
ttccagtggtctctcacccccaacccattagggctattcttagccctcctggtctaagtacaattatcatggccgtcatctcacagagcagccccacagargcctacaatctgttgtttgtccttgcaccacagctgccctgggcccctcttgtatcacagaataatcccatagccctaccctaccttccttctggtattt

SEQ ID NO: 372356 - DNA, 201 bp, Homo sapiens
atcaatagatagtggcaattggaaaggagacatgagaaatccagttgtggagatgtgcataatacaagccgccactgttgaatggagttcttatttgttcrtttgtttgtttataagagacagggtcttgctgtgttgcctgggctggagtgcaacggtgcaatcatagctcactgcagcctgaaactcccaggctccagt

SEQ ID NO: 372357 - DNA, 201 bp, Homo sapiens
tcacattgtatattttgttaattttagaatgtattattttggagaactttgagaaattttgcaagcatagaaaaacatccatttttcatatttaaaaaacrttcctcagtatttcacatttacttatgcaaaagcttcttgtcttttaggttgtaaactttgttatgaagtctcttaaactttgtacattctccttatttt

SEQ ID NO: 372358 - DNA, 201 bp, Homo sapiens
ggtgaagttggacttgaaccattgtcagagggcaagggcgttggagcaggcccttgaaggatgcgttagctgctgaggcaggaaagggctttccaggtcarctgctttccttcctgaatccttagcttccctcttgtctgaggaaggctctaaaactcgatgccaagttacttaacaaaattcctgaagctgaaactatta

SEQ ID NO: 372359 - DNA, 201 bp, Homo sapiens
agggtcttgctgtgttgcctgggctggagtgcaacggtgcaatcatagctcactgcagcctgaaactcccaggctccagtgatccttctgcctcagcctcmtgaatagcagggactacaggtgtgtgccacaacaactggctaatttttttatttttgtggaggtggagtctagctgtgttttccaggctggtcttgaact

SEQ ID NO: 372360 - DNA, 201 bp, Homo sapiens
gctccattaatgttaacaccaaaataggaaatagactttcccaataaaattaaacctaatttccatttatttggaaatatctacatatacaagaagatagwaagtttaattcagtaaacacccatgtactcactatttactgcttaaaaaaataggtcatacgctgagtgtggtgcctcatgcctgtaatcccagcacttc

SEQ ID NO: 372361 - DNA, 201 bp, Homo sapiens
tttcagtttatccagtgtttgggagactagacatatttaataccagtatttataggtaggccaggtttttttcccagttttccttttctgttctctgatcrctgttcaacatacatttgtagcttcctcctcccagctgcacctgttcctccagtggcttccccttcatctgggtagatgaaggtaatgatggaagtccga

SEQ ID NO: 372362 - DNA, 201 bp, Homo sapiens
cctttgggtacttgtcattttgtggattatattctagaccatttttttctttccattttaatgcataatcgacatcaggctgagtttttttctcatgactrtagatgacatgactatgttgtataaataatttctctttaatctgatatttgtcagggggaaatggcttctccattatactgtgccagccaagttttctgt

SEQ ID NO: 372363 - DNA, 201 bp, Homo sapiens
cacggaaaactaatcaccttccctttctaatctgaaatccttagagcctcattcattcagatataagaacaggaggaaagagtccattgacgtgaaatcgrtatcatctcgaggcagtgatggtaagatgtttttcagattcctctgacctttttaaaatgtagaaaatgatggaagaatatgttaaaaaattcatcagcg

SEQ ID NO: 372364 - DNA, 201 bp, Homo sapiens
gcctcctgaataatcagagctagactgttctttgcttgttctctattacacaatgtaattttacatgcttgaagtcatccggcagtgtctattatcagtgrtatctctaataaaaggaaggaagtcagttgagggatgtcacgttttgaccattgcctttaaattcctgtgttctcccagtcagaccctgcatgatctttg

SEQ ID NO: 372365 - DNA, 201 bp, Homo sapiens
caatactattagcaaatccctaaattaaaataatttgttaatattatcaaatacaagacagtgttgaagtttccctatctcataaacattttcatttaaakatttttttaatcatctttcaaataagatctagctattgcaatcaattgatatgtttcttaaggatcttgtcatctgtgagttccctttcctctctttctt

SEQ ID NO: 372366 - DNA, 201 bp, Homo sapiens
aagagatggttacccactgatttcttttggattctgggcatatatatgacttttgggaagtagaaccctattatcctcagatgtattctttcttcactccrttaggttataaatataatcaatgcagcccaagaaaacagcccagtcacagtagcggaagccttggacagagttctagagattttacggaccacagaactg

SEQ ID NO: 372367 - DNA, 201 bp, Homo sapiens
atgcttagtaaatgttcactttacatcttaaaacgaatttcatttatagatatctttagtttatttcaaatatttttaaaatatgcgttgatgtttttaarcagtgtatacagatgtctgtggtgaaagctatagctccttcctgtagatttctctctcctcttctacttttccacatttgagttgtactaaatttagagg

SEQ ID NO: 372368 - DNA, 201 bp, Homo sapiens
taagttttgttttgtttttattttttagttgcaagtaataactgccttataccaaaaaagtacataagtaaataagaaatgtattagaaggatagtgcaattttttttttcagactccaagaaagagttgaaaagggtgggtggcttgcgaagggtgtccatgggccatctctgagccgtttgacatcagcagtttaacat

SEQ ID NO: 372369 - DNA, 201 bp, Homo sapiens
gaaagagttgaaaagggtgggtggcttgcgaagggtgtccatgggccatctctgagccgtttgacatcagcagtttaacattcttccatcagtatctctattttttttttttttttttttttttgagatggagtttctctcttgttgcccaggctggagtgcaatggcacgatctcagctcactgcaacatctctgcctct

SEQ ID NO: 372370 - DNA, 201 bp, Homo sapiens
gaggcaggaaaatagcttgaacccaggaggtggaggttgcggtgagccaagattgcaacattgcactccagcctggacaagaagagtaaaactccgtctcaaaaaaaaaaaaaaaaagagtaatctgaatcccaagtaggtggagtgatgtatttcttaaaaaatagggtactgcgtgtgccttgtgaattatgaaaatcc

SEQ ID NO: 372371 - DNA, 201 bp, Homo sapiens
aggcaggaaaatagcttgaacccaggaggtggaggttgcggtgagccaagattgcaacattgcactccagcctggacaagaagagtaaaactccgtctcaaaaaaaaaaaaaaaaagagtaatctgaatcccaagtaggtggagtgatgtatttcttaaaaaatagggtactgcgtgtgccttgtgaattatgaaaatcct

SEQ ID NO: 372372 - DNA, 201 bp, Homo sapiens
ggcaggaaaatagcttgaacccaggaggtggaggttgcggtgagccaagattgcaacattgcactccagcctggacaagaagagtaaaactccgtctcaaaaaaaaaaaaaaaaagagtaatctgaatcccaagtaggtggagtgatgtatttcttaaaaaatagggtactgcgtgtgccttgtgaattatgaaaatcctc

SEQ ID NO: 372373 - DNA, 201 bp, Homo sapiens
cagggaaagccagggagaagccaaccactccagatatgtggagccaaccactccagtgtatatgtggggtgtgtgtgtgtgtgtgtgtgtgtgtgtgtgtragagagaggaaggagtgaggagagggattgatttttttctctggccaacttgggtgaaggaaatctaagaaatacatctttcagcagggcctagtattct

SEQ ID NO: 372374 - DNA, 201 bp, Homo sapiens
ttgcccttttgcaggtgacgggatgctaatgagctacagacttcctctcgtttctagcaatgagtcagctccagactcactgagcctccaggaaaagatastgtaaccagtttcccaggcccctaggaggcttttaccctcactagaggacattctgatgggtgcttaagcaaacctatagagaatgtctttgcggggaga

SEQ ID NO: 372375 - DNA, 201 bp, Homo sapiens
ttcaaatgttggacatttgggctgtttctgccttttggctatggtgaatgatgctgctatgaacacacatgtatgagtatttatttgagtacttgttttcagttcttttgagtatatacctaggagtggaattgctggatcatatgagaattctgtgtttaacttttcccctgcattaggcactcagaaaattaggaagga

SEQ ID NO: 372376 - DNA, 201 bp, Homo sapiens
cccaaccatgggttaaaggagatggtcagcctcccctaattaaaatgacctcctgcccttttgtgggaacagagcaaagctaccagttgacagctagtaarattttttttcctggcacagcctggcttcaccagcatgtcacagaggagactgccccacagttctcaccaggatctaggagcttctctccaaacccagcag

SEQ ID NO: 372377 - DNA, 201 bp, Homo sapiens
ccagcccctccctgtggggtgcttgttaacaggaaggacagatcacttttgtactatgcagactcaggacccagcactcggtggcctccaagtttcatgaygttgacctaaggaagtcagatgttggctgactctcctcctacacattctctgtttgcattttctacaactggcaagagaaaaccgttctatgggccaaat

SEQ ID NO: 372378 - DNA, 201 bp, Homo sapiens
ggtgcaccctggtcagggaagtcactttttggtgggtagagtgatctaagaaataaagtgtggggataaacagtcactttcttaggtagaaaagtattaaraaaagaatctcaaaccagtgggaaatcagatattttgggacttcaggtatttttaacagcccttggtaagaaatattgccaaagactttttgagcgtata

SEQ ID NO: 372379 - DNA, 201 bp, Homo sapiens
gacagctagtaagattttttttcctggcacagcctggcttcaccagcatgtcacagaggagactgccccacagttctcaccaggatctaggagcttctctmcaaacccagcaggtcctggatcatgggccttgtctgagatgtgtgcggtctgagtgtgaccaacaggctgctccaccaagcaccgttggtcgatttcttt

SEQ ID NO: 372380 - DNA, 201 bp, Homo sapiens
ctttggtcctggcaacttttcagccccttctttcatttcctctgtagccaaggatcagacttgttctcagtatttccacacttagggtggtacactctttytgggggtgattttcatctgttccccaaccaggctctgctgcctgactctcttttctggaaaggtttctgctgctttcagacgttcatttttctccctatg

SEQ ID NO: 372381 - DNA, 201 bp, Homo sapiens
ttaatattctcctctgctcttctaacccgtatcatgattacttgttacacttaccttctcacactgatatcttcatttctgcaactataggaatggcgtcytgcagttggctaaaatattgcactccgcacgcatacctcactattattgaatacagttcttggtttgacatttcaggtatacttatgagaaaagataggt

SEQ ID NO: 372382 - DNA, 201 bp, Homo sapiens
ttttatttctttttttgtctgagtttttccttattcatggggcggtagatggtgaatgagttccccaagaggctggtactgctagatgagggcttcctgtktttttcctgctgaagtttcttctgatatcctacaggggatcaggatggcagttgaatgaataaattgctgccaggaaggagggaactcctccaggaaggg

SEQ ID NO: 372383 - DNA, 201 bp, Homo sapiens
agggacacaatgcatctgcccccaatgtcagggaggccacagacaggtaaacagaataaatagaatgcagcacagaggaaatgtgaatcaagcactggagragctcaaaacccaggacctaaggaggctgtctgggatttttagctattgtgtaaaataggggccaagaaactagagcctgcaggccaaatatggcctgtt

SEQ ID NO: 372384 - DNA, 201 bp, Homo sapiens
accttcagtcaccttctgtaggcctccagacagtccacagattttcccatccagtccttacaccttcatggaccatcctctcaatgggtttctgctgcctrcaacccttggtggcccattctggttcccaccgccaggccagccttctcttgggtgtgtccttggccttcactgcccccatgcctttactctccccacatt

SEQ ID NO: 372385 - DNA, 201 bp, Homo sapiens
gagtacggttgttttaaataaatggaaccttttggggagacagggagggtggatgtgtcttctgattttatgagtctcttttgtttctagagaatctttcrtttctgttgcttgctttttcttttcctcctttcaccatcaagcatccaggggaggtgaccctccaagttacctccctccctccgaagtggtgccctccca

SEQ ID NO: 372386 - DNA, 201 bp, Homo sapiens
ttgggattaagtgaaaaagggcctactcctctttaaacgcgggacttgagcagctcatgcctagcataaataggtgcttcgtagttctttgatgaatgacratgtgtgctgcattttcttctatgttattatttgcttatctatctgttcattcattcactaagtttatttataaatacatgaaagccttttttttcaatt

SEQ ID NO: 372387 - DNA, 201 bp, Homo sapiens
ataaacctttatatttttaaactttttcactttcttaataacatttagcttaaaacacaaacacatttcacagctgtacaaaaaaaatgtttctttataacattattctgttagcttttttctatttttaaatctttttttttttttttttttactttttcaacttttttgttaaaaactaagacaaactttggctggtgc

SEQ ID NO: 372388 - DNA, 201 bp, Homo sapiens
ccgataacattctgggcatgtgcacctaccctgagcatgatgtgagaggaggctgcctagtttcaggtagacacaggtgccctttgccctggcagagaagsttaccctcatggcctgcaggacagcaggctggggggtgtctgccctgcacggatggggttttttgacccgtctgttctctcattctatcctttctgctac

SEQ ID NO: 372389 - DNA, 201 bp, Homo sapiens
gaggctgagacaggaggattacttgaatctgggaggcagcctgggtgacagagtggagactccatctcaaaaaacagaatatgacatagttccacgtttcrggagcttccattgtttgtgccctatattgtcgtcttctgtgggaaggcaatgtgttgactgagtgccggctggctggcaggagttacggattgggaattg

SEQ ID NO: 372390 - DNA, 201 bp, Homo sapiens
gcatgtgcacctaccctgagcatgatgtgagaggaggctgcctagtttcaggtagacacaggtgccctttgccctggcagagaagcttaccctcatggccygcaggacagcaggctggggggtgtctgccctgcacggatggggttttttgacccgtctgttctctcattctatcctttctgctacatcaaggatgtttat

SEQ ID NO: 372391 - DNA, 201 bp, Homo sapiens
atctctaatgcattgaagaccactaggatttaaagaggagtattatgttggcgtttgggaggagggttttttcccgataagtttaactaaaattccaaagkttgcacttctacatgacttgtgtcattcagactattacaagattctgctcactccggaggcttgtactaattaagcccaagagacttacagtaccttagg

SEQ ID NO: 372392 - DNA, 201 bp, Homo sapiens
ttgctataatttttgtggctgcaaaagggtaacctggtgtgaaggaaaggtgctcactgactccagcttgaattccagctctgccctgtacaaactttgtsactttggagaagctgcatgatttctccttgcacggtagggataatgcatctctaaaaggattggtacaacctagaggtacagtccctgtaaacccgctag

SEQ ID NO: 372393 - DNA, 201 bp, Homo sapiens
agcagtcattagagggctctttgagttttctgctggctggtttggtgagaggcccaagcgccctgcatgagttctttacactgctgtgttggggtggggtrggagaatcaggcctacagaggagaagaagactggtgctttggagagtgttcatagcaccagcactaagagttaagcttggggaaaggagaagaaaggaga

SEQ ID NO: 372394 - DNA, 201 bp, Homo sapiens
tgggaggagggttttttcccgataagtttaactaaaattccaaaggttgcacttctacatgacttgtgtcattcagactattacaagattctgctcactcyggaggcttgtactaattaagcccaagagacttacagtaccttaggcctgacttctgttaaagttttacttaatataccaatttttaggccacttatgggt

SEQ ID NO: 372395 - DNA, 201 bp, Homo sapiens
gcctgtgcaagcattgggtggatacaacctttcatcccagatccatctgtcatgtgcagcctcagacacacacatgcatgcacgtgcacacacctgctctrggaagtgttgctgggacagaacacctaggcgggtaagttttcaggagacttcctgctctccccctcccacatctataatgctgggtctgtgaagccagtt

SEQ ID NO: 372396 - DNA, 201 bp, Homo sapiens
tgtgtaaatgctgctgcgtgctgaaggcgctccttcagactgacaaggggccagtacagagtgtggaatgcaggataagcttccaatagtgacaaatgacyacagtctcttagagaaaaacaaaattggatccatggaggtgaggtcaagaccgtcaaccaaattagtctagagaatagtcacttttagaaatctcagtaa

SEQ ID NO: 372397 - DNA, 201 bp, Homo sapiens
ctgcatcctagaagccacttagttccaaaggtgatgtctttgaaacaactcttgactccatgcccacttcccaacccaccaccacttcctttaagccattrtgacctctcatcctacagagcctcatgaccactccctctgcctccttgtaatgtgtgctggagccagttcatactgacttgtgagaactgattgtttaat

SEQ ID NO: 372398 - DNA, 201 bp, Homo sapiens
tttgatgattgtctaaaataatggcattttaaaatggccacttaattcactgtttacagttcctgtttgatgactaatgatattaaaatatgtccagttaycttggttggagacctcgaacttattgctgtaaacatatccttctcttcagttcattctgtcccctgactgctgatacactttttttatcacttcctctgt

SEQ ID NO: 372399 - DNA, 201 bp, Homo sapiens
agtaaggggggaactgccccatgattcaattacctctcaccaggtccctcccacaacacatgggaattatggaagctacaattcaagatgagatttgggtmgggacacagccaaaccatatcagggtggttatgggaagctgagaaaccagggtagttatgggaatctgagaaaccaaacctgtaagtcagggaaaccctc

SEQ ID NO: 372400 - DNA, 201 bp, Homo sapiens
caaagccaaacaggaccccctaaccatacatcatggtgagccgtggggagccagcctgaaggtcaacaccaggttcatagcttgggtgtataaggaacacracgttgtgtgacatgtcagaaaaagatgaggccacagtcatcctgccagtaactggaacaggagccccacctgtgactcttaggactacctgagttcctt

SEQ ID NO: 372401 - DNA, 201 bp, Homo sapiens
tttgcttcactctggatgatgggggcactgacaggcccctgaccgaggttgtgagctggagagaggctgcccctcggccctcctcctgagcagcctggcckcagcgtggccattctcacccacaggcagtgctgagaactgtggggtggagatgatgcccgtgactgtcacattgtttttatcctcatccttataccatct

SEQ ID NO: 372402 - DNA, 201 bp, Homo sapiens
tggtctctctgattttacagataagaaaaagaagttcttttgtccagacacaatttccagtgttattttccctgtaattgtaggcagtgagctatcagagrcaattcttattaaaagtagggaaattttacctcttcctagttgggtgaagtttattacagagtaaccagtattttatatcctcttttcagaggcctacag

SEQ ID NO: 372403 - DNA, 201 bp, Homo sapiens
atgataggaaaattactaaggaagataaaaattaggaaaagagatagtataataaatattttaagctagattatttaagataaggtgctatagctatggtrttcagattaactttataatagttccacctttactagttcaatagttcccccgagaatgtccctcaagttttaatgtttattttcttaaattctttttttt

SEQ ID NO: 372404 - DNA, 201 bp, Homo sapiens
taaattgtctataattgagcatttgaagagctttgtaggaaatgtttttaactcctaggcttaaattcagattattctgtagcacagaaaaattttataaygtatctgaaacaaacaggttatatgttagccttataaataacttaaatttagttatatcttttatctttctgcatttctgtaggctgtcaaaatgagaca

SEQ ID NO: 372405 - DNA, 201 bp, Homo sapiens
ccctacaagccaccgccttgcccagtcctacccttgttccaggcagcctcacagtgtgtgtgtgtgtgtgtgtgtgtgtgtgtgtgtgtgtgttgttttastggagtctagatagagcacttttggaagggacacaggagataatgtaacccaacaccctggccatgattgacagaggaaaacactgagaaccatcacagc

SEQ ID NO: 372406 - DNA, 201 bp, Homo sapiens
ttaataacatttagcttaaaacacaaacacatttcacagctgtacaaaaaaaatgtttctttataacattattctgttagcttttttctatttttaaatctttttttttttttttttttactttttcaacttttttgttaaaaactaagacaaactttggctggtgcctacacagagtcaggatcatcaatatcactgact

SEQ ID NO: 372407 - DNA, 201 bp, Homo sapiens
ttattatttctagtgctaatgacttccttttgtcatttgacagacatttattgagcattagcacaaaaccattaacaacaaaaaaaattgataatgagaargaataggtggaaaactgcatctaaagttcagatctcatcgtgagaaaacattttataaattgtctataattgagcatttgaagagctttgtaggaaatgt

SEQ ID NO: 372408 - DNA, 201 bp, Homo sapiens
cactaggcaataggaattaggttataatctcgcaggaccaccattgtatattgagtccattgttgaaatatcgttatgagttgcattactgtatcttaaawtgagtaatttataagcaacagaaatgtattgctgacagttctggaggctgagaagtccaagatcaaggtgccagcaggttctgtgtctggtgagggcctg

SEQ ID NO: 372409 - DNA, 201 bp, Homo sapiens
atttttaatgtggctactagaagttttaaattacacatgtggtttgcatgtgtggctcacacaatatttttattggacagacctggtctggactttccctmccctgccaaatcctatcacagattcacctcacttgcccttttgcaggtgacgggatgctaatgagctacagacttcctctcgtttctagcaatgagtcag

SEQ ID NO: 372410 - DNA, 201 bp, Homo sapiens
atttacaaactattatttgattcaacaaagaagttcctcacatcactgacaaatgagtgaaatttctatgtacatctttgttatttgtctttcatcttacttttttttttttttttgacatggagtctcgctctattgcccaggctagagtgcagtggcgcgatctcggctcactgcaagctccgcctcccaggttcacgc

SEQ ID NO: 372411 - DNA, 201 bp, Homo sapiens
gctagagtgcagtggcgcgatctcggctcactgcaagctccgcctcccaggttcacgccattctcccgcctcagcctcccaagtagctgggactacaggcrcccgctacctcacccagctaattttttgtatttttagtagagatagggtttcactatgttggccaggatggtctcgatctcctgaccttgtgatccaccc

SEQ ID NO: 372412 - DNA, 201 bp, Homo sapiens
aggcaggagactcacttgaatccaggaggcggaggttgccgtgagccgagatcccaccattacactccagcctgggtgacagagcaagactccatcgcagaaaaaaaaaaaaaaaagaatatgtcattgtagggagagatcctctgcaaaagtgaaaaggcaacgaaaggcaggagaggagataatcaagcatggctggtc

SEQ ID NO: 372413 - DNA, 201 bp, Homo sapiens
tgaaagcatactttccagctagtcttcctggtgatgaccttgacctttgatctggaaataccaactggaagcctggggagttccttctctttttctctcttttttttttttttttttttgacagagtctcgctctgtcaccaggctggagtgcaggggcgcaatctcgactcactgcaacctccgactcccgggttcaagc

SEQ ID NO: 372414 - DNA, 201 bp, Homo sapiens
taatgggaaagcagcaatagatgatatataaatgatgggcaaggctatgttctaatgaaattgtatttacagaaacaggtggccagtacatactgacttgygaaaactgattgtttgattttctggaattttgtgattcagttgttaaaccagccattattaaaaattaaattacataaacatgcaattaaacaaatgcta

SEQ ID NO: 372415 - DNA, 201 bp, Homo sapiens
aaactcagtattggccaagttatgaagtgtggtggttcttacattgtagatatttgaaagacattagagagaaactagacaagagaaaaaagataaaacatttaagcctgaatagtagcttgcattaagtgtttttctgtgagataaggacacataaatgattatcactgggctaaacaatgacagtacttctctgtaaag

SEQ ID NO: 372416 - DNA, 201 bp, Homo sapiens
catacatgatggtaagctatagtaatgtgctatgtggccatatgctaaattatggcctggaccgtaatttcctgacctccgctttatatcagtaaaatgtrtaataaacttatgttcggctatctttgctttttcagcaagctggtggttaaactcttagcagcatactgttgactactatcctatctggtccccagtcct

SEQ ID NO: 372417 - DNA, 201 bp, Homo sapiens
ccagcctgaaggtcaacaccaggttcatagcttgggtgtataaggaacacaacgttgtgtgacatgtcagaaaaagatgaggccacagtcatcctgccagkaactggaacaggagccccacctgtgactcttaggactacctgagttccttgcaaattgttgtatgaatagaaaacgagatgtttcataaaatcagccagg

SEQ ID NO: 372418 - DNA, 201 bp, Homo sapiens
ttagccaccttatgtgatagaggggacaagaaatggctgcagggaatcggaatctcagtttctgattagccaaacctcccatgttcagagaacaggaaccratactctccccttggcctctttcacggaagctaagaggagccagagtaacccccgagaagccttggctggggggcccgtaggatgttaggaagatgatgg

SEQ ID NO: 372419 - DNA, 201 bp, Homo sapiens
tttcaaagcctggccaagatggtgaaaccccgtctttactaaaaatacaaaaattagtcgggtgtggtggcgggcatctgtaatcccagctactctggagsctgaggcagagaattgcttgaacctgggaggtggaggttgcagtgagccaagatcgcaccattgcactccagcctgggcaacagagtgagactccatctc

SEQ ID NO: 372420 - DNA, 201 bp, Homo sapiens
aatgagatagcataggatgcctagaactttctctggcagttaccattaatgatagcagttgctgttgtgtgggaatagaagatgataaaatgctcccctacatcttctatgtgacttaagccaagcagcctactgggctctgtaacacagcaggaacttgtgtccaaggatacaaggcccaaccacctgtaggactgactt

SEQ ID NO: 372421 - DNA, 201 bp, Homo sapiens
aacatctttacttctgccttcatttcattatttacccagtagtcattcaggagcaggttgttcagttttcatgtagttgtgcggttttgagtgagtgaggttttttttttttttttttttttgagatggaatcttgcactgtcgcagtgcaatggcacgatctcagctcactgcaacctccgcctctcaggttcaagtgat

SEQ ID NO: 372422 - DNA, 201 bp, Homo sapiens
ccgtggggagccagcctgaaggtcaacaccaggttcatagcttgggtgtataaggaacacaacgttgtgtgacatgtcagaaaaagatgaggccacagtcwtcctgccagtaactggaacaggagccccacctgtgactcttaggactacctgagttccttgcaaattgttgtatgaatagaaaacgagatgtttcataaa

SEQ ID NO: 372423 - DNA, 201 bp, Homo sapiens
gttagggcaggctgatagaaggatggcctttgtataattctcacaaggaagaccaggccactgtggaactgccaggggtagggaccatgccttcatcgtcrtcatcttatatctgtctcctaggtcctggcacacagaaaatatctattgaataaatacttgcatccaggcagagagaagccatggtgtttgggtagcagc

SEQ ID NO: 372424 - DNA, 201 bp, Homo sapiens
tagagcatgttactgtactgaatactgtaaatacttttaacacaatggcatttgtgaatttaaacatagaaaggcacagtaaaaatgcagtataaaaagakttaaaatggtgcacttgtataaggcacttagcatgaatggagcttgcaggactgggagttgctctgggtgagctggtgagtgaatggagagggaacatga

SEQ ID NO: 372425 - DNA, 201 bp, Homo sapiens
ttggtgtcatatctaagaattcattgcctaatctaaggttgtaaacatttacttctttgttttcttctaagagttttatagttttagatcttacatttagctctatgatccattttgggttaatttttgtttatggtgtgaggtaggggctttatttttatctagttgtcttagcagcatttgttaaaaaatactcttctc

SEQ ID NO: 372426 - DNA, 201 bp, Homo sapiens
acatctttacttctgccttcatttcattatttacccagtagtcattcaggagcaggttgttcagttttcatgtagttgtgcggttttgagtgagtgaggttttttttttttttttttttttgagatggaatcttgcactgtcgcagtgcaatggcacgatctcagctcactgcaacctccgcctctcaggttcaagtgatt

SEQ ID NO: 372427 - DNA, 201 bp, Homo sapiens
aggagttggatttttctctaaattccactggtaactcttaccttttagtaactgagcacagcacagctacagctccataccataggtgaccacgtggccgyccaggaatcaatcaaaagttcctcattctctatccttttatcctttccctttctatccatctagttttatctgtatcatttttcattcattttaaaacaa

SEQ ID NO: 372428 - DNA, 201 bp, Homo sapiens
agcttgggcttccagagcagccagtggcccaagagaagtctgacctgggcaaagctgctctcctctctggactcagagagcactgtgatgatgtggctctscctgtcttgtcagccatgtttccagcacttagcatgaagcctggtgcacaggaggtgcttccgtaggggtagatgatgtgctgggcagtcagccctcttc

SEQ ID NO: 372429 - DNA, 201 bp, Homo sapiens
ttaatcttttccttttttattgtttcttgtttctgcttattatcaagttgggaatgtttttgaagttacattttcttttctctaatataggtatacttctrttcttttagtggttaccctgaaattattattactattattattgagacaaagtcttgttctgtcacccaggctggagtgcagtggcacgatctcggctca

SEQ ID NO: 372430 - DNA, 201 bp, Homo sapiens
cgcctatgcttggggaactcactgctgtggaaatacagcctcgtgggtgtgtgggggtctgcctggcctgcagcagctccatgaggccagagcggggcctmtgtatgttctttcatcttctgatgaatgttgtccctcagagggaattgtctgaacagtggccccagagacatgttctatattaggaatttaaagtgacat

SEQ ID NO: 372431 - DNA, 201 bp, Homo sapiens
tcacatggtctcattcaaacatagagtttgactcaatgattcatgcaataagaatctactgagtacctcctatgttcagggctctatgctaagtgttgcargggagagagagaaggcaccatgttccctgaccacagagagaggtctggaaggtcagttttattgtctataacacactaactttcagtgtattgacatcta

SEQ ID NO: 372432 - DNA, 201 bp, Homo sapiens
ctccatgaggccagagcggggcctatgtatgttctttcatcttctgatgaatgttgtccctcagagggaattgtctgaacagtggccccagagacatgttytatattaggaatttaaagtgacattaaaaactgcaacatctttaaaacatccaaccaaaggttctaggggcttcggggctctaggccttgctcctggatg

SEQ ID NO: 372433 - DNA, 201 bp, Homo sapiens
tctgaaaaatcaagtggccttttcttcatccatacctggaacacgtttacttccccagtgtgcagaatgtatgtgtttctgcttagagagtcccgtccccrttcccgtcatgctgggctttccaactggacatggaaatggatccccacagctgtgacctaagctttttcttagcaaggtcacacatctcctttcaaagcc

SEQ ID NO: 372434 - DNA, 201 bp, Homo sapiens
tgctggcagtgcagctatggacaagttttttaaccatctaagcctcagtttccatgtctataaaatagggataatgcccaactccaaagagtttctctaaygggttattgagtgagacagtatgtttctagtgcattcagtatagtggctgccccttaaaaaactcccattaaactatagctgtaatcagcatcactttcc

SEQ ID NO: 372435 - DNA, 201 bp, Homo sapiens
gcccagcactcagccaagttttgtctcactacacaggtcatcccaggcagcattcagtatcttctccatcttgacctcttctttccccaagggccttacayggtgctaggtaggtgactaatacattcagactaaattagattacctgaaattattcataattaggttaccagcatcatgtcttataaatcaatcactaga

SEQ ID NO: 372436 - DNA, 201 bp, Homo sapiens
ccatgtctataaaatagggataatgcccaactccaaagagtttctctaacgggttattgagtgagacagtatgtttctagtgcattcagtatagtggctgscccttaaaaaactcccattaaactatagctgtaatcagcatcactttcctagggacatttaaggaaagttctcagaccattttttttcagctcaaatgac

SEQ ID NO: 372437 - DNA, 201 bp, Homo sapiens
tataaaatagggataatgcccaactccaaagagtttctctaacgggttattgagtgagacagtatgtttctagtgcattcagtatagtggctgccccttaraaaactcccattaaactatagctgtaatcagcatcactttcctagggacatttaaggaaagttctcagaccattttttttcagctcaaatgaccactccc

SEQ ID NO: 372438 - DNA, 201 bp, Homo sapiens
cactaggatgcacttgtagctttgtatgtctcctggccctatctctgcaccatcaccatttctaaagcattgcctgtcttacacaaaggccccaaggcccrtaagaaatagtaatgattttaaacaggattccaggagagtggagcccatgaatctgcattgttgcttacagaattacagcaagattgggaacatgagagt

SEQ ID NO: 372439 - DNA, 201 bp, Homo sapiens
ttcctagggacatttaaggaaagttctcagaccattttttttcagctcaaatgaccactcccctgatcaaattggccacttgtttagtattatgcagacasagcttatgtgatctatatatgtggtctgctttagaagctccattaccaggtgtttgcttaaagccaaaccaaatattccaaaaactggatgtttaatggt

SEQ ID NO: 372440 - DNA, 201 bp, Homo sapiens
atccacgtgctcatatcacaaggttggcaagccagaagaaaagcagaaatcccttaaaatgtccttgaatcttcctttatggcaaccttatcatactgaaygccctccccatcttgtttttcttttcttggctagataccatgtaggacagataaacccaagagagtgggccgaaagtctaggggagacactggttgaata

SEQ ID NO: 372441 - DNA, 201 bp, Homo sapiens
taaaagtgacatttaaaaattagctaccacgtatgcaaatacttctgaaaacttttatgtcaaatttaatgatttgatcaattaggaaatagcaaatatayccatagacatcagttgcatagacttgaatttcacaattaaaaagtgagtatatccttgggtattttactgataattttcactgtggctcatttttttttt

SEQ ID NO: 372442 - DNA, 201 bp, Homo sapiens
cattcaggagcaggttgttcagttttcatgtagttgtgcggttttgagtgagtgaggttttttttttttttttttttttgagatggaatcttgcactgtcrcagtgcaatggcacgatctcagctcactgcaacctccgcctctcaggttcaagtgattctcctgcctcagcctcctgaggagctgggattacaggtgtgc

SEQ ID NO: 372443 - DNA, 201 bp, Homo sapiens
aatttctgacagatttccaactatcaaaaaaaaaagttgcatatatcagtatgtttcaccccttgtaacttcagcatgcacattattaactagagtttaayatttgttttcatctattctaaggtagaagttacatacagcaaaatacgtacatcttaggcatagccttccgtgaggtttttaacttttttttaattatac

SEQ ID NO: 372444 - DNA, 201 bp, Homo sapiens
tttttttttttttttttttttttttgagacggagtctcgctctgtcgcccaggccggactgcggactgcagtggcgcaatctcggctcactgcaagctccrcttcccgggttcacgccattctcctgcctcagcctcccgagtagctgggactacaggcgcccgccaccgcgcccggctaattttttgtatttttagtaga

SEQ ID NO: 372445 - DNA, 201 bp, Homo sapiens
cttagcagagcttgcacgctgtgctgggagatccgctgctctcctcagagctgtcaggccgggatgtttaagtctgctgaagctgtgcccacagctgcccyttccccaacatgctctgtcccagggagatgggggttttatctataagtccctgactgggaatgctgcctttttttcagagatggcctgcccagagaggag

SEQ ID NO: 372446 - DNA, 201 bp, Homo sapiens
ggggtttcactgtgttagccaggatggtctcaatctcctgacctcatgatccgcccgcctcagcctcccaaagtgctgggattataggcgtgagccaccgygcccggccaattcaatttattttttatttatttatttttttgagacggagtctccctctgtcgcccaggccagagtgcagtggtgctatcttggctcact

SEQ ID NO: 372447 - DNA, 201 bp, Homo sapiens
ctacccttgggtttcatgaggaaaaagagattcttccctaaaagaggagtctttgatgccgtctgttttccccaagggatcccaggctgttggaaattccttttttttagatccctcgtgtggcaagaagtagtaggaacagacagaagtaaatggagaaacagaatttggtcagaagttttacagagagtgcagaggcct

SEQ ID NO: 372448 - DNA, 201 bp, Homo sapiens
acagaaggaataagacagcccctgttctattctactcttattaagtcaagtggacaatactcagatatatggaaacagaaagaaaagcaaagaggtgtggytagaccccatcttaaagacaaaagaaaaagaagaggctgggcgcagtggctcacgcctgtaatcccagcactttgggaggctgaagcaggtggatcacct

SEQ ID NO: 372449 - DNA, 201 bp, Homo sapiens
gtgacaagctctggtacaacatgttgtcattattttcactgaacacagtgcctgacactttgtaagtgctgtacaaatagtagctgctcttatttttatgrttgctattattactctttgggtaatcaaaatgagattttggttatttagatttagatatttttgaaacatgtaatttttttaatggaaaatatatccgac

SEQ ID NO: 372450 - DNA, 201 bp, Homo sapiens
tgcaacctctgcctcccaggttcaagcgatcctcctgcctcagcctcccaagtagctgggattacaggcatgcaccaccatgcctggctaattttttgttkgtttttttgagacagtctcgctctgtcacccaggctggagtgcagtggcacgatcttggctcattgcatgcaacctctgcgtgctgggttcaagcgagtc

SEQ ID NO: 372451 - DNA, 201 bp, Homo sapiens
acattaaccagaatgtttttgaagtgaggtattgaagggtgagatggaaagaagaataaagaatggccccacctgagtagcagggcattgactgttccatraattccaaggtggaaggagtatcacagagccctgagtgaaggtttctgctggacaagagaagcagggaggatgagggtgtgctggaccgaggtgacataa

SEQ ID NO: 372452 - DNA, 201 bp, Homo sapiens
acagaaaggacaagggagggactttccagtccttctgtacacagtaggaagactgagtatgaaagtggctgacataggccaggtgcgatggctcatgcctrtgatcccagcagtttgggaggctgaggcaggcggatcacctgaggtcaggagttcgaggccagcctgatcaacatggtgaaaccccctctctactaaaaa

SEQ ID NO: 372453 - DNA, 201 bp, Homo sapiens; identical to SEQ ID NO: 80693

SEQ ID NO: 372454 - DNA, 201 bp, Homo sapiens
tgaggaaaagttagtttttgttttcatctttttttataattagccatcaccagataaagtagtttcattctaatttagctgtcaaagacagattattgctrtcctcaaaaagatatgtttcagctttctttgaggtctttgtagttacctttgaaaagcaggtatctcttgctttgtacaggtccaatgtgcacagatttc

SEQ ID NO: 372455 - DNA, 201 bp, Homo sapiens
tgtgagcatgaagtgctttcttgatagaaaatgacatgagatagaagtgctttcttttgcagtgtagaaaccacagaaggtgaacagcttttgtctttgatttttttgttgtgtgtgtttatgtgatttctatggagagaggggaacaagactgcagtttagtgttagacctgtgagatattccagtaggtatgtcaggta

SEQ ID NO: 372456 - DNA, 201 bp, Homo sapiens
tcatttaggctatcaaattttttggcaaaagtggatcataatatcctctcatcatccttttaatgtctgtagactttgtagtgtaaggccgggtgtcgtgsctcacgcctgtaatcccagctctttgggaggccgaggttaggagtttgagactcagcctgaccaacatggtgaaacaccgtctctgctaaaaatacaaaa

SEQ ID NO: 372457 - DNA, 201 bp, Homo sapiens
atccaacatgtaacttcaggggagtccttcattaattaatactactttaaaccttagcacacatcgtctgggaatgacaaataagcatttctttttttttwaatttaattttattattattatactttaagttttagggtacatgtgcacaacgtgcaggtttgttacatatgtatacatgtgccatgttggtgtgcattt

SEQ ID NO: 372458 - DNA, 201 bp, Homo sapiens
tagataaaaggggggctacagaaatggaataggaaaagactttctggaagaacaaagcattctgagcaaaattaacaaagggaggggaaatagaatttttrtaaaaagggaagagcaatatgtagttcactttaattgtagcagtgtagagagttaaaggagagaaatctagaaagcagtagactgtaaatggacatgtga

SEQ ID NO: 372459 - DNA, 201 bp, Homo sapiens
ttttttttttttttgagacggagttttgcccttgttgcccaggctggagtgcagtggtgcagtctcggctcaccgcaacctccgcctcccaggttcaagcsattctcctgcctccacctcctgcgtagctgggattacaggcatgtgccaccacgcctggctaattttgtatttttagtagagatgggatttctccatgtg

SEQ ID NO: 372460 - DNA, 201 bp, Homo sapiens
aaagttattctttcccttggtcttcttttactgcttggtcctcttttacctggtactcttttactcttctacagctctagtcatttcaccattgtatgaayagttttgttgtatctgagccatttgctaccagcacactcaaaatcttttcagagctaggcaaattggtaatagttgtgatcacaggccactttctgctgt

SEQ ID NO: 372461 - DNA, 201 bp, Homo sapiens
ggccaaattaggtgaagggtctcatttcctaggatttcttcacaggtggcatccgtcctcagatgggctacctaggactagggatggctgcaggtttcaargagcgagtagcttgaatgtgtgattcaaggttatttagtatcaaatttgagaatgccccaaacttaccttttaactgctcgaccgcatggcaccaccttt

SEQ ID NO: 372462 - DNA, 201 bp, Homo sapiens
gtatcaaatttgagaatgccccaaacttaccttttaactgctcgaccgcatggcaccaccttttgggaaatactgtctttgggcacttctgaactagttcrctgagagccagagctttatctcttgttctcagtcacatcccagtgcctagaaaattgcctagcacatagtatatgctcaacaaacacctgctgaatgaat

SEQ ID NO: 372463 - DNA, 201 bp, Homo sapiens
attgttatattcttactgtattagtcaaagattgaggcataatggtgtcaaggaaatataaattgctgagattcttgtttagaaacccataattcagccakacaggtgagagacaagaaatgtttcaccttttttgacttctaggtttggcatattgagtttcttgtgttaataccacagctacaccaagtaaaaggttat

SEQ ID NO: 372464 - DNA, 201 bp, Homo sapiens
ctcacatttggaaactttgagggagacatgtttttgctgtgagagacctcacgggttctggctctcatgccatgttagagtagtgttgaatgagcagagakactatggcccctgagtgagatcctttgtggagagtattagtaagatgtgggatctgcctgggtatccacagctccctcctttgtgctagtgagccaagag

SEQ ID NO: 372465 - DNA, 201 bp, Homo sapiens
ttttcactttattggtgtttctcaaactgtagtgtgtaattgaatcacctggagattaaatggcaaaatgtagattccaattcagtagtcagagagcttgmgagtcagtagttctaacaagcttcaggtgttgccaatgccgccggtacactgagcacaccttaaatacaaaggcttaatgtgttaatggggtgggcccca

SEQ ID NO: 372466 - DNA, 201 bp, Homo sapiens
ttggctaggagttggttattgctgaagccgggtaaggagtacgtgagtttcattatattattgtttctacttttctatatacttccaattttcaattaatraaagtatttttcagctgggcatgtggctcatgcttgtgatcccagcactttgggaggccgaggtgggcggatcatgaggtcaggagttcgagaccagcct

SEQ ID NO: 372467 - DNA, 201 bp, Homo sapiens
taggtattttagtgctaagttcaaagaggtggcctccagggacttaaaggcaaataccacttgcaactggaatcaaatatatgtattgtaaatgtaaaccrtaatctaacctgtgttaactatctcattaataattttacttatttaaaaacaaagctaattaggaaattagaaatacttgtaattgcagtgagtaacaat

SEQ ID NO: 372468 - DNA, 201 bp, Homo sapiens
gcggagcgagagaagagcaagtaaaaccaagaatctcttgccatacacacgttacaggcaggacaattgtggctgttgttgttacttctgtatttactcartttttaaaattaagctcttggcctaaagatccaacatgtaacttcaggggagtccttcattaattaatactactttaaaccttagcacacatcgtctggg

SEQ ID NO: 372469 - DNA, 201 bp, Homo sapiens
gagttagctctggatgaactgattcatttagcagaagtggaatgctttgaagctagatggaagaggtcactaattaaatgctagaccaagacagagtccarttgcatggggagctggaattttcttgaatgttagtaagtgaaataaaaggtgagaaaatggctttttagactttggtaccctgacaagaaattagtggat

SEQ ID NO: 372470 - DNA, 201 bp, Homo sapiens
aagccatgttccctccctcccctgctgctgatgcaggacaggcaagtccccaaactggggctcagcccgggagggttcttggcctcgcccaggaaataatkcaagggcaagctggtggtgttaaacagcaacttctattgaagcagcagttgtactgcagtggcagagggactgctgcttgcagagcggggctaccccatg

SEQ ID NO: 372471 - DNA, 201 bp, Homo sapiens
tccaatctgtagaggagggccaggggaggtgaatctgcaagggagcctgaggaagcctactcactgagacaggagaacattcaccaggagcccgcagggakaaaagcatgcttcaggaagaagggcggtgccgtgaaagcactggtcattttgaataagagatggttacccactgatttcttttggattctgggcatatat

SEQ ID NO: 372472 - DNA, 201 bp, Homo sapiens
ttcttttgcagtgtagaaaccacagaaggtgaacagcttttgtctttgatttttttgttgtgtgtgtttatgtgatttctatggagagaggggaacaagaytgcagtttagtgttagacctgtgagatattccagtaggtatgtcaggtagggaattgaatgtacaagcctggaggtcaaaggaagttgagggctgggagg

SEQ ID NO: 372473 - DNA, 201 bp, Homo sapiens
atcccagctactcaggaggctgaggcatgggattcgcttgaacccaggaggcggaggttgtggtgagctagatcgtgcctccagcctgggcaacaagagcraaactccatctcaaaataaaaataaaaataaaaaaaatttaaaaagtggctgacatagcaagaaccaaagatgctagagacaagatgataattcacaggg

SEQ ID NO: 372474 - DNA, 201 bp, Homo sapiens
tatctcagcccctgcatactggtgcggacacgagaacctaggtcccctgaggctttttccttttcacaaggacaaaatccaaatgcaaattcatggctcaracttcagaatttcaaggatctgcaaccatggtccaagagtcatattgcatagggaaaaaaggaggcagttagggccctgacattatatctgctcttgtgt

SEQ ID NO: 372475 - DNA, 201 bp, Homo sapiens
aactggagtgcagtggcagtcctggctcaatgcagactcaaaactccaggccccaagcgaacctcctgccttgacctcccatatcactgggattacaggcrtgagccattgggcttggcctgaaactttttttaagtgcaaacatgtggcagcaaataatataatgactatggctattaatacagtttggtgctagttcat

SEQ ID NO: 372476 - DNA, 201 bp, Homo sapiens
tgtcttataactgttgtgatttaattttgagctttgcttcaacttagacttccagattggttgggttattcaggattcaaatctctttcactaataataawaaaaaaaagagaatgataatagatataaagcatgcttctaacaggctcttcctttattccaggacggcttgagaagactgtcaggaaacgagtatgtgtt

SEQ ID NO: 372477 - DNA, 201 bp, Homo sapiens
tcagctcactgcaaactccacctcccaggttccaacagttctcctgcctcagcctcctgagtagctgggactacaggcgtaggccaccatgcccagccgattttttttttttttttgtatttttagtagagacagggtttcaccatgttggccaggatggtctcaatctcctgacctcgtgatccacccgcctcaacctcc

SEQ ID NO: 372478 - DNA, 201 bp, Homo sapiens
gctcctttcttttataccacatgatgtttcacagctgaagccacatgctaccagttgagaacagcacccaattcattaatgccaagaccaaggtgatcaawagcctctgcagtcttgagttagaggtgaacctcactcaagcggaaccactctaggaaaacattgattaaatttttgataaattagggaatgcttagtaac

SEQ ID NO: 372479 - DNA, 201 bp, Homo sapiens
ttctaccagatctgctggcactgacaaagagggtcaggaagtattttcttacttctcttgtgtcatctgtcacccctaatttctttgtgataagctaaaattttttttttttttttttttttttgagatgaagtctcactctgtcacccaggttggagtgcaatggcatgatcttggctcactgcaacctctgcctcccag

SEQ ID NO: 372480 - DNA, 201 bp, Homo sapiens
gtccagtggcttagaaaaatgccagaagccattctgtcagaattctctagaggaggtagtaaaaccagcctgcagttttttattaaaggaactcaccatawgatatatacagatgtgatggtgaggaatgtcacctccacagagacaggagaagacagtcacaaggagcagctctaatcccttaggatctgcatgaagccc

SEQ ID NO: 372481 - DNA, 201 bp, Homo sapiens
tcagcctcccgagtagctgggattgcaggcacatgccaccaagcccaggctaatttttgtatgtttagtagagatggggtttcaccatgttggtcaggctsatctcgaactcctgacctcagataatccacccacctcgacctcccaaactgctgggattacaggtgtgagccactgcttccagccaggctaaaattctta

SEQ ID NO: 372482 - DNA, 201 bp, Homo sapiens
gcaggagcacagttaggagtggaatggattggaagtgcagagtggtgctgtggagcacgtctctcctgggtgagttgatgtgacccacagggaaagtcatrttttccaatcttggctagaaaataaaaagcagaggaagtgttatgaggcagagattcaaatcaacatgatactgtctgaaaaatcaagtggccttttctt

SEQ ID NO: 372483 - DNA, 201 bp, Homo sapiens
agtggtatgataccaagtatcagaatcagcacccatgtatatttcttttctgtcttggtgctacagcatttggagaacttggaatacatgaaaacaaatgrcaacagcttgtgggtggctttgagagctatgtaaaggcagtcactgaggacaggggcccagagtgttgcaagaggtgttttgttccggtgtttaggagct

SEQ ID NO: 372484 - DNA, 201 bp, Homo sapiens
cagcctcccgagtagctgggattgcaggcacatgccaccaagcccaggctaatttttgtatgtttagtagagatggggtttcaccatgttggtcaggctcrtctcgaactcctgacctcagataatccacccacctcgacctcccaaactgctgggattacaggtgtgagccactgcttccagccaggctaaaattcttaa

SEQ ID NO: 372485 - DNA, 201 bp, Homo sapiens
agggaaagtcatattttccaatcttggctagaaaataaaaagcagaggaagtgttatgaggcagagattcaaatcaacatgatactgtctgaaaaatcaartggccttttcttcatccatacctggaacacgtttacttccccagtgtgcagaatgtatgtgtttctgcttagagagtcccgtccccattcccgtcatgct

SEQ ID NO: 372486 - DNA, 201 bp, Homo sapiens
ggcctgcaagctgagagctcagggcagagtggtggggatcagaggtgcacctggagagctggcagggaccaggccatgcagcagagcctcatagccagctygctgcctggaattgaccctaagaccaacgggaagtgggagttttaaacaggagaatgacaggattaaatacatagtttgcaagcttacactggctgatga

SEQ ID NO: 372487 - DNA, 201 bp, Homo sapiens
caagcccaggctaatttttgtatgtttagtagagatggggtttcaccatgttggtcaggctcatctcgaactcctgacctcagataatccacccacctcgrcctcccaaactgctgggattacaggtgtgagccactgcttccagccaggctaaaattcttaatgtcactatgacaaagcatgcccaacccagctgtagag

SEQ ID NO: 372488 - DNA, 201 bp, Homo sapiens
gtaagtgaaataaaaggtgagaaaatggctttttagactttggtaccctgacaagaaattagtggattaagagaagtttcttatcgcaggcatcatcttgytattctttgatgattttcagtttcccaaagaagaatttttcttaagcatctgttttagatatgttttaatggcttcaaataatctcatctttctgcataa

SEQ ID NO: 372489 - DNA, 201 bp, Homo sapiens
ggggatcagaggtgcacctggagagctggcagggaccaggccatgcagcagagcctcatagccagcttgctgcctggaattgaccctaagaccaacgggawgtgggagttttaaacaggagaatgacaggattaaatacatagtttgcaagcttacactggctgatgagaatagactgggttgggcaggtattgccaagct

SEQ ID NO: 372490 - DNA, 201 bp, Homo sapiens
aacccaaaagatggaagccagtcccaaaagaaaccaagagagtgtgtgctccagcccagttatgctcattacatgtttcagcctcttgcctaaaacccacrccttaggatatagcccagcagtgtgtccatgatgcctgctggggtgggaaagactgaatgaagttgagaagtacttagtgtttccctagagataagaaca

SEQ ID NO: 372491 - DNA, 201 bp, Homo sapiens
atgtttcaccccttgtaacttcagcatgcacattattaactagagtttaatatttgttttcatctattctaaggtagaagttacatacagcaaaatacgtrcatcttaggcatagccttccgtgaggtttttaacttttttttaattatacttcaagttctggggtacatgtgcagaatgtgcagatttgttacataagta

SEQ ID NO: 372492 - DNA, 201 bp, Homo sapiens
gcacaaaaaccgagaaatcttccattcattcactaggttattcctgggtgtctacatggcgcgttatgggaacacaggcattagtgaagacatcgcggccrcggggagttccagtccaataggggagagatgtagataggtccacatgttagtaaaaaatgaagtgtatctcaaggaagtttatgttaagtgctacagacg

SEQ ID NO: 372493 - DNA, 201 bp, Homo sapiens
tgtgtccatgatgcctgctggggtgggaaagactgaatgaagttgagaagtacttagtgtttccctagagataagaacatgcctctaaaacactatgtatkttttcattaggtgctaactggtatttccactgagtatccacccagtaggctcctgagtataaaataagtatagcttcaccttagcaggacctgccctgtg

SEQ ID NO: 372494 - DNA, 201 bp, Homo sapiens
tttgcccattcagtatgatattggctgtgggtttgtcataaatagctgttactattttgagatacgttcaatcaatacctagtttattgagagtttttagwgtgaaggcctgttgaattttgttgaaggccttttctgcatctattgaggtaatcatgtggtttttgtcattgtttctgtttatgtgatgggtcacagtta

SEQ ID NO: 372495 - DNA, 201 bp, Homo sapiens
tccccccacacagtgtgagggctcaaggaacaggacatggagaaggtacattttttgagaaaggtcataaaatgttggagttgaagaggatgaagcaataygagctggctgtcccttggggagtggtagttcaaatacattaaagtagagaggagcagaaatgcccacagccagagagaaaaacaaatgcatgttgtttca

SEQ ID NO: 372496 - DNA, 201 bp, Homo sapiens
ccacacagtgtgagggctcaaggaacaggacatggagaaggtacattttttgagaaaggtcataaaatgttggagttgaagaggatgaagcaatacgagcyggctgtcccttggggagtggtagttcaaatacattaaagtagagaggagcagaaatgcccacagccagagagaaaaacaaatgcatgttgtttcacaaat

SEQ ID NO: 372497 - DNA, 201 bp, Homo sapiens
acattaaagtagagaggagcagaaatgcccacagccagagagaaaaacaaatgcatgttgtttcacaaattactcaggagtaattctgttcttggagatcrtggttcccttccaagatatctcagaataagcagaggccagaccaagagaataggtcaaagcaagctgctgattcacacctagattcaagtgtgtgggcct

SEQ ID NO: 372498 - DNA, 201 bp, Homo sapiens
ctcgctcatttgatttttatttggcaaatgggaggacacgttctggggtgtgaggaggggatggttagtgcctgtgatagaaaagagagatgaggctggtracttaagagagtcaacagaaaggacaagggagggactttccagtccttctgtacacagtaggaagactgagtatgaaagtggctgacataggccaggtgc

SEQ ID NO: 372499 - DNA, 201 bp, Homo sapiens
aactctcccataacagggaagcaaagctgccacggagaactgttaaggaaattaagccccaggactgttggggaaaggaagaaactgtgttctcatgggaragtaacgagcagctgccagtcgagctctttgcgtttttgctctctgggttatttccatatatcttagcaatagatatacaatgacataaaaacacatctt

SEQ ID NO: 372500 - DNA, 201 bp, Homo sapiens
tagtggtgacaggtgaagccaggagcagaagaacatctctaaggggtgtgtgatgtgcatgtagtgaaaggacagagggtccaagcctgagcctgaaggcrtagtctcagccagggggtgggcagtggaaatagggccagtaaagaggacagaagagctgggggtgaccatgagagtgcagtgtcacatgaaccaagaaca

SEQ ID NO: 372501 - DNA, 201 bp, Homo sapiens
tcagcctcctgggtagctgggattacaggcatgctcaaccatgcccggctaatttttgtatttttagtagagatggggtttcaccatgttggtcagggtgrtctcgaactcctgacttcgtgatctgcccgtctcagcctcccaaagtgctggacttataggcatgagccactgtgcccagcctaattttatgtatttttt

SEQ ID NO: 372502 - DNA, 201 bp, Homo sapiens
atccaacctcaaactggtctagaattgctgccatctgaagcgatagcatcttgtctggaaggctgagattgcacatctgctcacagttaggagaaacaacwggaactctttgggtgcaaatgctattgagaaaatttaaccaaagttccattgtttccttcttacacattttacaacctgtccatggggctctggaaggct

SEQ ID NO: 372503 - DNA, 201 bp, Homo sapiens
cagggaccacctggtgttcttcagtgctggccctgatagaggccatttgcccattaggtcagggtgcccccagtagcttgggctcattccaggagaagcaygctgcacctacaacagctctcctggcattactgtggcacaccatcagctgagactgatcttcatgtggtggttctccttttttgggcaaaatcctgtctt

SEQ ID NO: 372504 - DNA, 201 bp, Homo sapiens
tgccccactaacagtgttggggtcagttataaaacaagaaatgcaggatcccaaagaaagcacacttattatttctagtgctaatgacttccttttgtcayttgacagacatttattgagcattagcacaaaaccattaacaacaaaaaaaattgataatgagaaagaataggtggaaaactgcatctaaagttcagatct

SEQ ID NO: 372505 - DNA, 201 bp, Homo sapiens
ctggcttaccacacgtcagagtgggcaggcctgtgcacacctaccccaaagtccgaggaagctgagaggccaaagaaagaggctgatgaatcccgttcctyggaatgaaacatctaataggaacttatgaacagaagccacgtctgtgccttggatggtggcaagacaagataacggatccctgttccattacccacagac

SEQ ID NO: 372506 - DNA, 201 bp, Homo sapiens
aacctttgccccacaagagattggaatgtaagcttctctcgctatcttcttgccctctcccttcaagggcagctccaggcagctcccatctctgtggtacmtgccccaactctcctaaaaacccttctgcaccttctctggtggcaacttgtggaggcctaggagtttctttccacaacccagcaagagttctgcctggga

SEQ ID NO: 372507 - DNA, 201 bp, Homo sapiens
caccacaagatttcctccattttttggtctctcagctcctggcctggcttaccacacgtcagagtgggcaggcctgtgcacacctaccccaaagtccgagraagctgagaggccaaagaaagaggctgatgaatcccgttcctcggaatgaaacatctaataggaacttatgaacagaagccacgtctgtgccttggatgg

SEQ ID NO: 372508 - DNA, 201 bp, Homo sapiens
ttttattttagatgtttacacaataaatagaattagaaagagggggattttactgtggtttaattcttcaactgtgtattacccaccataaaaaatgaacrgcgcaacacctcattgcattgacaggcaattccattatttgattttaaataagtgcttctggttttttaggcaacattacatgtgatggcatatgttagg

SEQ ID NO: 372509 - DNA, 201 bp, Homo sapiens
cagatgtcctacacactcatctgtcttatttttcaagttaacctaccccattcattgagtggctacaaagatttaatggtctgagcacttgaaagtaggtkgatttagcagtgaagccgcatgattataagtttaatagaactaaatgtgccccactaacagtgttggggtcagttataaaacaagaaatgcaggatccca

SEQ ID NO: 372510 - DNA, 201 bp, Homo sapiens
tgagctggggatcgtgcatcaacccaaacatgttttaccactctgcagcatttaaaaccaaagacactgctccaaattagctactttcacaattcaacaamaggttttatccagggagctgatgatgcctatctacaaaagggaacaattccttcacacagtaccctctggtttcagcagttacttgggttttgcccttcc

SEQ ID NO: 372511 - DNA, 201 bp, Homo sapiens
cttcatctggggtgctccacgtagcattggggccgaccccattctcagggtaaacagatctgacagaggcttttatccagtccaccaggctggctgttccytcaggaataacctcccatgtgtctggatcacatatagccatctgtgattgttcagtagtgagctggggatcgtgcatcaacccaaacatgttttaccact

SEQ ID NO: 372512 - DNA, 201 bp, Homo sapiens
tattattacttcactttaggataatggcctccagctctagccatgttgctgcaaatgacatgatttcattcttttttatggctgcatagtattccatggtrtatatgcaccacattttcttcatccagtccaccaatgatgggcacctgggttgattccatgtctttgctaccatgaattgtgctgtcataaacatgcaag

SEQ ID NO: 372513 - DNA, 201 bp, Homo sapiens
gcacctgggttgattccatgtctttgctaccatgaattgtgctgtcataaacatgcaagtacaggtgtctcttcagtagaatgatttattttcctttgggyatatacccagtaatgggacggctgggttgaatagcaatttctatttttagttctttgagaaatctccgaactgctttccacaggggctagctgatctaat

SEQ ID NO: 372514 - DNA, 201 bp, Homo sapiens
ctttacatggtcattttttcatttttatttttatagaatataaaaatgcagatttcttgcatgcatatattgtgtactggctttcagtgtacccatcaccygaaaagtgaaaaatgtacccactacgtaagttttcaaccctcgtgcatggtcattattacagtctgattctactatgcaaagtgaggattgccgatagct

SEQ ID NO: 372515 - DNA, 201 bp, Homo sapiens
aacatctgttattttctgactttttaatagccattctgactagtttgagatggtatctcattgtggttttgatttgcatgtctgattagtgatgctggacttttgttttgtttagtttttttttttttttttttttttttttgagacagtcttgctctgttgcccaggctggagtgcagtggcatgacctcagctcactgc

SEQ ID NO: 372516 - DNA, 201 bp, Homo sapiens
ccaaggcataggaaagatgctcacttcgtatcataacttatacaactagaagaaggtggcaagcactgtccaaactactcttgataaatttttttaaatamataaaacatcttaattttcaatgtttctaatattttaagttacagtatattaaataaattttagctttatattttttcatttccctatatatttataacc

SEQ ID NO: 372517 - DNA, 201 bp, Homo sapiens
acatctgttattttctgactttttaatagccattctgactagtttgagatggtatctcattgtggttttgatttgcatgtctgattagtgatgctggacttttgttttgtttagtttttttttttttttttttttttttttgagacagtcttgctctgttgcccaggctggagtgcagtggcatgacctcagctcactgca

SEQ ID NO: 372518 - DNA, 201 bp, Homo sapiens
gtgtgtgtgtattttctgccttatactaaggcgctactctaggtttggagtgataaaaaaaatgaatatgatggccgggcatggtggctcatgcctgtaawcccagcactttgggaggctgaggcgggtggatcacgaggtcaggagttcgagactatcctgaccaacatggtgaaaccccatctctcctaaaaatacaaa

SEQ ID NO: 372519 - DNA, 201 bp, Homo sapiens
catctgttattttctgactttttaatagccattctgactagtttgagatggtatctcattgtggttttgatttgcatgtctgattagtgatgctggacttttgttttgtttagtttttttttttttttttttttttttttgagacagtcttgctctgttgcccaggctggagtgcagtggcatgacctcagctcactgcaa

SEQ ID NO: 372520 - DNA, 201 bp, Homo sapiens
tgtggtatcattaaccacattcttctggccttgtattccctgtatgttggtagttagatctagaggcttgataggattcaggtttatttactttttttttkggggaagactactttataggtagtgtcatggacctccatcaggaggcacatgatgtctggttgtgtctcttggagacgttagcagccactgatgattgtt

SEQ ID NO: 372521 - DNA, 201 bp, Homo sapiens
atctgttattttctgactttttaatagccattctgactagtttgagatggtatctcattgtggttttgatttgcatgtctgattagtgatgctggacttttgttttgtttagtttttttttttttttttttttttttttgagacagtcttgctctgttgcccaggctggagtgcagtggcatgacctcagctcactgcaac

SEQ ID NO: 372522 - DNA, 201 bp, Homo sapiens
ttgtggagtaggaagtggggagctacgatttattgtcaggcccagttcccagtgatttacttaatcctcctctacatatgagggatttgatattttctccwtttttgcagaggaggaaacaggctcaaaacaactaaacttgccagagctcacactcatgacaaagtccagaagcaaatacatgttgtttaactccaaact

SEQ ID NO: 372523 - DNA, 201 bp, Homo sapiens
tttcccatgacataaatcctggttcttaacatcatcatgataattcctcatttgttagatcccacatgcgcgtgcacacacacacacacacacacacacacacacacatctcagaataccagtgatcaacacgacttcatgatcaatatgaacactgaaaacagtttgatttttttccagtgatttttgatattagggtct

SEQ ID NO: 372524 - DNA, 201 bp, Homo sapiens
tctgttattttctgactttttaatagccattctgactagtttgagatggtatctcattgtggttttgatttgcatgtctgattagtgatgctggacttttgttttgtttagtttttttttttttttttttttttttttgagacagtcttgctctgttgcccaggctggagtgcagtggcatgacctcagctcactgcaacc

SEQ ID NO: 372525 - DNA, 201 bp, Homo sapiens
atcctcctctacatatgagggatttgatattttctccatttttgcagaggaggaaacaggctcaaaacaactaaacttgccagagctcacactcatgacaragtccagaagcaaatacatgttgtttaactccaaactctatattgggttcactaaagttagatttcccaagctagtgttccacagaacaccactgtacca

SEQ ID NO: 372526 - DNA, 201 bp, Homo sapiens
tcccatgacataaatcctggttcttaacatcatcatgataattcctcatttgttagatcccacatgcgcgtgcacacacacacacacacacacacacacasacacatctcagaataccagtgatcaacacgacttcatgatcaatatgaacactgaaaacagtttgatttttttccagtgatttttgatattagggtctgt

SEQ ID NO: 372527 - DNA, 201 bp, Homo sapiens
ttttaatagccattctgactagtttgagatggtatctcattgtggttttgatttgcatgtctgattagtgatgctggacttttgttttgtttagttttttkttttttttttttttttttttgagacagtcttgctctgttgcccaggctggagtgcagtggcatgacctcagctcactgcaaccctcacctcccaggcttg

SEQ ID NO: 372528 - DNA, 201 bp, Homo sapiens
aaagccttctatgatcaaataagtttggggaatcagtgaaaactcagtttccccctcctctcacacctgagaatccacagagcacttttgcaacattgcayattagcattttaaatactctgagaagtcccatagtaaagaaacctgctaactttgtttatcccaacattttctttccattttttgcaaaaactaatccat

SEQ ID NO: 372529 - DNA, 201 bp, Homo sapiens
tttcacttacaccttcattcgtctatttgtttggcagatattgattgaagtgggggcctaatatgtgtcagtcaatgtttgagacactgagttacagcagaaaaaaaaaaaaaactaaaaattcttgttttctgagtacttacattttaactgggggagatcaccaagaaaaaaaatttaacaaccttatttggttggtac

SEQ ID NO: 372530 - DNA, 201 bp, Homo sapiens
atccatctaaaagctcaaatggaatctaaccatgtttaactttgctctgtaaatcaaacagaaagtatttcccttatgtgtatgtttatggcttcctctcyttccttagctcttcccagcttccacgtaagaattgtggaggaccagaggcccagggaaagccagggagaagccaaccactccagatatgtggagccaacc

SEQ ID NO: 372531 - DNA, 201 bp, Homo sapiens
gggcaaccttaggtgatatcattggtcacaaatgcattacagaaaatgttttctcttagttaaattgatatatctagctcctaagttgattgattcaatayaattgaagactgaactataatggattttgagtattctatattttatttagtatttatatatataaatatgtaactatattttattgagtatttatagtta

SEQ ID NO: 372532 - DNA, 201 bp, Homo sapiens
cagtttggtgctagttcattgagtcatgctaaggtgttagcagttttacccactattgcttcttctcagtgtaaatgtcagtagttttggtatgagaattygtgtttgtatgacattgaacagagctttgactttgcaatgataaaagcagatcccagaaaaggggctaagtaccctgagatcaatgtgtcaggagatgct

SEQ ID NO: 372533 - DNA, 201 bp, Homo sapiens
agttccttatttcttttaatttgcttttatcaaacttttttccaaactgtaaaagcaatttgtatttttttgcaacaaaacaaacaatatgcgggtatacaaagaaaaagtcaacattctatttccactccctctcaaagtgaccagtgtttacattgggtacgtatatgaggtcttcccacacttttattcacaatcata

SEQ ID NO: 372534 - DNA, 201 bp, Homo sapiens
tgcagtgagccaagtttgcacccactgctctccagcctggacgacagagtgagactgtctccaaaaaaaaaaaagaaagaaagaaaaagaaaaagagtggktaggactagaatctaagtttttctctctccagtttccccatttctaccaaggataaattatagtaccttgctatttcaggaataatgaaaaataaaaaat

SEQ ID NO: 372535 - DNA, 201 bp, Homo sapiens
tataaatacatgaaagccttttttttcaattgagatgaaactaaaattagccattttaaagtgaacaattcagtgacacttagcacatacacagtgttgtrcagccaccacctctctctagttagagtgagaacctgttgcaaaacaaacaagcaaaaagccattttcatcattcccaaatgtgttcccattaagtggtca

SEQ ID NO: 372536 - DNA, 201 bp, Homo sapiens
gttgtacagccaccacctctctctagttagagtgagaacctgttgcaaaacaaacaagcaaaaagccattttcatcattcccaaatgtgttcccattaagyggtcactcctagtcctcctccccacagccctgacaaccaccagtctgcattctggctcaatcaattgacctattctagatatttcatatacatggaatca

SEQ ID NO: 372537 - DNA, 201 bp, Homo sapiens
gcggacaggcctatgcagacctaccccccaaagtctgaggaagctgagaggccaaagaaagagactgacaactctagttgtcagaaaggaacattaataaraacttaagaacagaagccctgtctgtgtctctggcagcagtgagacaagatggtagatctgtgcaccattacccccagacccagggcttatataccatac

SEQ ID NO: 372538 - DNA, 201 bp, Homo sapiens
ctgtcaacaggctgatgttcaggggttcatagctgaatcccagggattttgaagcttttaaacaggcaatgaatggcagctggccaacagcagtatctaarccagaaggcccattatataaagaaataaattggaagcatttcttcttttgacagtattttccactatttacagaattttaaaattgtaacctgggaaaat

SEQ ID NO: 372539 - DNA, 201 bp, Homo sapiens
cttaaccatagattagagtttgagtgtatactgtcacggttggcttctctcactcataatgtttttgaggttcatcttcactgtatcattttttttccttkttattactgaatattcctttgcatcagtctatcgcagtgtggagaatctacttctgctgatggactccagggctgtttccagcttttggctgctttgaac

SEQ ID NO: 372540 - DNA, 201 bp, Homo sapiens
agaaaagataggttacgattcatttttttcaccaaagccttttgaaagccttagagaacaaagaagtattactctgtgatcttaaacataacaacaggtawctacatgtgttgtattctcatattgtcccaagcacttcgagaaatgcctcacataaactatctgttttgatctttacaaaaacctgtgaaatacgtatta

SEQ ID NO: 372541 - DNA, 201 bp, Homo sapiens
ttttggaagggacacaggagataatgtaacccaacaccctggccatgattgacagaggaaaacactgagaaccatcacagctactcagcatgttggtggcmgtggtggagtagaatccaggcatcctgctttttcagtctggtgcactttccactcagcatagcactatattatttatagactttatacctggacccctgt

SEQ ID NO: 372542 - DNA, 201 bp, Homo sapiens
ggctctgcgtgatagccattgtgtttcaggggtggaaactgagctgtgaaggcttaaaataaccagtccctattgctttattgcccagtaatgagtgccamcaagtaacaaggtcacgatcctctcacctcttccactccctgctcccaactcatcccagactcctgctggtatgtggacttgtgttcagaatcttttccc

SEQ ID NO: 372543 - DNA, 201 bp, Homo sapiens
aacagaaaatcttccagggaccaaaaccccctgcttgtttatagaaatgcttgcactctggggaggaaacacaggcctgttcataaataaatgctcagtcrtaagagttagctctggatgaactgattcatttagcagaagtggaatgctttgaagctagatggaagaggtcactaattaaatgctagaccaagacagagt

SEQ ID NO: 372544 - DNA, 201 bp, Homo sapiens
cctgcgacagagctggttatagatgcaatattgctcggactccagagtcagcccttgaatgctttcttgataagcatcatgaaattattgtaattgatcayagacaaactcagaacttcgatgcagaagcagtgtgcaggtaccttctctaatttaatatgcttagtaaatgttcactttacatcttaaaacgaatttcat

SEQ ID NO: 372545 - DNA, 201 bp, Homo sapiens; identical to SEQ ID NO: 80692

SEQ ID NO: 372546 - DNA, 201 bp, Homo sapiens
cgggcaagagcctccactgtggtttccatgggaaggcttgggtgaggcagggtgagcagggttaggctaggctagtcggattaatttcagaaaggtctggkacatattggtggttctagttgtctggtacctggccctagggtgattagggttggggaattgtggcctggagtgtaagagccaaaggtggtggtggttggg

SEQ ID NO: 372547 - DNA, 201 bp, Homo sapiens
  misc_feature (1)...(201): n = A,T,C or G
ggatctgtggtcttgttttcacacatgtggccacatcagcattgcactgggtacaacaatacagcaggcattgggaaatgtaacgagagcatgtgggaatnttccttctcagccttctgagaccctctgcaggagcagctgtcatccttgactgaaggattttaagagctctctttgtccatgtaggagtggcagggggtt

SEQ ID NO: 372548 - DNA, 201 bp, Homo sapiens
ggaacttgtgtccaaggatacaaggcccaaccacctgtaggactgacttcactctaataatggcagcaactatgtcctccttgcagcccttccaggttccygtgcccccttaagagaaacatgtatgaagagggagtttgtacccttttaaataatttctaaatccttatctgcatataagccatcctgttaggcctaaat

SEQ ID NO: 372549 - DNA, 201 bp, Homo sapiens
gaaaaaccaagcaaggaaatgtgctatttgatttatgagcaaatggaaaaagaaaatagtgttttatagttgcttggaaaaagaaatgcaaatctaggaarggaaaaaaaaaaaggaagagattagcttgggaaaatttgatgaaaacaaatttaggaacagagagagagagaaaaataaacaccagccacaactatttgt

SEQ ID NO: 372550 - DNA, 201 bp, Homo sapiens; identical to SEQ ID NO: 80697

SEQ ID NO: 372551 - DNA, 201 bp, Homo sapiens
gtaaatgctgctgcgtgctgaaggcgctccttcagactgacaaggggccagtacagagtgtggaatgcaggataagcttccaatagtgacaaatgaccacagtctcttagagaaaaacaaaattggatccatggaggtgaggtcaagaccgtcaaccaaattagtctagagaatagtcacttttagaaatctcagtaaagt

SEQ ID NO: 372552 - DNA, 201 bp, Homo sapiens; identical to SEQ ID NO: 80699

SEQ ID NO: 372553 - DNA, 201 bp, Homo sapiens; identical to SEQ ID NO: 80701

SEQ ID NO: 372554 - DNA, 201 bp, Homo sapiens
actctcaagataacagcattaatccattcctgagggcagagccccatgacctaatcacgtcttaaagatcccacctcttaatatagtcaaaatggcgactraatttcaacatgaattttggaggggaaattcaaatcatagcacccctcaccactgctcctagtgtagacactcatcatcttttgtcaacaccagtagttc

SEQ ID NO: 372555 - DNA, 201 bp, Homo sapiens
tccatggcgaggatccactccatgaccatcgaggctcccatcacaaaggtgagtggcggctgctgcctgcactctgcagtcaggggccctcacacagggcygtgctctgaaaatacatcacactgacatcatggagctcggtctagtggaagaagcaaataacaggcaaataaacacatagcaaataaacacctcatccta

SEQ ID NO: 372556 - DNA, 201 bp, Homo sapiens
agttctcaacaacaaagaattatctgggctgggcgcggtggcttactcctgtaatcccagcactttgggaggccgaggcgggcgaatcacttgaggtcagkaattcaagaccagtctcgccaacgtggtgaaaacctgtctctactaaaaatacaaaaattagttgggcgtgtggtgcgaaaaaaaaaaattctctagccc

SEQ ID NO: 372557 - DNA, 201 bp, Homo sapiens
cagtgccttacatgtagcagataattcatagatggtggctgagtgaatgaatgactctccagactactaagcatccacattgaatgccgtcctaatccccyaacctcatttctgttgtctctactagtttttccactttcatctctaattttgtcttttgcctttgctgttttttttcactccatggatgagtgttactgt

SEQ ID NO: 372558 - DNA, 201 bp, Homo sapiens
  misc_feature (1)...(201): n = A,T,C or G
tctaagaatgaaatttggggacttgaatgattcaaggtcaaatattaaacattagctccttcaccaatacctgtcattgtcattagaaaggaaggcctctngtttacgctactgtgattcacagtgtcctttgtcggtcaagaggccccctctgtggcttggctttagctgtcagatggaagcctcaaacttttgcacttt

SEQ ID NO: 372559 - DNA, 201 bp, Homo sapiens
tacctgacatcatgtgacaggttgcagtcaaaattttgtttaacgcacaaaattaccaaaaatattgtataaaactaccttcaggctatatgtataaggtgtatatgaaaaataaatgaattttgtgtttagacttgggttcagtccccaagatagctcattaggtatatgcacatattccaaaatccaaaaaaaatcaga

SEQ ID NO: 372560 - DNA, 201 bp, Homo sapiens
tgctcacatagcatctgttaattataaggggccagttatatgtcattcatagctggctctctttaacaccacttctttctctcatactgaaaaaaaaaaaagcctgaatttgagtgaaagcaatattatggggacaactttaaattgattctgagtcattaaaaattatttacaaacttgtggatgacattaacagtaaat

SEQ ID NO: 372561 - DNA, 201 bp, Homo sapiens
agatattagagataaatcaaccaagtgtactatagaagccttatttggatccttctaactgtttaaaaaattacgatcagctaaatttgatcattgactgrgtatttgatgacattaaggaagtaaatgttaacttaggtgtgatgtaaaagagtccttagagatgcattctgaaatactgacaaaatgaaatacagtgac

SEQ ID NO: 372562 - DNA, 201 bp, Homo sapiens
ttcttagagttcatgattctaagaagcatatttttttctattttgacatctctaaaatttggacacatcatataattgtgtgtttcaattgtaattggcartatgttttccttaatggtaaataaaataagagtgtcttacaattgatgtcttagatttgatgaaatacggtacatttctaaacaatcataaagttttaag

SEQ ID NO: 372563 - DNA, 201 bp, Homo sapiens
aggagagacaactagggtacatgtgcacaacatgcaggtttgttacatatgtatacatgtgccgtgttggtgtgctgcaccgattaactcatcatttacaktaggtatgtctcctaatgctatccctcccccctacccccaccccacgacaggccctggtgtgtgatgttccccttcctgtgtccaagtgttctcattctt

SEQ ID NO: 372564 - DNA, 201 bp, Homo sapiens
attcttttctttaagaatgttgaatattggcccccattatcttctggcttgtagagtttctgccaagagatctgctgttagtctgatgggcttcccttcgwgggtaacccgacctttctctctggctgcccttaacattttttccttcatttcaactttggtgaatctgacaattatgtgtcttggagttgctcttctcga

SEQ ID NO: 372565 - DNA, 201 bp, Homo sapiens
aaggcagaatctctggtagccatctcatggcactgtgctgttcaaaatatcaacttagtcaagtttcaggggaagaaagtgccatgtactatatatacttytatctaacttaacagtggattttttaagaaggcattaaaaagtattgatttgattaaaatctctatactttatgtgacctgaaatgatgtgccttttaca

SEQ ID NO: 372566 - DNA, 201 bp, Homo sapiens
aaattcttttctttaagaatgttgaatattggcccccattatcttctggcttgtagagtttctgccaagagatctgctgttagtctgatgggcttcccttygtgggtaacccgacctttctctctggctgcccttaacattttttccttcatttcaactttggtgaatctgacaattatgtgtcttggagttgctcttctc

SEQ ID NO: 372567 - DNA, 201 bp, Homo sapiens
tctccgtgcatgagatgggtttcctgaatacagcacactgatgggtcttgactctttatccaatttgccagtctgtgtcttttaattggagcatttagccyatttacatttaaggttaatattgttatgtgtgaatttgatcctgtcattatgatgttagctggttattttgcttgttagttgatgcagtttcttcctagc

SEQ ID NO: 372568 - DNA, 201 bp, Homo sapiens
gatatcccctttatcattttttattgcgtctatttgattcttctctcttttcttctttattagtcttactagcgttctatcaattttgttgatcttttcamaaaaccggttccgggattcattaattttttgaagggttttttgtgtctctatttccttcagttctgctctgatcttagttatttcttgccttctgctggc

SEQ ID NO: 372569 - DNA, 201 bp, Homo sapiens
agaattcggctgtgaatccatctggtcctggatttttttttggttggtaagctattaattattgcgtcaatttcagatcctgttattggtctattcagagrttcagcttcttcctggtttagtcttgggagggtgtatgtgtcaaggaacttatccatttcttctagattttctagtttatttgcatagaggtgtttttag

SEQ ID NO: 372570 - DNA, 201 bp, Homo sapiens
cttgtacctctggtagaattcggctgtgaatccatctggtcctggatttttttttggttggtaagctattaattattgcgtcaatttcagatcctgttatyggtctattcagagattcagcttcttcctggtttagtcttgggagggtgtatgtgtcaaggaacttatccatttcttctagattttctagtttatttgcat

SEQ ID NO: 372571 - DNA, 201 bp, Homo sapiens
cctgacatcatgtgacaggttgcagtcaaaattttgtttaacgcacaaaattaccaaaaatattgtataaaactaccttcaggctatatgtataaggtgtatatgaaaaataaatgaattttgtgtttagacttgggttcagtccccaagatagctcattaggtatatgcacatattccaaaatccaaaaaaaatcagaaa

SEQ ID NO: 372572 - DNA, 201 bp, Homo sapiens
ttaagaaggcattaaaaagtattgatttgattaaaatctctatactttatgtgacctgaaatgatgtgccttttacattcctttaaaaatattcttgctayctgaaaaactaaggtcgttaagtttccaatgaaaatatgtggcttgaaggaacaaagagaaaaaaatttaatgtatttgggggaaattccttttggtaaa

SEQ ID NO: 372573 - DNA, 201 bp, Homo sapiens
actatagcacacagtaaatgttggccggatttattcggctgtacacatgagccactggatttgtctggatgcagaagtctactgcggtacaccttcttcakcaagctcttgggaaagcaggggagatttcctggtaccctaggaagtggaggatactaaagccatgtcacagggaggggcattattcttcgtgcgcgcttg

SEQ ID NO: 372574 - DNA, 201 bp, Homo sapiens
ttctatatagcacaaacttgaatctctcagccaaaaaagggaacatatatactgtttaagtatggcaagttttctttggtaccaatttgtttagataattktaaaaatgttttttagttctagctactaaaacctgtatgaactcaaatggataggcatcttgtgagggtgtgtttttcccagtgtgaattggcttgaaga

SEQ ID NO: 372575 - DNA, 201 bp, Homo sapiens
ggcagagtagatttaacataattcttaagggccttaagatttttggactggtaaataaactctgacttcaacttaaaggcaccaactacactcgctggcaytgaacttcttctccccagctatgaagtcctagatgacatctcttctaatagaagaccatttcatcttcacaaactcagttgtttagtgtagtcgccttca

SEQ ID NO: 372576 - DNA, 201 bp, Homo sapiens
tgttgtcccttgcactctgacgttaatggggatagtttcatgaaccaacctctgcttgcttccagcttttcttctgtagcatcctcacctctcagtcttcraagaaagaattgaagaattaattaggctttggcttaagggaatgttgtggcttgtttaatctatatagaccactcagactttctccatctcagcagtaag

SEQ ID NO: 372577 - DNA, 201 bp, Homo sapiens
cttttacttgcacatttacaggctactgtaggttattaattggcttaatttcgatattgttgtgtctcagggaatagggaggtctaagaagagggagagaytggaaaccgctagttggtggaacagttagaatatacacaagatttatcaattaagttcactgtcttatacgggcatggtttgcagtaccctaaaacaatt

SEQ ID NO: 372578 - DNA, 201 bp, Homo sapiens
atacattttgcattctttctagagttttcctccaacgacagaaaaacactgcagtaagctttggcagcgtgtcctttgaagaggcagagactcgtttatcyagctatcaaaaatccatcaagtcttctgcacacaagcttctgtgccagctgctggggatgcaaagaatgcaccccaccccacttggccacaaaaagctga

SEQ ID NO: 372579 - DNA, 201 bp, Homo sapiens
taccatgcttcttaacttttgcttgaaaagatttgtctcatatatattactggcctgtcatcactgttttcctgttgtgatgcaagtcaaccaaatcatgscatgttaaacaatcatctgcagccttttttttggcaatgttacttgttgctatgtcctgagagacactccatttattaaagtggtcatttttgtggggaa

SEQ ID NO: 372580 - DNA, 201 bp, Homo sapiens
ctttatttccttcttctgcctaattgccctggccagaacttccaacactatgttgaataggagtggtgagagagggcatccctgtcttgtgccagttttcraagggaatgcttccagtttttgcccattcagtatgatattggctgtgggtttgtcacagatagctcttattagtttgagatatgtcccatccatacctaa

SEQ ID NO: 372581 - DNA, 201 bp, Homo sapiens
ctgtgggtttcttataaatagctcttattattttgagatatgttctatcaatacctagtttattgagaatttttaatatgaaaggatgttaaattttatcraaggccttttctgcatctattaagataatcatgtggtttttgtcattggttctgtttgtgtgatggattacgtttattgatttgcatatgttgaatcagc

SEQ ID NO: 372582 - DNA, 201 bp, Homo sapiens
tctgtaaagagtaaaaagccatatgtgggtatgttagttaccgattgctctgtcagctgtcacaccaaacttagtggcttaacacaaccccatctatttakctcattattctgcaggatggcaattggggctaggctcagctgggtgagtctgtctttgcaccaggagcaactgatcttggctagattcacttatgcctct

SEQ ID NO: 372583 - DNA, 201 bp, Homo sapiens
cttcctcttttcctaattgaataccctttatttccttcttctgcctaattgccctggccagaacttccaacactatgttgaataggagtggtgagagaggkcatccctgtcttgtgccagttttcaaagggaatgcttccagtttttgcccattcagtatgatattggctgtgggtttgtcacagatagctcttattagtt

SEQ ID NO: 372584 - DNA, 201 bp, Homo sapiens
tatgtacattatgcattgtcaaattagagaaatacctttccagttttaaaattttatatcattatcctttttttgtttcttagtttttgaagacattacaytctgggttttttttggtcagctgttataatccaggtttcacgcttcaagtctttagataataacatcttattgaaaattttgcagaaggattttcttgtt

SEQ ID NO: 372585 - DNA, 201 bp, Homo sapiens
gctgagacagtggggttttctagatatacaatcatgtcatctgcaaacagggacaatttgacttcctcttttcctaattgaataccctttatttccttctyctgcctaattgccctggccagaacttccaacactatgttgaataggagtggtgagagagggcatccctgtcttgtgccagttttcaaagggaatgcttcc

SEQ ID NO: 372586 - DNA, 201 bp, Homo sapiens
atcctttttttgtttcttagtttttgaagacattacattctgggttttttttggtcagctgttataatccaggtttcacgcttcaagtctttagataatawcatcttattgaaaattttgcagaaggattttcttgttttctcagtggctcagctaaaatcagtgagtggaaaattttctcggattggtttttgaagatac

SEQ ID NO: 372587 - DNA, 201 bp, Homo sapiens
attggtgtaaaagaatgcttgtgatttttgcacattgattttgtatcctgagactttgctgaagttgcctatcagcttaaggaggttttgggctgagacartggggttttctagatatacaatcatgtcatctgcaaacagggacaatttgacttcctcttttcctaattgaataccctttatttccttcttctgcctaat

SEQ ID NO: 372588 - DNA, 201 bp, Homo sapiens
aggaaaggctgctttttaagagttctctactggatgtaaataactagggctttgtactattgccttgcttagttatttgctgagggtccttcatgaagaayatgcacctggcttctactatctggcttaaatcccagtgactaggagccgattgagctagtataactttggcttgaaggcagaaatggatcctgaagtcaa

SEQ ID NO: 372589 - DNA, 201 bp, Homo sapiens
ctcttttatttcattgagcagtggtttgtagttctccttgaagaggtccttcccatcccttgtaagttggattcctaggtattttattctctttgaagcarttgtgaatgggagttcactcatgatttggctctctgtctgttattggtgtaaaagaatgcttgtgatttttgcacattgattttgtatcctgagactttg

SEQ ID NO: 372590 - DNA, 201 bp, Homo sapiens
tctctactggatgtaaataactagggctttgtactattgccttgcttagttatttgctgagggtccttcatgaagaacatgcacctggcttctactatctkgcttaaatcccagtgactaggagccgattgagctagtataactttggcttgaaggcagaaatggatcctgaagtcaacagctggaggcagtcagataact

SEQ ID NO: 372591 - DNA, 201 bp, Homo sapiens
ctttctgcatatgactagccagttttcccagcaccatttattaaatagggaatcctttccccatttcttgtttttgtcaggtttgtcaaagatcagatggktgtagatatgcggcgttatttctgagggctctgttctattccattggtctatatctctgtttttggtaccagtatcatgctgttttggtaccagtatcat

SEQ ID NO: 372592 - DNA, 201 bp, Homo sapiens
tttccatttctgatttggagatggttgaagtgtatgcttgactgactaggatttagtttaagataaactgataaagtatagctagttttttgttatccatsataataggatgggtaattgtaatttgtgaatgatatctcaaccctttattagtttttttatgacaggtactaatatgtgtcaaagttatactggtttgta

SEQ ID NO: 372593 - DNA, 201 bp, Homo sapiens
tgtcttgaaagggggtctggaaggcaggtattggcgtctgccacacttccatagttgtaagttggtctattttatttttaacttgcatgaacatactcatkggctatgtctttgggcagctttttaagaaactgtaagtatgccattggttaatagttatttgatggcttgaaaaagttaatatttttagagctattaacg

SEQ ID NO: 372594 - DNA, 201 bp, Homo sapiens
tgttgtttcctgactttttaatgatcgccattctaactggtgtgagatggtatatcattgtggttttgatttgcatttctctgatggccagtgatgatgcrcattttctcatgtgtcttttggctgcataaatatcttcttttgagaagtgtctgttcatatcctttacccacttgttgatagggttgtttatttttttct

SEQ ID NO: 372595 - DNA, 201 bp, Homo sapiens
ctggcatttttttaaagcacttatatccagtgtgacgttgactttagacaactttattatagtaaattttactaaaatctgttaaccaaatagcttttctwtttctaaaggcccctaatccaccatgtgtggtgaatgtgttgattgaatttctgttgttttgcatcgtgccctgaatcaagcggggaatttcggcagtgt

SEQ ID NO: 372596 - DNA, 201 bp, Homo sapiens
atagtattccatggtgtatatgtgccacattttcttaatccagtctatcattgttggacatttgggttggttccaagtctttgctattgtgaacagtgccrcaataaacacacgtgtgcatgtgtctttatagcagcatgatttataatcctttgggtatatacccagtaatgggattgctgggtcaaatggtatttctag

SEQ ID NO: 372597 - DNA, 201 bp, Homo sapiens
agtgtcatcacacagatgcgtgtgccacccttgctgcttttctccttatttctaataattttgtcctttcagcttgtgttttggagctgtagctgagtttygtttagttggataagatgttgcagggtttgggaggatgacaggagtgagtgaaaaggtaattgctgcttcatgcattagcatagaatcaaattttaggat

SEQ ID NO: 372598 - DNA, 201 bp, Homo sapiens
acaaaggacatgaactcatcatgttttatggctgcatagtattccatggtgtatatgtgccacattttcttaatccagtctatcattgttggacatttggkttggttccaagtctttgctattgtgaacagtgccgcaataaacacacgtgtgcatgtgtctttatagcagcatgatttataatcctttgggtatataccc

SEQ ID NO: 372599 - DNA, 201 bp, Homo sapiens
taattttgtcctttcagcttgtgttttggagctgtagctgagttttgtttagttggataagatgttgcagggtttgggaggatgacaggagtgagtgaaamggtaattgctgcttcatgcattagcatagaatcaaattttaggataaggacagcaagtgtctaacagtatttcagtttcaaatttgtcatcttagcagta

SEQ ID NO: 372600 - DNA, 201 bp, Homo sapiens
tgatcctgtcattatgatgttagctggttattttgcttgttagttgatgcagtttcttcctagtctcgatggtctttacattttggcatgattttgcagcrgctggtactggttgttcctttccatgtttagcacttccttcaggagctcttttagagcaggcctggtggtgacagaatctctcagcatttgcttgtctgt

SEQ ID NO: 372601 - DNA, 201 bp, Homo sapiens
aagataatttgagtctatttctggccttcttattctgttacattaatctttctgttggcttgcctaggtacctcactgttctaattactgtggttttatasggcattactactagacattccattcagttatatctttacatagataaaatgatcgataatgaggcatatgtgaactttgcctagatttgagttttgtcac

SEQ ID NO: 372602 - DNA, 201 bp, Homo sapiens
gccttcttattctgttacattaatctttctgttggcttgcctaggtacctcactgttctaattactgtggttttatagggcattactactagacattccawtcagttatatctttacatagataaaatgatcgataatgaggcatatgtgaactttgcctagatttgagttttgtcaccggctcccacgtcggagagctga

SEQ ID NO: 372603 - DNA, 201 bp, Homo sapiens
tgcaaatttagcattggccctcagtggtgcgctctttttgtattactgattttctgttctgacaggcagttaatctcatgctcagaagatggcagtgtacrcatttgggagttaagagaaaaacagcagcttgcagctgagcctgtaccaacaggtgtgtgtcttctctcaaaaaggtagtctttttctctccttttttct

SEQ ID NO: 372604 - DNA, 201 bp, Homo sapiens
tctgtaatttggtcctagttgtttcgcttattttatgtctttttttttttttcttagataaatctgttcagataagctccttatgaatccttcagatcgaygttcttgaggaaaacagtcaagctaaacagcaatgatgacttttatggtaaaggatgagctgatcactagctaagctacttagtcaccatcctgggagat

SEQ ID NO: 372605 - DNA, 201 bp, Homo sapiens
tggggttatgtgctctgaaccccttcaaatgaaataatgaatttagatggcctaaatcataacatatacacatacacacacaagatagccagaaattatayttccggatggagtatacaatctgcctttggggtggtcttaccaaaaagtcagatatggatcttatttagtctctagatttaactatcaattaacaaaaaa

SEQ ID NO: 372606 - DNA, 201 bp, Homo sapiens
acagaggacagaggtgcatgttggataacagcacaggaaaaaaaacccagactgtgagaactcgacaagacaggtgaatttttttttcaacaaataaattrcaaggaaaaacagatggagaaaaaaatcattagaataaaagagatattagagataaatcaaccaagtgtactatagaagccttatttggatccttctaac

SEQ ID NO: 372607 - DNA, 201 bp, Homo sapiens
aagtcagatatggatcttatttagtctctagatttaactatcaattaacaaaaaatacagaggacagaggtgcatgttggataacagcacaggaaaaaaawcccagactgtgagaactcgacaagacaggtgaatttttttttcaacaaataaattgcaaggaaaaacagatggagaaaaaaatcattagaataaaagaga

SEQ ID NO: 372608 - DNA, 201 bp, Homo sapiens
tactgaaggttggggtggctgtggcagttccttaaaataagatagcgatgaagttttccaaatcaattgacttcctttcacaaatgagatctctgtaacaygtaatactatttaatagcattttacccacagtagaacttctttcaaaatttagagtctgtcatctcaaatcctgatgctcctttatgaactaagtttata

SEQ ID NO: 372609 - DNA, 201 bp, Homo sapiens
gaaggaacattgttgtgcatgttgttgatatttcagtggtagcaggagccctgtgaattgaatttagttactaataggagctagcttagctccacgtagayattttaaagtatcagaaacataatgacttaggaaaactaaatccatacattgctagggtttacaatttaaccactcagttcaacatttgattactaatag

SEQ ID NO: 372610 - DNA, 201 bp, Homo sapiens
gttatgtctctgcccggctttggtatcaggatgatgctggcctcatgagttaaggaggattccctctttttctgttgattggagtagtttcagaaggaatkgtaccagcttctccttgtacctctggtagaattcggctgtgaatccatctggtcctggatttttttttggttggtaagctattaattattgcgtcaattt

SEQ ID NO: 372611 - DNA, 201 bp, Homo sapiens
tcataatgatacttaaaaaagagaactcacctttggagaatgctggggaactaactcattctgttgaaaatcggtaaataaaagggcagagtcaaaatctrtactgcctttcttatataaactgtgtcttgggatcagtaataattgacgagaagaaatttctctgaagaattcaagctaggaagaatgatagaattagaa

SEQ ID NO: 372612 - DNA, 201 bp, Homo sapiens
ttatgtgctctgaaccccttcaaatgaaataatgaatttagatggcctaaatcataacatatacacatacacacacaagatagccagaaattatatttcckgatggagtatacaatctgcctttggggtggtcttaccaaaaagtcagatatggatcttatttagtctctagatttaactatcaattaacaaaaaatacag

SEQ ID NO: 372613 - DNA, 201 bp, Homo sapiens
gcgattcttctgcctcagcctcccgagtagctgggactacaggcatgtgccaccacaccgagctaatttttgtatttttaatagagacagggtttcaccayattggccaggctggtctcgaactcctgatctcgtgttccgcctgcctcggcctcccaaagtgctgggattacaggtgtgagctaccaaacccagccagga

SEQ ID NO: 372614 - DNA, 201 bp, Homo sapiens
ccagcctcccattcagatacaggcttacctcaaaaataagagcagaccagtatgttccctctctgtgaacagatgaatcttcagaaaacccacaaggggcygggtatgatggctcatgcctgtaatcccagaactttgggaggccaaggcgggtggatcacaaggtaaggagtttgagaccagcctgcccaacatggtgaa

SEQ ID NO: 372615 - DNA, 201 bp, Homo sapiens
tacctaagcaagtctgggcaatggcgggcgcccctcccccagcctggctgctgccttgcagtttgatctcagactgctgtgctagcaattagcgagactcygtgggcgtaggaccctccaagtgaggtgcaggatataatctcctggtgcgccgttttttaagcccgtcggaaaagcgcagtattagggtgggagtgaccc

SEQ ID NO: 372616 - DNA, 201 bp, Homo sapiens
tctgtcacccctttctttgactaggaaagggaactccctgaccccttgagcttcccgagtgaggcaatgcgtcgccctgcttcggctcgcgcacggtgcaygcacccactgacctgcgcccactgtctggcactccctagtgagacgaacccggtacctcagatggaaatgcagaaatcacccgtcttctgcgtcgctcac

SEQ ID NO: 372617 - DNA, 201 bp, Homo sapiens
cccactgtctggcactccctagtgagacgaacccggtacctcagatggaaatgcagaaatcacccgtcttctgcgtcgctcacgctgggagctgtagaccsgagctgttcctattgggccatcttggctcctcctcctactgtaatcttgatgtgtagtttagctttctatctgtgatttgggaagggaagaacttaccaa

SEQ ID NO: 372618 - DNA, 201 bp, Homo sapiens
tccctagtgagacgaacccggtacctcagatggaaatgcagaaatcacccgtcttctgcgtcgctcacgctgggagctgtagaccggagctgttcctattsggccatcttggctcctcctcctactgtaatcttgatgtgtagtttagctttctatctgtgatttgggaagggaagaacttaccaaatgttttacctttgc

SEQ ID NO: 372619 - DNA, 201 bp, Homo sapiens
tagatttgctgctgagcttctagggacgaacatatggacagggactatcattattttctatgcaggatatttttatagtgaagcacccagagaagagaggkagcaagaggagggaagggggctgcttaggacattgtgaagtataattcacactgttttcccaagggcatttttttaaatggagagaatcaatttatagca

SEQ ID NO: 372620 - DNA, 201 bp, Homo sapiens
ccgagaaccgcagggactggccgaggtaaaccccgggtgggtctgctctgcgtccgtcgagcttgctggaggggcggcttcgttccggttcggccttcctsggttccgaccgcggggacccgggcggaggcggggctggctgctgagctcgtgccacgcgctgttctcacgacggtgggggcggagggcgcgggagccgga

SEQ ID NO: 372621 - DNA, 201 bp, Homo sapiens
gcggggacccgggcggaggcggggctggctgctgagctcgtgccacgcgctgttctcacgacggtgggggcggagggcgcgggagccggagctcctcagasccggcgggaccccaggcgcaccctggagctgcagacccccggccccgtcccacggctagctgaatcgtgagatcctggctcagggacgctcagctggtca

SEQ ID NO: 372622 - DNA, 201 bp, Homo sapiens
caggtactgtccacttagcccttgactaaaataagtctggaacctcttcacatttaaattttgtttttctgatctcatgttattgtaagtacagagcacartaattttggaaatgattctttttctaggtttttttaacatgtggggatttggaagagtcagcaaacaagccagccaacctgttaaaaagcagcaagaaaa

SEQ ID NO: 372623 - DNA, 201 bp, Homo sapiens
cgaacgagttgtgaccgcagctttccacttttggtttatttgaattggtgtctcttcctggcgtctactgatacttggtcagggaatataaaattaatttwcttatccaacaaccgaaaaaggatataattatttttaaaaagtaatctgcttcaaggtcaagaacatgattttctaattaactgctgtttttggtttcat

SEQ ID NO: 372624 - DNA, 201 bp, Homo sapiens
gccgctgcccggatgttgcgatggctgatcgggggaggccgagaaccgcagggactggccgaggtaaaccccgggtgggtctgctctgcgtccgtcgagcytgctggaggggcggcttcgttccggttcggccttcctgggttccgaccgcggggacccgggcggaggcggggctggctgctgagctcgtgccacgcgctg

SEQ ID NO: 372625 - DNA, 201 bp, Homo sapiens
taggattgcaacccctgcctttttttgttttccatttgcttggtagatcttcctccatctttttattttgagcctatgtgtgtctctgcacgtgagatggrtttcctgaatacagcacactgatgggtcttgactctttatccaatttgccagtctgtgtcttttaattggagcatttagtccatttacatttaaagttaa

SEQ ID NO: 372626 - DNA, 201 bp, Homo sapiens
agaaggaattgtaccagttcctccttgtaccactggtagaattcggctgtgaatccatctggtcctggactctttttggttggtaaactattgattattgmcacaatttcagatcctgttattggtctattcagagattgaacttcttcctggtttagtcttgggagggtgtatgtgtcgaggaatttatccatttcttct

SEQ ID NO: 372627 - DNA, 201 bp, Homo sapiens
atgatggattacatttattgatttgcgtatattgaaccagccttgcatcccagtgatgaagcccacttgatcatggtggataagctttttgatgtgctgcyggattcggtttgccattattttattgaggatttttgcatcagtgttcatcaaggatattggtctaaaattctctttttcggttatgtctctgcccggctt

SEQ ID NO: 372628 - DNA, 201 bp, Homo sapiens
taaagtagttttttccaattctgtgaagaaagtcattggtagcttgatggggatggcactgaatctataaattaccttgggcagtatggccattttcacgrtactgattcttcctacccatgagcatggaatgttcttccatttgtttgtatcctcttttatttcattgagcagtggtttgtagttctccttgaagaggtc

SEQ ID NO: 372629 - DNA, 201 bp, Homo sapiens
gactggggctggaccgggcaagacgccgccgctgcccggatgttgcgatggctgatcgggggaggccgagaaccgcagggactggccgaggtaaaccccgrgtgggtctgctctgcgtccgtcgagcttgctggaggggcggcttcgttccggttcggccttcctgggttccgaccgcggggacccgggcggaggcggggc

SEQ ID NO: 372630 - DNA, 201 bp, Homo sapiens
gtttttgtcaggtttgtcaaagatcagatagttgtagatatgcggcgttatttctgagggctctgttcttttccattgatctatatctctgttttggtacsagtaccatgctgttttggttactgtagccttgtagtatagtttgaagtcaggtagtgtgatgcctccagctttgctcttttggcttaggattgacttggt

SEQ ID NO: 372631 - DNA, 201 bp, Homo sapiens
aaacaacccagaaaacccacaagggtctgaactgagcatgcctaattcattgtctcaagcaagtggggcagagagagaccaagaatgtttctctagtagtrggagtcctccatggaaacttgagtgcaggggaatggaggttcacctaatagaagtcacacagatttttttggtattctaatactgtaatctttttttttt

SEQ ID NO: 372632 - DNA, 201 bp, Homo sapiens
tgggcaacagggcgagactttgtctcaaaaaaaaaaacaacccagaaaacccacaagggtctgaactgagcatgcctaattcattgtctcaagcaagtggsgcagagagagaccaagaatgtttctctagtagtgggagtcctccatggaaacttgagtgcaggggaatggaggttcacctaatagaagtcacacagattt

SEQ ID NO: 372633 - DNA, 201 bp, Homo sapiens
tagccagttttcccagcaccatttattaaatagggaatcgtttccccatttcttgtttttgtcaggtttgtcaaagatcagatagttgtagatatgcggcrttatttctgagggctctgttcttttccattgatctatatctctgttttggtaccagtaccatgctgttttggttactgtagccttgtagtatagtttgaa

SEQ ID NO: 372634 - DNA, 201 bp, Homo sapiens
ttggtctattcagagattcagcttcttcctggtttagtcttgggagggtgtatgtgtcaaggaacttatccatttcttctagattttctagtttatttgcrtagaggtgtttttagtattctctgatggtagtttgtatttctgtgggattggtggtgatatcccctttatcattttttattgcgtctatttgattcttct

SEQ ID NO: 372635 - DNA, 201 bp, Homo sapiens
tttgtcaattttggcttttgtagccattgcttttggtgttttagacatgaagtccttgcccatgcctatgtcctgaatggtaatggttaggttttcttctrgggtttttatggttttaggtctaacgtttatgtctttaatccatcttgaattgatttttgtataaggtgtaaggaagggatccagtttcagctttctcca

SEQ ID NO: 372636 - DNA, 201 bp, Homo sapiens
gtttcttttgctgtgcagaagctctttagtttaattagatcccatttgtcaattttggcttttgtagccattgcttttggtgttttagacatgaagtcctygcccatgcctatgtcctgaatggtaatggttaggttttcttctagggtttttatggttttaggtctaacgtttatgtctttaatccatcttgaattgatt

SEQ ID NO: 372637 - DNA, 201 bp, Homo sapiens
ttgctattgtgaatagtgccgcaataaacatacgtatgcatgtgtctttatagcagcatgatttatagtcctttgggtatatacccagtaatgggatggctgggtcaaatggtatttctagttctagatccctgaggaatcgccacactgacttccacaatggttgaactagtttacagtcccaccaagagtgtaaaagtg

SEQ ID NO: 372638 - DNA, 201 bp, Homo sapiens
agtattccatggtgtatatgtgccacattttcttaatccagtctatcattgttggacatttgggttggttccaagtccttgctattgtgaatagtgccgcrataaacatacgtatgcatgtgtctttatagcagcatgatttatagtcctttgggtatatacccagtaatgggatggctgggtcaaatggtatttctagtt

SEQ ID NO: 372639 - DNA, 201 bp, Homo sapiens
tgactttttaataattgccattctgactggtgtgagatggtatctcattgtgattctgatttgcatttctctaatgatcagtgatgttgagctttttttcrtatgttttttggccacataaatgtcttgagaagtgcctgttcatattttgcccactttttgatggggttgtttttttcttgtaaatttaagttccttgta

SEQ ID NO: 372640 - DNA, 201 bp, Homo sapiens
gagtatatctacttttatagagagctgaagccagtgtttatcttgggaaatttagaattcagacattttttccatagccattatacagtataagtaatggytaagtaaaaccaatacttgaaaaatcagattatgaaaaaatctggaagaactatgagaattcatgtactttacaaaaatagctattctgtagttgaacaa

SEQ ID NO: 372641 - DNA, 201 bp, Homo sapiens
aactctatgactataaaattatactacagataataaataagccaaaggcgtatttaggaatcaaacatgaccaagtagtctgttaaaatttgaaaatgatytgctgacagtctcatcttgcagtacataggcacgttagccatgatgtggatgtcagtgatcctgaaatgtttatgttgtacagttccctgcttcacttgc

SEQ ID NO: 372642 - DNA, 201 bp, Homo sapiens
gctcagtttttaactttgtgtttatggttgggaggtgagcatggactgtggtagacagaagggcaaagatagcatttacgtggtggcaaggagcaccttgsctaggccggagcgctgggttcctgtgaacagacactagtaggggataaagcctgggaacgtggtttggggtcagattatggatgtccttgaatgtaaggc

SEQ ID NO: 372643 - DNA, 201 bp, Homo sapiens
ttttctgatacaactcttcaccccatagtattcatgctgccttttgtcaacactctgttttcctattcttagcttccagcctattccttcactgggcaagycccttccccttacttggggcattttctccctttgaagctttttctgaatttctgtgacatgtcatagtctatactgcattatttagtacctgattacata

SEQ ID NO: 372644 - DNA, 201 bp, Homo sapiens
ctgcttcacttgcaggagctctgctcctttctcctcacccattaccaatgaaagatatggccagttgcttgggattgtacatcacagggcaaatctgtttkcagaggggtggccccagggcaaccttagaattgtatgagagaataccaacaagtgtggataatgaataccagatttgctaaaaagattggaatgcccagg

SEQ ID NO: 372645 - DNA, 201 bp, Homo sapiens
tgaaaaacattaaaaatataaaagttaatattaaaatctttccactatccagtattaaacaccagtccacatctttctaggtgattttctgggcctatgtrtgtgtgtacatgtgtattaatacggtttactgttttgtaacaatatgtcataaatatatttccatatctaagtttatattgttaagcatacttttataac

SEQ ID NO: 372646 - DNA, 201 bp, Homo sapiens
ccttatttggatccttctaactgtttaaaaaattacgatcagctaaatttgatcattgactgggtatttgatgacattaaggaagtaaatgttaacttagrtgtgatgtaaaagagtccttagagatgcattctgaaatactgacaaaatgaaatacagtgactaggatttgcttcaaaataatttacagaggggttggac

SEQ ID NO: 372647 - DNA, 201 bp, Homo sapiens
ttttgagctagccatcttgtaaatgggtgatggtgattatcttaagggatccctggtaaataagtgtgaattgctgaatctaccactttatcacaatagtraaaaaaagtacaaaaaaacccaaccccatattctgctcttaataaatcaataatgtcttccaaaagtctcagaaacctacatttaacaatcattttccat

SEQ ID NO: 372648 - DNA, 201 bp, Homo sapiens
tcttttttaaggaaaagaaattgttgaagtagatctaattaaggaattggttgcgtcagcatctatggctcctgaaaatgctttgacgtttccttcaactsctttacaagtccctatctggatgcttctctaattttcttcaagtagttctagcatacaaacatatactttaaatgaaaattgtgattttttttgttgtta

SEQ ID NO: 372649 - DNA, 201 bp, Homo sapiens
aattggtgtctcttcctggcgtctactgatacttggtcagggaatataaaattaatttacttatccaacaaccgaaaaaggatataattatttttaaaaagtaatctgcttcaaggtcaagaacatgattttctaattaactgctgtttttggtttcatagtcacactttcttcatgggcccgaataattgaatagaccgt

SEQ ID NO: 372650 - DNA, 201 bp, Homo sapiens
ttccacttttggtttatttgaattggtgtctcttcctggcgtctactgatacttggtcagggaatataaaattaatttacttatccaacaaccgaaaaagsatataattatttttaaaaagtaatctgcttcaaggtcaagaacatgattttctaattaactgctgtttttggtttcatagtcacactttcttcatgggcc

SEQ ID NO: 372651 - DNA, 201 bp, Homo sapiens
tggtgcgaaaaaaaaaaattctctagcccaaaatgtcagcatcaagtttgagaaatccagagttgatttcatgccttcatttattcatttagcaagcatgyattgagtgcttgtaatggatgaggcactgtttcactattttatgtctttgatttgcagttttgtttctgccacattttaactgagaaacatgcattctaa

SEQ ID NO: 372652 - DNA, 201 bp, Homo sapiens
gacattgaatacaggaagatttatggttcaggtttatggactatactttttatgtcctttaaggtaacatttgaatttttgggaccttcacttagttgaarggccttcacatgagtaagaactattaaatgagcatttagctattggacataagaattattgtgaaaacaatttattttttacaaatctttattaagcttt

SEQ ID NO: 372653 - DNA, 201 bp, Homo sapiens
atacaggaagatttatggttcaggtttatggactatactttttatgtcctttaaggtaacatttgaatttttgggaccttcacttagttgaaaggccttcwcatgagtaagaactattaaatgagcatttagctattggacataagaattattgtgaaaacaatttattttttacaaatctttattaagctttgctgtagt

SEQ ID NO: 372654 - DNA, 201 bp, Homo sapiens
acctttaaaattaatacatcttttctaaaaatttaaaaactgtgatcattagtaacatttagtagaaattgaaattggcctctgcatctcgatgaaatatrtatctagagtcttttttgcccaaagtcagggtgtcgtgtctggtgatttgagggttatgtttgtttgtttgcattctcagaaatattcttaatagtttaa

SEQ ID NO: 372655 - DNA, 201 bp, Homo sapiens; identical to SEQ ID NO: 80710

SEQ ID NO: 372656 - DNA, 201 bp, Homo sapiens
tctaaactctcagctgttctcagtcatctctcattgtgaactcatgaaagtcaaacatgataaaacaatcataagaagttaaaaattagggttagaaaaaragtatgtattttaaacttgctgtcttctaaatgcaattttaagtttaaagaatcaatagaaattgatgttttataccaaagaacacttaagaccttgagt

SEQ ID NO: 372657 - DNA, 201 bp, Homo sapiens
gtattttttgaacatgaagtgagggtcgtattgatgagagatcactaaagaaggttaagcctcagcaaaagtcttccaaaaaatgggctgtgctaaaattkcatgtaatactctagcgtttgacacattaaactaaactgagttcataacacattttaagaagagttttctccgttgctcatttgaccattccttgctcct

SEQ ID NO: 372658 - DNA, 201 bp, Homo sapiens
ttgattctgagtcattaaaaattatttacaaacttgtggatgacattaacagtaaattatttgacatgcttatgatgtgattatttatactactttgttgsgttagtataataagatggtgaattttagtataatatggtgatgaataatcctgtatgacaggttattccttttgatagtgtttatgttcagaatatcttc

SEQ ID NO: 372659 - DNA, 201 bp, Homo sapiens
aacacattttaagaagagttttctccgttgctcatttgaccattccttgctccttcaggaaacagacaaggttatgtaggatggtgatcatgactggaaargaatcagatgacccatgatgaagtgccagattggagaacaaaatgtgcctctaggatggttggtgaagctgtacattcacaagaaagtaaataaactcag

SEQ ID NO: 372660 - DNA, 201 bp, Homo sapiens
ctaaatgctcagagctttctttagtgctttgacattttggggtttcagagattagtactgtaatttgggctaaaggctaggaatgggaaaggtaatggtgkctttctgatgtcacatgagggctggaaatccattacactaggaagggtgagtgctagttttatgcccatttctgaacttcttcccctagaatgtatttgc

SEQ ID NO: 372661 - DNA, 201 bp, Homo sapiens
gaatgcccaggtgtgtattgattatgtgtggattgtgtgataaagatatgatgatgtagttgagtatgtattcatataaatactatctggggatacatttrcatatcactgttaattgacacattaatatttgaaaagagctaattaggataaatccatatacagtggggaccagtatttcataatgaagagggaaagttt

SEQ ID NO: 372662 - DNA, 201 bp, Homo sapiens
tattggcgtctgccacacttccatagttgtaagttggtctattttatttttaacttgcatgaacatactcattggctatgtctttgggcagctttttaagraactgtaagtatgccattggttaatagttatttgatggcttgaaaaagttaatatttttagagctattaacgtacttatgcctggaaaaaagggtataac

SEQ ID NO: 372663 - DNA, 201 bp, Homo sapiens
caactacaaaatacccttactctaggcatttgaaaattattttcttgaacatctttcaaatgtagctttaaaaatccatctggcaacttgagcatagatayaggaagtaactgcaatgaattgcaacatatcacatatgtttaaatccatgtgttcataatgatacttaaaaaagagaactcacctttggagaatgctggg

SEQ ID NO: 372664 - DNA, 201 bp, Homo sapiens
acaaaagacaggttaatgagcgaaaaagaagtatatcaatgcatacgttgcatacacacacacacacacacacacacacacacacacacacgagtattcargtaactcgtaggggtggttaaaacttgggcttaggctgggcacggtgactcagccctgtaatcctaacactttgggaggctgagatgggaggattccttg

SEQ ID NO: 372665 - DNA, 201 bp, Homo sapiens
ttctcataattaggggatgagaggatgaaacattctaggaggtctgccataggtctttgttaaaccatgtttcaccttgttgaacttgtttttcatgaatrtaagttttgcttagtcatttaattgtgtagtctcaaggagtatttttaacaacttgggttttttttgttttttgtgttttttttgagatggagtcttgct

SEQ ID NO: 372666 - DNA, 201 bp, Homo sapiens
aaaactggattaccagatatggctcttttttttttttttttttttttgagacggagtctcgctctgtcgcccaggctggagtgcagtggtgtgaccttggytcactccaaccaccgcttcccaggttcaagcgattcttctgcctcagcctcccgagtagctgggactacaggcatgtgccaccacaccgagctaattttt

SEQ ID NO: 372667 - DNA, 201 bp, Homo sapiens
acttagacatacaaaagacaggttaatgagcgaaaaagaagtatatcaatgcatacgttgcatacacacacacacacacacacacacacacacacacacacgagtattcaagtaactcgtaggggtggttaaaacttgggcttaggctgggcacggtgactcagccctgtaatcctaacactttgggaggctgagatggga

SEQ ID NO: 372668 - DNA, 201 bp, Homo sapiens
aacttagacatacaaaagacaggttaatgagcgaaaaagaagtatatcaatgcatacgttgcatacacacacacacacacacacacacacacacacacacacgagtattcaagtaactcgtaggggtggttaaaacttgggcttaggctgggcacggtgactcagccctgtaatcctaacactttgggaggctgagatggg

SEQ ID NO: 372669 - DNA, 201 bp, Homo sapiens
tttttttcactccatggatgagtgttactgtaattattcctaactctgaccaccacttctgctgtctattaaccttgtcttttctctgcttttttttttttaatttaatttaatttttaaaatagagacagggtctcactatgttgcccaggctggtgggcaactcctgggctcaagctgtcttcccaccttggcctccca

SEQ ID NO: 372670 - DNA, 201 bp, Homo sapiens
gtgatactaccagacaagttcagagaatatcatgcttccagtctactgtaaaggtaaaatcttaagtaaatatgagtttttatgacaatctatttttgtcycagaagacatggtttaaagagttagacgaaattacttttgtgggtcttatgaattatttctttccacacacttgtagtcatttgcttcgtgtaagatcag

SEQ ID NO: 372671 - DNA, 201 bp, Homo sapiens
tgtatcacttgtaggtctcctgattgcttaagatgtggaatgcaagtaattttgcttgcatttttcaggcagaagaagctaggtaattttcccaaggatayagtgttatttaaatgaaaactcaggttatccctcaacagcttccactgcagggccaggctgctagctatagcttttctctagatatatttcagtgaggaa

SEQ ID NO: 372672 - DNA, 201 bp, Homo sapiens
acattgaatgccgtcctaatcccccaacctcatttctgttgtctctactagtttttccactttcatctctaattttgtcttttgcctttgctgttttttttcactccatggatgagtgttactgtaattattcctaactctgaccaccacttctgctgtctattaaccttgtcttttctctgcttttttttttttaattta

SEQ ID NO: 372673 - DNA, 201 bp, Homo sapiens
ctttttttaaagtgaggtttaataggatacaatttacataaaataaaattcaccctttttgtaaatttattgtgatttgaaaatactaaaattcatgattygaatttgtggtaggagaagtgttttatgtggaactggcagttatttagttgataaaagaagaaataatatttagtagtagaacatgataccttaaggctt

SEQ ID NO: 372674 - DNA, 201 bp, Homo sapiens
gttggggtacagtgtcatagttatctttgctttcctctaacaagtagctcagtttttaactttgtgtttatggttgggaggtgagcatggactgtggtagrcagaagggcaaagatagcatttacgtggtggcaaggagcaccttggctaggccggagcgctgggttcctgtgaacagacactagtaggggataaagcctg

SEQ ID NO: 372675 - DNA, 201 bp, Homo sapiens
taattttctttacagatgtttctatactttgaagatcatggactagtgacgtgctccgctgatcatctcattattttgtggaaaaatggagagcgagaatytggattgcgcagtttaagattatttcaaaaattagaggagaatggtgacttataccttgctgtctagtttaaggaattaaaaatacacatgcatgaacct

SEQ ID NO: 372676 - DNA, 201 bp, Homo sapiens
gttttctccttttggtgctaaaaaataaaaatattagaaagtagtctacacattaaagattgaaattcttaaactactgatgaagaaagggcaacgtgacwgatgttagcagactgacccttcttacagaaaacctacagatttatttgttcattatacaaatatactacaaatataccctaaagggaatctccataagtt

SEQ ID NO: 372677 - DNA, 201 bp, Homo sapiens
tctttcaaaatttagagtctgtcatctcaaatcctgatgctcctttatgaactaagtttatagaatattctaaatcctttgttgtcatttcaactatgttkacagcatcttcactgtggaaatgactgtctccagaaaccactttctatacacattcttaagcaacttctcatctattaaagtttgatcatgagattacag

SEQ ID NO: 372678 - DNA, 201 bp, Homo sapiens
gtgtcataccatcggccagaagaaccatgtagccatagaggctgtgaagctaactagtttatctgtaatttggtcctagttgtttcgcttattttatgtckttttttttttttcttagataaatctgttcagataagctccttatgaatccttcagatcgatgttcttgaggaaaacagtcaagctaaacagcaatgatga

SEQ ID NO: 372679 - DNA, 201 bp, Homo sapiens
acttccgcatgtctttgcagttgacggtattgtcagtttttaaaaatttcttatttcagattaatcctaaatccttgagattgtggattattgaatagccrtatatggtatatacgacattttggataattctgttttaacctggttctttggttaatcatgttatttgcttaaccaggtctcccattcctggcaagtttt

SEQ ID NO: 372680 - DNA, 201 bp, Homo sapiens
cagagcctcccttcctgatcatttgttactcaaattattcttttttgaagtatcttcctctcaccttaattttggattgttatctagtctgactgtgtcasatctttatttttcaatggctttgcctgtgataaaatcagttctttaacattattttcaccacattcacgaagtcctgcaatcttggaaagatttgccatt

SEQ ID NO: 372681 - DNA, 201 bp, Homo sapiens
gcctgtgataaaatcagttctttaacattattttcaccacattcacgaagtcctgcaatcttggaaagatttgccatttacattgtatttttgcatgtttmctacttggtaaattagtcagagactgatggatgaagacattggatgggtaggaatagatgttggtgttaaataacgatggagtggagactgactttctaa

SEQ ID NO: 372682 - DNA, 201 bp, Homo sapiens
attcacgaagtcctgcaatcttggaaagatttgccatttacattgtatttttgcatgtttactacttggtaaattagtcagagactgatggatgaagacaytggatgggtaggaatagatgttggtgttaaataacgatggagtggagactgactttctaagtggttaataaatgtgtggatatatatacttatttgtgtg

SEQ ID NO: 372683 - DNA, 201 bp, Homo sapiens
agtcagagactgatggatgaagacattggatgggtaggaatagatgttggtgttaaataacgatggagtggagactgactttctaagtggttaataaatgwgtggatatatatacttatttgtgtgtaggtacatatacagttgttatggtgacttttattttcttctatgaccttataactgtggagacttaaataacaa

SEQ ID NO: 372684 - DNA, 201 bp, Homo sapiens
tttacacaattatatttttaaatttatagaaaaaaatactcaaaattttctataaaaatatactaaaaattagcattttgttttagaaaataaaactatarttatggctgtactttcagtgcttgtttagattctgtgtgattgcttaagttaaattctgaataagtaattttaaatggaatgtatatgtatcttctatat

SEQ ID NO: 372685 - DNA, 201 bp, Homo sapiens
accactaataaggtttgatagttcttaatcttagtaattaaatgtcaccagtgatttttttttcttgaccctttctccctaaccagatttgcatctgctgrtgatgatggaattgtagttgtgtggaatgcccaggtgtgtattgattatgtgtggattgtgtgataaagatatgatgatgtagttgagtatgtattcata

SEQ ID NO: 372686 - DNA, 201 bp, Homo sapiens
  misc_feature (1)...(201): n = A,T,C or G
aagaaatgaacaagctgtagtggcctaaggagccactacatacactattagtctttagctgatagggtcttgtctgtatattcttgttatagcaaaaatgntttttgttctgttacttataagataccatttattaggtatctgaaaagtattagactggaaataggaggttaaggcttgttattgatggaaactccatga

SEQ ID NO: 372687 - DNA, 201 bp, Homo sapiens
ctgcccgccttggcatcccaaagtgctgggattactggcatgagccactgtttccggtcatattaatttttaaaagtatatgcttatctgaaagttctgtktaaacagtttcaagcattggtgaagttttggagtaagcccaaaagtataggtgtttcttaggctcttacagaaccaagatacagacttgaacatgcttta

SEQ ID NO: 372688 - DNA, 201 bp, Homo sapiens
atggtttttgttctgttacttataagataccatttattaggtatctgaaaagtattagactggaaataggaggttaaggcttgttattgatggaaactccrtgactattgctgttctttccagagttactctatcaggttgtataaaattgatgaaatgggaaaatgtggacttaaaaataatttattttactatctcagt

SEQ ID NO: 372689 - DNA, 201 bp, Homo sapiens
ccttggcatcccaaagtgctgggattactggcatgagccactgtttccggtcatattaatttttaaaagtatatgcttatctgaaagttctgtttaaacastttcaagcattggtgaagttttggagtaagcccaaaagtataggtgtttcttaggctcttacagaaccaagatacagacttgaacatgctttaaatgagt

SEQ ID NO: 372690 - DNA, 201 bp, Homo sapiens
atgggaaaatgtggacttaaaaataatttattttactatctcagtttgcttttcaatttagggaaacaacgatgagttggactggagaataatttacattytttttccccactatacagcagaagaaaccaaatggtcccaacccataaaaatctttggagcatctgagtctgatagaaaagtgaattactgtttgttcag

SEQ ID NO: 372691 - DNA, 201 bp, Homo sapiens
tgtgggtcttatgaattatttctttccacacacttgtagtcatttgcttcgtgtaagatcagatttttgagagcacatgtattaagtgttagaatgtttcmatttgaaattagagcaagggataatcccaatagcaagataaggaaaaaaggtagtacctggtatgttttttgtaggtagttccaggaagagatattactt

SEQ ID NO: 372692 - DNA, 201 bp, Homo sapiens
gacctgtgtgtgtggaaccgaaaattagatctcctgtgtaagactagccacctttctgatacaggtaaaaaacatcaaggtaattttgaactatgattgasagactagaagacacagcagatcttcagagagactttccataagtagaaaggtcaatataggggatttttctttttcagttctgaagataacaggtagcca

SEQ ID NO: 372693 - DNA, 201 bp, Homo sapiens
ctttgttttgcaagttatgtttaagtactatatattaaatcattacaatactgccatttatcagtgtctcaagagttaacagaaggctttgagggtatctrtgggaaagccttgagaaggccatgggttactattggtgagctgttcatcatttgggttttccaaattactggaggccagattgttaatagtgttattaga

SEQ ID NO: 372694 - DNA, 201 bp, Homo sapiens
taagtttctaacctgatatacatttcaaataaattttgcagtgtttaactgttcttcagagactagatgtttggctttctggtgggaatgacctgtgtgtrtggaaccgaaaattagatctcctgtgtaagactagccacctttctgatacaggtaaaaaacatcaaggtaattttgaactatgattgacagactagaaga

SEQ ID NO: 372695 - DNA, 201 bp, Homo sapiens
aaaaatgtcaagaaaaggtttaaatggggataaactctctatacatacatacatatatacatacacacatatatgtatgtttgtgtgtgattatgatacartgtaaacaagggcataaaattctctcagatggttaggtcagagttgctttattactactctgtagaggcaaatatgggataaagctctctttttcagtat

SEQ ID NO: 372696 - DNA, 201 bp, Homo sapiens
atttgggttttccaaattactggaggccagattgttaatagtgttattagatccttatgtcatgatgtcctttcataagccctgcttgatttatggactgstggagcttttacaagcagttattctgtgtttggaaataagcaaagacaatcttagtcaatgtgatacaatggaaggagccctggactaaaacacagggca

SEQ ID NO: 372697 - DNA, 201 bp, Homo sapiens
tgctacatctggattgttgggcttctagtattttcacatataatttagtgaaagatttttaaacaagctgttttctgcatttagaattcttctcttgctayccaccctgctgttctcccatgtcctctgccttctctgtaccattcctttgccttccttgcagcaccatttcctccttcttgtacatgggaaaatacaaaa

SEQ ID NO: 372698 - DNA, 201 bp, Homo sapiens
gtcagtcctttgatggatgggaaggataagcaaatgactagaccgttttctacacttgcatatatattataaattacatatatatcataatggaaaaattraacaggtttttttttttttgccaacacgtggtggttctaatatatcaactcttttattcatactgacagaagcaaaattgtaacatgccttgtagaagtt

SEQ ID NO: 372699 - DNA, 201 bp, Homo sapiens
ccgttttctacacttgcatatatattataaattacatatatatcataatggaaaaattaaacaggtttttttttttttgccaacacgtggtggttctaatwtatcaactcttttattcatactgacagaagcaaaattgtaacatgccttgtagaagttatagttacgctaaaatcattaacctctttacttaaataagtg

SEQ ID NO: 372700 - DNA, 201 bp, Homo sapiens
atactttcgtaatttgaaaaggacatgatctcagagacttgtcacttctcagatgttagtgatgctaatctttgagcatccacagcacctggtccagtggygtatttttaaaacactcagtacattgacggtaagcctgtttataaacaagtctctctcccactctagactgagcatttgtgactgggccttattcacatt

SEQ ID NO: 372701 - DNA, 201 bp, Homo sapiens
gtactgtaatttgggctaaaggctaggaatgggaaaggtaatggtggctttctgatgtcacatgagggctggaaatccattacactaggaagggtgagtgytagttttatgcccatttctgaacttcttcccctagaatgtatttgctgcagttggaaggggtttatacgtgtatagccttcaaatgaagcgtgtgattgc

SEQ ID NO: 372702 - DNA, 201 bp, Homo sapiens
ctgctccgcgcgcgtccaccaggggccgctcgagctacctaagctccgtgcgctacccggcggcgctcccgcgcgtgctcactcggagcagcgcgcgcccsgcaatcgccgcagccgcccccgccgtcggccgccgcaccccaagcgactgcccaaactaagcctccgtggctgggtacgggagcgctttggggacaaaaa

SEQ ID NO: 372703 - DNA, 201 bp, Homo sapiens
gttatgtagtggggggagaatatgatccatttttctttgtaccactctttaaaaacaaaacaaaagattaggataggaacaggacttagaaacactaatayattcaaagattgtttctttgtatcccaactttattttgaaaaaagttaaatatacatgataaagacagtatggtttcagaaaagatagagactagatcac

SEQ ID NO: 372704 - DNA, 201 bp, Homo sapiens
gctgaggtggaaggatcacttgagtccaggagttcgaggctgcagtgagttgtaattgtgccactgcactctagcctgggcgatagagcaagaccctgtckcaaaaaaaataataaaataaaaatttttaaaaatggtgaaagacaaataatttcccccaaagatcaggcacaagataaggatgtctgctgtcagcacatc

SEQ ID NO: 372705 - DNA, 201 bp, Homo sapiens
ggagttcgaggctgcagtgagttgtaattgtgccactgcactctagcctgggcgatagagcaagaccctgtctcaaaaaaaataataaaataaaaattttwaaaaatggtgaaagacaaataatttcccccaaagatcaggcacaagataaggatgtctgctgtcagcacatctgtttaacattgtactggaggttctagc

SEQ ID NO: 372706 - DNA, 201 bp, Homo sapiens
cataaaattctctcagatggttaggtcagagttgctttattactactctgtagaggcaaatatgggataaagctctctttttcagtatcagtgtaatcttygcaaaaatagaatttaaaatactctattagaccactcctaagacactatagcaatattttgaggcagtgattaaaattacatacagaagttagtagctgg

SEQ ID NO: 372707 - DNA, 201 bp, Homo sapiens
tattcccaaataacatgatcttgtgtatatagaaaatcctaagtccacaaccaaactattgaggctagtaaatggatttagcaaggtttcaggatataatrtcaacacacagaaatcaattgtatttctattcactagcaatgaacattccaaaaattaagaaacaattccatttacagttgcatccaaaagaataaaata

SEQ ID NO: 372708 - DNA, 201 bp, Homo sapiens
atactcagaaatagatttagtctgggcggggtggcttatgcctataatcctagcactttgggaggccaaggtgggaggattgcttgaggtcaggagttcaygactaacctggccaacatagcaataccccatcactattaaaagaaatttgaagtagtatgagacttatataccaaaaactacaaaacattgttgaaagat

SEQ ID NO: 372709 - DNA, 201 bp, Homo sapiens
aagctacagtagtcaagacagtgtgatattggcataatgacagacatgcagatcaatggaaccgaattaaaggcccagaagtaaagtctcacatagccaaytgattttttgacaagagcgccaagaacctttaatgggagaaagaatagtctcttcaaaaaatgatgctgtgtcaattggacatccacatacaaaataatg

SEQ ID NO: 372710 - DNA, 201 bp, Homo sapiens
gttgtgtaaaatatatttttatcctgaatcaggaggagaagactccactcaagaacaaccttttccaatgctcttgggctgttttcctgaactgtgtttgrtgagcacgctgatacctagaagcagacccttacgactttacagtagcatttgtggggtcattaactttgaataaatgcctaaggatgacctctttttaca

SEQ ID NO: 372711 - DNA, 201 bp, Homo sapiens
cagaatgaaaagtttttgtgcttcaaagtgaaaagacaacatacagaattggagaaaatattttcaaattgtatatctgataagggacttgtgtctacaayatatgaagaattcaataaaaaagcaaatactccaattaaaaatagacaagatttgaaagaaagaaatttctccaaagaagataaacaaatagcaaataag

SEQ ID NO: 372712 - DNA, 201 bp, Homo sapiens
aaaatactaccaggggcgcaaagataatatttgatgtctttttaaaatggctacacgtttattattcaatttgatttttagtcactcatttaatgcatgargaatccaagataaaggttaaactacttcctaaagaccacctggctagcaacaggcagagccaaaatcagaacttgggtttctagactaagtgcattatac

SEQ ID NO: 372713 - DNA, 201 bp, Homo sapiens
agaatgggtttattgtgggacataactactttaagtcaaggcacatctgtataataaaaatataacaaaaggcattggccatgataaggttaactagtttrtgaaattagtttcaatttttaatacatgcatatacatttgtatacgtagtacatacatgtatgtaaatgtgttttcagacatggtgtaaaatgtatttct

SEQ ID NO: 372714 - DNA, 201 bp, Homo sapiens
agtgggcgaggagagtactattaaaggtaaagggcttatatggtacttgaaacactcactttcctgactaccaaatgtatagaattgagaagacttgggcrttatttattctaaagatacagagaaactaaggtcatagtttcaatttgatttaaaaaggggtttaagcaattgtgtattagtaatttattactgagtaac

SEQ ID NO: 372715 - DNA, 201 bp, Homo sapiens
atcttcagatttttaagattgtgtatttgtacatatatgtatgtaacaaccttgtacatttatgtatttccttcaggataaattcctagaagtggaattgktggatcgagatttacatttttcaaggttttgatacatattagcaaattaatctttgaaaaaaatactaatgtatagtagggcattaggcaatacaggaat

SEQ ID NO: 372716 - DNA, 201 bp, Homo sapiens
ctttttcagttctgaagataacaggtagccatattcaattcagatcggggttgtgtaaaatatatttttatcctgaatcaggaggagaagactccactcargaacaaccttttccaatgctcttgggctgttttcctgaactgtgtttggtgagcacgctgatacctagaagcagacccttacgactttacagtagcattt

SEQ ID NO: 372717 - DNA, 201 bp, Homo sapiens
aaacactgtgaaaaagagttcttttgaagatctgacacatttcctagtgaggcaaagaaaattaaaaattttaggagtgtttctcagtctgctggcatctkggggcaagataaattgagtgagaattgttggattccatcttataggacttgggagtgatgctcttgaagcactttagatctgttttgctgtgagagatta

SEQ ID NO: 372718 - DNA, 201 bp, Homo sapiens
tttttggaggtattagtgctttggttgaaatacctaagaactgtgttgtggcagcagttggcaaagaactgagtgagtatgaatttttttctttttgtgtrttttgaacgagaattgtatacacatgctggaaggactaaagtaattttttatttaagggacattgcgtgtgccccactcttggcttcttgggattgttga

SEQ ID NO: 372719 - DNA, 201 bp, Homo sapiens
ctctgatctgaaaaaacaaatctcttagcatcaggggctcagaaaatgtttttaaagggcaattaacttttctaaatgtaatcacaagaaatgtttatgarttgtacccttcgaggagaaggagttggggaggcttttctctattttgtgactttctatactgtttaatttttctaacggcatgcacgttatttttattaa

SEQ ID NO: 372720 - DNA, 201 bp, Homo sapiens
ttagtacattggctagcagtgttcattaatgccctggcattgggcctcggctgcattgctgattgcagagtactaatcctgagagtcaaggggatcattcmagatttaagattccagcaagccttgggggcatgctttggttcagttactataggtctgagttgagtttgtagtcttggaggctgtgtgagaaaggttgga

SEQ ID NO: 372721 - DNA, 201 bp, Homo sapiens
ttctttagtgctttgacattttggggtttcagagattagtactgtaatttgggctaaaggctaggaatgggaaaggtaatggtggctttctgatgtcacaygagggctggaaatccattacactaggaagggtgagtgctagttttatgcccatttctgaacttcttcccctagaatgtatttgctgcagttggaaggggt

SEQ ID NO: 372722 - DNA, 201 bp, Homo sapiens
tggccacaaaaagctgacagccacatttttaaaaatatattttgtttacctttaggctcaccctgtgtcactaaagataatattcgtaaagtataacaatyttctttgggtgacaaaacagtaactgtcttaccatcccaagcatcaaacatgtctgttatgaagtagtcaatgaaagagatctgagacttggggatgcta

SEQ ID NO: 372723 - DNA, 201 bp, Homo sapiens
tgtatttgctgcagttggaaggggtttatacgtgtatagccttcaaatgaagcgtgtgattgcctgccagaaaactgcacatgactccaatgtcctgcacrttgccagacttccaaacaggtacaagttcccatctgttctgcaatagatgaaagcaagtcacagttcccagggctaccagtgtaatttctcaagtggcca

SEQ ID NO: 372724 - DNA, 201 bp, Homo sapiens
cagctgagtcttatcctgtggtcttcagaaatgtatatgtcatttcagagaaaactcttgttttttttcccgagagggagttttgctcttgttgcccaggytggagtacaatggcgcaatctccactcactgcaacctctacctcctgggttcaagcgattctctttcctcggcctcccgagtagctgggattacagatac

SEQ ID NO: 372725 - DNA, 201 bp, Homo sapiens
ggcacaaattcagtgagtgggtaaataaacttgacctctcatggtagaagtaactaagtcctattgctaatggtggtggcaatattgggagggggaataayttgtggccagtttgtgatctaccacagtgagtctaagatagatgaagaagcctgctttttggcttttgtaatacagtgatgatatgacttcatgattcac

SEQ ID NO: 372726 - DNA, 201 bp, Homo sapiens
tactgtccacttagcccttgactaaaataagtctggaacctcttcacatttaaattttgtttttctgatctcatgttattgtaagtacagagcacagtaaktttggaaatgattctttttctaggtttttttaacatgtggggatttggaagagtcagcaaacaagccagccaacctgttaaaaagcagcaagaaaatgct

SEQ ID NO: 372727 - DNA, 201 bp, Homo sapiens
caatgtgtatcagaaagagttctcttttctattgactgaaaaaccttcttttgacaaccacagtttgaatatgagtagctgtcaggattaaataacctggwtagagatttgtagtttggtaaaatattgtcagagacacagaaagaagcatggcatgacctatcttctagagagaaatgtgagaaagaaaagatactttcg

SEQ ID NO: 372728 - DNA, 201 bp, Homo sapiens
  misc_feature (1)...(201): n = A,T,C or G
gtttttgttttgccaagcagctacttactaggatctcttcccctggcaccccactctgcttccgttagagccctttaccactccacattcctaaaagtatncacctttatcttcttccatcctttaactaactttcatgttttaatctatttgaaacttattttggtgtatggtacaagataaggttcttttacttttatt

SEQ ID NO: 372729 - DNA, 201 bp, Homo sapiens
cctggatagagatttgtagtttggtaaaatattgtcagagacacagaaagaagcatggcatgacctatcttctagagagaaatgtgagaaagaaaagatamtttcgtaatttgaaaaggacatgatctcagagacttgtcacttctcagatgttagtgatgctaatctttgagcatccacagcacctggtccagtggtgta

SEQ ID NO: 372730 - DNA, 201 bp, Homo sapiens
atttaatggtatatgcctaggaatcagaagctttttaaaaaagaagttgcttatgtcttcactgagttgaagttaaacttggatttgcagcttattctgtmgcaatgcttacatgagtaagagacatgagtagagaaagctgatgttggaggtgattgagggatgtgggctagtcactgattagggagggagtgagttgag

SEQ ID NO: 372731 - DNA, 201 bp, Homo sapiens
gctgcacctatcaacctgtcctctcagtttcctccccttccccacaacaggtgctggtgtgtgttgttcccctctctgtgtccatatgttctcattgttcrgtttccagttagagtgagaatatgcggcatttgattttctgttcctgtgttagtttgctgagaatgatggcttccagcttcatgactatgtccctgcaaa

SEQ ID NO: 372732 - DNA, 201 bp, Homo sapiens
tcatgactatgtccctgcaaaggacatgatctcattcctttttatggctgcatagtattccatggtgtatatgtgccacattttctttatccaatctatcrttgatgggcatttggattggttccatatctttgttcttgtaaatagtgatgtagtaaacatacatgtgcatgtgtctttgtagtagaatgattgatatcc

SEQ ID NO: 372733 - DNA, 201 bp, Homo sapiens
aaaatggctacacgtttattattcaatttgatttttagtcactcatttaatgcatgaggaatccaagataaaggttaaactacttcctaaagaccacctgkctagcaacaggcagagccaaaatcagaacttgggtttctagactaagtgcattatactcttctgtcttaccctaaatatgtaataatttaaataaattac

SEQ ID NO: 372734 - DNA, 201 bp, Homo sapiens
ggaatccaagataaaggttaaactacttcctaaagaccacctggctagcaacaggcagagccaaaatcagaacttgggtttctagactaagtgcattatastcttctgtcttaccctaaatatgtaataatttaaataaattacatttatttgaaataagactagcagttgtacattttctattaaatatatagtgtgtaa

SEQ ID NO: 372735 - DNA, 201 bp, Homo sapiens
gttaatattaaaatctttccactatccagtattaaacaccagtccacatctttctaggtgattttctgggcctatgtatgtgtgtacatgtgtattaatayggtttactgttttgtaacaatatgtcataaatatatttccatatctaagtttatattgttaagcatacttttataacttaatttttaataacagcattac

SEQ ID NO: 372736 - DNA, 201 bp, Homo sapiens
tgtaacaaccttgtacatttatgtatttccttcaggataaattcctagaagtggaattgttggatcgagatttacatttttcaaggttttgatacatattrgcaaattaatctttgaaaaaaatactaatgtatagtagggcattaggcaatacaggaatgtgctgatttcttatgcttttgccagtactgtgttgggtat

SEQ ID NO: 372737 - DNA, 201 bp, Homo sapiens
ttccttcaggataaattcctagaagtggaattgttggatcgagatttacatttttcaaggttttgatacatattagcaaattaatctttgaaaaaaatacyaatgtatagtagggcattaggcaatacaggaatgtgctgatttcttatgcttttgccagtactgtgttgggtattttcctgttttatatttcctgattca

SEQ ID NO: 372738 - DNA, 201 bp, Homo sapiens
ctaagaatgaaatttggggacttgaatgattcaaggtcaaatattaaacattagctccttcaccaatacctgtcattgtcattagaaaggaaggcctcttrtttacgctactgtgattcacagtgtcctttgtcggtcaagaggccccctctgtggcttggctttagctgtcagatggaagcctcaaacttttgcacttta

SEQ ID NO: 372739 - DNA, 201 bp, Homo sapiens
ttttaactttgtgtttatggttgggaggtgagcatggactgtggtagacagaagggcaaagatagcatttacgtggtggcaaggagcaccttggctaggcyggagcgctgggttcctgtgaacagacactagtaggggataaagcctgggaacgtggtttggggtcagattatggatgtccttgaatgtaaggctgaggag

SEQ ID NO: 372740 - DNA, 201 bp, Homo sapiens
gcattatttagtacctgattacataatctctcattggtacctttattgtttcaattatgatttgcttttcagaatcttcttgagggtagggaccataaacstagtgctgacacttaatacctatggattgagtatatctacttttatagagagctgaagccagtgtttatcttgggaaatttagaattcagacattttttc

SEQ ID NO: 372741 - DNA, 201 bp, Homo sapiens
cccaaaatattacgtatagatggtgcatggcacaacatactgcatgggcttacacccagaaaatttggattttaataaaaattttaaacatgtatataaactttttttttttttttaagaaaagcttgtccaagggcattcaaatttaatggcttttatataatacttggtgtagtgcctcgtggctgcctctgtgagcca

SEQ ID NO: 372742 - DNA, 201 bp, Homo sapiens
gggtatgttagttaccgattgctctgtcagctgtcacaccaaacttagtggcttaacacaaccccatctatttagctcattattctgcaggatggcaattsgggctaggctcagctgggtgagtctgtctttgcaccaggagcaactgatcttggctagattcacttatgcctctgtcagctggtagattggcgggggctg

SEQ ID NO: 372743 - DNA, 201 bp, Homo sapiens
attacataatctctcattggtacctttattgtttcaattatgatttgcttttcagaatcttcttgagggtagggaccataaacctagtgctgacacttaayacctatggattgagtatatctacttttatagagagctgaagccagtgtttatcttgggaaatttagaattcagacattttttccatagccattatacagt

SEQ ID NO: 372744 - DNA, 201 bp, Homo sapiens
ccacaactggacacccaacaagaaataaaactctgtcaaaaatcaaatgacatttctattcatcatttcacatgtgatgaagaggtaaaaaatgtatacaytatctataaacttgcctttgacatatataacccaatttctgattttaaaaatttaatcccatgttggacataaaaaaggtatcattcatggtttcaggtt

SEQ ID NO: 372745 - DNA, 201 bp, Homo sapiens
cagtgtttatcttgggaaatttagaattcagacattttttccatagccattatacagtataagtaatggttaagtaaaaccaatacttgaaaaatcagatkatgaaaaaatctggaagaactatgagaattcatgtactttacaaaaatagctattctgtagttgaacaatattaacaaaattctgattaaaatattagat

SEQ ID NO: 372746 - DNA, 201 bp, Homo sapiens
ttttagatttctttgattattaaaggagttgaacatcttttcacgtttactgaccatttgtatttgttttgccttttcaggtccttttcccatttttttttctgctgtatttatcttgttcttaataatttccaagaactccttatgtatcaagtataataaacctgttttgtcatccaagttgcaaatttttcccagctt

SEQ ID NO: 372747 - DNA, 201 bp, Homo sapiens
ttaaaatattagatattatttgtatgtgacttaccaatactgaaaaatgaaatgaagttctacacccagatccaaaggagtctttaaggcacatatctcasacgcacatgtgttaatgtggtattagacacttctctgcttttcggggtccctataatcagttttaattttctttacagatgtttctatactttgaagatc

SEQ ID NO: 372748 - DNA, 201 bp, Homo sapiens
cagatgggtagattgcaaaaattttctcccattttgtaggttgccttttcactctgatggtagtttcttttgctgtgcagaagctctttagtttcattagwtcccatttgtcagctttggcttttgttgcagttgcttttggcatctttgtcatgaagtctttgcccatgcctgtgttctgaatggtattgcctaggtttt

SEQ ID NO: 372749 - DNA, 201 bp, Homo sapiens
gcttgagacagacttcttttatgtagttctttgcagtgtccattgagacactataaccagccttgtaacaatatgttttctccttttggtgctaaaaaatraaaatattagaaagtagtctacacattaaagattgaaattcttaaactactgatgaagaaagggcaacgtgactgatgttagcagactgacccttcttac

SEQ ID NO: 372750 - DNA, 201 bp, Homo sapiens
accgacctttgtcagatgggtagattgcaaaaattttctcccattttgtaggttgccttttcactctgatggtagtttcttttgctgtgcagaagctcttyagtttcattagttcccatttgtcagctttggcttttgttgcagttgcttttggcatctttgtcatgaagtctttgcccatgcctgtgttctgaatggtat

SEQ ID NO: 372751 - DNA, 201 bp, Homo sapiens
gacactataaccagccttgtaacaatatgttttctccttttggtgctaaaaaataaaaatattagaaagtagtctacacattaaagattgaaattcttaamctactgatgaagaaagggcaacgtgactgatgttagcagactgacccttcttacagaaaacctacagatttatttgttcattatacaaatatactacaaa

SEQ ID NO: 372752 - DNA, 201 bp, Homo sapiens
tggtgtgtgttgttcccctctctgtgtccatatgttctcattgttcagtttccagttagagtgagaatatgcggcatttgattttctgttcctgtgttagwttgctgagaatgatggcttccagcttcatgactatgtccctgcaaaggacatgatctcattcctttttatggctgcatagtattccatggtgtatatgtg

SEQ ID NO: 372753 - DNA, 201 bp, Homo sapiens
agcgattcttctgcctcagcctcccaaatagctggaactacaggcgcatatcaccatgcccagctaatttttgtatttttagtagagacggggtttctccrtattggccaggctggtctcgaactcctgacctcatgatccacctgcctcagcctcccacagtgctgagattacaggcatgagccaccaagcccggccggc

SEQ ID NO: 372754 - DNA, 201 bp, Homo sapiens
ttatagggtcattctggtccagcagtgttttataactggcttccttctcttactagtcacggaaattattagagagtgttgcattttcctaatacggcccycctcagcacatgacatttaagtaaacaactctgtgtaagaggcagttataatagtttatataatataaactatctgatacacatatcatctgaaagcctg

SEQ ID NO: 372755 - DNA, 201 bp, Homo sapiens
tgtttacgctactgtgattcacagtgtcctttgtcggtcaagaggccccctctgtggcttggctttagctgtcagatggaagcctcaaacttttgcacttyaggtcatctagtgtcttccagtgtttgtagttgtcagccaaatgttgcatcagggctggcagatgtgcaaaggctgcaaagacagaaaagaatcaaaaga

SEQ ID NO: 372756 - DNA, 201 bp, Homo sapiens
gcttaggaggagcagcggcagcatccttgttagtgagcatttcctgtatttcaggcactgtgctaaacactggctgctggagtttacagagagagatgaawacagtccttgccctcatggatcttacccttgagtggagagaaggggtatagacctaataggctgttaccctaggctgcatttgatggacccaagtaagca

SEQ ID NO: 372757 - DNA, 201 bp, Homo sapiens
acctgacatcatgtgacaggttgcagtcaaaattttgtttaacgcacaaaattaccaaaaatattgtataaaactaccttcaggctatatgtataaggtgtatatgaaaaataaatgaattttgtgtttagacttgggttcagtccccaagatagctcattaggtatatgcacatattccaaaatccaaaaaaaatcagaa

SEQ ID NO: 372758 - DNA, 201 bp, Homo sapiens
ggctgtgttctaacttaggtgtcataccatcggccagaagaaccatgtagccatagaggctgtgaagctaactagtttatctgtaatttggtcctagttgyttcgcttattttatgtctttttttttttttcttagataaatctgttcagataagctccttatgaatccttcagatcgatgttcttgaggaaaacagtcaa

SEQ ID NO: 372759 - DNA, 201 bp, Homo sapiens
gtgttctaacttaggtgtcataccatcggccagaagaaccatgtagccatagaggctgtgaagctaactagtttatctgtaatttggtcctagttgtttcrcttattttatgtctttttttttttttcttagataaatctgttcagataagctccttatgaatccttcagatcgatgttcttgaggaaaacagtcaagcta

SEQ ID NO: 372760 - DNA, 201 bp, Homo sapiens
aaaactttaggccaaagaggtaaaataaaaacagctgttgggagtgaaaaatggctgtaggaatttagttacaagtacttcacaaaaacattttcatcacwtttacataatatagcattacaatacaaagctggctgctgtcctgaccaagcaagttctcttatcatctaacaaaaataatttagatacatttctttgcat

SEQ ID NO: 372761 - DNA, 201 bp, Homo sapiens
tcatctagtgtcttccagtgtttgtagttgtcagccaaatgttgcatcagggctggcagatgtgcaaaggctgcaaagacagaaaagaatcaaaagaaacyggtgaacttagaccccaggagcatttataagcctgggggtgtctgggacaagtttgggatcagaattagaggaggcacaccctgggcgaagcatgaggac

SEQ ID NO: 372762 - DNA, 201 bp, Homo sapiens
gatgattctaggacaggtgcttgcaaaaatttcaaaggctactactgcatgtgagtcacgtgaggaatgagcaagggactggagtaacatgaccttgattstaatattgactccatgtttcatttcttgtgtgactttaatctctttaattttaaattccttatctggaaaatggcaatgatgcttgcctttcttaacacg

SEQ ID NO: 372763 - DNA, 201 bp, Homo sapiens
ggagagaatcaatttatagcatttgagctaatgtaacgagtaacatgtggctttcctaaagggtgcttttagtttgcgttgtaacgtcatgctaaattgtratttttgtcagttcctgctaagagctgaataaaagcagttgagggctccactgatttctttcactgcaaatttagcattggccctcagtggtgcgctctt

SEQ ID NO: 372764 - DNA, 201 bp, Homo sapiens
cttaatactgccctaatgtagaactgccacttcatttcaagtaagatagagattttcttgttttgagggaaaacttactttctggtaatctgaatgaccaratggcctaatgaagtattcatttatattgtctataattctgactgatacacaaaatttgtaccgtcagatgtcaaaccaaagtgttctttacccttgatg

SEQ ID NO: 372765 - DNA, 201 bp, Homo sapiens
cagtgagccgagaacatgccactgcactccagcctgggtgacacagcaagactgtctcaaaaaaaaaaaaaaaaaaaaaaagttttttcctaagaaacaartgccaaagtatgaaaattcaaaaaatacaaaattttaatcttatttaacaaaatttaggttatcactagctatgccctgacttccaaaatgaataaatga

SEQ ID NO: 372766 - DNA, 201 bp, Homo sapiens
atgcattgcttttaagaatggtcttaatcaccattatttaggagctggagatagctgacagtaagggcagtgtgaataatgttgactatatgacaacagtmaacagaggatgcatgaagggttgtggttatatgtgtatacagttaaagccttaacagaatcgaattccaggggcctttatcaaattcatgaacagagtcc

SEQ ID NO: 372767 - DNA, 201 bp, Homo sapiens
ggggcagagagagaccaagaatgtttctctagtagtgggagtcctccatggaaacttgagtgcaggggaatggaggttcacctaatagaagtcacacagakttttttggtattctaatactgtaatctttttttttttttttaattatactttaagttttagggtacatgtgcacaatgtgcaggttagttacatatgtat

SEQ ID NO: 372768 - DNA, 201 bp, Homo sapiens
ttgaaaattatgaaatgcgtaagcttttaacatgtagaaatccagatacattaatatttgctgcaggcatcattgcctgtagtgaaggaataagatcagtkgaggtaacagattagctgtgagaactaataacagtgtaatcagggccctaaggaatttcttaaattgttcttccctgtttcatagccaaagaacaaaaaa

SEQ ID NO: 372769 - DNA, 201 bp, Homo sapiens
tgacctatcttctagagagaaatgtgagaaagaaaagatactttcgtaatttgaaaaggacatgatctcagagacttgtcacttctcagatgttagtgatrctaatctttgagcatccacagcacctggtccagtggtgtatttttaaaacactcagtacattgacggtaagcctgtttataaacaagtctctctcccact

SEQ ID NO: 372770 - DNA, 201 bp, Homo sapiens
ataaaacagtgtcagcttcttaggaattttcctgagtgaaagtgttgagacctgaacacttttaaaaagcatctccagcttcgttgataaaatctaggctrtctttgcagtgtcacctgaatttcctcatttctttttttttctttgagacagcatctcactctgttgcccaggctggagtgcagtcttgggtcactgtac

SEQ ID NO: 372771 - DNA, 201 bp, Homo sapiens
gacacattcagtatgggttttagtagatcatctcaaacatctcaagcatttgaaagaaatagtttaaagtagtatgaataaggcttttttttggagatggstttttcagtatggtaggtatttttcacttaatgaaatgcttgtttttagagcaggagtagtattttatcctcttagagcattgtaataaaattttatctg

SEQ ID NO: 372772 - DNA, 201 bp, Homo sapiens
attcttagcttccagcctattccttcactgggcaagccccttccccttacttggggcattttctccctttgaagctttttctgaatttctgtgacatgtcrtagtctatactgcattatttagtacctgattacataatctctcattggtacctttattgtttcaattatgatttgcttttcagaatcttcttgagggtag

SEQ ID NO: 372773 - DNA, 201 bp, Homo sapiens
gcgcaccctggagctgcagacccccggccccgtcccacggctagctgaatcgtgagatcctggctcagggacgctcagctggtcagcagtcctattgggasctgtgacaacttagggcttctggctaccgaaactatcttcatttccacttaaaaagtatacgatttagctagaaacgaacgagttgtgaccgcagctttc

SEQ ID NO: 372774 - DNA, 201 bp, Homo sapiens
gattaaaatattagatattatttgtatgtgacttaccaatactgaaaaatgaaatgaagttctacacccagatccaaaggagtctttaaggcacatatctsacacgcacatgtgttaatgtggtattagacacttctctgcttttcggggtccctataatcagttttaattttctttacagatgtttctatactttgaaga

SEQ ID NO: 372775 - DNA, 201 bp, Homo sapiens
gtgaccgcagctttccacttttggtttatttgaattggtgtctcttcctggcgtctactgatacttggtcagggaatataaaattaatttacttatccaasaaccgaaaaaggatataattatttttaaaaagtaatctgcttcaaggtcaagaacatgattttctaattaactgctgtttttggtttcatagtcacactt

SEQ ID NO: 372776 - DNA, 201 bp, Homo sapiens; identical to SEQ ID NO: 80716

SEQ ID NO: 372777 - DNA, 201 bp, Homo sapiens
gtatttgtttagattgttaaaagtaagaaattggattgttgagagtaggcagtcttctcaattttaacttccgcatgtctttgcagttgacggtattgtcwgtttttaaaaatttcttatttcagattaatcctaaatccttgagattgtggattattgaatagccatatatggtatatacgacattttggataattctgt

SEQ ID NO: 372778 - DNA, 201 bp, Homo sapiens
ggaagacagaataaatacaaaatcaatgctttgtggtggtggttttttttttggaaaacatttatgcatgttttaaatttatatatttcttcatataaatstaattgagttgtataactgctgtgaatttgtacattatcggaacctatgattgtccctaatttatgcaataactttgtatccaggcttctcgtttaagca

SEQ ID NO: 372779 - DNA, 201 bp, Homo sapiens
tttatctttgtttttattgcatttgcttttgggttcttggtcatgaaatccttgcctaagccaatgtctagaagggtttttccaatgttaccttctagaayttttatagtttcaggacttagatttaagtccttaatccatcttgagttgattttttgtataagatgagagatgaggatccagtttcattctcctacatgt

SEQ ID NO: 372780 - DNA, 201 bp, Homo sapiens
tctacccatcagcagtcactccccaatacctcccttctatacccatgacacccacacttcctttacactttgaataaaattgcatttggggtccttccccrtcttccctatcttcagggctaatctgctctgctgaagtgctgatggacattaggaaaaacctgtgagaaaattatatgcccaataaatagaaccagaagg

SEQ ID NO: 372781 - DNA, 201 bp, Homo sapiens
ccatgagcagccgcgtgcacgaagccgtgaaggccatcgcgctctgccacaacgtgactcccgtgtatgagtccaacggtgtgactgatcaggctgaggcygagaagcagtacgaagactcctgccgcgtataccaggcatccagccccgatgaggtaaacctgggcaggtgcagcaaggcatggggaggccctgcttgtt

SEQ ID NO: 372782 - DNA, 201 bp, Homo sapiens
tgacttcagtccataacatgagctttgtgacaataatggatttgttccgtgtgtgacttgacggtggtgctggctcttgctgagtctgtgcgttcagctcyggcagtgtgcttctgcagggagtgagtccggatgcgatggcacatgtgtttagagtccatgtttttataaagatacaaggagccttacatctgtcctgtt

SEQ ID NO: 372783 - DNA, 201 bp, Homo sapiens
agattttcatagtagaaaaaagtgaaggcctgtattagcaaaagaataaaatataaatcacctctgctctcactaccaagtgataatcattgttaatagtwtgggatatacttttttctagagtgcttttgattttagaaaaaggggagtttggtctactaaaatctgcctttacaaaaaattggagcagtgttttgaata

SEQ ID NO: 372784 - DNA, 201 bp, Homo sapiens
gcctgcgttgtgacacctagagtgtctccagacattgccacatgtctcctggagggccacattgccctgttgagagtactgggctgagccttgttctctaygtacagtatggctgggggacttgggaaatcactctcatcccagcagcagttataccactgaggggtcctttccatgtgtcagtctctgtgctacatgctt

SEQ ID NO: 372785 - DNA, 201 bp, Homo sapiens
gagttgtcactgcctatgattcttcaccagctccaacagctgcctccttcaacagccccccttcccctgcccattaaagcttctttctaaatatctgtgartggatattaaggacctcctaaattggatggttggaatttattcctggactacatttgcatctctttgtaaggcaatttcaccagcctggccaatacggtg

SEQ ID NO: 372786 - DNA, 201 bp, Homo sapiens
tttgtgtatctggtagacgaagtgaatgttgaattttgggattctatccaaaaactttgcctggggagaaaaatctctttcctgtgagacagacagacagmcacacacacacacagacacacacacacacaaatattttttcaaggtttatatgcgttggttagccagaaatcctgcttacaaacacaagtacaagttttg

SEQ ID NO: 372787 - DNA, 201 bp, Homo sapiens
ccaccacgcttggctaatttttgtatttttagtagagttggggtttcaccatgttggccaggctggtctggaactcctgacctcaagtgatccacccgcckcagcttcccaaagtgctggggttacaggcgtgagctactgcacctggcctggttttttaaagtgatataaataatagattttcatagtagaaaaaagtga

SEQ ID NO: 372788 - DNA, 201 bp, Homo sapiens
tttgcagtgagtcccatccggccaaggtttcctctggctgttcctgacgccttgctggactgccctggattgcttgttgctgatggttgttacttgcatayggtaccagatgaggttgttgccttctgttgtaaaccaagaagattgtgagcttaaacagtggttctaagccgagggtgattttggcctctattggacatt

SEQ ID NO: 372789 - DNA, 201 bp, Homo sapiens
aaatatcataaagtttttcctagaagtctgcttactacatagacacttaaaatatttatctaatttaccctttgagccattttagcttgcatttcctgacstaaccattgtgcttgtctattattttatggggagcaggggttaagtgtaacctgagaacagtaaaaagaccaaaaatacattttaaaaaatagccgtgtc

SEQ ID NO: 372790 - DNA, 201 bp, Homo sapiens
ttctttttttttttttttttttttgagattgagttttgcttgtgtcgcccaggctggagtgcaagggtgagatcttggctcactgcaacctccacctcccrggttcaagcgattctcctgcctcagtagctgagattacacgtgcctgccactatgccttgctaatttttgtatttttagtagagacaggatttcaccatg

SEQ ID NO: 372791 - DNA, 201 bp, Homo sapiens
ccataagatgtatgcagttcccctccatgcctgggtatagcctgagcctcagcctcaggtccagacaatgacagcattcagatgtgtgcatgaatgagctyggagtgtgaagcagaaagatttaggagggtgttggagttttaccaccacgttgccatgaccttggacccaaggggtaaggtcaaagaacagaggttagga

SEQ ID NO: 372792 - DNA, 201 bp, Homo sapiens
ggtacagatgttatgtcatgtcatgttattttttagacagagtcttactctgtcgcccaggctggagtgcagtggcgcaatcttggctcactgcaacctcygcctcctgagttcaagcgattctcctgcctcatcctcctgagtagctgggattataggcatgtgccaccacgcgtggctaatttttgtatttttagtaga

SEQ ID NO: 372793 - DNA, 201 bp, Homo sapiens
aaaataattatctcattcagtttgaatttcctagattacctggcaggtggtcatatttgcatctgtctcttttgtttctttgtaagttactagttggcttaaaaaaaaaaaaaaagagtccctctgtggcccaggctggagtgcagtggtaccatcttggctcgctgcaacctccgcctcccaggttcacgtgattctcct

SEQ ID NO: 372794 - DNA, 201 bp, Homo sapiens
tctgccacaacgtgactcccgtgtatgagtccaacggtgtgactgatcaggctgaggccgagaagcagtacgaagactcctgccgcgtataccaggcatcyagccccgatgaggtaaacctgggcaggtgcagcaaggcatggggaggccctgcttgttttctctgtgctggaattaggcgttttctaaggaagcaatgtg

SEQ ID NO: 372795 - DNA, 201 bp, Homo sapiens
gaccccagagcttattatggaagaagtaggagataggatatgtattttctcttgtggtcgctggccattggttggctgtttttacaaggaccagagcagaygctgcccagagctgccaagggaagggtgcttgaggtgcaggtgacggcacccgacttccttccacagggtcatgcttcttgcggacggatcagctggatg

SEQ ID NO: 372796 - DNA, 201 bp, Homo sapiens
ggccagtgtggatggtattgaagcaggcatttcttaagtgtcagtgggtggattaatggaggtatgagccaggggtgatgggagtccatcagagagaatcyggtgatgtctttccagaagaggtgaccttcatcttgagtcttagaggagggaagagagcaggactggctacatgatttgtgggacccaatgcaaatgaac

SEQ ID NO: 372797 - DNA, 201 bp, Homo sapiens
gtattttctcttgtggtcgctggccattggttggctgtttttacaaggaccagagcagacgctgcccagagctgccaagggaagggtgcttgaggtgcagrtgacggcacccgacttccttccacagggtcatgcttcttgcggacggatcagctggatggggagacggactggaagctgcggcttcccgtggcctgcacg

SEQ ID NO: 372798 - DNA, 201 bp, Homo sapiens
tcctcccacctcagtctccggagtagctgggactgtaggtgcacatcaccacacctggctgattttttgtgtttgttgtagagacagggtcttgctatgtygcctaggctggtcttgaactaataggctcaagtggtccacctgtctcagcctcccaaagtgctgagattacaggtttgggtcactgtgtccggcctcttt

SEQ ID NO: 372799 - DNA, 201 bp, Homo sapiens
  misc_feature (1)...(201): n = A,T,C or G
tttctcttgtggtcgctggccattggttggctgtttttacaaggaccagagcagacgctgcccagagctgccaagggaagggtgcttgaggtgcaggtganggcacccgacttccttccacagggtcatgcttcttgcggacggatcagctggatggggagacggactggaagctgcggcttcccgtggcctgcacgcaga

SEQ ID NO: 372800 - DNA, 201 bp, Homo sapiens
tgagcacagaattagcatttaatgttagcttttactgtttatctaaacatccagcaaaaattatatagtctgatcataatcctataaatcaaagcatgtarcaattataaattaaaaagtaaatcagtcatttggaattagttagcttctttctttttggtggtgttgaaaattaagacttttttcccccggtactttgca

SEQ ID NO: 372801 - DNA, 201 bp, Homo sapiens
gcaggaaagcttcagattattaatacaaggccaagtaaacagtaagaaaatggccaacacattaggagagaaaactataaccagctaaggacttgtgatgrtttttcccctgggttattcatttactggtactttttttttttttttttgagacgaagtctcactctgtcgccccatcctggagtgtagtggtgctatctt

SEQ ID NO: 372802 - DNA, 201 bp, Homo sapiens
tgaggtaggaggagtgcttgagcccaggaagcgtaggtggcggtaaaccctgatcataccgctgcactccagcctcggcaacagagtgagaccctgtctcaaaaaaaaaaaaaaaaaaaaaagccatttgtggatatatcaccttaaatctttttgtttgtttgtttttagacagggtctcgctcttgtcacccaggctgg

SEQ ID NO: 372803 - DNA, 201 bp, Homo sapiens
gcatcattgtagatatatctaagggttctgtgtgttggaacagtagaaaaaagaaacaatagctgcacggctgttcttccactctccaaatcattcctgcytctggtcatcttccttgttcatttctccttcctgtagcaatcccaggacccaccggctcagaagggcccaacgctcaccactaaggtccggcggaccatg

SEQ ID NO: 372804 - DNA, 201 bp, Homo sapiens
tgaacttcaccatcctacagatcttccctttcacctatgaaagcaaacgtatgggcatcatcgtgcgggtgagtcgtttttattcatggcttaaagtgctkaagtaccccaggtgtgctgcgtgtgtccctgtgggttgacattctttctaaccctctttactgtggtatctgtcacccagactaacaagggaatataatt

SEQ ID NO: 372805 - DNA, 201 bp, Homo sapiens
ccctcccctcatggtggagccgtcggcttccaaactgggcttccaggttcatcggggggagcctgtctttctatctccagcggaccatgctagaagcagcytgtggattctggggaagctttggggggtgaacgtgtgtccgtttggtcttttccaggaagacagcgaccccccgatcagcgagagcctgagcatagagaa

SEQ ID NO: 372806 - DNA, 201 bp, Homo sapiens
agataaatgtattattattaaaataataatgtccagggccgggcacggtggctcacacctgtaatcccagcactttgggaggccgaggcaggtggatcacytgaggccaggagattgagaccagcctggccaacatggtgaaactccgtctctactaaaaatacaaaaattagctgggtgtggtggcgggcgccataatcc

SEQ ID NO: 372807 - DNA, 201 bp, Homo sapiens
atgtgaatggagacagtacaaactgcctgccccccactgcccccttccccccgccccgccacccagtcctgtatgtttctccgcttgacttgactttcagsctagcgccactcactccctgtgatgccgtgtttcttggtttccttctttactgtctatctttcctgctgtgttgattttcttggcacacactgagaaggg

SEQ ID NO: 372808 - DNA, 201 bp, Homo sapiens
gtaaatttatgtttgggaaagttggggcaagctcaggtgaaggaaaagttcattggcgctgagggccacgttgaatttacggtcttccttcaagtaatacmttcctgagctcccagaaaaacgacaggtctgtgttcatttttccttttgccccctagtggagcaagaagagtggttcaggccatgaaatcgttctgccaa

SEQ ID NO: 372809 - DNA, 201 bp, Homo sapiens
ttaggagggcattttcttttctgtcagatcaattgtagggagagttcctgcccttttttgagattggtaataattgctatcaatgtgctattttttctttstgctgttactttcttaggaagacaagaacccttctgttaggttacttctccgtatcttgttcttccccttttttgcaacaatgttcgtagaagactcaga

SEQ ID NO: 372810 - DNA, 201 bp, Homo sapiens
tgtagaatttctgcaaatgcgtttaaaaatcttggagcctcgatattggagatggggtgttacaggaaaagttcagagttctgtggcctcggttcttaggwcagggccaggttttcctgtgcactttataagaagatattattgggtgtttttacttcccttctggaccagctacataatttgtgggacccagtgaaaaat

SEQ ID NO: 372811 - DNA, 201 bp, Homo sapiens
ggagatcgagaccatcctggctaacacggtgaaccccgtctctactaaaaatataaaataataataattataataataatcagctgggcgtggtggtgggygcctgtaatcccagctgctcaggaggctgaggcaggagaatcgtttgaacctgggaggtggaggttgcagtgagctgagatagcaccactgcactccagc

SEQ ID NO: 372812 - DNA, 201 bp, Homo sapiens
cacaggtggtgaggaaaatgggatttgcattttcacaagatgaattccatgggtgttcataccaggaatgctttcccagactaacttctgatcaaggactraatgaagcaagcggacaattagccttgaaagaagtgcaaacagaggcataattaacacaattgctgatgcttctttcctgctggggacatctgggcaggc

SEQ ID NO: 372813 - DNA, 201 bp, Homo sapiens
aaactgctgttcaaattaggaagcaggagaaaaaatgaagaaaggctacctgccatcagctagccaggtgctagataaggtttaatctgtagtttcttttsgttctttatttttgaaatgggatttcactctgtcacccaggctggagtacagtggcacagtcacagttcactgcagtctctacctcccagacttaagtga

SEQ ID NO: 372814 - DNA, 201 bp, Homo sapiens
gcaggaggattgcttgagtccaggagtttgagaccagcctaggcaacatagtgaaaacccatctctacaaaaaataaaaacatggccaggtgaggtggctsacgcctataatcccagcactttgggaggctgaggcgggtggatcacaatgtcaggagatcgagaccatcctggctaacacggtgaaccccgtctctacta

SEQ ID NO: 372815 - DNA, 201 bp, Homo sapiens
ttgtgtcatgctaagaaaattttccctgctctaaaattataaaaatatccactgactttttttggagtgtttatatagtcttacattaaaatacttggttyaaggaatagagttaggagaactaacaggcaagggaatattacctcaggtcagactccaggctccagactcttaggcccagtctgtgtttctggccccgtg

SEQ ID NO: 372816 - DNA, 201 bp, Homo sapiens
tcaggcagttggcccacctcagcctcccaaagtgttgggattacaggtgtgagccactgtgcctggccacagttgctttttaatacttttgtttcccccartgtccatatacatataggtatatctggggtcatttgagacaagttgcagacattcccttttgtgcctaaatacttaagtgcttaattccttgaaggacgt

SEQ ID NO: 372817 - DNA, 201 bp, Homo sapiens
tttttgtgtcatgctaagaaaattttccctgctctaaaattataaaaatatccactgactttttttggagtgtttatatagtcttacattaaaatacttgsttcaaggaatagagttaggagaactaacaggcaagggaatattacctcaggtcagactccaggctccagactcttaggcccagtctgtgtttctggcccc

SEQ ID NO: 372818 - DNA, 201 bp, Homo sapiens
atgtcgcgatcttcgctcgctgcaacctccacctcctgggtttaagcgattctcctgcctcagcctcctgagtagctgggattacaggcacatgccactayacccagctaattttttgtatttttagtagagatggggtttcaccatgttggccaggctggtcttgaactcctgacctcaggtgatccacctgcctcagcc

SEQ ID NO: 372819 - DNA, 201 bp, Homo sapiens
gtgcaatgtcgcgatcttcgctcgctgcaacctccacctcctgggtttaagcgattctcctgcctcagcctcctgagtagctgggattacaggcacatgcyactacacccagctaattttttgtatttttagtagagatggggtttcaccatgttggccaggctggtcttgaactcctgacctcaggtgatccacctgcct

SEQ ID NO: 372820 - DNA, 201 bp, Homo sapiens
tggactgttttctttctatcacatgaagtttttttctttttttttagacggagtttcgctcttgttgcccaagctggagtgcaatgtcgcgatcttcgctygctgcaacctccacctcctgggtttaagcgattctcctgcctcagcctcctgagtagctgggattacaggcacatgccactacacccagctaattttttg

SEQ ID NO: 372821 - DNA, 201 bp, Homo sapiens
cccaggctggagtgcagtggcacgatctcggcttactgcaacttccacctcccaggtttaagaaattctcgtgcctcagcctcccgagtagctgggactayaggcatgcgcttccacgtccagctaatttttgtatttctagtagagacagggtttcgccatggtggctagtctggtcttgaactcctggcctccagtgat

SEQ ID NO: 372822 - DNA, 201 bp, Homo sapiens
  misc_feature (1)...(201): n = A,T,C or G
ctgctgtgcctgacgggcgtggaggaccagctgcaggcagatgtgcggcccacgctggagaccctgaggaatgctggcatcaaggtagggcgggctgcccncagggaagggcactccagggcaatgccagttatccctcagcagtgcagggagatcacagggggaaagggtgggaggagcagcagaggacaccaggagtgc

SEQ ID NO: 372823 - DNA, 201 bp, Homo sapiens
ccactcccccacgccacgacaggccccggtgtgtgatgttccccaccctgtgtccaagtgttcttactgttcatttcccacctatgagtgagaacatgccrtgtttggttttccgtccttgcgatagtttgctgagaatgatggtttccagcttcatccatgtccctacaaagggcatgaactcatccttttttatggctg

SEQ ID NO: 372824 - DNA, 201 bp, Homo sapiens
cctgatcgttcttttcatgcttttctggaacttgaacttcccaattccttccccagtgtttgttctcttacctcaaaccctgagaactatgactaaacgargctcaccaaaaagaatattatttttaggacaggcgggatattgagggaaaacagacccagctaggggagagggcccgggaggctcagccctgagaggtgc

SEQ ID NO: 372825 - DNA, 201 bp, Homo sapiens
agttttagtagagacggggtttcgccatgttggccaggctagtctcgaactcctgacctcaggtgatccgcctgccttggcctcccaaagtgctgggattmcagatgtgagccaccgtgccctgcccagtacttacattctttatttcagtcgttgtgagcactgaattttcgaatatggaaccattgctcttaggggaaa

SEQ ID NO: 372826 - DNA, 201 bp, Homo sapiens
  misc_feature (1)...(201): n = A,T,C or G
cagacactgtcatgggccagcacagagcacttggcgtccctaagggcagtgactactgtgattcccctgtctctgagcccccttctgcctttgtgttcatngcacagcctgtgaacccagattctcggctgggcatctgaccttcgaccctgtgttatgtttaggtggccctggtacagtggacggaaagtgtgggcttaa

SEQ ID NO: 372827 - DNA, 201 bp, Homo sapiens
caaagcatgtagcaattataaattaaaaagtaaatcagtcatttggaattagttagcttctttctttttggtggtgttgaaaattaagacttttttccccyggtactttgcatctaagtcactgttaagtggtgttgaaaattaagacttttttccccccactactttccatctaagtcactctgaaggcaaataaatgat

SEQ ID NO: 372828 - DNA, 201 bp, Homo sapiens
ggggccatttgctgtgtgtgggaaatatagttgctttggaaacatagtggatgcctcctgaagtcttgcattgtgaactgactttgactcccgaatgtgcsttctgttgaacaggaccttcttcagattcgatcgtatgtgtacgcagaagagccaaatattgacattcacaacttcgtgggaacttttacccgagtaagt

SEQ ID NO: 372829 - DNA, 201 bp, Homo sapiens
agggaaatggtgttgtgattgacagcagtgtctgctgtaggtgtgcaatgaaagcttggtggcacatgccagtcctttgcctacctgatttggaggttgartaaatggttatttatttatttatttatttttgagatggagtcttgctctgtcgcccaggctggagtgcagtggtgcgatctcagctcactgcagcctcca

SEQ ID NO: 372830 - DNA, 201 bp, Homo sapiens
atagtggatgcctcctgaagtcttgcattgtgaactgactttgactcccgaatgtgccttctgttgaacaggaccttcttcagattcgatcgtatgtgtaygcagaagagccaaatattgacattcacaacttcgtgggaacttttacccgagtaagtgagcttccttcacatgggatcctgtcaccgggagtgtgtaagg

SEQ ID NO: 372831 - DNA, 201 bp, Homo sapiens
gtcaggagaattgcttgaacctgggaggcggaggttgcagtgagtcgagatcgtgccactgctctctagcctgggtgacagagcgaggctcagtctcattaaaaaaaaaaaaaaagaaagaaaaagaaaaatgagagaacagagaaaactgataaaggaaatgctggtattatgttatttttccttcaaagacaatcacaa

SEQ ID NO: 372832 - DNA, 201 bp, Homo sapiens
atattgacattcacaacttcgtgggaacttttacccgagtaagtgagcttccttcacatgggatcctgtcaccgggagtgtgtaagggatgaaatgaaggycaagaagtactgacagttctttgtcaggaagttgtttcatgccaggtggggacataaagaaggcaccgccttgaaagccagcgtattgtttctcagtaag

SEQ ID NO: 372833 - DNA, 201 bp, Homo sapiens
tttgccatcagtctgtagcaattaagtgtggagtagaaaggaggccaaaggagggaaagaaaatatttttggtgttaaaaagctattgattgtcaatcttyctttttgggcattgaggtgaaaatgctcccagttgagtggtgagaatgtaggtacagtagatcctggaactcacgtctccttctggccataccattaagg

SEQ ID NO: 372834 - DNA, 201 bp, Homo sapiens
aattgtgagtaggggagcctgaaagtgactttcatcaaaatgatctaaacccaaacagctgctgtggttcaccagaccacatctgtacttttatgttaackcaccaattgaacaggataatgctgtggctttaatgattgggagattaatcagcccgtccttggactcatacacaaaagctggccgggatgagctgacttc

SEQ ID NO: 372835 - DNA, 201 bp, Homo sapiens
tgtgggctgctctggagatcagctgtgctcatgtacaaagcattcctgggtcctggaacttaataaatattcacaacaggctgagtagaccctggagctgkgatacatcaccctacccgggaatgattcctagatttgctgcttaggaactgtgtgggcttgggcaagccacgtaccctctctatgcctcactttctgctt

SEQ ID NO: 372836 - DNA, 201 bp, Homo sapiens
atgactaggaaccatgtagaacgtgggtttgttgttgttgttgttgttgttgttgttgttgttttttgagacggagtctcactctgttgcccaggctggaktgcaatggcatgatttcggctcactgcaacctccgccttccgagttcaagtgattctcctgcctccgcctctgcctcccaagtagctaggactacaggtg

SEQ ID NO: 372837 - DNA, 201 bp, Homo sapiens
ctgctttgcataatgaggatgatgagaatcgtacctacttcatagggttgttgttgatgttgtgagaatgaaatgagcaaatccatgtaaagtaccttacrgcagtgccggcgcgggtgttatgtaagtatcaggtgttatttttattctgtaaatgtaagggattttgtcatgacttttggtgacatcctcctctctcct

SEQ ID NO: 372838 - DNA, 201 bp, Homo sapiens
taggaaccatgtagaacgtgggtttgttgttgttgttgttgttgttgttgttgttgttttttgagacggagtctcactctgttgcccaggctggattgcartggcatgatttcggctcactgcaacctccgccttccgagttcaagtgattctcctgcctccgcctctgcctcccaagtagctaggactacaggtgcacac

SEQ ID NO: 372839 - DNA, 201 bp, Homo sapiens
tgcctgcttctaactggaaaagcgggctgtctttcgtcgggttctggaagagtacaagaacattacagaatatagtcaggggttccctgagctgtgcgccrtgcgaccttccgtggtctggtcccatctttcccgtgggtcctcatttcctcttccgtcgccctcagccccagccccactggccttatggctgttcttcag

SEQ ID NO: 372840 - DNA, 201 bp, Homo sapiens
gtgagccactgtgtgcggccatttaactttttaaaaattattttttattttattttttgagatggggtttcactttttattttttgaggtgggggactcaytgtcacccaggcgagagtgcagtgacatgatcttggctcactactatctccgcctcctgggctcaattgatcctcccacttcagcctcctgagtagctgg

SEQ ID NO: 372841 - DNA, 201 bp, Homo sapiens
tgctcttcctcctgggattggcttggctggccctcaccttttgtgggtgttcactcaaatgttctgttcctcagcctctaaaattgtaccatcaccccctmcacacacacacacacacacacacacacacacacacacacgtcttatttcctctaccccattatatttttctctttagcacttctctaacacacatagagt

SEQ ID NO: 372842 - DNA, 201 bp, Homo sapiens
  misc_feature (1)...(201): n = A,T,C or G
ctgcgggtgctcgtggtggcaaagaagtctcttgcagaggagcagtatcaggactttgaagtaagttgttctgggacctttccattgcctttgcagccccncctgcctcccagtcactccttccaccatccctcatcctatgcgagccattctgatgtcatttctgggcacactgggttcactgttgttgaaggcctttgc

SEQ ID NO: 372843 - DNA, 201 bp, Homo sapiens
tcatcctatgcgagccattctgatgtcatttctgggcacactgggttcactgttgttgaaggcctttgcacttgccgttctgtctgcctggaactctcttyacccacagagccccatggcccatttcctcgcttcttttgggtctcagctcaaaagccacgtcctccaagaagtcttcctggaccacctgtctaaggctcc

SEQ ID NO: 372844 - DNA, 201 bp, Homo sapiens
gtccatttttgctcatgggtttctggtgcttacagccagccccggagcataatagacaagcagtaaatatttgttagaggcatggttgggacttgggtgcyggaggctggcacagcacatagctcctatcgcgtcagccaggtcttacctatggcggttttctctcccaggtactccacaatttacaccatgtttcctgtg

SEQ ID NO: 372845 - DNA, 201 bp, Homo sapiens
ggtctcgaatcctgacctcaggtgatccgctcgcctcggcctcccaaagttctgggattataggcgtgaaccaccacgcctggctgcaggaatgtttttaratgttattcatttcccaccaaatgttccagatctcatcagacaagccctgaatgtctttctctgttgtctccctccattccaggtgctgttcaaccagtt

SEQ ID NO: 372846 - DNA, 201 bp, Homo sapiens
agttctgaatattaacccagaccctagcgctgcagtttgttgtgaaagcccagcaaaacactgaagaaactgtcagcttggaaagtgatcgaggcgagttyagttatttgatacgcttttggggggagggccagagtagcaaacctaaactgggagattgcagggaagagggagaaaaagaagccttttttgactttcctg

SEQ ID NO: 372847 - DNA, 201 bp, Homo sapiens
atcgtttgaacccgggaggcaaaggttgtggtgagctgaaatagcaccactgcactccagcctgaacaacagagtgagacttcgtctcaaaaaaaaaaaartagtcaaattcatagaaatgtaagtagagtgctggttgccaggggctgccagggctagggttggtgggggatggggcgttattgttgaatgggtgtggaa

SEQ ID NO: 372848 - DNA, 201 bp, Homo sapiens
aagtaaacagtaagaaaatggccaacacattaggagagaaaactataaccagctaaggacttgtgatggtttttcccctgggttattcatttactggtactttttttttttttttttgagacgaagtctcactctgtcgccccatcctggagtgtagtggtgctatcttggcttaccacaaactctgcctcccgggttcaa

SEQ ID NO: 372849 - DNA, 201 bp, Homo sapiens
ctggccaattctttttttaaagaaataattcctccaatgtgttcagatgtgtgcgagccactttattgatgaagacagatgggttgccttatctcgttagygggagaataacgtgaaagctgatggcatgctgcgtgagccccccacgaaaccggctctaacctttctctgtctctcattcagggacggccgttgtcctac

SEQ ID NO: 372850 - DNA, 201 bp, Homo sapiens
agaacacagttctgaatattaacccagaccctagcgctgcagtttgttgtgaaagcccagcaaaacactgaagaaactgtcagcttggaaagtgatcgagkcgagtttagttatttgatacgcttttggggggagggccagagtagcaaacctaaactgggagattgcagggaagagggagaaaaagaagccttttttgac

SEQ ID NO: 372851 - DNA, 201 bp, Homo sapiens
gaggcaggagaatcacttgaacccaggaggcggagattgcagtgagctgagatcatgccactgcactccagcctgggtgacagagtgagactcatgtctcaaaaaaaaaaaaaaaaaaaaggaagcataggtggcacccgatgtgtgacagaggaacggagctgcaggctgcatctcccatcctgctgcagttggtggtgc

SEQ ID NO: 372852 - DNA, 201 bp, Homo sapiens
gatgtgtgcgagccactttattgatgaagacagatgggttgccttatctcgttagtgggagaataacgtgaaagctgatggcatgctgcgtgagccccccrcgaaaccggctctaacctttctctgtctctcattcagggacggccgttgtcctacaagacattcttaatatgggttttgattagcatctatcaaggtaag

SEQ ID NO: 372853 - DNA, 201 bp, Homo sapiens
tgagaaagtcctaaggagaattggcagatggctctagcattaaaaacttgtcttcctttgtgggtctctctttgcggcccctggtgtccattgttatgccratcccactctagggaaaacagaacacagttctgaatattaacccagaccctagcgctgcagtttgttgtgaaagcccagcaaaacactgaagaaactgtc

SEQ ID NO: 372854 - DNA, 201 bp, Homo sapiens
ttgcaattgcttttcccgtgaatgatttttctgccctccactgcacaccccttcccagctcttgcttcaacttcactcagctcttgagaaagtcctaaggrgaattggcagatggctctagcattaaaaacttgtcttcctttgtgggtctctctttgcggcccctggtgtccattgttatgccaatcccactctagggaa

SEQ ID NO: 372855 - DNA, 201 bp, Homo sapiens
aggctggagtgcagtggtaccatcttggctcgctgcaacctccgcctcccaggttcacgtgattctcctgcctcagcctctccagtagctgggattacagrcatgtgcaaccacccctggctaatttttgtatttttagtaaagatgggatttcaccatgttggccaggctggtctcgaactcctgacctcaggtgatcca

SEQ ID NO: 372856 - DNA, 201 bp, Homo sapiens
ggattccattcattcatccatccgggcttcgaccctcctttggttcttttcatattgcaattgcttttcccgtgaatgatttttctgccctccactgcacrccccttcccagctcttgcttcaacttcactcagctcttgagaaagtcctaaggagaattggcagatggctctagcattaaaaacttgtcttcctttgtgg

SEQ ID NO: 372857 - DNA, 201 bp, Homo sapiens
cctctgtggcccaggctggagtgcagtggtaccatcttggctcgctgcaacctccgcctcccaggttcacgtgattctcctgcctcagcctctccagtagmtgggattacaggcatgtgcaaccacccctggctaatttttgtatttttagtaaagatgggatttcaccatgttggccaggctggtctcgaactcctgacc

SEQ ID NO: 372858 - DNA, 201 bp, Homo sapiens
ttttagggtatttgaatacattgtcgtggttggtggtcttaaaaatatgcacatctctgggagaagggggaatttagagttggtaaagaaatgctttattsatgctaaactactgtatttaggacatgttgctaccaaaagaaaaagaatcagtgtaatctttgcagaggcaggtggcttgggctttctgcgtgagtagtc

SEQ ID NO: 372859 - DNA, 201 bp, Homo sapiens
gagttatatgtattgggctcaaaaacaaaaaattgaaattttggcccagtacagtggctcacgcctgtaatcccagcactttgggaggccgaggcgggctratcacaaggtccggagatcgagaccatcctggctaacatggtgaaaccctgtctctactaaaaatacaaaaaaaattagccgggcatggtggcgggcgcc

SEQ ID NO: 372860 - DNA, 201 bp, Homo sapiens
tgcatgttccctaagacagattcagagagggggcttgcagcggcgtgtgcatttggaataactcacaggtcctgcccccctgccctcccaagtgacctctygcctttcctgcccctggcaccaggaggggacggttggctgcagcagggctcactgcctgtagcaagactcactgtcgtctgtctctgcagggcttcgtgc

SEQ ID NO: 372861 - DNA, 201 bp, Homo sapiens
ctgcacggtcatgcctgggccacgcctgggcacagccacccaggggacgcagcatgcagacgttcacatcctgcccctccttgccactttccacccatgtmacctgaaccaattttttcttgctttcaagtcatttattaacaaataataattaattactctttttattctttgataatttgactgaaaaataattatctc

SEQ ID NO: 372862 - DNA, 201 bp, Homo sapiens
tggcagtgagtgtttctctagggtagtgtttctacaggttgtgtttgggagtgcatgttccctaagacagattcagagagggggcttgcagcggcgtgtgyatttggaataactcacaggtcctgcccccctgccctcccaagtgacctctcgcctttcctgcccctggcaccaggaggggacggttggctgcagcagggc

SEQ ID NO: 372863 - DNA, 201 bp, Homo sapiens
gctactccggaggctgaggcaggaggatctcttgagcccaggaggtggagattgcagtgagccaaggtcatgctactgcactcctgcctgggtgacagagygagaccctatctcaaaacaaacaaaaaagccctgtaatcccagcactttgggaggctgaggtgggcggatcacgaggtcaagagatcgagaccatcctgg

SEQ ID NO: 372864 - DNA, 201 bp, Homo sapiens
ctttgcatccttcctgacttaggttttgtattctcctagttaaacaggaaaaaaaaaaaaaaaaacgaaaaacccagaccttagatgtatttagaaggaasagcaaaagtttcccttcatacctttccttccactcctttttcttttctcttttttttgagacggagtctcgctctgttgcccaggctggagtgcaatggc

SEQ ID NO: 372865 - DNA, 201 bp, Homo sapiens
aagagcaaaagtttcccttcatacctttccttccactcctttttcttttctcttttttttgagacggagtctcgctctgttgcccaggctggagtgcaatggcactacctcggctcactgcaacctccgcctcctgggttcaagccattctcctgcctcagcctctggagtagctgggattacgggcgtgcgccaccacac

SEQ ID NO: 372866 - DNA, 201 bp, Homo sapiens
aagggatgaaatgaaggccaagaagtactgacagttctttgtcaggaagttgtttcatgccaggtggggacataaagaaggcaccgccttgaaagccagcrtattgtttctcagtaaggtcgacacaactggaattttcttctggccttggaacagcttaaatgacctgacaacttagaggaagcatttgctgcaattcat

SEQ ID NO: 372867 - DNA, 201 bp, Homo sapiens
tcagggctcactgcagcctcgacttcccgggctcaagcaatccttcgtccttagccccccaagtagctgagactataggcatgtccaccatgcctggctawttatttttgaattttagtagagatgaggtctcaccgtgttgctcgggctggtctccaactcctgaactcaagctgttttcctgcctcggcctctcaaagt

SEQ ID NO: 372868 - DNA, 201 bp, Homo sapiens
gagacggattctcgctctgctgcccaggctggagtgcggtggtacgatcttggctcacttcaacctccgcctcccaggtacaagcaattctcttgcctcayctcccaagtagctgggactacaggcatctaccaccacgcccggctaattttgaatttttagtagagacagggtttcaccatgttggccaggctggtctcg

SEQ ID NO: 372869 - DNA, 201 bp, Homo sapiens
ttgtgcctcagggtgtgaaattgaggacagagggcgtgattgcagtagacagtgtttttgtttttctttttgagtcggagtcttgctctgtcacctttttkgggccacaaaatctttttgttcccatgaaatcttaatctgaagtccaatctatgaaactgataaaaggggacttgtgatagcaaagtggcagtgctggga

SEQ ID NO: 372870 - DNA, 201 bp, Homo sapiens
tggagtgcggtggtacgatcttggctcacttcaacctccgcctcccaggtacaagcaattctcttgcctcacctcccaagtagctgggactacaggcatcyaccaccacgcccggctaattttgaatttttagtagagacagggtttcaccatgttggccaggctggtctcgagctcctgacctcaagtgatctgcccgcc

SEQ ID NO: 372871 - DNA, 201 bp, Homo sapiens
gttcgtgtgtgcttcctttgccattgacatcagttcaagagtaaggtggaaggaggtgtcttgaaagggatgctctccagcagtgttgcccagtagaactytcagccatgatggaatgttctgtgtctgcacagtctagtccgtagttagtggtcacatgtagctatggagcactcagtgtggccagggaaaaggaatttt

SEQ ID NO: 372872 - DNA, 201 bp, Homo sapiens
atcagctgggggagcagggcccggaggctgcttctctgctaagaagctcatgtgtgttcaggattgcaggatagactctctctgggggaaactttcagttaatgacaaccccctcacgccccatcctccgtgggaaacctgcagggcccaggctctctagcaatggcccatcccttgctcctttacctcaggccttctcag

SEQ ID NO: 372873 - DNA, 201 bp, Homo sapiens; identical to SEQ ID NO: 80718

SEQ ID NO: 372874 - DNA, 201 bp, Homo sapiens
ggagaatcgcttgaatccaggaggcggaggtggcagtgagcgccactgtactccagcctggtcaacagagcgagactccgtctcaaaaaaaaaaaaaaaargaatttgctgttgcccaggctgtagtgcagtgtgcaatcatagctcactgcagccttgaattcctatgctaaaggaatcctcctgccccagccccctgtg

SEQ ID NO: 372875 - DNA, 201 bp, Homo sapiens
  misc_feature (1)...(201): n = A,T,C or G
tcatttctgggcacactgggttcactgttgttgaaggcctttgcacttgccgttctgtctgcctggaactctcttcacccacagagccccatggcccattncctcgcttcttttgggtctcagctcaaaagccacgtcctccaagaagtcttcctggaccacctgtctaaggctccttctcactttccatccatcacacca

SEQ ID NO: 372876 - DNA, 201 bp, Homo sapiens
tgacagaatgagaccttgtctcaaaaaacaaaaacaacaacacaaaacccattagaattcaagacacataaaaccaacaggaatgtgtctttacacatggmccagccgtgtggcagacagaaatctttttatttgtttatttttttgagacagggttttgctcttggtgcccaggctggagtgcagtggcgtaatcttggc

SEQ ID NO: 372877 - DNA, 201 bp, Homo sapiens
gcagaggcctgtgggggctgggggctggggacagagcggggactggaaccccagttttgagctccagcttgatctcttcttcggggtatagcaggtcagcyaagatgacatccaggggttccagagaaagaaaggactaggggtggagagctgcatacctttgccttgtggcttctgcagagctctcttggtaaaaggaat

SEQ ID NO: 372878 - DNA, 201 bp, Homo sapiens
  misc_feature (1)...(201): n = A,T,C or G
catttcctcgcttcttttgggtctcagctcaaaagccacgtcctccaagaagtcttcctggaccacctgtctaaggctccttctcactttccatccatcanaccatttcactttgttcattgcatttgtcactgtcatcgcgtgctaccatttggggccaaaaaatatgtctaggagttgaatctggagaggccagaagaa

SEQ ID NO: 372879 - DNA, 201 bp, Homo sapiens
  misc_feature (1)...(201): n = A,T,C or G
accagaaaccaagacatccacgtttttcggctggtaaagtgtcctctgcgttagggccatgtggggatgatgttcgatttgtcctataacctcctaacctngagtgggccccttaagaagggaggggcagcatgtgaattacctagggtggggagcatcaaccacggttgctttggatgggatgattaatgacccaggcgc

SEQ ID NO: 372880 - DNA, 201 bp, Homo sapiens; identical to SEQ ID NO: 80720

SEQ ID NO: 372881 - DNA, 201 bp, Homo sapiens; identical to SEQ ID NO: 80721

SEQ ID NO: 372882 - DNA, 201 bp, Homo sapiens; identical to SEQ ID NO: 80722

SEQ ID NO: 372883 - DNA, 201 bp, Homo sapiens
caatcacaatgaacacaaaccttttagcagatgatgttttcttcctgtttgtttctgcgtgtacattgttttatgactaggaaccatgtagaacgtgggtttgttgttgttgttgttgttgttgttgttgttgttttttgagacggagtctcactctgttgcccaggctggattgcaatggcatgatttcggctcactgca

SEQ ID NO: 372884 - DNA, 201 bp, Homo sapiens
tgcaataattcctaacaagcaaaaaatttgcaagaattatatggagaattccaatatgcccttaacccagattcatgaattgtgacatttcaccacagttrtttatttatttagagacaggatctcactgtgtcacccgggttggagtgcagtggtgggatctggactcactgcaacctccgccttccaggctcaagcaat

SEQ ID NO: 372885 - DNA, 201 bp, Homo sapiens
aatcacaatgaacacaaaccttttagcagatgatgttttcttcctgtttgtttctgcgtgtacattgttttatgactaggaaccatgtagaacgtgggtttgttgttgttgttgttgttgttgttgttgttgttttttgagacggagtctcactctgttgcccaggctggattgcaatggcatgatttcggctcactgcaa

SEQ ID NO: 372886 - DNA, 201 bp, Homo sapiens
atcacaatgaacacaaaccttttagcagatgatgttttcttcctgtttgtttctgcgtgtacattgttttatgactaggaaccatgtagaacgtgggtttgttgttgttgttgttgttgttgttgttgttgttttttgagacggagtctcactctgttgcccaggctggattgcaatggcatgatttcggctcactgcaac

SEQ ID NO: 372887 - DNA, 201 bp, Homo sapiens
agaatcccagtgcttagcacaaaggctggcacctagtaggtgctcagtaaatactggctgcttgattaaatgagcgagtgaataaagaagaggagcggccrggcgcggtggctcacgcctgtaatcccagcactttgggaggccgaggcgggcggatcacgaggtcaggagatcgagaccatcctggctaacacggtgaaa

SEQ ID NO: 372888 - DNA, 201 bp, Homo sapiens
taacattcatcttatccatctcctttcgggaataaaatatttttgaagacagggactttacaagtctggtttgttcttcttattcttgttcttcttcttctttttttttttttttttgagacagagtttcgctcttgtcgcccaggctggagtgcagtggtgtgatcttggctcattgtaacctccgcctcccaggttcaa

SEQ ID NO: 372889 - DNA, 201 bp, Homo sapiens
ccagtgcttagcacaaaggctggcacctagtaggtgctcagtaaatactggctgcttgattaaatgagcgagtgaataaagaagaggagcggccaggcgcrgtggctcacgcctgtaatcccagcactttgggaggccgaggcgggcggatcacgaggtcaggagatcgagaccatcctggctaacacggtgaaaccccgt

SEQ ID NO: 372890 - DNA, 201 bp, Homo sapiens
aaaggctggcacctagtaggtgctcagtaaatactggctgcttgattaaatgagcgagtgaataaagaagaggagcggccaggcgcggtggctcacgcctrtaatcccagcactttgggaggccgaggcgggcggatcacgaggtcaggagatcgagaccatcctggctaacacggtgaaaccccgtctctactaaaaata

SEQ ID NO: 372891 - DNA, 201 bp, Homo sapiens
gtactgtagtttgtttagccagtctaccactgatggtcatttagattatttttccattttatttgtctgtctgtctgtctgtctgtctgtctgtctgtctrtctatctatctatctatctatctatctatctatctatctaatctttagaggcgctgtcacccaggctggtcttgatctcttggcctcaagtgaacctggg

SEQ ID NO: 372892 - DNA, 201 bp, Homo sapiens
aacctcctaacctcgagtgggccccttaagaagggaggggcagcatgtgaattacctagggtggggagcatcaaccacggttgctttggatgggatgattaatgacccaggcgccggctggagagtttcttccagtagtggtttgggagtacctccttctagccctgtgctaatgccatgctcttaaccttttgggggtcg

SEQ ID NO: 372893 - DNA, 201 bp, Homo sapiens
agtaacacactttgcttttcattgtgctggttttgttatttatcttctgtttatggcaagtgatactggtttctagttatggtaatggcatgaagttatcttttttttttttttttgagacagtgttttgctctgtcccctagactgcagtacagtggcatgatcagggctcactgcagcctcgacttcccgggctcaagc

SEQ ID NO: 372894 - DNA, 201 bp, Homo sapiens
aaattgataagtggctcaaaggtgaatgggtacggggcaagagagctcctgcatggaccgaacagtcactcttgatggtccccaaagacgcttccaatttrtgaactgagagactgggaaaaaaagtattgctgtgaaagaattgtgcaggtgaggctgttcatggtagtgcaggatgcagagagctcttagcccagggtc

SEQ ID NO: 372895 - DNA, 201 bp, Homo sapiens
gctgtgaaactgaggttcatccctgttcagagcatgggtatctaaacctgtggactccaaggaagagtttgcaagatgacccactggggtacaggaagcgmctctttacatttcagttccatctccaaaattaatgcaaaattaaaatcttactaatactattgaggttgacccaggggccctcactccatgtatcagaca

SEQ ID NO: 372896 - DNA, 201 bp, Homo sapiens
tttttgtggcgtacaagatgttccagtgccttctcccccttcccacgtggagccacgggtttggatcgtggctgtagatcatcgtagcgctgtcattgctrgactaaaagaggcctttgagcaggtgccagatgcagaccacggtgggaaaagatgaggcccccaaacaatgccacacagccggccgatctctgtaaattt

SEQ ID NO: 372897 - DNA, 201 bp, Homo sapiens
caacacaaaacccattagaattcaagacacataaaaccaacaggaatgtgtctttacacatggaccagccgtgtggcagacagaaatctttttatttgttwatttttttgagacagggttttgctcttggtgcccaggctggagtgcagtggcgtaatcttggctcactgcaatctccgcctcctgggttcaagcgattct

SEQ ID NO: 372898 - DNA, 201 bp, Homo sapiens
ctcactgcaacctccgcctcccaggttcaagcgattctcttgtctcagcctcctgaataggtgggactcaggcctacaggcacctgccaccacgcctggtkaatttttgtagttttagtggaggcggggtttctccgtgttgtccaggctggtctcgaactcctacctcaagtgatctacccgccttggcctcccaaagtg

SEQ ID NO: 372899 - DNA, 201 bp, Homo sapiens
actgcactccagcctgggcaacagagagagactctgtctcaaaaaaaaaaaaaaaaatgttttagaggctgagtcttgctatgttgcccaagttggattcraaatcctgggctcaagtgatcctcccacttcagtctcctaagaatctgggattatagatacttaggatatagagtatagcatatagataggatatagatc

SEQ ID NO: 372900 - DNA, 201 bp, Homo sapiens
ttaataaaaaggggtgggggatctgaaaaatgccctcctggcctgaactgagcccagtagaagtcccatccttggagctccaaggagggccagagtccacwgcctcggggatgtgcaagtaacagagcttggctgctgtgccacagtgacagagatggtgtcacttgggcctttgcagcctgcaaacccacccccattact

SEQ ID NO: 372901 - DNA, 201 bp, Homo sapiens
tcaccatgttggccaggctggtctcgattgcctgacctcaggtgatccacctgcctcggcctcccaaagtgctgggattacaggtgtgagccactgcaccyggcctcgaccttgaatctctctgtgcacctttcatggatttgcaaacttgcccagggtcctgtggccccagccgtggttctcagttggaggtgaacctgc

SEQ ID NO: 372902 - DNA, 201 bp, Homo sapiens
ggtgatttcactggggtcttaataaaaaggggtgggggatctgaaaaatgccctcctggcctgaactgagcccagtagaagtcccatccttggagctccarggagggccagagtccactgcctcggggatgtgcaagtaacagagcttggctgctgtgccacagtgacagagatggtgtcacttgggcctttgcagcctgc

SEQ ID NO: 372903 - DNA, 201 bp, Homo sapiens
tggctgtggtcctgagccagagaagatgctgtagagaaaagcaatctgcgaagagtgggcagacatgagcacagcctcgatgcgtgggcgtggccttgatrcgtgggtttctttcccacaggtgctgcgagtggctgagatgctgcggtggaggggaggccaggccccgcactgtctggctggggcaccccgagaagagag

SEQ ID NO: 372904 - DNA, 201 bp, Homo sapiens
tcgtgggagcttctgctctgttttcttgtttcactgaaagatgaagcctcaaatatggctgtggtcctgagccagagaagatgctgtagagaaaagcaatmtgcgaagagtgggcagacatgagcacagcctcgatgcgtgggcgtggccttgatgcgtgggtttctttcccacaggtgctgcgagtggctgagatgctgc

SEQ ID NO: 372905 - DNA, 201 bp, Homo sapiens
tgagccaccgcgcctggccaggacaaagcatcttttatttggaccacagcttcgtgggagcttctgctctgttttcttgtttcactgaaagatgaagcctsaaatatggctgtggtcctgagccagagaagatgctgtagagaaaagcaatctgcgaagagtgggcagacatgagcacagcctcgatgcgtgggcgtggcc

SEQ ID NO: 372906 - DNA, 201 bp, Homo sapiens
tcatggtggcgctgaccatccagacctggcactggctcatgacagtggcggagctgctcagcctggcctgctacatcgcctccctggtgttcttacacgarttcatcggtaagacccctgaatgcttaaaccccgtccgtcacccccagtgaatctggcccagaggtctcactgccgtatgaaggaaggggggttcccagc

SEQ ID NO: 372907 - DNA, 201 bp, Homo sapiens
aggctggtcttgaactcctgacctcaggtgatccgcccacctcagcctcccaaggtgctgagattacaggtgtgagccaccgtacctggcccccccccccyttttttttttttaaagacgagtcttgctctgttgcccatactgccagtgcagtggcatgatctcggctcactgcagcctctgcctcctgggttcaagtga

SEQ ID NO: 372908 - DNA, 201 bp, Homo sapiens
ggtggctcccgcctgtaatcccagctctcagggaagcaagagtcaggaggatagcttgagcccaggagttcgagacctgcctgggcaatatagcgagaccycgttctccagaaaaaggaaaaaaaaaacaaaaacaaaagacaaaaaaaaaaataagagtaactacaatgtgagaacatttcattcccataaaaagaaacc

SEQ ID NO: 372909 - DNA, 201 bp, Homo sapiens
ctccagttttgcaatgagattgtgaggaaggagaaggcaaggattctgttccaatgtttggtcccagaggacctagaatagtactttgtaccgggtaagcrcttaataaaataatgcttactcttatgaatttagctgcagaaacatttagtcccatagacaatatgtgtagaatgtaaaaaatgcaaatcttactaaaag

SEQ ID NO: 372910 - DNA, 201 bp, Homo sapiens
aaagtgctgggattacaggcatgagccactgcgcttggccagtacaggcatttttagtcctgggggaaattgtaggtggtggttggcacatgggctctctygattcctgcagagtcaaccaataggattccatttggtgctgcctctggtggcaggggaggggagggacccttggctggggtggccgttgtcttcatgtgg

SEQ ID NO: 372911 - DNA, 201 bp, Homo sapiens
tgtcctcatgtttgcagatggagatctctactctgaagccttttaggggcgtgggcacttttgagagcctgagctggaactgaagctggagctgcagtctrggccttggtttgattcttggcctttggccagcacagcctaagacccttagcagtgcgggcatgagcatgcgtcccaagtttggagtgggcaatgtaggca

SEQ ID NO: 372912 - DNA, 201 bp, Homo sapiens
gccgttgtcttcatgtgggctcctggaagccactgtttgttgttctatcatgtccggagagcaatgcctccttccccatctctgttcccttccaggtgacyaaccgcggggaggctcacctcgagctgaacgccttccgcaggaagcatgattgtgccctggtcatctcgggagactccctggaggtgagcttggggaccc

SEQ ID NO: 372913 - DNA, 201 bp, Homo sapiens
tgtgaagcatagatgtaataatagtacttactgtgatatatttattttcttaaatccttttattctaaaataaagcctacctttaaaaaattattattatwtttatttatttatttatttgagacggagtctcgctctgttgcccaggctggagtgcagtggcaatagctcactgcaacctccgcctactgggttcaagcg

SEQ ID NO: 372914 - DNA, 201 bp, Homo sapiens
atcttggtagtcaaggggttggagagatggaatggacggggcaggccaggcactcagcaagcgctccgtgaaagacgagagtgcggtaaagacaagcatamattcttggttaaggtaagaatgaaacatcttttctctctggtctgtgtggctcgcaggggacggaggcaatgacgtcagcatgattcaggaatctgactg

SEQ ID NO: 372915 - DNA, 201 bp, Homo sapiens
acccaggctggagtgtagtggcgcgatctcagctcactgcaacgtctgcctcttgtgttcaagcgattctcttgcctcaacctcctgagtagcctataggygcctggctaattttttgtatttttgtagagacggggtttcaccttgttgggcaggatggtcttgatatccttacctcgtgatccgcctgcctcagcctcc

SEQ ID NO: 372916 - DNA, 201 bp, Homo sapiens
tagagaaaccctgtctctactgaaaatacaaaaattagctgggcatggtggtgggtgcctgtaatcacagctacttgggaggctgagataggagaatcgcytgaacccgggaggcagaggttgcagtaagccgagattgcgccactgcactccagcctgggcaacagaacaagactctgtctcaaaaaaaaaaaaaaaaaa

SEQ ID NO: 372917 - DNA, 201 bp, Homo sapiens
agcatcccaaatccaaaatctcaaatggtctaaaatctggccaggcacggtggctcatgcctgtagtcctagcactttgggaggccgaggtgggaggattrcctgaggccaggagtttgagaccagcctgggcaacatggtgaaacccatctctactaaaaatataaaaattagtggggtgtggtgggacgtgcctgtagt

SEQ ID NO: 372918 - DNA, 201 bp, Homo sapiens
ccctgtctctattaaaaatacaaaaattagctgggcttggtggcatgcacctgtagtcccagctactcaggagactgaggcaggagaatcgcttgaatccrggaggcggaggtggcagtgagcgccactgtactccagcctggtcaacagagcgagactccgtctcaaaaaaaaaaaaaaaaggaatttgctgttgcccag

SEQ ID NO: 372919 - DNA, 201 bp, Homo sapiens
atcccagctactcaggaggctgaggcaggagaatcacttgaacccaggaggtggaggttgcagtgaatcgagattgagccactgtactcttgcctaggtgaaagagcaaaactccatctcaaaaaaaaagaaaagaagtgtgtttgaagtataggagtgccaaggcccggagggggcagcagagatgctcccctgtccatc

SEQ ID NO: 372920 - DNA, 201 bp, Homo sapiens
tggatgttagtcctttgtcagacgtatagattgtgaagattttctcccactctgtgggttgtctgtttactctgctgactgttcctcttgccgtgtaaaasctcttcagtttagttaagtcccaactatttatctttgtttttattgcatttgcttttgggttcttggtcatgaaatccttgcctaagccaatgtctagaa

SEQ ID NO: 372921 - DNA, 201 bp, Homo sapiens
ccagctactcaggaggctgaggcaggagaatcacttgaacccaggaggtggaggttgcagtgaatcgagattgagccactgtactcttgcctaggtgaaagagcaaaactccatctcaaaaaaaaagaaaagaagtgtgtttgaagtataggagtgccaaggcccggagggggcagcagagatgctcccctgtccatcctg

SEQ ID NO: 372922 - DNA, 201 bp, Homo sapiens
tagagatgggggtttcaccatttttggccaggctggtctcgaactcctgaccttaagtgatcctctcgccttggcctcccaaagtattgggattataggcgtgagccactgtgcccagcccgtttcttcttcccccccttttgttttttttttgagacagagtcttgatctgttgccaggctggagtgcagtggtgcgatc

SEQ ID NO: 372923 - DNA, 201 bp, Homo sapiens
aaaattagccaggcatggcagtgggtgcctgtaattctagctactcaggaggctgaggcaggagaattgcttgaacccgggaggcagaggttgcagtgagyggagattgtgccactgcactctgggtgacagagtgagactgtctcaaaaatatatataacataaaataaaagaatctagaagtaaaacgcatcttttctt

SEQ ID NO: 372924 - DNA, 201 bp, Homo sapiens
actcctgaccttaagtgatcctctcgccttggcctcccaaagtattgggattataggcgtgagccactgtgcccagcccgtttcttcttcccccccttttkttttttttttgagacagagtcttgatctgttgccaggctggagtgcagtggtgcgatcttggctcactgcaacctctgcctcctgggttcaagcgattct

SEQ ID NO: 372925 - DNA, 201 bp, Homo sapiens
ttccctatcttcagggctaatctgctctgctgaagtgctgatggacattaggaaaaacctgtgagaaaattatatgcccaataaatagaaccagaaggaayctgctggttgattatacttcaagtttacgaccacgttgatgttttccctttccctggctatgacccggagcaccaataacaaatggtctgcttgtgaaat

SEQ ID NO: 372926 - DNA, 201 bp, Homo sapiens
tccatctcaaaaacaacaacaacaaaatttgccatcagtctgtagcaattaagtgtggagtagaaaggaggccaaaggagggaaagaaaatatttttggtrttaaaaagctattgattgtcaatcttcctttttgggcattgaggtgaaaatgctcccagttgagtggtgagaatgtaggtacagtagatcctggaactca

SEQ ID NO: 372927 - DNA, 201 bp, Homo sapiens
ttatgcacataacttagcataattttattaggcagctcatcaccaacagaattagtgaaaatcaggccagaaaaaatctgagagccaggcttatgcagacrtggaggcttttgctctaaaatggtctgctcacgcttggggaagaccccaagagaaagcactacctttcttctgggccctgagcgggttgggagtggaaat

SEQ ID NO: 372928 - DNA, 201 bp, Homo sapiens
caaaaccaaaccccaaaacacacataacatagttgatgcccctgtgtgcccctccatgttagattttaccccttccccaggaagtaactactcttctgaatttggtatttacaatttccatgtatatcattatttactctttcttttacaaatgatacttttattacccatgtatgtttttctaaacaacatatggaagtg

SEQ ID NO: 372929 - DNA, 201 bp, Homo sapiens
gcaggaaggagggtggcagtgggacccaggggagaccctgctcaccctgtataaggacttgaacatcagacatgcacagtgctgctgtgtgagaaatgagrtagtgaagccagaggaaggcagtggacagtaatcaaagcctgtggggctgctccactcatgaggcaaaaagcagatgctttctgggatgttctgaaacct

SEQ ID NO: 372930 - DNA, 201 bp, Homo sapiens
ctcctgaccttaagtgatcctctcgccttggcctcccaaagtattgggattataggcgtgagccactgtgcccagcccgtttcttcttcccccccttttgttttttttttgagacagagtcttgatctgttgccaggctggagtgcagtggtgcgatcttggctcactgcaacctctgcctcctgggttcaagcgattctc

SEQ ID NO: 372931 - DNA, 201 bp, Homo sapiens
ccccctaagtagctgagattacaggcatgcgccaccatgctcggctaagttttgtatttttagtggatacggggtttcaccatgctggccaggctggtctygaactcctgacctcatgatctgcctgccctggcctcccaaagtgctgggattatgggaatgagccaccacactcggcaattatgactttttaaaaattta

SEQ ID NO: 372932 - DNA, 201 bp, Homo sapiens
agccacccgaggagctgggattacaggtggccaccacacccagctaatttttgtacttttaataggggtgggggtttcaccatgttggctaggctgatctsgaactcctgacctcaggtgatccgcccacctcggcctcccgaagtactgggattacaggtgtgagccacgacagctgactctgagaagtcgtgtaatttg

SEQ ID NO: 372933 - DNA, 201 bp, Homo sapiens
tcaccatcttcacttagtaagttccaaagcaaaatgaaataagtatgtatgagtatattcatgatggactgttttctttctatcacatgaagtttttttctttttttttagacggagtttcgctcttgttgcccaagctggagtgcaatgtcgcgatcttcgctcgctgcaacctccacctcctgggtttaagcgattctc

SEQ ID NO: 372934 - DNA, 201 bp, Homo sapiens
ttaaacagctgaattaaaatcctcattaataggaactcattattgggaggaaaaatggatgacaggtttttttattgttgttgctttgttttagttttcarcattttagataattttatttcaatcaaggtgtatcattttttttttttttaaatcatagagatgggatttcgccatgttgcccaggctggtttcgaactc

SEQ ID NO: 372935 - DNA, 201 bp, Homo sapiens
ttttcaacattttagataattttatttcaatcaaggtgtatcattttttttttttttaaatcatagagatgggatttcgccatgttgcccaggctggtttygaactcccgagctcaagtgatggcacccgcctcaccctcccaaagtgctgggattacagatgtgagccactgtgcccagccaaggtgtatctcgaacaac

SEQ ID NO: 372936 - DNA, 201 bp, Homo sapiens
tacttcatcatttctgggcaccataaaccggcaagaccatttatatatttattttaaaagccactgttgggtataaacttgttacatttaaactgcagccttttttttttttttttttaagttcccactatttaaacaaaagccccaggaagtggtagtgattatttataataatcctttcaactctttgcctgttttcaa

SEQ ID NO: 372937 - DNA, 201 bp, Homo sapiens
gtgccctgcatgaacaatgaaaaatacaagtatagatggaggtgttcagggtcaaaaaataggcccacacatattactgccctggaatttattaaaaaaawtttttttggtaggctattctgcagtttgactgaattgtcatttgcttgtttcgactcaagggaaacatctggtttctccctgcaatgtagacaaactgct

SEQ ID NO: 372938 - DNA, 201 bp, Homo sapiens
ttagtggagacagggtttcactatgttggccaggctggtatcgaacgcctgacctcatgatccacctgcctcggcctcccaaagtgctgggattacaggcrtgagccaccacgcctggcctaatttaacttttttaaaaaatagagacagggttttgccatgcggcccgggctggtctcaaactcctgggctcaagcaatc

SEQ ID NO: 372939 - DNA, 201 bp, Homo sapiens
gctccctctctgttttctattttttgagacggagtttcgctcttgttgcccaggttggagtgcagtggtgcgaactgggctcactgcaacctccgcctccygggttcaagcgattctcctgcttcagcctcccgagtagctgggattacaggcgtgtgccaccacatctggctaatttggtatttttagtagagatggagt

SEQ ID NO: 372940 - DNA, 201 bp, Homo sapiens
cggcgccgccgacatgacggacaacatcccgctgcagccggtgcgccagaagaagcggatggacagcaggccccgcgccgggtgagtgggcctgggcccgygttttcctttgtccgcgcctcccggagcccggcgctcgggccagcctggccgggcctgacaggttggccgcgcgccgcgcccggcgccatgagcctgggg

SEQ ID NO: 372941 - DNA, 201 bp, Homo sapiens
gagactccgtctcaaaaaaaaaaaaaaaaggaatttgctgttgcccaggctgtagtgcagtgtgcaatcatagctcactgcagccttgaattcctatgctraaggaatcctcctgccccagccccctgtgtggctgggactacaggcacatgccaccatgcctggataattttttttttaattcattttttttcctatagg

SEQ ID NO: 372942 - DNA, 201 bp, Homo sapiens
gtggtttcgatttgcatttccctgatcattagtgatgttgatcattttttcatatgtttgttggccatttgtgtatcttcttttgaaaattgtctattcawgtccttagtccacttattgatgggattgtttgtttttttcttactgatttgtttgagttctttgtagattctggatgttagtcctttgtcagacgtatag

SEQ ID NO: 372943 - DNA, 201 bp, Homo sapiens
ggagtgcagtggtgcgaactgggctcactgcaacctccgcctcccgggttcaagcgattctcctgcttcagcctcccgagtagctgggattacaggcgtgygccaccacatctggctaatttggtatttttagtagagatggagtttctccatgttggtcaggctggtctcaaactcctgacctcaggtgatccgcccgcc

SEQ ID NO: 372944 - DNA, 201 bp, Homo sapiens
ggtcttgctatgttgcctaggctggtcttgaactaataggctcaagtggtccacctgtctcagcctcccaaagtgctgagattacaggtttgggtcactgygtccggcctctttacccgtttctaatcatctaattggatgttctccagtctctctgtaaatgtattgaccaaagcccaagacataatgaaaggaggccag

SEQ ID NO: 372945 - DNA, 201 bp, Homo sapiens
ataaatgatattaaattatgttaaaatgtaaaatatgtgagacactaaaagtctagagttgtgcacttatattatttcgtgtctttaagtctttaagttctttttttttttttttttttttgagattgagttttgcttgtgtcgcccaggctggagtgcaagggtgagatcttggctcactgcaacctccacctcccgggt

SEQ ID NO: 372946 - DNA, 201 bp, Homo sapiens
taaatgatattaaattatgttaaaatgtaaaatatgtgagacactaaaagtctagagttgtgcacttatattatttcgtgtctttaagtctttaagttctttttttttttttttttttttgagattgagttttgcttgtgtcgcccaggctggagtgcaagggtgagatcttggctcactgcaacctccacctcccgggtt

SEQ ID NO: 372947 - DNA, 201 bp, Homo sapiens
aggatttcaccatgtttgccaggctggtcttgaactcctgacctcaggtgatctacctgcctcggcctcccaaagtactgggattacagacgtgagccacygtggtgcccggcctataattactttttatctctctcttagctgaacatttgtaagttacatgggcttgttacaagatagcagcatcataaagattttgtg

SEQ ID NO: 372948 - DNA, 201 bp, Homo sapiens; identical to SEQ ID NO: 80727

SEQ ID NO: 372949 - DNA, 201 bp, Homo sapiens
gaaactccatctcaaaaaaaaaaaaaaaaaaaaaaattgaaattgaaattttaataatatttcccagggatatgaaaaagctttaatcactgacccccccmcttgcaagatatgtgcattttaaatgctagaacttaaaaacccactgaaacacacggtggaaaagccacaaaacaacccagccattgttgatgtctgtgt

SEQ ID NO: 372950 - DNA, 201 bp, Homo sapiens
cactgcttttattctgtactgtggagtcagatgcaggtgtgaatcccagcactgacctgttctaactctgagactttgggggaaggtgggacatcctgagyctcctttcctcgtctgaaagctggagatggaactaccttcttctgagggctattgtgaagattaaatgaaaccttcaaaatctgtacagtgctgagcaca

SEQ ID NO: 372951 - DNA, 201 bp, Homo sapiens
tgggaggctgaggtaggattgcttgaggccaggagttgaacactgcagtaagccatgatcacatcaccgtactctagactgggggacagagccagactccrtctctaaaatacacgctacacacacacacacacaaacacagttgagacttcatcatgtaccaagtctatgctaggtttctgcatcacagagatgaacgtg

SEQ ID NO: 372952 - DNA, 201 bp, Homo sapiens
gggttttcacggtgttagccaggatggtcttgatcccctgaccttgtgatccgcccgccttggcctcccaaagtgctgggattacaggcatgagccactgwgcctggcctttttttttttttttttttttttgagacggtctccttctgtcgcctaggctggagtgcagtggcgcgatctcggctcattggaacctctgcc

SEQ ID NO: 372953 - DNA, 201 bp, Homo sapiens
gatcccttgagtccaggggtttgaggctgcagtgagccatgatcgcgtcactgcactccagcatgggatggagtgtgacgctgtctcaaaaaaaaaaaaamaaaacaaaaaaaacccagaaacgttaaaaaatctcaagagttttgcattcctaattcattgggggtataagtggtggcagggcccacaatgggcttcagt

SEQ ID NO: 372954 - DNA, 201 bp, Homo sapiens
aaaaaaaagagtccctctgtggcccaggctggagtgcagtggtaccatcttggctcgctgcaacctccgcctcccaggttcacgtgattctcctgcctcakcctctccagtagctgggattacaggcatgtgcaaccacccctggctaatttttgtatttttagtaaagatgggatttcaccatgttggccaggctggtct

SEQ ID NO: 372955 - DNA, 201 bp, Homo sapiens
actttcctttgtggttcttctttttctcattactttgttagaatgctttatagaggaaagaatatcaaactttcactttttgtgggttatacatatttttkcagttttttgtttgttttttgtttttgtttgtgatgggctttattttcttttaccatatagaaatttaaaattttttattgcctacattttctttttttt

SEQ ID NO: 372956 - DNA, 201 bp, Homo sapiens
tatttttgcagttttttgtttgttttttgtttttgtttgtgatgggctttattttcttttaccatatagaaatttaaaattttttattgcctacattttctttttttttttaattatactttaagttctagggtacatgtgcacaacgtgcaggtttgttacatttgtatacatgtgccatgttggtgtgctgcacccatt

SEQ ID NO: 372957 - DNA, 201 bp, Homo sapiens
aggctcacctcgagctgaacgccttccgcaggaagcatgattgtgccctggtcatctcgggagactccctggaggtgagcttggggacccctgagagccaktcctcccagcagcctgggtcttacccggcttcggcaggggcactgcaggctcggcagcgacctccaccaacgcaccacctctccctccaccaacgcacca

SEQ ID NO: 372958 - DNA, 201 bp, Homo sapiens
ctgcttactgcaacaatctctgcctcctgggctcagacaatcctcctgcctcagcctcctgagtaactgggaccatagcacgagccaccatgcccagctattttttttttttttttctgtttcaggtttctattttcttttgtagaaaccagctgattctttttgtagtttttgtaaagatggggtctccctatgttgccc

SEQ ID NO: 372959 - DNA, 201 bp, Homo sapiens; identical to SEQ ID NO: 80732

SEQ ID NO: 372960 - DNA, 201 bp, Homo sapiens; identical to SEQ ID NO: 80733

SEQ ID NO: 372961 - DNA, 201 bp, Homo sapiens; identical to SEQ ID NO: 80735

SEQ ID NO: 372962 - DNA, 201 bp, Homo sapiens
gacctcaagtgatccattggcctcccaaaatgctggaattacaggtgtgagccaccacgcctggccaaaatggccttagttttaatttttgttatttaagytgttctgaggaaataaggctgtttttcccttatctggcatgatcggaggtttttgaatacatgaaaaatttacattcgtattcctttgaggatgctgcaa

SEQ ID NO: 372963 - DNA, 201 bp, Homo sapiens
ggctgtgagctcaatgttaatgaatccaggtgtctttaagtagaaacgcacataaaataaggttatatatttatgaagatattgcaaccaggggcaaaaayctaaccctgtatttcccctacaggtgatggtttagtatttgctaattcagtgttcacagtgactttagaaaacatagctactatgaataatgagaattga

SEQ ID NO: 372964 - DNA, 201 bp, Homo sapiens
gtcttctagccactctgaaagttgcctcatttcaaacccaactcttaagtgcagcagttctgaatgagggctgtggagccaagtggtttgggtttagatcttttttttttttttttttttttgaggcagtcttgctctgtcacccaggctggagtgcagtggtgagatctcagctcactgtaacttccgcctttcaggttc

SEQ ID NO: 372965 - DNA, 201 bp, Homo sapiens
tttaagttctagggtacatgtgcacaacgtgcaggtttgttacatttgtatacatgtgccatgttggtgtgctgcacccattaactcgtcatgtacattargtatatctcctaatgctatccctccccactcccccacgccacgacaggccccggtgtgtgatgttccccaccctgtgtccaagtgttcttactgttcatt

SEQ ID NO: 372966 - DNA, 201 bp, Homo sapiens
gctgagaatgatggtttccagcttcatccatgtccctacaaagggcatgaactcatccttttttatggctgcatagaattctatgcatagtattctattcrttttcttaatccagtctatcattgatggacatttgggttggttccaagtctttgctattgtgaatagtgccgcaataaacatacgtgtgcatgtgtcttt

SEQ ID NO: 372967 - DNA, 201 bp, Homo sapiens
gatcaccattctaactggtgtgagatggtatctcattgtggttttgatttgcatttctgtgatggccagtgatgatgagcattttttcgtgtctgtttttyttttcttttcttttttcttttcttttttttctgagactgagtcttgttcttgtttcccaggctggagtgcagtgttgtgatcttggctcactgcaacctc

SEQ ID NO: 372968 - DNA, 201 bp, Homo sapiens
agtggggacccttggtgtgtctctgctgggttcctgccatttggattcctccctaggttgccatctagacaattgagaggtggctctcagattctacaacragatgagattgccagactccagctaagagggctggctccggggtcagcctgctggactcacatcctggctctgtcccttatgggctgcaagaccctctga

SEQ ID NO: 372969 - DNA, 201 bp, Homo sapiens
catgtgatagacattgaacaaattttagcatattgatttgcctttagaaaaattatttgtgcaaacatcttcctttatgtttactatttatttgtattttwtttttttttttatttatttttggagatggagtctcgctcagtggtccgggctagaggtcagtggcacaatcttggctcactgcaagctccgcctcctggg

SEQ ID NO: 372970 - DNA, 201 bp, Homo sapiens
aatctttgcagtctctcaaggctatcgggaacttcttgtctctgctgtcctccttgggggcttcattttcaggccgactagtccctcaatgggaacaggaygtctgtcccctgcccaggcatgttttctgctaccttagcaaccccagggagaagaacacatctttccaagtatttctagcaaaatcccagccaggggtct

SEQ ID NO: 372971 - DNA, 201 bp, Homo sapiens
ttgaacaaattttagcatattgatttgcctttagaaaaattatttgtgcaaacatcttcctttatgtttactatttatttgtattttttttttttttttatttatttttggagatggagtctcgctcagtggtccgggctagaggtcagtggcacaatcttggctcactgcaagctccgcctcctgggttcatgccattct

SEQ ID NO: 372972 - DNA, 201 bp, Homo sapiens
tggtctcgatctcctgacctcgtgacccacctgtctcagcctaccaaagtgctgggattacaggcgtgagccaccgcgcccaggcctgtattttctttcctttttttttttttttttgagacagagtctcactgtttcacccaggctggagtgcagcggtgcgatctcggctcactgcaagctccgcctcccgggttcacg

SEQ ID NO: 372973 - DNA, 201 bp, Homo sapiens
tttgggaggctgaggcgggtggatcacaatgtcaggagatcgagaccatcctggctaacacggtgaaccccgtctctactaaaaatataaaataataataattataataataatcagctgggcgtggtggtgggcgcctgtaatcccagctgctcaggaggctgaggcaggagaatcgtttgaacctgggaggtggaggtt

SEQ ID NO: 372974 - DNA, 201 bp, Homo sapiens
catctaagtcactctgaaggcaaataaatgatctttcatgaagggctgaagttattccagtgccctgtgaagtgggcatttatttctgcaacggcctctgyagcggttgaaccctttcctggagaggcaggaaataatggtgctggagtcactggcagctgtgtgtgggagcgtgtacttctgggtgtattgtgtgtttgc

SEQ ID NO: 372975 - DNA, 201 bp, Homo sapiens
ttgggaggctgaggcgggtggatcacaatgtcaggagatcgagaccatcctggctaacacggtgaaccccgtctctactaaaaatataaaataataataattataataataatcagctgggcgtggtggtgggcgcctgtaatcccagctgctcaggaggctgaggcaggagaatcgtttgaacctgggaggtggaggttg

SEQ ID NO: 372976 - DNA, 201 bp, Homo sapiens
tgggaggctgaggcgggtggatcacaatgtcaggagatcgagaccatcctggctaacacggtgaaccccgtctctactaaaaatataaaataataataattataataataatcagctgggcgtggtggtgggcgcctgtaatcccagctgctcaggaggctgaggcaggagaatcgtttgaacctgggaggtggaggttgc

SEQ ID NO: 372977 - DNA, 201 bp, Homo sapiens; identical to SEQ ID NO: 80734

SEQ ID NO: 372978 - DNA, 201 bp, Homo sapiens
gtgcttacagccagccccggagcataatagacaagcagtaaatatttgttagaggcatggttgggacttgggtgctggaggctggcacagcacatagctcytatcgcgtcagccaggtcttacctatggcggttttctctcccaggtactccacaatttacaccatgtttcctgtgttttctctggtcctggacaaagatg

SEQ ID NO: 372979 - DNA, 201 bp, Homo sapiens
gagcccacagcagagaaatgcagtgtgagttaatgcacgatacggaagaacctgactcatttacggtcagcgttttataagctgagttaaaccccagaagsgtctgtcttgctcatccaactacatagaaagtccacagcgtcaaaaatgagtgtttcctgtaggacagggaagtgccccctcacctgtacagcctttccc

SEQ ID NO: 372980 - DNA, 201 bp, Homo sapiens
ctatagtcttgcctggatgatggcaccagcctcataaataattcctgtttctgttttttttgttgttgttaatataacagtttcattgagacataactcayataccttataattcacctatttaaagtgtacaattcagcaagttttagtgtatttgtagagttgtgtagctatcactacaatgtgagggccaggcgcggt

SEQ ID NO: 372981 - DNA, 201 bp, Homo sapiens
agcagcagaggacaccaggagtgccttatctgcaatgggccacaggcactgtttctgcccctccaactgtgatttttttttttttttttttttgagacggrgtctcgctgtgtcgcccaggctggagtgcagtggcatgatcttggttaactgcaacctctgcttcctggattcaagcaattcttgtgcctcatcctccct

SEQ ID NO: 372982 - DNA, 201 bp, Homo sapiens
cttcttattcttgttcttcttcttctttttttttttttttttgagacagagtttcgctcttgtcgcccaggctggagtgcagtggtgtgatcttggctcaytgtaacctccgcctcccaggttcaagggatccttctgcctcggcctctggagtagctgggattacagttgcccgtcaccatgcccggctaatttttgtat

SEQ ID NO: 372983 - DNA, 201 bp, Homo sapiens
agctgtcatccatgaaaggcatggtttgggctcaataggtttgcttatgaaaggcttgggggtccatcgctacagaaataaacagctctaataattggaartttgttccccgttacaaactctgattgagagacgacttgggtgaagtggcgaaagctgaaagggatagatttattagaagacttttaatgatttaggatg

SEQ ID NO: 372984 - DNA, 201 bp, Homo sapiens; identical to SEQ ID NO: 80719

SEQ ID NO: 372985 - DNA, 201 bp, Homo sapiens
aacgtgctggagtgttcttcacttgacacctccacttcctgggaacacgtggaggccactgctcctcagccatcattgattgtggttatttgggaaaatgyacctggttttgtcagatgctcagtttttccacccattcagcagtccagatttgtgtgtgagaccgcacaatgttgacttaaatttggaaacatacatgtg

SEQ ID NO: 372986 - DNA, 201 bp, Homo sapiens
ttcatcattgaaaatcttccaagtgctttgagttttccttttactttctgtagcctttgcccctaaatgaggccccttctcgcttttcatcttcagccaastgaaaaaacattggtgtctgttaagtgcactttgtacactgtctgtcatgggaagcgggctttgccgctgaaagagggtgttcctttcagtttctcattc

SEQ ID NO: 372987 - DNA, 201 bp, Homo sapiens
tgagtaaacagagaaacgagggtcttcactgtagagtctgtcagggtgctttgagatactgtatgctgcgactcctcaacttacttaacagaggactttcstcttctttccacctcccctgtaattttgaggggccatttgctgtgtgtgggaaatatagttgctttggaaacatagtggatgcctcctgaagtcttgcat

SEQ ID NO: 372988 - DNA, 201 bp, Homo sapiens
ttcagtggctcacacctgtattcccagcacattgggaggccgaggtgggcagattacctgaggtcaggagttcaagaccagcctggccaacatggtgagamcccgtctctactaaaaatacaaaaattagccaggcatggcagtgggtgcctgtaattctagctactcaggaggctgaggcaggagaattgcttgaacccg

SEQ ID NO: 372989 - DNA, 201 bp, Homo sapiens
taaataaattccccttttaaaatcaaatttagacttggaccaccaactgcatatagcttgaaaccaaagaatttctttcttgaagttcttcaaagatctcmtacaatgtcttgctttttcagtgaaagaaaatgtgtttgccctgacctcttgtgcttctgatggtgcctaattttattggattttaggaaggaaaacagg

SEQ ID NO: 372990 - DNA, 201 bp, Homo sapiens
aagtgaatgttgaattttgggattctatccaaaaactttgcctggggagaaaaatctctttcctgtgagacagacagacagacacacacacacacagacasacacacacacaaatattttttcaaggtttatatgcgttggttagccagaaatcctgcttacaaacacaagtacaagttttgatttcctgttcgatgtgct

SEQ ID NO: 372991 - DNA, 201 bp, Homo sapiens
tccatattcaatgaagactttccgggcatttattctgggcttcctggagtagcaaaatttaggcacaaggtattgatggccatgctcagttttcttgcttrtctttactgcctcccacctcccagtgacgcgaatcattgggggaaaatgggggaaggatctgtggctgcgccgtcattcctcagagctaggacttctcag

SEQ ID NO: 372992 - DNA, 201 bp, Homo sapiens
ctatcagagataaagtgtgcagttgaacgcttttaaacgtgggtgcctgtcttggcctgggggtgctcttatgagtcagcatgttgttctaaaagattgtyggtgattaaggggcatttgaaagttattctaaaagaggaaactctaccactaatctgattttggatatttctgttccatgaaagggctgcatagacaaag

SEQ ID NO: 372993 - DNA, 201 bp, Homo sapiens
gctcccactgcagtcacgcctcccaccttagagcttcgtaaggggttcttataccagtggttctttcttctttttctttctttcttttttttttttttttragacacagtctcactctgttgcccaggctgaggtacaggggtgcgatctcggctcactgcaacctccacctcccgggttcaagcaattctctgcctcagc

SEQ ID NO: 372994 - DNA, 201 bp, Homo sapiens
actccgtgggaggaagtgactcatgggaggggatcgttgatgcggtatttatattggacagaacttctgaactcactcaagcccttttcttagtgaggaarctgggctgggagcatcatttcctacagccacatgttgttgagcaccctttggttgtcggggggaaggaaaaaataaaacctctgattctttaatgtgcag

SEQ ID NO: 372995 - DNA, 201 bp, Homo sapiens
agtaagaaaatggccaacacattaggagagaaaactataaccagctaaggacttgtgatggtttttcccctgggttattcatttactggtacttttttttkttttttttgagacgaagtctcactctgtcgccccatcctggagtgtagtggtgctatcttggcttaccacaaactctgcctcccgggttcaagagattct

SEQ ID NO: 372996 - DNA, 201 bp, Homo sapiens
ccttgtcctttatcttctccccgtgatgggtgcatttctgctgcagccagtctttgcatgctttgcgagtgccaggctgcctcccacctccggatctttgmctgtgcagttccatctgcctggattgcacttccttgtatgggtgcatggcagcttcttcttggcactcagctaaactgtcccctcacctccctggccacc

SEQ ID NO: 372997 - DNA, 201 bp, Homo sapiens
agctaattgtgtgagaaatgctatttttcattttgttttcttatttatttttatttttatttttttgagacagagtcttatactctcttacccagactacrgtgcagtggtgccatcacagctcactgtagccttgacccctcaggctcaggtgatcttcccaccccagcctcccaagtagctgggaccacaggcatgcgt

SEQ ID NO: 372998 - DNA, 201 bp, Homo sapiens
acagacacatgcagctgaggccacttctggttatgaggagacggcgggtgcgggaaggtcagctgcgctctggagagtctcacagagtccgctttccatcytactgtgttggctgatgagttcagcctgagaggaggcattagaattctgcctgcttctaactggaaaagcgggctgtctttcgtcgggttctggaagagt

SEQ ID NO: 372999 - DNA, 201 bp, Homo sapiens
tataacccaaatgctctatgcaaatgactgtccagttatctgatgtgaggaagttttagttcagttataaaacttctcctaggcttggtacggtggctccygcctgtaatactttgggaggccaaggcaggaggatcacttgagccaacgagtttcagtccagcctgggcatcattgccagactccacctctactaaaagc

SEQ ID NO: 373000 - DNA, 201 bp, Homo sapiens
ttcattttgttttcttatttatttttatttttatttttttgagacagagtcttatactctcttacccagactacggtgcagtggtgccatcacagctcacwgtagccttgacccctcaggctcaggtgatcttcccaccccagcctcccaagtagctgggaccacaggcatgcgtcaccatacctggctaatttttgtatt

SEQ ID NO: 373001 - DNA, 201 bp, Homo sapiens
tcactggcagctgtgtgtgggagcgtgtacttctgggtgtattgtgtgtttgcaggctgggcactctgtaaagacgtgttgaattgaaatgaattaagatrgtgatgtatcttgaacctgctgctttgcaggcacagtgaaggtgaagagttctaacatccaagttggagaccttatcatcgttgaaaaggtgagcagaat

SEQ ID NO: 373002 - DNA, 201 bp, Homo sapiens
agagaacacagtgtttttatttttcccaaagtgctcttgtcgagatgaagactttgtggttaggatgacccttttagaggaaggggctcctgatactggtytggaaaataaacaacagattcttgacatttttacaaccatccttcctaagcagcggcacagcctgggtgaaaagtcactggaaaagtggcttttccggcg

SEQ ID NO: 373003 - DNA, 201 bp, Homo sapiens
cttcccaccccagcctcccaagtagctgggaccacaggcatgcgtcaccatacctggctaatttttgtattttttgtagagagagggggtgttaccatttkcccaggctggtctcgaactcctgggctccagcaattagcccacctcagcctctcaaagtgctgggattacaggcatgagccactgcagccagccctgttt

SEQ ID NO: 373004 - DNA, 201 bp, Homo sapiens
actgttaacattgatgtagaaaaagaattccaggatgaggcattgttctttgtgctaaagaaaatgcctttaacccctgtccactgtgctgaaaatggccragagcaagtcccagttagaattgcaccgggacatgagtctgtcagagaacacagtgtttttatttttcccaaagtgctcttgtcgagatgaagactttgt

SEQ ID NO: 373005 - DNA, 201 bp, Homo sapiens
atgcctgtaatcccagctactctggaggctgaggcaggagacttgcttgaacccaggaggtagaggttgcagtgagctgagatcatgccactgcacccagyctggatgacagagcaagacagtctcaaaccataattgggattattccacatactttggtctgtgaactgtcatttttcatttactgagttgtttttttta

SEQ ID NO: 373006 - DNA, 201 bp, Homo sapiens
tgtaatcccagctactctggaggctgaggcaggagacttgcttgaacccaggaggtagaggttgcagtgagctgagatcatgccactgcacccagcctggrtgacagagcaagacagtctcaaaccataattgggattattccacatactttggtctgtgaactgtcatttttcatttactgagttgttttttttatgagc

SEQ ID NO: 373007 - DNA, 201 bp, Homo sapiens
cttttttgagattggtaataattgctatcaatgtgctattttttctttctgctgttactttcttaggaagacaagaacccttctgttaggttacttctccstatcttgttcttccccttttttgcaacaatgttcgtagaagactcagaatagtggttgctgtgaagttagaaatcatgtgttttgggccctttccacacc

SEQ ID NO: 373008 - DNA, 201 bp, Homo sapiens
gatttcagatgatctgcctgcctcggcctcccaaagtgctgggattacaggcttgaaccaccacgcctggcaatttactagtacttttaatggaaaaaggrgatacaatttaaaaaccataaaatttgctcttttaagcatatgattctgtagtttttaatatgttcacaatactgtgcaaacattggtactgtctaattt

SEQ ID NO: 373009 - DNA, 201 bp, Homo sapiens
ctccattttcacccaacaaaagaccttttaccttttcaagggatttcctttcagtctcttttctaagcatatccgagtgtaaatatccacacacatttttrtaaaattatcactgaactccatagaaggcttcctaaacttcctccctcattgaactatatgtatacgatgagaattttttcgtattattaaaatctgatt

SEQ ID NO: 373010 - DNA, 201 bp, Homo sapiens
cataaaatttgctcttttaagcatatgattctgtagtttttaatatgttcacaatactgtgcaaacattggtactgtctaattttagaacatttttatcamccctaaaaagaaagcccacatcccttgagttcccaaacccccctgctctatccccccagctgtcagtctactttctgtctctggatttgcctattctgaa

SEQ ID NO: 373011 - DNA, 201 bp, Homo sapiens
tctccattttcacccaacaaaagaccttttaccttttcaagggatttcctttcagtctcttttctaagcatatccgagtgtaaatatccacacacattttygtaaaattatcactgaactccatagaaggcttcctaaacttcctccctcattgaactatatgtatacgatgagaattttttcgtattattaaaatctgat

SEQ ID NO: 373012 - DNA, 201 bp, Homo sapiens
cacctcagcctcctgagtagtcaggactacaggcgtgtgccaccatgcccggctttaaatgagcataaggctcatggtaactatggccagagtgcttcccrgaatttttttttttttttaaacatttaactcttgtaccaacattgggaggaatcccaattttttttttaacccattttaggaagaatggggctcctaaag

SEQ ID NO: 373013 - DNA, 201 bp, Homo sapiens
atctatcaaggtaaggatgagtggagacacctgtttgtcttgtgctctggtactgactcagggtgtccccttcttgcctgtagaacaagaagagaagaaamgaatctgaaatagcaggaaggagggtggcagtgggacccaggggagaccctgctcaccctgtataaggacttgaacatcagacatgcacagtgctgctgt

SEQ ID NO: 373014 - DNA, 201 bp, Homo sapiens
gacgaagtgaatgttgaattttgggattctatccaaaaactttgcctggggagaaaaatctctttcctgtgagacagacagacagacacacacacacacasacacacacacacacaaatattttttcaaggtttatatgcgttggttagccagaaatcctgcttacaaacacaagtacaagttttgatttcctgttcgatg

SEQ ID NO: 373015 - DNA, 201 bp, Homo sapiens
gccagaggaaggcagtggacagtaatcaaagcctgtggggctgctccactcatgaggcaaaaagcagatgctttctgggatgttctgaaaccttttctgasagtcaggtcaagtcgtagttttggaaaaacatgtttacctcagtggcctccagaggggggtcttcccagactgtggaggcgttgtaagatgacctgttgg

SEQ ID NO: 373016 - DNA, 201 bp, Homo sapiens
gcagggtgtttgtggaatagctcaagctataaaacccagttcatccgtgactgttgacatttgaaccaggctttttaggagtgaaaaatgttgtacacccstggctaccttctgagatgggaattgtgtgcagaaagagagagggggagggagggtaggtttgggtgattgtcctgatctacttggacttgtgccatagta

SEQ ID NO: 373017 - DNA, 201 bp, Homo sapiens
cactgcgactggccttgctgtggttttttttttacaacttttattattttgtattgcacagttattttatgtctatagtagaacacatgaatgcattgatyagaaaagtaaaaagtagcccataatcttactaaaggtatagtcattgttaatgtcttcctgatcagccttctaaaaactacttcagaggccgcctactgc

SEQ ID NO: 373018 - DNA, 201 bp, Homo sapiens
ctgggactacaggtatgcactgccacacccagctaagttttaaattttttgtagagccaaagtctctctgtgttgcacaggctggtctcaaacttctggcytcaagctgtcctcccgcttcaacctccctaagtactgggattacaggcgtgagccaccgtgcctgaccagttcatctccattttcacccaacaaaagacc

SEQ ID NO: 373019 - DNA, 201 bp, Homo sapiens
caggcgtgaactactgcacccggcctagctgtgcgattttaagcaaatcattgctgcacctcagcctcctcaaaggtaaagagggactagggccattgacytcacaggtccttgctaaagatgaggtagtaatggtgataacagtggtactgacggcagtgagaaatgatcacctattgaatacctgctctgtgccaggcc

SEQ ID NO: 373020 - DNA, 201 bp, Homo sapiens
acttgcatacggtaccagatgaggttgttgccttctgttgtaaaccaagaagattgtgagcttaaacagtggttctaagccgagggtgattttggcctctrttggacatttggtgacatatcttgtcacaactaggggagtgctgctggcgtccagcgcatctggtggctggaggacagggatgctgctgaacaccctata

SEQ ID NO: 373021 - DNA, 201 bp, Homo sapiens
catctgatgtcaagaacatctgtggtctggaagcagcagcatagatcctgtgggtggggtgtttcctggggaatgagtgtcattatctcctatcgaattaytttaattttgttccagtctgaagttgttcaagacgtagggctgtgggctctgctagggtcatttgagggttgacttatcattgagcagtccctaatgtca

SEQ ID NO: 373022 - DNA, 201 bp, Homo sapiens
gtctgtctgttttccaaaagtggctgcgctattttacgtatctaccagcaacgtatgacagtttccgtttctccacatctcggtcaatccttgttactgtyagttgtttggattctggacgttctagtcagtgtggagcggtatctcattgtggttttgatttgtattttccggatggcccctgatgttgagcgtcttttc

SEQ ID NO: 373023 - DNA, 201 bp, Homo sapiens
agtcagtgtggagcggtatctcattgtggttttgatttgtattttccggatggcccctgatgttgagcgtcttttcgtatgcttattggccatttgtttatcttctttggaaaaatgtctatccatatcctttatccattttcactttgtctgtttttctttttgttgttgaggtgttgtttgtttgtttttgttttgctc

SEQ ID NO: 373024 - DNA, 201 bp, Homo sapiens
attgaggggagctgggaaacctgtccaagttcacacagctggaattagtggggctggaactcactccaggctgcctggcttccagctcccagctctctacsccaggacttgggggttagggctggggtgtgacgagagggacatcgaaaagctcacaaaagacccacagtaatgttagggtgggatattaactacgtattg

SEQ ID NO: 373025 - DNA, 201 bp, Homo sapiens
gtcagtgtggagcggtatctcattgtggttttgatttgtattttccggatggcccctgatgttgagcgtcttttcgtatgcttattggccatttgtttatcttctttggaaaaatgtctatccatatcctttatccattttcactttgtctgtttttctttttgttgttgaggtgttgtttgtttgtttttgttttgctct

SEQ ID NO: 373026 - DNA, 201 bp, Homo sapiens
tgtgtagaatgtaaaaaatgcaaatcttactaaaagaatatacaggaaaagttctccctactccttcttcctgaaagggagccagtgttattagctcgtcrtggagattgtctgtgctcatgcaagcatctccctgcatgtatgtcctcttgctttcgtgcaaagaatagcatcctacacacaccttttagccccttgctt

SEQ ID NO: 373027 - DNA, 201 bp, Homo sapiens
ggcgaggcttgtctggaactcctgacatcaagcaatccgcccaccttggcctcccaaagtgttgggattaccccgcccaggggcttattgtgtgccagagsctgttctaagtgatttgcatgaagtaactcatttaatacataaccatgtgaggtaggtaccattaggactgatgtttggcaggggagaaaattgaagtgg

SEQ ID NO: 373028 - DNA, 201 bp, Homo sapiens
tcagtgtggagcggtatctcattgtggttttgatttgtattttccggatggcccctgatgttgagcgtcttttcgtatgcttattggccatttgtttatcttctttggaaaaatgtctatccatatcctttatccattttcactttgtctgtttttctttttgttgttgaggtgttgtttgtttgtttttgttttgctctg

SEQ ID NO: 373029 - DNA, 201 bp, Homo sapiens
acacatgtagtcaatattggcaagttgggagataatagcttagaggagaaaaaataaagatgcattttaatcttaccatctatagagagaattttcattartatttttgctaataataaatgtttctggtggcataacacttccacattaacttacacaaatctgtggacatgtactcagcaaaccttctccccaacatgc

SEQ ID NO: 373030 - DNA, 201 bp, Homo sapiens
tgggattacaggcgtgcgccaccatgcccggctaattttttgtattattagtagagacggggttttgccatgttggcgaggcttgtctggaactcctgacmtcaagcaatccgcccaccttggcctcccaaagtgttgggattaccccgcccaggggcttattgtgtgccagaggctgttctaagtgatttgcatgaagta

SEQ ID NO: 373031 - DNA, 201 bp, Homo sapiens
acttactcccgggatccagctccacacttgggcagttacttatgcttgctgtgcctccagatctgtgccatggaacccccacagtggggctgttgtgaagmcccaagtaggcagtcagtatatcttgtgggtcaaattgaatgagtattttatttttagagatggggtcttgctatgttgcccaggctggagtagtgcagc

SEQ ID NO: 373032 - DNA, 201 bp, Homo sapiens
tggtggcataacacttccacattaacttacacaaatctgtggacatgtactcagcaaaccttctccccaacatgcacataaattaaatatctatttttatscagcactgcctccaaacacacaccagttgactttgagaagcagcagtagcaatcagctccaatgcagaaaggaacataatggtagtgttagatattgagt

SEQ ID NO: 373033 - DNA, 201 bp, Homo sapiens
ttggaaataaaaaaaaaaaaaacagagtgcacaagtagaagtagaaattgataacataggttgttgggcacatggccctgccccctgcctgctggcggagwattttcagctaaggcttggcttgtgaacttctccttcagccttacaggttccttgaattcagaccacctcttacagcatctcgttcttcttccgtagcat

SEQ ID NO: 373034 - DNA, 201 bp, Homo sapiens
ctagaatcgtgcctttgaaattcaatatcaataaaacattgctagcctaggcaaggtcagtttatggaacatgtgtagaaaccagtatgcattttacttgrgagctgctggagtaatttctaccagttggcgtaggattcatttcctgtaacagaaagcaggatttcctaaatttgtttcctgtgcacattccagttgggg

SEQ ID NO: 373035 - DNA, 201 bp, Homo sapiens
atatttaaatatacatatatatttattttattttatgtgtatttatataatatatgatatgcatatttataatatgtaaatatttacatattataaatatdtaaagattataatatatatatatgtaaatatatattatataatatattatgtaaatatatattatataatatattatgtaaatatatattatataatata

SEQ ID NO: 373036 - DNA, 201 bp, Homo sapiens
atacatatatatttattttattttatgtgtatttatataatatatgatatgcatatttataatatgtaaatatttacatattataaatatgtaaagattataatatatatatatgtaaatatatattatataatatattatgtaaatatatattatataatatattatgtaaatatatattatataatatattatgtaaat

SEQ ID NO: 373037 - DNA, 201 bp, Homo sapiens
cttttgtgtctggctgctttaatttagcatgaagtttttgaagtttctttttattgtgtaatagaatttcagttgggcttggtggctcacacctgtaatcycagcactttgggaggcccaggcaggaggattgcttgagccctggagttcaagagcagcctgggcaacatagtgaaaccctgtctctacaaaaaataaata

SEQ ID NO: 373038 - DNA, 201 bp, Homo sapiens
cccactggccgtaattcagatgttggctggggctgtggtctcatctcaagacttgaccagggcaggatccatttgtgagcaagctcagttgttgtgggctrcattcagctacttttggactgttgaactaagggtctcaggttgttgccaactgttggccagaggccgccctctattccttgcaggtgggcctctcccata

SEQ ID NO: 373039 - DNA, 201 bp, Homo sapiens
atatatttattttattttatgtgtatttatataatatatgatatgcatatttataatatgtaaatatttacatattataaatatgtaaagattataatatatatatatgtaaatatatattatataatatattatgtaaatatatattatataatatattatgtaaatatatattatataatatattatgtaaatatatat

SEQ ID NO: 373040 - DNA, 201 bp, Homo sapiens
ttctcatgcatcggcctcctgcgtagctgggattacaggctcccgccgccacgcccagctaattttttttttttttttgagacagagtcttgctctgtcaytaggctggagtgcagtggtgtgatcttggctcactgcaacctctgcctcccggttcaagcagttctcctgccccagcctccggagtagctgggactacag

SEQ ID NO: 373041 - DNA, 201 bp, Homo sapiens
gtgtgttacgggacgttttgtagcatccctggcctctgcccactggataccagcattacctccttccagttgtgacaagtacagattcccccagatgttgscgcgggtcccctgggggacagaatcacccagttgagaaccactgaagacactcccccagtgcagtgtgtgaggctgaaaggagagcctgaaggcgaaggg

SEQ ID NO: 373042 - DNA, 201 bp, Homo sapiens
ggcgtgagccaccatgcctggcctaatttttgtatttttggtagagacggggcttcaccgtattggccaagctggccttgaactcctgacctcaagttatmtgcccaccttggcctcccaaaatgctgagattacaggtgtgagccactgaccctggcccggcccagtgttatcacagggtccttaaaagcgaaagacagg

SEQ ID NO: 373043 - DNA, 201 bp, Homo sapiens
taagctaaaatggaggagagtggaaggggagaaggaaagacttcctgcagggctcagatcctgttggaatcagctcccaaagagactgagaacgttcttgttttttttttgtttgtttgtttttgtttgtttgtttgtttgttttgagacggagtctcactctgtcgcccaggcgcgatcttggctcactgcaaactccac

SEQ ID NO: 373044 - DNA, 201 bp, Homo sapiens
acggggtttcaccgtgttagccaggatggtctggatctcctgacctcgtgatctgcccgccttggcctcccaaagtgctgggattacagccgtgagccacsgcgcccggccaaagttgtgctaatttgttacaacaatgaggagaagctgtcacacaccgatgtgtgctgcagaccctgggaacggattgtcgtgctcctc

SEQ ID NO: 373045 - DNA, 201 bp, Homo sapiens
tgcgattacaggcgtgagccactgcacctggcatttttttttttttttttgagacggagtcttgctctgtcgcccaggctggagtgcagtggcgtgatctyggctcactgcaacctccacctcccagttcaagtgattctcctgcctcagcctcccaagtagctgggattacacatgcctaccagtatgcccggctaattt

SEQ ID NO: 373046 - DNA, 201 bp, Homo sapiens
aggctggtctcaaacttctgacctcaagtgatccacccacctcagcctccctaagtgctgggattacagatgtgagccactgcacctggcccattggtgtytttcagtgctgggatgacactgatcaggactgcatgggctgaatatgacccccgatagcagtggttaacatcagcggcatgcagcccatgtgtcaggccc

SEQ ID NO: 373047 - DNA, 201 bp, Homo sapiens
tcatttcatcttcataacagccctgtgagtgcatgcttcctttatccatgagaaacggcttcaggaagcaccgtgccctgtccaggctacacagtgaggayggggcaggcccatgtgattcaaaccgtgacccaccatcacagcttacccctcctccaatttttaagagtcagaacattacagaataattgtcttttgtca

SEQ ID NO: 373048 - DNA, 201 bp, Homo sapiens
ccaggccaatctcaaactccaaactcaagcaactgtcctgcctcagcctcccagagtgctggaattacaggcgtaagcactgcattgggccaataagaggwtttttaatggctatacaatattcttctgcgtacgtacaccacagagtatttgttctatctcccaagcttaccacttaggaggtttcccccttttggctat

SEQ ID NO: 373049 - DNA, 201 bp, Homo sapiens
tccttaggggaagctcataaatcagtttgcccatcccggccttgagtctgacacagctgtgtgttgtggggttagggttagctgtgcgaggctggggtgarctcacaattccagtacagatctacccaagtgagagtgtgtgcatctttctctcgtgatgtctaaacatcctggcataagcacaggaccacgtgtgtgatg

SEQ ID NO: 373050 - DNA, 201 bp, Homo sapiens
tttattttattttatgtgtatttatataatatatgatatgcatatttataatatgtaaatatttacatattataaatatgtaaagattataatatatatatatgtaaatatatattatataatatattatgtaaatatatattatataatatattatgtaaatatatattatataatatattatgtaaatatatattatat

SEQ ID NO: 373051 - DNA, 201 bp, Homo sapiens
ttagaaatggggtctccttgtgttacctaggcttgtctcaaactcctgggctcaagtgatcctcctgcgtcaacctccccaagtgctgggattaaaagtgwgagtcacagcagctggccaattgcttacatttaaaagttaggccgtctcggggagaagtctaaatttctgttttttcttgagaaactggaagctccatcc

SEQ ID NO: 373052 - DNA, 201 bp, Homo sapiens
ctcttttcaaaaatttccccaaataccgaaacatgtaatataagaagtgaagccttttctgccatcccagcccccgtagacacttcagaggctctttttcygtatgtgtttccatacctacggcactttggttagcagcgtgcatgcctacagaggtgaggattctgagctgtttagaagtgtggccacagagctgtggcc

SEQ ID NO: 373053 - DNA, 201 bp, Homo sapiens
aatatatgatatgcatatttataatatgtaaatatttacatattataaatatgtaaagattataatatatatatatgtaaatatatattatataatatatwatgtaaatatatattatataatatattatgtaaatatatattatataatatattatgtaaatatatattatataatatattatgtaaatatatattatgt

SEQ ID NO: 373054 - DNA, 201 bp, Homo sapiens
gtgtggcaccattatggctcactgtagcctccacctcccagatcgtgatcctcccacctcaacctcttgagtaactgagacgacacacatgcaccaccccrccctaataataattttttttttgagatacagtctcgctctgttgtccaggctggagtggggtggtgcgatctctactcactgcaacttctaccttccagg

SEQ ID NO: 373055 - DNA, 201 bp, Homo sapiens
tttacatattataaatatgtaaagattataatatatatatatgtaaatatatattatataatatattatgtaaatatatattatataatatattatgtaaatatatattatataatatattatgtaaatatatattatataatatattatgtaaatatatattatgtaaataataatttaaatattgacataatatataaa

SEQ ID NO: 373056 - DNA, 201 bp, Homo sapiens
gtgggagtagtgtggcaccattatggctcactgtagcctccacctcccagatcgtgatcctcccacctcaacctcttgagtaactgagacgacacacatgyaccaccccaccctaataataattttttttttgagatacagtctcgctctgttgtccaggctggagtggggtggtgcgatctctactcactgcaacttcta

SEQ ID NO: 373057 - DNA, 201 bp, Homo sapiens
tcaacgagacacagtacgtccattcattacctattggcccaaactagtcatgtggtctcagtctgactctcgggtgcatgccaatggtcagaaccacactrgcacctagctgctccccaggggaggatttgactgtgttattttatggagttgaggtcatgttgtggacatagcttttttttttttttgagactgagtctc

SEQ ID NO: 373058 - DNA, 201 bp, Homo sapiens
ttacatattataaatatgtaaagattataatatatatatatgtaaatatatattatataatatattatgtaaatatatattatataatatattatgtaaatatatattatataatatattatgtaaatatatattatataatatattatgtaaatatatattatgtaaataataatttaaatattgacataatatataaat

SEQ ID NO: 373059 - DNA, 201 bp, Homo sapiens
atgggaactcaagaggaacgccaggttttttttttttttttttttttttttggagacagagtctcactcagtcacccaggctagagtgcagtggcatggtytcagcttactgtagcctctgcctcccaggctgaatcaatcttcccatctcagcctctccagtagctgggactacaggtgctcccctagagcctccgcagc

SEQ ID NO: 373060 - DNA, 201 bp, Homo sapiens
agtaacttcctttagaaagtcatatggctttccgagattgcaccactgcactcgagcctgggcaacagagcgagactgtctcaaaaaaaaaatttaaaaaaaagaaagtcatatgactttcacatttctgtaggacttacgcttgtgttcaggtatacgtgtgtgtgtgtgtgtgtgtatgtgtgatgtattttcctgtgt

SEQ ID NO: 373061 - DNA, 201 bp, Homo sapiens
gtaacttcctttagaaagtcatatggctttccgagattgcaccactgcactcgagcctgggcaacagagcgagactgtctcaaaaaaaaaatttaaaaaaaagaaagtcatatgactttcacatttctgtaggacttacgcttgtgttcaggtatacgtgtgtgtgtgtgtgtgtgtatgtgtgatgtattttcctgtgtg

SEQ ID NO: 373062 - DNA, 201 bp, Homo sapiens
gaacttaaataagggagagtcttgaaaaataatttcttgctaatgtaaatttagttaatagaagcaacagaaactgaactcgatatctgagcatagtagactaaggatgcataaagatacattttcagagctggagcagaaatgagaaatagtcatctactccaagatctttattttgcagaggcctgtgggggctggggg

SEQ ID NO: 373063 - DNA, 201 bp, Homo sapiens
taacttcctttagaaagtcatatggctttccgagattgcaccactgcactcgagcctgggcaacagagcgagactgtctcaaaaaaaaaatttaaaaaaaagaaagtcatatgactttcacatttctgtaggacttacgcttgtgttcaggtatacgtgtgtgtgtgtgtgtgtgtatgtgtgatgtattttcctgtgtgc

SEQ ID NO: 373064 - DNA, 201 bp, Homo sapiens
aacttcctttagaaagtcatatggctttccgagattgcaccactgcactcgagcctgggcaacagagcgagactgtctcaaaaaaaaaatttaaaaaaaagaaagtcatatgactttcacatttctgtaggacttacgcttgtgttcaggtatacgtgtgtgtgtgtgtgtgtgtatgtgtgatgtattttcctgtgtgcc

SEQ ID NO: 373065 - DNA, 201 bp, Homo sapiens
gcacacatccactcatgaggaaccccacccccaggacttaatcacctcccagaggccccatctccaactgctatcatattggggattaggtttcaacataygaattttaggggacataaacatagtctatagcatagccattaaattaaacaaataactaagtgaatgagttttcaaagacttaggcaggccagtagccaa

SEQ ID NO: 373066 - DNA, 201 bp, Homo sapiens
tttcatggaaggtgagggcatcacattggccttccctgcttctgcagtgcaattgctggccatgtttaacttgtaactttcaattcaatcagctgtgtgattttttttttttttttttgagacggattctcgctctgctgcccaggctggagtgcggtggtacgatcttggctcacttcaacctccgcctcccaggtacaa

SEQ ID NO: 373067 - DNA, 201 bp, Homo sapiens
tgagggcctgtttcctggctgataaaaggccctcttttcactctgtctctcgcagcagaaggagcgagggacctctctggggtttctttcataaaggcacwcatccactcatgaggaaccccacccccaggacttaatcacctcccagaggccccatctccaactgctatcatattggggattaggtttcaacatatgaat

SEQ ID NO: 373068 - DNA, 201 bp, Homo sapiens
aaaatgagcatgtttcacttagcaacttccagttccacctatgttgctgcaagtcacagaatttctttcttttttaatgtgttttgcttatttttttgagrtaggatcttgctgtattgcccaggctggaatacagtggtgcagtcttggctcactgcagccttgacctcctggcctcaagcagtcctcccgcctcagcct

SEQ ID NO: 373069 - DNA, 201 bp, Homo sapiens
tggaggctgggaagtcctgtgtcagcatactggcagatttggtgtctggtgagggcctgtttcctggctgataaaaggccctcttttcactctgtctctcrcagcagaaggagcgagggacctctctggggtttctttcataaaggcacacatccactcatgaggaaccccacccccaggacttaatcacctcccagaggc

SEQ ID NO: 373070 - DNA, 201 bp, Homo sapiens
caccatgcctgggtaatttttgtatttttagtaaagacggggtttcaccatattggccaggctggtctcgaactcctgacctcaggtgatccacccacctyggcctcccaaagtgctgggattacaggcctgagccactgcacccagtcacaatcactcttaattctgtgccatctctttccgccatgcctctggtgtgca

SEQ ID NO: 373071 - DNA, 201 bp, Homo sapiens
gccaccacgcctggccaaaatggccttagttttaatttttgttatttaagctgttctgaggaaataaggctgtttttcccttatctggcatgatcggaggtttttgaatacatgaaaaatttacattcgtattcctttgaggatgctgcaacgtatttcattatgaatagaattaaagtacaagtaaaattttatactaat

SEQ ID NO: 373072 - DNA, 201 bp, Homo sapiens
gcatacagagccatcacttcttactctgactctacctttttattttgaaaaatgtcaaaagttgaaatacaacaatggaaaagttgaaatagaacagtgarcattcatctacccttcactttggccaattgttactatttgctacattatctttctttctttgaatcagtagaaagtaaattgtatgtaatgttaccccta

SEQ ID NO: 373073 - DNA, 201 bp, Homo sapiens
agaggtcagtggcacaatcttggctcactgcaagctccgcctcctgggttcatgccattctcctgcctcagcctccctagtagccgggactacaggcgccygccactacgccaggctaatttttttgtgtttttagtagagacggggtttcaccttgttagccaggatggtctcgatctcctgacctcgtgacccacctgt

SEQ ID NO: 373074 - DNA, 201 bp, Homo sapiens
tgtctaggaaattgccttccactggattctgtcctgttttctggaattttttgggctcgtgctgtgtggggttgccagccaggctctgtggcctaggtctrtgttagaacctatgaccgagtgtcttgggtaaacacaaatgcatgaggtgagggaggagtgctgggcactggggcatgtgaaagggcccaggagaatgag

SEQ ID NO: 373075 - DNA, 201 bp, Homo sapiens
ccatctctaccaaaaatacaaaaattagccaggcatggtggcgcacacacctgtggtcccagctactccggaggctgaggcaggaggatctcttgagcccrggaggtggagattgcagtgagccaaggtcatgctactgcactcctgcctgggtgacagagcgagaccctatctcaaaacaaacaaaaaagccctgtaatc

SEQ ID NO: 373076 - DNA, 201 bp, Homo sapiens
aggagttcaagaccagcctggccaacatggtgaaaccctgtctctagtaaaaatacaaaaattaggtgggcatgtaataccagctactggggaggctgagkcaagagaatcgcttgagcccgggaggcggaggttgcagtgagccgagatggtgccactgcactccatcctgggtaacagagtgagactctgtaacaatga

SEQ ID NO: 373077 - DNA, 201 bp, Homo sapiens
ttatcataggattttagaattttttttcttgttttgtaatgttcagtagtacaatacaatatttatacaaagatcaatatatatagatggaaggtacttgraaaacttttcctgctgggcgtggtagctcatgcctgtaatcccagctactctggaggctgaggcaggagacttgcttgaacccaggaggtagaggttgca

SEQ ID NO: 373078 - DNA, 201 bp, Homo sapiens
catgttgttctaaaagattgttggtgattaaggggcatttgaaagttattctaaaagaggaaactctaccactaatctgattttggatatttctgttccaygaaagggctgcatagacaaagtggcctccaaaggagcctgaaaccaaagaacaaggcaggcaaatccagtttgtcgttaaagggtgttttattgggggaa

SEQ ID NO: 373079 - DNA, 201 bp, Homo sapiens
acatggcaaaaacccatctctgctgggcgtggtggctcacgccggtaatcccagcactttgggaggccgaggcgggtggatcacctgaggtcaggagttcragaccagcctggccaacatggtgaaaccctgtctctagtaaaaatacaaaaattaggtgggcatgtaataccagctactggggaggctgaggcaagagaa

SEQ ID NO: 373080 - DNA, 201 bp, Homo sapiens
gctggagtacagtggcacaatcttggctcactgtaacctccgccccccgggttcaagcgattcttgtgtctcagtctcccaagtagctgggattataggcycgcaccaccacgctggctaatttttgtatttttagtagagatggggtttcaccatgttggccaggctggtctcaaacttctgacctcaagtgatccaccc

SEQ ID NO: 373081 - DNA, 201 bp, Homo sapiens
cttgggtggttatgctgactgtatttaaaaaataactgtcctggcaagctttaaaaggggataggggaaggaatgacaaggaaaacgaatgactgtaaacmagtaagtaaaataaatgaatgattttggctttattgattacaagaggaaaaaaatctagattggaagtagattctgctatgggtgactccctccacccaa

SEQ ID NO: 373082 - DNA, 201 bp, Homo sapiens
ccagctattctcctgccttagcctcctgggtagctgggactataggcatatgccaccatgcctggctaattttgtatttttagtttatttgtttgttttgrgatgaagtcttgctctgttgctcaggctggagtacagtgccacaatctcagctcactgcaacctccgcctcccgggtttaagggattctcctgcctcagc

SEQ ID NO: 373083 - DNA, 201 bp, Homo sapiens
agtggatattggtgcctttctttttctttttctctttttttttcttttctctttttttgagacaaggtcttacactgtcacctaggctggagtacagtggmacaatcttggctcactgtaacctccgccccccgggttcaagcgattcttgtgtctcagtctcccaagtagctgggattataggctcgcaccaccacgctg

SEQ ID NO: 373084 - DNA, 201 bp, Homo sapiens
tgcaacctccgcctcccgggtttaagggattctcctgcctcagcctcccgagtagctgggattacaggtgtgtgccaccacgcctggctaatttttttgtrtttttagtagagacagggtttcaccatgttggctaggctggtcttgaactccttacctcaagtgatccaccatccttggccccacaaagtgctgggatta

SEQ ID NO: 373085 - DNA, 201 bp, Homo sapiens
taggctggtcttgaactccttacctcaagtgatccaccatccttggccccacaaagtgctgggattacaggcatgagccaccgtgcccggtctataaatartcatttcttaatgatcacattttaggaagatgatgctgttctttcttcttaagtatttatttttatcagtcaagtgataggaagttcaatttcaagtaca

SEQ ID NO: 373086 - DNA, 201 bp, Homo sapiens
gcagtagtggaagagcttggccctcccctcatggtggagccgtcggcttccaaactgggcttccaggttcatcggggggagcctgtctttctatctccagyggaccatgctagaagcagcctgtggattctggggaagctttggggggtgaacgtgtgtccgtttggtcttttccaggaagacagcgaccccccgatcagc

SEQ ID NO: 373087 - DNA, 201 bp, Homo sapiens
gagctggagcttctgtgtttaaacaccaagaggaagtggatattggtgcctttctttttctttttctctttttttttcttttctctttttttgagacaagktcttacactgtcacctaggctggagtacagtggcacaatcttggctcactgtaacctccgccccccgggttcaagcgattcttgtgtctcagtctcccaa

SEQ ID NO: 373088 - DNA, 201 bp, Homo sapiens
gccaggtggtgcctgcgcctttaagcactgatattgtgatcatcaggaaacggtttttgtttttgttttttgtgagacagagtctcgctgtgtcgcctagrttggagtgcaatggcgcgatatcggctcactgtagccatcacctcccgggttcaaacgattctcatgcctcagcctcctcagtaactgggattacaggca

SEQ ID NO: 373089 - DNA, 201 bp, Homo sapiens
tttgtatttttagtagagacagggtttcaccatgttggctaggctggtcttgaactccttacctcaagtgatccaccatccttggccccacaaagtgctgrgattacaggcatgagccaccgtgcccggtctataaatagtcatttcttaatgatcacattttaggaagatgatgctgttctttcttcttaagtatttatt

SEQ ID NO: 373090 - DNA, 201 bp, Homo sapiens
tttatttatttgagatggagtcttgctctgttgcccaagctggagtgcagtggtgtgatctcagctcactgcaacttcctcctcctgggttcaagcaattmcgctgcctcagcctcccgagtagctggaattacaggcacccaccggcccagtgaattttttgcacttttttttagtagagatgggttttcactatgttgg

SEQ ID NO: 373091 - DNA, 201 bp, Homo sapiens
gtcccaactatttatctttgtttttattgcatttgcttttgggttcttggtcatgaaatccttgcctaagccaatgtctagaagggtttttccaatgttaycttctagaacttttatagtttcaggacttagatttaagtccttaatccatcttgagttgattttttgtataagatgagagatgaggatccagtttcattc

SEQ ID NO: 373092 - DNA, 201 bp, Homo sapiens
cactatgttggccaggctggtcttgaggctccatacctcaggtgatccgcccacttcagcctcccaaggtgttgggattacaggcgtgagccactgcgccyggcaagaagtgaccttttatgccactgtctcttccgctgattcctagcaggctgtgttttgtttgtttcatgctatgttaaaaaaaaaaattgaagcagt

SEQ ID NO: 373093 - DNA, 201 bp, Homo sapiens
cttcttcctttttaaggctgagtaatattccattgtatggacagaccacactttgtttatccattcatccactgatgcttgtttgagttgcttccacttcytggctattgtgaataatgctgctacgtacatgggtggacagatgatcacttcaagtccctgctttcatttcttttgggtatatagccggaggtggaattg

SEQ ID NO: 373094 - DNA, 201 bp, Homo sapiens
tgtagcaatgggggtcttgctatgttgaccaggccaatctcaaactccaaactcaagcaactgtcctgcctcagcctcccagagtgctggaattacaggcrtaagcactgcattgggccaataagaggttttttaatggctatacaatattcttctgcgtacgtacaccacagagtatttgttctatctcccaagcttacc

SEQ ID NO: 373095 - DNA, 201 bp, Homo sapiens
agcttttttacatagacagatgggataattttttttcttgtttttatttatttatttatttttgaggcagagtcttgttctgttgctcaggctgaagtgcratggcgccatcccagctcactgcaacctctgcctctggggttcacgcgattctcctgccttagactcccgagtagctgggattacaggcacccgccatca

SEQ ID NO: 373096 - DNA, 201 bp, Homo sapiens
cccacttcacatgatggtggctgctacaagtccccaggggctcctagacagtagttagaaactcactgttctaacagtgactgctgctccccctgactgtrcctgtcttacgccacttcacatatgctgctttgaaatgtagtttttgccaagatctttcacttttgggctttcttatcacctaaggttgacttcttgttt

SEQ ID NO: 373097 - DNA, 201 bp, Homo sapiens
gtgcttctgaaatgacgagaatagttcttttctgctctgagtcattttggggtgaagtagcatcctgagagctagagaggccctttatccaagcatccctycccctctgataacagacattcctgcctgtatcaggtggcatgcttaaccaactgccaggtggtgcctgcgcctttaagcactgatattgtgatcatcagg

SEQ ID NO: 373098 - DNA, 201 bp, Homo sapiens
ctgcatacctttgccttgtggcttctgcagagctctcttggtaaaaggaatgggaactcaagaggaacgccaggttttttttttttttttttttttttttggagacagagtctcactcagtcacccaggctagagtgcagtggcatggtttcagcttactgtagcctctgcctcccaggctgaatcaatcttcccatctca

SEQ ID NO: 373099 - DNA, 201 bp, Homo sapiens
tcctgttgtattctctgccgtatccccagtgtgtatgatggggcgcaggccctggctgagaggatggccgcagtagttggccatgtgtaacttaagtgccyggtgagtggcatgccccactgtggtctggaaggatgaagtggaacacagaagcttcccctgtgctcacgtcacatggatcgaagccactccttactgtgt

SEQ ID NO: 373100 - DNA, 201 bp, Homo sapiens
ctgcaaatgctgttaattcattcctttttatgggtgaggagtagtccattgaatatatataccacagtttatttatccactcgtcgattgatgggcatcartctctactaaaaatacaaaaaattagctgggcatggtggcgggcgtctgtaatcccagctactggggttggttccacgattttgcaattgtgaattgtgc

SEQ ID NO: 373101 - DNA, 201 bp, Homo sapiens
cagggaccaggagttgccagacccaagagttacaaactctatagttttatgtgaaatactctaacttcattttagttttttagttccataactgtttactrtatacttacataaaaatcaaaccataagttactttaacaaagttggtctacaatgtatataaaataacatttatcatactgccttttattggttatcttt

SEQ ID NO: 373102 - DNA, 201 bp, Homo sapiens
tttgcttatttttttgaggtaggatcttgctgtattgcccaggctggaatacagtggtgcagtcttggctcactgcagccttgacctcctggcctcaagcrgtcctcccgcctcagccttccaagtagctgggatgagaggcgcacaccaccacacctggataatttttgtattttattgtagcaatgggggtcttgctat

SEQ ID NO: 373103 - DNA, 201 bp, Homo sapiens
tatatatatatatatatatatatatatatataaaatgatgaaatgctacttagccatggaaaggaatgaattaatggcattcgctgcaaactggatgggaytggggactattatctaagtgaaataactcaggaatggaaagccaaatgtcgtatgttctcactcataagagggagctaagctatgaggaagcaaaggctt

SEQ ID NO: 373104 - DNA, 201 bp, Homo sapiens
tactgctcaggtgatgggtgcacgaaaatctcataaatcactgttaaaaaacttactcatataaccaaacaccatgtgttccccaaaaacctttggaaataaaaaaaaaaaaaacagagtgcacaagtagaagtagaaattgataacataggttgttgggcacatggccctgccccctgcctgctggcggagtattttcag

SEQ ID NO: 373105 - DNA, 201 bp, Homo sapiens
accattgcaccccaaacctgggccacaagagggaaactctgtctcaaaaaaaaaaaaaaaaaaaaaaaaaaaaagatacagtgaaaagcaacacactttaragcagaggatgtctgggtcaaatgcttgtctctttgggtggaataaagaggcgttaaaggcaatgagaacaagatggggttaaagttgtcatgtcccgtt

SEQ ID NO: 373106 - DNA, 201 bp, Homo sapiens
gctatgagcccctcttatgatagagtcacaatgattgtgcccattttgtagatgaagtgtaagttggctaaggaaagttcccatggtcgcatagctggcamgattaaaaccagacagcccatgcctagagtctggactatgcaacccacaataccactttcctccccaggggatgatggcttgaaagtgctttgtaaactc

SEQ ID NO: 373107 - DNA, 201 bp, Homo sapiens
ccctgcctgctggcggagtattttcagctaaggcttggcttgtgaacttctccttcagccttacaggttccttgaattcagaccacctcttacagcatctygttcttcttccgtagcattcatcacactgaaattcttgatttcctgcgggtttgcttgtcaccacctgtcttctccctgtgggttagaacaggggccagg

SEQ ID NO: 373108 - DNA, 201 bp, Homo sapiens
cggtgctgaggtccgttgccggtcccagcactgtggtagtgccttaggagacagatgcatgtgcccacaacatgggatttatagtttattagaagtttcgratggaggctgggcgcggtggctcacgcctgtaatcccagcactttgggaggctgaggcgagtggatcatttgaggtcaggagttcgagaccagcttgacc

SEQ ID NO: 373109 - DNA, 201 bp, Homo sapiens
ctgcacctcagcctcctcaaaggtaaagagggactagggccattgacttcacaggtccttgctaaagatgaggtagtaatggtgataacagtggtactgayggcagtgagaaatgatcacctattgaatacctgctctgtgccaggccctgggctatgagcccctcttatgatagagtcacaatgattgtgcccattttgt

SEQ ID NO: 373110 - DNA, 201 bp, Homo sapiens
acactgaaattcttgatttcctgcgggtttgcttgtcaccacctgtcttctccctgtgggttagaacaggggccaggatccttttggtcctcccgtgtctyctgtgcctagctttcctgcctggcacacggtagactcacagtcagtgccgaagtgagcaggattcaacagtgatagccagttgtcttttttttttttttt

SEQ ID NO: 373111 - DNA, 201 bp, Homo sapiens
attcctagatttgctgcttaggaactgtgtgggcttgggcaagccacgtaccctctctatgcctcactttctgctttgcataatgaggatgatgagaatcrtacctacttcatagggttgttgttgatgttgtgagaatgaaatgagcaaatccatgtaaagtaccttacagcagtgccggcgcgggtgttatgtaagtat

SEQ ID NO: 373112 - DNA, 201 bp, Homo sapiens
gtggcaccatctcggctcactgcaacctccgtctcctgggttcaagtgattctcctgcctcggcctcccgagcagctgggactacaggtgcacgccatcaygcccagctaatttttgtatttttagtagagacggggtttcaccatattggccaggctggtctcaaattcctgaccttgtgactcacccaccttggcctcc

SEQ ID NO: 373113 - DNA, 201 bp, Homo sapiens
aggcttcctaaacttcctccctcattgaactatatgtatacgatgagaattttttcgtattattaaaatctgattttaatgatttttaacgcatgtgcagygttctgttgaaagaatgtgccactatttcattcattaacttattttttggctgcttaggctgtttctcaatttcagtttttttgttttgttttgtttttg

SEQ ID NO: 373114 - DNA, 201 bp, Homo sapiens
caacatgggatttatagtttattagaagtttcggatggaggctgggcgcggtggctcacgcctgtaatcccagcactttgggaggctgaggcgagtggatyatttgaggtcaggagttcgagaccagcttgaccaacatggtgaaaccccatctctactaaaaatacaaaaatgagctgggtgtggtagcgtgcacctgta

SEQ ID NO: 373115 - DNA, 201 bp, Homo sapiens
tctcccgtctcagcctcctaagtagctgggattacaggcatgcaccaccatgcctggctaatttttgtatttttagtaaagatggggtttcaccatgtttkccaggcttgtcttgaactcctgacctcaggtgatctacctgactcagcctcccaaggtactgggattgtaggtgtgagccaccgcgcccatcggctttta

SEQ ID NO: 373116 - DNA, 201 bp, Homo sapiens
ggatgccatttagagctcctgtcatcagccagctctgcaaggttgatagtggctgttgggactgctgtgttgagaaggattttgagcctgcatctgggctyaaagggaaatggtgttgtgattgacagcagtgtctgctgtaggtgtgcaatgaaagcttggtggcacatgccagtcctttgcctacctgatttggaggtt

SEQ ID NO: 373117 - DNA, 201 bp, Homo sapiens
ggctcgccagggagctgcccttctcgttgggaacacacgataaacacacattaagtgagtgtgagcacaggaatatcagatgtgatcaaagttaccaagaragaaaaatggggtgaggtgctagacgcccaggcacaccccaaataaaaaatgttatggaggccgggcacaatggctcacacctgtaatcccagcattttg

SEQ ID NO: 373118 - DNA, 201 bp, Homo sapiens
gtgggagcacctgccgtgtgccaggattatggtggcagatgaggtggacgggctcgccagggagctgcccttctcgttgggaacacacgataaacacacattaagtgagtgtgagcacaggaatatcagatgtgatcaaagttaccaagaaagaaaaatggggtgaggtgctagacgcccaggcacaccccaaataaaaaa

SEQ ID NO: 373119 - DNA, 201 bp, Homo sapiens
cttaacccagattcatgaattgtgacatttcaccacagttgtttatttatttagagacaggatctcactgtgtcacccgggttggagtgcagtggtgggayctggactcactgcaacctccgccttccaggctcaagcaatcttctcacttcagcctccgagtagttgggactacaggtgcacaccaccacgccctgctaa

SEQ ID NO: 373120 - DNA, 201 bp, Homo sapiens
tggaacttaataaatattcacaacaggctgagtagaccctggagctgggatacatcaccctacccgggaatgattcctagatttgctgcttaggaactgtrtgggcttgggcaagccacgtaccctctctatgcctcactttctgctttgcataatgaggatgatgagaatcgtacctacttcatagggttgttgttgatg

SEQ ID NO: 373121 - DNA, 201 bp, Homo sapiens
tccaacaattctcttttttcactccccagcaataatactgtgagtagtatcttttgtattctttttctgtgaatacacttcttagtccaactggggttacktacttttggtaaggctgaatgtatatatattgggccccacacgtgtgcaaagagtgacatggtagattagtaatctgtgtaattagcaaaggaaataatt

SEQ ID NO: 373122 - DNA, 201 bp, Homo sapiens
tccaggcagcatccctgcgggtgggttcttcctgttgtattctctgccgtatccccagtgtgtatgatggggcgcaggccctggctgagaggatggccgcrgtagttggccatgtgtaacttaagtgcccggtgagtggcatgccccactgtggtctggaaggatgaagtggaacacagaagcttcccctgtgctcacgtc

SEQ ID NO: 373123 - DNA, 201 bp, Homo sapiens
tggttgagcacctgctgtgtgccaggccctgtgctgggttctgggggtgcagcaatgaacagagtagacaaatatttctgccctgtggggctgacattcasaagggatagacaataaaccagtaaatgaaattgttacaaattgtgaaaagtgctctgaaggtaacagaataaggtcgtaggacagatggggtatcccaga

SEQ ID NO: 373124 - DNA, 201 bp, Homo sapiens
aggctccccacggccgccgtgagtagctttccctgcagaagcccatgcgggcaacctatcttagcagggttctcaaactcagatacctggggggccaggcrtgggatggcaacttgtgaagtggggccagtaggggagcgtggggtcctggagagcccctgggcctagttggctttcctgacgtgaccaaagcagaccccg

SEQ ID NO: 373125 - DNA, 201 bp, Homo sapiens
tggcagatggtggttgagcacctgctgtgtgccaggccctgtgctgggttctgggggtgcagcaatgaacagagtagacaaatatttctgccctgtggggytgacattcagaagggatagacaataaaccagtaaatgaaattgttacaaattgtgaaaagtgctctgaaggtaacagaataaggtcgtaggacagatggg

SEQ ID NO: 373126 - DNA, 201 bp, Homo sapiens
gagtttcgctcttgtcgcccaggctggagtgcagtggtgtgatcttggctcattgtaacctccgcctcccaggttcaagggatccttctgcctcggcctcyggagtagctgggattacagttgcccgtcaccatgcccggctaatttttgtatttttaatagagatggggtttcaccatattggccaggctggtctcgaac

SEQ ID NO: 373127 - DNA, 201 bp, Homo sapiens
attgaatctttacagcaagcttgcgaagtctgcgtttctccacgttttacagacactaaagcttgacaagtccaagaaactagctggggatcccactcagrgggagtggcggagtgaggatttgaactctgagctttttgaccccagagcttattatggaagaagtaggagataggatatgtattttctcttgtggtcgct

SEQ ID NO: 373128 - DNA, 201 bp, Homo sapiens
tttggcagatggtggttgagcacctgctgtgtgccaggccctgtgctgggttctgggggtgcagcaatgaacagagtagacaaatatttctgccctgtggkgctgacattcagaagggatagacaataaaccagtaaatgaaattgttacaaattgtgaaaagtgctctgaaggtaacagaataaggtcgtaggacagatg

SEQ ID NO: 373129 - DNA, 201 bp, Homo sapiens
cccaaagtgcagggattacaggtgtgagccactgtgcctggcctggtttattcttatatccttagtagttaaagatagtccttggcatatggtatgccttygggaaaatttggcataaatcattctcttggagccctaatttcttttctctttttttttttgcacatttattctgagacagggtctcgctatgctgcccag

SEQ ID NO: 373130 - DNA, 201 bp, Homo sapiens
attctgcatcagggatgctcaccttgtatttgaattgtttcctgggatcacattttctttttaaccaatgtagagtatttgagtgtgaggggttggaaaartagcagaatctatgcttttgtgcatgcgatgtgtagcagaaccgagtagcccctctgttccttccctcgcctccttttctttctccattgatttggcaga

SEQ ID NO: 373131 - DNA, 201 bp, Homo sapiens
ctgtgcacattccagttggggaaccttgaagtgtctttattcagctatcgattacagcctgggggcgctgggccctccctgccaccgtacagtaagtcacrgaggaaatgaaatagatacagtcggacccggaggagcggagcactgctcagatgctggagcgagcaggcctcagccctgacagcatcccaccatttccag

SEQ ID NO: 373132 - DNA, 201 bp, Homo sapiens
gtcctcccgtgtctcctgtgcctagctttcctgcctggcacacggtagactcacagtcagtgccgaagtgagcaggattcaacagtgatagccagttgtctttttttttttttttttttttttaatgttagggaagttatcaaataagatacttaaaataaacaactcacagctttttctcgccctcctatctttgcacca

SEQ ID NO: 373133 - DNA, 201 bp, Homo sapiens
ttacaggcgtgagtcaccgcgcccggcctccttcgttttaatgatgacaattgacttgaacactatgcctggaacagtgcctggtacatcgtacatcctcygtaaatactgtgatgaattaatatgatcagtggagtctaaaatccagtggttattaatttgtgccatgagcaattatgagacgcctactatgtgcaggag

SEQ ID NO: 373134 - DNA, 201 bp, Homo sapiens
tggaaacatctgcaatctcaaacacttcggctcccaagcattctgcatcagggatgctcaccttgtatttgaattgtttcctgggatcacattttcttttyaaccaatgtagagtatttgagtgtgaggggttggaaaagtagcagaatctatgcttttgtgcatgcgatgtgtagcagaaccgagtagcccctctgttcc

SEQ ID NO: 373135 - DNA, 201 bp, Homo sapiens
tcctcccgtgtctcctgtgcctagctttcctgcctggcacacggtagactcacagtcagtgccgaagtgagcaggattcaacagtgatagccagttgtctttttttttttttttttttttttaatgttagggaagttatcaaataagatacttaaaataaacaactcacagctttttctcgccctcctatctttgcaccac

SEQ ID NO: 373136 - DNA, 201 bp, Homo sapiens
tgaggcaggagaattgcttgaacccaggatgtggaggttgcggtgagtcaggattgtaccactgcactccagcctgggtgaagaagcaagactccatctcaaaaaaaaaaattctcccattttattgacagggaaacaaagattcactgatattaatgtgttcgtggtcttggaggttgtgagaggaggcagttttgaacc

SEQ ID NO: 373137 - DNA, 201 bp, Homo sapiens
gtgttattttatggagttgaggtcatgttgtggacatagcttttttttttttttgagactgagtctccctctgttgcccaggctggtgcacaatggcgtgrtctcggctcactgcaacctccacctcccgggtttaagtgattctcctgcctcagcctcctgagtagctgggattacaggcacgtgctcccatgtccggct

SEQ ID NO: 373138 - DNA, 201 bp, Homo sapiens
ttcagaggccgcctactgccaaatacaaataggtttatataaatgcctcatgaggctcagaggaggctaaatctagttaaggtgaaatctttcagaaagcygtactgtttccaagtccctgtaggattctgcatagacttggctggctctagaatcgtgcctttgaaattcaatatcaataaaacattgctagcctaggca

SEQ ID NO: 373139 - DNA, 201 bp, Homo sapiens
caggattcaacagtgatagccagttgtctttttttttttttttttttttttaatgttagggaagttatcaaataagatacttaaaataaacaactcacagytttttctcgccctcctatctttgcaccactcttctccttgatcatttaccgtgtagctttagtgccatgggcagctctgggatagtagtagaaatggtaa

SEQ ID NO: 373140 - DNA, 201 bp, Homo sapiens
tgatcagccttctaaaaactacttcagaggccgcctactgccaaatacaaataggtttatataaatgcctcatgaggctcagaggaggctaaatctagttmaggtgaaatctttcagaaagccgtactgtttccaagtccctgtaggattctgcatagacttggctggctctagaatcgtgcctttgaaattcaatatcaa

SEQ ID NO: 373141 - DNA, 201 bp, Homo sapiens
ccctcctccctccctccctcccttcctccttccttcctttttccctccctccctccctcccttccttccttccttccttcctcctcccctcctctgtttcmttccttttctcttttcttttctcttctctttttccttccttccttccttccgtccatcttgctctgttgcctagggtggagtgcggtggcataatcatgg

SEQ ID NO: 373142 - DNA, 201 bp, Homo sapiens
cctgctcagttagagtaacttcacatgtatttggtgtgctaagcctaagaatgaaaaagacattctggggacctagcattatgaccaaaacagcagaaaaraatgtcagcagtgcttaaatttccccccatcatgacacatgtagtcaatattggcaagttgggagataatagcttagaggagaaaaaataaagatgcatt

SEQ ID NO: 373143 - DNA, 201 bp, Homo sapiens
ttacaggcatgtgctaccatgcccggctaatttcgtatttttagtagagatggggtttctccatgttggccaggctggtctcgaactcccgacctcaggtkatccacccacctcggcctcccaaagtgctgggatacagaagtgagccgccacgctcggccctatgttaggggatttttatgtccagaggccaataggttc

SEQ ID NO: 373144 - DNA, 201 bp, Homo sapiens
ttttctgtttcaggtttctattttcttttgtagaaaccagctgattctttttgtagtttttgtaaagatggggtctccctatgttgcccaggctggtctcraactcctgggctcaagcgatcttcccgcctcagcctccccaaatgctgggattataggtgtgagccaccacacccagccatgttttagcttttaataatt

SEQ ID NO: 373145 - DNA, 201 bp, Homo sapiens
ccagcctgcagggtgtttgtggaatagctcaagctataaaacccagttcatccgtgactgttgacatttgaaccaggctttttaggagtgaaaaatgttgyacacccctggctaccttctgagatgggaattgtgtgcagaaagagagagggggagggagggtaggtttgggtgattgtcctgatctacttggacttgtgc

SEQ ID NO: 373146 - DNA, 201 bp, Homo sapiens
gaggaagttttagttcagttataaaacttctcctaggcttggtacggtggctcctgcctgtaatactttgggaggccaaggcaggaggatcacttgagccmacgagtttcagtccagcctgggcatcattgccagactccacctctactaaaagcaaaaaaattagctgggcatggtggtgcacacctgtagtcccagcta

SEQ ID NO: 373147 - DNA, 201 bp, Homo sapiens
gtttgtttttgttttgctctgtcactcaggttggagtgcagtggcacgatcttcccggctccatctcccagagtgctgggattttaggtgtgagccacagygcccggccacctttcaatatcttttaatttactttttaaaacgtgaattttcctattgatatagtttgtatcctccttttttcacttactattttatcat

SEQ ID NO: 373148 - DNA, 201 bp, Homo sapiens
tgtcagcataagagaaagattgggagaggctgcactgctggcttgaagagggaagaaggggccatgagccaaggaatgcgggggactctagaagttggaaraggtaaggaaacggactcggttggagcctccagaaggaacacggctctgctgacaccttccttgattttagtcccatgaggcccattttggacttcggac

SEQ ID NO: 373149 - DNA, 201 bp, Homo sapiens
gtcgcttaacaatgcaagactgtaaataatttgggattggggacaaagcatctttttatttatttatttacttattttttgagacgaagtctcagtctttygccaggctggagtgcagtggtgcgatcttggctcactgcgacctccgcctcttggtttcaagcgattatcctccctcagcctcctgagtagctgggatta

SEQ ID NO: 373150 - DNA, 201 bp, Homo sapiens
cccaccaccatgcccggctaattttttgtatttttagtagagatggggtttcaccatgttggccaagctggtcttgaactcctgacctcaggtgatccacyggccttggcctcccacagtgttgggattacaggcgtgagtcactgcgttggtgagtatggcttcttaatatagttagtatattttgggattttttttttt

SEQ ID NO: 373151 - DNA, 201 bp, Homo sapiens
ttgtcactgtcatcgcgtgctaccatttggggccaaaaaatatgtctaggagttgaatctggagaggccagaagaatataaacttgaccctgttcatatattttttttaacattcatcttatccatctcctttcgggaataaaatatttttgaagacagggactttacaagtctggtttgttcttcttattcttgttcttc

SEQ ID NO: 373152 - DNA, 201 bp, Homo sapiens
gacgacttgggtgaagtggcgaaagctgaaagggatagatttattagaagacttttaatgatttaggatgtggcaggcagagaattttccgcttaactttkgcaaaaatctcttacctttgtagaatttctgcaaatgcgtttaaaaatcttggagcctcgatattggagatggggtgttacaggaaaagttcagagttct

SEQ ID NO: 373153 - DNA, 201 bp, Homo sapiens
ggctggagtgcagtggcgtgatctcggctcactacaaccacccactctggggttcgagcgattctcctgcctcagcctcctgaatagctgggattacaggyacccaccaccatgcccggctaattttttgtatttttagtagagatggggtttcaccatgttggccaagctggtcttgaactcctgacctcaggtgatcca

SEQ ID NO: 373154 - DNA, 201 bp, Homo sapiens
gcctacggcctcgactcaatggacgaagtacaaagccacattttcagcatttacacccaggtaaagccttccatttcaacacccaaaacaattctttgactttttttttttaacagctatattgagatgtaattcacaataccgtacaattcacccatttcaagagtacaattcattgtttttttttaagcatattcagag

SEQ ID NO: 373155 - DNA, 201 bp, Homo sapiens
ttccatacagtctacctatttaaagtatgacttttttattttatttttttccccgagatacagtctcactcttttgcccaggctggagtgcagtggcgtgrtctcggctcactacaaccacccactctggggttcgagcgattctcctgcctcagcctcctgaatagctgggattacaggcacccaccaccatgcccggct

SEQ ID NO: 373156 - DNA, 201 bp, Homo sapiens
ggagatcacagggggaaagggtgggaggagcagcagaggacaccaggagtgccttatctgcaatgggccacaggcactgtttctgcccctccaactgtgatttttttttttttttttttttgagacggggtctcgctgtgtcgcccaggctggagtgcagtggcatgatcttggttaactgcaacctctgcttcctggatt

SEQ ID NO: 373157 - DNA, 201 bp, Homo sapiens
tttgttttgtaactcaaaaggccagcataacagggcacaaggtcccatttaaaccacatactttaaaaaagatgtaaataattaagatcttaattaagatraactccacattccatacagtctacctatttaaagtatgacttttttattttatttttttccccgagatacagtctcactcttttgcccaggctggagtgc

SEQ ID NO: 373158 - DNA, 201 bp, Homo sapiens
gcaccccgagaagagagaccagaggtatcctcggaatgtcatcaacaatcagaagtacaatttcttcacctttcttcctggggtacgtgcaggcagggacygtgctcttttcttttttccatcacaaatacatgcattggtacagatgttatgtcatgtcatgttattttttagacagagtcttactctgtcgcccaggct

SEQ ID NO: 373159 - DNA, 201 bp, Homo sapiens
ccccaggcccctttgttcaggtcatgatttttctccacctctcagactttggctctttttgttattatttttaatatttcccttggagagtagataagcaygtgccaggcctctactcctttgccagtggctcaagagtgcagccttccagggggtggagaccacacactgtggggttggatctgggttcaaatctttcca

SEQ ID NO: 373160 - DNA, 201 bp, Homo sapiens
gtaagttggtagaagcagaaagcgagagaggagggtctgtcttgagtctcagcagacagcctggaagagagccagctggggaggcaggcttttgggatttkgggaggtaatggttgaatgtgccagaaaactagaagctctctttccaagataagattttgataggggattagtaaagtagcagcagtgtgcaagattttt

SEQ ID NO: 373161 - DNA, 201 bp, Homo sapiens
gagatcacagggggaaagggtgggaggagcagcagaggacaccaggagtgccttatctgcaatgggccacaggcactgtttctgcccctccaactgtgatttttttttttttttttttttgagacggggtctcgctgtgtcgcccaggctggagtgcagtggcatgatcttggttaactgcaacctctgcttcctggattc

SEQ ID NO: 373162 - DNA, 201 bp, Homo sapiens
gtggcgtgtgcctaggcaggtgtataattttatttgtcttcagggttttttacccaagggaaggtttattcccatgtaatgttaattttaatgttaattcyttttttttttttttttgagactaattctcactttgtcacccacgctggagtgtagtggctcgatctcggctcactacaacatccacctcctgggttcaag

SEQ ID NO: 373163 - DNA, 201 bp, Homo sapiens
tgaggcagaagaatcgcctgaacccgggaggcgaaggttgcagtgagctgagatcacgccactgcactctagcctgggcgacagagtaagactccatttctaaataaataaataaataaataaataataaaaaatgttatgggaatgtagagatgggggagtgtcagcaccatcctaatgtggggtggtggcagatttctc

SEQ ID NO: 373164 - DNA, 201 bp, Homo sapiens
gaggcagaagaatcgcctgaacccgggaggcgaaggttgcagtgagctgagatcacgccactgcactctagcctgggcgacagagtaagactccatttctaaataaataaataaataaataaataataaaaaatgttatgggaatgtagagatgggggagtgtcagcaccatcctaatgtggggtggtggcagatttctct

SEQ ID NO: 373165 - DNA, 201 bp, Homo sapiens
aggcagaagaatcgcctgaacccgggaggcgaaggttgcagtgagctgagatcacgccactgcactctagcctgggcgacagagtaagactccatttctaaataaataaataaataaataaataataaaaaatgttatgggaatgtagagatgggggagtgtcagcaccatcctaatgtggggtggtggcagatttctctg

SEQ ID NO: 373166 - DNA, 201 bp, Homo sapiens
atctgtcctgttagcctgtttgctctggttttgtgcctagtttgcgtgtgaacctggacatgggcaagatcgtgtacagctgggtgattcgaagggactcraaaatccccgggaccgtggttcgctccagcacgattcctgagcagctgggcaggatttcgtacttactcacagacaagacaggtgagctgctttctggga

SEQ ID NO: 373167 - DNA, 201 bp, Homo sapiens
gaaagaattgtgcaggtgaggctgttcatggtagtgcaggatgcagagagctcttagcccagggtctggatcagacaggcctgggctccattcctgcttcyaccccttagtaggagagagagcggatgtagcagatgattttgggcaggtcactgagtcctctggggctcactttatccactgtaacaatgggaatggtgc

SEQ ID NO: 373168 - DNA, 201 bp, Homo sapiens
ggaggctgtcctgtgccttgtaggaggttaagcagcatgctacagatttctatagtacccctgtcccctcacagttgtgacaaccaattatgtctccagayatgaccaaatgagggtcaaaatcatccaagttgagaatgatgatgatatatgggtacatttaaatttattgactttgtgttgcagatgatgtctgctcta

SEQ ID NO: 373169 - DNA, 201 bp, Homo sapiens
ggcagaagaatcgcctgaacccgggaggcgaaggttgcagtgagctgagatcacgccactgcactctagcctgggcgacagagtaagactccatttctaaataaataaataaataaataaataataaaaaatgttatgggaatgtagagatgggggagtgtcagcaccatcctaatgtggggtggtggcagatttctctga

SEQ ID NO: 373170 - DNA, 201 bp, Homo sapiens
aattgtgcaggtgaggctgttcatggtagtgcaggatgcagagagctcttagcccagggtctggatcagacaggcctgggctccattcctgcttccacccsttagtaggagagagagcggatgtagcagatgattttgggcaggtcactgagtcctctggggctcactttatccactgtaacaatgggaatggtgctagta

SEQ ID NO: 373171 - DNA, 201 bp, Homo sapiens
gttgcagatgatgtctgctctaaaacagtaaacattggatttacttagtcacttaatcagcctgtggctcagctgattcatttggaggtagtagctctgakcctgtctctttgatggtggccctttgaggtgagtgagtcatcagctctgagcttttttgatgtggcaggttagttagggttatcataacagaaattcttt

SEQ ID NO: 373172 - DNA, 201 bp, Homo sapiens
attggatttacttagtcacttaatcagcctgtggctcagctgattcatttggaggtagtagctctgagcctgtctctttgatggtggccctttgaggtgartgagtcatcagctctgagcttttttgatgtggcaggttagttagggttatcataacagaaattctttatctttaatagtgtatttctggctgggtgcagt

SEQ ID NO: 373173 - DNA, 201 bp, Homo sapiens
gtgatatatttattttcttaaatccttttattctaaaataaagcctacctttaaaaaattattattatttttatttatttatttatttgagacggagtctygctctgttgcccaggctggagtgcagtggcaatagctcactgcaacctccgcctactgggttcaagcgattctcctgcctcagcctcccgagtagctggg

SEQ ID NO: 373174 - DNA, 201 bp, Homo sapiens
tgtcctctctgctcttgttgaaggtgagggactttcatattacctcacccctgtgcttctgggctcaggaggcccttccctggcccccagcaaggaatgckccagaccccatctctcaagccacatctctctctcttttttttttttgagacagagtctcactctgtcgcccaggctggaatgcagtggctcgatcttggc

SEQ ID NO: 373175 - DNA, 201 bp, Homo sapiens
agtctccctctgtcacccaggctggagtgcagtggcatgatcttggctcactgcaacctccgcctcccgagttcaagctattctcctgcctcagcctcccyggtagctgggattataggcgtctgccaccacacccagctaatttttgtaattctagtagagatggggtttcaccatgttggccaggctggtcttgaactc

SEQ ID NO: 373176 - DNA, 201 bp, Homo sapiens
ggtcctcagagcacctcgttttgccagagcagcccagattcctaggtgttcctttgcctcgtgggagggtgacctgggagtgggggtgctgatgttggcaycaatgagctgtcctcttgggaaaaccacgttgggggcgcccttggggtcgttctgccgacagctggtgtgctggcttctctccaggttatatcgagctct

SEQ ID NO: 373177 - DNA, 201 bp, Homo sapiens
accctatataatgtcccccaacataggagtacccaagtggggaagccctgctctgaactaccgggatccctttcagtgcagtggggtcctcattctgtcaraagcccccgacaccaccccagggaggatagattcactcaatctgcaggtagaatcgttctcgttcattaaattgtattttttttcctctgtctctttttc

SEQ ID NO: 373178 - DNA, 201 bp, Homo sapiens
cctgcttttgacaagaattcaaggctactgagcgtgatctggcttatttcccaagcacagcatcccaggtacaaagagaaaactttaaaaacttgtcacargtggtttattgctggccaagaaatgatgaaaaagccctttcacggatggtttctggcctgagtccctcacatgggcatttgaggcagggaaaggtgtggg

SEQ ID NO: 373179 - DNA, 201 bp, Homo sapiens
agagttttgccctgttggccatgctggtttcgaactcctgacctcaggtgatccacccacctcggcctcccaaagtgctgggatcacaggcatgagccacygcacccggccgtgtgtgtacattttaacatcctttctttgatgtggtggagggagtattagataccaagcatataggggtatgttttgagggaggggatt

SEQ ID NO: 373180 - DNA, 201 bp, Homo sapiens
acgaggtcaggagttcaagaccagtctgaccaacatggtgaaaccccgtctctacttaaaaatacaaaaattagctgggtgtggtggcgcacgcctgtaakcccagctactcaggaggctaaggcaggagaatggcttgaacccagtaggtggaggttgcagtgagtggagatcgtgccactgctctctagcctgggcaac

SEQ ID NO: 373181 - DNA, 201 bp, Homo sapiens
gaagcttggcagtgcccaaagaacagaaaggccagcatggctggagcagagggaacgggaggaagatggcatgagggacagctggagatgcaggcaggtgytgatcagatgcgagggcatttggcttgtgttcaacaatgagccttcccccccccccccccgccagtggtcttaattttcattatattctaaagcagtaga

SEQ ID NO: 373182 - DNA, 201 bp, Homo sapiens
agacggggtttcaccatgttctgcaggctggtctcgaactcttgacctcatgatccgcccgccttggccttccaaagtgctgggattacaagcataagccrctgcgcccagcccaaaagggctctttctacctactgtacagctggctggcgagaggaggtccctgtagtccagtccgcaaggagatgggggcaccctttg

SEQ ID NO: 373183 - DNA, 201 bp, Homo sapiens
gtggtttttccccagggcaaaaagagtcataacctgcctctgtggatgccacatctgtttttgttttcccctggtattttttaagtaagaagaaatgtgtrtaggttaaagggcctatggggaggaggttagagataaacactgtacaatgtgaaactcttccatatggggaatgtgaggatgtttgaaggccaggcctaa

SEQ ID NO: 373184 - DNA, 201 bp, Homo sapiens
ccaggctagtctcgaactcctgacctcaggtgatctgcctgcctcagcctcccaaagttctgggattacagacatgagccaccaccctaataattaaaaawtttttttttagaaatggggtctccttgtgttacctaggcttgtctcaaactcctgggctcaagtgatcctcctgcgtcaacctccccaagtgctgggatt

SEQ ID NO: 373185 - DNA, 201 bp, Homo sapiens
ccaccacatccagctaatttttatgtttttggtagagacagggttttgacatgtggccaggctggtttggaactcctgggctcaagccatctgcctgcttyggccttccaaagtcctgggactacagatgtgagccactgtgcctggcccagtcatgttttttgggttgaatggaactcactgcttttattctgtactgtg

SEQ ID NO: 373186 - DNA, 201 bp, Homo sapiens
gtacaagtcaagtgactttattcatccaacaattctcttttttcactccccagcaataatactgtgagtagtatcttttgtattctttttctgtgaatacrcttcttagtccaactggggttacttacttttggtaaggctgaatgtatatatattgggccccacacgtgtgcaaagagtgacatggtagattagtaatct

SEQ ID NO: 373187 - DNA, 201 bp, Homo sapiens
tcagctcagctgtgtctttgggacatctttccagaccattcactctgtaggagccacctaccgctgagtagcatatattttttttttcttgtttttttttkttgttgttgttcctaccttgcccacctacaaaatgtaggctctgtgagagcagtgccctcgtttgtcttgtgagaatcccagtgcttagcacaaaggctg

SEQ ID NO: 373188 - DNA, 201 bp, Homo sapiens
gagaccatcctggctaacacggtgaaaccccgtctctactaaaaatacaaaaaaattagccgggcgtggtggtgggcgcctgcagtcccagctactcaggwggctgaggcaggagaatggcgtgaacccgggaggcggagcttgcagtgagccgagattgcgccattgcactccagcctggggagagcgagactctgtctc

SEQ ID NO: 373189 - DNA, 201 bp, Homo sapiens
ctttgaggtgagtgagtcatcagctctgagcttttttgatgtggcaggttagttagggttatcataacagaaattctttatctttaatagtgtatttctgrctgggtgcagtggctcacacctataatcccagcactttgggaggccgaggcgggaggttgacttgagcctgggagttagaaaacagcctgggcaataaga

SEQ ID NO: 373190 - DNA, 201 bp, Homo sapiens
actacaggtgtgtcatgcgccaccatgcccagctaacttttgtatttttagtagagacagggtttcaccacgttggcaaggctggtcgtgaactcctgacytcaggtgatctgctcgcctcggcctcccaaagtactgggattacaggcgtgagtcactgcgcctggccgagaggcatacactttcgatggagcttgtgct

SEQ ID NO: 373191 - DNA, 201 bp, Homo sapiens
cacacactcagcacttactcatgtttttgcttattgttttggtgtctaggaaattgccttccactggattctgtcctgttttctggaattttttgggctcrtgctgtgtggggttgccagccaggctctgtggcctaggtctgtgttagaacctatgaccgagtgtcttgggtaaacacaaatgcatgaggtgagggagga

SEQ ID NO: 373192 - DNA, 201 bp, Homo sapiens
tctcttgtttttttttttttttttctgagacggagtctcgctctgtttcccaggctggagtgcagtggcgcgatctccgctcactgcaagctccacctccygggttcacgccattctcttgcctcagcctcccaagtagctgggattacaggcgcctaccaccatgcccagctaattttttgtatttttggtagagatggg

SEQ ID NO: 373193 - DNA, 201 bp, Homo sapiens
aggccaagtaaacagtaagaaaatggccaacacattaggagagaaaactataaccagctaaggacttgtgatggtttttcccctgggttattcatttactrgtactttttttttttttttttgagacgaagtctcactctgtcgccccatcctggagtgtagtggtgctatcttggcttaccacaaactctgcctcccggg

SEQ ID NO: 373194 - DNA, 201 bp, Homo sapiens
gagtgtccaggtgacttgttctaaggatgtggttgaactaaactggactcataaagagagcaggtggttttaaaagattcctgcaggaaagcttcagattrttaatacaaggccaagtaaacagtaagaaaatggccaacacattaggagagaaaactataaccagctaaggacttgtgatggtttttcccctgggttatt

SEQ ID NO: 373195 - DNA, 201 bp, Homo sapiens
aagcaattctctgcctcagccttcctagtagctgggattacaggcacctgccaccacgcccggctaatttttatatttttagtagagacggggtttcaccrtgttggcctggctggtctcaaactcctgacctcaggtgatctgtccgccttggcttcccaaagtgctgggattacagacgtgagtcaccatgcctggccc

SEQ ID NO: 373196 - DNA, 201 bp, Homo sapiens
caaactcctggcctcaagccatcctcctgcctcaacctccttgtagctgggattacaagtgtgagccaccgcatctggttcggctccctaatttcttttcttttttttttttttatttgtgacagagctttactcttgttgcccagactgtagtgccaatggcacgatctctgctcactgcaacctctgcctcctggattc

SEQ ID NO: 373197 - DNA, 201 bp, Homo sapiens
tcgtggggccctgccctgctccatgcggggaaactgcctggatctctctttaatatatttgagttctttgtaagccattatttaacaagcattttagcccygatcaatgctacctgccttttaattttaaaagcatgtgcttcaagcgggcccattagatgactggttttcctccaggtttttgctaacatgataaagaga

SEQ ID NO: 373198 - DNA, 201 bp, Homo sapiens
tagcatagtattgtatagaggcaggtacagtcagttctcatcattcacagattctttgtgaattctcctcctcccaaaatttatctgtgacctccaaatcmgtactcttgatattttcactgtcatacgtagagtggcttaaatctctccttttttttttttttttgagatggggccttgctcttatcacccaggctgggg

SEQ ID NO: 373199 - DNA, 201 bp, Homo sapiens
agacccggattctgggcctggttaggacaagaggtagctgtgtggtttggggcaagtcatctaccctctctgagcccacagcagagaaatgcagtgtgagytaatgcacgatacggaagaacctgactcatttacggtcagcgttttataagctgagttaaaccccagaagcgtctgtcttgctcatccaactacatagaa

SEQ ID NO: 373200 - DNA, 201 bp, Homo sapiens
cctcatcctcctgagtagctgggattataggcatgtgccaccacgcgtggctaatttttgtatttttagtagagatggggtttcaccatgttggccaggcyggtcttgaactcctgacatcaggtgatccacccacttcagcctctcaaagtgctgggattacagatgtgagccaccttgcccgccggtacagtcttaaaa

SEQ ID NO: 373201 - DNA, 201 bp, Homo sapiens
atttaaataaattccccttttaaaatcaaatttagacttggaccaccaactgcatatagcttgaaaccaaagaatttctttcttgaagttcttcaaagatytcctacaatgtcttgctttttcagtgaaagaaaatgtgtttgccctgacctcttgtgcttctgatggtgcctaattttattggattttaggaaggaaaac

SEQ ID NO: 373202 - DNA, 201 bp, Homo sapiens
tacatgcattggtacagatgttatgtcatgtcatgttattttttagacagagtcttactctgtcgcccaggctggagtgcagtggcgcaatcttggctcamtgcaacctccgcctcctgagttcaagcgattctcctgcctcatcctcctgagtagctgggattataggcatgtgccaccacgcgtggctaatttttgtat

SEQ ID NO: 373203 - DNA, 201 bp, Homo sapiens; identical to SEQ ID NO: 80728

SEQ ID NO: 373204 - DNA, 201 bp, Homo sapiens
cgtttggtcttttccaggaagacagcgaccccccgatcagcgagagcctgagcatagagaacacgctgtgggctggcactgtggtcgcatcaggtgaggcrccgttttgaggaatgtggtagcaatttgaaaaggaaagaaaatccttttgtaattagaataatcatctgtcagttggaaaaatgagtgctcggtcaaatg

SEQ ID NO: 373205 - DNA, 201 bp, Homo sapiens; identical to SEQ ID NO: 80729

SEQ ID NO: 373206 - DNA, 201 bp, Homo sapiens
ttccaggttcatcggggggagcctgtctttctatctccagcggaccatgctagaagcagcctgtggattctggggaagctttggggggtgaacgtgtgtcygtttggtcttttccaggaagacagcgaccccccgatcagcgagagcctgagcatagagaacacgctgtgggctggcactgtggtcgcatcaggtgaggcg

SEQ ID NO: 373207 - DNA, 201 bp, Homo sapiens
ccacaccccttcctcattcactctctggcccctggccttattttctttggaagttgtttactgtctccctccactaggctacaaggtccatgggaggaggrccttgtctgtcctgttcgctactgaatgcccggtgcctaggcgagggctggccactgtgcaaacactcagggcacactttgggaatggaggagtgacaaa

SEQ ID NO: 373208 - DNA, 201 bp, Homo sapiens
tactaaaagaatatacaggaaaagttctccctactccttcttcctgaaagggagccagtgttattagctcgtcatggagattgtctgtgctcatgcaagcrtctccctgcatgtatgtcctcttgctttcgtgcaaagaatagcatcctacacacaccttttagccccttgcttttcggttttgtgtattttgcagattgg

SEQ ID NO: 373209 - DNA, 201 bp, Homo sapiens
taatttttgtattaatcttttctgtaataacaggctggagttcttgtcaggaaatggccctagctgtggattactaatgggaaagggaagcctattttccytgccttggtgtctcatttattggctgggatgctataaatgactcaggggctttataggattcgagacacccgcccaggggcccaagtcagggccctttgt

SEQ ID NO: 373210 - DNA, 201 bp, Homo sapiens
gcagtacgcccgccccccccaccttccatcagagtccctgagggtcagcttaagcctttctctgacaagggggtctgaacactttgcaccatgacccagaytcatcctgtggctttctgcgaccatcactggaagcagagggtgcatttgaatgtcattttctgctcgccagtggccgggacttagaaagactctccaact

SEQ ID NO: 373211 - DNA, 201 bp, Homo sapiens
catttctgttttctaatcatcttgaatattattgaaagcattctttaagaattgctacctatgcatataccctaatatcctaactattctcataattggarcttctcatactgtaggaacttaggttattcctaatttttagcaatgatatttataagtattttgcaatgaacatccttacaccttataattctagaagtg

SEQ ID NO: 373212 - DNA, 201 bp, Homo sapiens
  misc_feature (1)...(201): n = A,T,C or G
tgcactctatacctactgggttcccctggtaagttaatcggcattgtttgttcagtaaccttagaggtttggaaacagaaagttctttgtttctctcactnaggcatctggaatgggatggtggccttgtaagggaaaggatgcccttaggccaatacattgggagtctctgagactttaacgttgaagctccatttcata

SEQ ID NO: 373213 - DNA, 201 bp, Homo sapiens
tgacaccagaggttaacagagcaggaaggcagagcgctgtgtccccgcagtgaccagaataatttagtaattgtctaattacctgaggagtctaatgctamtactaaaaatagtattaaaaaattaagtgaaagtcattttcttgtttcttgtaacccatctgttctctattttgggcaatcgggtgtcatgggtgtaaag

SEQ ID NO: 373214 - DNA, 201 bp, Homo sapiens
agttcaagaccagcctggccaacatggtgagaccccgtctctactaaaaatacaaaaattagccaggcatggcagtgggtgcctgtaattctagctactcrggaggctgaggcaggagaattgcttgaacccgggaggcagaggttgcagtgagtggagattgtgccactgcactctgggtgacagagtgagactgtctca

SEQ ID NO: 373215 - DNA, 201 bp, Homo sapiens
  misc_feature (1)...(201): n = A,T,C or G
tcacagcacgaggtcagccttctggctcctgggccacagggttgcagctcaatcacgggccgctgacagtcaggggagaagagttcaaggcccgggccgcnggtgtgggaatgccacgtggcggaacagtcgcttggttactccagcaccagggaggcctccatctgccctggatgacaggttgacggggtcccaccaggc

SEQ ID NO: 373216 - DNA, 201 bp, Homo sapiens
taaaggatcagatcacttctctcctgttggataaatatgtttttaatagaatgtagaatctggtaactccatacacatttctagcctccacaattcagttrgctgtggattcagtaagactgttgtaggtgaccccttgtctaaatctgtgatttaaaatctgaaactgatgtcgatttcatagttgttacttcttgaaaa

SEQ ID NO: 373217 - DNA, 201 bp, Homo sapiens
ccaagggcagtagtggaagagcttggccctcccctcatggtggagccgtcggcttccaaactgggcttccaggttcatcggggggagcctgtctttctatytccagcggaccatgctagaagcagcctgtggattctggggaagctttggggggtgaacgtgtgtccgtttggtcttttccaggaagacagcgaccccccg

SEQ ID NO: 373218 - DNA, 201 bp, Homo sapiens
ggatcccactgtcctacctggggtagaggtgtttgtaggggaaggaccagctctccggcaggctgagttagtgcagtgaggctcagctcactgcagcctcsacctcctggtttaggtttgagattagttacaccagctcatctcaagccctggtttgtgcttcgtcccacagatcggcctgttcgacttggaagtgaactg

SEQ ID NO: 373219 - DNA, 201 bp, Homo sapiens
atttctagcaaaatcccagccaggggtctcactgtcccttctcaagcctgtcaccatgtccagaacatccagggctctccctggctaagcctggagcctgygcacatcatgcctgaaattcagagatgggattgggctcagctaaacccctgggaaagaagatggaggaaattgacttttacaaccatgattaaagagtga

SEQ ID NO: 373220 - DNA, 201 bp, Homo sapiens
gcccattttttgtatttttagtagagacgaggtttcactgtgttagctaggatggtttcaatctcctgacctcgtgatctgcctgtcttggcctcccaaartgttgggattacaggcgtgagccaccgtgcccagccctgactgatttttgtgtttgtagtagagacagcgtttagctatgttggccaggctggtcctgaa

SEQ ID NO: 373221 - DNA, 201 bp, Homo sapiens
ctggagctttggattataacgtagccgaatgtttggcattgctgcatgtggctcataaggatgctgtacctgggacccctcctgactttcttccctcatcycctaaacctattctctcccagggctgcttgtcttagtgcacaccacgccctccatcctggtaccctcgtcaccccagctgacagccactgccccttctcc

SEQ ID NO: 373222 - DNA, 201 bp, Homo sapiens
acgaggtttcactgtgttagctaggatggtttcaatctcctgacctcgtgatctgcctgtcttggcctcccaaagtgttgggattacaggcgtgagccacygtgcccagccctgactgatttttgtgtttgtagtagagacagcgtttagctatgttggccaggctggtcctgaactcctgacctcaggtgatccgcctgc

SEQ ID NO: 373223 - DNA, 201 bp, Homo sapiens
aacattcccatagtcagaagaccagtaagaaatatgaatgaattatctctgtatacaggttaaaggcagaatccctgaatacttcttgatacggtcataaytgacatttaattttctggaacatttgtcagtgggctggatttccaggctgtctcctgaaaatggcagagcaggggacagtgtgacagtgggagtggatgt

SEQ ID NO: 373224 - DNA, 201 bp, Homo sapiens
gttgtggaggttgtctgtgcattgtaaggtgtctcgcagcatccttggctgcctccatccactagatgagagtagcatcttggagttgtgacagacaacaktgtttccagatattgccagatacccaccctgggggtgcaaaattgcctgtagttgagaaccactgatgtaaggtgatcaaatttagacaaaattgtgtag

SEQ ID NO: 373225 - DNA, 201 bp, Homo sapiens
ctcccaccctctacctgcagatagacccccagtgtctcttcttcccttctttgtgcctgtaagttcttatcacttagctcctacttataagtgagaacacrtggtatttggctttcttttcctgtgttaatgtgctgaggataatagcctccagctcaatccatgtcctgcaaaagacacaatcttgttcttttttatggc

SEQ ID NO: 373226 - DNA, 201 bp, Homo sapiens
ggcttaaagtgcttaagtaccccaggtgtgctgcgtgtgtccctgtgggttgacattctttctaaccctctttactgtggtatctgtcacccagactaacragggaatataattccctaagcagaaaggaaattagttcattcattggacacaccccgtaactctgatccgcttatggtgtccctggttctggagtgaaag

SEQ ID NO: 373227 - DNA, 201 bp, Homo sapiens
cagctttgggccactgctcctctggaaccctggggcaccagggagctgaagtccatgcatgcaacacgcagggtgtggctgcagcttccccaggaagagarctgcatgtataaatccactcctcagtagggaggctggctgtcacttctcttgtttggacagatgtgggggaatttggtcacttgtagtaagtttgccacc

SEQ ID NO: 373228 - DNA, 201 bp, Homo sapiens
aagagaacgtccattggggatttcttggtaatacatctctcattctcttttgtttaatattgaacatgtatttttttattgaggtgaaattcacataatayaatcattttaaagtgaaaacttcagtggcatttagtccattcacagtgttgctcagccaccacttccctcatgtttcaaaacattttcatcaaaatgatg

SEQ ID NO: 373229 - DNA, 201 bp, Homo sapiens
tcatattttgcttaaattcgtcgaaatagagaacattcccatagtcagaagaccagtaagaaatatgaatgaattatctctgtatacaggttaaaggcagmatccctgaatacttcttgatacggtcataactgacatttaattttctggaacatttgtcagtgggctggatttccaggctgtctcctgaaaatggcagag

SEQ ID NO: 373230 - DNA, 201 bp, Homo sapiens
tgtgcttagagtctgtgatgctgtcagatgggcagatctatttttgttttaacctggcatgccccccttcccaggttattaaaaaacattcacagttaagrcatttagaacaaaaagttacaggtaaagagggggatcaaaactgccctccctctctctctccctccctccctttcttcctccctccctccctcttttcct

SEQ ID NO: 373231 - DNA, 201 bp, Homo sapiens
ataacttgcagtttatctgttcctacctttatttttcctaccaagtttcccaaaaccagtcacttttcagagaaagtattactggcaaatatcctaatatycctaaagtgttagaccggtgggtccccatcttggctgtgtgtcagaattgctggtggagtttcaaaacaacacagaacaaaaacgagacatttatttggg

SEQ ID NO: 373232 - DNA, 201 bp, Homo sapiens
tggctggacataactttttatttctttttgcactcaaccttatagcataagcattttccgcaaaaacctcctcctaaacaacagagcaaggctccgtctcaaaaaaaaaaaaaaaaaaaaaaaaaagaaataacacagtctggacgcagtggcttaggtctgtaatcccaacactttgggaggctgaagtgggaggatcgc

SEQ ID NO: 373233 - DNA, 201 bp, Homo sapiens
tggtctgcttgtgaaataatcatgacgttactgattacctttagtttctcatctacattcaactcaacaatcacgaggaagaaattagttcatcagagatracttgcagtttatctgttcctacctttatttttcctaccaagtttcccaaaaccagtcacttttcagagaaagtattactggcaaatatcctaatattcc

SEQ ID NO: 373234 - DNA, 201 bp, Homo sapiens
aatgatacttttattacccatgtatgtttttctaaacaacatatggaagtgtttaagctctatgtgaaaagtatagtgtaaattgtattataaagcaggatttttttttttttttttttttttttttgagacagagtttcgctcttgttgcccaggttggagtgcaatggtgcgatcttggctcactgcaacttcctcctc

SEQ ID NO: 373235 - DNA, 201 bp, Homo sapiens
atacttcaagtttacgaccacgttgatgttttccctttccctggctatgacccggagcaccaataacaaatggtctgcttgtgaaataatcatgacgttaytgattacctttagtttctcatctacattcaactcaacaatcacgaggaagaaattagttcatcagagataacttgcagtttatctgttcctacctttatt

SEQ ID NO: 373236 - DNA, 201 bp, Homo sapiens
ataacagaattatgtgcagaatacaattctggggagtttcagtgcggtcactccttcagtcctcacctgaaccttgtgagttaggtagtgtttctgtcccscttccacagatgaggaaatgtggcccagagagggtaagtgacttgtcacgggcgcatagtagccgaagcaagctttaactcaggcagtcaggcctgatct

SEQ ID NO: 373237 - DNA, 201 bp, Homo sapiens
cacccacctcagcttcccaaagtgctggggttacaggcacgagccaccacctcccaggggctctccaggaccccacgctccccctccagccccacttcacrtgatggtggctgctacaagtccccaggggctcctagacagtagttagaaactcactgttctaacagtgactgctgctccccctgactgtgcctgtcttac

SEQ ID NO: 373238 - DNA, 201 bp, Homo sapiens
atgaagatgatgataacagaattatgtgcagaatacaattctggggagtttcagtgcggtcactccttcagtcctcacctgaaccttgtgagttaggtagygtttctgtcccccttccacagatgaggaaatgtggcccagagagggtaagtgacttgtcacgggcgcatagtagccgaagcaagctttaactcaggcagt

SEQ ID NO: 373239 - DNA, 201 bp, Homo sapiens
ggtgatccactggccttggcctcccacagtgttgggattacaggcgtgagtcactgcgttggtgagtatggcttcttaatatagttagtatattttgggatttttttttttttttgcaaccatcatcacaatcaaattaggatatttttatcaccccaaaggaaattctatacccactttcctgctgtactcccttgtctt

SEQ ID NO: 373240 - DNA, 201 bp, Homo sapiens
gtgagctgctttctgggacctgcgcaggattcctggtgagagaagatgcctgagggctttggctgaaattcttgggctctctctggacatatgagagatgygtgttgctgctattttattcccttcatcttttgatgaagattctttggtgatgaagatgatgataacagaattatgtgcagaatacaattctggggagtt

SEQ ID NO: 373241 - DNA, 201 bp, Homo sapiens
cgatggcacatgtgtttagagtccatgtttttataaagatacaaggagccttacatctgtcctgttagcctgtttgctctggttttgtgcctagtttgcgygtgaacctggacatgggcaagatcgtgtacagctgggtgattcgaagggactcgaaaatccccgggaccgtggttcgctccagcacgattcctgagcagc

SEQ ID NO: 373242 - DNA, 201 bp, Homo sapiens
caagagatacttttgagtagactaacactgtgatattagtgctaacaagacagccccaggcccctagggaggaggcttgtgtgacacagtatagtgtgtgrcttactcccgggatccagctccacacttgggcagttacttatgcttgctgtgcctccagatctgtgccatggaacccccacagtggggctgttgtgaagc

SEQ ID NO: 373243 - DNA, 201 bp, Homo sapiens
cttttgagtagactaacactgtgatattagtgctaacaagacagccccaggcccctagggaggaggcttgtgtgacacagtatagtgtgtgacttactccygggatccagctccacacttgggcagttacttatgcttgctgtgcctccagatctgtgccatggaacccccacagtggggctgttgtgaagccccaagtag

SEQ ID NO: 373244 - DNA, 201 bp, Homo sapiens
cccagcccccgtagacacttcagaggctctttttccgtatgtgtttccatacctacggcactttggttagcagcgtgcatgcctacagaggtgaggattcygagctgtttagaagtgtggccacagagctgtggccacagctgggcttgagtcccatagggctgtttacctgctcagcctccccttctgtaaagtgtgggt

SEQ ID NO: 373245 - DNA, 201 bp, Homo sapiens; identical to SEQ ID NO: 80725

SEQ ID NO: 373246 - DNA, 201 bp, Homo sapiens
ttcctcatcattgggtaaggaaatcctgccaaggaattaattgtttacaaaaccttcttcaaatgctgcaacagagagaagaaacgtggtggaaaaattcytgggttcccaagccacattggattcccagccccagcgaatgcaggcccagcaccatggtttagaacctccttcaattaacaaggttttgagctgttaagc

SEQ ID NO: 373247 - DNA, 201 bp, Homo sapiens
ttacagccagccccggagcataatagacaagcagtaaatatttgttagaggcatggttgggacttgggtgctggaggctggcacagcacatagctcctatygcgtcagccaggtcttacctatggcggttttctctcccaggtactccacaatttacaccatgtttcctgtgttttctctggtcctggacaaagatgtcaa

SEQ ID NO: 373248 - DNA, 201 bp, Homo sapiens
aggccgttggtacctgcagatcatccgcttcctcctcttgttttccaacatcatccccattaggtaagcaggcgacgagcttgagtttggctgccgtgacrtcttcttctctttactcattcaaagatgatggttctgtggcttttattattattattgttttctgagatggagttttgctcttgttgcccaggctggagg

SEQ ID NO: 373249 - DNA, 201 bp, Homo sapiens
ttgtttttttttaagcatattcagagttgagcaactgtcactgcaatcgattttatgtttaccccaaaaagaagccctctacccatcagcagtcactcccyaatacctcccttctatacccatgacacccacacttcctttacactttgaataaaattgcatttggggtccttccccatcttccctatcttcagggctaat

SEQ ID NO: 373250 - DNA, 201 bp, Homo sapiens
ggatgacaggttgacggggtcccaccaggccctggcagcatccacaggcctcttggtgttggtcttgtcaaataacttatgtgtcataaacctggaattasattttgtgtgctggcatcccagctggctaatccctttcccgttctgccgcctggctgaagagggaagtagggcgcctctgctgttcaaatgagaggctgc

SEQ ID NO: 373251 - DNA, 201 bp, Homo sapiens
gcagtagctctaattgcctgttcagattgacattctaatctgtaccagagggggaggcagcctggatgttctggctggaggctgtgtttgtagggtatgtygcgctgggactgccagcactggggccctaggaaagggcatgggcttgagctggagcttctgtgtttaaacaccaagaggaagtggatattggtgcctttc

SEQ ID NO: 373252 - DNA, 201 bp, Homo sapiens
gtgacggcacccgacttccttccacagggtcatgcttcttgcggacggatcagctggatggggagacggactggaagctgcggcttcccgtggcctgcacrcagaggctccccacggccgccgtgagtagctttccctgcagaagcccatgcgggcaacctatcttagcagggttctcaaactcagatacctggggggcca

SEQ ID NO: 373253 - DNA, 201 bp, Homo sapiens
tcaattgaggactccctaccaccaccttgggactattaagttattaatttaattgttcagcaaatatctgttacataccagacactgccctggatactagraatacagtgatgagtaactcactcaggtgagccttctgtttctatggtctaatgagagggaaccgtcaggtaaataggccaatttagacaatgaagagag

SEQ ID NO: 373254 - DNA, 201 bp, Homo sapiens
cccgacttccttccacagggtcatgcttcttgcggacggatcagctggatggggagacggactggaagctgcggcttcccgtggcctgcacgcagaggctycccacggccgccgtgagtagctttccctgcagaagcccatgcgggcaacctatcttagcagggttctcaaactcagatacctggggggccaggcatggga

SEQ ID NO: 373255 - DNA, 201 bp, Homo sapiens
ttgctctgccagggttcaggagtcctgcttccacctgggtagatcctttaagttctcagtaaatgaatctacatcagggaaaataatagcacctaccttaragggttgctgtaagtgaagctcttgcatgggaagagctcagcactgtgccttgggacttggcatggtggagagaggccagtgtggatggtattgaagcag

SEQ ID NO: 373256 - DNA, 201 bp, Homo sapiens
tctagaagcctggggcaagtccggctaattgtggacttggggaaaataaggcccaacccctgtttttgcaaggttaaggagaaataatcttaaaccagtcwcacaaatcatcggcatttatttcctgggtcctaggtgtcacttatcctggtggacagggcagaggtggtcagatcgttttgagccaaaatcccttcccta

SEQ ID NO: 373257 - DNA, 201 bp, Homo sapiens
catggtgctggtgacagagcctgggtgggcatctcgcccacagactggtcccccaaggtggtggagctgtgtaagaagtaccagcagcagaccgtggtagmcattgacctggctggagatgagaccatcccaggaagcagcctcttgcctggacatgtccaggcctaccaggtgggtcctgtgagaaggaatggagaggct

SEQ ID NO: 373258 - DNA, 201 bp, Homo sapiens
cactctggccaactccccgcctgcttcctgattcagacactaagcacacgcagctcccctgcctggagccattctccctctccttctttcttctccctggmgaactccccctttaagtgatcttttcccaacacactttctaaattgcccccaccccagtgtgatttttctttatctcatagcacttggtctgcttcttat

SEQ ID NO: 373259 - DNA, 201 bp, Homo sapiens
  misc_feature (1)...(201): n = A,T,C or G
aggacttggagggtaaaagaccaggtttccccatgctgttgaagcaggcagcatgactaggatggttcaatctccacagcatggtcaaggcagggcctgcnggggccctcccgctagggcacccatgacctggctctcccccttccaggaggctgtgaagagcggcattcaccgtactgtccacgccggggaggtgggctc

SEQ ID NO: 373260 - DNA, 201 bp, Homo sapiens
tgacatttgcttaatgcctctcccactctggggcctgtacaagccccaggaacaggacttggaccctcctgtttaactctacaatctagcatccagcaggmgcgcaggccttcgttgacttttattttattcttattttttatttttgagatgcagtttcgctcttgtcgcccaggctggagtgcagtggcgtaatctcgg

SEQ ID NO: 373261 - DNA, 201 bp, Homo sapiens
gtggggagggccatgttgacaccccacacctcccactaagatctaggagcacccagctgctttaagagctagagggacatgctagggcctgggggcatctmtgccagtctttcctctgaggcagtgggtcagtgggggaggagggtcctccccaaagcctcctcttcctcctctgtcccagtcccagagctgccctttagg

SEQ ID NO: 373262 - DNA, 201 bp, Homo sapiens
ggctccctctgcccttgggctggggacccactgtaccctgatgtgaatcctatggcagtagcaaagctctttgattggcggggtgcagtggctcacgcctrtaatcccagcactttgggaggcaaaggtgggtggatcatgaggccaggagttcgagaccagcctggccaacatggcaaaaccccatttctactaaaaata

SEQ ID NO: 373263 - DNA, 201 bp, Homo sapiens
  misc_feature (1)...(201): n = A,T,C or G
tgttaaagtagtttatttagttggctgagagcgggagctgcctacgtgacctggagcacaagctttggaattgggcttgggttagaattccgcctctgccnctcaccagctgcgattaagaacaaagatactgggttgggctcctgcctctattacttgcaatctgtgtggccttggatgagatatttaacacctccgaac

SEQ ID NO: 373264 - DNA, 201 bp, Homo sapiens
attaatgttaacattaagctctgaaaggtccttcgtgaactcataggtatttgttctctctctccctttctctctctcttccccctgcccccttgcaggtrgaactgcatgtccacctagacggatccatcaagcctgaaaccatcttatactatggcaggtaagtccatacagaagagccctctctccctgggatttgag

SEQ ID NO: 373265 - DNA, 201 bp, Homo sapiens
ggctgccgggaggctatcaaaaggatcgcctatgagtttgtagagatgaaggccaaagagggcgtggtgtatgtggaggtgcggtacagtccgcacctgcyggccaactccaaagtggagccaatcccctggaaccaggctgagtgagtgatgggcctggaaggggccatgctgagggtgtggctgggaggctcagctctg

SEQ ID NO: 373266 - DNA, 201 bp, Homo sapiens
tctctctctcttccccctgcccccttgcaggtagaactgcatgtccacctagacggatccatcaagcctgaaaccatcttatactatggcaggtaagtccrtacagaagagccctctctccctgggatttgagtggggtccccagctccacccagaggcccctggggaattccagggtcactgttccttcctgtctccctg

SEQ ID NO: 373267 - DNA, 201 bp, Homo sapiens
gagagaatgagggatcccggggggttgcccccaactctcgggagcatctccaccaactccctgagagatttctggtaagtccactattctccatcttttcrcacttccagggaccttcttctgccccaggaagctgccattgatttaattcctatttaactgcaaggcataagcacagtagcacctcctgtgtgccaaaca

SEQ ID NO: 373268 - DNA, 201 bp, Homo sapiens
tgttcccaacccctttcttcccttcccaggggctgccgggaggctatcaaaaggatcgcctatgagtttgtagagatgaaggccaaagagggcgtggtgtrtgtggaggtgcggtacagtccgcacctgctggccaactccaaagtggagccaatcccctggaaccaggctgagtgagtgatgggcctggaaggggccatg

SEQ ID NO: 373269 - DNA, 201 bp, Homo sapiens
tgaggcgggaggatcgcttgagcccaggaggttgaggctgcagtgaggtgtgatggtgccactgcacttcagcctgggagacagagcgagaccctgtctcaaaaaaaagagaagaaaaagaaaagaaaagaaataggtgtgaatgatgatgacagctatcacaaaagtgccggtgagaatccagtgagtgtgcatgtgtca

SEQ ID NO: 373270 - DNA, 201 bp, Homo sapiens
gcccagtaagcacagggcggaggtttgaacccagatagtctgcccccgagtccatggccctggccattaccccctgtcagttagaggttttggtaagtgaygcccgtaaaatgcttagttcagggcctagcacacattaatgtgctccataaatgtcacttaatgataatattcttattaattggagcttatatctctaag

SEQ ID NO: 373271 - DNA, 201 bp, Homo sapiens
gttttactgacaagggcaccaagggccttagaggggagcgctcctgcctgggatgatgtggtaaataggggtgggagatggacttgacctgcaacccctgmgctcatcctccctccctccctgggctcctgatggtgggcttcttgtgactgtgttgcccaccaaggccggaagaggaccagacagtgccccagcacagca

SEQ ID NO: 373272 - DNA, 201 bp, Homo sapiens
ccaccatgcctggctaatttttgtgtttttagtagagacagggtttcaccatgttggccataacaatggctgtccttgaagtagtcctgggtaccaggtgmcttcagtgactttttttttttttttttttttgagctggagtcttcctctgtcacccaagctggagtgcagtggcacgattttggctcactgcaacctctg

SEQ ID NO: 373273 - DNA, 201 bp, Homo sapiens
ctcagcctcccaaagtgctgggatttcaagagtgagccaccgcacctggcccctgtttagatgttagcatcagtgacccagcaccttgctatgtggcatgmagggagcgtgctgctagacctccgggtttagagtcaaatagcttcctggctgtggtgtgcattagactttctaactcaaggtcctcccactctctgagcc

SEQ ID NO: 373274 - DNA, 201 bp, Homo sapiens
taactcaaggtcctcccactctctgagcctcagtcttgttgcctttaaaacgagtttaagtgtgctgagtccctatgctgtggctccacaggaatttcccsaggtggaagacacatcttgccttctgtgaaacctctcagcagcagagctgtcaggccccgtcagcaggagacactgtggggactgctcagtcccttccac

SEQ ID NO: 373275 - DNA, 201 bp, Homo sapiens
gggaggatttcctgctgttcagacaaatgctgggctggctgtgagtcagccttgcagagagcaaaggcagtgggaaggggcgtgagattcccctctggagmggtcaggaggccaggcactgtctcgacatgagtgccagggagggggtgtggcctgtgggcagggcttgggctgaggcagagggacttgagttccacccta

SEQ ID NO: 373276 - DNA, 201 bp, Homo sapiens
atgggctttactgaagaggagtttaaaaggctggtgagtgggtgtgagccatactggccttgactcgggtttgggagtatggtatctacaggtccagtccrgggcctggaatctttggagagagggagtgagtctgcctcaacagtccaagacaagcccaacctagacactttccacagagaagacatctttgtgttgacg

SEQ ID NO: 373277 - DNA, 201 bp, Homo sapiens
tgtcccagtcccagagctgccctttaggccttccttttgcctcaggcccatccctactcctctcctcacacagaggggacctcaccccagacgaggtggtrgccctagtgggccagggcctgcaggagggggagcgagacttcggggtcaaggcccggtccatcctgtgctgcatgcgccaccagcccagtgagtaggatc

SEQ ID NO: 373278 - DNA, 201 bp, Homo sapiens
agcttgagccacctgtggaggtggcttcctgcctctgctccacacctgaaacgcgtctgggcctcttctcaggcagccgtgagaagggatgagtgctactrgtcatggtgggcagctggctctgctttcccccttcccagaggcgctcctgcctcctgcccagctccctgaacccctagcttctgcaccccggcactgtct

SEQ ID NO: 373279 - DNA, 201 bp, Homo sapiens
tgagccacctgtggaggtggcttcctgcctctgctccacacctgaaacgcgtctgggcctcttctcaggcagccgtgagaagggatgagtgctactggtcmtggtgggcagctggctctgctttcccccttcccagaggcgctcctgcctcctgcccagctccctgaacccctagcttctgcaccccggcactgtctggct

SEQ ID NO: 373280 - DNA, 201 bp, Homo sapiens
tcccgcagtagctggtcttctgttctggcttcctgccatcctgtcctccacacagcagccgggaaaggtttttttaaaggggactctccgatttaacacayttgggtggaaaaccctttgcttcggcctctgcaatctccctgccccctctccactttgccctggcctcatttctcaccactaacctcactctgcactctg

SEQ ID NO: 373281 - DNA, 201 bp, Homo sapiens
gctaccacaccctggaagaccaggccctttataacaggctgcggcaggaaaacatgcacttcgaggtaagcgggccagggagtggggaggaaccatccccrgctgtcccaacttcctgtatagagaggcagaaagcagggcgggtcccaggaactcgaggggtggccccaggcccagacatggggggaggaatcagcatgg

SEQ ID NO: 373282 - DNA, 201 bp, Homo sapiens
cttccttttgcctcaggcccatccctactcctctcctcacacagaggggacctcaccccagacgaggtggtggccctagtgggccagggcctgcaggaggrggagcgagacttcggggtcaaggcccggtccatcctgtgctgcatgcgccaccagcccagtgagtaggatcaccgccctgcccagggccgcccgtctcac

SEQ ID NO: 373283 - DNA, 201 bp, Homo sapiens
cctttcttcccttcccaggggctgccgggaggctatcaaaaggatcgcctatgagtttgtagagatgaaggccaaagagggcgtggtgtatgtggaggtgyggtacagtccgcacctgctggccaactccaaagtggagccaatcccctggaaccaggctgagtgagtgatgggcctggaaggggccatgctgagggtgtg

SEQ ID NO: 373284 - DNA, 201 bp, Homo sapiens
gtctcaaactcctggcctcaggtgatccacccacctcggcctcccaaagtggctggattacaggggtgagcccccatgcccagccttcattgacttttagwtgacaactatttagcatttgctatgtgccaagaactccctgcctactaatgcagttaaccctcatgaagcctagaaggaaggactgccattctccccact

SEQ ID NO: 373285 - DNA, 201 bp, Homo sapiens
agtgggtttaatctgccaagggttggggatgtcatttgctcctggagctcccaagggacttggggaaggttgttcccaacccctttcttcccttcccaggkgctgccgggaggctatcaaaaggatcgcctatgagtttgtagagatgaaggccaaagagggcgtggtgtatgtggaggtgcggtacagtccgcacctgct

SEQ ID NO: 373286 - DNA, 201 bp, Homo sapiens
gtgggtttaatctgccaagggttggggatgtcatttgctcctggagctcccaagggacttggggaaggttgttcccaacccctttcttcccttcccagggkctgccgggaggctatcaaaaggatcgcctatgagtttgtagagatgaaggccaaagagggcgtggtgtatgtggaggtgcggtacagtccgcacctgctg

SEQ ID NO: 373287 - DNA, 201 bp, Homo sapiens
gtttgtagagatgaaggccaaagagggcgtggtgtatgtggaggtgcggtacagtccgcacctgctggccaactccaaagtggagccaatcccctggaacyaggctgagtgagtgatgggcctggaaggggccatgctgagggtgtggctgggaggctcagctctgagactggaagggcgaactgctgggaatccctgacc

SEQ ID NO: 373288 - DNA, 201 bp, Homo sapiens
cctcttcctcctctgtcccagtcccagagctgccctttaggccttccttttgcctcaggcccatccctactcctctcctcacacagaggggacctcacccmagacgaggtggtggccctagtgggccagggcctgcaggagggggagcgagacttcggggtcaaggcccggtccatcctgtgctgcatgcgccaccagccc

SEQ ID NO: 373289 - DNA, 201 bp, Homo sapiens
ggacctcaccccagacgaggtggtggccctagtgggccagggcctgcaggagggggagcgagacttcggggtcaaggcccggtccatcctgtgctgcatgygccaccagcccagtgagtaggatcaccgccctgcccagggccgcccgtctcaccctggccctgacctcctggcctagcagtggggctgtacctgatctcc

SEQ ID NO: 373290 - DNA, 201 bp, Homo sapiens
gacctcaccccagacgaggtggtggccctagtgggccagggcctgcaggagggggagcgagacttcggggtcaaggcccggtccatcctgtgctgcatgcrccaccagcccagtgagtaggatcaccgccctgcccagggccgcccgtctcaccctggccctgacctcctggcctagcagtggggctgtacctgatctccc

SEQ ID NO: 373291 - DNA, 201 bp, Homo sapiens
gcagtgagctgagatggcgccactgcactccagcctgggcgacagagcaagattctgtctcaaaaaaaaaaaaaaaagataaggtggtcagggaaggcctstctgaggaggtgaagcttcagctggctctaaaccaggggagcgggagagacgcagtgtaggacagtatcggggaagagcaggcctgtgtcttctccggtg

SEQ ID NO: 373292 - DNA, 201 bp, Homo sapiens
gtggagctgtgtaagaagtaccagcagcagaccgtggtagccattgacctggctggagatgagaccatcccaggaagcagcctcttgcctggacatgtccmggcctaccaggtgggtcctgtgagaaggaatggagaggctggccctgggtgagcttgtctcccacccatagttgggagaaatcacaagaaccagggacca

SEQ ID NO: 373293 - DNA, 201 bp, Homo sapiens
tgcaccaagacacctcagttgtgcactgtcacaaggagatgatcacacttacttcattcctctaccctcaggattagtaagaaccaaagagctacctgcaygcatttcctctaatcctcgcagcagcctgcaaagcagaactaccattgcttagtcccatttgacagatgaggaaactgaggtggagtgaggtgcagcctc

SEQ ID NO: 373294 - DNA, 201 bp, Homo sapiens
aagaggtgagggcctgggctggccatggggtccctcctcactgcctcctcccatacttggctctattctgcttctctacaggctgtggacatactcaagayagagcggctgggacacggctaccacaccctggaagaccaggccctttataacaggctgcggcaggaaaacatgcacttcgaggtaagcgggccagggagt

SEQ ID NO: 373295 - DNA, 201 bp, Homo sapiens; identical to SEQ ID NO: 80803

SEQ ID NO: 373296 - DNA, 201 bp, Homo sapiens
tagatgttagcatcagtgacccagcaccttgctatgtggcatgcagggagcgtgctgctagacctccgggtttagagtcaaatagcttcctggctgtggtrtgcattagactttctaactcaaggtcctcccactctctgagcctcagtcttgttgcctttaaaacgagtttaagtgtgctgagtccctatgctgtggctc

SEQ ID NO: 373297 - DNA, 201 bp, Homo sapiens
acctcctcagagaggccttccctggctgctctgtctaaactctgtgttgagaagttccttcttgatggttgttgaggagggaggctggagaagaagaatcraagaggagaaatagaaagcaaaataatttgttcttggggacgggctggtgctgggcacggggaggcgcccgtctctggtgtgggcagctgggtagatgga

SEQ ID NO: 373298 - DNA, 201 bp, Homo sapiens
taaactctgtgttgagaagttccttcttgatggttgttgaggagggaggctggagaagaagaatcaaagaggagaaatagaaagcaaaataatttgttctwggggacgggctggtgctgggcacggggaggcgcccgtctctggtgtgggcagctgggtagatggaggagccgtatttggaaatgtggaacccaggaaggg

SEQ ID NO: 373299 - DNA, 201 bp, Homo sapiens
cacatggcctcggcaaagcctggccgtgaccctgtgcaatagctggcagggttctttctgaaaagggcggaaactgaggccataagcagagcagttttccrcaggccatgtggttaggacatagcagttaggatttgaagacactgagccctgttttgtgctggcctcccatggggggtttgggtgggacagcaggcaggt

SEQ ID NO: 373300 - DNA, 201 bp, Homo sapiens
cctggaggccagtgctgatcacatgcctgttacaataatcataacaatagctgtccttgaagtagtcctgggtaccaggtgccttcagtgactttttcttytttgccagaatctcactctgtcgcccaagctggagtgcagtggcaagattttgggtccctgcaacctctgcctcctgggttcatgcgatcctcctgcctc

SEQ ID NO: 373301 - DNA, 201 bp, Homo sapiens
gcagtgagcccagatcgcgccacttcactgcagcctccgcgaaagagcgaaactccgtctcagtaaataaataaataaataaataaataaataaataaataaataaataacctgtacccgcgtgttatttccctccgtccttacctcctcccggctccttccctttcacctgagataaccactcttctcgtatctatgctc

SEQ ID NO: 373302 - DNA, 201 bp, Homo sapiens
cagtgagcccagatcgcgccacttcactgcagcctccgcgaaagagcgaaactccgtctcagtaaataaataaataaataaataaataaataaataaataaataaataacctgtacccgcgtgttatttccctccgtccttacctcctcccggctccttccctttcacctgagataaccactcttctcgtatctatgctca

SEQ ID NO: 373303 - DNA, 201 bp, Homo sapiens
gtgagcccagatcgcgccacttcactgcagcctccgcgaaagagcgaaactccgtctcagtaaataaataaataaataaataaataaataaataaataaataaataacctgtacccgcgtgttatttccctccgtccttacctcctcccggctccttccctttcacctgagataaccactcttctcgtatctatgctcatc

SEQ ID NO: 373304 - DNA, 201 bp, Homo sapiens
gcccagatcgcgccacttcactgcagcctccgcgaaagagcgaaactccgtctcagtaaataaataaataaataaataaataaataaataaataaataaataacctgtacccgcgtgttatttccctccgtccttacctcctcccggctccttccctttcacctgagataaccactcttctcgtatctatgctcatctttc

SEQ ID NO: 373305 - DNA, 201 bp, Homo sapiens
cccagatcgcgccacttcactgcagcctccgcgaaagagcgaaactccgtctcagtaaataaataaataaataaataaataaataaataaataaataaataacctgtacccgcgtgttatttccctccgtccttacctcctcccggctccttccctttcacctgagataaccactcttctcgtatctatgctcatctttcc

SEQ ID NO: 373306 - DNA, 201 bp, Homo sapiens
agctgaaaaccaccaaaggagatgagttggcctggccaggtgtgtaaaaggcagagtctgagagagaacgaccagagggcagagcccccgcaggtggagtyctgggggctggagggagaccattaggagaatcgcacatggctggcgcagcaggtcccaggcaaatgtggccactgggtttggcaatatgggagccagagc

SEQ ID NO: 373307 - DNA, 201 bp, Homo sapiens
gagatgcctgcctctcaacaggtagccagacacatgggtctgtcttggtcactgctatctgcccagtgcccagcacatcacaggccctcagtggtggtgtrtgggcatagagaattagaagctgtggacctctggatccggagctgaaaaccaccaaaggagatgagttggcctggccaggtgtgtaaaaggcagagtctg

SEQ ID NO: 373308 - DNA, 201 bp, Homo sapiens
caggtatgagccactgcacccggcctcctatttttctgcttctgctttgtggataattggatgcttggacctcctgatttaatcttctaatttccttaacygtttactcctatttttcatcatcttgtctttttgttctactttgtggaggatttcttcacttttagcttccagttcttttcttacatcgtgacagttgct

SEQ ID NO: 373309 - DNA, 201 bp, Homo sapiens
gactatttatgtaagagtaaaaggaggctgattctctcctcctccctcttctgcaggctcaaaaatgaccaggctaactactcgctcaacacagatgaccmgctcatcttcaagtccaccctggacactgattaccagatgaccaaacgggacatgggctttactgaagaggagtttaaaaggctggtgagtgggtgtgag

SEQ ID NO: 373310 - DNA, 201 bp, Homo sapiens
cctcatcctgaagatgcaagaacttctggtgaccccttctcctgagagtggcctgatctcccctgggcagggcactttcttcccacgctgggctctcccascacttgtgtgccttccctcacacattctagtaaccacttcattttcactcttcatggtgggaacttccagctaagcacagtccaccgttacgtgatcaac

SEQ ID NO: 373311 - DNA, 201 bp, Homo sapiens
cttcccaggggctgccgggaggctatcaaaaggatcgcctatgagtttgtagagatgaaggccaaagagggcgtggtgtatgtggaggtgcggtacagtcygcacctgctggccaactccaaagtggagccaatcccctggaaccaggctgagtgagtgatgggcctggaaggggccatgctgagggtgtggctgggaggc

SEQ ID NO: 373312 - DNA, 201 bp, Homo sapiens
ctcatcctgaagatgcaagaacttctggtgaccccttctcctgagagtggcctgatctcccctgggcagggcactttcttcccacgctgggctctcccagsacttgtgtgccttccctcacacattctagtaaccacttcattttcactcttcatggtgggaacttccagctaagcacagtccaccgttacgtgatcaaca

SEQ ID NO: 373313 - DNA, 201 bp, Homo sapiens
ttttacaacatcctgggtactacaagttgcctgatctttttgcttctctgaaccaacgagcagggcagaacctctgaagacgccactcctccaagccttcrccctgtggagtcaccccaactctgtggggctgagcaacatttttacatttattccttccaagaagaccatgatctcaatagtcagttactgatgctcctg

SEQ ID NO: 373314 - DNA, 201 bp, Homo sapiens
gtctctccatggtgctggtgacagagcctgggtgggcatctcgcccacagactggtcccccaaggtggtggagctgtgtaagaagtaccagcagcagaccrtggtagccattgacctggctggagatgagaccatcccaggaagcagcctcttgcctggacatgtccaggcctaccaggtgggtcctgtgagaaggaatgg

SEQ ID NO: 373315 - DNA, 201 bp, Homo sapiens
gcctgatctcccctgggcagggcactttcttcccacgctgggctctcccagcacttgtgtgccttccctcacacattctagtaaccacttcattttcactyttcatggtgggaacttccagctaagcacagtccaccgttacgtgatcaacacagtggccctggcaggccaatttgtgccttgcttctggaacaaacatgc

SEQ ID NO: 373316 - DNA, 201 bp, Homo sapiens
ccttgtcactgatgctgatcagatctctaaaggccctaaaggtcctgctctaacttcataactgaagtgagtctggcccatttctagccccctgcctgggmccccatggatctctaagtggtatcacaaaaccaccctgccccattttctgagccatgattctgatacatatagaatgtgaacatcatggcaggcccaagc

SEQ ID NO: 373317 - DNA, 201 bp, Homo sapiens
caatgctgtccatctgggggtggggagggccatgttgacaccccacacctcccactaagatctaggagcacccagctgctttaagagctagagggacatgytagggcctgggggcatctctgccagtctttcctctgaggcagtgggtcagtgggggaggagggtcctccccaaagcctcctcttcctcctctgtcccagt

SEQ ID NO: 373318 - DNA, 201 bp, Homo sapiens
aaagcagaactaccattgcttagtcccatttgacagatgaggaaactgaggtggagtgaggtgcagcctcttgcaaggcacaaaccctggatttgtatccrgggacatctagttccaaagcctgtgttcattcattctttcttaaacacttcagaataactttattggttaagagtacctaatacattagcgagatacttc

SEQ ID NO: 373319 - DNA, 201 bp, Homo sapiens
actgcaaggcataagcacagtagcacctcctgtgtgccaaacactcctttaagtgcgttacccgggttaagttattgaagcctcacaacaatttgtaagayaggaactctattgccgtcatttacagatgaggagactgagccgtggtaggtggagtaaggtgcccagtaagcacagggcggaggtttgaacccagatagt

SEQ ID NO: 373320 - DNA, 201 bp, Homo sapiens
tatgaggagccttcgcttgtgtgggtggccagggacagcaagaggtgccagggccctaggaacagctctttcctgcttcaactttgggctccagatgggcrctttccagctcagtctgagcagcttcgggaagctgtgtcccatgggagacactgggagtcccctgtgctctttgtctcctgtcgggcccccacattagct

SEQ ID NO: 373321 - DNA, 201 bp, Homo sapiens
ctctattctgcttctctacaggctgtggacatactcaagacagagcggctgggacacggctaccacaccctggaagaccaggccctttataacaggctgcsgcaggaaaacatgcacttcgaggtaagcgggccagggagtggggaggaaccatccccggctgtcccaacttcctgtatagagaggcagaaagcagggcgg

SEQ ID NO: 373322 - DNA, 201 bp, Homo sapiens
ctattctgcttctctacaggctgtggacatactcaagacagagcggctgggacacggctaccacaccctggaagaccaggccctttataacaggctgcggyaggaaaacatgcacttcgaggtaagcgggccagggagtggggaggaaccatccccggctgtcccaacttcctgtatagagaggcagaaagcagggcgggt

SEQ ID NO: 373323 - DNA, 201 bp, Homo sapiens
tgagtgaagaggatggactatcactacattgctaagagctgccttctttgttctctggttccatgttgtctgccattctggcctttccagaacatcaatgyggccaaatctagtttcctcccagaagatgaaaagagggagcttctcgacctgctctataaagcctatgggatgccaccttcagcctctgcaggtaggttc

SEQ ID NO: 373324 - DNA, 201 bp, Homo sapiens
caggggctgccgggaggctatcaaaaggatcgcctatgagtttgtagagatgaaggccaaagagggcgtggtgtatgtggaggtgcggtacagtccgcacstgctggccaactccaaagtggagccaatcccctggaaccaggctgagtgagtgatgggcctggaaggggccatgctgagggtgtggctgggaggctcagc

SEQ ID NO: 373325 - DNA, 201 bp, Homo sapiens
ttcagcctctgcaggtaggttcctgtctgggcttctgggcagttgccctgtcctggccccagtgtggctttctgtgggacttctagcaagatgcccttccrttcttgggcagcgccatgaatgtgtgatgactccctggtttctgggccctggctgggagcagcgtctcattagatcggtttgttttctataaaagttctt

SEQ ID NO: 373326 - DNA, 201 bp, Homo sapiens
tggtgcactcccgtagtcccagctactcaggaggctgaggcgggaggatcgcttgagcccaggaggttgaggctgcagtgaggtgtgatggtgccactgcmcttcagcctgggagacagagcgagaccctgtctcaaaaaaaagagaagaaaaagaaaagaaaagaaataggtgtgaatgatgatgacagctatcacaaaa

SEQ ID NO: 373327 - DNA, 201 bp, Homo sapiens
tgggcatcctagcaccgctgagcgctgtgtgggcctgggcagggacttgaggtctctgaagctcagctgtatgatcaggcccgatgtctacgccggatagscacctagtgctgtgccccgcgcctactgagtgctcagtgaatggaagcagctttgtacgccagcgttatggtggtgagcgccaaggagctcaggtttgtg

SEQ ID NO: 373328 - DNA, 201 bp, Homo sapiens
taatcccagcactttgggaggcaaaggtgggtggatcatgaggccaggagttcgagaccagcctggccaacatggcaaaaccccatttctactaaaaatayaaaaaattagctgggcatggtggcgggcgcctgtagtcccagctacgcagaaggctgaggcaggagaatggcataaacccgggaggtggagcttgcagtg

SEQ ID NO: 373329 - DNA, 201 bp, Homo sapiens
gggcatcctagcaccgctgagcgctgtgtgggcctgggcagggacttgaggtctctgaagctcagctgtatgatcaggcccgatgtctacgccggataggsacctagtgctgtgccccgcgcctactgagtgctcagtgaatggaagcagctttgtacgccagcgttatggtggtgagcgccaaggagctcaggtttgtgg

SEQ ID NO: 373330 - DNA, 201 bp, Homo sapiens
cccatttctactaaaaatacaaaaaattagctgggcatggtggcgggcgcctgtagtcccagctacgcagaaggctgaggcaggagaatggcataaacccrggaggtggagcttgcagtgagccgagatctcgccattgcactccagcctgggtgacagagtgagactctgtctcaaaaaaaaaaaaaaaaaaaaaaaggc

SEQ ID NO: 373331 - DNA, 201 bp, Homo sapiens
tgagcgctgtgtgggcctgggcagggacttgaggtctctgaagctcagctgtatgatcaggcccgatgtctacgccggataggcacctagtgctgtgcccsgcgcctactgagtgctcagtgaatggaagcagctttgtacgccagcgttatggtggtgagcgccaaggagctcaggtttgtggatgcgccccggggaaga

SEQ ID NO: 373332 - DNA, 201 bp, Homo sapiens
ggctggagtgcagtggtgtgatcctggctcactacaacctccacctcccgagttcaagccattcttctgcctcagcctccggagtagctgggattacaggsgtccaccaccacgcccggctaatttttgtatttttagtagagacagggtttcaccacgttagccagctggtctcgaactcctgatctcaggtgatcctcc

SEQ ID NO: 373333 - DNA, 201 bp, Homo sapiens
ccactggccccaggggagaatccccttgtttctccgcccaccagctgtggcgtcttgggactgttggggtcagggagggtctggacccccttggcctgtckcagagtccgagaggaggggcccaggagtctgccaagcagggtgagtcagccagtagggtgtgagagtggttggggaaggagtcagctgcagtcagcctca

SEQ ID NO: 373334 - DNA, 201 bp, Homo sapiens
ggctaatttttgtgtttttagtagagacagggtttcaccatgttggccataacaatggctgtccttgaagtagtcctgggtaccaggtgccttcagtgactttttttttttttttttttttgagctggagtcttcctctgtcacccaagctggagtgcagtggcacgattttggctcactgcaacctctgcctcctgggtt

SEQ ID NO: 373335 - DNA, 201 bp, Homo sapiens
aaaaaataaaaaaagttaggggaagtgtgtgtggtggtgcactcccgtagtcccagctactcaggaggctgaggcgggaggatcgcttgagcccaggaggytgaggctgcagtgaggtgtgatggtgccactgcacttcagcctgggagacagagcgagaccctgtctcaaaaaaaagagaagaaaaagaaaagaaaagaa

SEQ ID NO: 373336 - DNA, 201 bp, Homo sapiens
tgaggcacgagaatcccttgaacctgggaggcagaggctgcaatgagctgagatcttgccactgcactccagcctgggcaacagagccagactccatctcaaaaaaaaaaaaacaacaacaacaaataaataaatgaataaatactttagccagaagtagccatgcagacctccccccaccagtcccacccacaagcggac

SEQ ID NO: 373337 - DNA, 201 bp, Homo sapiens
ggctggagtgctagtggctcaatctcggctcactgcaacctccgcctcccaggttcaaatgattctcctacctcagtctcctgagtagctgggactacagrtgcatgccaccatgcctggctgatttttgtatttttaatagagaggggatttcaccatgttggccaggctggtgttgaactcctaacctcaagtgatcca

SEQ ID NO: 373338 - DNA, 201 bp, Homo sapiens
tttcatataccccgttttctcctgccatagggccttgcacatgctgttccttctgcctggaattttcttcctgcctccctccgcacccctgccttgtgttrtgggttcctcgctatcctctagcttttcgctcaggctcattgttggccctctagatgtattcacttctcttgtttgttaccctctgtcataggactgtgt

SEQ ID NO: 373339 - DNA, 201 bp, Homo sapiens
tagtagagatggggtttcaccatgttggccaggctggtctcaaactcctggcctcaggtgatccacccacctcggcctcccaaagtggctggattacaggsgtgagcccccatgcccagccttcattgacttttagttgacaactatttagcatttgctatgtgccaagaactccctgcctactaatgcagttaaccctca

SEQ ID NO: 373340 - DNA, 201 bp, Homo sapiens
ttttgcctcaggcccatccctactcctctcctcacacagaggggacctcaccccagacgaggtggtggccctagtgggccagggcctgcaggagggggagygagacttcggggtcaaggcccggtccatcctgtgctgcatgcgccaccagcccagtgagtaggatcaccgccctgcccagggccgcccgtctcaccctgg

SEQ ID NO: 373341 - DNA, 201 bp, Homo sapiens
ggaggctgaggtgggtggacacctgaggtcaggagttcgagactagcctgagcaacatggtgaaaccctgtctctactaaaaatacaaaaattaactgggygtggtggcacctgcctatagtcccagctactccggaggctgaggcacaagaattgcttgaacccaggaggtggaggttgcagtgagaggagatcacgtca

SEQ ID NO: 373342 - DNA, 201 bp, Homo sapiens
tccatggtgctggtgacagagcctgggtgggcatctcgcccacagactggtcccccaaggtggtggagctgtgtaagaagtaccagcagcagaccgtggtrgccattgacctggctggagatgagaccatcccaggaagcagcctcttgcctggacatgtccaggcctaccaggtgggtcctgtgagaaggaatggagagg

SEQ ID NO: 373343 - DNA, 201 bp, Homo sapiens
tcccgtagtcccagctactcaggaggctgaggcgggaggatcgcttgagcccaggaggttgaggctgcagtgaggtgtgatggtgccactgcacttcagcytgggagacagagcgagaccctgtctcaaaaaaaagagaagaaaaagaaaagaaaagaaataggtgtgaatgatgatgacagctatcacaaaagtgccggt

SEQ ID NO: 373344 - DNA, 201 bp, Homo sapiens
tcttgaagctttccaccggagggtctgttccaccctgcctggctcccatcctggagtctaaccagggtcaaggccctccttccgtcctgtcgccaagccayaggagcagtatcaggccttaggaaaaagccgccttccccaagacaaggacagcaagaactcagggtgaccatggtcaggccagcacttatccatctgcca

SEQ ID NO: 373345 - DNA, 201 bp, Homo sapiens
tcctttttgtcttcctgacacaaaacccaccagctgcacttctttgggcttgcagtggctttcagttaccagagccacctgttaaaacaaaaatgtgcctrggaagagcctgccttacccattttgactcacatggcagttggtggtggaggggaacaaaggagactgagtttcatcgaagccttttgcttcggaggagga

SEQ ID NO: 373346 - DNA, 201 bp, Homo sapiens
gccttccccaagacaaggacagcaagaactcagggtgaccatggtcaggccagcacttatccatctgccaggcatatgagaaggggaggggcttcggctcygatgttctgatgacaagggggtcttggggcttgccttagggacacgtggcacctgtggaggttcttggaggcatgtgggtataccatgggctggaaaaag

SEQ ID NO: 373347 - DNA, 201 bp, Homo sapiens
tgattggcgcctcccctttgcagtctttttattaaatgctctgggctccctctgcccttgggctggggacccactgtaccctgatgtgaatcctatggcartagcaaagctctttgattggcggggtgcagtggctcacgcctgtaatcccagcactttgggaggcaaaggtgggtggatcatgaggccaggagttcgaga

SEQ ID NO: 373348 - DNA, 201 bp, Homo sapiens
gatgagatggaagagggctcatcagacactggccttggagggtgctggcctctgcagaacgccagcatcttctcagaatcgtatgttctagaagcctgggscaagtccggctaattgtggacttggggaaaataaggcccaacccctgtttttgcaaggttaaggagaaataatcttaaaccagtcacacaaatcatcggc

SEQ ID NO: 373349 - DNA, 201 bp, Homo sapiens
atgagatggaagagggctcatcagacactggccttggagggtgctggcctctgcagaacgccagcatcttctcagaatcgtatgttctagaagcctggggsaagtccggctaattgtggacttggggaaaataaggcccaacccctgtttttgcaaggttaaggagaaataatcttaaaccagtcacacaaatcatcggca

SEQ ID NO: 373350 - DNA, 201 bp, Homo sapiens
gagagcccacctaccttctgaggagggtgaggcctggcccccactactgatgcccccagcccagggaaaatgctcagctactccccgtcagaagctggaascactgaggtgctgtacaagccctcctacccccacccctgcctccttcacgtcttactggagctggggcccatgattggcgcctcccctttgcagtctttt

SEQ ID NO: 373351 - DNA, 201 bp, Homo sapiens
agagcccacctaccttctgaggagggtgaggcctggcccccactactgatgcccccagcccagggaaaatgctcagctactccccgtcagaagctggaagsactgaggtgctgtacaagccctcctacccccacccctgcctccttcacgtcttactggagctggggcccatgattggcgcctcccctttgcagtcttttt

SEQ ID NO: 373352 - DNA, 201 bp, Homo sapiens
gtgagcccccatgcccagccttcattgacttttagttgacaactatttagcatttgctatgtgccaagaactccctgcctactaatgcagttaaccctcaygaagcctagaaggaaggactgccattctccccacttaacagatgaggatgccgaggcacaggaagtgaagtgactttctcagggtcaagcagggagtgag

SEQ ID NO: 373353 - DNA, 201 bp, Homo sapiens
attccagggtcactgttccttcctgtctccctgtgggaatcaagccagctccaggccagaagtgggactgtgaggacatggaggcctcggcactgagctgsagacccgcagaccaactcctgagctttctgggcctctgagtcttgtcctcctggtgtcaggtgagccaggcctgagcctgctctccccacccacccacat

SEQ ID NO: 373354 - DNA, 201 bp, Homo sapiens
  misc_feature (1)...(201): n = A,T,C or G
ggcccctggggaattccagggtcactgttccttcctgtctccctgtgggaatcaagccagctccaggccagaagtgggactgtgaggacatggaggcctcngcactgagctgcagacccgcagaccaactcctgagctttctgggcctctgagtcttgtcctcctggtgtcaggtgagccaggcctgagcctgctctcccc

SEQ ID NO: 373355 - DNA, 201 bp, Homo sapiens
ggcactgtctggcttctgccccgctgagcacccactgtctctgacgctgccttgagtacttcccgcatgttattcaaatcccaatcagatcttccctcccscagtagctggtcttctgttctggcttcctgccatcctgtcctccacacagcagccgggaaaggtttttttaaaggggactctccgatttaacacacttgg

SEQ ID NO: 373356 - DNA, 201 bp, Homo sapiens
cagaaggctgaggcaggagaatggcataaacccgggaggtggagcttgcagtgagccgagatctcgccattgcactccagcctgggtgacagagtgagackctgtctcaaaaaaaaaaaaaaaaaaaaaaaggctccttgattgcgaacatgttgggagttatggagagaacagcagggcccacttctagagcacttgttg

SEQ ID NO: 373357 - DNA, 201 bp, Homo sapiens
tcatcgtcaggggatgcccaagtcaagtttgccctgtcgggtgtgcctcccatacccccacctggtttgacttagcacctgctgggcactggaagaagtgsaaaggggggttgcaggggtggcccttatcagcctatgttcacaggtggcaccaggcactcaggcattctgcatcctggaggccagtgctgatcacatgcc

SEQ ID NO: 373358 - DNA, 201 bp, Homo sapiens
tctcaggtgatcctcccaccttggcttcccaaagcgctgggattacaggtgtgagccactgtgcccggctagtaacttttatctcacggaatcctctggaygacttgacaaggcatgggtcttcatccccatttacagatgaagaaactgaagcttagggagtggagggacttgccagggctacacaaaatctgagagcct

SEQ ID NO: 373359 - DNA, 201 bp, Homo sapiens
ccccatttacagatgaagaaactgaagcttagggagtggagggacttgccagggctacacaaaatctgagagccttgaagctgtagactggcaagtgaacmggtacaggctgggacagcagtttctttctttttttctttttttagacagagtttcgctcttgttgcccaggctggagtgcaatggcacgacctcggctca

SEQ ID NO: 373360 - DNA, 201 bp, Homo sapiens
cccaacccctgtttttgcaaggttaaggagaaataatcttaaaccagtcacacaaatcatcggcatttatttcctgggtcctaggtgtcacttatcctggkggacagggcagaggtggtcagatcgttttgagccaaaatcccttccctaaaaatggatctgtggagctccatgagggaacctcagagatgcacaatgaca

SEQ ID NO: 373361 - DNA, 201 bp, Homo sapiens
acgacctcggctcactgcaaccttcgcctcccaggttcaagtgattcttctgcctcagcctcccaagtagctggaattacaggcatgcaccaccatgcccrgctaattttttgtatttttagtagagacggggtttctccttgttggccaggctggtctcgaactcccgacttcaggtgatccgcccacctcagcctccca

SEQ ID NO: 373362 - DNA, 201 bp, Homo sapiens
aaacatgagtcagatctgggagtatctgtcccaggagtccaagacctgggtcctcatggtagctctgccaccgacacactgagtgaccttgggtaagtgarcccaccgccctggacctctctggcacgcatctcttgagagcagggacttagtgcatttcccgagggcctccacggtgcctggcacatagtggggcttagt

SEQ ID NO: 373363 - DNA, 201 bp, Homo sapiens
atgcccggctaattttttgtatttttagtagagacggggtttctccttgttggccaggctggtctcgaactcccgacttcaggtgatccgcccacctcagyctcccaaagtgccgggattacaggcatgagccaccgcacccggccaagggacagcagtttctaaactgtccctctctgatgcagaggggaattggggcta

SEQ ID NO: 373364 - DNA, 201 bp, Homo sapiens
gaatttgaacttggacaccagctggggtcaggctctctgggtctgagtcctgatttcccactttccagctagaggagcttgaatgagtcatttaacttcayggtgcctcagtttcccctctctaaaatgagaattatacccatacccacctctcaaacaccaagtgcaggcctggctcagagcaggtgctgcagcaatagc

SEQ ID NO: 373365 - DNA, 201 bp, Homo sapiens
tacccacctctcaaacaccaagtgcaggcctggctcagagcaggtgctgcagcaatagctgccattggtcagcatcatcatcatggttggtaatggtcctrctttgacttttgagacagagtctcactctgtcgcccaggctggagtgcagtggtgcaatctcggctcactacaacctctgcctcccgggttcaagtgatt

SEQ ID NO: 373366 - DNA, 201 bp, Homo sapiens
ctttcttcccttcccaggggctgccgggaggctatcaaaaggatcgcctatgagtttgtagagatgaaggccaaagagggcgtggtgtatgtggaggtgcdgtacagtccgcacctgctggccaactccaaagtggagccaatcccctggaaccaggctgagtgagtgatgggcctggaaggggccatgctgagggtgtgg

SEQ ID NO: 373367 - DNA, 201 bp, Homo sapiens
agtggcacgattttggctcactgcaacctctgcctcctgggttcatgcgatcctcctgcctcagcctcccaagtagctgggacttgggatacacttgcccycgctggtcctcccttccacctctgtgaagaggaggtctcaaactcctggcctcaagtgatccacccacctcagcctcccaaagtgctgggatttcaagag

SEQ ID NO: 373368 - DNA, 201 bp, Homo sapiens
aggaggctgattctctcctcctccctcttctgcaggctcaaaaatgaccaggctaactactcgctcaacacagatgacccgctcatcttcaagtccaccckggacactgattaccagatgaccaaacgggacatgggctttactgaagaggagtttaaaaggctggtgagtgggtgtgagccatactggccttgactcggg

SEQ ID NO: 373369 - DNA, 201 bp, Homo sapiens
tgggtgtggtggcacctgcctatagtcccagctactccggaggctgaggcacaagaattgcttgaacccaggaggtggaggttgcagtgagaggagatcaygtcactgcactccagcctgggagacagagcgagactccatccgtctcaaaaaaaagaaaacgaaaatggatcctgaattttgaaatatgctgtgactctt

SEQ ID NO: 373370 - DNA, 201 bp, Homo sapiens
acgattttggctcactgcaacctctgcctcctgggttcatgcgatcctcctgcctcagcctcccaagtagctgggacttgggatacacttgcccccgctgrtcctcccttccacctctgtgaagaggaggtctcaaactcctggcctcaagtgatccacccacctcagcctcccaaagtgctgggatttcaagagtgagcc

SEQ ID NO: 373371 - DNA, 201 bp, Homo sapiens
atcccagcactttgggaggccaaggcgggtggatcacctgaggtcaggagttcaagaccagcgtggccaacatggggaaaccccgtgtctactaaacatayaaaaaattagccaggcatggtggtgggcatctataatcccagctacttgagaggctgaggcaggagaatcacttgaaccagggaggtgaaggttgcagtg

SEQ ID NO: 373372 - DNA, 201 bp, Homo sapiens
cccaagtagctgggacttgggatacacttgcccccgctggtcctcccttccacctctgtgaagaggaggtctcaaactcctggcctcaagtgatccacccrcctcagcctcccaaagtgctgggatttcaagagtgagccaccgcacctggcccctgtttagatgttagcatcagtgacccagcaccttgctatgtggcat

SEQ ID NO: 373373 - DNA, 201 bp, Homo sapiens
tgggtgacagagggagaccctgtctcaaaaaaaaaaaaaaggaagaaagaagaaagagaaaagaaagagaaagaaagagaggaaggaaggaaaaagaggargggagggagggaggaaggaaggaaagaaggaaggaagggagagagaaagaaaagcctccacttggtgttgggagtcctgtgctgagcctgcttctggctg

SEQ ID NO: 373374 - DNA, 201 bp, Homo sapiens
tttttgcaaggttaaggagaaataatcttaaaccagtcacacaaatcatcggcatttatttcctgggtcctaggtgtcacttatcctggtggacagggcaraggtggtcagatcgttttgagccaaaatcccttccctaaaaatggatctgtggagctccatgagggaacctcagagatgcacaatgacagtttagctaaa

SEQ ID NO: 373375 - DNA, 201 bp, Homo sapiens
tttgcctcaggcccatccctactcctctcctcacacagaggggacctcaccccagacgaggtggtggccctagtgggccagggcctgcaggagggggagcragacttcggggtcaaggcccggtccatcctgtgctgcatgcgccaccagcccagtgagtaggatcaccgccctgcccagggccgcccgtctcaccctggc

SEQ ID NO: 373376 - DNA, 201 bp, Homo sapiens
gttaaggagaaataatcttaaaccagtcacacaaatcatcggcatttatttcctgggtcctaggtgtcacttatcctggtggacagggcagaggtggtcaratcgttttgagccaaaatcccttccctaaaaatggatctgtggagctccatgagggaacctcagagatgcacaatgacagtttagctaaaatggcttaaa

SEQ ID NO: 373377 - DNA, 201 bp, Homo sapiens
ctgataggtgttttaggggaagacctactcccagactactaatatattatcattgtcatcatgagttagtgctaattcagatgtgatactctaggctagcrtttcccaaacctgcttgaatgggctgttgcatgaacaacattgcaactttcattttcatgttacactggaatatggaatttttgtataacattagtattt

SEQ ID NO: 373378 - DNA, 201 bp, Homo sapiens
caacctacttatattttgaaatttttattcttcatagatataaatatgacaatttatgttattatttttttttctttgctgctctctttagcttttcttgktgactttggctttttcagaggcttacttagtatgaaggagtgtgactgtaggtccagttccttgagcaggtgagggcacctggagctgaagaagttgatg

SEQ ID NO: 373379 - DNA, 201 bp, Homo sapiens
gtgagtagtggctgtcatgattcttctgaactggcaattatgtcagaaccatttaatcagtgcctgagctgtgctggcattgctcttggaaggccatttttcagaatgacatccacctaagcatttgttaaattattagacctataaacccttcccatgagaactctcagaaatactgttagatatgcagagccttaggga

SEQ ID NO: 373380 - DNA, 201 bp, Homo sapiens
gggtcttgatatccaatttccatgttggacttcttgtttatagtttggcacagagctcattaatgttgaccccttagccattttaaagaacctcagatackctgcagaacgtggaatttgatctatttttcactaaataaaatttttaaatttatgtgtttgagtactagctatgactactgcattggtcagataatttta

SEQ ID NO: 373381 - DNA, 201 bp, Homo sapiens
tttcagcggtttatgctttgtttagggtcttgatatccaatttccatgttggacttcttgtttatagtttggcacagagctcattaatgttgaccccttarccattttaaagaacctcagatacgctgcagaacgtggaatttgatctatttttcactaaataaaatttttaaatttatgtgtttgagtactagctatgac

SEQ ID NO: 373382 - DNA, 201 bp, Homo sapiens
acagtatttagaaacaatacgacttgtcctgtaagtctgatgagcagaaaggaggagaaaatggagctcgccaaacaattcagaactgatggaaaagcagyttgctcaaaagccccatatggtttgcccattttcctctgccctttggaaattcctctaaacattagttctgactgtcagcatgcagtccagtaacatttt

SEQ ID NO: 373383 - DNA, 201 bp, Homo sapiens
aagaaagatgagaacagaatgaagaacagatacgggaatatcattgcatgtaagtgtcaacagtgtcattgtgctgttgtagaacttcctttttgcatctrgtaagattgaccaccaggctcatacagaggaaatttacagtgcaattacctccttcatccttctagaacagctggtgttaacgctcgtactaaagaaagg

SEQ ID NO: 373384 - DNA, 201 bp, Homo sapiens
ttaatattgttaaaatgcccatattacccaaactgaccaataaattcagtgcaatctccattgaaattccaatggcattttttaacaaataggaaaaaaaattctaaaatttgtatggaactacaaaggaccccaaatagccaaagcaatcttaagaaagaataaaactataggcattagactccctgatttcaaacttta

SEQ ID NO: 373385 - DNA, 201 bp, Homo sapiens
atcatgggcaaccccgcttgggtccccttccacgctgtggaagctttgttctttcgctcttcactgtaaaccttgctaccactcaaaaaaaaaaaaaaaaagaatcgtgaatgataaggaaataatgtggactaaatgttttgaattacttaatgtttgacattttacagtgtataaattcgtattattgtcacatgtatc

SEQ ID NO: 373386 - DNA, 201 bp, Homo sapiens
cagcaggtggaggttgcagtgagcagagatccgagattgcaccactgcactcctgcgtggtgacagagcaagactccatctcaaaaaaaaaaaaaaaaaaagagtacacacctacacacacagcacacacagagatgtttatttctaaccacaatgctattacattactatcaaacccattttccagatgagaaaatgagt

SEQ ID NO: 373387 - DNA, 201 bp, Homo sapiens
ccagcaggtggaggttgcagtgagcagagatccgagattgcaccactgcactcctgcgtggtgacagagcaagactccatctcaaaaaaaaaaaaaaaaaaagagtacacacctacacacacagcacacacagagatgtttatttctaaccacaatgctattacattactatcaaacccattttccagatgagaaaatgag

SEQ ID NO: 373388 - DNA, 201 bp, Homo sapiens
ttccaaaaataagaacctcagcatagcacattcagccctctgtgtcaagacctcactctgtgtttcagactttcgttgtaatgcaggtgcttcccaccgtscaggctgtgctctgcttctgctcatgtactcgccaccctgccatcctccaggcctccagggctcatgctgcaggttgtggcctctgcctggccgtgactt

SEQ ID NO: 373389 - DNA, 201 bp, Homo sapiens
gcttagacattcccagtgcctgtgaaactgaatgttaccaacccgtaatgccttggatggtttctaagtcgagcccagcctcattaatgttgcgtagcaaygctgagacacgcgctagattgatgaaaccccttctcccagggcccgcactatccatcccccacactaaactgctctccgtcatccatgactgcatcaagg

SEQ ID NO: 373390 - DNA, 201 bp, Homo sapiens
gccacaagtgccttcttggaggacctggcccagaaaggatagtgaacgtgcccgtgtgccagcatctgcggaccttatgtgtgtctggtactggtcctcctgcttttgattagtttgatgctgtcaccgcccactaacatggtcaaactagatatttcacggttgccattgcccctgccgctccctcatttccacaccagc

SEQ ID NO: 373391 - DNA, 201 bp, Homo sapiens
agccacaagtgccttcttggaggacctggcccagaaaggatagtgaacgtgcccgtgtgccagcatctgcggaccttatgtgtgtctggtactggtcctcctgcttttgattagtttgatgctgtcaccgcccactaacatggtcaaactagatatttcacggttgccattgcccctgccgctccctcatttccacaccag

SEQ ID NO: 373392 - DNA, 201 bp, Homo sapiens
tagccacaagtgccttcttggaggacctggcccagaaaggatagtgaacgtgcccgtgtgccagcatctgcggaccttatgtgtgtctggtactggtcctcctgcttttgattagtttgatgctgtcaccgcccactaacatggtcaaactagatatttcacggttgccattgcccctgccgctccctcatttccacacca

SEQ ID NO: 373393 - DNA, 201 bp, Homo sapiens
tcctgcttcatatttcgagggaccagctgagtcaatcaattggcacaatcagtgcaggttgttttctgtcccataggatacaaaacaaacaaaacaaaacmaaaccattgaaggctaaggatggggagctgggggtggggaggcactggcaggcactgtaaatgcattaagaatcacacggctgtgtctccaatggctgaa

SEQ ID NO: 373394 - DNA, 201 bp, Homo sapiens
tcgcagttctgactccctcccttcagatgcccttccatgggaaaggccttgaactggggaggacagcccctggaattttgagaccagcccagcagcagggygcgggaggaaggcgccccgggcatctgggctcccccttgttgggagttggttggcagagggagaattgcacacacttctagacgacttttcagaatggtg

SEQ ID NO: 373395 - DNA, 201 bp, Homo sapiens
ttactacagccttgacctcctcagctcaagaaatcatcccactcagcctcctgagtagctgggactacaggcacgcaccaccaagcccagctaactttttwaattttttgtagagacagagtctcactatgttgctgaggctcgtcttgaactcctggactcaagtgatcctcccacctcagccccacaaagtgctggagc

SEQ ID NO: 373396 - DNA, 201 bp, Homo sapiens
aaaatagagactaaaagagattaacaaaatgaaaactttggttttctgaaaagataaaatagataaacctttagctagaccaagagaaaaacagaaaagayccaaaaaaaattagaacaaaaaggagacattacaattgataccacagaaatagaatcattagagactattaggaacaactaacaacaacagattcctgga

SEQ ID NO: 373397 - DNA, 201 bp, Homo sapiens
ggttgagaaccactggtctaacaaccatttccactccttccctctgaaggcagacatggactagtccccaacaccatggctccttgtccacagcataaccrtggcacagttacaccatggaagtgtgtgttcagactttccaaccaagagctctccattgtattcctcacatatgcattttgtccagatgtacccgagtca

SEQ ID NO: 373398 - DNA, 201 bp, Homo sapiens
aagacatgcatgaaataatagatctcaggtccataaataaatggagaatgtgttgtgaggacaccactggggacttgcaggagaagggtgagtggacgagyggcagactaatcaggaaaagacctctcaggcaaaagagaaggtcgtagggtttggagataggaggaacagtttggagtccttgtcctaccacatactggc

SEQ ID NO: 373399 - DNA, 201 bp, Homo sapiens
agcttttataaccactgctggatgggtgctgggatgactggtcccactggcttggttttcaccaggtgtggtggctcatacttgtaatcttagcactttgrgaggctgaggtgggaggattgcttgaggccaggagttggagaccagccttggcaacaaagcaagactctgtctctacaaaaaaattttaaaaattagttg

SEQ ID NO: 373400 - DNA, 201 bp, Homo sapiens
gagggttaaagagtttcacggttaataaggtatggaggcaggattccaacccaggagcagcttttataaccactgctggatgggtgctgggatgactggtyccactggcttggttttcaccaggtgtggtggctcatacttgtaatcttagcactttgggaggctgaggtgggaggattgcttgaggccaggagttggaga

SEQ ID NO: 373401 - DNA, 201 bp, Homo sapiens
catggagacactgagatatatttttgaatcatgagtgaaaaaagctagcatttgctgagcacttacatatgccagacactactctaagcactttgcacatmgaaacccgctcactaacaacaccacgaaataggtagtatttttgtatctattttacaggtgaggcaattgagggataaagagggttaaagagtttcacgg

SEQ ID NO: 373402 - DNA, 201 bp, Homo sapiens
tgatactggacactgaggacgcaaaggccatggagatgagatggtgcccctgtccccaggacaaacccaaccgggcagtcagatcgctgtggcagtagtcyagcgccgtgacacagggttttgttgcagcctggtacacagtgttctagaggctcagagaaggaaaacatggtttcttggtctatctagactcttccaagt

SEQ ID NO: 373403 - DNA, 201 bp, Homo sapiens
aaacctcttaactcttaggtttgtagtgttatttttttcagtcttctgtgttgtgttttaaaatggtgttgctcaactgttttattgggtggatgtacagrggacaagatctgaagcctgagggcagaacagacctggggctagggtcttctccagccagtctctgatgcaagctcggttgtatggtaacagcagtgtcca

SEQ ID NO: 373404 - DNA, 201 bp, Homo sapiens
gtttcttagcaaaatgagtactcatgcgcatgcacataaacacaccttcagttctgcccagactccttcctgtggatggggagagttgctgacacaggagkcagagtagaaacgcagcagcttgtgctaatggaaaaaggaggatgatggtttcagagcatgcattctgctctcctgcccacccctccacccgtctccagt

SEQ ID NO: 373405 - DNA, 201 bp, Homo sapiens
tattatgataatgaagtgttacctatgatcacgactaagggaccttaagatgagcagattaaacctcttaactcttaggtttgtagtgttatttttttcartcttctgtgttgtgttttaaaatggtgttgctcaactgttttattgggtggatgtacaggggacaagatctgaagcctgagggcagaacagacctggggc

SEQ ID NO: 373406 - DNA, 201 bp, Homo sapiens
tttgtggtaaaaatacaattttttaaacttagaccatttttccaggttttacgtctcccataactcaaatattgttttcttctgagaagaataaaaacacmggtgatctacaaaaaatagaccttcctcttgagtatacaattaacttttgtgtgcaaattttgtcctataaatcatagtgtgacccatcatgggaggaac

SEQ ID NO: 373407 - DNA, 201 bp, Homo sapiens
atgcatagtgtgagtctgttaatacagctgttcatatatagcacatctgatcctaccatgtttttgaaatgataaatataaggtaaaaactattatgatamtgaagtgttacctatgatcacgactaagggaccttaagatgagcagattaaacctcttaactcttaggtttgtagtgttatttttttcagtcttctgtgt

SEQ ID NO: 373408 - DNA, 201 bp, Homo sapiens
cgctccttcttgaagctcattcgccaggtggacaagtggcaagaggaatacaatggcggggaaggccgcaccgttgtgcactgcttgtaagtgcttgacaragctcttcatttcagaacagcgaggccccacactcactctcacctcctagttctctgacttttgtttcactagaaatggagaagaaataagtaggtctag

SEQ ID NO: 373409 - DNA, 201 bp, Homo sapiens
  misc_feature (1)...(201): n = A,T,C or G
actcttatttgtagttgatatttatatccataccatatcatctcaccatatatacgattttacataaattatctaacaacctgagtagtaaaacagttcanggaaaatgaactgtagaaaaatgttacatggatgtgggtggtgtgtcttaaagatcacagataatttctaactgagtagcattacctttattaataataa

SEQ ID NO: 373410 - DNA, 201 bp, Homo sapiens
tggagtcaggagacagtgacatttatctatggaggcactagttatctgaccttttcctcagagcatttctaattttgttttgttttttaaaaaacacattytgccatttatagtgattcatgtaattcctggataagaagttgggaggctcattgcaagaagttgaacttttcctgcagtggctcccatgcaatgaacaca

SEQ ID NO: 373411 - DNA, 201 bp, Homo sapiens
tgctttgtaataggggtgttttctttggtcatccattgaattacctttaattcaattaccattgaattacattgaatcgatgctcttaatacctaagtttyctttgagctaaatgtaagcatttatgtgctgatggatgttattaaaccctacatctcctttataatcattcatgagatccatcagcatgagggcagtttc

SEQ ID NO: 373412 - DNA, 201 bp, Homo sapiens
tgggtatctgttttgacacctgtgtctgtaattgctggtttgctttgtaataggggtgttttctttggtcatccattgaattacctttaattcaattaccrttgaattacattgaatcgatgctcttaatacctaagttttctttgagctaaatgtaagcatttatgtgctgatggatgttattaaaccctacatctcctt

SEQ ID NO: 373413 - DNA, 201 bp, Homo sapiens
gtggggccgtcgtttcccaaacaggtgtcttcccctgatggccttttggtctttcctgccctctcaagaggatccagcctgtgtccagagaggctgggctrgctgaggctgtgagagtggggagggtccttagatttagtcctggtagattgccccagaagagtgcacttactcttgctttgtctattaactcctcatttg

SEQ ID NO: 373414 - DNA, 201 bp, Homo sapiens
aactaatttgttgccaaatctatggtgtggggatgtaagaattcttatccactgttgctgagaagtaatttgttacatttctggagggtgatttggcaaartatagaaaagactaaaaacatgcatattctttgacacataaattgcccttctaggaatttctgttaataatggatatggataaacctttcattacaaaga

SEQ ID NO: 373415 - DNA, 201 bp, Homo sapiens
atattctttgacacataaattgcccttctaggaatttctgttaataatggatatggataaacctttcattacaaagatattcaagaccacataatatatgwtcataaaggattaatgtaatctaaatatacaagagaatggttaaataaattatacttctttcatacaataaaatgattatgataatactcctagagtggt

SEQ ID NO: 373416 - DNA, 201 bp, Homo sapiens
gagatttcctatattttcacacgttaaaataatgaagtaggtatgagtctcaaatgtaggaggaatattgtaattctttattttctgttactcagcctaayatagcctctaagcaccagccctgtccagcaggtaattctacctaaattactgtgtcaaggtgtgtaagtgtgtgtggataagaggaggatccctcttgtc

SEQ ID NO: 373417 - DNA, 201 bp, Homo sapiens
gggaagtttattaggagaattgactcacatgatcatgagatgaactcccacagtaggccctctgcaagacaaggagccaggaagccagttcaagtcccaamacctcaaaagtagggaagctcatagtgcagccttcagtctgtggccaaaggcctgagaggccctggtaaatcactggtgtaagtctcagagtccaaaagc

SEQ ID NO: 373418 - DNA, 201 bp, Homo sapiens
taaagttctgtctccctgaagaaattaaacaattaaaaaagagtggcctggcctggtggctcacacctgtaatcccagcactttgggaggctgaggtgggyggatcacctgaggtcaggaatttgagaccagcctggccaacatgacaaaaccccatctctactaaaaatacagaaattacctgggcatgagggtgtgccc

SEQ ID NO: 373419 - DNA, 201 bp, Homo sapiens
agcagggcattcctctacccagccaccaggacaacaacctgaggagaaccctcggtggaggcagagctctccttttcatcaggttgatcacttggtgatcrccatgaggtgaccacatgagtggtcactcattcatgagaaatggacttaaccttcggaactgctttggtaaatctttttttttttttttgagacggagtc

SEQ ID NO: 373420 - DNA, 201 bp, Homo sapiens
gaaatattaggcatatggtaagtggctatgcatttgtactcttgcccaagcctaccaatgtcaggggctggcctgacagcacccctaactctgagcagccmttctgcaaatgtcactattgtcctcagtgagtcaggagtgaaatgtggttaaaactaaatctctactgctgaaaaaacaagtcaaagcaaatgtcccact

SEQ ID NO: 373421 - DNA, 201 bp, Homo sapiens
tctgggcgacagagcgagactccgtctcaaaaaacagaaaaaaataatgaagatttttcttggacatttatttaaagtactgacaatgtgtatcctaaaaytgagcctaatttttctctgaaccctcaaagacaaccattgcatctctgtcatttaacactccaggtaaataaaaataatcatgatgtcttttaacagatt

SEQ ID NO: 373422 - DNA, 201 bp, Homo sapiens
attgatcctgagcgctttgtagccggcctttctgagaaacagctgaagagtgcttccctgctgccggttgctcctgctgccatccgcagctgatcactagrtgtagctgcgtcccttaacccccctgcctgagccaagcaaggtccagccccatccatagatggcttcctggacagctaaagaaaggcacgagagcggact

SEQ ID NO: 373423 - DNA, 201 bp, Homo sapiens
tgatttatataattaatattattattatataccaaaaagccaacccttcatccttgggataaacctaacttggtcatgatatatattaaacattgctgagwgctgttaactgatcatttttcattcatgttcataggcgagtctaatctgttagttatccttattatattttcatattgtgattttagaattaaaataata

SEQ ID NO: 373424 - DNA, 201 bp, Homo sapiens
gtccaaagcaaatcaaagaaattcaagcaaaaagaaggcattttgcctgaattatggagctaatgatctcagtcctccacttcagtgttcctgaggagacmtggcctgagaatgtttttccagtgatctggcagattcagaagtgaagagaaaatgtattattgtaagtgcagctatggagatggagtccagtgctgcctc

SEQ ID NO: 373425 - DNA, 201 bp, Homo sapiens
tgttgagaacacccaggctcaactagcatggctagctgggaggagagaggctctagaagggatgatcatgatccccacggggcaagagaggggtggtgtcrgtgcccagaggagtcatgctggctcatctttcaaaatctttgtagctttaacactgtcagagatgttataagtaattttcatttttctgtttaaaaatat

SEQ ID NO: 373426 - DNA, 201 bp, Homo sapiens
cacttgaccccgggaggcagaggttgcagtgagctgagattgcaccattgcattccagaccagaagacagagtgacattccatctcaaaaaaaaaaaaaaatatatatatatatatatatgagatttatacatgggcttttttttttaagctcatcagctgttgttagtgtattttacatgtggcccaagacacttcttct

SEQ ID NO: 373427 - DNA, 201 bp, Homo sapiens
catttctacttgtaaacaaatgtgattttcttctcttaaaattatttttgtctagagaaatttatggaaagaaacaaatatactcatctttttttttttttgattgggggagtttatcatcaacatgataggttttattttcagttttcctgttaccaaaagttggctggcaattctgcttagcttactattttacaggaa

SEQ ID NO: 373428 - DNA, 201 bp, Homo sapiens
gcatttctacttgtaaacaaatgtgattttcttctcttaaaattatttttgtctagagaaatttatggaaagaaacaaatatactcatctttttttttttttgattgggggagtttatcatcaacatgataggttttattttcagttttcctgttaccaaaagttggctggcaattctgcttagcttactattttacagga

SEQ ID NO: 373429 - DNA, 201 bp, Homo sapiens
agtcacataccatatagctctgtagcctagcagcaataggctctaccatacagcctaggggtgtagtaggctgtaccatctagggttttgtaagtgcaccstatgatgtttgcacaaagatggaatggcctaatgaggcacttctcagaatatatccccatcattaagtgactcatgaccatatttaatgttgagagtgag

SEQ ID NO: 373430 - DNA, 201 bp, Homo sapiens
tttctttttctttaacgtttttccaacaagattgtctgtttatgcatatcctctgtatctggaattgtcccaatgacttcaaatatgtgggggtatacatytttgtgcactaaaattttgaataacaagaatttttatttgaaagggatcatggcatcctattttaattaatctcaataacaaataacttgttcaattcta

SEQ ID NO: 373431 - DNA, 201 bp, Homo sapiens
atgagcatccactgcacgcccaggggtaaattgcagattaccaacaacgtgacataatgcactaaatgtcagttttgtcaaacaaatttagaagaacggttaaactattagcttcctgttgttctagggcctttcttgcagcaagcaactattgggagcagcagggacactgtgccttgtggaagactaagggagttaaat

SEQ ID NO: 373432 - DNA, 201 bp, Homo sapiens
ctctcacaggagagtgcagttctctttctgtcttcctcctttcccttcatattaattggttttgttgcaaaaacccgtatttctttaattttttttatttyttcccttcttttcatggaagtcataaaaacctggtcattctatttctaaccccggttctctctctctcttttttctttttctttaacgtttttccaacaa

SEQ ID NO: 373433 - DNA, 201 bp, Homo sapiens
tccactgtcatgcttttctgagagcccacagattgtcactaattaattccaacaaatctctctgactcccactgtcctctttaaatccccaatgagtctctggtacatgaaaaaccttgatttagatggaataactataaagtccaatgattatttcctaaatatgcctttagcataaacagtttatttgagaattcatat

SEQ ID NO: 373434 - DNA, 201 bp, Homo sapiens
gtttctggcttttctctgctgtgggaaatcagtagatggtctctgagctgagaagtggtgcagaggggcacatgacgggcaggttgacagatggtcacatycagtaggtaggctgagctcagttcgaagggtcctgtgtggcatgctgaggatgttgagctttatctgataagcaacttggaaactagattgttaaacctt

SEQ ID NO: 373435 - DNA, 201 bp, Homo sapiens
tataataagtgaccagacaaggggggaggtactatggggctattatgcaaagtttaaacacttccagagcaatattttatatactaaaagtatagaaaccrtttctttctttcaatgatgtctctgccgggagccagcatgggagtgcaggtgagctggtgaggaggctactgaggcagggaggaccaccagcccgaccta

SEQ ID NO: 373436 - DNA, 201 bp, Homo sapiens
aagaagaaataccaactaagcatctaattcaagaagacagatgaagaacagagcaaaaccaaagaaagaaaaaaaggaaataataaacatgaatagaaatktattaactaaacagcacagaagcaataacaaagtgcaacaaaataaaaagctggttttgtgaaaaggttaataacatggacctctggcaacagatcagaa

SEQ ID NO: 373437 - DNA, 201 bp, Homo sapiens
aaggtcttgtactaccttctccgtagtaactgtttatgagcagtgcttttatttaaccaggaaacttttacatagttgtaatctcagtagtagtatgctayaggattatttccaaagtgaaattttaaaatgagcaaacacacagcgtgcagttgccttttttacagtaggttgaattccatggttgtgctaactgaagag

SEQ ID NO: 373438 - DNA, 201 bp, Homo sapiens
cttataaattatcagtaaacatagcctgaattgctttcatttgttgcgatagcaacagacaggaaaggcactcaagatttaaaagcagttgttatcgggcyatattgagagcacaaaaatacctctaagcatgaatgctgattgttgagtgtcaaaactcaatgggtgctgcattagacatgactaccttcccaaactcaa

SEQ ID NO: 373439 - DNA, 201 bp, Homo sapiens
aggaaaccatctatgacttctggaggatggtgtggcacgaaaacactgcaagtatcatcatggtgaccaatcttgtggaagtgggaagggtgagtggaccrtctgctgcaaatggccattttgttccttgcttagttggtaacagaaagtaaggcatgaggcaagcttttgaactattatgtgtactccccaaaacattaa

SEQ ID NO: 373440 - DNA, 201 bp, Homo sapiens
aaatttgatatttctataggtgcagttttagaaagagtatctttttgcattgacactagagacctgtgtccatctgtacaagtgagggaactgcatgtggrtattaatagatgtatttgtaagccccggaaattttccagttgaaacttacaacaaaaacaaaaagtttctgttgtgttttgctgcagggccaatgcagga

SEQ ID NO: 373441 - DNA, 201 bp, Homo sapiens
ttccctgggatatctgctaattgttagcagaaagagtaatgttatctattttttaaaatttcactcttgagtactatggagataatagctaaatgatggasaaataactttctttcacggtagtagtttaagaagggtaaaaagagctcaaaggcagatgtttgatgacatgagaaaattcagcgacaaatgacaaatttg

SEQ ID NO: 373442 - DNA, 201 bp, Homo sapiens
ggctcatttcattctatataccacttccctgggatatctgctaattgttagcagaaagagtaatgttatctattttttaaaatttcactcttgagtactayggagataatagctaaatgatggagaaataactttctttcacggtagtagtttaagaagggtaaaaagagctcaaaggcagatgtttgatgacatgagaaa

SEQ ID NO: 373443 - DNA, 201 bp, Homo sapiens
tcctaccccttccatggtcagctgctgggaccgctcttctcccctagaccaccgcactcacaccccttcttctccagcccaggtgcactgtcatgtgttgscctttccaagacagggtgcaggggaggggataactctgcctctgtagctcctcggtcctccacgtggccactgcccctcctgtgttaccatgacctctcc

SEQ ID NO: 373444 - DNA, 201 bp, Homo sapiens
taaatgctctggatacctgagcccctttcggtgttacagtgatgttttactagatcccttcctgtgatgtttatcttccctttgagtttaagatgataagrggagggtgatggtagactagggaggaaagaatgagaggattaaaaagggttgggaacagaagacacaagtgccttaagggataggaactataaaattctg

SEQ ID NO: 373445 - DNA, 201 bp, Homo sapiens
attctgaagaaaacctctaggtgtgttcctgtttcagggaatatctgcaatattacattctttgacaacagattgtccagagagagtgattattcctgagsttctgtgggacttggtgagtttggaataataggaggcaggtggaacctggaggtggggttgggggagaggcaatgagagagccagctggaatcagaaata

SEQ ID NO: 373446 - DNA, 201 bp, Homo sapiens
tcctctaggccctgggaactgccctttggcatgttgagcttgagatatgaatgaagataggacctcaaaatgcaagacaaactgaattttcccctggtagygttttaatctggtagttggtttctgttgtgcatgtgttactgtgctaactgtgaggatacagtgtgttatgttgctcattatgaatagcctggggatgca

SEQ ID NO: 373447 - DNA, 201 bp, Homo sapiens
tatacaacttgtgaggttatacttgttttcagctacttttctatagggattgtgggagatgggtgctgagaggggtgtttgcctgtgctgtggggatcccygttcttccagggtcttggcagcctcctgcaacaaacttgctggggcctgctgtgtgtacacactgtatcaggctgggtgtacctcgttaagcacataggt

SEQ ID NO: 373448 - DNA, 201 bp, Homo sapiens
agagggataatagtgatgctataaatagcaaatgaagtcagttgggctcttatatgtgttgagcaccaccatccatctgaatagttgcttaagccagaaaytggggagtggccccagctgcttcttccttcccttcatccagaaagttagcagttcctggattttcctcctctagaatgtccctcaaacctgtcctctttt

SEQ ID NO: 373449 - DNA, 201 bp, Homo sapiens
attatgttgaaattttcagatataatggtaatgatatatatgctgttggaacaagtattagcatatgaatgattattattttcacaatatttcttaacacytggtaaaaccagcagagcatctattttgctgtgttagaatcgggccagggtcagacaaataatatgagtcaatttataaaacaaataaaagattaaatat

SEQ ID NO: 373450 - DNA, 201 bp, Homo sapiens
tcttccaattagtttcttccaacttttctcttgcatataacctagaagaatttttaaacaataatgtaaataatatacttccctcatatacttgtaaattsacatgcaaagcttttaagaattgtaagttgcaaaataggaataaaggatgtcatttctaataaattacaaatcttggcacttaaaaattaagtggtataa

SEQ ID NO: 373451 - DNA, 201 bp, Homo sapiens
gttcgaatgcgcagtggcctgccggcacttgggaggggctgcatgtacactgtgtttatgggagttgtatgcatgctcacctgagctttcttcccttaccrgttcattattcctagaggaaggtcatataccagttaaactccaccattttgcctcttagtgcacatgcttgagcccacttgcccaaatcctgagatctta

SEQ ID NO: 373452 - DNA, 201 bp, Homo sapiens
ttccactgtcatgcttttctgagagcccacagattgtcactaattaattccaacaaatctctctgactcccactgtcctctttaaatccccaatgagtctctggtacatgaaaaaccttgatttagatggaataactataaagtccaatgattatttcctaaatatgcctttagcataaacagtttatttgagaattcata

SEQ ID NO: 373453 - DNA, 201 bp, Homo sapiens
tgactgctggtctccgcttggagtaagactcccggaagctggaagggaatgaggctacagacctctctatttgagctttgaaagaagaaaaaatgtttccrtccagaaaagaaagctccgcaaggcagatggtacacagggaaggtggtgtctgtccttaacctcacactccctgggtcagggcagcctagggattttgca

SEQ ID NO: 373454 - DNA, 201 bp, Homo sapiens
agtttaaatttctataatatcaagtgttaatcagtgatgtggagaaatgtgtacatgcatagtctgttgatgggaacacacattttgcagtctttttttttgtaggcaattagggagattctatcaaaatgtaaacatagtatgccaaacctatttctagaagtttattagtaatactccccaatgtacaaggatatttgc

SEQ ID NO: 373455 - DNA, 201 bp, Homo sapiens
ttctctagccatgtggccatggacagcttagcaccactgtgcctcagtttccttctctggaagatagggataataatggcagtttcctcattgggcttttktaagagttaaacgaattaatgaacataaagtgcctggcatggctaatctgaagccctacataaatttttgtaattactattttcatgttgtatttctgtc

SEQ ID NO: 373456 - DNA, 201 bp, Homo sapiens
actttttctctcattcattgtgatcagggtggtaatatacctgttttaatttatttttgatcatttttcctattttgttttgtttttctgaaagaccaaamctttcatttggttacccctttcaaaaattttgttttttgtttttctttcaactgttgacatactctctctgagacatatggtaacatattatttccatgg

SEQ ID NO: 373457 - DNA, 201 bp, Homo sapiens
aggcaaagaaaacacattctgctgatgtctttgttttcaatactttttctctcattcattgtgatcagggtggtaatatacctgttttaatttatttttgrtcatttttcctattttgttttgtttttctgaaagaccaaacctttcatttggttacccctttcaaaaattttgttttttgtttttctttcaactgttgac

SEQ ID NO: 373458 - DNA, 201 bp, Homo sapiens
tactcttactgaaaatcaatgtactgcaactgtaagggtttcttgagtactgggattctcagttcgattccatatctatatctatctatctatatatatawctttatctatgtaaagatatatatgtctcctatgccaacaccacactgtcttgattactgtagctttgcagtcagttttgaaatcaggatgggtgagttc

SEQ ID NO: 373459 - DNA, 201 bp, Homo sapiens
tgtttatgcatatcctctgtatctggaattgtcccaatgacttcaaatatgtgggggtatacatctttgtgcactaaaattttgaataacaagaatttttrtttgaaagggatcatggcatcctattttaattaatctcaataacaaataacttgttcaattctagaaccacagtctgtcatatctacatataacagtaat

SEQ ID NO: 373460 - DNA, 201 bp, Homo sapiens
ctttagtcattttattagtcagtaaaattgatgaaaaccttaggaaaatgcgttagaacagtcctgtgatgaataggaggcctgggattaataaggaaaarggcaaagggacacatgttgatctgtgtatgtatagagatctggagcttattagaagtttttatgaacattcaactaatgaagcattatataaaattagac

SEQ ID NO: 373461 - DNA, 201 bp, Homo sapiens
ttatataaaatcattggactgaaaaattgttgttttgggtattagattatttatataaaatgtttacctaaatatatttaaatggcattctgaaacattttcctagttcagataaaatttcagcactaaatagaggctgcccttgcttttcaacacagtcttgagaaactgtaagttggtggtcatgaaacaggtcatttt

SEQ ID NO: 373462 - DNA, 201 bp, Homo sapiens
tttgggaggccaaggcaggcggatcacgaggtcaggagatcaagaccatcctgactaacatggtgaaaccctgtctcgactagaaatacacacacacacamaaaaattagccagaggtggtgacaggtgcctgtagtcccagctacttgggaggctgaggcaggagaatggcatgaacccaggaggtggagcttgcagtga

SEQ ID NO: 373463 - DNA, 201 bp, Homo sapiens
ctcagctcactgcagcccatacccgccgggctcaagtgatcctctcatctcagtctcctgagtagctgagactacaggctcatgccactaggctcagctamtttttttcgttcattttttgtagagaccaggtctccctatttttcccaggctggtcttgaactcctggactcaagggatcctcctgccttgacctcccaa

SEQ ID NO: 373464 - DNA, 201 bp, Homo sapiens
gtaaactatgggtttgacttaattggtctgagatttggcagtttcatgtgcgtaggtgaatggtgaggcttttacattttttagattaaaaaaattttttyattatactttaagttctgagatacatgtgcagaatatgcaggtttgttacataggtatacacatgccatggtggtttgctgcccatcaagccatcatcta

SEQ ID NO: 373465 - DNA, 201 bp, Homo sapiens
gacattgaaactcatagaggctaagtaacttgcccctaatcacacagccagttaaaaggcagaagcaaatctcaaattcaaatatttgagctccagctccrgcaatctgaaatgtcaagatacctagtacaattgggttctggtcctggatgtgcctgaacatttttatgatttcacatatatcatgtgactctccaagcc

SEQ ID NO: 373466 - DNA, 201 bp, Homo sapiens
agacattgaaactcatagaggctaagtaacttgcccctaatcacacagccagttaaaaggcagaagcaaatctcaaattcaaatatttgagctccagctcyagcaatctgaaatgtcaagatacctagtacaattgggttctggtcctggatgtgcctgaacatttttatgatttcacatatatcatgtgactctccaagc

SEQ ID NO: 373467 - DNA, 201 bp, Homo sapiens
cctatgagaagacccctgttgggccctgacaagggaagtggctttgctcttcctgcaggcacaagctgtccatgatgctgggacctctgattcatccactrgagccattgtcatcagaactatttctggaagtttctgagtaggtggcacagccctgtgtacctagtgaagccccccccccctttgattcaggggtcacat

SEQ ID NO: 373468 - DNA, 201 bp, Homo sapiens
acacacatgcatacagacttaccatccattcattgattcactgggttcctgctatgtgccaggcatttcctagggcactaagaaaacagcagcaaacgaaraaggctgagttcccctccgggaggggtcttacaccgagcaatcccagaatgtcggctggcaagaaggggtgagtgaggaatatgctggaggcagaatggg

SEQ ID NO: 373469 - DNA, 201 bp, Homo sapiens
tgtgctgtgaggacagtgataattatgctccttctgaagaaatccttgcagaagatgtcacctttccatgaattgaaaaggaggaaaggtgctgtgttttsaagcttctccagataatcttagaaatgtaagtcgagaaagggaatcatacaaacatcatgtcttaatttgacttagtacctagtatgggtttaacataac

SEQ ID NO: 373470 - DNA, 201 bp, Homo sapiens
ccagttcagtcagagtctcttgggttaggacctgagaatttaaaaaaatctccacagtaattttaataagcagctagagttgagaaccattgcctcccgtrgagaacagtcactgggaagctaggattgtactgtggttacctagggtgatggactgagctaagctgaaagcagagccttgggtggggaaactgagaggag

SEQ ID NO: 373471 - DNA, 201 bp, Homo sapiens
gctgcactgcagggagatgtctctgcctgtactttttttttctttctgggatctatttagaataatctttgtgttcaatttcatttttagattttaacacygaattctttttgttcttctggatccacatatctaattttagcattgaaaagaatttcacctagtttatttttgtatcctaatctttttttagcgtaggtc

SEQ ID NO: 373472 - DNA, 201 bp, Homo sapiens
gaaaagcaggggtacaagtcatcaaggtttgaaaatgatcatttttatagatgtaggggtacaagtgcagttgtgttacgtggatatattgcttagtggtraagtgtgggcttctagggcacccatcacctgaatattatacattgttgaaacgatgatttttgatatctctcacttcccatgaactagagaactcatctt

SEQ ID NO: 373473 - DNA, 201 bp, Homo sapiens
aatgaatgagagaggatttattgattctgtgaggcttgtgaacacagctcctgctgtccatggaggattcatgttccagtagagctggatacatacaatgygtcgtgagagtacagaagggtggagaggattatagacagagccctagaaacctcaggtgtgaaaagtgtaattctttttaaggttaggcttgaggaagct

SEQ ID NO: 373474 - DNA, 201 bp, Homo sapiens
ccatattagctatatccactcttagccagatgccatactcaatggcagtgggaagctttgtccttggagctgcctgccacaggtacatctacagaggtacrttagttccttggctgtgagctgcaaggagggcctggccggggattggtgagggcctgctctgctcagagggtcaattaaataactaggttcaagctgccc

SEQ ID NO: 373475 - DNA, 201 bp, Homo sapiens
ggtgggctgtgccatgcagggacagttgcttttcagtccctctccagttagaatctagagaaatatcactgtgaaacaaggaaaagacattcttgttgccraatgtgataatgtgttctagatgcctatgtaaagtagccctttttttactcataagacaaatacttagaattatgatggaatatggtagtttcctcttat

SEQ ID NO: 373476 - DNA, 201 bp, Homo sapiens
aaaggaaatatccaccaacccagaattctacttctaatgaaggagaaataaaattatttttataccaacaacaaacaaaaaaacaaaaaaaaaactgaggmaattaattaccagcagaattgcaccaaaggaaacactaaaaggagttcttttggcaaaagaaaatgatcctagataaagcatgatcgtgcagggaataag

SEQ ID NO: 373477 - DNA, 201 bp, Homo sapiens
attcagtaaggtttttaaatgaagtgaatatatagattttagaaatataagttaaacagaggttcaagtatatatatttttggtaccatgtccagcttttrcaatatcatattgagagccttaactgtaaccaaataacgttttccagtctgtgtttaactatacatcaacccagtggatggttcataaagagtataattg

SEQ ID NO: 373478 - DNA, 201 bp, Homo sapiens
aagcttccattacttgtttttttcctgtaacagcttttcagagaaataccatttggctcaatttactcatcatcctaatcttagaatttccatgttttacrtagttcaatttagtaaacctctcaatttatatcattactttatcaatccagcatcatgataaaaggaagatgtatcacatgaataaaattttcttggatg

SEQ ID NO: 373479 - DNA, 201 bp, Homo sapiens
atccatagaaacacaaacaagaaattgtagcagcagtatttcattcctaaagctgaatgatgtcaggcataattactgaaactaacatctggagtggtttrttaaagggaaacctgccaagattgttagcatataccaaacagcattatccatatgtgccattttatcactattgaatgtcggggtgtgttagtatgaagg

SEQ ID NO: 373480 - DNA, 201 bp, Homo sapiens
tgtgataagccaggcaaggttctaagctttggagaacaaaattaacaaaatctctcctcttgtggggcttgctttctgatgggaggagatagaatgtaatkaaaataagtagcttatttgtactatggagaaaaataaagctgggaaggtagataaggagtggggtaagtgagacttgtaagtagagtgggcaggcaaggc

SEQ ID NO: 373481 - DNA, 201 bp, Homo sapiens
cgatctcttgactttgtgatccgcccgtctcagcttcccaaagtgctggattacaggcatgagccactgtgcctggtcaaaatttttttaaaaattaaaarcattctctagtcgtgccttcatggaggcatactgagcatatggcatcatattttgtcacactctcacgtatctgctagtgtaagctacttcccagcccgg

SEQ ID NO: 373482 - DNA, 201 bp, Homo sapiens
cagaatccaagtgggacagccgaggtcatgggtggatatgaaactgtagagttcaaaggagagatctggactagagaaataaaatttggagttttcaccgsatgatatttcaccagaatagaaattggtacagttttgtggggaagcaatttatagcttgcaccactactcaaacatgagtctcaggtaaattaatatact

SEQ ID NO: 373483 - DNA, 201 bp, Homo sapiens
aataaattaattgaaatgcatttaaaacccaagcttttagcagaattagaattagagctcagaccagtgcattgtctttacccctccaaaagcgatttcargagaatggtcacgcttccttaggcctgtttgtttttaatggtattccaggtgagacttctttcaccgctgtcaactgtggctgtgctacagaacaggtag

SEQ ID NO: 373484 - DNA, 201 bp, Homo sapiens
gacagtatgggctgcttttagcagctgtccctgtgattctatgtagggagtatatgtgaagcttgctcgtggttgttgatagctgcaatgtaaagtaaatkcactgtgttcttaatgctctttgtaaaagaaagtggaaactaaactgagaagataaaccagaaataatgagtctcccattctacgcctttttccccagca

SEQ ID NO: 373485 - DNA, 201 bp, Homo sapiens; identical to SEQ ID NO: 80862

SEQ ID NO: 373486 - DNA, 201 bp, Homo sapiens
aagcttgtctgtctgctggctctgataagtcttattactctgttaaatgcagcgaaattttttaaactgtggcatctttattctctcttacctacagtctstcctttttcatttcctttcatcttcaggagctgccactccgaaaccagtcccagaacccgagaaacagacagaccatacagttaaaattgctggagtcat

SEQ ID NO: 373487 - DNA, 201 bp, Homo sapiens
atttgattctgtatcagtgggaggcccttggattggagtagttaaaggagggaagtgacctgagatcatgtaccctagaacttaaagtataatttaaaaawatatatatatatatggaaaaaaattaaaaaaaatgaaaacctagaaagatacaaggttctatgtcattacattaaaattgtaatgcttaaaaaaaaaaaa

SEQ ID NO: 373488 - DNA, 201 bp, Homo sapiens
aaaactcagggcaaaaatgtatcttactcgtgcaccttaagtgaatgaattacagaaagacattgaggtagagttaaaatgaaggcacgtttgcagcactrtagagtctgacaggagaaaacagtaggcagagcagtaagaggtagccacaccaccccactcaaagggactctgccaagtgtccagcagatgtgtggagat

SEQ ID NO: 373489 - DNA, 201 bp, Homo sapiens
tttacatctctactatacctcacagaatgcctggcatttaacactaggctgagtgcttaactgctgcacgcaggggtggccactcatacccactggggccrggacagtggtataaacgaacaaagcaagttaggcatgaggccacgttaggaaaatgtgcatggaaaacacactggcagcacaactcactttaaacatcat

SEQ ID NO: 373490 - DNA, 201 bp, Homo sapiens
tttttcatttcctttcatcttcaggagctgccactccgaaaccagtcccagaacccgagaaacagacagaccatacagttaaaattgctggagtcatcgcrggcatcttgctgttcgtgattatatttcttggagttgtgttggtaatgaagaaaaggtgagctcctagctgttgccaaagatacagttatatcccattgt

SEQ ID NO: 373491 - DNA, 201 bp, Homo sapiens
acacctgggcagtgccccatggtcatatttgagataggtggtttttcaagtgtatgaaagactattgtgaggctggacacagtggctcatccctgcaatcycagcactttgagatgatgaggcaggcagattgcttgaatctaggagttacaaaccagcccgggcaacatagtgagaccctatctctaccaaaagtacaaa

SEQ ID NO: 373492 - DNA, 201 bp, Homo sapiens
tgatcgcgccaccgcactccagcctgggtgacagagagagactctgtctcataaaaaataaataaataaataaatagtaataaatattaccaacctctackgcttcaagggttctgagttcagaacatcttaacataagccaaaatgctaagttttactcctcacagaattgtttcagacagggaagtgagtttctggagc

SEQ ID NO: 373493 - DNA, 201 bp, Homo sapiens
acacttataaaaccatcagatcagccaggtgtggtggctcacacctgtaatgccagcactttgggaggccaaggcggttggatcacctgaggtcaggagtytgagaccagcctagtcaacatggtgaaaccccatctctactaaaaatacaaaaaattagccaggcgtggtggtggacgcctgtaatcccagctactcagg

SEQ ID NO: 373494 - DNA, 201 bp, Homo sapiens
atcctcagctgctgatggctggtcacacctaaggctgagcccacacctgatcaaacctccttgcagtacaggtgccccccgtagagtccgttccaacaacmaaacacttcttcctctgttttctttctctgatttttcccgagctttgattctaaaaccggaactttccttagtcatgttttttagtatctgtcatggttg

SEQ ID NO: 373495 - DNA, 201 bp, Homo sapiens
ccctctttcttagtagtatgcctagtatgtgccgcagattctagtccctgcctgggagcttcttagtcactggtagaatttcttaatgttaacctgaagcygcagttttagtctgctgcccagacaggctgtgtgatcccctgacattatatcttcatcaatatggtccactctgcctggattgtttctgccctctttcaa

SEQ ID NO: 373496 - DNA, 201 bp, Homo sapiens
cctggtgaagtgacccaaaccttcattcctgaagggtctgggccaattgtagtctgcctggattgagctgttgtaccttcccattgaccttaatcacaggrcatggtaatactaagaagtgctcttagggtgtcctatattccacgcctattcttccttacttccagagtggagtagtagactgatttcatcttgatagtc

SEQ ID NO: 373497 - DNA, 201 bp, Homo sapiens
cacaatgaaaacaaatacactgagcacatcggtgcctaattcctattacccaggtaacagttttttccattgtctcctctctgctctctcctcagcagtcrgaatcactccgccctctctctgctatccctggtgcttgaggggcttactgtgtttgagatgttgtaacccaatgcttttctacagctttctatgcagaaa

SEQ ID NO: 373498 - DNA, 201 bp, Homo sapiens
tttcttgggctggagtaggtgcctcacactgctgtgttggggaatgaatgagatcgtgcatataaagagcagcatccagcacctgcctggcagggagccayctagttgtacctatttatttgtccaacacccttgtcctgggttccccttattccagcctagaagccttggttctcttattgctgacagagctttagggat

SEQ ID NO: 373499 - DNA, 201 bp, Homo sapiens
ctgaagaacttggagtcttcagcttttgctcgagggtacaatgttcgagggtatgatgcatccaacacaggagaaagatggaggccagaagacttagctartctagtccttccacattcctctgcctgcttttatcctagccatgctggcagctgattagatggtgcccgcctagattatgggtggatctgcctttcctag

SEQ ID NO: 373500 - DNA, 201 bp, Homo sapiens
gcgctcaaacgggccctggtctcgggcagttcagttcattctgcagtcagaatagtggtgctgggctgacctgaattggaattccagctttgccacatacyggcagtgctgctgtaacaaaggcacttcatctcctaagcctgtttcttgggctggagtaggtgcctcacactgctgtgttggggaatgaatgagatcgtg

SEQ ID NO: 373501 - DNA, 201 bp, Homo sapiens
aaggcctgagaggccctggtaaatcactggtgtaagtctcagagtccaaaagctgaagaacttggagtcttcagcttttgctcgagggtacaatgttcgarggtatgatgcatccaacacaggagaaagatggaggccagaagacttagctaatctagtccttccacattcctctgcctgcttttatcctagccatgctgg

SEQ ID NO: 373502 - DNA, 201 bp, Homo sapiens
acccatctcaactttgcttttccttttctgcagctgaaacaaaaaatatttcatgaaagttgcatgattttaacataagtagcctcaggggagaacaaatrcaactatcaaataagtgatgttaaggattattaatgctgaagccaagtatattctgtgtcactgttaccacttctgtgacacatgaggcagattcagttt

SEQ ID NO: 373503 - DNA, 201 bp, Homo sapiens
accttttaagaggtttaattttatattatgtaaatttcacctcgataaaaaatttaaaaagcagcagcagcagtgtggtccttcttcctccactgacagascccccttttcattcagtgctggtgcagggaggactggctgtttcatcgtcattgatatcatgttggacatggccgaaagggaaggggtcgtagacatcta

SEQ ID NO: 373504 - DNA, 201 bp, Homo sapiens
ttgcttgtaattcattagttgatttccattgtttcctttaaatggtaattttcttgggatattcttagcaattcgggataatgagcaaatcatgtcccttrtacccacccatctcaactttgcttttccttttctgcagctgaaacaaaaaatatttcatgaaagttgcatgattttaacataagtagcctcaggggagaa

SEQ ID NO: 373505 - DNA, 201 bp, Homo sapiens
atttcttaatgttaacctgaagccgcagttttagtctgctgcccagacaggctgtgtgatcccctgacattatatcttcatcaatatggtccactctgccyggattgtttctgccctctttcaattatttggtcctatggtagtatctttattatatgcttgctattctaagtttacattagaaatgagacttgagtgtac

SEQ ID NO: 373506 - DNA, 201 bp, Homo sapiens
ttggtttcaaagaagttacttatttctgctttaattttgttatttacccagtagccattcaggcgcagattgttcagtttacacgtagttttgtgattttkagtgagtttcttaatcctaagttctaatttgtctgcactgtggtctgagagactgtttgttatgatttccgttcttttgcatatgctgaggagtgtttta

SEQ ID NO: 373507 - DNA, 201 bp, Homo sapiens
ctataagattttttttttttttttttaagacggagtctcactgtgtcaccagactggagtgcagtggtgcaatctcggctcactgcaacctccgcctcccrggttcaagtgattgtcctgcttcagcctcccgaatagccaggactacaggcacacgccaccatgcccagctaatttttgtatttttagtagagacagggt

SEQ ID NO: 373508 - DNA, 201 bp, Homo sapiens
caattttctcttaatgaaatttgacataaccttttggtgtccaatcaggatttcatatgttttagaaatacacccagaaacaaacattccatgaaactaaktatgtagagaaagccacaaatagtcacatggtttatattgtcacactttcttacttcagtctgaaatgagaattttggggaatggaatgagtgaaatgta

SEQ ID NO: 373509 - DNA, 201 bp, Homo sapiens
ctctcaagtagctgggactacaggcatgtgccaccacgcccggctaattttttgtattttagtagagatggggcttcaccatgttggtcagaatggcctcratctcctgacctcatgatctgcctgcctgggcctcccaaagtgctgagattataggcgtgagccaccgtgcctggcccctaccaatatcttttaagtcta

SEQ ID NO: 373510 - DNA, 201 bp, Homo sapiens
ggaaataatagcataaaaccaccagggaaattcaaatatgataattttggtgaatgttctcaattttaaataaaaattttttaatgtaatgactttacctwtggtgggattgaagcaatacattatttacacatttaatcttattttgatttactctaatttatttgatatcagcagcctgttagatgataatttaaaaat

SEQ ID NO: 373511 - DNA, 201 bp, Homo sapiens
tctctagaaagagcacctgatggttaaaatggagtcaatatccattactttatcatagagatgatctcacaaaagggcacctgcatcatttagggtgcttkggttgcaagcaataaaattggactgcagttcacttaaagcagaaaaggaatttattataaggacatgaggaagctcacagactctagtggcaggccagaa

SEQ ID NO: 373512 - DNA, 201 bp, Homo sapiens
gtgcccctgcccctgtctgaaccctgctggaacaagcccaagcttgtactgttatttgctggcctgatgaacatcctatttcagtagtgatggctaatttyatttcatattaagggatttgtggaaagaaattttaactaaagtatgatcattgtatcttgatgccccgaagggtgtgagagattcttaaagatgatagta

SEQ ID NO: 373513 - DNA, 201 bp, Homo sapiens
gcctgtagtcctagctattcgggagactgaggcaggaggattccttgagcccaggggttaaaggttgcagggagctatacaccactgcactctagcctggrtgacagagggagacctcatttaaaaaaaaataaataaataaaataaatgaatgaataaaataaataacatggtaagaacacgtaacatgggatcataaga

SEQ ID NO: 373514 - DNA, 201 bp, Homo sapiens
gcatactgtaatattctcagagatctatatgtaaaatttgtatagtcatagttttatggtgggttataattgtctctagtagattctgtgagtctaaaacmataggaagactgtgctccattagcttgtcatgcaatttttaactttgacaatagactttttttgaaaaaaaaaatattttattttttgcgacaagatctc

SEQ ID NO: 373515 - DNA, 201 bp, Homo sapiens
aggactgagacccagaaaggaaaggaaacccacagttaactatttactaggtagctagataggtaagtgcgtcccaggtagctagataggtaagtaggtcratagatacatagcataatgtatgtgtttatagaaacacacacatatatgcagaatcacttaattcttataacattctagaaggtagatggttttatagat

SEQ ID NO: 373516 - DNA, 201 bp, Homo sapiens
ggccaccaggactgaagtttctttctcctcttaccttgaacaagagaagcagaagggccactgtttacagggagttgatgagaccaccttccttagaaggyccttacttctctggttgatgaatgtcatactgattgcacccaagactgagttcttggtacacgtggctgggcaaattcttggaacaggtgtctgggctca

SEQ ID NO: 373517 - DNA, 201 bp, Homo sapiens
gtctttctgttgcccacagtacaccaacttttaagtaaatgaaagttgaatatatctggttgaagcagggttttagaagggcctgcgctgggttcgccctygtgggctgagagagcctgaggattctgaggatcacagggtgaaaaactcagtgatccaagtcatcatgcttttttttatagacaggactgagacccagaa

SEQ ID NO: 373518 - DNA, 201 bp, Homo sapiens
ttagaagcccagggaagcaaagacatttttcttggcttactcttttaagtgtttccacagtattcttagctattagaaaataaaaattatttattgttgcmattgttagaaaaagtcattcatctcctgtctcttggccactgtggagccctggcattaaggaaaaaaaagtttggtggctggcgatcagctataattgtg

SEQ ID NO: 373519 - DNA, 201 bp, Homo sapiens
tcattactgtttgtatataatccttatcatttcatagctcctggcacagttgtgaatctgaatcttgaagggatctctgaagatcactcagacacagtcayctagacagaaaccataacgggtctccacccaccgttattaaatcatgcatatggttaggaagtgcttgccttgtaaagttagtgatggctgggcagctcc

SEQ ID NO: 373520 - DNA, 201 bp, Homo sapiens
acagaatccaagtgggacagccgaggtcatgggtggatatgaaactgtagagttcaaaggagagatctggactagagaaataaaatttggagttttcaccrgatgatatttcaccagaatagaaattggtacagttttgtggggaagcaatttatagcttgcaccactactcaaacatgagtctcaggtaaattaatatac

SEQ ID NO: 373521 - DNA, 201 bp, Homo sapiens
ggagttcgagaccagcttgggcaatatagtgagaccccccatctcaaaaatagataaataataggctagtgtggtggctcacacctataatcccaactctytgggaggctgagacgggcagatcaccctgaggtcaggagttcgagaccagcctggtcaacattgcgaaaccccgtctctactaagagtacaaaaattagc

SEQ ID NO: 373522 - DNA, 201 bp, Homo sapiens
gaggcaaaatgaaaattactgtctctctgaaatttggggtgacaatcctggagacaagacctaagcctagcatgacttatagaaacacagatactttcagmtgcctctaaaacagagcagtcctctttgggggacctgtgacagattgctcactgacatcactattttgacaccccattaaattaccatggcctctttggg

SEQ ID NO: 373523 - DNA, 201 bp, Homo sapiens
tacagctcttgagtagtgtgaacctcccaaactctggcaatatctgcatcagaggcaaaatgaaaattactgtctctctgaaatttggggtgacaatcctrgagacaagacctaagcctagcatgacttatagaaacacagatactttcagctgcctctaaaacagagcagtcctctttgggggacctgtgacagattgct

SEQ ID NO: 373524 - DNA, 201 bp, Homo sapiens
agtaatatgaaaactaagtgagactaacaattactcactgaggattttcatgtctttaatatttgaatgcaatctggcttattgcagcaggactttgcagrtgacagcataatatttaaaaatatttatacttgtacataatcagcattttctacaacttattttgggtaaattgaaatgaccctaaaagttctataaaat

SEQ ID NO: 373525 - DNA, 201 bp, Homo sapiens
ggggcttccatgagccttctgaacttcagtgctcctattctgacccccaggcacctctggcccaagtatgcccactggagttcccataaccctggcctgcrtagcagatgtcactcctgttggggaactcaggcttccaggatggctgccagagggaccagggaaccagtcagaaatgggggttgaggagtcggtaccctg

SEQ ID NO: 373526 - DNA, 201 bp, Homo sapiens
ggtagtcaggacacctctgctgggccagccaggcccattattactcccgtctcccaactctgatgtcacttgtgatcaagaactggcattactgcctggcrcctggggcttccatgagccttctgaacttcagtgctcctattctgacccccaggcacctctggcccaagtatgcccactggagttcccataaccctggcc

SEQ ID NO: 373527 - DNA, 201 bp, Homo sapiens
caagagtgaaaattcattatttttgcacgtggatatccagtttattcagtaccgtttgttgaaaagactgttcttttaccactgaatgtttttgacacacwtgtcagaaattactcaatcatatatgccagggtttacttctgggctctctattctgtttcattactctgtctgtgtttatgccagtactacattgtttta

SEQ ID NO: 373528 - DNA, 201 bp, Homo sapiens
tctccccaccagttttcctttgttcttaaaatcttgaatttgtgtagtgtatttgttgtaattgcataggcaatattgagagattactgttaatgaaggtycatagtttacattaggattcactgtttgtattgtatatgctatggggtttgacaagtatgtaaggacatgtgtctagcattacagtatcatacataaaac

SEQ ID NO: 373529 - DNA, 201 bp, Homo sapiens
agaaagatttctgcgcattcttatcagtattgccaaccccatttaaatttctaaacatttaacttttcttttttgctgagccatcgtagggaattttgcamccctaggtgaggggatgccaggagccagcttcttagcattctcagtgatgccgacctagctccctggctctccctcattttctccctggccttcttttcc

SEQ ID NO: 373530 - DNA, 201 bp, Homo sapiens
atagtcttttcagattggcttctttcactgagcaataagcatttaaggttcctctgtgttttttggtggcttgatggcccatttctttttatttgaaaagwtagacttttaataagttgtgttggaacacctagataatcatttggtaaatatgaagtaggagacatactgtacaccgtacaccatcataaaatccagatg

SEQ ID NO: 373531 - DNA, 201 bp, Homo sapiens
agagcttctttgaagggcagtctgcaccatgggactcggctaagaaagatgagaacagaatgaagaacagatacgggaatatcattgcatgtaagtgtcarcagtgtcattgtgctgttgtagaacttcctttttgcatctagtaagattgaccaccaggctcatacagaggaaatttacagtgcaattacctccttcatc

SEQ ID NO: 373532 - DNA, 201 bp, Homo sapiens
aagaaagcctttctataactcaaaaccaagatgaaataaaagaaaagattgacaggtttgccagtggcaacataaaaactttcaagaaaaagtttttatgyatgaagaaaactaccataagcaaaaccaaaagacaaatcataaactgggaataaatgtttacaacacatcatatataaagggataatctacctaatatta

SEQ ID NO: 373533 - DNA, 201 bp, Homo sapiens
tcagaaaacatttaaaatcttggtgaattctcttggtaaagacaagggcaaaaagagcccttaagtacctggctggtgtgagtgcccgagggtcccactcyatggagagagatttggcagtgtctaagaatgagacctccactgactgtcagtgcccacccctgccctctgtgctctgcatctttccatgttccagggtga

SEQ ID NO: 373534 - DNA, 201 bp, Homo sapiens
aaatttatctttattataaagacatactaaataatatctactatgtaattatttgtcctttttgtttttaaacatttcataatcattttaattgaataaaygattaaaagaaaagattattaaccagaaaagagaaaatagatgatggttgaagggttgtatagcatattatagacagaggtttcccaggctattttagtg

SEQ ID NO: 373535 - DNA, 201 bp, Homo sapiens
ccttatatttcttaggaagaaaatggctattgattaaatttatctttattataaagacatactaaataatatctactatgtaattatttgtcctttttgtktttaaacatttcataatcattttaattgaataaatgattaaaagaaaagattattaaccagaaaagagaaaatagatgatggttgaagggttgtatagca

SEQ ID NO: 373536 - DNA, 201 bp, Homo sapiens
gtataaaactcagtaaacccaaccattctgacatgtaccagattgtgtgtctgctgaacgattgttggacatacattgggctcaatctaaaagcaaacacrtgaatattaccctgcacaccacagaacttaacagtgaagacacggtcactccttttctcaaggtagcccattcgttggtgaatttctctgtaacattcta

SEQ ID NO: 373537 - DNA, 201 bp, Homo sapiens
cgtcttggtgttctgaaggcttccctggtgcacacttaaagtcagatgacatgtgagtgaaaacagcttaattccaaagaccagacaagttccttcctaasaggcttcattgaaagcagttcctgagataagaattacacaggggtgttttagagaggagctttaacatggtaagttccttatatttcttaggaagaaaat

SEQ ID NO: 373538 - DNA, 201 bp, Homo sapiens
attgacactagagacctgtgtccatctgtacaagtgagggaactgcatgtgggtattaatagatgtatttgtaagccccggaaattttccagttgaaactkacaacaaaaacaaaaagtttctgttgtgttttgctgcagggccaatgcaggaaaccatctatgacttctggaggatggtgtggcacgaaaacactgcaag

SEQ ID NO: 373539 - DNA, 201 bp, Homo sapiens
gctggaaaagcatattttccttctgtttttgaagtcttgctgaaattgagcagccttgatagcagcgccagctccacgtcttggtgttctgaaggcttccstggtgcacacttaaagtcagatgacatgtgagtgaaaacagcttaattccaaagaccagacaagttccttcctaacaggcttcattgaaagcagttcctg

SEQ ID NO: 373540 - DNA, 201 bp, Homo sapiens
cctatcagtcagtttttgcccttgttcatagaaaaataggactgaatgtagaaggagccaggatcactgattaaataggatgctgaagtgctggaggctaraagtgggcttgctcgtcccttaggtcagacttctctgctggaaacctggctcaagctggcagaaaaagaacagaatgaaaaatgctgcaggcatcagtgg

SEQ ID NO: 373541 - DNA, 201 bp, Homo sapiens
agtgtgcaccaacatcctgtactccctccagagtacaaagagtgccatcattgttcactgttaaactgtagacaaacataggttggaaagacaacagctgyatcctaagctggaaaagcatattttccttctgtttttgaagtcttgctgaaattgagcagccttgatagcagcgccagctccacgtcttggtgttctgaa

SEQ ID NO: 373542 - DNA, 201 bp, Homo sapiens
aaagacatatctctcaatagcagagaagcagttcaggttttaaccctagtataatgtatactcatatagttttcatgaaagctgatacatcctacacctgwtaatgcttccttccagaaggatgtatcaaagggagccacttaagtgtgcaccaacatcctgtactccctccagagtacaaagagtgccatcattgttcac

SEQ ID NO: 373543 - DNA, 201 bp, Homo sapiens
tcactcaaatctgatgggtctgcctttctcgacctgctttctgtgtcaagaataatagaaacctttgcattccttttcacagtggtaccactgcaacctgwaatagtttacgtaactgctagggaggtccgattctagaagaggactgaatatcgcccaaaaagaatgaaatgcaaataatggtttctttcggtagatgga

SEQ ID NO: 373544 - DNA, 201 bp, Homo sapiens
gttgcagctgaggaaactgaagtgtggagtttaagtaactggcccaaggtaacagatgcagtgatcagaggagcagggacccacagccaggcactgtgacrcagagcctgcgctcctcactcatatcctgcttcaggcttcacaggtcttgggaagaaaaagagaacgtttacaccctgaataacattgcaaaaggatagt

SEQ ID NO: 373545 - DNA, 201 bp, Homo sapiens
tcccctctttacagcatgcgcaagtacccaagctcagtttctgagcgttctctttggagaccgacactgatgaatgctctgtacctccgccagcaggatgyttctgtgctgtggacatctgtcatgttccttccttccgaggccacagcactttctcctgcgcctcttttcagctccccatgcatgccgccattcggtctg

SEQ ID NO: 373546 - DNA, 201 bp, Homo sapiens
ttccagaataaatgaaatcactcagtcattaaggtgatatatttaactgggctggctgggctaatttgtccatgttaccaattattattgagcagacaaastcaggtaatgatggcagcaaaagcccatctggggcctgagactagaggaggaggaggctggccagaccctcctcagatgcgcagaggacagcttcaggat

SEQ ID NO: 373547 - DNA, 201 bp, Homo sapiens
ttaaatgtgaaacctcaaactataaaaatcctggaatataacctaagaaatagcattttggacataggccccagcaaaggggccttttctttttaataccyagtaagttgcccatttacaaaataatgtccttttttgctgaccttgaaaatatactcagacaaagcagagtaggtcttactaattgcatatgttcacatt

SEQ ID NO: 373548 - DNA, 201 bp, Homo sapiens
agcaagactctgtctcaaaaaaaaaatagaatatatttaacttttattaatattctatgaatcataagtagcaaatttcctctcaaacagtaagataaatkgactgatggcaaatgatgggatgtgttttgatcttaggagaaagacatgccatcataaaatattttaaagacatatcgttagaatacatttcatttaata

SEQ ID NO: 373549 - DNA, 201 bp, Homo sapiens
tttgacatctgaggaggtgtaagatctctacagcgagaactacaaaacactgcccaaagaaatcagggatgatacaaacagtgaaaaaatattccatgctyatggataggaagaagcaatattgtttaaatggccctactgctcaaagcaatttacagattcaatgctattcctatcaaactaccaatgacattcttcaca

SEQ ID NO: 373550 - DNA, 201 bp, Homo sapiens
gatcatgccactgcattccagcctgggtgacaaagagagacaatttctcaaaaaaaaaaataataaaataagtaaagcaagcagtagaagtgggtttggtygatttatgcttcaagaggtttttgtatggtggcccaggctgagaagctgagtgtgattaaaaattttcttttggggaaccccttcccaaagtagggaaga

SEQ ID NO: 373551 - DNA, 201 bp, Homo sapiens
ttattgaaatacagtttttttcatcagaaattgtgtgggaaaaaatttacctttcattaatgttagtagaatcctatacagcccagggataagttgtacamacttaggtattatggctttatatcccagatcctgaattcccagagcttctaaaaataggtactagacctaagttactatgaggtactatcttccgtaact

SEQ ID NO: 373552 - DNA, 201 bp, Homo sapiens
ttttcttttgtttcctctgactgtgtattttcaaatagctggtcttcaaactcattggttgtttcttctgcctgacctattctactatcaaatgactcatrcattcttcagtatgctaattgcgtttttcagctctagaaatactgattgatactttttaattatttcagtctttttgttaaatttgtctgatagaattct

SEQ ID NO: 373553 - DNA, 201 bp, Homo sapiens
tgacccgtttatcattatatagtgaccttctttgtctcttaaagttttttttgttttgttttgttttgttttgttttgttttttatcttgaaagctattgkctccatagagctcctcctgctctctttcagtttctatgtgcctggaatatctttttccatccctttatttttagtttacctgtgtctttatgcctgaagt

SEQ ID NO: 373554 - DNA, 201 bp, Homo sapiens
taagaaagtagtattaaagatttggtggctgttcctcgtatattcatatattcaaaataaactttaaaatgtgtagggcagtgggactctgactcataatkttagttttaaactaattactcttatagtagtgctgttccctttattgaaaaataagtgttgtattacaatgttcaggctctttgtctttatacacatacc

SEQ ID NO: 373555 - DNA, 201 bp, Homo sapiens
catatatgtatagatatatatgataaatatgtattatgtatattaatgtatatgttgtgctggacccagtttattcatctcccaggatcttcttggccatycttttctgctgtgcttccctgatccccctctagggaaattccctgatgcccactgcattctttagacacagagctcagatttctaccctgatccttgctg

SEQ ID NO: 373556 - DNA, 201 bp, Homo sapiens
cacattgtacagttcactgacttaacagatgagcattcccagttctccatatttttgccagtgcttgttattgtccatattttttgttctagccaccccartgggtatgaggtggtgatagggacaggaggcagggaaattctgggcagaaaaggacgggtccctggtgaagtccctatcctcaagccaaagagcctggaa

SEQ ID NO: 373557 - DNA, 201 bp, Homo sapiens
tcatcaagagtgtgcctgctttgaatgacactactgttatctccatatctaagctgtagacagatggtgtatatgcagacaataagaggcagtatcagtaktccctgtgctgatgcagaggcggtactcacctcaaaaacatctgacttataaatgactcacagataagagcaaaatgggagcattatctcctggctgatg

SEQ ID NO: 373558 - DNA, 201 bp, Homo sapiens
aggaaatacaaggaaagactgaaggaaactaaggagacaggacaactacatgcacgactggatcctggaccagaaaaaggacattcgtggaggaactagtragatgtgactacagtctgtggtttagttaatagtattgtcccagcatcacgttcttggtttgcataatgcgctgtgggcaagtaaggtgttcatatcagg

SEQ ID NO: 373559 - DNA, 201 bp, Homo sapiens
atttctctaacgactaatgatgagcatctttttttgttcatggtggtcatttacatatcttctttcaaaaacgttttcagatcttttcagatcctttgctyatttttaattgggtcatttcttgttgagttttaagatttctttatagattctggttaaaagtcgcttatcagataatatgatttacaaatacattctcct

SEQ ID NO: 373560 - DNA, 201 bp, Homo sapiens
gggtgccatggctcatgcctataatcccagcacggagggctgagacaggaggattgcttgagcccaggagttcaagaccaatgttggcaacatagtgagamcctgtctttgcagaaaaaaaaaaaagaaaactacctggatgtggtggcacatgtctatggtcccacctactctggaggctgaggcaagagtatcacttga

SEQ ID NO: 373561 - DNA, 201 bp, Homo sapiens
aacttgatactgcttttctatttattcaacttaagatttcatgactttttaatgcaactctgttattattttgcaaatcagtgaactattgttatattccrtggaataatagatcaaagtcagagaaagtgcgtaagtgaaaaatagaggatatcagccttgacagcagttcatagaaaaagacctgggctttttagttaa

SEQ ID NO: 373562 - DNA, 201 bp, Homo sapiens
ttcagaaagaatcaattaggaaagggcaggcaaactggggcagatgttctccctttgggtcttgggtttcatctgagaccagcagtccggtcttcagcctycaggctgttttaggcttgaaggtgaggtttcaccagggacccttccctatctgcctaggcatttgtctgcctcctgcctctatcagcagcatttctctat

SEQ ID NO: 373563 - DNA, 201 bp, Homo sapiens
actatagcaatggagaagtattcttaggatgcaatggtataaaatagtatcttatccttgaaaatagacgtgctcaattgaaataagcttggttggtattkcaagtattaatttggagtactttcagacattttaagaggtatcgttttagggccatagaatagtagagttaggagggcacctgaagatctaatttaatcc

SEQ ID NO: 373564 - DNA, 201 bp, Homo sapiens
ctctgagtagagatgcacaggaaatgaatggttacagtaactgggatgtttgtggtaaaaatacaattttttaaacttagaccatttttccaggttttacktctcccataactcaaatattgttttcttctgagaagaataaaaacacaggtgatctacaaaaaatagaccttcctcttgagtatacaattaacttttgtg

SEQ ID NO: 373565 - DNA, 201 bp, Homo sapiens
acttaggtctttagttaggatttgatccagcccaagatggaaaacacaaaataagaatggtgtaagcaagtagaatttatttttcctttaaaggaaaaggmgtacacaggttccttctttgccttctctgtcttcctaatgtggcaatgaaggttcaacataccttccccagccctggccatcacatcctcagctagcctg

SEQ ID NO: 373566 - DNA, 201 bp, Homo sapiens
gtgtacatgcgccatggtggtttgctgcacctatcaacccatcatctaggttttaagccccacatgcattaggtatttgtcctaatgctcccttttccctygccccccaccctccaacaggccctggtgtgtgttgttctcctccttggtttccatgtgttctcattgttcagctcccacttataaatgagaacatgtggt

SEQ ID NO: 373567 - DNA, 201 bp, Homo sapiens
tttttccaggttttacgtctcccataactcaaatattgttttcttctgagaagaataaaaacacaggtgatctacaaaaaatagaccttcctcttgagtayacaattaacttttgtgtgcaaattttgtcctataaatcatagtgtgacccatcatgggaggaactccaaaaaaaccaaactgtaaacccataatttcttt

SEQ ID NO: 373568 - DNA, 201 bp, Homo sapiens
ttgtggggcaggttggagattctccgggtacccttccctaatcctaggggatttggctgtctgctgcctctatgactaccttacctaccatagagatgaargttcctcacactaaacatttcacacttatgaaggggtcagaactctcagtatattccaaacctacatccaaaagtaaagctggcacacatcagctttgca

SEQ ID NO: 373569 - DNA, 201 bp, Homo sapiens
atatttttaaaaatggtgtgcaagatactggacatcaggcaatgaaggataacaatctccaagaaacaggaaacaaattaggtgacccctaggattgcccyagcttatggcctgagagaacttctagaacatgggtgcagggaggggggatccaggtggagccacatggtttctcttatttgaggagataaggctgaaagt

SEQ ID NO: 373570 - DNA, 201 bp, Homo sapiens
ctcaaatattgttttcttctgagaagaataaaaacacaggtgatctacaaaaaatagaccttcctcttgagtatacaattaacttttgtgtgcaaattttrtcctataaatcatagtgtgacccatcatgggaggaactccaaaaaaaccaaactgtaaacccataatttcttttatgttttctaaaggtcaaatgctgca

SEQ ID NO: 373571 - DNA, 201 bp, Homo sapiens
aaccctgcaattaattgtcattgtctttcctggtgttgactggcagcactggggttgatcagatgcctagcacgcttcccctagctctatcaaaacctgcrtatgaacagaaaatgcccttagcctgtgaatagtcagctaacagcttgtgaacttggggaccagtaacctccaggcttggtatttctcagcctgccccca

SEQ ID NO: 373572 - DNA, 201 bp, Homo sapiens
tgaaaagacggctcatctgagcatggcgaggaagtgacctcagatgtgtgagtctaatgacaccgccacttcccagtcattccctgcgtcgtcataccccrgtctcacatgggagccagttgttttcaatctcttggatttttatctttctttcacttatttcaccttttagcggaaacagtgatagaaaaaaaaaggcac

SEQ ID NO: 373573 - DNA, 201 bp, Homo sapiens
gagatggtatctcattgtgattttaatatgcatttatctaacaattggtgatgttgagcattttttcatatacttgctggccgcatggtaccttttcaagygtatctgttcctgttttttgccaaatttttaatggggttatttggcttttgcttgttaatttgtttaagttccttatagactctggatattagacctttg

SEQ ID NO: 373574 - DNA, 201 bp, Homo sapiens
tctcttccttgttctggctaaccaactactgcagagaggtgtgcatgaaatccgagagatcagacagtttcacttcactggctggccggatcatggggtcscctaccatgccaccggcctgctgggattcgtgcggcaagtcaagtccaagagcccgcccagtgcaggcccactggtggtgcactgcaggtaagcagagct

SEQ ID NO: 373575 - DNA, 201 bp, Homo sapiens
ccgcccagtgcaggcccactggtggtgcactgcaggtaagcagagctccagagcctcttgaaggaaacgcagtgggtgatgggtgcagggccacctttggrgatgatgagtatgttttagaacttcagaggggtgatgattgcacaacattttgggagcactaaatgccactggagtgtaccttttaagaggtttaatttt

SEQ ID NO: 373576 - DNA, 201 bp, Homo sapiens
agcgttccgtcttctccacaacctctccagcatctgttattttttctttttaataatagccattctaattggtgtgagatggtatctcattgtgattttartatgcatttatctaacaattggtgatgttgagcattttttcatatacttgctggccgcatggtaccttttcaagcgtatctgttcctgttttttgccaaa

SEQ ID NO: 373577 - DNA, 201 bp, Homo sapiens
aagtggtacttctgttgtaagttctttgagaaatttcccacactgctttccacaatggctgaactaatttacattctcaccagcactctataagcgttccrtcttctccacaacctctccagcatctgttattttttctttttaataatagccattctaattggtgtgagatggtatctcattgtgattttaatatgcatt

SEQ ID NO: 373578 - DNA, 201 bp, Homo sapiens
acgatgcgatcctggaagcctgtctttgtggggacacctctgtgcctgcttcccaagttaggtctctgtattatgacatgaacaaactggatccacagacraactcaagccagattaaagaggaattccgggtaagtgatgcctaagggaggggcactgcacggtgacttgctcctcaagaaggatttcaaggtcagcacc

SEQ ID NO: 373579 - DNA, 201 bp, Homo sapiens
aatccaaggagcaaaagaaagaaaactcgaactatggtgggttggggagggagggggaagggaccgtcttgcagtcagccacaggaagtttgcatctttcsaaaactgcacgtgagaggagtccgctgccaaggcttcttgtcctcatgttcctttcttttctcacgcagacgctaaacatggtgacaccaacgctgcgag

SEQ ID NO: 373580 - DNA, 201 bp, Homo sapiens
gggttttctgcctatctgttattttgcattcgtgctgaaaagtttatgcctttgctcacctttcaacaattttagcaattataatatattagaaaatgctstctctgaatgacagagactagagtagcaggtcccatagctgatgtttattttgtaaaagcaggatgtagtagaaataacacatgtaccacagccagaagg

SEQ ID NO: 373581 - DNA, 201 bp, Homo sapiens
aagaaaagaaaacaaagggagtcagtgaaatcttcagaattcctgaatgatgtctccaaacacagcatcccacatccgtaatcccagcaatttgggaggcygaggcaggaggatcactggagaagagggcttcaagaccagcctgggcaacatagcgagatccctgtgtctccaaaaatacaaaaattagccaggcatggt

SEQ ID NO: 373582 - DNA, 201 bp, Homo sapiens
gtctggccactaatatatgatgacccaatattaacttcatcatgtctgactgaccagacattagtgcaacagtaacattcaagatttatgatttagcaaaycaggggctcaaaggagaggaagtcatgtccactactgcatgtctctgtatgtagaggcagggcagagtgaagatttcaaaagcaggctcaagtgatgggc

SEQ ID NO: 373583 - DNA, 201 bp, Homo sapiens
gagattaaaaaccataactcttcaggccagcagaagccacgttggtaatttgtaggcaggactcgcctttaataatgggaagatcaagtaagtggaatcarcccactggaattcagtaaataatgcctgttttctttccactccccgattgttgcctggttctttgtagccccaagatggatatcggatggtgcagcaatt

SEQ ID NO: 373584 - DNA, 201 bp, Homo sapiens
gaagcagaaagttagttctcccaggtggaaagcagctggtgggtcaccttggctaaaggaaacagaagagctagaggacatgttgaggaagctcatggcartggtttttgggtgattttcccagcgtatgaagtgggtcatctgcagatggtgggggtcatgagggagcgaggttttagagaatgaggcatcctaaaggat

SEQ ID NO: 373585 - DNA, 201 bp, Homo sapiens
ttctttgttgattttctgtcaacaaatactgaaagtgggatgttgatatctccagctattcttgtattggggtctctatctctctttagcgctaataatattttctttatatatctgggtgcttcaatgttgggcccatatatatttacaatcattatagcctcttgctaaattgacccgtttatcattatatagtgacct

SEQ ID NO: 373586 - DNA, 201 bp, Homo sapiens
acagtggcaggtgacatctgtgagaggaacagatacagataaaacattagggatatttggagcaggaaggggttgctttccggtgggatgactcaaaaacygttttgtggcagaggtgagattgggaagagcccttgtgaatggagaaacatcatgagcaaagatgtggaagcagaaagttagttctcccaggtggaaagc

SEQ ID NO: 373587 - DNA, 201 bp, Homo sapiens
gttttagcatacactttaattggaaggaagggtccctctgctaaaaggaacagttatttaggtaaatactttttaaaggacatatattttcaaaaaacgamaatgcactttttatttcttcaaaagttattttgggggtaaatctgctatgttccaggctctaatctaaaggccagggacacagcagtgatcagtgcagga

SEQ ID NO: 373588 - DNA, 201 bp, Homo sapiens
aatacaactattgcccctaagatacaagatcatatcaagtgtcgcacatagccttttagacagaatttttcattcttcctttggcaaatgttaaggaggaracttctaatattcaaataatcactcactttatatatcacataaattatgggcctaatttttaaaacgagtgcatgacatagagaaggacacattttgaaa

SEQ ID NO: 373589 - DNA, 201 bp, Homo sapiens
tttctttgttgattttctgtcaacaaatactgaaagtgggatgttgatatctccagctattcttgtattggggtctctatctctctttagcgctaataatattttctttatatatctgggtgcttcaatgttgggcccatatatatttacaatcattatagcctcttgctaaattgacccgtttatcattatatagtgacc

SEQ ID NO: 373590 - DNA, 201 bp, Homo sapiens
aactccagaaaccaatatgaaattttgactttcacccattagcatttcaaggaatgggtccaggtcaatagttgctccagtgactgaggataaaagggtcygtcatctgcagctcccctggcttttatctcaaaagctgtgggcttcatttctcacccactaacccaaaagaaatgttgagtaaagttagcatcagaaaaa

SEQ ID NO: 373591 - DNA, 201 bp, Homo sapiens
tgtttctttgttgattttctgtcaacaaatactgaaagtgggatgttgatatctccagctattcttgtattggggtctctatctctctttagcgctaataatattttctttatatatctgggtgcttcaatgttgggcccatatatatttacaatcattatagcctcttgctaaattgacccgtttatcattatatagtga

SEQ ID NO: 373592 - DNA, 201 bp, Homo sapiens
aatacccctcagattcagccctgtccactagccctctctatgctaaactgccattgatcccctaggactcttgcagtagcctccccattgtctccccactsccacagcccttccagttcgtcctcaacaatagcgggcatctgatgaaatgaagcacgcccctgcctgtggcttcccacggtgctcaggatgaaggtccta

SEQ ID NO: 373593 - DNA, 201 bp, Homo sapiens
atagccactaatggttttttgaatttctgtagtatcagttgtaatgtctcctttttcatgtttgatgttatttatttggatctttttttttttttttttttagtctggctaaatgtttgtctgtttaacttttcaaaaaaacaactttttggttcagtgatctttgatattctttatttcagtgtcatttatttcttctct

SEQ ID NO: 373594 - DNA, 201 bp, Homo sapiens
ccacatatttaacttgcttggatcttcaattcccattgatactcctcttaatacattgccactgccataatctgcctttattgaccatgccattccaggtragtgatttcatgtcctggggtcttgagtctctcatctgaaaacaaagggagtcaggagtcatgttctttacgtattatttggaattagacctgtgtctgg

SEQ ID NO: 373595 - DNA, 201 bp, Homo sapiens
ccaaattctctaaacattccatcttctctgctgtataattttaataagtggtacttcttagagttgttgcaagggttaaataagataatggaaataagagkgtatcagttcatcagtcaatggcaatacgtctaaccctttaagccaacccttttgctaagaacaatcagaaaacaggaccatatatctggccagctattt

SEQ ID NO: 373596 - DNA, 201 bp, Homo sapiens
attcatagacatggaatgcaactatgatagcagtttgaacagaggaaattaaaaaatgttttgagtaatgcccatgtctgcataaattttacctagtcacycgtctctacttttgtttattgatacccacattagaccagttgaaaaggacagcaggccgggtgccatggctcatgcctataatcccagcacggagggctg

SEQ ID NO: 373597 - DNA, 201 bp, Homo sapiens
aaaccatagttacctgtcttgattgcaaagatttataaacaaggcatagtcacactttatacatacatattcatagacatggaatgcaactatgatagcartttgaacagaggaaattaaaaaatgttttgagtaatgcccatgtctgcataaattttacctagtcacccgtctctacttttgtttattgatacccacatt

SEQ ID NO: 373598 - DNA, 201 bp, Homo sapiens
gcatggaaattataataataaaaacaccaatctagaagagagcagtaaaggggagataaacaaagaacacagctcaatagagagctcaaacccaaatataygaattatagtaaatatgcataaaattatttcaaaggcaaagattgttagatcagataaaaaaggataggaaaatgtctgtttgctgcttgcaagagacat

SEQ ID NO: 373599 - DNA, 201 bp, Homo sapiens
ttttaattaacgggtgaggatggccacgtactttatccaaactagggcactttgagagtgaaagagggttatgccaggacaacaggcagaagccaggaccrtccagggcaaaccaaggctgcctccactccacgcatcagttccgtcctctggggaaggcgctgtccacttcccactgccatcttccctaagaagacctgc

SEQ ID NO: 373600 - DNA, 201 bp, Homo sapiens
gggaaggccgcaccgttgtgcactgcttgtaagtgcttgacagagctcttcatttcagaacagcgaggccccacactcactctcacctcctagttctctgwcttttgtttcactagaaatggagaagaaataagtaggtctaggtgaaggggtgatcatgacactcagtgagggattggttggcttttcaggaaacaggat

SEQ ID NO: 373601 - DNA, 201 bp, Homo sapiens
gcccaagagttcgaggctgtgttgagccatgattgcaccaccgcactccagcttgggtgacaaagggccatgtttcttaaaaagaaaaaaaaaaaaaaaaraaaggagggagaaattaattccctgtctgatgaagaactggtctatgggtcccagaggatctcaaacatttccccttctgtacctttcctcgtcctgttg

SEQ ID NO: 373602 - DNA, 201 bp, Homo sapiens
taataaggtgtagtttgttcccatagattagacagactccagggcttgtattcaaccagtgtgcatctggctactaaagtgttaaaatacctgtggactgrctggtaagtagccactgcctagtgctagtggtcctggggaatgttgtgtgttcagtgctggggcctgtgccagcccctggtctcctggcctgtctatggc

SEQ ID NO: 373603 - DNA, 201 bp, Homo sapiens
ctatgtcagagtccacccagttgcagttccacctgagtccttcacagacattaaaggtaggattcacatcatggaataagcatttttctactagcgatttktttaataaagctttattggaatataatttgcatgccataacatttccccttttagatggaaataatagacactgggaactccaaaagagcagggaggaga

SEQ ID NO: 373604 - DNA, 201 bp, Homo sapiens
ggattggccaagatgtcggggatggttaataggacctcaggctcctggtcagtgtggggcactcagacccatgagtctagaaagcaaagaacaactggatycatgtttcctatgtcagagtccacccagttgcagttccacctgagtccttcacagacattaaaggtaggattcacatcatggaataagcatttttctact

SEQ ID NO: 373605 - DNA, 201 bp, Homo sapiens
ataatgcctgttttctttccactccccgattgttgcctggttctttgtagccccaagatggatatcggatggtgcagcaattccagttcctgggctggccratgtacagggacacaccagtgtctaagcgctccttcttgaagctcattcgccaggtggacaagtggcaagaggaatacaatggcggggaaggccgcaccg

SEQ ID NO: 373606 - DNA, 201 bp, Homo sapiens
gcaaagagtggccatgctgtcggcagaggcctgagtttgggctagcagaggatagaaacaaatgcacaaatgaaatattctgcctgtggctttgtgaggtrgttaacctcactaattcagggacaggtatgtagcctcgagactctggttggtacttgggcacagctgaccttgatcaaaaaaaatgtcacttccctctca

SEQ ID NO: 373607 - DNA, 201 bp, Homo sapiens
gcttattctagaggcctggttggtatttacattactttttattcttttacattttaggtggctgcctctttgatgagccgtatagcacatgtggatatagwcaatctgaaggtgatgacttcaattgggagcaagtgaacaccttgactaaaccgacttctgatccatggatgccatcaggtttgcttttagttttaagtt

SEQ ID NO: 373608 - DNA, 201 bp, Homo sapiens
cccgaatatacactctgtatagcagcagttacaagtggatttatttcattttattttatttttagagatgggatctcgctctgtcacaggctggattgcarcggtctgattataggtcactgcagcctgaaactcctgggctgaaatgatcctcctgcttcagcctctccagtagctgggactccaagcatgtgccgccgc

SEQ ID NO: 373609 - DNA, 201 bp, Homo sapiens
aattaaaagaatctgcccaggtaagaggtcccccggcctcagagccctttgttgttactgttccccagggtttagacagcttgtttccacaggtgtttgcragatgcagtgtaaagacagaccgagtgcagtcatctgatctttttcacgacaggaacgggggaggccgcagtgggacgttctgcgccatcagcatcgtat

SEQ ID NO: 373610 - DNA, 201 bp, Homo sapiens
ttttggagatgctaatgtaaatggtattacgtctttaatgtcaaattacagttgctcattgctggtatataggaaagtattgacttttgtatattaacctkgtatcctgcaaccttgctacatttgcttattagtactaggagctaattttgttggttctttcagatttttttacacagacagtcatgtcatctgtgaaca

SEQ ID NO: 373611 - DNA, 201 bp, Homo sapiens
ccaagcctggtttttcttgatgatttctaatgaaactttgtatttgttggtcactgatattttcagttaacgaaaacacatcggtattggactttgttttytttatggcttctgtgaagcactgaaggctgtcatttttgacaaaactattgtaactcttaataagttgtctaagctttaaggctgggcaaataaatctta

SEQ ID NO: 373612 - DNA, 201 bp, Homo sapiens
gggaaactgatgcgtagaggaagagactcattttcaaaatcacaatgtaatcactttgcttgtagggcttttttcttctttcttgttctccctcttcctcwctttgttcttcacacggagactttgtctccagctcattcgaaatgcggaaatagctgaaactcacaagtgaacatccttattaacttcccttcctggcag

SEQ ID NO: 373613 - DNA, 201 bp, Homo sapiens
gcgctgtgggcaagtaaggtgttcatatcagggaagttggatatgcattctctatgctatttttacatttctgcacatctaacatgggttcagagtaaaamgttttctttaaaaagagcctctatgttttatagataaataatgaaatgccaatggatttgttgttgttgttgttgttgtttgagagggagtctcgctctg

SEQ ID NO: 373614 - DNA, 201 bp, Homo sapiens
tgatacttacctatttcttgtattctggaagacatagggattaacttgagaagtgctgacctgtttcagccaggaagtgcaatcatgtgatgatcagcctrctgctctccatggcagaacacatgtcccgcgttctccaccccaactggaccctttcttgagacttaccccacgctcactgctaacacaggtatctcctgg

SEQ ID NO: 373615 - DNA, 201 bp, Homo sapiens
tgcataatgcgctgtgggcaagtaaggtgttcatatcagggaagttggatatgcattctctatgctatttttacatttctgcacatctaacatgggttcakagtaaaacgttttctttaaaaagagcctctatgttttatagataaataatgaaatgccaatggatttgttgttgttgttgttgttgtttgagagggagtc

SEQ ID NO: 373616 - DNA, 201 bp, Homo sapiens
tccgtgtaacacttaatcttgtgctcagagccacagggcacgtgagctgtcaggaccttgcctcctcctgggagctgtgctcattctcttgtcccccactktgcttgatcagaagacatctttcctcctgacccttcagaaccaagatggttacacctccctttgcagacgtggactattctgcaaattaatatcctttat

SEQ ID NO: 373617 - DNA, 201 bp, Homo sapiens
ctttggtgaggcatcaaggtctctggcccattttttaatcccattgtttgtgttcttattgttcagttttaagagttatttgaacattatggataccagtycattaccaggtatgtcttttacaaatattttctccaagtttatggcttctttcttgacagtgtctttcacagagcaggaatttttattggaaagatgtct

SEQ ID NO: 373618 - DNA, 201 bp, Homo sapiens
aagcctaagtaagacatggaattgcagtgccaacccatgtaaatggtggtgggttttcagagataaccagaaagtagtgtttcagggtatgactctccttrattttgtttttgcaggttctttcatgctggtgaatgcctctgggagacctgaggggcagagagcccacctgctcttaccccaacttaaagaaaatgacac

SEQ ID NO: 373619 - DNA, 201 bp, Homo sapiens
gacgtccaagcagcagagcatgggggagctggaagagccaatcatttcacttctttagcttttacattcaccgacttaatgtgagtgatggtgatacttamctatttcttgtattctggaagacatagggattaacttgagaagtgctgacctgtttcagccaggaagtgcaatcatgtgatgatcagcctgctgctctcc

SEQ ID NO: 373620 - DNA, 201 bp, Homo sapiens
gtaaatagcaaggagcataactgctggatcatatgggaagaatatgttaatgttgtaggaaactgacaaactgtttttcttttttttgagatggagtctcrctctgtcacccagtgacagtgcagtggtacgatcttggctcactgcaatgtccgcctcccaggctcaagccattctcctgcctcagcctcctaagtagca

SEQ ID NO: 373621 - DNA, 201 bp, Homo sapiens
ggaattgcagtgccaacccatgtaaatggtggtgggttttcagagataaccagaaagtagtgtttcagggtatgactctccttgattttgtttttgcaggytctttcatgctggtgaatgcctctgggagacctgaggggcagagagcccacctgctcttaccccaacttaaagaaaatgacacccactgcatcgattttc

SEQ ID NO: 373622 - DNA, 201 bp, Homo sapiens
aagagccagagatgactcctgcgtttccgacttactggaggatgaatggttagatggatgatgggcagttgaacaggtagacacatggaaggatggatggrccattcccttccagtattatccaggatggataatactggaagggaaccagctgtggagaggagctcaggttggcatgagatcaacagcagcttatgagtt

SEQ ID NO: 373623 - DNA, 201 bp, Homo sapiens
ctggaacattgactagcagatgttacgtacatgaatgaatgaattggtgaaagaataaacgaaattatgtgtcttatatataggagatacttggtaaaagyaagacaaaatgaataaataatgtaaatctttcttaattttccaggtgatttttgaagtgataacttctggacatcaaggctatctcgctatcgatgaggt

SEQ ID NO: 373624 - DNA, 201 bp, Homo sapiens
aggaacaataaaatatctcctttctgtttcattctattccagaatgcttggctttttgttattcttttacacaacatactaaaaccttttatgattttttwaaaattatagttaaatctttaaagcttatataagcaaaagcattatttttttcccaaggtgaacaaaattgaaaggccaaaaatttcagatagattgaag

SEQ ID NO: 373625 - DNA, 201 bp, Homo sapiens
tactctggaggctgaggtaggagaatcacttgaacccaggaggtggaggttacagtgagccgagatctcaccatggcactccagcctggtccacaagagcragactctgtctcagaaagaaaaacaacaacaacaacaacaacaacaaaagcaatgcatattgatttttgtaggttgattttgtgtcctgcaactttactg

SEQ ID NO: 373626 - DNA, 201 bp, Homo sapiens
taccattgggtgtctgactgttttgctctgacagcttatattgcttctttttgtcctccccaccccacttgatacagggcattgatgtgcgagatgctccyctgaaggaaatcaaggtgaccagctcccgacgcttcattgcttcatttaatgttgtgaataccaccaaacgagatgctggaaagtaccgctgcatgattc

SEQ ID NO: 373627 - DNA, 201 bp, Homo sapiens
ggtaatgtgcttcctccagttttgttctttttgcttaggatagctttgactattctgggtcttttggggttccatatacattttaggatttttttttgttkctgtgaacaatgtcattggtgttttgataaggtttgcattgaatctgtagattacttgggtagtgtggacattttaacaatattgattcttctaatccat

SEQ ID NO: 373628 - DNA, 201 bp, Homo sapiens
gtgatattgaacaccttttcatatgcctgtttgccacttgtatgtcttcttttgagacgtgtctattaaaatattttgccattttacttattaatatttttcctatagagttgtttgcacttcttatatattctggttattagccccttgtgagatgggtagtttgcaaatatttccgattctgcaggttgtctcttcata

SEQ ID NO: 373629 - DNA, 201 bp, Homo sapiens
gaccagtgatattgaacaccttttcatatgcctgtttgccacttgtatgtcttcttttgagacgtgtctattaaaatattttgccattttacttattaatatttttcctatagagttgtttgcacttcttatatattctggttattagccccttgtgagatgggtagtttgcaaatatttccgattctgcaggttgtctct

SEQ ID NO: 373630 - DNA, 201 bp, Homo sapiens
atgaccagtgatattgaacaccttttcatatgcctgtttgccacttgtatgtcttcttttgagacgtgtctattaaaatattttgccattttacttattaatatttttcctatagagttgtttgcacttcttatatattctggttattagccccttgtgagatgggtagtttgcaaatatttccgattctgcaggttgtct

SEQ ID NO: 373631 - DNA, 201 bp, Homo sapiens
cttgagccccataactgaaccgcagaataagaatccctgtgtttatttggaggttcttttccagcaagcttttccagggctccctatgcagccagcttcayatgtttaggaatcattgcactacaatataggctagacatactgatgcaggatttttgctccttagttcagctaaatctgggtttttgtctcatgaccagg

SEQ ID NO: 373632 - DNA, 201 bp, Homo sapiens
gattttcaggatatggcatatgtacaaactgatattgaacttcagtaatttagggagccatattgtaatctctacagcaatcacaaaaagaatagagaagrgatatgtaaagaacaagctactggcatggaaattataataataaaaacaccaatctagaagagagcagtaaaggggagataaacaaagaacacagctcaa

SEQ ID NO: 373633 - DNA, 201 bp, Homo sapiens
ttcaaagtcacatctctgggaagttcttattttctagttctagctttctaatgcagaaatattgcctcactttgatacacacctttatctttttcaaactrcttttacataagtaatcccatctaattcccagatcagtggttgaggttgacatatgcccattttacagatgggtaaactgtgattcagaaaattgaaaac

SEQ ID NO: 373634 - DNA, 201 bp, Homo sapiens
tcccattctgtaggtttttctgtttattctctggatagtttttcttgttgtgcagaagctctttaattaggtctgatttgtcaatttttgtatttgttgcmattgcttttgacatctgaggaggtgtaagatctctacagcgagaactacaaaacactgcccaaagaaatcagggatgatacaaacagtgaaaaaatattc

SEQ ID NO: 373635 - DNA, 201 bp, Homo sapiens
aacactaaaaggagttcttttggcaaaagaaaatgatcctagataaagcatgatcgtgcagggaataaggagcggtggcaaggagtattgctggaggtaawtctgaataaaaattgactgtaaaaattctaagtaataatggttttttgggtctcacatagagatttaaaatatgtgacagcaatagcttgttaactcaag

SEQ ID NO: 373636 - DNA, 201 bp, Homo sapiens
caagtttctgatcataatgaagaatggctgacttattagttgtgctatcctgggatgtcaagcattgttaaatttgaaaatgtgaactggacatagaaaartggtttatttcatttatcgtgtagctcagttgtttccttgaaaagcagaaagaaattaaagatgttgaatatttcatggttataacaaatgaaactccca

SEQ ID NO: 373637 - DNA, 201 bp, Homo sapiens
gagctctctctaagtggctgtgatgacggaggaatagggcaggagtgcttgactgcaccataaactaagaacccacagcttcttttgcctcaactctttcmgcaaccctgacctttctctagtggatgcaggaaagtttcaataaccctaagaaatgagtgccacctccctgttcactcatttagaggtagaagtggattg

SEQ ID NO: 373638 - DNA, 201 bp, Homo sapiens
cttcaccatgtctaaaatgttctctctgcttctttcttttatataaatctaaacttacctcagtcattcaacaactggttttctcaaagtccatccttgcrgtttcctgaacacacctatccagtttcatgtttctgtgtcataagaaaagtagcaatgaatggctacgggaaatgagagaaagaacagattacctaagga

SEQ ID NO: 373639 - DNA, 201 bp, Homo sapiens
aaacactaaaaggagttcttttggcaaaagaaaatgatcctagataaagcatgatcgtgcagggaataaggagcggtggcaaggagtattgctggaggtawatctgaataaaaattgactgtaaaaattctaagtaataatggttttttgggtctcacatagagatttaaaatatgtgacagcaatagcttgttaactcaa

SEQ ID NO: 373640 - DNA, 201 bp, Homo sapiens
gggcagccagggaagccttcctagaaagtgtgtgcatgtgctgggccatagaagtggaaaagatttaaacatacagagacagaaaagatgagagaagaggygtttacagggaagaaatacagttatcagcaagaaaaccacccatgtgtttggggattattgaatggttgaattaaggacaaactgagttccccattttat

SEQ ID NO: 373641 - DNA, 201 bp, Homo sapiens
ttatttatagtgccaggaaattgggtggataaaaagatgtatatttcagaagtgcagttttatctttttaaggaactcctatctgggcacagtggttcackcttgtaatcccagcgctttggcaggctgaggtgggaggatcacttgagctcaggaattcgagaccagcttggacaacatggaagagaccccagtctctac

SEQ ID NO: 373642 - DNA, 201 bp, Homo sapiens
atgcatggctgccacctaaccattaaaggagtctggtcttgggctgaatccattaaagtcccatgcttaagctttaagttgttctcaatagaaaggaaaargtccagtcatccagttctaccacttgctactgcctgtatggccgctgattgtcacttagcttttctttgcctaatttttatcagctaccacaatgggaat

SEQ ID NO: 373643 - DNA, 201 bp, Homo sapiens
ttatggataaagctatatgaacatctctatggaggttttgtgtgagcataagttttcaaatcctttgggtaaatagcaaggagcataactgctggatcatrtgggaagaatatgttaatgttgtaggaaactgacaaactgtttttcttttttttgagatggagtctcactctgtcacccagtgacagtgcagtggtacga

SEQ ID NO: 373644 - DNA, 201 bp, Homo sapiens
ttaagtttatatcctcttttcgcttttacattctgttgtttcatttgttttaaaaaaaagaacactcaagtgatttctaagcctcttagtaaaacaagctygttaaagactgttttataacatctttcacattcctctgaagtactttgtagaattaaccctttaccctaactttggaaaccacctgtgtgctcactggct

SEQ ID NO: 373645 - DNA, 201 bp, Homo sapiens
ggccagatgccctccccacaggggcctctcgcgcagactcagggagctttggtcacctgggcccaacaagtgtggagcagagagcagaacacagtagtgartgcacagctggcagccttctgctttgattaagatgcagaaagtgttgagggacccagggcttcctgagttagagagactgtgggccacaggccaaggctt

SEQ ID NO: 373646 - DNA, 201 bp, Homo sapiens
gtctgatgcaatgccacctcctaccccgggcctgcaaagtctccctggaagcccaggactctgcctgcctctcaacgatcaaaacacgatagtgtctcatsctgcaggaaactgatattcctttggaaggagccttaagaacctacccacagttgtcttcaaccagaagttccaatcttttgtcctctaaaaagcagttta

SEQ ID NO: 373647 - DNA, 201 bp, Homo sapiens
agttttctttttgttctggtgaatattgtgcagctgcggatagaataacattcctcgtatcagtctttactcagctgttcagaatgactttttactggctrttagagccaatagaagttttctgttttatatttaagaccctccaacgctccaaaatctgacattcttacctctctcatgccatgcccctaccttatcctc

SEQ ID NO: 373648 - DNA, 201 bp, Homo sapiens
cgatgtacagggacacaccagtgtctaagcgctccttcttgaagctcattcgccaggtggacaagtggcaagaggaatacaatggcggggaaggccgcacsgttgtgcactgcttgtaagtgcttgacagagctcttcatttcagaacagcgaggccccacactcactctcacctcctagttctctgacttttgtttcact

SEQ ID NO: 373649 - DNA, 201 bp, Homo sapiens
tgatagagaattaaatgagacccatcttttcggtgtgacctgcacactaccaggcacctaatatacatctggtatacactaactactgcaaaagccttcarcctagtcagttcactctctagggcatgattcttcctctgtgaaaattttccacataccttcctctctagctaatagaaaatgctttctcaatttttgtcg

SEQ ID NO: 373650 - DNA, 201 bp, Homo sapiens
agcaattccagttcctgggctggccgatgtacagggacacaccagtgtctaagcgctccttcttgaagctcattcgccaggtggacaagtggcaagaggartacaatggcggggaaggccgcaccgttgtgcactgcttgtaagtgcttgacagagctcttcatttcagaacagcgaggccccacactcactctcacctcc

SEQ ID NO: 373651 - DNA, 201 bp, Homo sapiens
cgcttcattgcttcatttaatgttgtgaataccaccaaacgagatgctggaaagtaccgctgcatgattcgcactgaaggaggtgttggaatatcaaactrtgcagagttggtagttaaaggtatttaatgtgtttttataccagaatattcttctaaagtagatatgttaggtgttgttagttcattatccctttaaagc

SEQ ID NO: 373652 - DNA, 201 bp, Homo sapiens
atccaagtcatcatgcttttttttatagacaggactgagacccagaaaggaaaggaaacccacagttaactatttactaggtagctagataggtaagtgcrtcccaggtagctagataggtaagtaggtcgatagatacatagcataatgtatgtgtttatagaaacacacacatatatgcagaatcacttaattcttata

SEQ ID NO: 373653 - DNA, 201 bp, Homo sapiens
gcctttaataatgggaagatcaagtaagtggaatcagcccactggaattcagtaaataatgcctgttttctttccactccccgattgttgcctggttcttygtagccccaagatggatatcggatggtgcagcaattccagttcctgggctggccgatgtacagggacacaccagtgtctaagcgctccttcttgaagctc

SEQ ID NO: 373654 - DNA, 201 bp, Homo sapiens
caactgcccatgggtaataagcaactgcaccaaggtctgcatgaaaacagcatggataatataccattgggtgtctgactgttttgctctgacagcttatwttgcttctttttgtcctccccaccccacttgatacagggcattgatgtgcgagatgctcctctgaaggaaatcaaggtgaccagctcccgacgcttcatt

SEQ ID NO: 373655 - DNA, 201 bp, Homo sapiens
tgcagaatcacttaattcttataacattctagaaggtagatggttttatagatgaatagatgaggaaagcttgtaagttgatagggttggactcacctatrctccttctggtggcaaatctacattctttccaccctagctccattctgctgcttggttgccttgtccaaagccacacacaggcaaggacaggactgaaac

SEQ ID NO: 373656 - DNA, 201 bp, Homo sapiens; identical to SEQ ID NO: 80858

SEQ ID NO: 373657 - DNA, 201 bp, Homo sapiens
aggactcgcctttaataatgggaagatcaagtaagtggaatcagcccactggaattcagtaaataatgcctgttttctttccactccccgattgttgcctkgttctttgtagccccaagatggatatcggatggtgcagcaattccagttcctgggctggccgatgtacagggacacaccagtgtctaagcgctccttctt

SEQ ID NO: 373658 - DNA, 201 bp, Homo sapiens
taagcaaagcctggagatggaaggagcagaggctaactaggtggaggtggaggagcaccagttcatatttctaatttcttagtttcagcttgtttggagcrtaagattgttaggcttctggactaaatgtatgatttctctgtcatatgccccttccttttcaatgttgaaatcatgtaagttgagcatacctttgatatg

SEQ ID NO: 373659 - DNA, 201 bp, Homo sapiens
tttagccgtggccagattaaagctgttttcatgtttctatcataagctaagtaacacttttttgaattctgcaattctatttcactatgactaaggattarttaactattgctatcttagcaagattcaacatcaataagcaaaaccatattatgctcacaggaagcagtgttctctatcttcacactgagctcagagaca

SEQ ID NO: 373660 - DNA, 201 bp, Homo sapiens
gatgatggaatggacactgactgagttgttgtccaggctgcccgtgtaaccggattgtttgtgggtggggggcattgtggagagaggatcagaagctcaaktgtagacatactaggtttgggatgacttttaggcccctaagtgggaatatcaggtgggcctttgaaaatataagggtgaaattcaagagagagggctgaa

SEQ ID NO: 373661 - DNA, 201 bp, Homo sapiens
ttggagcactcactctatgtcagtcactgttccaggagtttggagtatgtcagtgaaccaaaaaaacatagattcctgaccttatggagcttacattctamtaggagcagtatttagaaagtaatgatacttattaaagcacggcaaggcagattttattcaagaccatcacgataggtgcagggacccctgtcacaggac

SEQ ID NO: 373662 - DNA, 201 bp, Homo sapiens
catttgggacatcactgttcagagaaagcctctagaggaagtaggatctcccactgttctgcgggtgacatcagtcaggagagtgcgcaccagtcatggtrgggacacatgaaacaactccgtggggtctcaggtgcaccaggcagcccaagagcaggtggacgtggtgatgtggttggattttcctgtgtgtgtgtgtgt

SEQ ID NO: 373663 - DNA, 201 bp, Homo sapiens
agaatgtggcctctgcaagtcttcagacaataacccccaaatccattcactttacacaaacttgctttacttttattttttgtgtgattcttgaggagagaacacttagaatctgttggcaagacactgattttgactgtagaggtaattatgacagacaccctagcagctttattgctggaaactggccccttcgaggca

SEQ ID NO: 373664 - DNA, 201 bp, Homo sapiens
tagaatgtggcctctgcaagtcttcagacaataacccccaaatccattcactttacacaaacttgctttacttttattttttgtgtgattcttgaggagagaacacttagaatctgttggcaagacactgattttgactgtagaggtaattatgacagacaccctagcagctttattgctggaaactggccccttcgaggc

SEQ ID NO: 373665 - DNA, 201 bp, Homo sapiens
ttcttacttctatggtgttattgatatggaagaggggcaggggagtcctgggaggagaaggtgggcccctggcttgggcttcacccccaggcctgtgcctrtggacataggtgaggacaggcactcctgcttttgtacccaaatgttgcatttcccaagaccaccctggcctgccatgcccccttcctgtgcctataaaaa

SEQ ID NO: 373666 - DNA, 201 bp, Homo sapiens
atgatatcttggggcagcttttgctcccccaaaatggaagtaacaataagccctgctcacagagttgtggttgaaattaaacatcagtaaaacactctctmtgcaggtgtgaaatgcttaattcatatgaagtgccactcttagtgttactggtggagcaaatgcacaaatgaatgagagaggatttattgattctgtgag

SEQ ID NO: 373667 - DNA, 201 bp, Homo sapiens
gttaagcataataactgaaatttcatttgaaatgcatctctttgagaagaaaacgtcttttattttttctagttagttaattaatttttttttttttttttgagatggggtctcactctggcgcccaggctggagggcaggggcgtgatctcggctcactgcaacctctgcctcgtgggttcaagtgattctcttgcctca

SEQ ID NO: 373668 - DNA, 201 bp, Homo sapiens
acccctcacccaacatgattgcctagcccaccacctactgcctgttggctaactcctcttccttaccctttcctggtcttgttttcccacatgtcattacrtttctttcctgctgtgtaaatccttaattttagttggcttaggagatggatttgagactgatctcccattctcctctgccgcagtacccgaataaagcct

SEQ ID NO: 373669 - DNA, 201 bp, Homo sapiens
acattcggacccctctgctgcaggtctgctggagtttactggaggtccactttggactctgtttgcctgggtgtcaccagtggaggctgcagaacagcaaagattgctgcctcttccttcctctggaagcttcatcccagaggggcacctaccagataccagctggagctctcctatgtgaggtgtctgtcaacccctgct

SEQ ID NO: 373670 - DNA, 201 bp, Homo sapiens
ttaagggtacaatttcagattgagccaatggaaaatatattcgagtgtggttatttccctgattggctttatttatgttaaaagtgacagaagcacttgaagtcactcttcgtctttatcctcttcttctcagaggtgctgctgtttactactcagccttcaccaacacatctctgcagatgacttgaagcacatctccaa

SEQ ID NO: 373671 - DNA, 201 bp, Homo sapiens
aataaattaaccttagcctactgtactgttattttataaatttataatttttaaaaaaactttgacttttgtaataacacttagcttaaaacacaaacatacagctgtataaaaatattttctttatatacttattctataagcctttttcaatttttaaaaatttattgatttttttctttactttttaaacatttttgt

SEQ ID NO: 373672 - DNA, 201 bp, Homo sapiens
ctatcttcaaattaataaatttaattcaatactaataaaagtgacaaagttttactttgagcttgatgatttgattctaatatccacatataaaataaacstacaaaaataggaagacctgacagtagaagagtaatggggaaattgctttttccaatatgcacactctagagcctctgtaatgaaatagtgggtgctggc

SEQ ID NO: 373673 - DNA, 201 bp, Homo sapiens
gaggaaattaattaccagcagaattgcaccaaaggaaacactaaaaggagttcttttggcaaaagaaaatgatcctagataaagcatgatcgtgcagggartaaggagcggtggcaaggagtattgctggaggtaaatctgaataaaaattgactgtaaaaattctaagtaataatggttttttgggtctcacatagagat

SEQ ID NO: 373674 - DNA, 201 bp, Homo sapiens
acaaaaaaacaaaaaaaaaactgaggaaattaattaccagcagaattgcaccaaaggaaacactaaaaggagttcttttggcaaaagaaaatgatcctagrtaaagcatgatcgtgcagggaataaggagcggtggcaaggagtattgctggaggtaaatctgaataaaaattgactgtaaaaattctaagtaataatggt

SEQ ID NO: 373675 - DNA, 201 bp, Homo sapiens
tttcactgtaggaataagagtgaatctgagaagtgatttctcacagtgactgaagccaagcttctgatcatgcaagcactagaaagaagtaatctgttccyagcctgtgcctctgctagctgcaaaagtgaatccactctggatgaaagtaacattaactgtagcctcagattttctctacaagtttttatttccagtgtt

SEQ ID NO: 373676 - DNA, 201 bp, Homo sapiens
tgtcaggcaattaaatgtagaagtcactgtgatttaaaagaagaaagcagggcctctgctatgttggtatagtttttttttaatactcctaaaataattawgtctattaaatctcactttctgtttatcctttgcattgtgtagtttatagccatttattctacacagttttaaatttgagataaataggatcctctgaga

SEQ ID NO: 373677 - DNA, 201 bp, Homo sapiens
atcttgaaatcaatttagtggatctagaacctccttttagaacagaatgataaatatttgtatatctcagtagagataaatttggtttttaaagtgtacaratgatttacgtgtactgggtcaagatgtcatgactatgagtcacaataaaaaaaacaatttttaatatactgctttaaatggtagactctatttcttgtc

SEQ ID NO: 373678 - DNA, 201 bp, Homo sapiens
actcaaaaaaaagttataggaataagaagtcccaaaggaagagtaatttcaaactttaaatgcctgttaaggtttcggggctttgagaagggtttttgaaraaaaaaatcttagcagttcttccttcctgactatttccaagggtaggaattttgtggggtgctggctaataagcaccttcataagccaccatgcccagca

SEQ ID NO: 373679 - DNA, 201 bp, Homo sapiens
aattcagttctataaggtttttaattatgtctgaggcactgcattatattgtcaaagctcttgcctgaaagctggttaatgaaatagtaatgataatcttkgttcttatccagtccttttggcttaagaagcttaaatattttaaaactcttccccactgatgctctgagaaggttagcttacagtcatttataaagacaa

SEQ ID NO: 373680 - DNA, 201 bp, Homo sapiens
aaatactcactggaggttgacaaggtcgcagaccgagttggagctcagcaggaacctgaacatcgcagagccaaagcagaatgagcaaaccagaggacagyggagaagggaagatagcgtttgacccagcccagatcccattcctggagtgactgtgtgcttcctggcacagctcaccgggagcctacaggtagagatcgt

SEQ ID NO: 373681 - DNA, 201 bp, Homo sapiens
gaaaattataacctggcaccagtgttgtattagtcttctgggtttgctctcagccacacgtgcatgcttttgctttatatgtggttctattttagtgcaayagtggttttgtaaaccgggtctgtagccagccttaagttgttttgtggatgcttatcactatttctcactgttttaagatcgcactgtaggactttcatc

SEQ ID NO: 373682 - DNA, 201 bp, Homo sapiens
tggattatcactgcacatccgtagttatgctaaatgatgtggatcctgcccaggtgagacccggacttcttacagtcagaactagtgccagggggtcaagwttgtttttacactgagtttgtttgcacccgagaagtgcaggccctagtgccagatctcaagtgccagttgaagttgagaactggggatgctgaacacaac

SEQ ID NO: 373683 - DNA, 201 bp, Homo sapiens
gtcacggagggtgaacatggtgcaaacagaggtactcccgctcatcacctagcctggggccttggtccctgggctccctcctgcatctccccatttcaggrccaagggcacaaggaatccaggcaattatctgttcaagtgatctacctggcattccctgttccttccctccctccctcccttccccctttttgtttttcc

SEQ ID NO: 373684 - DNA, 201 bp, Homo sapiens
aagctggaaagactttattttaatctgtttctcatactatttagcattttttttcttagcctgtcttttttaataagcaggcagaaagcttggagacttcmaagaatgaggagttctggttgactcagttcttcaagttctgaacctcacactttgatgtcaattttttccttcttaggcagaattggaaaaaaaaaaaac

SEQ ID NO: 373685 - DNA, 201 bp, Homo sapiens
tttttgcaaccttggaatgaagggaattatccatatgaactctaaaattccatgtttatatgagagatattttcctgtttgctgtttacattttggtgacrggatccatttgaataacaaaagcatctgcactccagatccagtttaatccacatgcttccagagtccttgatgcttcctgtacactctgaataccaccaa

SEQ ID NO: 373686 - DNA, 201 bp, Homo sapiens
tcgaacccaggaggcggaggttgcagtgagcctagatcgcaccattgcactccagcctgggtgacagagtgagattccgtcttaaaaaaaaaaaaaaagtrtaatgcaaagtgataaccactgcaacagaacagagttcttgggagaaagtggaaagagaaaagaggaggactcacaacagaacactggagaatatctgtt

SEQ ID NO: 373687 - DNA, 201 bp, Homo sapiens
gtgaaaccccatctctactaaaaccacaaaaaattagctgggcgtggtggcgggtgcctgtaatcccagctacttgggaggctgaggcaggagaatcgctygaacccaggaggcggaggttgcagtgagcctagatcgcaccattgcactccagcctgggtgacagagtgagattccgtcttaaaaaaaaaaaaaaagtgt

SEQ ID NO: 373688 - DNA, 201 bp, Homo sapiens
taataaattaaccttagcctactgtactgttattttataaatttataatttttaaaaaaactttgacttttgtaataacacttagcttaaaacacaaacatacagctgtataaaaatattttctttatatacttattctataagcctttttcaatttttaaaaatttattgatttttttctttactttttaaacatttttg

SEQ ID NO: 373689 - DNA, 201 bp, Homo sapiens
attaaatttatttaaaaatattttcttcaataataaattaaccttagcctactgtactgttattttataaatttataatttttaaaaaaactttgactttygtaataacacttagcttaaaacacaaacatacagctgtataaaaatattttctttatatacttattctataagcctttttcaatttttaaaaatttattg

SEQ ID NO: 373690 - DNA, 201 bp, Homo sapiens
tctctggccctagtttcctcttttgtaagttgagaaaactcaactagatgatctctgaagaccttctcaattccaaaatgtcaggtttcctggtaggtagyagccactggtgacactactacgcatttgctattctagaagtaccgcatgtgttttgttactgtgtttccctacttaaacctctgcagcagctcttcccca

SEQ ID NO: 373691 - DNA, 201 bp, Homo sapiens
atgggcttccctttgtgggtaacccgacctttctctctggcttcccttaatattttatccttcatttcaaccttgttgaatctgatgattatgtgtcttarggttgctcttcccgaggactatctttgtggtgttctctgtatttcctgaatttcaatgttggcctgtctttctaggttggggaagttctggataatatcc

SEQ ID NO: 373692 - DNA, 201 bp, Homo sapiens
acattgtatatttgtatcacacaaagttttgttcaccaagatattaccactatttttatcgcattttttctttctttctttctttttttttttttttttttagagagacagggtcttgttctgtcacccaggctgaaattcagtggcaagattatagctcactgaaccttgaattcctggcctcaagcaatcctcctgttt

SEQ ID NO: 373693 - DNA, 201 bp, Homo sapiens
aagagcacctgtaacacatgcccactggggcttcagctgtaaacattcacccctagacactgctctggggtcggagcccctcacactgcctgtctgtatgytcccctagagattggagcagtggggcactgaagaagtgaactactccccctgtcatataccctgggagggggacaagggaaccattcccgtttcattatg

SEQ ID NO: 373694 - DNA, 201 bp, Homo sapiens
cattcctgtttttgagaagtagtccctctttatactaataaatgcctattttactaggctatcaaatgaaataatgcacataaaattatattgtatgaagycacataactgtaaatattaattctatgaaggttgagattatgaaatattttgctttggaaaaatatgaaagtatgagtagtattcatatacttagaatta

SEQ ID NO: 373695 - DNA, 201 bp, Homo sapiens
tataaaaggtaacataccatatataaatttatatatttatatataatatatatactataatagaaaacatactatatatgtgtgtgtatatacatatatakagagagagtatgatttttgttaccttttaaaatagttctttttgattctctattcttaaaagcctttttatatttttttccagtattgttttgggtccag

SEQ ID NO: 373696 - DNA, 201 bp, Homo sapiens
gggatcctcctgcttgggcctctggagtatctgggactataggtgcatgccaccatgcctggctaatttttaattttgtgtgtgtgtgtgtgtgtgtgtgkatgtgtgtgtgtgtgtagagacagggccttgctatcttgcccaggctggtcttgaactcctggactcaagcaatccttctgccttggcctcccaaagcac

SEQ ID NO: 373697 - DNA, 201 bp, Homo sapiens
tatatcaataggcaatgaacataattctaatttagagataaaaatttaaataataattgtttacttatttaaatctgtgaaactgagaaagattgaaaaayatagtagacaatcttgttgacaagaatcttgggacatagaacaacttcacacttagctgggagatttacattattcaatttttagagaaaaagtgacaaa

SEQ ID NO: 373698 - DNA, 201 bp, Homo sapiens
tattattttatttatttatttgtttttagagatggggtcttgctttgttgcctgtgttggagtgcagtggcgtgatcatagctcactgcagcatcaaactygtgggctcaagggatcctcctgcttgggcctctggagtatctgggactataggtgcatgccaccatgcctggctaatttttaattttgtgtgtgtgtgtg

SEQ ID NO: 373699 - DNA, 201 bp, Homo sapiens
cttaaagatgatagtaaacgtattagaaaaggagcaattactgttctagctttgtagaactatttatatccagactcttaatgtgtattataggtgagacmaagacataatatggattagttcattgcttattttattgtgagaaggagtctatggaactgggtcactggaatttttacaaatataattgagattatggat

SEQ ID NO: 373700 - DNA, 201 bp, Homo sapiens
aatagatgttaactctagctccaattcttaagtggggaatgaggagtaaatgtctttttctggggatgccagtactaacagtgaggcactttttaaacatrtgtctttcagtttaaatgaaatgattggaattgggctgtctgttaatatgtttctttgcagctatgatatgtatactttttggaaatactttaaaataat

SEQ ID NO: 373701 - DNA, 201 bp, Homo sapiens
tctgagatggcatctgcctcgttaattttttttggtagaatatattgcacccagaatgattttggctttcccctcacctatcaaatggattttcatgcagyggccaaactgtgatgttttgctcatttcactttgggttaaattcctatgtctatgactgcaggtaaaatgtctcaagtttcattggggattcagaatgtt

SEQ ID NO: 373702 - DNA, 201 bp, Homo sapiens
tcacaagtctagaaattaatgttgactgtcaggtgtggaccacctggggctgctgctgggataacatacatatggcctcttcatgtggtctgggattcctsacaacatgatgacttgattccaatggcaagcaccctgagggggcaggtggtcactgctgcactgccgttcatgacccagccttggatatcatgcagcagc

SEQ ID NO: 373703 - DNA, 201 bp, Homo sapiens
tcatatgcctgtttgccacttgtatgtcttcttttgagacgtgtctattaaaatattttgccattttacttattaatatttttcctatagagttgtttgcrcttcttatatattctggttattagccccttgtgagatgggtagtttgcaaatatttccgattctgcaggttgtctcttcatatggttgattatttccttt

SEQ ID NO: 373704 - DNA, 201 bp, Homo sapiens
aggctggctggctggctgggaagttgtacagttgacctaagcatttggatagaagttggaccaggtgacctctaacatctgtttttgctctgaggttggamaatggctgttttacttatcttcttgccaacaggacacacattgtggacataatgtaaaaatattcttaaattcatgttttcttgaatgagaacacttaat

SEQ ID NO: 373705 - DNA, 201 bp, Homo sapiens
ctttgatattctttatttcagtgtcatttatttcttctctgatttttgttatttattctactaaacttgggtttggtttgttcttgcttttaaattattcrtttgacatttttctttttttttttttttgttgtaggcacttatagctctaaactttcctcttaatagtgcttttgctgtatcccataggttttaaatgtt

SEQ ID NO: 373706 - DNA, 201 bp, Homo sapiens
accaaaaggtttggggatacaataaatctgttatcttggaaacaaagctggcagctgctcttggctgggctctatgtggtagctgtgcttcatggcagtgyttttgctctcactatccaatatccatccaccctcttctcagcgggcccaaacacaactattaatagaagtatggatactcggtttggatatctctttcaa

SEQ ID NO: 373707 - DNA, 201 bp, Homo sapiens
gaaggaaggagaggtagcaagtgggcagtgtgtgtgtttgtttgttcactttaatggaaggcattgaggtagtgaatcgtgttctaattggtattgaaaarcaatcttggtgaccattaagaaaaggctgagaaaggctatggaagagtatggagacacgtttaggaggttagagcaaggctctaggtgaaagatgatgtg

SEQ ID NO: 373708 - DNA, 201 bp, Homo sapiens
ttctgcagcctttggatgaaatgttctgtaaatatctaccaggttcatttggtctatggtgcagaataagttcaatgtttctttgttgattttctgtcaasaaatactgaaagtgggatgttgatatctccagctattcttgtattggggtctctatctctctttagcgctaataatattttctttatatatctgggtgct

SEQ ID NO: 373709 - DNA, 201 bp, Homo sapiens
acctgccttggcctcccaaagtgctgggattacaggtgtgagccaccccacccggcccgatttcgttttttatggctatgtagaaaatgtgtatataccayattttctttatccagcctaccattgatggacacctgggttgattccatgtctttgctgaggaagcattttaaatggcaggagtgagacagtaaccacttc

SEQ ID NO: 373710 - DNA, 201 bp, Homo sapiens
ttaaatatttgctaaaaagtatacaaattagcctgtgtttataaataatgtgttttaatagttttatttcctgcttaaatttcccataaaattgtacaagwtgacatcataagagttatgtggagccaagtaatggaataaacaggctgatcatgacagatgttgtacatcttttagttagcatctggtagtggagtgggt

SEQ ID NO: 373711 - DNA, 201 bp, Homo sapiens
gaaaggaggcactaacgaatactgagctatcagcagcaggagaaaggccttctacagactcctcaacaccagctcctccaggaaagatggttccctggctkccctggtgaacctggaggttttctctgcctgaaaacctcagttcccctctgtaaaaagttcaaccaaagagctcgatttgtcatgttcacaaattagccc

SEQ ID NO: 373712 - DNA, 201 bp, Homo sapiens
agcctattttgttttatcctcagcccaaagcgaaataaagccatagaaagtttttgggatgatttatcaatgcctgaattggcatccttcagagctgataygtgggctctttattcgtttattccctgggggtggagtataggggaaggtggcttacctgagtgaggagcctggggttggcactgcccacaggtctccctc

SEQ ID NO: 373713 - DNA, 201 bp, Homo sapiens
tctagtcgcaggggtctactgagtattttcagtgtggttattgtgactgagagattgacttctgaggtttatttcatttgtattaatttaaattgaaatgkccacatgtgactaatggcttttgtctgggacattgcagggacagcacctccttgccttcctccttatgcctgcttaaccagggcccttcatttaatacta

SEQ ID NO: 373714 - DNA, 201 bp, Homo sapiens
tgggtaagagcaagactcgtctcaaaaaaaaaaaaaaaaggtctcagggttgaaaggtaaatgaagaaaacatcccctgtttttggagagatcagctcacrgggggttctgctacttctgagtggtaaggggaagggcatactgatgtccttctctgtccactctgcatctccatggacaggtgctttgtcaccctgttcc

SEQ ID NO: 373715 - DNA, 201 bp, Homo sapiens
aataggagctacagctctgagtcacaacccagaccactgcaactctgattggccagaggaccagccttgaaaacactctttcctgataagcagctgtagaycttgagcccatttcggcagctcatagaggctgcatacagactgtctttgtgtcccatagctgaccttttgatgtaaagagccaaatgccattttcttttc

SEQ ID NO: 373716 - DNA, 201 bp, Homo sapiens
gtgggaagggagcacaggtgttcacaaggctgcctgggaaactgcatgtagttctagggactgccaagtacatggaatgggaagaggaagaggtccagacrtaggcgatgagctggtgaaggatatgaaggaagagggtgatttgagtgttgatttctggcaaagtgagaagaaaagaaaatatttaactgagtatgtgta

SEQ ID NO: 373717 - DNA, 201 bp, Homo sapiens
tcagggcctgtcggggcaaatcctctaagttcctatggccaaactccctaccaataggagctacagctctgagtcacaacccagaccactgcaactctgaytggccagaggaccagccttgaaaacactctttcctgataagcagctgtagaccttgagcccatttcggcagctcatagaggctgcatacagactgtcttt

SEQ ID NO: 373718 - DNA, 201 bp, Homo sapiens
ctttcccagggcctgttgtaagaactccctggctatcacctaatttcactcaaggccttggggctctacagtcagcagatggcaaagccagtcaggcctgyctccttccctgcagggtggagagctcccctaggcccaggtagggccaaaggtgctgtcccaggtgcatggaatttgagtcaaaaaccttagaagtttacc

SEQ ID NO: 373719 - DNA, 201 bp, Homo sapiens
gttcttaggagattcatgctgaagtgttaaaagatataagtgttaggatatctttgcagaaaaaagtgtgtgtgtatgttgagagagagagagagcgcgcrtgtgtgcagatatggtaagatgttaacaaatgttgagtctaagggaagtgtgcgtttattacttaatttttctgtacttttgaagctaagcaaaatttgc

SEQ ID NO: 373720 - DNA, 201 bp, Homo sapiens
ccccattttgccctgaagcgctctgcattaggcggccctaattgctggtgttggagccgccaggagacctttcctgtcgcagcacctggtgcagaagacayagatgctgcacttccctccagcggggtccccggtacatctgccaggacctgtcattatctaagacttccttgtcaccaccatgcctccccttttagccca

SEQ ID NO: 373721 - DNA, 201 bp, Homo sapiens
cagctgggaatgtgctgagtctcaccagaagccagcaagtctcagaggctcaccaaggcccttgacatagcacctcagcatccctgctggctattcagaamccttggactctcagtcagcaggtgatgaattctgccaggactaggtccttcacttcaaggcagtaggttcccttctggcccagggtgtgtctagcaatgt

SEQ ID NO: 373722 - DNA, 201 bp, Homo sapiens
tggctggtgagtgtgagtgaaagtgacatgtgctattttcaggcagaagctgctagaaccaggatgagagtcaaggtgttctctccccttcttcctgtcayggtgactgtggcagcattgagacgcttttagcccagatgcctgagtgaggaagatgtagaaatgccttcccttgcccctcacacattcacacacactcag

SEQ ID NO: 373723 - DNA, 201 bp, Homo sapiens
ttggttgaaaagtcaaaagaaaattgtgctgtaaaattactgcagcaaaaaataataattacacactaaagcccactgtgtctgagacatggcacaatttkcagggagccaggtttcattcagagcgacctgggtttagaaaaggaatgaaaatgctatgcagtggtggtcgctgttccttccatcaggcacctggacccg

SEQ ID NO: 373724 - DNA, 201 bp, Homo sapiens
cacgctctgtggtgtctcttcttacaaggacacgaatcctattgggtgagggccccaccttaatgacctcatttaaccatcattatctccttggaggcctrtctccaaatacagtcacacttggggtttagggcttcaccatttgagttttgggggtacacaaatattcagtccataacagcctgcttaatggggttctcg

SEQ ID NO: 373725 - DNA, 201 bp, Homo sapiens
ttgtaagttgagaaaactcaactagatgatctctgaagaccttctcaattccaaaatgtcaggtttcctggtaggtagtagccactggtgacactactacrcatttgctattctagaagtaccgcatgtgttttgttactgtgtttccctacttaaacctctgcagcagctcttccccaggctctctcagttcagttcaag

SEQ ID NO: 373726 - DNA, 201 bp, Homo sapiens
aaccatttctttctttcaatgatgtctctgccgggagccagcatgggagtgcaggtgagctggtgaggaggctactgaggcagggaggaccaccagcccgrcctagaagagggtgctgggcctctccttccacagacctttctctggaaagaggaaactagcagtactgtgtgtccacctggttgggctgccataaccaaa

SEQ ID NO: 373727 - DNA, 201 bp, Homo sapiens
cacaggtcttgggaagaaaaagagaacgtttacaccctgaataacattgcaaaaggatagtgcgctgtgtctgccggtcagcagagctctttgatgatatwagtaggagacacctaagcaaagtaaagttgaggtcagtgtagctccataacaaaagatagggaatgctctaggtctcctcaagaaaaatctacaccatgg

SEQ ID NO: 373728 - DNA, 201 bp, Homo sapiens
gcaatcatgccttactgcagcctcgaactcctgggctcaagccatccatcctccctcctcagcctctcgagtagctaggactaccagtgtgtgccaccgtrcctggctaattaaaaaaaatgtttttatagagacagggccttgctttgttgcccaggctggtatcaaactcctggctggaagggatcctcccacctcagc

SEQ ID NO: 373729 - DNA, 201 bp, Homo sapiens
atagtgcttttgggtgctagagccagagtcagcggttgagaacacaggctctgggagcagctacctgagttttagtgttggctctgcctggcactagacayaggactagagaaaaactgctaaccctctctgggcctgagttgccttatctataaaacagaggtgatgataataataatatgtgtttcattgttttgttgt

SEQ ID NO: 373730 - DNA, 201 bp, Homo sapiens
ttgagccaaggaggttgaggctgcagcaagccgtgattgtgccactgcactccagcctgggtgatggagtgagaccctgtctttaaatgatgatgatgatkattattattaatattgtcttggaggatctatgtacaaggtttctgaggtcacagatttctgaggttagcaaagttgatcaatgctttacttgacagaaaa

SEQ ID NO: 373731 - DNA, 201 bp, Homo sapiens
gaagaaattaattgtgcttgttctggaaaaaaaaaaaaaaagctatattggagtacccagagaagccactttgagactttcgtaaactctttgttatgtcwttgtttgtgagagtgttatgatggtcagtttacagaggagttgaggtagatgcattgcaggtcaagttacatctgacctttagctattcatcttctgcct

SEQ ID NO: 373732 - DNA, 201 bp, Homo sapiens
ttagctattcatcttctgccttcctattggtactttctctattttggcaaaatctatgaaaccatccctctttgaggtatttttgaatgaacacatactartttacattgtatatttgtatcacacaaagttttgttcaccaagatattaccactatttttatcgcattttttctttctttctttcttttttttttttttt

SEQ ID NO: 373733 - DNA, 201 bp, Homo sapiens
gttcctccactcagagtagcctcatctctgacccttcagtttgtttgtgtaacgttgcagtgatcttcaacattgcagttgaagatgacaatgttgaaaakagataattttgcagatcatctagatggcttaccagctagttagatgcatgtgaactcatgtgggcttttaggctgttgtctgaaaatactcaattgagca

SEQ ID NO: 373734 - DNA, 201 bp, Homo sapiens
tttagtaaaataatcctgcttcgtaaatattacaaagaaaatgttatcagtctttttgggtattgttggcggagtccttagatcagagatttttgttttcrttagggccttccttctttaatgttttaaaaacattatttcagttgtgcaggtagtttgcattttaaatcatctcacacaacttgctggaaactgaaatgg

SEQ ID NO: 373735 - DNA, 201 bp, Homo sapiens
ctctctgaagcttcttttataaggacatgaatcctctccatgaggacagagctttcagggcccaatcatctcccaagtgccccccttcttcatactatcarcttagaagttctaatatatgaattttggagagacatgcacattcaagtcatagccaatactactggcatttccatgtgaaccttaaagggaacttgtcaa

SEQ ID NO: 373736 - DNA, 201 bp, Homo sapiens
agtaggagctctataaacatttgttgaatgagtgaatgactgagtttcctgaaattcttcctggaaacactaaatctgctgccccagggtctgttagagartgctggactgccatgctatgaatgctcaatgaccagtgtgggtttccagttatccttgaaacctaggaaagaaagggcagggagatgtgaaaccactgaa

SEQ ID NO: 373737 - DNA, 201 bp, Homo sapiens
catgagacagtttcttaaaatctcaatcaatctctctctctggctttctgtacatatgtttatgtgtgtgtgtgtgtatatatatatgtatatatatatakagagagagagagagagaaacatatatatatatatgtttctcgtgtgtatatatatatatgtttctcatatgtgtgtgtgtgtgtgtgtgtatatatatat

SEQ ID NO: 373738 - DNA, 201 bp, Homo sapiens
gcatgatactgggggcaatggtaagctcttactactctaaagggagtggctgagggcaaggtcagatgcatcagagaatatagtaaataagtttcaaagtktatttgtagccatcacatgcaatacaaaataacagaaagcaagttgtcttattaatttaaggcacccagtttgacaggttggagtatcatgtaatggaca

SEQ ID NO: 373739 - DNA, 201 bp, Homo sapiens
aagagacagagttttcctaaggaagaaggaattttcaagattgtaacatagaaaccctgcctgagtttccagcctgcttaatttggacttgccagccccamcacttacatgagacagtttcttaaaatctcaatcaatctctctctctggctttctgtacatatgtttatgtgtgtgtgtgtgtatatatatatgtatata

SEQ ID NO: 373740 - DNA, 201 bp, Homo sapiens
tttagtggaagtttggtagtgtaagacaggcttcacttattttttgtgtgtgttccaaattgacctgagatgaaaggacaagatgtaatttgtaaagtacyacaatagaagtaactggagaagctatgtgcaaaaatcaggctcattattttatagtcacatagcatcattttaagttccttgaactgaaaagcagatctc

SEQ ID NO: 373741 - DNA, 201 bp, Homo sapiens
tgtttgggcatttgggtggtgtttgcacatatatggcagcctcttcctgagagactggatagattaatacccagaattactttatgtaaagttttccaggrtatgttattggagtgaatttgaactctggttctgaaaccttttatataatagttatgtccatcaaggctcttgtgcactgattcttaatcaagaaaaaat

SEQ ID NO: 373742 - DNA, 201 bp, Homo sapiens
attttcaatttgatgcgttattaccaactttatctctgtgataacaatattggatgaagtaggcattactgagtgactgacacttctcaaattcccagttyttctctgcccatcattcacttcctttaagtattacttttttccttatttcaggttttcaagtgacttctgacattttaaaaaaccggttttgatgaggcc

SEQ ID NO: 373743 - DNA, 201 bp, Homo sapiens
catgattctgagcattgccctatcctgctgtggctgagctagtattatagatgtaagataaagtcctccccagacttcccccacctctgcccaagcagagrgatggggtctctgttggagccacaagctgtggagcttgggcttagggtaggaatgatgccaatacttctttagctgcccttggggatgtctcagtgggtt

SEQ ID NO: 373744 - DNA, 201 bp, Homo sapiens
ctagactgcctttcaagtttgggttccagagtactttaacttgcttgagaggcatgtgggagttcaagttcggactgttgggactggtgattcccctcttyctagggctggtttaaatgctcccttcatgggtgggcatcagttgagtttgctctggttttgttttctgctgtaacaaggcagcactgagtttagtgcctc

SEQ ID NO: 373745 - DNA, 201 bp, Homo sapiens
gacagatgaagaacagagcaaaaccaaagaaagaaaaaaaggaaataataaacatgaatagaaatgtattaactaaacagcacagaagcaataacaaagtkcaacaaaataaaaagctggttttgtgaaaaggttaataacatggacctctggcaacagatcagaaataaatagagaaaaaccacatatagccaatagcag

SEQ ID NO: 373746 - DNA, 201 bp, Homo sapiens
ggacagggaggaaggagaagaaacattacacaagaaccgattgctaattggtcaagagggatggggagtgactgaagggccccttgggtgtgtcactattrttcagtgtccaggctgctgcaaaaggacagctattaataaacatcgttaaatgcatcttgttttctttctattgctttgttgtttataaaatgcctgagt

SEQ ID NO: 373747 - DNA, 201 bp, Homo sapiens
acctccaccccaacccagttcagtcagagtctcttgggttaggacctgagaatttaaaaaaatctccacagtaattttaataagcagctagagttgagaamcattgcctcccgtggagaacagtcactgggaagctaggattgtactgtggttacctagggtgatggactgagctaagctgaaagcagagccttgggtggg

SEQ ID NO: 373748 - DNA, 201 bp, Homo sapiens
taaaaacccaggccatcttaactgatgcccagccgcagaggtgaggtggcatggtcatgttcctagatgacatgttatgaatggagttccttctacatccragcaaaacaggattccatgattcacagagcttgcaggcaaggttagactagtcaggagattcagaacaaacaaatctttggtgtttcacagttacaactc

SEQ ID NO: 373749 - DNA, 201 bp, Homo sapiens
tttcagatttcccacagggggacaactgctgagattaaccgtgttgcctattgtgcaaacatctgtaaacgcaccaccacagcaattgcagtggctccccsccagccagaaactgcggaaatcaaatgccctgtcttgcaaacacatctgttcacaccttgagagagggaggcttttcagagctccttgctctgaaaaatc

SEQ ID NO: 373750 - DNA, 201 bp, Homo sapiens
gggtgagcaataggacctatttcataggatggtgttttctaaatttaatgcaatagtacatgtaaactacttcaaacaggacctgggaaacagtaagtgtktaagggacattaggtattattctgtttatgatggaatgccaatttgtacttatattatctttctttacttcaaaaaactcgaaaatgccactgtgagctt

SEQ ID NO: 373751 - DNA, 201 bp, Homo sapiens
gggaggggcaggtgccctgacacagtccaggcacagactgtgtgggaccgcatttgccttattaaagaatttagggcttactctgagagcagcggaaagcygtgggaggatttatgcaggaaaatgacatgtggggtttacagtcttcatagatgagccctggctgagggatagggaacggattcaggggaggccccatgt

SEQ ID NO: 373752 - DNA, 201 bp, Homo sapiens
agtagctggaattacatcagttgaggtttaagtgtcccaggatgtttgccttactgtactttacatgagagtgtgggctgttcttatcttatctctacctyagaaaatttcaagcttctggatggtggagaccatgtatgtattactcacctttacatctctactatacctcacagaatgcctggcatttaacactaggct

SEQ ID NO: 373753 - DNA, 201 bp, Homo sapiens
cctttgagacctatggcaggtacctgacttcaacaatgctagtcctgctactgcgtcgccagtcagacctaagctcttcctgactttgactgccacaggcrtcctcatacatcagttaccgaccctggccttcagacttttcttcttgtgtatccccaaaagaagtttgaagaaattatgcacctgctctaaacatttgag

SEQ ID NO: 373754 - DNA, 201 bp, Homo sapiens
gatgatctgaacagcaaaatgacaagatggcacttataatcatatgctttattatgtgtcagatgtcactagaaatgaactaaggtgttagcccggtgggrcagaatgcatttaaagtatgaaatattcccagcagggggttacagaaaaagtcccgtttgtccaatataagaagggtgaggagaaaaatggcattacctg

SEQ ID NO: 373755 - DNA, 201 bp, Homo sapiens
tggggtagatgacagggaagtgaggagtggtgatggtgggcgggcatgcctgtgccatggccgcagggagaaggggacgccccctaagaagcgtgtgtcakggaatgacatgctctggtcttgatggaggcacagccaggcttctgggaactggtggtggagtgaaaggtcccagactgcaggtactcatatgtcccactt

SEQ ID NO: 373756 - DNA, 201 bp, Homo sapiens
tgtgagagaagagctgcctggttcctctgacaagcaaagggcagtctgtgctaagcctctggggggaacctttgggcttcccagaaaagtagaagagagarcgcttcactcacgagggacagacaggtcagactcagccaccctgccccacgcagacttctgggcctttctcagctagagttgaacagggacatttgccat

SEQ ID NO: 373757 - DNA, 201 bp, Homo sapiens
tctctttataggcagaacaaaaaagaatattgaggcaattactggcataaatcagtccaaagcaaatcaaagaaattcaagcaaaaagaaggcattttgcytgaattatggagctaatgatctcagtcctccacttcagtgttcctgaggagacctggcctgagaatgtttttccagtgatctggcagattcagaagtgaa

SEQ ID NO: 373758 - DNA, 201 bp, Homo sapiens
tatgattccatgatgtctctaatccctactcacccagttcttaagaatcatgggcaaccccgcttgggtccccttccacgctgtggaagctttgttctttygctcttcactgtaaaccttgctaccactcaaaaaaaaaaaaaaaaagaatcgtgaatgataaggaaataatgtggactaaatgttttgaattacttaatg

SEQ ID NO: 373759 - DNA, 201 bp, Homo sapiens
gatgtctctaatccctactcacccagttcttaagaatcatgggcaaccccgcttgggtccccttccacgctgtggaagctttgttctttcgctcttcactrtaaaccttgctaccactcaaaaaaaaaaaaaaaaagaatcgtgaatgataaggaaataatgtggactaaatgttttgaattacttaatgtttgacatttt

SEQ ID NO: 373760 - DNA, 201 bp, Homo sapiens
tacaatcccagcaaagaatattaacattgtagttcgtttgtattagatatatcagatttttctaaaatactaaaaataggttgcagttacccctgcctgcwtctggagacccccagcgtctggagctagatgtataatgcatcgctccccccgggattagcagctttctaaaaagggtcagtgctttaacccacaggacta

SEQ ID NO: 373761 - DNA, 201 bp, Homo sapiens
ccagtgccatgttcttccatagaaatgaaagtacgagggataaatgagtgaggggaatggcagagggaaagaaaatgtgaatgtaagggtacagtagatgyacattagtgtgttgtgatctcagtgcagtagattaacgttagtgtgttaggacctcaaggagaaatttaatagctgaatcattgctgagattgacaaaga

SEQ ID NO: 373762 - DNA, 201 bp, Homo sapiens
aggagttaaaaacagaacatgccaaaaaggcacaaaccacccatagatacagtcttgaaaaaaatcactagatttatgtttttctgagagggagatttatkccggtagaaatacgttgttttgtacaatgatctcatttatcatgtgtggtatcacccacagtggcatcggcatgtggaataccttcatttggtgcctaga

SEQ ID NO: 373763 - DNA, 201 bp, Homo sapiens
cctggcaatactctttgtcctagtaattggcctcctgtgcggcagcagtgacacctatctgtaccatacctttgacgctttgggggcagttctgtgaaggygggaaaattgattgtggaataaagtgatacatttggtttggggcatgtttctatcttattaatagtatatttttcctcatagagatgtctactacacagt

SEQ ID NO: 373764 - DNA, 201 bp, Homo sapiens
aaagtaattaactgctctttcagtctggctacataaatgccttaggatgtaccataaaaggcccatttcatgtctcggttcaaggaatcgcctaatgataygaattgatgttaaatcattgtgagttaaggcagagctgtttaaagaaatgaaaaaccagcacaaagtttcagtttataaacaacaggaacaatattttag

SEQ ID NO: 373765 - DNA, 201 bp, Homo sapiens
attttgaagagattgtagtttaaagtatgggaatagatttaatatatggacagcaaatcaataaagaaaggcaaaatgaggttctactacaaaatcagtgsaactcctaaacataaggaaacggctgccctcatgtagtgaacacaagatccacattgtttgaaggacatcagcgtatgttctgtcctctccctttgaaga

SEQ ID NO: 373766 - DNA, 201 bp, Homo sapiens
tctggaaacccaacacattgtcctctcctgatctttccagttcttagtcagtatatcaggaatacagtcttcagactaaggccctgctgtttttgtctaarcatttttgtttttatttatccccttcaagcaacatttttcccactatatccaatgtaaacaatttgcatagcagtttacaaaagggttgtaaaccttatt

SEQ ID NO: 373767 - DNA, 201 bp, Homo sapiens
atacaatattttccccaccaagtactggaaacttgtgttctgctggttaaggactatttctctgttgtggtaatccctagaagctagagtctcagagttcrtatggcatagacagttggcatagagatcttccaattagtttcttccaacttttctcttgcatataacctagaagaatttttaaacaataatgtaaataat

SEQ ID NO: 373768 - DNA, 201 bp, Homo sapiens
taaatacttcacgtgatgtataccccgtttaccctgatgtgattattacacattgtatgcctgcatcagaatatctcatgtatcccataaatatatacacstatcagtatggatacctattataatgtatccacaaaaaaattaagaattaaaaaagatatatacattttaataacattatgctgaggaccatgtcttcat

SEQ ID NO: 373769 - DNA, 201 bp, Homo sapiens
ttctgctggttaaggactatttctctgttgtggtaatccctagaagctagagtctcagagttcatatggcatagacagttggcatagagatcttccaattrgtttcttccaacttttctcttgcatataacctagaagaatttttaaacaataatgtaaataatatacttccctcatatacttgtaaattgacatgcaaag

SEQ ID NO: 373770 - DNA, 201 bp, Homo sapiens
tgtttgttatattaaaactaacataaattttagtggaagtttggtagtgtaagacaggcttcacttattttttgtgtgtgttccaaattgacctgagatgraaggacaagatgtaatttgtaaagtaccacaatagaagtaactggagaagctatgtgcaaaaatcaggctcattattttatagtcacatagcatcatttt

SEQ ID NO: 373771 - DNA, 201 bp, Homo sapiens
gtacaacagttggctgtagaatttgttttgttataacttcagaagctgctactattttgctttgacatgcccttgaaaatccaagatgctttggtcaatgkgtttgttatattaaaactaacataaattttagtggaagtttggtagtgtaagacaggcttcacttattttttgtgtgtgttccaaattgacctgagatga

SEQ ID NO: 373772 - DNA, 201 bp, Homo sapiens
ataatccagtgtaaacctgacattaaggaaagatacagtggtacctcataaaatatttatgtattatgtgtaataagttgatagaaatgtaatattagatrccatttggggttattattgtactactcctgctcttttctagtaattaacagttggccactacaaacttgcacttggataaaatataaaatgtgtttttta

SEQ ID NO: 373773 - DNA, 201 bp, Homo sapiens
aatgtgttttttataattacaaaagggttcctagctttatgaaagattttaaatgattcaatatgtgaagtgatttctatgctctttttctatcatattaytccatgaaataaggcattcttgtacagggatgaactttggctgttctgttttgctgtaacagtatgatggatagcattatctctggtaggataattgggg

SEQ ID NO: 373774 - DNA, 201 bp, Homo sapiens
attctcagaagtcttgggatgtgcagatccaaggcagcctgtcgtgttcctgtgtgctgtcttagtctgactgctggtctccgcttggagtaagactcccrgaagctggaagggaatgaggctacagacctctctatttgagctttgaaagaagaaaaaatgtttccgtccagaaaagaaagctccgcaaggcagatggta

SEQ ID NO: 373775 - DNA, 201 bp, Homo sapiens
ctctactaatttagttttttttccgacgagtcttgtattggaaagtagcttaatagttaagaaactagtattaatttctttggttaggtctaggtattatrgcctctccatgagagctttaaaatgtatctaaccattcagttcctttacttcgttcagtcattcacaaacagttttgactccatcctagggtaagattaa

SEQ ID NO: 373776 - DNA, 201 bp, Homo sapiens
tggcatattttaccgtttacatctcactactgtaaaaatgaaaagctactcaatgtaaaattatagacttaagtgttatggaagcatcatattgaaaaatsacataaagctttataataaaaacttagaaaaccactgaagggacaactagttctctaaatgttgagtaactgacttcgtaacccttattatagattatca

SEQ ID NO: 373777 - DNA, 201 bp, Homo sapiens
ctacatatacatgtgccatggtggtttgctgcacctatcaacccgtcatctagattttaagccccgcgtgcattaggtatttgtcctaagctctccctccycttgccccccactcctcgaaaggccctggtgtgtgttgttcccctccctgtgtccatgtgttgtcattgttcaactcccacttatgagtttgaacatgct

SEQ ID NO: 373778 - DNA, 201 bp, Homo sapiens
tatagcttttctcttcttttactgtcaccaaattgaaattccagtggaccagtgaacacttctaaccctattatgtaattctaggcataaagagtttttcrtgtgagagttgtccttagaaaatgcgattttaacaggccagttatatttttgattttaggttaaagtattgccgagttttccccatcatagaacaattct

SEQ ID NO: 373779 - DNA, 201 bp, Homo sapiens
tgggattacaggcatgaggcactgcacccaacctaggaacttctttaagccatttctcttctccacccctaccccattttacagaagaaaaaataagaccragtgcagccctagaaccacttttccagaaatctgggcaccaggtttctttttcacccatgggcacagtttaggaccagtttttcaaggcagcaaacagtt

SEQ ID NO: 373780 - DNA, 201 bp, Homo sapiens
tatggataatatacaatgtaaataataattctttgccaatttaaatggtaaattatcagaagacacacacacacacacacacacacacacacacacacacrcgcacacccctcctatgaatgaaccattttctggctttggatttattctgtctttaatgagtcattttgaaatatgtgttttaatcaacagaaggagtgc

SEQ ID NO: 373781 - DNA, 201 bp, Homo sapiens
gctgtgtgctctgttagaaaattatgttggaaaatactctgtgtacttggcgacaagcctttctgagccaggcatgtgttgatatgacatggcggcttcamacagtcctgcaggtgctgtggtatattacttaagcttttttgattccaagtaacaaaaaccaagtgatttgtgcttaagcataaaagagacacacacaca

SEQ ID NO: 373782 - DNA, 201 bp, Homo sapiens
gctactcaggaggcggaggcaggcaaacatgaggatggccctgtattgattgtttcctttctataaaacgtctgcaggctccccaccacgttccaagcagrttttctcctttaaacctccagagatcctgcccatttgtctccacttggcccgtgtgggtatttggtgtacagctgcttgtcacaggaacactgaattctg

SEQ ID NO: 373783 - DNA, 201 bp, Homo sapiens
tgactccataaaagtcactgtcgtaagtattccagctacccagggccaagtttatacagaccctgcctgcattttaccaaccatctgtggttttacaagaragaatgaacaattgcaattagcagcttatccagaaacttccttttaaacaataatttctcttcactagattaatttcaaaagatagttgccaattagcca

SEQ ID NO: 373784 - DNA, 201 bp, Homo sapiens
tgcgtgcctgcagtcccagctactcaggaggcggaggcaggcaaacatgaggatggccctgtattgattgtttcctttctataaaacgtctgcaggctccycaccacgttccaagcaggttttctcctttaaacctccagagatcctgcccatttgtctccacttggcccgtgtgggtatttggtgtacagctgcttgtca

SEQ ID NO: 373785 - DNA, 201 bp, Homo sapiens
caacaaagcaagactctgtctctacaaaaaaattttaaaaattagttgggcgtgatggtgcgtgcctgcagtcccagctactcaggaggcggaggcaggcmaacatgaggatggccctgtattgattgtttcctttctataaaacgtctgcaggctccccaccacgttccaagcaggttttctcctttaaacctccagaga

SEQ ID NO: 373786 - DNA, 201 bp, Homo sapiens
ccagtggagtattgttcagccataaaaaagaatgagatcctgtcatttgcaacaatatggatggaactggaggtcattatggtaagtgaaataagccaggmacaaaaagacaaacttaacatgctctcacttatttgtaggagctaaaaattaaaacagttgaattcatggaaatagagagtaggacgatggttaccagag

SEQ ID NO: 373787 - DNA, 201 bp, Homo sapiens
taaaacctcgtcctcattctccaagcccacaggtgatctgattcttctagtacaccaaggcaagaaccctgggatacagaaagccctctgtccttgcagtwaggcagggctctaatggagctgactaacacaagctgcctatggacaggggcttcagctgtaaacattcatgcctagacactgctgtggagtcagaacccc

SEQ ID NO: 373788 - DNA, 201 bp, Homo sapiens
actaaccagctgtggtggcacacacctgtaatcccagctactcaggaggctggggctggagaatcacttgaacctgggaggcggaggctgcagtgagccaygatggtgccactgcactgcagcctcggtgacagagcaagattctgtctaaaaacgaaaatttaaatgttgccgtattcttgtgctgattcttctgtaaac

SEQ ID NO: 373789 - DNA, 201 bp, Homo sapiens
agaatctagagaaatatcactgtgaaacaaggaaaagacattcttgttgccgaatgtgataatgtgttctagatgcctatgtaaagtagccctttttttaytcataagacaaatacttagaattatgatggaatatggtagtttcctcttatccacaagagatacgttccaagtcccctagtggatgcctgaaaccaccga

SEQ ID NO: 373790 - DNA, 201 bp, Homo sapiens
cagagcaagactccatctcaaaaaaaaaaaaaaagaaaagaaaatgtaaatgttggccgggcgtggtggctcatgcctataatcccagcactttgggaggycgaggctggcagatcacttgaggtcaggagttcgagaccagcccggccaacatggtgaaactccatttctagtagaaatacaaaaactaaccagctgtgg

SEQ ID NO: 373791 - DNA, 201 bp, Homo sapiens
cctcttatccacaagagatacgttccaagtcccctagtggatgcctgaaaccaccgaggcaagtaccgaatcctatatatactatgtttttttcctatgcrtatatacctatgatgatgtttaatttataaattgggcacagaaagagttgaacaacaacaataataaaatagaacaattataataatttgccagtatcac

SEQ ID NO: 373792 - DNA, 201 bp, Homo sapiens
tctacttccttccttcgtcaaatattattttacatttatatttattgacatcaccttgcccctgatgtgtacttttaaactatactttacctctctctgaygctcaatacttcttgtcccccatcaagtttcacaggaggtgtgtgtatatccagagctattgaagcaaactctaaactatctcatccacttcagaatgcc

SEQ ID NO: 373793 - DNA, 201 bp, Homo sapiens
tgctgagtcttccagtcttcatctttctcccgtgctggaagcttcctgtcctcgaacatcgaactccaagttctttggcttttgcactcttgaacttaaaycagtgatttgccaggggcccttgggtcggcttccctgcttttgaggttttgggacttggactggcttccttgctcctcagcttgcagatggcctattgtg

SEQ ID NO: 373794 - DNA, 201 bp, Homo sapiens
caccagtcatggtggggacacatgaaacaactccgtggggtctcaggtgcaccaggcagcccaagagcaggtggacgtggtgatgtggttggattttcctrtgtgtgtgtgtgtgtgttttttcctcagtagcattttctttatttgtaagaagagatcttttagcattttataaaattacttttattgctcgttttttcc

SEQ ID NO: 373795 - DNA, 201 bp, Homo sapiens
tgagggatggaggataggtatataaaaggatgtgagggaggagaagacacaggtttggaaggtggataattgggccaaaatgactcttaatttacaaggartagaggttggctgatccctgtgatgccatgggctggcagctcattatgttatccctgacatacaagccccgaggctcccatcccctagaagtaagcacca

SEQ ID NO: 373796 - DNA, 201 bp, Homo sapiens
aaaaggatgtgagggaggagaagacacaggtttggaaggtggataattgggccaaaatgactcttaatttacaaggaatagaggttggctgatccctgtgrtgccatgggctggcagctcattatgttatccctgacatacaagccccgaggctcccatcccctagaagtaagcaccaccctaagcccctcagaccaagcg

SEQ ID NO: 373797 - DNA, 201 bp, Homo sapiens
tatataggtaaactgcatgtcatgagggtttggtgtacagattattttgtcacccagataataagcataatacccgataggtagttttttaatcctctccytcctcccaccctctaccctcaggtaggtcccagtgtctgttgctgcctcctttgtgcccatgtgttctcagtgtttaactctcactaacaagtgagaaca

SEQ ID NO: 373798 - DNA, 201 bp, Homo sapiens
tgctcatcataaatgaagatgaaaatagtctaccttgtagggagctatttatttattttttaacttttaggttcaggggtacatgtgcaggtttgttatayaggtaaactgcatgtcatgagggtttggtgtacagattattttgtcacccagataataagcataatacccgataggtagttttttaatcctctccttcct

SEQ ID NO: 373799 - DNA, 201 bp, Homo sapiens
gatcgtttccccagaaagaaaatttcatttaaggtggttcatggactacccccaccccccaattttactcatgaattatagtaattctatggacctcaggwtatgaactttactttggtcagaaacattaaaagctatttggggataagacagaaaccatagacttaattaatctactttttaaaattatactttaagttc

SEQ ID NO: 373800 - DNA, 201 bp, Homo sapiens
tggtagggattatctttattatttaaaatgtggtatttgatacctgctaagttccgtatttttcgttttaaacatttttaaattgacaaaaattacatatrtatggtataaaacatgctttgaaatgtgtgtaccttgtggaatggctacgttaagcaaaatgatatacatcacctctcatacatcatttttttgtagtga

SEQ ID NO: 373801 - DNA, 201 bp, Homo sapiens
gccactaatatatgatgacccaatattaacttcatcatgtctgactgaccagacattagtgcaacagtaacattcaagatttatgatttagcaaaccaggrgctcaaaggagaggaagtcatgtccactactgcatgtctctgtatgtagaggcagggcagagtgaagatttcaaaagcaggctcaagtgatgggcagaag

SEQ ID NO: 373802 - DNA, 201 bp, Homo sapiens
aactcattttagcattaacccaaagtccacagtccaaagtctcatttgagacaaggcagtttccttttgcctatgagcctgtaaaatcaaaagaaagttakttacttccaagacgccatggagtacaggcattggataaatgctttcattccaaatgggagaaattggccaaaacaaagggaatgcaggccctatgcaagt

SEQ ID NO: 373803 - DNA, 201 bp, Homo sapiens
aacccaaagtccacagtccaaagtctcatttgagacaaggcagtttccttttgcctatgagcctgtaaaatcaaaagaaagttatttacttccaagacgcmatggagtacaggcattggataaatgctttcattccaaatgggagaaattggccaaaacaaagggaatgcaggccctatgcaagtctgaaacccagctgtc

SEQ ID NO: 373804 - DNA, 201 bp, Homo sapiens
tgagaaacggcccaagcaaaggccttgttgtggaatttgtgcctggcgattttgaagaaaagcaagcaggcaatcattggcatggtgtatgggggcctgcrgagttccatgatatggggagaggtcatgggccaggtcaggtccacagttgtaaggactttggcttttactgtgagtgagatgggcagtcgttagaggtat

SEQ ID NO: 373805 - DNA, 201 bp, Homo sapiens
agtgctgggattacagatgtgagccactgcacctggccatatttattttttattagggattttcctcagttttcttgtgggggcagggtctctggttttctactcatatttaaaagtgggcattattttattttatttttttcatcaaattttattttaagttctggggtacctgtgcaggatgtgcaggtttgttacata

SEQ ID NO: 373806 - DNA, 201 bp, Homo sapiens
ccatttctgaaaaaaattaaggtaacaaataaaatacaatatacattttcaaggaaataattgagatacatcaatagtatttgcagataattttttttacyctggaaatacttaaatataactaattaataccataaatatgagccctctatagtacttatgtgtcaatttgtgttttcattgaatcctggacacagccca

SEQ ID NO: 373807 - DNA, 201 bp, Homo sapiens
tttggcgcacccgtcacccaggcagtgtacacggtacccagtgtgtagtcttttctcccttacccccttctccccctttcccctgagtcctcaaagtccaytgtatcattcttatgcctttgtgccctcttagcttagctcccatttatgagtgacaacatacgaagcacatccctttttaaaatatggatttggggccag

SEQ ID NO: 373808 - DNA, 201 bp, Homo sapiens
tttttaaaggacatatattttcaaaaaacgacaatgcactttttatttcttcaaaagttattttgggggtaaatctgctatgttccaggctctaatctaarggccagggacacagcagtgatcagtgcaggaaaattctgcccttagggtgctattagcacatcctttcttttttttttttaatttttagttttttatttc

SEQ ID NO: 373809 - DNA, 201 bp, Homo sapiens
tgctaaaaggaacagttatttaggtaaatactttttaaaggacatatattttcaaaaaacgacaatgcactttttatttcttcaaaagttattttgggggwaaatctgctatgttccaggctctaatctaaaggccagggacacagcagtgatcagtgcaggaaaattctgcccttagggtgctattagcacatcctttct

SEQ ID NO: 373810 - DNA, 201 bp, Homo sapiens
tccccagttcttgttatctttgctttagtcacattgatgagatttccaaccttttagctcaccaaccttgcttctgcctcagggcctttgccctttctgtscatctgcctgaagctctccccagttctgcagacagctaccatttccatattcaggtcttcagtcaaattgtccctggttgctaatgagttcttatttgat

SEQ ID NO: 373811 - DNA, 201 bp, Homo sapiens
acaactgaaaccattttagcctagagtaacatagggtaaccagattttgtgtgtgtgtagtgtgtgtgtgtgaatgtgcagacccacacactcaaaatacrcatcatatttttaaagatctctcagactgtgaagagaatggacttaaaaatgttcatggaggaggtagagtgggtggcagtggactggttaatagactat

SEQ ID NO: 373812 - DNA, 201 bp, Homo sapiens
tgtagctcagttgtttccttgaaaagcagaaagaaattaaagatgttgaatatttcatggttataacaaatgaaactcccatgaaataaaagagttcacaytgttactttattttccaataatgaaagtaccatttgttcatcatggaaaataccgaaatttatcaaacaaaataaaagtaactcccatcatattatccaa

SEQ ID NO: 373813 - DNA, 201 bp, Homo sapiens
aagcatttcggcatcccaactggacatgatggcaagatttttccttcctacaatctgttttcttgccatcatccagccataaatggcatggacattcaatycagttctataaggtttttaattatgtctgaggcactgcattatattgtcaaagctcttgcctgaaagctggttaatgaaatagtaatgataatctttgtt

SEQ ID NO: 373814 - DNA, 201 bp, Homo sapiens
gcactttgggaggcccagacaggcagattggttgaggccaggagttagaggctagcctggacaacatggttatatcccgtctctacagaaattaaaaaaawaaataaataagccagctgtggtgatattcacctataatcccaggtacttgggaggctgaggtgggaggattgcttgggtccaggaggtcgaggctgcagt

SEQ ID NO: 373815 - DNA, 201 bp, Homo sapiens
tagttagtcacacgtagcttatgggggacagtgcaccccagtgaggccacctcgagaatcgtctgcagcagtgactgatgttcggcgtaaggaagtgcacrttaagatatctactcggataatgtatttgtcacagcagattcttaacatgtttttatttgtgatgagacttgaaccagcctaatatttaggtttaaagtc

SEQ ID NO: 373816 - DNA, 201 bp, Homo sapiens
caacaccatttattaaatagggaatcttttccccattgcttgtttttgtcaggtttggcaaagatcagatggttctagatgtgtggtgttatttctgaggsctatgttctgttccattggcctatatatccgttttgataccagtaccatgctgttttggttactgtagccttgtagtatagtttgaagtcaggtagcatg

SEQ ID NO: 373817 - DNA, 201 bp, Homo sapiens
atgggtgcttgaaaggcccttggtgggaagggagaggaggacagggataaacttctctctggtccagtctgtcagtggtcttcactggggaatggatgtcwgaactacctttctgactttttaaaaatataaatacctgcccacctattgtctcctccctgtctggccacacccatattgagtcagaatatccagggacac

SEQ ID NO: 373818 - DNA, 201 bp, Homo sapiens
aattgaaatgatttttggataatctgccatttggactatctgcatcatttttatcttaaatgatggaaacctgaatatagatgatgataacagtgatatawttgtgacatatttatatggttcaaagcacttctgttgagaggaataaacaaaacaacatacataaatgttagagacatttttgtgcacaatattttcagg

SEQ ID NO: 373819 - DNA, 201 bp, Homo sapiens
tagcaagacccaaccatattctgcccacaagaaactgacctcacctataaagacatatagattgaaagtgaagagatgggaaaaaataatttatgcaaaargaaaccaaaagtcttcagtagttactatacttagacaaactagaactttaagtcaaaaaacataaaaagagacaagatcagtacataattataaagggat

SEQ ID NO: 373820 - DNA, 201 bp, Homo sapiens
tacataataattacatatttgctttccttagaattcaagatgacactcttcacattcaagataataatagatgcacatttgatatccaggaaaatactgtyacattctatcctagctaatcaacgtatttgtatttcagagatgggtggccaaaactagattactaacttaaagtgacatttttacatgttgggtttgtag

SEQ ID NO: 373821 - DNA, 201 bp, Homo sapiens
atattttcagtagcaacccaatctagcaactttgtgagcatcttagatttggtttagttttaaactaataaaatcttagctgcctgacccaggagagcttkttctcattagtaactgacacaaaggattttgttgattgtccacatggtttctgattcccagaaaaaaatgagcagtgaatgttataaaggcccataagtt

SEQ ID NO: 373822 - DNA, 201 bp, Homo sapiens
catgctgcctttttaaaagttgtttttttcttcaaggatagactctgtgttaatgtcagcccagttctctgtgtatacatgatggtggggcctgggggacrggggatgggtggattgcaggaagcttgtctcagtgtgccaggttttgtaggtgacagggtgtagtaatggtttcttacatgaatgattgctatagctaat

SEQ ID NO: 373823 - DNA, 201 bp, Homo sapiens
ggattttatttttccgtgcatttgtatgagcaaaatgaggagttaaaaacagaacatgccaaaaaggcacaaaccacccatagatacagtcttgaaaaaartcactagatttatgtttttctgagagggagatttatgccggtagaaatacgttgttttgtacaatgatctcatttatcatgtgtggtatcacccacagtg

SEQ ID NO: 373824 - DNA, 201 bp, Homo sapiens
cccatcctctgcccgtaaaaaccccagactcagctggtagatgggactacggctggatgttggagagaagcagcttgacttcagagggacagcttgatggygtaacttcgaagaagaatcagatcagagacggctggacttgagggaaagattacctacctgccccatcccctttttgtctccccttcctgcggagagcca

SEQ ID NO: 373825 - DNA, 201 bp, Homo sapiens
tgaatagcagggctctaggctctttctcaaatttctctgatgacaagaatcacccaggctgcttcttatgatacaaattctggggcttcatcacaggcccmacaaatctaagtctctggggatgaggcctagagagttttatagggtcatgtgttgcataatgacattttggtcaaccgcagaccacatataccactgtgg

SEQ ID NO: 373826 - DNA, 201 bp, Homo sapiens
tggaaaacatatacagggagccactggttttaagcagcaaaatgtgtcctaggaaattggttcttaaagcagatcaccatgaggaaacattctgactgccrgtgagtctgttcctggggttgctgttatctgcttggacatcatctgtaaaaacagcaggaagaaaaatgtggctgtccattacatagcccatgacaataa

SEQ ID NO: 373827 - DNA, 201 bp, Homo sapiens
ccaagagctaaggaagtagatggctatttatgttctgccaggaatctttatgttcagtgagaggaagtgcaactgcttaaaactcttaacttctctctctyactttagaaagtcaagcagaaaaaaaaatggattaatttgacagatagcacagaataagaaaaatattagaaacaagaagaggccatttttcctatagag

SEQ ID NO: 373828 - DNA, 201 bp, Homo sapiens
gcagtagttgcatgtaggcactggctctcctaagatacacaaaagccataacaatctacacatgtccagtgcaccagctcacctcccccaaacccccaacrgtggaaaacatatacagggagccactggttttaagcagcaaaatgtgtcctaggaaattggttcttaaagcagatcaccatgaggaaacattctgactgc

SEQ ID NO: 373829 - DNA, 201 bp, Homo sapiens
cctcccttcagaggagctgacgaaagcccagtgtgtgtggagtagccgtgattcagttctagggtgcatctttcattcttgaagttcaaatggcattgccrgtgcttgtggcacccttctgtgcagtagttgcatgtaggcactggctctcctaagatacacaaaagccataacaatctacacatgtccagtgcaccagct

SEQ ID NO: 373830 - DNA, 201 bp, Homo sapiens
tattgatatacaatctggtaatttttaaaacttgaatatatcttttatatgttttatataacattctcattttaagtgactttagcattatattttgacarcacccatcctcaatcataaaactgctaaagggattcagcattataatgagttaacctgtagaatgtggaattcttaatctaatagcatttccctgcataa

SEQ ID NO: 373831 - DNA, 201 bp, Homo sapiens
tccagccacatttcatgtgctcagtaactagtgtggcctttgtactggtgagcacagatatagaatgtttccatcagcacagaaagttctactggacagcrttggtatatactcttctgtgtattgctttttttgttgttcaactatgtttgtatgatttgttcaagttgtatgtaaatgtagcttgttcattttcattac

SEQ ID NO: 373832 - DNA, 201 bp, Homo sapiens
tgtgaaatggctttggaataatcaaggaaaagcacccatgctggcagagaaatacagatggtaattaaaaactacagctcaggtcttctcaaacttagcakgctgtgtgccccagaaataccaagtcctcatagtcttgaccccgtggttttcatggttagtaattgacctgttgttaaccacaaaactgattgaattcta

SEQ ID NO: 373833 - DNA, 201 bp, Homo sapiens
tagtttcatttcctgcaaaatgtgaatgtgaaatggctttggaataatcaaggaaaagcacccatgctggcagagaaatacagatggtaattaaaaactayagctcaggtcttctcaaacttagcaggctgtgtgccccagaaataccaagtcctcatagtcttgaccccgtggttttcatggttagtaattgacctgttg

SEQ ID NO: 373834 - DNA, 201 bp, Homo sapiens
cctcccagaactcctaggaaagtagccccttgtcacccctttttacagatgaagctcagcaggactccaaatttgtgcagatgcatgtgagttgtagagcmagcatcaaatcatggtcttggacaccaaagcccctgttagtttcatttcctgcaaaatgtgaatgtgaaatggctttggaataatcaaggaaaagcaccc

SEQ ID NO: 373835 - DNA, 201 bp, Homo sapiens
aggctggagtgtgccatgattgtgcctgtgaatagccacagcactccagcctgggcaacatagagttcatatctaaacaataatattaggtatttgggggraaccttaggaacctttttaaatgcagctgtatttgctgtgcatttgtaaaacgaagaagcagcatggtgaacccagtttgagcagagctgcaagttgctt

SEQ ID NO: 373836 - DNA, 201 bp, Homo sapiens
cagtttgagcagagctgcaagttgcttgttacgcacccctcattgtcacagagcattcgatttatcctctgggcagaaggagcttctgctgctgatggacrggaaatgaaacatttatcacattgctgttattatttttaagaattctttaaggaaaggaaaaataatcaatccacaataatagagaatcaactccttaaa

SEQ ID NO: 373837 - DNA, 201 bp, Homo sapiens
ttaataaggtaatatctgtgacaggctttgggcttcttagaaaagcactgaataaaaagagcagcagcaaaaccttctagatagatagtgtcatcagttcrctgcactctgcacagaaggaccacgttgagattctgttgtgcagtgtcagtcccgtaggtcactgaaggaggaaggggtggctttgggagtgactttgtc

SEQ ID NO: 373838 - DNA, 201 bp, Homo sapiens
aatgcccatcagtgatagactggatagggatgggagcaaagaaattctaggcagaaaagggatggggtttctggtgaaaaccccactctcaagttgaaaarcctgaaactgtgaggacttacatccctattttcctgcttgaatgttgccttttcctaaaacacccatggccccaccccaccccatcctctgcccgtaaaa

SEQ ID NO: 373839 - DNA, 201 bp, Homo sapiens
agaatggcaatcattaaaaagtcaggaaataacagatgctggagagaatgtggagacataggaatgcttttacactgttggtggagtgtaaattagttccmccattgtggaagacagtgtggcaattcctagaaactagaaaaccatttgacccagcaatcccatcactgggtatatacccaaaggattataaatcattct

SEQ ID NO: 373840 - DNA, 201 bp, Homo sapiens
tagatatcagataataatgttatctaccttacagggccatgaggaagatcaaatgcaaagtgtatattatatataggacacttagtatacatagtgagcartgggtgcttgaaaggcccttggtgggaagggagaggaggacagggataaacttctctctggtccagtctgtcagtggtcttcactggggaatggatgtct

SEQ ID NO: 373841 - DNA, 201 bp, Homo sapiens
aaccaagtgatttgtgcttaagcataaaagagacacacacacacacacacacacacacacacacacacacatataaattttactttaagttccaggatacrtgtgcagagtgtgcaagtatgttacctacatatacatgtgccatggtggtttgctgcacctatcaacccgtcatctagattttaagccccgcgtgcatta

SEQ ID NO: 373842 - DNA, 201 bp, Homo sapiens
gataccatctcataccagttagaatggcaatcattaaaaagtcaggaaataacagatgctggagagaatgtggagacataggaatgcttttacactgttgrtggagtgtaaattagttccaccattgtggaagacagtgtggcaattcctagaaactagaaaaccatttgacccagcaatcccatcactgggtatataccc

SEQ ID NO: 373843 - DNA, 201 bp, Homo sapiens
gtagatatcagataataatgttatctaccttacagggccatgaggaagatcaaatgcaaagtgtatattatatataggacacttagtatacatagtgagcratgggtgcttgaaaggcccttggtgggaagggagaggaggacagggataaacttctctctggtccagtctgtcagtggtcttcactggggaatggatgtc

SEQ ID NO: 373844 - DNA, 201 bp, Homo sapiens
cacacacacacacacacacacacacacatataaattttactttaagttccaggatacatgtgcagagtgtgcaagtatgttacctacatatacatgtgccrtggtggtttgctgcacctatcaacccgtcatctagattttaagccccgcgtgcattaggtatttgtcctaagctctccctcctcttgccccccactcctc

SEQ ID NO: 373845 - DNA, 201 bp, Homo sapiens
catcagtggtcattagagaaatgcaaatcaaaaccacaatgagataccatctcataccagttagaatggcaatcattaaaaagtcaggaaataacagatgstggagagaatgtggagacataggaatgcttttacactgttggtggagtgtaaattagttccaccattgtggaagacagtgtggcaattcctagaaactag

SEQ ID NO: 373846 - DNA, 201 bp, Homo sapiens
acctggacagagtgagaccctgtgtcttagacaaaaattgtctgtttcttatgtggtataaaagcaatagcttttatctgcacatttctcaagataggcarctttaaagattgctggattcaaatcccagaactaggtatgtggctatgggccagtggcttgccctgtatgtgctgctgtttccttgtgtgtaaggtagat

SEQ ID NO: 373847 - DNA, 201 bp, Homo sapiens
gtgtttgctgaggttgctggcttccatcttcacactgcaaaggacatgatctcattcttttttatggctgcagagtattccatggtgtatttgtaccacaytttctttatccagtctattttggtggagatgggatctcactgtgttgcctaggctggtcttgaactcctaggctcaagcaatcctcctgtctcagcctct

SEQ ID NO: 373848 - DNA, 201 bp, Homo sapiens
tgcccctctgggacaaagcttccagaggaagaaacaggcagctatctttactgttccgtagcctctgctggtacccaggcaaaacagggtctggagcggayctccagcaaactccagcagacctgcagcagaggggcctgattgttagaaagaaaactaacaaaaagagaggaaaagcatcaacatcaaggaaaaggacat

SEQ ID NO: 373849 - DNA, 201 bp, Homo sapiens
atccttatcatttcatagctcctggcacagttgtgaatctgaatcttgaagggatctctgaagatcactcagacacagtcacctagacagaaaccataacrggtctccacccaccgttattaaatcatgcatatggttaggaagtgcttgccttgtaaagttagtgatggctgggcagctcctaactgcgctcctattgat

SEQ ID NO: 373850 - DNA, 201 bp, Homo sapiens
tagaggtgtttataatattctctgatggtagtttgtatttctgtgggatcaggggtgatattcgctttatcattttttattgtgtctatttgattcttctytcttctttattagtctggctagtggtctctctaacattagatgaaagaagacatcgaaatttgaagtgcaaagagaaaataagtgttaacctagaatttt

SEQ ID NO: 373851 - DNA, 201 bp, Homo sapiens
cttgaaacaagcacaacagcaatcctcagcccaaatgcagccacgggaggagcaaatccattatttgcagaaatcaattgtaattaaaattaatttccagmcttctctcagaggctaaatattaccttgataattgtgattccaatttaccttatatatgtcaccagtatgtagcagagagaaagaattggttagaggtga

SEQ ID NO: 373852 - DNA, 201 bp, Homo sapiens
cccttctgaggtgggttaccatgccctcctactccatttcctaacaacgaggtgtgactaatcagtgactggagctttggacctaccccagattcttctarccagtgagccaatcttggttgctcacattgaaggcttcacttttctaacattttgttttatagcagtgtgcttctctctgctaattgagtgactccaaca

SEQ ID NO: 373853 - DNA, 201 bp, Homo sapiens
gttagagctttttacataactataataaaaacttggaatatgtattacattaaaatgtattttgttgtacttagatgctttgataacatgcagtaatagctatcatatctgcagtattttcagtggcagaagatactggacataccttgccactatttggagtcatttcacctttcaatctttgttctgtgaaacgttcag

SEQ ID NO: 373854 - DNA, 201 bp, Homo sapiens
  misc_feature (1)...(201): n = A,T,C or G
atgtggtgtggggcctacagctctcccccttgtgccaccaactggtgtgtataggctgtccctcaatagctcttgctgtgaaatttgcagcctatttaacngctgtgcatgtgtgtgtgcatgtgttggggtggtgagtgcaggagttgggtgggaatcagaggtgagctagggtccccaatccacactccaggcaccttg

SEQ ID NO: 373855 - DNA, 201 bp, Homo sapiens
agaatccgcccacccccaactcccgggggagctttcagaaataccagtgcacaggcctgccccagcccacttcagccagaggctctgagatggagcccccrccaggtaggatagacgtgccacacggctgagaaagttggtgtaggaggatcagcgggcctctcccttccctgcagtgccatgcggcggtgttcacagctc

SEQ ID NO: 373856 - DNA, 201 bp, Homo sapiens
tgttactgagttgctgggagaaatccaggataaagggtggtaaagcagtgcatgctcttgcaccgggagaaaaagggcacaggttagtgtaggggacctgrgaacagggcagagctcaatcactgtgtgtgtgagcttcatctcagaccaggtgtaacaggaacagccccgtccaccatcacgtgccttgtaagattcaga

SEQ ID NO: 373857 - DNA, 201 bp, Homo sapiens
taaggcacagcaattagttttctcaatgctttagtaaagatattaaaaagaaataatactgggacttggagataagagaagtttggaatgataaatggggyttttgcatagttactcttaaacattaaagagaaagaattggacagtgatgactcaatgttagtaatggagttagacacattttcttgaagcaggttgtca

SEQ ID NO: 373858 - DNA, 201 bp, Homo sapiens
ggaaatcaaggaaattgcaacatctgcttattggctaatttagtctgatgttttgaactacctttcctggtttgcagatccaaatttgtcatagaatcacmaagctggaaagactttattttaatctgtttctcatactatttagcattttttttcttagcctgtcttttttaataagcaggcagaaagcttggagacttc

SEQ ID NO: 373859 - DNA, 201 bp, Homo sapiens
agtagcagaaacataagaaatgaattatttcaacagctggtacgatattagcgagagaactttgtttagaaaaatatcttgacctaaaacctgaggtcaamgattttcaagggaacaaaagtaattaaaccattccggataaaaacaaggatttgaagatgggaggagtgagaagagataggactgagctttaaggtaaaa

SEQ ID NO: 373860 - DNA, 201 bp, Homo sapiens
atggagacacctgtgcctgggcacctgcctccatggtcacccctgcggagccctgtcgctagccttcaatggacactcttgctgctttgccataattggcygaccctggaaaatcctcacttacatctgtgcctggacttcttgtctctttgccattttactggcctgggcttggggcctctgttgtgtcactctgtcacc

SEQ ID NO: 373861 - DNA, 201 bp, Homo sapiens
cgcctcggcctcccaaagtgctgggattacaggcgtgagccaccgcgcccggcctccactctatattctcactgcatctaaatgcgctttttagatgaacmagaccagttttaggaaatcaaggaaattgcaacatctgcttattggctaatttagtctgatgttttgaactacctttcctggtttgcagatccaaatttg

SEQ ID NO: 373862 - DNA, 201 bp, Homo sapiens
gcatgtttttaattcatgggcattttcaatatgaactgttgtccagaacttgcccattaaaaccatatgtgtaaaccatatgtgtaatactttctatgctkcctcccagagcccgacttagcagtggccttaatcaataaattattcattatttaagctaatatttattaaatacttactatatcagacactggagttagg

SEQ ID NO: 373863 - DNA, 201 bp, Homo sapiens
taacttacaagtttttttttttttaatagttaacattttctgtggcctgtttaagtttttttagcctatgccagggtcaccaatatactctgtgattttcygtgaacactttattgctttatttttcacatttacacttgcaatccatctggaattggtttttgtgaattgtatgaggtaggatcaagctgcctttcttcc

SEQ ID NO: 373864 - DNA, 201 bp, Homo sapiens
aggtaactgcgagctgggtgcagatcagctctttcacattgtctagctgagcctatggagacacctgtgcctgggcacctgcctccatggtcacccctgcrgagccctgtcgctagccttcaatggacactcttgctgctttgccataattggctgaccctggaaaatcctcacttacatctgtgcctggacttcttgtct

SEQ ID NO: 373865 - DNA, 201 bp, Homo sapiens
agaagagcgtatttctgccttgctagtacatcagctggctgaataacaatagcatttaccaagagagcacgacgaggaagatgaagtgcaaaaaagatcaygaatgtagtcatgacagtgtctccttcaccactgtgccctttaatattggcaataacatctcaaatgctggcaaagtcaatgacttttaatttatactct

SEQ ID NO: 373866 - DNA, 201 bp, Homo sapiens
ggctggacacagagaaagtatgagtgactgtttcaggagaggtggaagaataattacaaaggaacatgtaagctgctgcaaaataactgagtgcatacgargggaatttctgtgtactgccctccttctgttgatttcttctacattggaagaagagacttgaatctgaagccatacaaatatgtataatatattcactaa

SEQ ID NO: 373867 - DNA, 201 bp, Homo sapiens
ataacaatagcatttaccaagagagcacgacgaggaagatgaagtgcaaaaaagatcatgaatgtagtcatgacagtgtctccttcaccactgtgcccttyaatattggcaataacatctcaaatgctggcaaagtcaatgacttttaatttatactctttggtttttacttgtagagcattctaatcccactgaatccct

SEQ ID NO: 373868 - DNA, 201 bp, Homo sapiens
cgtgtttctgtgattctaacaatgtgtttaaatcttagtgcatgacatctaaatttgaattttcgtagaaacaggtttccagagtgtattttcatgttttyatatatgatactctgttgtatttatatcacagataattatttgaatcagatttatcacttttctggcatattttgaaatagtcatacatagaaatgtgga

SEQ ID NO: 373869 - DNA, 201 bp, Homo sapiens
acacacacacacacacacacacacatgcatacacttggacatgcacacacacacatccctatctccatttcagaaatgttctttgctttgttgggagcagsaagccactgtttgttctgagtgcagaccatggtctctcttgttctgaattctggtgagttgtcaccatgaatgaatgaatttcctgtggggaagacagga

SEQ ID NO: 373870 - DNA, 201 bp, Homo sapiens
acgaggaagatgaagtgcaaaaaagatcatgaatgtagtcatgacagtgtctccttcaccactgtgccctttaatattggcaataacatctcaaatgctgrcaaagtcaatgacttttaatttatactctttggtttttacttgtagagcattctaatcccactgaatccctcaggaaatgaatgtgtaggtctttcattc

SEQ ID NO: 373871 - DNA, 201 bp, Homo sapiens
acagtcgccatgagaaggagggcttgttgttatccccattttgcagatgaggaaacagaggtttagagtgtgatttactgatactgtgtaactgctcagtsgcaaagtcagggttggaacacagcttggcctcactccccatgccgctgttttctaacgtctcctgtaagtggtgcttcggctcgtaatgccagtaaaatc

SEQ ID NO: 373872 - DNA, 201 bp, Homo sapiens
tgtctccttcaccactgtgccctttaatattggcaataacatctcaaatgctggcaaagtcaatgacttttaatttatactctttggtttttacttgtagmgcattctaatcccactgaatccctcaggaaatgaatgtgtaggtctttcattctctttctcaccaacaccagggctgggccttccctatgcaatggctta

SEQ ID NO: 373873 - DNA, 201 bp, Homo sapiens
gtagtgcggtcttggctcactgcaacctctgccacccgggttcaagtgattctcctgcctcagcctcccaagtagttgggattacaggtacccaccaccaygcctggctaatttttgtatttttagtagagacagagtttcaccaggttgtccaggctggtcttgaacccctgaccttaggcgatccacacacctcggcct

SEQ ID NO: 373874 - DNA, 201 bp, Homo sapiens
ttaatattggcaataacatctcaaatgctggcaaagtcaatgacttttaatttatactctttggtttttacttgtagagcattctaatcccactgaatccstcaggaaatgaatgtgtaggtctttcattctctttctcaccaacaccagggctgggccttccctatgcaatggcttactgcctgtatatcctacatggag

SEQ ID NO: 373875 - DNA, 201 bp, Homo sapiens
cttttgaacatactgcctttgaatttgattaggtgtagacagtcaatagtaggaaacgtaggaaactcccttcttccttccttccttttttttttttttcracagagtctcgctctgttgcccaggctggactgcggtagtgcggtcttggctcactgcaacctctgccacccgggttcaagtgattctcctgcctcagcc

SEQ ID NO: 373876 - DNA, 201 bp, Homo sapiens
tggaaagtgatttgaaagcctaggccctgaaactggtttctcaacatgacttcaagggagtgtccaatagttcttccctcatcatggtccgtcagtgtgasaatttgctcaaaaccatgcataaggaatactatgtcaaagtgactgtgttagtggcatttcttagtgcgtgttccgatagtaatagcctgtggaccttgg

SEQ ID NO: 373877 - DNA, 201 bp, Homo sapiens
gaagtaaaaataacttcagtctattatagggtcttaaaaatcaattaaaaaatgaatactataatataaaactgggcaaaggattataacaggcaatttgkgaaaacagagataaaaatacttattaaacatattttaaaagtcagtaccagctctaagcacagatgtaactatacatatgtactatacatacactgtatg

SEQ ID NO: 373878 - DNA, 201 bp, Homo sapiens
tagaactcaggaagataaaacctctccatgaatgatcatagccaggatttctttccagagagggctgagagtgtggagggaaactgatggagctctctgcmtcatgcagtacatcctggagacttgcagggcgtgggaagtccccttgcttccagtgaaggcattgtttctagcttcagtgtttatgcaagttctaatctc

SEQ ID NO: 373879 - DNA, 201 bp, Homo sapiens
gatgtaacttgtccacagtctcacagtcagtatgtggcagaataggattggaaaccagaccattcgatcccaaagacctaccttcctaccgtttaataatrccctcctgttccagaaatatgcaaaagccaatgacaagacataaacaggaacatatggtaaattggtaaccagtaacatatgcctaatatttgaaaactt

SEQ ID NO: 373880 - DNA, 201 bp, Homo sapiens
caaagattaacgggtgacattggaggggtactacttgatgaacactccacatgcaggatcttattcttcttaccatccttatgaaggtaagagctgttctyatccactgttacatagggctcatttgatgtaacttgtccacagtctcacagtcagtatgtggcagaataggattggaaaccagaccattcgatcccaaag

SEQ ID NO: 373881 - DNA, 201 bp, Homo sapiens
tccctcggcccaccccatgtctctttgaggtggcttttggattttctcctcaccaaggaaagatgttgatctcctcatacttaggaaatactccacaaatrcttttaaaattccaatgacatctacgctagggttacagttaagccctatggcctcctgctcattttttaatcaacttgatctcaggcctgaaagtaacca

SEQ ID NO: 373882 - DNA, 201 bp, Homo sapiens
ttttaatgaaattgctgaagaaacatggtgagaattaaaggggaaggagataaaagattagagatgaaggaaaaaacaagaccaagaagatgtggaaactrtgagtgatgacttccgaactttaaagtatttttagtgcttctgaatttatgtccttcaaactgtgtaccaacttgcttttttgagcatgcagacattaca

SEQ ID NO: 373883 - DNA, 201 bp, Homo sapiens
ctgtaatcccagcactttgggaggccgagacgggtggatcatgaggtcaggcgatcgagaccatcctggctaacatggtgaaaccccgtctctacttaaartacaaaaaattagccgggcgtggtggaggacgcctgtagtcccagctactcgggaggctgaggcaggagaatggcgtgaacccaggaggcagaggttgca

SEQ ID NO: 373884 - DNA, 201 bp, Homo sapiens
catgaagggcacatgaaagctctgaagagtgcagaaagtctcactgtggtcactggatgaaattatgacctccagtttctcagaaaactaaaagtgtatcyaccattcgatccagcagtcccactactgggtatgtaaccaaaggaaaataaatcattatatcaaaaagacacctgcatgcatgcgcttgtcactgcactg

SEQ ID NO: 373885 - DNA, 201 bp, Homo sapiens
ccttcatgaagggcacatgaaagctctgaagagtgcagaaagtctcactgtggtcactggatgaaattatgacctccagtttctcagaaaactaaaagtgkatctaccattcgatccagcagtcccactactgggtatgtaaccaaaggaaaataaatcattatatcaaaaagacacctgcatgcatgcgcttgtcactgc

SEQ ID NO: 373886 - DNA, 201 bp, Homo sapiens
aaagctactagaattctcccacaattgagatgtcagttcacacccacagagggcttctggtggtgacagttggtggaatgagagccaggatcctacagcarcagcccttcatgaagggcacatgaaagctctgaagagtgcagaaagtctcactgtggtcactggatgaaattatgacctccagtttctcagaaaactaaa

SEQ ID NO: 373887 - DNA, 201 bp, Homo sapiens
tctgtgaggatcattcttgcacacgaagggtaacagcatgaccttgatatggtaaggccttggcattgcagaggagaacaggctgcagaaggtaatgtgcratctcataaactggactccttgtcagcattcttttgatatttcacaaatgacaaaagtcatcaagagaagattccaatggttcagatatttaacggtcac

SEQ ID NO: 373888 - DNA, 201 bp, Homo sapiens
tcatagggtttacagttttttgttatagatgtttaatcacaaaaataacagaggccacttatgctaagtatattctgtgaggatcattcttgcacacgaarggtaacagcatgaccttgatatggtaaggccttggcattgcagaggagaacaggctgcagaaggtaatgtgcgatctcataaactggactccttgtcagc

SEQ ID NO: 373889 - DNA, 201 bp, Homo sapiens
tgctttgtggggggccaaggcaggaggatagcttgaagccaaaagtcagagaccaacctgggtgccatagcgagaccctgtctctgcaaaaaaattttttwaattagctgagtgtgatggtgcatgcctgtagtcccagctactcaggagcctgaggcagaaggatcacttgagcctaggatttcaaggcttcagtgagct

SEQ ID NO: 373890 - DNA, 201 bp, Homo sapiens
cctgcaggtaatgcacttaccaacaggcctagaaactgccttcttcattactgaggattagtaatagtaattattatttcttaattataaatttaatgctyctttgtcactccccagtgtgtgtgtatacacacacacacgagaattatgtatgtaacaatgacatatttacatatgtaagaaattataaaattatctatg

SEQ ID NO: 373891 - DNA, 201 bp, Homo sapiens
ggaaaagtcttaaagcatgaacggaaatttggacagacagatgagcaggtgaggaatgggcaggtccaaggagagaatgttgtgtgccagtgccaccccaraggcggcaatacaggtgtggcctgcaggtaatgcacttaccaacaggcctagaaactgccttcttcattactgaggattagtaatagtaattattatttc

SEQ ID NO: 373892 - DNA, 201 bp, Homo sapiens
tgctggtgttggagccgccaggagacctttcctgtcgcagcacctggtgcagaagacacagatgctgcacttccctccagcggggtccccggtacatctgmcaggacctgtcattatctaagacttccttgtcaccaccatgcctccccttttagcccacgtgttctgggaagagacccttgtcggttttcctggcacctg

SEQ ID NO: 373893 - DNA, 201 bp, Homo sapiens
gtgagctgggtgagaagagagaccaggacagaagatgtcaagacctttgttgaatgaatgggcaaagataaaaaaaaagaaactgtcatctcaaacagttmaagtcaggactgcaaaagaggaccaggtgcctgtgcctggtaggaaggaggaccaagatggcttccaagaggaaaagtcttaaagcatgaacggaaattt

SEQ ID NO: 373894 - DNA, 201 bp, Homo sapiens
tgtttgtttgtccactctgtgagcaatccacagtgatcttgggagtcagaggtcaaaggcaaaggcttactgacctcccatgctgttccccctgtctttargtccttcaagggcatgggtgctaagaggagcctccctgtgtaccaggctcacatctttggacttgtgatgttggctcatgatggtcgtggtcactcagac

SEQ ID NO: 373895 - DNA, 201 bp, Homo sapiens
tgtatgtatcatgactatacactatatgtatagacactatacagtcatgtgtcactcaacaataaggatatactctgagaatgtgtctttcaccatttcayggttgtgcaaacatcgtagagtgcacagacacaaacctagatggtagagccaactacacacccagggtatatggtgtggcccattgctcctaggctacaa

SEQ ID NO: 373896 - DNA, 201 bp, Homo sapiens
cattggtttcatcactccagtctctgcctccatcttcatgtggccttcacttcatttggttttcaaatctcccttgtgtatctccagaaaggtacagattrttggatttaaggtcaacccatgtaatctaggatgatctcttcatctctagatctttacattaattacctgtgtaaagttttttttttttccgaactaggt

SEQ ID NO: 373897 - DNA, 201 bp, Homo sapiens
tgacacatgtgaagactgacaatgacagaaaatacggatttcttttctcaacagatatatcatgtaccactctaagaaatgtcctctctgatgtacctggyggcatatatatgtattctaataatgtcattgctcaaaagatttctgaagttcttatttcagagtaatctgtagagtagtatgtgacactctctgtttatt

SEQ ID NO: 373898 - DNA, 201 bp, Homo sapiens
gagcagctgtagaagtccctgagttctaggcagtgtcatctcagactgttcgggattgggctcaaagggctggaaaggtctcaggcacatcaggtgcacgsacccttggagccacagtagcaatgccctccctcggcccaccccatgtctctttgaggtggcttttggattttctcctcaccaaggaaagatgttgatctc

SEQ ID NO: 373899 - DNA, 201 bp, Homo sapiens
cgtagatctatactgtgaccctgacacatgtgaagactgacaatgacagaaaatacggatttcttttctcaacagatatatcatgtaccactctaagaaaygtcctctctgatgtacctggcggcatatatatgtattctaataatgtcattgctcaaaagatttctgaagttcttatttcagagtaatctgtagagtagt

SEQ ID NO: 373900 - DNA, 201 bp, Homo sapiens
ttgtgtcaatgcagagaagataagttaaagaagaaggagcagctgtagaagtccctgagttctaggcagtgtcatctcagactgttcgggattgggctcaragggctggaaaggtctcaggcacatcaggtgcacgcacccttggagccacagtagcaatgccctccctcggcccaccccatgtctctttgaggtggcttt

SEQ ID NO: 373901 - DNA, 201 bp, Homo sapiens
tcctcagactagcctcccacagccactatatctgcagtttgtctgcaatggggtttctgctagccagctcatctttcctaaaccaccctggccatcgtttytgattatgtattcactctaaacctatacaccccaaacaactgcaggcccataagcccagccaccacttttcttttgggtaccattgtgatcatgctatct

SEQ ID NO: 373902 - DNA, 201 bp, Homo sapiens
tacatacacaacatatttacacatgcacatttttgtttaaggctagctattcccccccacacacacacacacatttgcctgcgtgagtaaccagactagayctcttttacaattttcacattccccatatctgatcagaggttcttcccaaatgtatgcacatgacacgcacacacacacacacacacacacacatgcata

SEQ ID NO: 373903 - DNA, 201 bp, Homo sapiens
gataggtatgtaggtaattcaagtataaatgccacataaatgagatataaagtaactgggattcatggaagaaagaactgcatcctggttgacgagatttkaaaaaagtttgtatcaatcaatcaaaaactttgtgtcaatgcagagaagataagttaaagaagaaggagcagctgtagaagtccctgagttctaggcagt

SEQ ID NO: 373904 - DNA, 201 bp, Homo sapiens
tttgttttcattagccaacatgttgtccctctacgccctacctttcctatcccttagtaaccactcttgacttctgagatcaactttatgatctctcttayatgagtgagaatgtggtatttgtccttctgtgcctggcttttatcacttaacatcatgtatgtactctaggcacatccatgctgcagcaaatgacaaggt

SEQ ID NO: 373905 - DNA, 201 bp, Homo sapiens
ctcttaagtcatattcctcagtctcaggtttatcagtaataaaggtggtactttgatagccgctctgcctttctccttgaattcatcactcaggtgttccrgcgcttgggcggggctgcatggtggaattgttatggctgtgtccttgcgtatgcctgtgggttctcccagcagccctgacagtgggtggtatcatctcct

SEQ ID NO: 373906 - DNA, 201 bp, Homo sapiens
ttataatatggaaggaaagaggataggtatgtaggtaattcaagtataaatgccacataaatgagatataaagtaactgggattcatggaagaaagaactrcatcctggttgacgagattttaaaaaagtttgtatcaatcaatcaaaaactttgtgtcaatgcagagaagataagttaaagaagaaggagcagctgtaga

SEQ ID NO: 373907 - DNA, 201 bp, Homo sapiens
aagaaaccctcagccctggtgactgtgagggaggtttcagcaactaaatgcaaaatagcatactgatctagctttaagaatttcaggagttactcatttartttttattttgtgcctgtagtccaaacaggatctcagctaggaatatggcatgtcctgttcttaaggatctgattataatatggaaggaaagaggatagg

SEQ ID NO: 373908 - DNA, 201 bp, Homo sapiens
catttatcagagttcttttacatagcacagaacagtcataagatactcttacttttcaacacacatacacacacatatatcccacaaagggattcattttycttttgctattttgaaaaggctgagaaatgtatgcctccaccagcaggattggggcattctttatgtgaacctgtcccacttaaaaccagttgtcaagga

SEQ ID NO: 373909 - DNA, 201 bp, Homo sapiens
ctggattacaggcatgagccactgtgcctggtcaaaatttttttaaaaattaaaaacattctctagtcgtgccttcatggaggcatactgagcatatggcrtcatattttgtcacactctcacgtatctgctagtgtaagctacttcccagcccggtagcacttttgaaagacttacattgggctttttgtggcggaaatg

SEQ ID NO: 373910 - DNA, 201 bp, Homo sapiens
tttagcccactgacttagagataggaggaactcaaagtggctaggtggcaatcttaactgccagtttaatggaatcattgttatgtctcctggtggcagcmtccctccctctgaaactaagacctctaggccagcagaatgtaatgtcacaggaacgggaagcaaaaattttgctagtgggtcactaggggtgatggtaag

SEQ ID NO: 373911 - DNA, 201 bp, Homo sapiens
tgagtgaccgcacccagcttcctgagttgtttagaggatgttggcatgcacttcaccgtaggtccctcacacgtgcacaccttgcaagcagaggcaccgayggcctttgttctggtccagggaacagccttggaatatagagatagtgtctctctctggagcactggatgagctttctagttgtccaacataagaaagata

SEQ ID NO: 373912 - DNA, 201 bp, Homo sapiens
tgtcttcagcccagctctcgctcctgcctctgggcatgctggctcctggacaccccacatggattccctggatatctccaactcctctgctctataatgcmcctgagcgtcttactcctcccccttggccgtgcctgtcttcgcagcccaaaaaatatttttttctaccagtgtctcttacctgaatcagtacttcaagct

SEQ ID NO: 373913 - DNA, 201 bp, Homo sapiens
gtcttcagcccagctctcgctcctgcctctgggcatgctggctcctggacaccccacatggattccctggatatctccaactcctctgctctataatgccsctgagcgtcttactcctcccccttggccgtgcctgtcttcgcagcccaaaaaatatttttttctaccagtgtctcttacctgaatcagtacttcaagctg

SEQ ID NO: 373914 - DNA, 201 bp, Homo sapiens
gcctgagttgagccatcgaaggcactctgggaatggaaatgagtggttggcgcacattcccctatcatctggctttggccccctctccatcagttcccctygtttttccccactgctttcttagcttcagccttagcactttcattttcttgagatcaaggtgctcttcctgcttatgaagcaccatgaaggtagaatcac

SEQ ID NO: 373915 - DNA, 201 bp, Homo sapiens
ttacagcagccctaggaaattagcacagaatccaagtgggacagccgaggtcatgggtggatatgaaactgtagagttcaaaggagagatctggactagaraaataaaatttggagttttcaccggatgatatttcaccagaatagaaattggtacagttttgtggggaagcaatttatagcttgcaccactactcaaaca

SEQ ID NO: 373916 - DNA, 201 bp, Homo sapiens
agctacaggcgcccgccaccacatccagctaattttttgtacttttagtagagacggggtttcaccatgttagccagaatggtctcgatctcctgacctcrtcatctgcccgcctcagcctcccaaagtgctgggattacagtcgtgaaccaccgcgcctggccctgaatgttttaataagcaacaaatgactgatgttcc

SEQ ID NO: 373917 - DNA, 201 bp, Homo sapiens
gagtcttgcactgtcgcccaggctggagtgcagtcgcgccatctcggctcactgcaagctccgcttcctgggttcacaccattctcctgcctcagcctccygagtagctacaggcgcccgccaccacatccagctaattttttgtacttttagtagagacggggtttcaccatgttagccagaatggtctcgatctcctga

SEQ ID NO: 373918 - DNA, 201 bp, Homo sapiens
tgttggaagattagttccttttgctaggctatgaactagagggagggtgtgcattcatttcactaaagtaaaattttgccttttctttgttgttagacagsatcttactcccatcatcctggctggagtgttgtggcacaaacatggctcactgcagcctcgacttcccaggcccaggtgatcctcccacctcagcctccc

SEQ ID NO: 373919 - DNA, 201 bp, Homo sapiens
cattgttcctgcactcttaagtcatattcctcagtctcaggtttatcagtaataaaggtggtactttgatagccgctctgcctttctccttgaattcatcrctcaggtgttccggcgcttgggcggggctgcatggtggaattgttatggctgtgtccttgcgtatgcctgtgggttctcccagcagccctgacagtgggt

SEQ ID NO: 373920 - DNA, 201 bp, Homo sapiens
tatttctcctgcctgaaatgctctgtgcccctttccttccatctctgcctaaatgctgccttatcagagaagcccacacgccatgtaaagagcagtacccrctcccttgtcctgttgcctatgtcccctaccctgccctggtttgctgtgtgggacttatcacctatcctattagatatctgtttatttatttatcatctc

SEQ ID NO: 373921 - DNA, 201 bp, Homo sapiens
gaagattatataagcctttaatatttactgaaaaaatttacaccattagcagaaagtttgactttcatgttcttggagaaatctgatctcacagtcatttkgttaagtgaaataacttagaaacagaaaaacaaaaactacacgttttcacttacaagtgggagctaaacagtgtgtatatatggacataaaagaataata

SEQ ID NO: 373922 - DNA, 201 bp, Homo sapiens
agtgatggccaccaggactgaagtttctttctcctcttaccttgaacaagagaagcagaagggccactgtttacagggagttgatgagaccaccttccttmgaaggcccttacttctctggttgatgaatgtcatactgattgcacccaagactgagttcttggtacacgtggctgggcaaattcttggaacaggtgtctg

SEQ ID NO: 373923 - DNA, 201 bp, Homo sapiens
cactgcgaaataggtacttttaaaaaatctctattttacaaataaaaaaattttgtgaagatttaggtttaagaatttttgcatatattcggagataataraggactgaaggaagtactgatgcttgaacacaaatgtgctgaaatccaaatcttaaaatagtatcagcctaagctgcttgccacctgaaaatggttgtag

SEQ ID NO: 373924 - DNA, 201 bp, Homo sapiens
agagaatatgcagagtccccaccagcaagaaggccctcaccagatgaggccatttgacctgggcttcttagcctccattactgaaagaaataaatttcttyataaattttagtttcagatattctgttataagcaacagaaaacagactaagacatccagtcaggtcttctcctctgtgctatgggaggcagttcattgct

SEQ ID NO: 373925 - DNA, 201 bp, Homo sapiens
tgtgtgtgtgtgtgtgtgtgtgtgtgtgtgtgtatgtgtgtgtgtgtgtgtgtgtgtgtgcgcgtgcacgcgcacgcgcatggattaggtgttaggacacmcaagtctaaagatttaattgtacaaatcttactgacaaatgttttactgatttgaatgtgccagattatttaaaaactggaacaatataacagatgtttt

SEQ ID NO: 373926 - DNA, 201 bp, Homo sapiens
ttaagatagagtcgacttctaaaagttatttatatgtagtggctaccttagttttctctgataagaatgttgaatctgtttttccacttgaaaaattattycattaaagcctattcttacctttcaaggaaaacaaaactgactttgacctgaaacatgttaagagaaattttctgcttctatcacaggaattacttggct

SEQ ID NO: 373927 - DNA, 201 bp, Homo sapiens
attataaaacaacttcatttaaccaggaaacacttaattgactacaaactgggtaatgattttgaaaaatatgagactaaaagaaacacatactcgcagaytaaagcaaggagaaaaccatataacttttttctccaatcttattgaaggcttattcagtattttaaatactaagttctgcattttataacttagagtaat

SEQ ID NO: 373928 - DNA, 201 bp, Homo sapiens
gccttgaacttttccttatgatgttgtacagtctatggtttttagtttatgtgtattttgagatattcaaattttcatttacatagatatatgcattttayttattacctcgtaaatttttccaggcatactatgtaagatcaggttctagtttaaatagtgcttcaaagattgggaggcaaaattattctttcttctgtc

SEQ ID NO: 373929 - DNA, 201 bp, Homo sapiens
gactccatctcaaaaaagaaagaaaaaaaaagcaaagaaaagaaagaacatagcattttctaacatgacaatgtcagcttagtgacaggatgaatcacttsaggctacagcagaaatatgttttgaagaacaggactatctttgcacagggaaaaatgatgaagaggcaaagcaaaagatctgttcaatttacagattttt

SEQ ID NO: 373930 - DNA, 201 bp, Homo sapiens
ggacgctctgtgtgctgctatttctggatctgccattgacagcaaccagattacagtgaagcccgtgaactgacagtccagggcaagtgtgctgttgccgkgggcagtccacgatgggggcctctccatccttctgagttaggacagtcattcctcccgaggtggcttgtcctttctgatgatagattgagggagacaagc

SEQ ID NO: 373931 - DNA, 201 bp, Homo sapiens
attatgaatggtgtctttgtaagaagaggagattaggatacaggcattgtacagagagaagaccatgggaggacacagggagaacacatcagcaagccaasgagacagatcccagtagaaagtaaccctgccaatgtcttgatcttgagcttccagcctccataactgtagaaaatgtgcttattgtttaagccactcagt

SEQ ID NO: 373932 - DNA, 201 bp, Homo sapiens
gaggctgtgattcctagagtcagccagtatttcttgagttctatttattgtgcacctgggtacacaaaatgagtaagatacgaccctggaccttatggacygctagaggagaaagatgttactgcagtagagtacatgttgtgttgatttcattttctagatatctttaggttccgtccctttgtttctgtcttctctcat

SEQ ID NO: 373933 - DNA, 201 bp, Homo sapiens
gtttttgtcaaaaacatatgttcacataaaaatctgcacacatggttatagcagctttattcatttttgccaaaagttggaatcaaccaagatgtcttttmccaggtgactggataaactggtacattgagacaatggaatattactcaatgctaagaagaaatgagttttcaagcccccaaaagacattgaggaatctta

SEQ ID NO: 373934 - DNA, 201 bp, Homo sapiens
ggcagagtggggcacagacatctcgtggcgtctgcgagcagtgtctcctactgcagcagtgctaagcaacagtttacctcatgggggagagttggacccayaaaaaggaataaatacattctacctagcgacagactaatctgaaaatattgtaaatggtggaaatggccaagacggctgaacaccacaggtgagatggag

SEQ ID NO: 373935 - DNA, 201 bp, Homo sapiens
acagattccgtgtcactaagctaagcatctatgaagcattattgataatcactcagttgactattacatacaaatttcaatgtggtcatcaactcttaaayttctttatagttaaaggataggaaaactgacaaaaaatgttactttttatcacttagtagaatttcatgagtcactagtttagaactttcatttccattc

SEQ ID NO: 373936 - DNA, 201 bp, Homo sapiens
tagcactcagaaattcaaaattgcctaaagtgcgtggtgggatgtctatctgtatcataccgtgggcaaacgtctgacttgaaggcatcaaacaggcaaayggaagaaccatgaaggatgctaagttttgactgtgtctgggtagccaattgggagtgtattatgtagaaagccaaataaatgcttatttcaagcacttca

SEQ ID NO: 373937 - DNA, 201 bp, Homo sapiens
tgactacattttttaatacagttttgactttagaaccaaatgtttttcatatcccagaaataaatagaatatatgaaacaagctcaccctgagattgtatrtagatggaagcagatgaatctgactatgtagcaaattgacagtattaccaacctacagggaaaaaaagatttcaagtaacttctgaacacatatcatttt

SEQ ID NO: 373938 - DNA, 201 bp, Homo sapiens
accgtacagagcgatttgaactgttcatctctatgacccgtctttgtgtgtcttgttaatagatgtttcccagggagtatatgagttgcataaaaacataygttccttttgtgaaaagtttctctaggcaggcatatggaatagagtgtgaaaatcatgtgaccactggaggcctagtgccttcacctgaagaggcaaaat

SEQ ID NO: 373939 - DNA, 201 bp, Homo sapiens
acaaaataaaccatagcttctaaatggatttagacattaaaagccttctcaagtatgtcacttttttttcttgattaaaaatatttaactcttacaagttrtttaaatatggctaaattctgttatggctaaaatcctaattttttattttatttccaaagatttgatgctgtgactttcttatcagaatcaccattgttg

SEQ ID NO: 373940 - DNA, 201 bp, Homo sapiens
aaggaaaccccttcttttaaatataatggttcaattttaagatgaagatgagtagcatttgttgggggtctttaattacgctggtctgtggcttaccttargagctagctgcctttgatgctttcagttcttattctaatttaactatttttttcctatgccattattgtaccatgaaaggaaactccctcataaacccat

SEQ ID NO: 373941 - DNA, 201 bp, Homo sapiens
acactcagttgaatcagacaagctgagggtctctgagggaagatgaatccgcatcaggctttccccagcttaacagttcagaacccacttttccttcatcrgtgctggcagtgttgcaaagataattctcagctcttgagccctttaaaatatttagctttttaatacgtgaaaaaaagaaaataccttaaaaaagaaaaa

SEQ ID NO: 373942 - DNA, 201 bp, Homo sapiens
ctgctaaaaccaggccatagaaagcgtggcaattgctggaggcaacttctgaggagcccacttcggtgggcagagtggcttctgctgagcctatcacagarggcggcgacctctgcggatcacgcacatcagagcctcactggaagcctgtgttcctctggaagtagacgagctatccatcctgagactgaggggcgaaaa

SEQ ID NO: 373943 - DNA, 201 bp, Homo sapiens
tcctatataagcttcagtgtataattactttgtttttatttttgttttatatccagaaggtactgtttcttaatatgtcaatgctataatataatcacacyggcaatctagaaatacctacttcccaactttcagcatttaaatgggagtttaattcaacagtgtatgattttcttgtttttaaaggcttcacctatgaat

SEQ ID NO: 373944 - DNA, 201 bp, Homo sapiens
ttgatgaaagaattatcaaccaagcagtataagcacaatactgaccaagtgtggaggattattgagctcagaaatagtcatgcagtaagaggcgagggaartctatagggaaagtgcaatttgctgtatcttattaaaataaaaatatgccttgctacctgagtaagaatgcacatactttttttaaaaaaaatctttgtc

SEQ ID NO: 373945 - DNA, 201 bp, Homo sapiens
gtttgttcactttaatggaaggcattgaggtagtgaatcgtgttctaattggtattgaaaaacaatcttggtgaccattaagaaaaggctgagaaaggctrtggaagagtatggagacacgtttaggaggttagagcaaggctctaggtgaaagatgatgtgggcttgagtttgggcagaggtgttgggagcttatgagga

SEQ ID NO: 373946 - DNA, 201 bp, Homo sapiens
gtactgggtgcaggtgtggtggctgcagtcaaggttgcacatggctttctattacatatcctgggctccatcttccacatctggccactagccagcataakagctcctgaagtgtagtgccttctattttactggattttagtcattgtgtgcagcaaagacctaaagacttcatgcttatcagtgccttcctaaaacatg

SEQ ID NO: 373947 - DNA, 201 bp, Homo sapiens
tgtattctcaggtgatgcacatgctgctggtctttggaccacccttggagaactgttggtatacaggcttacctcgttttattgtgctttgctttattgcrtttcatagatatacttttttacaaattgaaggtttgtggcaatctttcatctagcaaatctattggtgctttttttccaacagcatatttggaaaatagg

SEQ ID NO: 373948 - DNA, 201 bp, Homo sapiens
atgtgtcttttgtaaatgttacttgcatacctttgttgtgattatagtccattccaggctcttcccatcttgttccagctgtgtttctgacttatctctcrtatactggaggactcgctcttcccacaggaagctgggaacctcagtatttgtgtgatttttattacctggctttgcatttcattatacccatttctctgc

SEQ ID NO: 373949 - DNA, 201 bp, Homo sapiens
atgtatgtatgggtaggcatgcacacataaacgtatcaacaaagattgcttttctcctatcttgactctgcaattagctttaagtcagtgttggaacctgycaagtttgagaagtttactttttaaagtttctaattaaactcagagggggcaggaaacatatttgtaatcagctgctgtccttctttgcctcttgatatt

SEQ ID NO: 373950 - DNA, 201 bp, Homo sapiens
ttttgtcagtctgccaggattgggtctctgccaaaacaggtcatgttggtattttattaatttataatgagaaaataagacaagcctggggaaactgtgtrcccacaacctttagccagccaggacagtcattctttctggcgagctctgtggggaacccattaaaatctggtttttcttggtgagcctggaagcagggat

SEQ ID NO: 373951 - DNA, 201 bp, Homo sapiens
ggaggcccttattctgcctaccacagtcatgatgagttggggcaatgttgctgactgacgacacacagaacctctaaaacattcttttactttccctgttygtctccattgtaaatagggattctttgtctagggtttggggtttaagcctgttaatttagtagaacctcatttttctcttctacccctggaagatttttt

SEQ ID NO: 373952 - DNA, 201 bp, Homo sapiens
actgtcatggggaaaggacggtaggggcagactctcatgcctgtctgcacctgacttgcagcaaaggaattggggctggccatcactccccacacttcacwgtttaattccagcctagggaatggaatctggggaccaaaagacatcttaaaatcaatttagtcacttgttcaatgcctgaatcacttttaatatcaccac

SEQ ID NO: 373953 - DNA, 201 bp, Homo sapiens
aagctatcctcctgcctcggcctcccaagtagcttggtctgcaggcatatgccatcacatccagctaaggtatttttgatctgtaggagaaataagtcatrtctatagataaccatatataagagcaccaaaaagtgaaatcaaaggactattgacatttaaggaaggagaatttatacccaacaacctactccatatctc

SEQ ID NO: 373954 - DNA, 201 bp, Homo sapiens
cactgttactttcataggtcctttttcataaactgatatttaagattgatcttttgtgacctgtgtaattacagtcttagcctttgaataatttatgctcwttcagcaaacactcctcatctcaatctactgtcatcctttcgcctatcataggatgaagctgacataagccttacctccctcctgcatgttacccctggg

SEQ ID NO: 373955 - DNA, 201 bp, Homo sapiens
ttattttgtctttattttagatttagggggcacatgggcaggtttgttaaatgggtatatttagtggtgctgaggttagggcttctaatgatcccatcaaycaaacagtgaacatagtccccagtaggtagtttttaaacccttgccctccttcctctctcctcccttttatattccccagtgtttattcccatctttgtg

SEQ ID NO: 373956 - DNA, 201 bp, Homo sapiens
tgttaaatgggtatatttagtggtgctgaggttagggcttctaatgatcccatcaaccaaacagtgaacatagtccccagtaggtagtttttaaacccttkccctccttcctctctcctcccttttatattccccagtgtttattcccatctttgtgccgtgtatacccaacgtttagctcccacttacaagtgagaacat

SEQ ID NO: 373957 - DNA, 201 bp, Homo sapiens
tccgtaaatgcagcatggcacagttgccctctgagagctgagacttttaacctgctggctggggaacaggggacaccatggcaggaaaatgggttaatagrtttgcagcattattttagttcattttcctgtaatttagcctgcagttaacataggggaaagttcaactcattacttcctgccagtctgttttcttattgc

SEQ ID NO: 373958 - DNA, 201 bp, Homo sapiens
aattttctgagctgggtcttcaactgttggtaacttgaattcatccatggtagaaggatttacatcatggaaatcaacaaatgctacaactcagggctccktcccaccagccaaaggccagtttaccatcacattacttgattattcaattggaaatcatgtcaggtctcaaaggacctggagagtgtgtgtgtgtgtgcg

SEQ ID NO: 373959 - DNA, 201 bp, Homo sapiens
ggtaacttgaattcatccatggtagaaggatttacatcatggaaatcaacaaatgctacaactcagggctccgtcccaccagccaaaggccagtttaccaycacattacttgattattcaattggaaatcatgtcaggtctcaaaggacctggagagtgtgtgtgtgtgtgcgtgtgtgcgtgtgtgtgcgcgtgcgcgtg

SEQ ID NO: 373960 - DNA, 201 bp, Homo sapiens
aaagcactgttcctgaataacatttcaagtcttgaccttttttttttttttttttataactttacagacttacctattccctgcaactcattcagggtatrgatgatcttgttttatggtcttgctgcaattcatagcctgttagtagctgtgtcttcaatgtactgggaaatttatctttgtacaggaaggcactgtttc

SEQ ID NO: 373961 - DNA, 201 bp, Homo sapiens
atataaagacatacccgatactgagcagtttacaaaagaaagaggtttaatggactcacagttctacgtggctggggaggcctcacaattatggcggaagstgagaaaggtggcaaagatacagataaagcactgttcctgaataacatttcaagtcttgaccttttttttttttttttttataactttacagacttacct

SEQ ID NO: 373962 - DNA, 201 bp, Homo sapiens
ttttcagcaatataaagacatacccgatactgagcagtttacaaaagaaagaggtttaatggactcacagttctacgtggctggggaggcctcacaattayggcggaaggtgagaaaggtggcaaagatacagataaagcactgttcctgaataacatttcaagtcttgaccttttttttttttttttttataactttaca

SEQ ID NO: 373963 - DNA, 201 bp, Homo sapiens
tctacaattgcttttgctgtattctcgttttcagcaatataaagacatacccgatactgagcagtttacaaaagaaagaggtttaatggactcacagttcyacgtggctggggaggcctcacaattatggcggaaggtgagaaaggtggcaaagatacagataaagcactgttcctgaataacatttcaagtcttgacctt

SEQ ID NO: 373964 - DNA, 201 bp, Homo sapiens
tgacttgaattattatgatactcatatctctcccttcacccagttaataaaagaagcaccctgcaaagccaagtgtgcaggctctaagctactcttggacrcaggctctgctcacttaaggtcaggaagcagagaggagacctgggtgcctctggctcctttggaagctcctttagcatatgaagcatctaagtaggcttg

SEQ ID NO: 373965 - DNA, 201 bp, Homo sapiens
gtgcccagcattctggaagcttatagtgcttcaaatcaaatccacacagctccccacgtgcagaattgtgcagttccccccttatgggcttgatttttttwaaatgtaagaaaagatattcagcatttgctacctaacacttagggctcgggtccctctcagttgaatgaagctctaattatgcatcttgacttattctgt

SEQ ID NO: 373966 - DNA, 201 bp, Homo sapiens
gctcccgagtagctgggactacaggcgcccgccaacacgcccggctaatttttgtatttttagtagagacgggtttcaccatgttggccaggatgggctcratcccttgaccttgtgatccactcaccttggcctcccaaagtgctgggattacaggcatgaaccactgtgcctggcctgagctgcatgttttaatcctct

SEQ ID NO: 373967 - DNA, 201 bp, Homo sapiens
ggggaggatcagggaggctgtggtgttaaactgcttctgcatttctcctgtttggcagacatctgaaggatagcctgatgtcaaacctctcagaggccagyatccaggatggattttcatgagcaaatgagagcaatagtcagtttaaacaactggtttaaccagttgtttcctctctgaaagcaaatggcttttcccaca

SEQ ID NO: 373968 - DNA, 201 bp, Homo sapiens
aacacactgacctctccaggtgtcactgtcatggggaaaggacggtaggggcagactctcatgcctgtctgcacctgacttgcagcaaaggaattggggckggccatcactccccacacttcactgtttaattccagcctagggaatggaatctggggaccaaaagacatcttaaaatcaatttagtcacttgttcaatgc

SEQ ID NO: 373969 - DNA, 201 bp, Homo sapiens
acaactgtgtcctaggctgtctctcccagtgaactctcatatggtaaagaacagtgcgatgcccatccttcatcattttttatggtccttctgtcacgctrttaagaatgtagagtgccagtgcttgacggggctgcctgtttcttattctgaaaatggggcaaaatgtggctgacaattttgctgtgtccacctgatgta

SEQ ID NO: 373970 - DNA, 201 bp, Homo sapiens
taatcttcacaccctccctaagaagttaataataggatctcatattatgcatgagaaaacaggctcggggtggaagtcatggaagtcacctgccgcatgaraagactgaggctcagggggtgtaagtcacttgctgcaacatcacaaggtagatggaaaaaaaatccatgtgcatcttactccatcacactgagaccagag

SEQ ID NO: 373971 - DNA, 201 bp, Homo sapiens
atcatgtcaggtctcaaaggacctggagagtgtgtgtgtgtgtgcgtgtgtgcgtgtgtgtgcgcgtgcgcgtgcatgctttttgggagaatgtgtatatkgggagcatttggttacagccaatgtccccagaatgaggcttccaggccagcaggttttgcaggtgctaaatatgggcacccctgctacacatagcccgca

SEQ ID NO: 373972 - DNA, 201 bp, Homo sapiens
tagaatttcttctaagggaattttccaatgcagtgatttatagataggattgatggtcacgggattatatatgacagtgaaatatttgggcactacctacrtttccaataatggtgacataaataaatgatggtgcacatttcattaagtgcggttagtcattaaatcctgtgttttcaggaaaagaattcatgacataga

SEQ ID NO: 373973 - DNA, 201 bp, Homo sapiens
actaaagtcaccatgatgtacagtaaatctcttgaaattattcttcttgtctaactgaaattttgtgtcctttgaccaacatcattccagcctccctcccyacacagcctctggtaaccacctatcttctccctgcttctatgagcttgagtttttacacattccacatatatgtgaggtcatgaggcatttgtctttctg

SEQ ID NO: 373974 - DNA, 201 bp, Homo sapiens
gtagagtactttttaaattgtttaaatgacttataacaactatatatatttatggtgtacaatataatgttttgatatatgtatgcattgtgaaactgctmaatcaagctaattatgcttattttttgtggtgagaacacttaaaatctaccctcagcaattttcaaatgtacaatgtagtgttattaactaaagtcacca

SEQ ID NO: 373975 - DNA, 201 bp, Homo sapiens
tggttcccaggagggaagccagcccaccccagcatggctcctcaccctgagcactgagtgctggggaccacccgctacctcctcaacacaggtgaccaagkccggagacccagagatcatctaagaacaaggctgttgctaacacgtggctgatgatttctttatgtacccttttatgccgggtttgaggagtaagattta

SEQ ID NO: 373976 - DNA, 201 bp, Homo sapiens
cggatcatttcctggtcgtgctacccctttacccacgtgctcattcataccctgtgatgcatgccaatggcaccactggcctgcatcctacttcgtgatarctggttcttgctcagaaatccaagagaacttaggcatcagttatcttgtaggtgatatggccagatggtttggaataagtgtgcctcccatttctaatta

SEQ ID NO: 373977 - DNA, 201 bp, Homo sapiens
aaactgtttttatgagttttactgcaagtaaaaatggattcatttattaaatcccaacatactatttctttgtaaaaacaaaacaaaatttgacaaaactrtagtccatgttatcgtgtctaaagatggcccagtgttcattccggtgtttattatgtttctgtgatgacttaggcagcacctgcctgagtaccagaattc

SEQ ID NO: 373978 - DNA, 201 bp, Homo sapiens
tcgaatgttcttcaagaaacacactcaccattcctcagcttgccagtggtgaggtccagtctctttcaccgtataattagcgggaagtgtcccctgccctmcttagccaatacccaggctgttagccatgtctctcaagggaagtctgccaagcacagaggacaatattttaccaaaggaacacagcataaataaatgttc

SEQ ID NO: 373979 - DNA, 201 bp, Homo sapiens
tgttcagcttctggtgaggcctcaggaagcttccaatcatggaggaaggcaaagcacaagcaggcgtgtcccatggcaagagcaggagcacgagagcgagygggagggtgtctcagactttgaaacaaccaaatttcatgtgaactgagtaggaactcactcaccaccaaagggatggtgttaaaccattcaaaagggatc

SEQ ID NO: 373980 - DNA, 201 bp, Homo sapiens
tttttaacctggaactttcaggatgctagcctgattttctaaattttgcctgactctagattaagtctagcttgtcgaatgttcttcaagaaacacactcrccattcctcagcttgccagtggtgaggtccagtctctttcaccgtataattagcgggaagtgtcccctgccctccttagccaatacccaggctgttagcc

SEQ ID NO: 373981 - DNA, 201 bp, Homo sapiens
gccagcccaccccagcatggctcctcaccctgagcactgagtgctggggaccacccgctacctcctcaacacaggtgaccaaggccggagacccagagatmatctaagaacaaggctgttgctaacacgtggctgatgatttctttatgtacccttttatgccgggtttgaggagtaagatttatctgagaataagtacat

SEQ ID NO: 373982 - DNA, 201 bp, Homo sapiens
ataagactacagttaaattttgtggggtttttttcttttttttttttttcctacggagtttcactcttgttgcccaagctggagtgcaatggcgccatctyggctcactacaacctctgcctcctgggttcaagcaattctcctgcctcagcctcctgagtatctaggattacaggcacatgccaccacgcccagctaatt

SEQ ID NO: 373983 - DNA, 201 bp, Homo sapiens
aaatcataactgcctaggggggccagtagagttgacctgtgtatggatgagctcctggtgcagagagtgtggtgagaaggcacccactgtccagcttcagrcaagtatattacagtgtcacaaatcttcccatctcccctgagggaagggagaaatcttgatttctttactaagtgttctaactttttggttggcaatgaa

SEQ ID NO: 373984 - DNA, 201 bp, Homo sapiens
ctcagggcacaattttcctactgattcctcatttgaatgcctggtaactccactcatttttaacctctatctattagcatagcttattaaaactggttctrtctgtgtctcttaattcctaaactcaagccctagacttcttaaaagggtattgagagagggctgcataattactactaaaattgatcattcttcacagtt

SEQ ID NO: 373985 - DNA, 201 bp, Homo sapiens
agacaagccacctagctcggtgtccctcagtttccccagctattccaagggcataataatagttcttacatcataaaatgttatgacaagaaaacaagttratacctttaaagtgctggccccagtaaatattaactctattgataatatgcattatacaccagtatacaagctgtagctgcctctctggtttcaatgctc

SEQ ID NO: 373986 - DNA, 201 bp, Homo sapiens
tgttaagttttagaggaagccataaagcaggggagcattagctgcacctttcctcctcagagacaaatgctggggtcttccgtggtgaaagtggagaccckggggacagctgccttatgcccacaccttggttccgtggcttactggctgtgtgaccttagacaagccacctagctcggtgtccctcagtttccccagcta

SEQ ID NO: 373987 - DNA, 201 bp, Homo sapiens
tattttgtgtcatttgttgattcctgagtttacttctgataactctcaatggtgaggatgctgtatcctcttgtctggtttactgaacaagagaatcttgytaagttttagaggaagccataaagcaggggagcattagctgcacctttcctcctcagagacaaatgctggggtcttccgtggtgaaagtggagaccctgg

SEQ ID NO: 373988 - DNA, 201 bp, Homo sapiens
ttttaaaacttgccacatctctaaatttcattcttaacttgtacttcttatgtgatgataaaggataagtacttctattgtttaccatcttaatctctgcrtggtctgccgctatatgcatatcaaccctgttctttatgacttctaagccatgtttttgtcctctaccttaatttctgtgcacggcctcttgaatgagta

SEQ ID NO: 373989 - DNA, 201 bp, Homo sapiens
gttgctaagtttttatttttttgttgttgggaaaatttttattttaaaatggaaatggaaatatacaggaaaagcttgtgctttccttttttttctttgcrtaaacaataataatgcaatccaggtcaaagcacaaggcagaaacttgagaaaagaacagttattacaagtacatggtcttcttttcaaatatccatgaaa

SEQ ID NO: 373990 - DNA, 201 bp, Homo sapiens
cctgggtccaggagtttaagaccagcctgggcaacatggcgaaatccagtgtctccaaaaaaaaaaaaaaacaacaaaattagcaggacatggtggcgtgygcctgtagttgcagctactcaggaggctgaggctggaagatcgcttgagcctgggaggtcgaggcttcagtgagccgtggtcatgccactgcactccagc

SEQ ID NO: 373991 - DNA, 201 bp, Homo sapiens
ctcagagacaaatgctggggtcttccgtggtgaaagtggagaccctggggacagctgccttatgcccacaccttggttccgtggcttactggctgtgtgaycttagacaagccacctagctcggtgtccctcagtttccccagctattccaagggcataataatagttcttacatcataaaatgttatgacaagaaaacaa

SEQ ID NO: 373992 - DNA, 201 bp, Homo sapiens
  misc_feature (1)...(201): n = A,T,C or G
tgtcagttagaagcaaatgctgtgaaactttgcactcattcctgtgtggactggttagcctatgtttcctctaccgcagcattctgagtcgtccacctcanatatgtgctgttggtcataaagacagactgggcccaagagacagtgtgggtgaaacaaattcattcattccttctagaaataaaatgggaagtctgtcct

SEQ ID NO: 373993 - DNA, 201 bp, Homo sapiens
  misc_feature (1)...(201): n = A,T,C or G
tgtgtttccctacttaaacctctgcagcagctcttccccaggctctctcagttcagttcaagcccagaggtgatggctgatgagtggtttatcttccagcnacatgttttcgaccttcacacaggaggccctcaattaaaagggaagccgtagggaaatggaaaaaggaatgagagagagggaaggaaaggaactgcctcg

SEQ ID NO: 373994 - DNA, 201 bp, Homo sapiens
tcccaagagctaaggaagtagatggctatttatgttctgccaggaatctttatgttcagtgagaggaagtgcaactgcttaaaactcttaacttctctctctcactttagaaagtcaagcagaaaaaaaaatggattaatttgacagatagcacagaataagaaaaatattagaaacaagaagaggccatttttcctatag

SEQ ID NO: 373995 - DNA, 201 bp, Homo sapiens
ttcctattcagccatcttgccagcaatcccagctttgcacattttaagttcaatactcctttaaaattaagtggagatgttcactgggaggttgaatatgstactgtggactagaaataataatttccatagtctgaaagtcatcaacatttctggagctgaagccataggtttggaagaggctcctcagagtttttgtag

SEQ ID NO: 373996 - DNA, 201 bp, Homo sapiens
ggaaatgcagaaatcacccaccttctgtgttgatctcgctgggagctgcagaccggagctgttcctattcagccatcttgccagcaatcccagctttgcayattttaagttcaatactcctttaaaattaagtggagatgttcactgggaggttgaatatgctactgtggactagaaataataatttccatagtctgaaag

SEQ ID NO: 373997 - DNA, 201 bp, Homo sapiens
ataaactgtgtcccttgtcctcaaataaataggttggactactagggtatttacaaaacagagtgtaggtgaagaaaaggaaatttcagtgacaaattagsaggcacttaagaaatactggacgttttcaattaatttggcaaaatgaaaagtaatagatacatttccttggttgtggctgtgatgggtagagacagtggt

SEQ ID NO: 373998 - DNA, 201 bp, Homo sapiens
acttcctggggtcagtctaatgactacagccatgttcagaatgcagggcctcatgtataaaatctcaccaggaataactttggaaagaaacatcatttacrtgttcccaaaggacacaaaaaaacagatggaaggtgatatctggcactccctctttctcagtgataactcattttagagtttgtcctcctggtcttgggg

SEQ ID NO: 373999 - DNA, 201 bp, Homo sapiens
ctgcattcacaccactcaatgtgcagtcacagaaagccagggatgctaagacaaattaagtgtgtccctgtacacagggagggggcatcaagcaaagggaygaaattccgtgataaaggtttcacagcatgctgtggaagttcatgaaagaggcacctcatctagctgtggagttgagtggaggttgaagggatttgtcaa

SEQ ID NO: 374000 - DNA, 201 bp, Homo sapiens
gaggagcatcctatttaaggagagcctaaagatgttcatttcaggcagggatagagggacagggcacaggcaggaaagcaggaacttcctgggcaaggggyctggagtcagtgacacccacccatcaggttatccgagggctgtttgtgtttacactgatgcttctgcagagtcctaaacccaaacacccgactcaaccgg

SEQ ID NO: 374001 - DNA, 201 bp, Homo sapiens
caatatgggatgaactgaagaaggagtaagaagcagagaagacccagctaaggctgaacagcacatgttctccccattttattattttatcattgttttcrgcaataggctacatcccaggaacagtagcagggaagtgaaaaggatgtgatctgccaaaggttaggcatgggggcagggtgtacacagacagtcagtgac

SEQ ID NO: 374002 - DNA, 201 bp, Homo sapiens
cttcctaaccctgccactcccctcccgttgggaaagcttcccgttcactcggggtgaaagcagcccgtgctgtgggcagcatggtcagtagctctgggcaycactgacagccttcatggccttctgggcttgtacccttggatcttctgggaaaatttgtgcagccagttcagtagtcaaaattgggcccagacctcaagc

SEQ ID NO: 374003 - DNA, 201 bp, Homo sapiens
ctaatatcatctgaaaccttcttttctttgaaacattttatgaaatgtatacacttatttttactttattatgtaagcaaagcaattttttattttccgtsccacaaattatgtgttcctttaaagatttgacattttgatgcagcaaatgttaagaaaaggtgtgagataaatgtctacaaaataaatgttttatacaga

SEQ ID NO: 374004 - DNA, 201 bp, Homo sapiens
tcctccacattcaaggtcaacctcgtactagtcaccaccgtgcaaagttctgcagctgagctgtccctgcggctcttcctaaccctgccactcccctccckttgggaaagcttcccgttcactcggggtgaaagcagcccgtgctgtgggcagcatggtcagtagctctgggcatcactgacagccttcatggccttctgg

SEQ ID NO: 374005 - DNA, 201 bp, Homo sapiens
atgatgacagattttatggggcctgtgttatatgtaggcaccgtgctagggaaggtcatcagcacaacatccatgagaaagagaacccgcaaaaacagccygacagaaaaatgcagcgcgggagcagctcgtgttagaacaaatcacagagcaagtggtgtggctgggcaccgtggctcatgcctgtaatccccgcatttt

SEQ ID NO: 374006 - DNA, 201 bp, Homo sapiens
gattttaaaagtacaagcccttttacaaaggagtctttttagggaattgaacattgcattcctaatatttttcatcctgaatgcacttagcagaggaaacrtatatttcatcagacatggatttgacattccattacattgtagtaaacgggacaaacatgtctcatgttttagacatgagaaaggggagctaagacagcc

SEQ ID NO: 374007 - DNA, 201 bp, Homo sapiens
taattaccataaaggataattaacattaataccttaaagatttaactgaacaactagtttgagggatattcattgaatcaaaatagcaggacttattctcracattgtcagaaataaaattgacctgtagaggcttcttcagaagggtttttatttcataaggtgtgttttttgcatcatggctgctgctgttgcggctct

SEQ ID NO: 374008 - DNA, 201 bp, Homo sapiens
cttgccacctgcactgctaccttctcactccaagccatgagtgtcttccctgcatcttcgtaatagcctcataactgaggtccctgcctccaccgtggccygctacagcctgcagtacacacggctgccgggatagtgttgttgaatataagccagatcaagttcctcctctgctcagaatcctcccaaggcttctcaagc

SEQ ID NO: 374009 - DNA, 201 bp, Homo sapiens
acaaaacgtactaaataaggggctgctaattcggaggctgtggaagccaacatgagccacacatatgaacaggacagtgctggcccacgttcacggcttcrtcccttatatttagagggaacgtcaagtgtcacagggatgcttctgtatctctgatctgaacactggtcacacccctccccaatgtaagtctgagtgggg

SEQ ID NO: 374010 - DNA, 201 bp, Homo sapiens
atctgggctgtcctacccagtgagcaacacccatcccaccataaagcctcagttccaaatcctcttcccaatcacccccagcccctgctccagaccctgcycttgaagctagtatgtgactccagaggcccctttgttctggcttatgaggcactcttcccacccagcgttgaagccttcccggtccttccagcccattca

SEQ ID NO: 374011 - DNA, 201 bp, Homo sapiens
tgggttcaagtgatccttctcccaagtagctgggactgtaggtgcgtgctgccacattcagctaatttttgtatttctgggtagagatggggttttgctaygttgctcaggctgatcttgaattcctgagctcaagcaatcagcccaccttggcctaccaaagtgctgggattacaggcgtgagctaccgcactcgccatc

SEQ ID NO: 374012 - DNA, 201 bp, Homo sapiens
tttttgtatttctgggtagagatggggttttgctacgttgctcaggctgatcttgaattcctgagctcaagcaatcagcccaccttggcctaccaaagtgmtgggattacaggcgtgagctaccgcactcgccatcagattctgcttttattaaatagagacagcagtagtatctactgcatgagattgttgcgaaggctg

SEQ ID NO: 374013 - DNA, 201 bp, Homo sapiens
tgggtgctcagatgaatcctgccatggctaaaagtgactagttaaggtgaaataatatatttttcttcagctcaatatttttatgaataataaaaatggcygttcagttgtgctgtgaatcactaaattgacaattgaatatctttttggtatttaatataaatgtcttaaagcaaaggttataagcacatctgaggtata

SEQ ID NO: 374014 - DNA, 201 bp, Homo sapiens
ctcttctgggcaaatcacatgctcttccatccactaagtgaggccacagatgtcagaatgcagccatccagtgtgtccagttcaaagtagaaactgctcgrtggatgggagttgcaatgatcttgaaaatgagtgtttggaaattgactgtctctgagattcctcgcagctatatttgatttgaatccccttccccaaaac

SEQ ID NO: 374015 - DNA, 201 bp, Homo sapiens
cagatagcacagaataagaaaaatattagaaacaagaagaggccatttttcctatagaggctcatttcattctatataccacttccctgggatatctgctrattgttagcagaaagagtaatgttatctattttttaaaatttcactcttgagtactatggagataatagctaaatgatggagaaataactttctttcacg

SEQ ID NO: 374016 - DNA, 201 bp, Homo sapiens
tgtcacagcgtgtctcaagtttgatggcatcttgccacctgcactgctaccttctcactccaagccatgagtgtcttccctgcatcttcgtaatagcctcrtaactgaggtccctgcctccaccgtggcccgctacagcctgcagtacacacggctgccgggatagtgttgttgaatataagccagatcaagttcctcctc

SEQ ID NO: 374017 - DNA, 201 bp, Homo sapiens
ttggttcctttttccctgggaaaatgaagccatcaaaagagacctttcaaatgctctgctcccagaccagcgcatctgccaagagcctgtgcattgctgcrtgtgtggctttctgctgttcctctgggtgaaacatcagccctcgtggttctgcgcgctggtctcacctcccgcctctgcaagggcttccctccagcaggc

SEQ ID NO: 374018 - DNA, 201 bp, Homo sapiens
aagatggataggatttgaacctacacaaattgagtagggaaagctcctatgcagcaggagcaaaggccttgggaagggaaatattgagggtttggggaaaytgggcatttccgtttggtgtatttcagaaaggagggtggcataatattaggaaagggggttggagttagctcatggaaggccttttgaaataatcattta

SEQ ID NO: 374019 - DNA, 201 bp, Homo sapiens
tctggacttaacagttccctaactgtgattttaaaagggaaattcacacaggaactctggaacccaatgcacacagtttagaaagcatgtacacagcaagyagtgggttcaagtccaggcttcttggggaaatctcttgatctctcaacatctcagcttccatatctgtaaaacagggagaatactatttctttacctcat

SEQ ID NO: 374020 - DNA, 201 bp, Homo sapiens
agtgtacctcaggggtagactccagatcattttcaaacccacatggcccacttcattggcagttttctaacatgttagataggaatctggacttaacagtyccctaactgtgattttaaaagggaaattcacacaggaactctggaacccaatgcacacagtttagaaagcatgtacacagcaagcagtgggttcaagtcc

SEQ ID NO: 374021 - DNA, 201 bp, Homo sapiens
tgtgaaacgtgttcttccatgtctccaatgggctgagagtgaggcccaaagtcttttaaaagttgtcttctaagattctatcatgttaaaaatatcacctrcctccccattctgcaacatgcacatactacttttctacttttaggattgctgctgttgtttttaatgtgaaaggatcttggatttggcgttcatttctga

SEQ ID NO: 374022 - DNA, 201 bp, Homo sapiens
tgacgttaatttggtgtattacgcatatccaaaaagaatactgaaaagaaagttttgagctcaaaattagccaagagtttggtaaaagatacgaaatactrtgaaaaagaaagtactttcagtttaaaaaacacttgaagatttttgcatgaaagattttatattgatagtgaaattgttcttgcctttttgataaggaaa

SEQ ID NO: 374023 - DNA, 201 bp, Homo sapiens
gtttgcttaaggcatagagctttctggcttgaatggcatatattgaaatttcatattttaggaaacctaacttttaattttgacgttaatttggtgtattrcgcatatccaaaaagaatactgaaaagaaagttttgagctcaaaattagccaagagtttggtaaaagatacgaaatactgtgaaaaagaaagtactttca

SEQ ID NO: 374024 - DNA, 201 bp, Homo sapiens
ttgctgtggcagtttcatctataaaacagtatagttacaagaaaatggtgagaggatacaggcatgccatgagggatgctgttgcttttttcttgtcattwtttggaatggaatactgagtcaaatgtcaagtatttgatttcagaaacaatatattttaaaatctctatattgcactgaaatagtattattttccatttg

SEQ ID NO: 374025 - DNA, 201 bp, Homo sapiens
gtaaacacgaggtctagaccatgacctaaaatacaaatctggaagaaattttgagagacagtaggtttccattttaatgccttcaaagtttagtttcaagmaaatggttggaaacttccattctgaactacatcaccttcaagaatcatctgttttggaagcagccacccccacttcctttcttgattattcacttatgtg

SEQ ID NO: 374026 - DNA, 201 bp, Homo sapiens
tgtttactaaatgagagtctggagagtacatgacttccactctctcctaagaccgtgtgagtcctcatcacaattctaaaaggccatcttttgtgtgtgtrgttcttaggccctgtgaaagtcatgtcacacatctcatgcaatttgctaggctctacattttttgagcctcagaaatactgatacttctagcaagcatac

SEQ ID NO: 374027 - DNA, 201 bp, Homo sapiens
tgttcaaaaatatttttctccatctatacacagaccactcatggttattgttctctttacaaatgcttcttgtgtcttttacaatatccgttcagtaaagrcttgtcaaatgcccaccgtgttaaagagactgttaatcactagacagcaaaggtggtaagaaatgatctttactcttgggaagctccgatggcaggtcac

SEQ ID NO: 374028 - DNA, 201 bp, Homo sapiens
ctcagtaattaatccaggccactgccagtcccaagttgacactgcagctcttcagagacattcaaaattgaacttctgggaaaatgaatggatttcttgayagtatgtagggtattatttacttgaacaccatgtggatgctgtggtctccaggagcaccgaagcaagagagggacattattattctgtcacatgtgaaga

SEQ ID NO: 374029 - DNA, 201 bp, Homo sapiens
actttgatgtcaattttttccttcttaggcagaattggaaaaaaaaaaaacacatggaggatttttgtatggctgttggcaagagcactcatgaataaccrcattaaaacagcgataaaagaccctcaatatttttttctttaaaaaaaaatccaaaagccatcatttaaacatggagtttttttgaacaatagtcagctc

SEQ ID NO: 374030 - DNA, 201 bp, Homo sapiens
ttataaaatacctagtatttgtgagagttctttgaaaatatttatggttgtgttccaatatattagatccattcagaatggaaaggaagtcagaatttccktcatcatcataagacagcaggatgtagaggaggcaacagatcaagaaaatatcaagaattaatttagaataaatgatacccctttttgaagaaaggattc

SEQ ID NO: 374031 - DNA, 201 bp, Homo sapiens
ctaagagaatgacccagccactcccaccaacattatctgttttcctcctactctgctgactgtctgtccatttctctacttcccaccagtcagatcccatytcacatcctaagtcctctttatcttcagtaaaccgtggcagagctaagatgtaggtagataatgtctgtccttctggggacccaaggttctctatttgta

SEQ ID NO: 374032 - DNA, 201 bp, Homo sapiens
cattggcagtgtgtctgttattttcaggcaagattcaacttcctgttcagactccagaacttgctgtagcaggaaattgacaaatgatcagaaatgtgccktcagtgactagcctctgtgatgttgtgttttgttcaaaggatgaattggctttatgtagaataaaagccattggaaacatatggtacaacagttggctgt

SEQ ID NO: 374033 - DNA, 201 bp, Homo sapiens
agcaaagctaagaaaagacagcagttttataactgatgggaaccaaaggacctgtatttcaaaccgtttctcactgtggtaaacagcctaggaagtggtcrgtgtgacagctctgaacattttctatctgtgacccattcaaccgttgtgtttaatagatcaatcctgtcccttccagaagccaatagaagatataggagg

SEQ ID NO: 374034 - DNA, 201 bp, Homo sapiens
ggttcgtaagaaggtgcttttttagtgtagataggtgttaattggtgtccttgcaggaaagaccatccttctctgccccctgtctgagttttaaattttaytctagatattttttcaagaaaaaaggtatatgtgtgattagttgagaactaaattacttattggaggacacatatagacataaggtgattaggcaaattc

SEQ ID NO: 374035 - DNA, 201 bp, Homo sapiens
tacttcagattgaaggtgagtagttagtgaactccaaaagacaaacttttttgcttcagcaaaggcaagtcattgtcaagatttctaacatgattacctgrgcaggactcaaaattctggtttcagaagcacctgcttacagtctaggcctgatgaaagccaagtaagaagcagaaactactttctatatgattttcactc

SEQ ID NO: 374036 - DNA, 201 bp, Homo sapiens
atccgaattcattttttaaggaacactggagtcatgcaaaatgcagttaggtaaatgctggctcaacaagcttccaggagatcccgctgcacgtaactgaratgaccatttagaagtctgatccacagggaccttacatttatcagcaccagatattgtcttcaaagtgtaggattggaatttctgtctttattccaattt

SEQ ID NO: 374037 - DNA, 201 bp, Homo sapiens
cccgtaatgccttggatggtttctaagtcgagcccagcctcattaatgttgcgtagcaatgctgagacacgcgctagattgatgaaaccccttctcccagkgcccgcactatccatcccccacactaaactgctctccgtcatccatgactgcatcaaggcactgacaggcccgctgtagtcgcctaacataattaatact

SEQ ID NO: 374038 - DNA, 201 bp, Homo sapiens
gtatattaaggccccctgagaagttcctaaagaaaagaatccggaaaaaccctatgctttccaaatttatttgatccgaattcattttttaaggaacactsgagtcatgcaaaatgcagttaggtaaatgctggctcaacaagcttccaggagatcccgctgcacgtaactgagatgaccatttagaagtctgatccacag

SEQ ID NO: 374039 - DNA, 201 bp, Homo sapiens
tgggaaattaaacagtctctttagaacgttctaaatagtcaacctgtcactactcaattgttgtatgtgtggctcatttcctgagatacagtcattagcgycatcagatagttaaaaggttgtgtttgctttactcagtgtttgttttttacttataaattacaaagctcacacctagtattttctacctaagtcactgaa

SEQ ID NO: 374040 - DNA, 201 bp, Homo sapiens
tgtatgtttatttgtatataaagaagtatcctgagggaaacatactattgtctaaatgggataagtttgtggtcagttaagtgaaagttaggaagaaatgkttaatttttcctttgaaatctattttttgacattttataaaggcatatgcaatttttgttaatgtttttaatgaaaagttaaaatggggaaagaacgaac

SEQ ID NO: 374041 - DNA, 201 bp, Homo sapiens
accctcacacatgatgttgagatctcagtttgcttttgacatggcacctcccataaaattacttacatccaacactgctgcagcaacgttttttacagagscttcattacagtttcctggaccttcagccagggacagagtacaagtacagaagcttccagacttccttcttgtagtttgctgctgtactgaagtacttaa

SEQ ID NO: 374042 - DNA, 201 bp, Homo sapiens
cagccagcccagggaattggcaaggaagttacaccattttcacttaggtaggatctgtgggggtaaagcacttcggccaactccagggtcaaagtaaacasctaataaaatcagaaaataattagaactgtgaatcataaagtatcatgatagtgttaaagttgtcacatgcaaataacatggtaccagagaaggaaatac

SEQ ID NO: 374043 - DNA, 201 bp, Homo sapiens
atttattattgtgagtaaattttgattgaggggaggaatattttgaaattggtttattttgtcttcttttgactgattttatgttactttatgcaagattrcaaaatatctctttttaatatgtatatatatataaatttaataagcttttccattgcaaataaaacaaaccaatggtttttcaacccacttacaaaagca

SEQ ID NO: 374044 - DNA, 201 bp, Homo sapiens
ttattgagcaccttatgtgtgccaggtatgaatcgaccaactcttttcaggagttttactttgtatggttgcctagacaccttggcatcaagtacatttgyattagtaaccccaaaacctacataagtgcatactcagatgagtgaaaaattggtatcatacttatcatttagcaaagctaagaaaagacagcagttttat

SEQ ID NO: 374045 - DNA, 201 bp, Homo sapiens
cttcagcaactctgaccacccattgtgtctgagctggccccagactcatcagtacattgttaaaaatgggttgttcccaccttcataaaacaagtacttaygaaatataattcagtagtccttttaccaagctttacctataatccactaacttcagatgaagcatgctgtttactaggaatgaagtaagcgaggcttctg

SEQ ID NO: 374046 - DNA, 201 bp, Homo sapiens
taaatttctcttgttctgatccgcccaatttagggtactttttacagcagccctaggaaattagcacagaatccaagtgggaaagccgaggtcatgggtgratatgaaactgtagagttcaaaggagagatctggactagagaaataaaatttggagttttcaccagatgatatttaaaacaacgagactgtatgacgttc

SEQ ID NO: 374047 - DNA, 201 bp, Homo sapiens
ctcagttgctgcagttgtctagttgtaagcagcactgcttgcatggtgcagagggatatttcaaaatattatgcagcagcagttttgggtttaattgtctrcagatggtagatgatctattttccttactcgctgccacatttctaatagtacccaggctgttccatgtaaattagtaatctttcatgtaagcctgtcctt

SEQ ID NO: 374048 - DNA, 201 bp, Homo sapiens
ctgataaaagaactgaaaagaatgtctgttgagatgtaaagctaattaagattccgtttaatttctcatattctctacatgagaaaaccaattatatagcwagaccactcatatatgctaatctgctgttatttaggctttggattttgaaataggaacattaacattcatcgttcagcattttatagagaaaatgtactt

SEQ ID NO: 374049 - DNA, 201 bp, Homo sapiens
gacacttcttcttcttccagggtggcccagggaagtcaaaagattggacacccctggtctagctagaagtcaaagcaaaaacttcacgtaaacacatgctraattattttccaaaactattagaaaaatcagactgtaagccttaaacaaaaagaaaacaaagcatttttcaatgttatattttaagggactttttcatga

SEQ ID NO: 374050 - DNA, 201 bp, Homo sapiens
tctacttgtaaacaaatgtgattttcttctcttaaaattatttttgtctagagaaatttatggaaagaaacaaatatactcatctttttttttttttgatkgggggagtttatcatcaacatgataggttttattttcagttttcctgttaccaaaagttggctggcaattctgcttagcttactattttacaggaagaca

SEQ ID NO: 374051 - DNA, 201 bp, Homo sapiens
taaaatcacagcacaagaggaaaccttggaagatattctccctccaggcaaaactacactgttttgtgctattttattaagttctacatggacggattcakcaaccctcctttcagcacagtgtaatgtttcaccaccttttagtcagaaaatgtgtccctattgatactagaaattctcttgcaacatgggaagccattc

SEQ ID NO: 374052 - DNA, 201 bp, Homo sapiens
gcctcctgagtatctgggattataggcgcctaccaccatgcctggctaattttgtatttttagtagagacggggttttgctatgttggccaagctggttgygaactcctgacctcaagtgatctacccaccttggcgtcccaaagtgctgagattacaggtgtgagccgccactcccagccagatgccacacgtttttaag

SEQ ID NO: 374053 - DNA, 201 bp, Homo sapiens
ccagcagcacctctggccagtgacagtattgtgtagtgtaagcatcagacctcctcttggtgaggattgagtcactgcccaatttactgtgaaaacaacaraatatctgtcatcatgctcatttacatagttaaataattatataaataacacactagtaaatgtggaaacctgacaagtttgctgttttcacaatagatt

SEQ ID NO: 374054 - DNA, 201 bp, Homo sapiens
cgtcacatacagaaatgtataagaaatgctttgagaaatttaaaatgtcgtcttaaaatgaggcaatataaattaacactcaaagtcaaatacaatcattyagatcattggagtaaccatgaatacagtgggaagttctgtatgatttaatttagagacgatggtaaaaacacatcattaggtctgtagcagaagatttaa

SEQ ID NO: 374055 - DNA, 201 bp, Homo sapiens
aatttttatatgatctcagtacacgttttttaatccatagtgtcatgcctggtagtaccacatctagtgaatcttcatatgcaaaggaataaaatatcacycactatttttaagtagttctctagttataatagcagtagaaagtggagtctacgcgggcttttttcactggtggtgcgtgtctctctgaacctagtaacc

SEQ ID NO: 374056 - DNA, 201 bp, Homo sapiens
tgtacataccttgattcctcattccagtgaatgattcctcaatcattcattgaggaatgattcagatacagaaggaattgaggtcaaagccaacattatcrtctataactcccttgatgtgataagtgtgaatctttacaatactcaaaagaagttgactgtggaaagtcagtggagactagcttatgtgttggttgtgtc

SEQ ID NO: 374057 - DNA, 201 bp, Homo sapiens
aggggcacaggctaatcttaggcaccagaacaatgtaatctacatacaaatgacatttgcagaatcttttgataggcgaagatttgcgatttcttcatgtrctgtggcattcattctgaggttcctctagtagattttctgaccttgggggagccgtgagtggggagggctaaaacgtgccttgtcagaaggaagaaaatg

SEQ ID NO: 374058 - DNA, 201 bp, Homo sapiens
gccagtcacctgtggacggtgattcccaagtcaatgctctctcatcagcacccccttgggcacagctgcctttctctgatagttgcatttgtattccagcycatctggcccaaagcactggaacttttcgggactgaaagattttgaattggataaaatacaaactataaaatatcattcagacaaacatacaggaacaaa

SEQ ID NO: 374059 - DNA, 201 bp, Homo sapiens
ctctctgctctctcctcagcagtcagaatcactccgccctctctctgctatccctggtgcttgaggggcttactgtgtttgagatgttgtaacccaatgcktttctacagctttctatgcagaaaataggggtgggcattcatcaatcatttactgttctttctctttttactttctctgcattgacctgcttacggtgta

SEQ ID NO: 374060 - DNA, 201 bp, Homo sapiens
gtgtacagggaggctgctatagacagggaaggtcaggaatggctctcagagccaaattccactgccagtcaccccccagaaaaaccaacaaaatacttacktaatattttgatataactttaaggattaaaatggatatccagtgaagtactgaaaacaaaaaattatggcctttgtagcctaaggagtgattatagactc

SEQ ID NO: 374061 - DNA, 201 bp, Homo sapiens
ctcagaatatatccccatcattaagtgactcatgaccatatttaatgttgagagtgagcatttccctaggctaaacattatgtaaaacatataaaaatatratcagaaatgcaaaatcatttgatcacaaaatgattttaataatttagtttttgaatatcatgcaatacctctaacctaattaagagtgcaataaatgtt

SEQ ID NO: 374062 - DNA, 201 bp, Homo sapiens
tcacatgttgttcctttctctgctatcttaggtttatttagctctgctatcttaggtttatgaataaaattagatattatttatatatatacttacaaggwtataatgttcctcctgaagttatctaactaatgtgctgccccttaaactgagaggcagcttagtatcatgcttaagagcacaaagtccagagcacatttc

SEQ ID NO: 374063 - DNA, 201 bp, Homo sapiens
gcattattttaggaaactaacaattagattgattatatcaagcacaaaaggagtagttgctttgtccctggtaatctcggagaccagagggagatacctcrctctgtggtttagggcacactttggtgagttcaaggtcgggggtttctttactgtgtgaaatctgtgcctcaggcctgagctgcataaccaggattctgg

SEQ ID NO: 374064 - DNA, 201 bp, Homo sapiens
atgtatatttgggtaccaaggatgctatattgtttactctttgctataactttaagcctatgctactcagtatggtcggcagatcagagctggcccactcrttgtttctggtccctgaccagtacagaaactgagagcaagtctttagaaaatttttataggaattggacagaataattttatttcatcgaataataacaa

SEQ ID NO: 374065 - DNA, 201 bp, Homo sapiens
atgttctaaaggtgataggaccagatcagagagtccagaaaaccacagtgcagtttctgtaaagatttagagagcagtgacacgaggctttccttcttttraggaagaaggcacctgcttctcatcatccttcttgttgtttagatcccatttgtaaactatccaggtgtggaattacacatgggaagcctgttataaaaa

SEQ ID NO: 374066 - DNA, 201 bp, Homo sapiens
ctattttggtggtggggagaggaatgagggcacagatacagaaggaattatgttttacatcattctcttcagcagggcattttatcaaccagcacttatamgtatactcaatgtaactatttattataagaacaccagtgtacacaaaagtgctaatatgccttctatttccttaataactattttttaagtatattatat

SEQ ID NO: 374067 - DNA, 201 bp, Homo sapiens
cacatctccttggttttgcaagattccaggtggtactaggggatttcaaaaaaaaaaaaaagcttcctgaagaaatttttatgccgtgttggtttcttcartcattttcagtgatcctttgtgccacaggttgcttagcagagatgttctaaaggtgataggaccagatcagagagtccagaaaaccacagtgcagtttct

SEQ ID NO: 374068 - DNA, 201 bp, Homo sapiens
gaaaaaagaaatacccaaaaccaggtagtttataaaggaaagaggtttaattgatgcacagctccacagggctggggaagcctcaggaaactaacagtcayggcagaaggggaagcaaacacgtccttcttcacctcgtgacagcaaggaagagtgccgagtgaagggtgggaaaagccgcttataaaacgatcaaatctc

SEQ ID NO: 374069 - DNA, 201 bp, Homo sapiens
tctgtactaaaaatacaaaaagtcagctgggcgtggtggtgcatgcctgtaattccagctactcgggaggctgaggtacaagaatcatttgaacccaggargcagaggttgcagtgagctgagatcgtgccactgcactctagcctgggtcacagggtgagactctgtctcaaattaaaaaagaaaaaagaaatacccaaa

SEQ ID NO: 374070 - DNA, 201 bp, Homo sapiens
ataatatggcctcctaaattcaaaattattcttattttttaaaatagtattttccttattaatttgtgtagtcacacattgcttaccactcccaaatttakattttttaatgaagatttattaaatagtgtgattgaaataagaataacagtgacaaagcacaaattagaattgttttcggaattatgttctgctgaataa

SEQ ID NO: 374071 - DNA, 201 bp, Homo sapiens
attttttaaaatagtattttccttattaatttgtgtagtcacacattgcttaccactcccaaatttagattttttaatgaagatttattaaatagtgtgaytgaaataagaataacagtgacaaagcacaaattagaattgttttcggaattatgttctgctgaataaagacagattcatgtgctttggttgagagatgtg

SEQ ID NO: 374072 - DNA, 201 bp, Homo sapiens
actatgtcaaagtgactgtgttagtggcatttcttagtgcgtgttccgatagtaatagcctgtggaccttgggcatattttgaagttcatctgtctatttkagtataatacattttgaaatattaagttctttcaattccattattgaaaacgttttgtctgttctgtgtagagcacagatgggatccctcacatgaggtg

SEQ ID NO: 374073 - DNA, 201 bp, Homo sapiens
tgctaggactttgtataaagaagcacagtctgaaacagacgcactgcaggagaccagggatgaacagtggggaacactgcctgcagaaggggatgtgaaargaagctgggagtagatgtttcaacacccgacactgtttggatttacatcttttagctttagattgtctactgtaaaatagaagcagaactcttatcactt

SEQ ID NO: 374074 - DNA, 201 bp, Homo sapiens
cagatacagaaggaattatgttttacatcattctcttcagcagggcattttatcaaccagcacttataagtatactcaatgtaactatttattataagaamaccagtgtacacaaaagtgctaatatgccttctatttccttaataactattttttaagtatattatattatgcttgtgaggcttacctgtatttcattgc

SEQ ID NO: 374075 - DNA, 201 bp, Homo sapiens
aagttacatgctgtttcttttccctcatctagatagaccgtctttaaatgttaatagtggaataaattagaaatagtttcaattataaactcagagcactraaagattgcaaatgcctgcactgaacaatatattactttacgaattgtaaagctgctctgccatttgctctcgggaacccttgggtcttcttaatcacag

SEQ ID NO: 374076 - DNA, 201 bp, Homo sapiens
ttttgttgcttctcctaccttccttatattgcaccttaacccctttgctgtgggcctgtgtccatcaattttgtgacaatgactgtacgtgttgaggtgtkaccatgatgcctactcagtggatgtgggtggcacctctggttactaaaagctagagtgtgaaatgcttctctcggcttcagaaggcatgccagcagcaca

SEQ ID NO: 374077 - DNA, 201 bp, Homo sapiens
agtgaatgttgtcttcaagggattcattatataggacaacataattggactgattatctgtagaatagatggaagaccaatatagcgagaaagactaggtkggggaaaaaaatgtgtatagtaccctctaactaaatagggcatattaaaattctcaatttcatgtaatgtttagacaaataagaactctgattatggaat

SEQ ID NO: 374078 - DNA, 201 bp, Homo sapiens
tcgcaccattgcactccagcctgggtgacagagtgagattccgtcttaaaaaaaaaaaaaaagtgtaatgcaaagtgataaccactgcaacagaacagagytcttgggagaaagtggaaagagaaaagaggaggactcacaacagaacactggagaatatctgtttctgggggcagtcgggaggaacagctgggatggagt

SEQ ID NO: 374079 - DNA, 201 bp, Homo sapiens
gaaattatttcaacctcacctgtcgaaaagatttttttttttttttttgcagaaaagtgaatgttgtcttcaagggattcattatataggacaacataatkggactgattatctgtagaatagatggaagaccaatatagcgagaaagactaggttggggaaaaaaatgtgtatagtaccctctaactaaatagggcatat

SEQ ID NO: 374080 - DNA, 201 bp, Homo sapiens
ggatgcctatcttaaatgggtaaatcgtgttggcacaaatttgagagaggaaattatttcaacctcacctgtcgaaaagatttttttttttttttttgcaraaaagtgaatgttgtcttcaagggattcattatataggacaacataattggactgattatctgtagaatagatggaagaccaatatagcgagaaagacta

SEQ ID NO: 374081 - DNA, 201 bp, Homo sapiens
caaactgaaggaagctgaaagcttaatcatttttcaaaaacagccagttatcccatggtactttgttcttatatggataccttttgcacattttctatacktgtatcttactttcaaaccctttcagttggattttcattcgcatctttgtatagatctttccaagaccaagttttgttggtttgtttgtttttgagatgg

SEQ ID NO: 374082 - DNA, 201 bp, Homo sapiens
tagggatttgctgcaaatctcagccagcatgtaaatccatatctttattagctctaattaaaagtaatgactgaggaaaatgaaagggctttgatgtaagrtgatcaagtattgtttaaagggttttattctgatgcaagtgagttgttcttttgaagataaggaacaaagcactagtctgttgaggaggtagttttaaat

SEQ ID NO: 374083 - DNA, 201 bp, Homo sapiens
gccggctctagatagaagaaaactaaatcaagttgattaattcctccaatgtgttttctagggatttgctgcaaatctcagccagcatgtaaatccatatstttattagctctaattaaaagtaatgactgaggaaaatgaaagggctttgatgtaagatgatcaagtattgtttaaagggttttattctgatgcaagtga

SEQ ID NO: 374084 - DNA, 201 bp, Homo sapiens
cagtaaaaagttgttcttagtgtctcttgtttggaagaaccttctggatctttcttttgttgcttctcctaccttccttatattgcaccttaacccctttrctgtgggcctgtgtccatcaattttgtgacaatgactgtacgtgttgaggtgtgaccatgatgcctactcagtggatgtgggtggcacctctggttacta

SEQ ID NO: 374085 - DNA, 201 bp, Homo sapiens
aactgcactgtctcatatggcagctactaatcacacatggcaatttaaattcaaattttcagttcctcagtctcactaaccacatttcaaatgctcagtarccagatgtggctagtggctacatttccatcatttcagaaagttctattggaagacattgctctaaagaaaagaaattaatatgacccataatgatcactc

SEQ ID NO: 374086 - DNA, 201 bp, Homo sapiens
tgaacacaggagttcaagatcagcctggacaacatagagaggcccaacatagaccctctaccaaaaaaattttttttaagaaagacaggagataatcatgyatttttgttttaaaacgtttctcagaaattatggttgttggcatacaaatggttatggtttagtagttcaaggttatgaagcataaagcatgtttttttt

SEQ ID NO: 374087 - DNA, 201 bp, Homo sapiens
tgtttgctttcctggattttgcacagtattgtgtgttcaaaaatactgtcattgtgtgatttccaaaacccatttttttcaattgatttgatttttttttwaatccgtattcattgatgttgaaaattcagtcgaatttcgtttatgcacttcactaagtaaggtggtcatgtattgatttccctacaaacactcagcttg

SEQ ID NO: 374088 - DNA, 201 bp, Homo sapiens
tcatttgtttctgacccacttaacagttgctcagactcagcaataaagggtcattgggacaggactcaatattttactgcaaagcatcatgatcatgtgamtagttagagttcactcagattcaatgcctccaaactgaaggaagctgaaagcttaatcatttttcaaaaacagccagttatcccatggtactttgttctt

SEQ ID NO: 374089 - DNA, 201 bp, Homo sapiens
ccttagaagccccctcataccatctcccaacttcaactcaagatcacagaggacagtatgggctgcttttagcagctgtccctgtgattctatgtagggartatatgtgaagcttgctcgtggttgttgatagctgcaatgtaaagtaaatgcactgtgttcttaatgctctttgtaaaagaaagtggaaactaaactgag

SEQ ID NO: 374090 - DNA, 201 bp, Homo sapiens
atggttttgaccactttcagcatgccaagttcaaataattttattgaaaatcaagcaacctgacattttcattagcctatatggctcatcaagaataagtwtttgatttttatagtcttaaaacagttacagtttacaggtcctgttttcaattttcatggacctaagagagggaaccactcttgttaattctatgttatg

SEQ ID NO: 374091 - DNA, 201 bp, Homo sapiens
gaatattcacaactagagtattgtaagtgtttggctaggttttgagggagggtttagaattttctttttaagcaattataacaagggataattttttattrtgtaatattttatgagcacaaacttgacttgaaatttaatacacttgatattctgtgtatagaattaggttatagaaacagtatggagagttgagaaaga

SEQ ID NO: 374092 - DNA, 201 bp, Homo sapiens
aacattggaagcaattatgcattcataatagaggtttagatccgtctcctccaaactgccttgttccctggaggtatccgaatggaggaccaagtaatcayacagcggttacatcgctgacgtccttcgctcagccactagggggtagattggctttgtctcttcttgacttccttaaccttgcagaggaagtctgttaga

SEQ ID NO: 374093 - DNA, 201 bp, Homo sapiens
atgttccaggcaggtgaaagcttacgagcaaaagcagtgtcagaaaagccccattagtgtttgtagggcagttagtctttatcctctgaccagaacagaarggaatataatggtgtagtatcacagattcagaagtaagtttggagaaggtgagagcaaaactaaggagtttgggctttctctcgtatgcatttatgtttc

SEQ ID NO: 374094 - DNA, 201 bp, Homo sapiens
gaggttagggcttctaatgatcccatcaaccaaacagtgaacatagtccccagtaggtagtttttaaacccttgccctccttcctctctcctcccttttayattccccagtgtttattcccatctttgtgccgtgtatacccaacgtttagctcccacttacaagtgagaacatagtatatttggttttgtttctgagtta

SEQ ID NO: 374095 - DNA, 201 bp, Homo sapiens
tcagactccagggctctgtggatgggtctgagatggggaaacccatcacctttgtgacatttggtggacatatacatgcccaacatatttgtttgttaggsgtgagggagaggatctgtaatttttaggagtgcatgaattagtgtatacatgtgttttttagaagtaggaaagagaaggtgtctaatttttaccaaattg

SEQ ID NO: 374096 - DNA, 201 bp, Homo sapiens
atgggttttaggagttcttattttttttaattccaaatgtttcgttttgattaaaaactgaaatatcaaagaattctctaaaaattctctattaggaccamaaagatgaaatatacaaaacagtctggcatttgcttttgtgctgttacccagagtgtttctcattttgccatggctgagaaaaagtgttggtgatatagt

SEQ ID NO: 374097 - DNA, 201 bp, Homo sapiens
atctgtttctgggggcagtcgggaggaacagctgggatggagtctggaaaaggaaagcaagaggaatagggcgagaacaaagagacccagatcatgagaaygaagagaagacagcatttcaacaggaaggggatagcgaccaggtcacgagctacagaaaggccaggtaaacaggaatcagagagcaaggtagagagaaag

SEQ ID NO: 374098 - DNA, 201 bp, Homo sapiens
gttctcaaaattacttaaagctatccccccaatttgtcaactgccacaatcagtcgcacccggtgagcacatttccgtgtctttacctagtgatcagcagrgccgcagcgggttcctgcctgcagtagggagggggtccttggagagaatgtggtttctttggaggactctcacgatcgtttaatgaagatatctatgcat

SEQ ID NO: 374099 - DNA, 201 bp, Homo sapiens
aacctctgtaaactttattctgatagtattcctgcaaatacatacatacacaacatatttacacatgcacatttttgtttaaggctagctattcccccccmcacacacacacacatttgcctgcgtgagtaaccagactagatctcttttacaattttcacattccccatatctgatcagaggttcttcccaaatgtatgc

SEQ ID NO: 374100 - DNA, 201 bp, Homo sapiens
acataagaaggtgaaactacctctttacagatgatactagaaaatccaaacaatcaatgagaaaacaaacacagtaaaataattcaaataagatagcagawtataaaattaacatacaaaagtcaaaagccaggtgtagtggtgtgtatctgtagtcccaaactactcgttagactgaggtaggaggatctcttgatcgca

SEQ ID NO: 374101 - DNA, 201 bp, Homo sapiens
aatttatagattcactgctatccccatcaagctactattgactttcttcagagaattagaaaaaactactttaaatttcacatggaaccaaaaatagtccrtatagtcaagacaatcttaagcaaaaagaacaaagctggagggatcacgctacctgacttcaaactatactacaagtctacagtaaccaaaacagcatgg

SEQ ID NO: 374102 - DNA, 201 bp, Homo sapiens
agcaatagatgatgatcttcatagtgatattattaagactatttcttgtgtaatttttgcatctttgctgttcatctgagaatatttgaatttgtgcacarctgaagccatttgaggcttgcctgtctgattatttacgtagaacaaatcaccctagatatattagtggatctctgccaaactgccttccagaaacattgt

SEQ ID NO: 374103 - DNA, 201 bp, Homo sapiens
ggggtaatcaggctctggggaaccatggcctgtgaccttgaatggcaatagaccaggactgggaggagcatccatattgaatccactgatacccatggcaracgggcccatccatcctgctcctctcccaattgccactcagtccagtttcagagcgggaaactggaggaggagtgatttcttcttccttccagccaggtg

SEQ ID NO: 374104 - DNA, 201 bp, Homo sapiens
ttatatatatatgtgtgtatacacacatgtaccaagagatcctgacagttacttgctgaagagatccacacacctctttgcttcttttgctctggtgcaarttcatttgcagacacctttcctcaccagtgactcatcgtgtggtgttgttaccactaggtcatctgaaataaagttgtagcctaaagcgatatgtaaata

SEQ ID NO: 374105 - DNA, 201 bp, Homo sapiens
ttcttaattttttagttctgaaaataaaaattatttaacatataaggatattgggtgtattttttatctcacatgttggtttagcatatgattccttgaaytttgttgccataaataacatcatcatgattcttttgtttattgtaatttaattatcatctcagagtcatgcaagacatttgtgtcatggttttgaggtga

SEQ ID NO: 374106 - DNA, 201 bp, Homo sapiens
gtcttctcagtctgggcttgtttgtacactggcaaggttttccagatattctaaaggacttgggtgttatggtctaagctgtatctgcattagggggcacrctgatcccagtaactctgtggttcctgaagagaagactcatggagtgtattagtctcttctcaggctgctgtgaagaactgcccgagactgggtaattta

SEQ ID NO: 374107 - DNA, 201 bp, Homo sapiens
ttcaggagaccattctgcccagtgaatgggatctgggccctccaaaaagagacatccttttctgggttatcattcatgcacctgaagcaacctcttttagytactgctttccatgccagttaccagggctcctgaacaaacaggaagtatttactcacacataaattaatcagcatctatgtttttaacttggaatagaaa

SEQ ID NO: 374108 - DNA, 201 bp, Homo sapiens
atggagtcacatttgaatactggtaaaaatcagagggtgagataaattgccatggttggaaaaaagtttagtaaccaatgacacaggtgtttctttaaggraggcagcacacaggataatttttgaaggaaagaagaaagcacagatggaatattgttgatgtttgtattaggccgctcttgtttggctataaagaaatgc

SEQ ID NO: 374109 - DNA, 201 bp, Homo sapiens
tagctagttcatcttgagatctatatctgtgaaacaagaaattcagaatcagagctaaagatttttaaagtgtgatttttatatttttcctaggagaaaarggcattttttacaataaagtgacagttgtttaggataaattaataagaaaatgtaggcccttgttgggaagaattgttgatagatgggtgttttagaaaa

SEQ ID NO: 374110 - DNA, 201 bp, Homo sapiens
ttgagctgaaatgcacctgtgagctacgattcacccagcctatgccagagtttacaacaggcacatacagcttcctcccggagctgaagatacatgttgamccagattcagtacctctctggagaatcacagacttctgagacaaaatcatgctaaggaaatcaaacacttgccccaaaagaagcagggaccatggcaaca

SEQ ID NO: 374111 - DNA, 201 bp, Homo sapiens
taacaagtaagaacctttcactaccagtatactcaagttctgcaatatagctagttcatcttgagatctatatctgtgaaacaagaaattcagaatcagakctaaagatttttaaagtgtgatttttatatttttcctaggagaaaagggcattttttacaataaagtgacagttgtttaggataaattaataagaaaatg

SEQ ID NO: 374112 - DNA, 201 bp, Homo sapiens
tcaactttaatttccaagccgtaagttcacctgtcctaaaagccacatgttgctatctagacagacagaaaatatttaacagattctttctttttaatccyacaagagatatatctctgtgtggtaagtcactttaacatgaaaacaatgggaataataattcaaaggaaaaacccattagtctctctgattctgcagcca

SEQ ID NO: 374113 - DNA, 201 bp, Homo sapiens
aaatattacagatattttttaaagaactacttatttttaaaggactaagaattattttcaaagaagtatgtcttcaagcatcatgagcagaatgaaaggcygaatgctctccttgtgacaaagtgagtggacagacccatccgcagtgcagcatgcctatcaccagccaccagcgcagtccaaagttacatgattgaaaaa

SEQ ID NO: 374114 - DNA, 201 bp, Homo sapiens
taaattgtctataacatgaagcatactaaaaaactacatttaaaatgatgatgggataaataacattttataatgatattgaatattattttatagaaaaytggcaaatgacatcttcacttttgttagtttttttgcaaacttataagaaggtgttatgtattttaagttttgaaaaatggcatcaaacttcccccaaat

SEQ ID NO: 374115 - DNA, 201 bp, Homo sapiens
tgggtgagttctctccgactgcttattggtcattcacttcatcaccaaaaaatgtgatcatgtgccccaaaatatatgcatatttataaacaggatagctrttttgtaaataagataggcatactagtacactaaattgtctataacatgaagcatactaaaaaactacatttaaaatgatgatgggataaataacatttt

SEQ ID NO: 374116 - DNA, 201 bp, Homo sapiens
aggaaagccggaactgacagagtatgggggctggggacgggatctcttccgattgccatttactcattgaaataagttttcatctgagcggggacagagartggttaatggaggtagaaggaggtaagagaaaagggaaaatcagttttcctaaaatgtaatgtctgtcatattattctcctgctcagcaggactttcctt

SEQ ID NO: 374117 - DNA, 201 bp, Homo sapiens
atcaaagcccattaagcttaggttcatcatagatcttattaaggatttaaatctttatgcagattttatttttcttattgaataggataaataaaggtgaygtacaaggaagttcacattttgaaagagtacaagattacttcaccaatgcttccttgaaatgtggcactgagaaactgcaaagttatgtttttgtttatt

SEQ ID NO: 374118 - DNA, 201 bp, Homo sapiens
gtgggtatgaggtgatatctcattatggtttcgatttacagcgcttgctagctaatgatactgagtatcttttcctgtgcttattgactatttgtttgtcktttttggagaactgtttattcaggtcctttgcccatttctaattgtactatttgttatcttattattgggttttaatattgttacttttacagtctagat

SEQ ID NO: 374119 - DNA, 201 bp, Homo sapiens
atatgaagatatagaaaggatgcaataaaaggttatatcagctgggcatggtagctcatacttgtaattccagtgttttaggaggccgaggtgggaggatyactagaggccaggagttcaagaccatcctgggcaacaaagctggatcctgtctctacaaaaaaattttttttagaaaagaaacaactttgggaggccgag

SEQ ID NO: 374120 - DNA, 201 bp, Homo sapiens
cctctggctagcacatgaactacatggagagacatttgtgtatctttgtgaacacagattcagagtaaggagaattaatggcataattcagatgtttgacrttgtcaggaatgtggctgaaaatagtatcccacagcaagtaggtcacagtagaaaaagcagaaggtgcctgggaatcaaacagtcatctgggacaagttg

SEQ ID NO: 374121 - DNA, 201 bp, Homo sapiens
taatcccagtactttgggaggccaacacaggaggggaccacttgagcccaggagattgagaccagcctgggaaacatagtgagaccctatcactacaaaamttaaaaataaattagctggcatgctggtgcatacctatggtcccagctactcagaaggttgaggtgagagatcacttaaacctgggaggttgaggctgca

SEQ ID NO: 374122 - DNA, 201 bp, Homo sapiens
gagcatgcattacttccaaataaaaatctattgttttcctagcacactagcgtttcattaattagaaaaaactttaatttcaaattatattttgtaacccytccaaaaaaaatacttcagaaaaggcagagagaagaaagaaatagaataattgtcaaacagtatccagtttgaagagaaaagaattggggagtcactttg

SEQ ID NO: 374123 - DNA, 201 bp, Homo sapiens
agtttgaaaacacaagagtccataaacatctcttccattgggcatcagagcagtggtgtagacctgtgagagttgagcgtgaactgagaataataaagtcmaataatgtcttcttatgatcatgaaaatagttttgaccttgtggcctccctgaaagggtctcagggatttcaggggtctctggcagatactttgaaaacg

SEQ ID NO: 374124 - DNA, 201 bp, Homo sapiens
tagcattatatgtagtggaaacaaacctcagtgttcaataatgggggatgtttccgtaaacttgtttatgtatgatatgtattagggtttcttaaccttgrtgctattgagattttggcacccgctaattttttgttgtgggggctatcctgcacattttagcagtgtctctagcctctgctttctgggtgccaatagcac

SEQ ID NO: 374125 - DNA, 201 bp, Homo sapiens
agcctctggtaaccacctatcttctccctgcttctatgagcttgagtttttacacattccacatatatgtgaggtcatgaggcatttgtctttctgtgccygtcttcacttagcgtgatgtcctctaagttcacccatattgtcacaaatgacagaatttcctttaatttatcccatttttgtaaatgatagcacagttat

SEQ ID NO: 374126 - DNA, 201 bp, Homo sapiens
tctcatttcattttcatcaaccccctacaaagtagatgacatgctttctctgtcaagcatatgaggaaaccaagattttacaaagtttccatctctttcayaaggaaagccggaactgacagagtatgggggctggggacgggatctcttccgattgccatttactcattgaaataagttttcatctgagcggggacagag

SEQ ID NO: 374127 - DNA, 201 bp, Homo sapiens
gaactgtgctttacatgtattctcatttcattttcatcaaccccctacaaagtagatgacatgctttctctgtcaagcatatgaggaaaccaagattttasaaagtttccatctctttcataaggaaagccggaactgacagagtatgggggctggggacgggatctcttccgattgccatttactcattgaaataagttt

SEQ ID NO: 374128 - DNA, 201 bp, Homo sapiens
tggagtgcaatggcgcaatctcggtccactgcaacttcagcctcccaggttcaagcgattctcctacctcagcctcctgagtagcgggattacaggcaccygccaccgtgcctggctaatctttgtatttttagtagagatggggtttcaccatgttggccaggctggtctcaaactcctgacctcaagtgatctgccccc

SEQ ID NO: 374129 - DNA, 201 bp, Homo sapiens
aaatttgagcaatggtgtttccaatttcatttattaaattcttttaaaaagtttagttattaccgatgatggcaaagaacatttaggtttcattaagtgakagttttttatgttatagtattctatgttttctttatctattaatgggtttttcttcttatctgcagtgaccctgtctctttgaagttttaaatccagcct

SEQ ID NO: 374130 - DNA, 201 bp, Homo sapiens
atttgggcaaaaaaaaaaaaaatgcttatcaaattagtaagacaaaaccttttgctttttgtggcagcagttgtgggggtgaaggaaaataaaaataatawgtctaaaagtaataggtctacttcccctgttgccgagtacactctctgaacacttcataaagtgtacctccatgtagccttttcagatagcagtgattta

SEQ ID NO: 374131 - DNA, 201 bp, Homo sapiens
cgtttctcttacactgttaaacaaaatattgtgtggctaaatgatttcagcctatctaatttgcttgacaattagacagtcgttctagccttaggaacaamatatgttcatcataaaaaaattaagaatgtgatctaaagttcaaagctgaaatattaaaacattaataaatagaaagctttaagaactattcactcagta

SEQ ID NO: 374132 - DNA, 201 bp, Homo sapiens
taaattctattcctgcacataaaaggaaaatatatcaagtttaacaattcaatacaaaaaaaaaccctgcaatgtgagttctccaaacaaacatccctatyatccctacatacaggtatagccttaggttatatttttatgatttcatttttgaggtatatacaaaacatgcatatggttttcatcactagaaataaacta

SEQ ID NO: 374133 - DNA, 201 bp, Homo sapiens
aaaaaaaaaccctgcaatgtgagttctccaaacaaacatccctattatccctacatacaggtatagccttaggttatatttttatgatttcatttttgagrtatatacaaaacatgcatatggttttcatcactagaaataaactacactgagtcctttgggtttgctttctttatttctttattatatgtttaattgatc

SEQ ID NO: 374134 - DNA, 201 bp, Homo sapiens
ccataatcccagctactctggaagctgaggcaggagaatctcttgacctgggaagcagaggttgcagtgagctgagatcacgccactgcactccagtctgrgcaacagagcgagactctgtctcaaaaaaaaaaaaaaggccaatcttagattttacaatagtggtgttatccacaggagtaaagggaagttgcaaatctt

SEQ ID NO: 374135 - DNA, 201 bp, Homo sapiens
tttttttttttttttgagacaagatctgtcgcccaggccggagtgcagtggtatgatctcagctcactgcagcccatacccgccgggctcaagtgatcctytcatctcagtctcctgagtagctgagactacaggctcatgccactaggctcagctactttttttcgttcattttttgtagagaccaggtctccctatttt

SEQ ID NO: 374136 - DNA, 201 bp, Homo sapiens
attctggttttaagactcagttattctttctctccttgccttaattctttccttaagtcctacctagtgcttttttttctttctttctttcttttcttttyttttttttttttttttgagacaagatctgtcgcccaggccggagtgcagtggtatgatctcagctcactgcagcccatacccgccgggctcaagtgatcc

SEQ ID NO: 374137 - DNA, 201 bp, Homo sapiens
tttttttttgcttctcttaaacgagtactgtttttgaaatttggcctatttgttaggaagatactattctcccttatataggattgtatgattttttgaaraaaaacagattgtttccaagggcattttttgatttttgttatgataaaatgtgaaaactattaatgtgatatctatgaaaagtattctggaggaaaaata

SEQ ID NO: 374138 - DNA, 201 bp, Homo sapiens
acagtggggaacactgcctgcagaaggggatgtgaaaagaagctgggagtagatgtttcaacacccgacactgtttggatttacatcttttagctttagaktgtctactgtaaaatagaagcagaactcttatcacttaaaattgtaagtaaacagatgtctttattctagagtaacatagcacatttgttatctcaccaa

SEQ ID NO: 374139 - DNA, 201 bp, Homo sapiens
atgtccatcttaaaccaagaaataaagtagaatgattttgtgtagactttggcattgttacactttccttcatttattctgtaagactattttttttttttgcttctcttaaacgagtactgtttttgaaatttggcctatttgttaggaagatactattctcccttatataggattgtatgattttttgaagaaaaacag

SEQ ID NO: 374140 - DNA, 201 bp, Homo sapiens
attaggatgcgtgggaggcgccgcctctcctagaagctgtgcaggtagcgctgggctgcaggaggcagccaagccaggcgcacgatcagagcagggacgcytcccgttccttggttcctgggctccaacgggcacctccaaaccaatagttccagcatctctgtatgcagaccttagaggacaggaagcgactgcgagccc

SEQ ID NO: 374141 - DNA, 201 bp, Homo sapiens
tccgagccaggtgtgggatatagtctcgtggtgcgccgttttttaagccggtctgaaaagcgcagtattcgggtgggagtgacccgattttccaggtgcgyccgtcacccctttctttgactcggaaagggaactccctgaccccttgcgcttcccaggtgaggcaatgcctcgccctgcttcggcttgcgcacacccact

SEQ ID NO: 374142 - DNA, 201 bp, Homo sapiens
ttttaatagacaatattttatttacatgtattgtcattactagtatatactagtagtaatatatactagtagtagtaatatatatatatatatatatatawtactactactagtggtagacttctgtgtaccacttttctgtttgctttctggtttttcctgtttttctacatttcccctcaccccttgccttttttcttt

SEQ ID NO: 374143 - DNA, 201 bp, Homo sapiens
gattttacctttaattctctgggcattttaatagacaatattttatttacatgtattgtcattactagtatatactagtagtaatatatactagtagtagtaatatatatatatatatatatatattactactactagtggtagacttctgtgtaccacttttctgtttgctttctggtttttcctgtttttctacatttc

SEQ ID NO: 374144 - DNA, 201 bp, Homo sapiens
gtaacttgatggttacagaatgcagtaagacatagagaaacataataaacatatatatatatatactgggatcttgaccatgtgagtccatgaaagtctgkgaggtttttttttttttcttttttgagatgaaatcttgcactgtcgcctggcctggagtgcagtggcgcagtctcagctcactgcaacccccgcctctca

SEQ ID NO: 374145 - DNA, 201 bp, Homo sapiens
catttggtggggctttgaagttaattaaggcatcattaaaggcatgactttgagttagtctgcactgagatgcaccatgtgtgaccaaaagaaaaaaaaaaggccaagcatatttgtcatttctactacagtgtggttatatcttctttcttataagatgtgtaagcaatgtcctgcagtgtgtttgtgcagcatttatac

SEQ ID NO: 374146 - DNA, 201 bp, Homo sapiens
ctggtttctttttagcctatcagcctttctaagagtccttcagtctgtcatttgatataaccccatggtgtaaagaggtgaactctacaacagaggcccarcaaagataaaaaccctgacttgtcttaaaaaaaactgtttttttgtgataaatgtatgtctgttaactagtgaatgaagaacagagagtggctgggtagg

SEQ ID NO: 374147 - DNA, 201 bp, Homo sapiens
gcgtgaccatatgacttgctttggccaattaaatgtcacttctgagcagaagcaggaaagctcgtgcttgtttcaccacatcctgtgccatggaaacttgyagttgattcttcagccccagggtgaggatgacttggaaaagagctcccagctgatggccagtgggcatggagggtgcacaagaagtgatatgttccttga

SEQ ID NO: 374148 - DNA, 201 bp, Homo sapiens
gtctgcaggctccccaccacgttccaagcaggttttctcctttaaacctccagagatcctgcccatttgtctccacttggcccgtgtgggtatttggtgtrcagctgcttgtcacaggaacactgaattctgttcctgtacccgttgctcgtcacagctggacagagagtatgtacttaaaagggtccaataatccatctc

SEQ ID NO: 374149 - DNA, 201 bp, Homo sapiens
acttaccaacaggcctagaaactgccttcttcattactgaggattagtaatagtaattattatttcttaattataaatttaatgcttctttgtcactccccagtgtgtgtgtatacacacacacacgagaattatgtatgtaacaatgacatatttacatatgtaagaaattataaaattatctatggctggacacagttg

SEQ ID NO: 374150 - DNA, 201 bp, Homo sapiens
tggagtgtcacctcttttgggaaaccatcctgtgctggctccctgccaccatcctcccacatccccactaagaattccttccttccctctgtgtactcttytgtatcttgtatatgcctctatcactgtcctgataaacatctgtcattctcagcagtttacatgtcagtcttccccaccaatgtgagctcctcgagagta

SEQ ID NO: 374151 - DNA, 201 bp, Homo sapiens
cgttcattgtttctttcttttttttgttttttgagacagggtctcaccctgtcacccaggctagagtgcaatgataacaatctgggttcacaacaacctcygcctcccgagctcaagccattctcctgcttcagcttcccaagtagctggaattactggcacgtgccaccacaccaggctaattttttacttttagtagag

SEQ ID NO: 374152 - DNA, 201 bp, Homo sapiens
aaattgtccatgtttctgcaaatctctctcttacataagactgtacttttcacaccaaattccaaagatttggaaacccaaatctttttttttttttttttactgagtcagggtcttgctttgtcacccaggctggagtacaatggcatgatcttggctcggtgcagccttgacttctgagacttaagcaatccttccacc

SEQ ID NO: 374153 - DNA, 201 bp, Homo sapiens
ggataatatacaatgtaaataataattctttgccaatttaaatggtaaattatcagaagacacacacacacacacacacacacacacacacacacacacgsacacccctcctatgaatgaaccattttctggctttggatttattctgtctttaatgagtcattttgaaatatgtgttttaatcaacagaaggagtgctaa

SEQ ID NO: 374154 - DNA, 201 bp, Homo sapiens
actaaaagttcagtcaaatgaatttagagaggacattaatccttggtaatataataataaagtacttgtataaagttcttgtatgttctcaggagtagggrttgctgataccatgtaccaatatggaggagagatatataggctgattggtttcaaaaaaagaccatattggtcatcttatgtgtatttaacttaggataa

SEQ ID NO: 374155 - DNA, 201 bp, Homo sapiens
acttaagcttttttgattccaagtaacaaaaaccaagtgatttgtgcttaagcataaaagagacacacacacacacacacacacacacacacacacacacmtataaattttactttaagttccaggatacatgtgcagagtgtgcaagtatgttacctacatatacatgtgccatggtggtttgctgcacctatcaacccg

SEQ ID NO: 374156 - DNA, 201 bp, Homo sapiens
ggcttactatacttagtatgatagtttttaaattaatttagagcagaacctttccaagggatctgtgacaagaatggttaaatactgaagtgttgaagaargaaataatttatcctgaactttgaaagtgtattattactaatgaatttaaagataagtgtagaattgatcatttatcatttttaaaccttttaaattaga

SEQ ID NO: 374157 - DNA, 201 bp, Homo sapiens
tagctgtcattctgaaggatgtggctaaaagatgaagcttctggagacagtgaataaggcagttataccttattggcttccataactttttttttttttttaccctgaaagcctgaaagagcccattacctacttaacttggagtcctgatttttccagcaactagctaagaaactaaatgaatcactttggccgagcgcg

SEQ ID NO: 374158 - DNA, 201 bp, Homo sapiens
gaacactcgtgtgggtttgcaaaagatgcacaggcaaagtggccgcttgttgcatctaagtgtgggttttaatgtggattttctccaacaagtcatttgamtccattcgagattctctgaagtcttattttaggaaattacctcagttagataacaaatacatattattttgttctcaatattcctaagagtttaatttcc

SEQ ID NO: 374159 - DNA, 201 bp, Homo sapiens
atgctggccagagggccctgagactgaaacctactctggatacttttttagtgttcatgtggtttagtatcctgcagtggttttggggtgagtgcaaattkaagagtaaaaagccagtttataagagagaagcttgttccttgtttgctttttacctgctgctgtgtaatgtttagcccctatttgaggtcatgtccatga

SEQ ID NO: 374160 - DNA, 201 bp, Homo sapiens
agaaaatcccctgaatcacagaggctctgtggagctccacgtgttaagcgggaacctaatttatttggcattacagtgacgtagcagagcaagaggtgaarggattcatgggttgcctgatgctgctggagcccttgtgagggtttgtcggagcatatgaacttgagaccttccaactcgctgctgttaagcctgctgcct

SEQ ID NO: 374161 - DNA, 201 bp, Homo sapiens
tatttgtactatggagaaaaataaagctgggaaggtagataaggagtggggtaagtgagacttgtaagtagagtgggcaggcaaggcctattttttttttttaaacacggtctcaccctgtcacctaggcttaagtgcagtggcaccatcatagttcactgcagtcttgaactcctgggctcaagtgatcctcccatctca

SEQ ID NO: 374162 - DNA, 201 bp, Homo sapiens
agaatgtaatgaaaataagtagcttatttgtactatggagaaaaataaagctgggaaggtagataaggagtggggtaagtgagacttgtaagtagagtggscaggcaaggcctattttttttttttaaacacggtctcaccctgtcacctaggcttaagtgcagtggcaccatcatagttcactgcagtcttgaactcctg

SEQ ID NO: 374163 - DNA, 201 bp, Homo sapiens
agatgagggggagagagaagactggaggcacaaaaagactttatcaaggctgaatttttattttattttattttattttgagacggagtcttgcactgtcrcccaggctggagtgcagtcgcgccatctcggctcactgcaagctccgcttcctgggttcacaccattctcctgcctcagcctcccgagtagctacaggcg

SEQ ID NO: 374164 - DNA, 201 bp, Homo sapiens
tgagagtcgtcaccaagccctgagctagaaccttcaggatcattagacatgcatcagtcagtgtccgtctgtctgtctgtcatgcctctctcttatgcacrattatgtttatcatatattttttatgatcaggaagtaaggtattaagattaatcagacaagcagaataagaacaaacaaatgtttggtgagcgcctacca

SEQ ID NO: 374165 - DNA, 201 bp, Homo sapiens
tggtagaccataggatcaagccatgaaatgtgagagtcgtcaccaagccctgagctagaaccttcaggatcattagacatgcatcagtcagtgtccgtctrtctgtctgtcatgcctctctcttatgcacaattatgtttatcatatattttttatgatcaggaagtaaggtattaagattaatcagacaagcagaataag

SEQ ID NO: 374166 - DNA, 201 bp, Homo sapiens
tctactaaaaatacaaaaattagccaggcatggtggtgcgcacctgtagccccagctactcgggaagctgaggcaggagaattgcttaaacctgggaggcrgaggttgcagtgagccaacatcgtgccactgcaccccagcctgggcaacagagcaagactccgtctccaaaaacaaaaaagaaaagatttaaaaactaaa

SEQ ID NO: 374167 - DNA, 201 bp, Homo sapiens
tgttttcaacttccaaggtctttttctttcaacaacttgaaaagtggtagaccataggatcaagccatgaaatgtgagagtcgtcaccaagccctgagctrgaaccttcaggatcattagacatgcatcagtcagtgtccgtctgtctgtctgtcatgcctctctcttatgcacaattatgtttatcatatattttttatg

SEQ ID NO: 374168 - DNA, 201 bp, Homo sapiens
aaaattgtgatgaaaaaccagtgggattatcctttgtaatagctcattctttaagttgcatttcaataaggcattgctgtgaatccagaggagattgtcarttacagaatttttttcatgatctagtatttgcttggtgcctcagagaaaatggttgttcatctctgcccctcactgttcatgtttgggactattgtttgg

SEQ ID NO: 374169 - DNA, 201 bp, Homo sapiens
ttggtttggggaatggcgttaggcgctcacgtgagctgtgggttactcccaagtggagggtgttgtttcaggagggatctatttgcaggtggatattggarggcagaatgcctcttatgtgcaggtcttgccacactgtgtgttcagaggagcccagctgaagacacggtggaactgatctgtatggggcactcctgctcc

SEQ ID NO: 374170 - DNA, 201 bp, Homo sapiens
ctatcactaatgtcacttgattcccatcttgcttgactatggattgtaccagtttcatatttcttgcactgtcaccggttccagcccctctggattcataytgctgtgatgtgagaaataaaactaaacaaaatattactaaggatgacagatactacatctattatttttatggctgacttatttcagtgtttaaaaatc

SEQ ID NO: 374171 - DNA, 201 bp, Homo sapiens
atttgatcttctttcttttcttcgttattagtctggctcgtggtctagctattttgttgatcttttcagaaaaccagttcctggatttattgatttttttraagggtttttcgtgtctgtatgtccttcagttctgctctgatcttagttatctcttgtcttctgctagcttttgaatttgtttgttgttgcttctctagt

SEQ ID NO: 374172 - DNA, 201 bp, Homo sapiens
tcaggtcatttataaacaataaaaatttatttgactcatggttctggaggctgggcaatccaagagcattttgctggtatctggtagggtcatctcatgamagaaggcagaagcaagcaagagagacagagaggagaaatcagaccaaactcatccttttatcagaaacccacttccacaataatgacattaatccattca

SEQ ID NO: 374173 - DNA, 201 bp, Homo sapiens
gtgtggggtgagcagtaaggtgatacaggcagagcaaggccaactgtgaccgtgtaccttacattaaggactttggtcttgatcccaggaggagtgggaarcaattggagtgttttaggagagacagaaaggatcagttttgcactgtgtactccaagccacactagaaacattggagaagagatgaaaaaggccaaaaga

SEQ ID NO: 374174 - DNA, 201 bp, Homo sapiens
aagataaaattcccttgaagggtgaactaattttcacactgctttttaaaaaaaataacatccttgccacagtggcacttccacctgtgactgcagtcagrgtgaatgtggtttcaggaggggcaactggaccaagagctacacagaccccctccagttagccttccttcagacggtgcatacagtttagctctgacagaa

SEQ ID NO: 374175 - DNA, 201 bp, Homo sapiens
ggatcacttaagtctgaggctgaggcttcagtgagccatgctggcaccactgtactccaatctgggtaagagcaagactcgtctcaaaaaaaaaaaaaaaaggtctcagggttgaaaggtaaatgaagaaaacatcccctgtttttggagagatcagctcacggggggttctgctacttctgagtggtaaggggaagggca

SEQ ID NO: 374176 - DNA, 201 bp, Homo sapiens
tcagtccctgcagggtcagtttattagtctgttttcacactgctataaagaacttccctgagactgggtaattataaaggaaggggtttaattgacttacwgttctgcatggcttgagaggcctcaggaaacttacaataatggtggaaggggaagcaggcaccttcttcacaaggcagcaggagagagaagaatgaagga

SEQ ID NO: 374177 - DNA, 201 bp, Homo sapiens
ctttgtttctgctttcagagcaacagttgccctgcactcttgtgcatggccctcaaagctgttctttcttgccagctctcacctcattttccacatagcastaagatttgaaccaaggctgagagactccaccatgtctgtccagccactgtgttgcactcatgtgtcaggcacagcgcaaggtgacatgggggaaactga

SEQ ID NO: 374178 - DNA, 201 bp, Homo sapiens
gaaggaggaacttctaaacacttataaaaccatcagatcagccaggtgtggtggctcacacctgtaatgccagcactttgggaggccaaggcggttggatyacctgaggtcaggagtttgagaccagcctagtcaacatggtgaaaccccatctctactaaaaatacaaaaaattagccaggcgtggtggtggacgcctgt

SEQ ID NO: 374179 - DNA, 201 bp, Homo sapiens
ccttgaattctaatgcagactttcaaaggataccactttctttcaccaagtataatctaactatcttgttggttttctttttttaagagtaataagttagwtgctgtagttttgagatatattaacagcaaatgtactttgccaatgagtagacaatggtatattttacatgcaaagatagaattaaacccactaatttca

SEQ ID NO: 374180 - DNA, 201 bp, Homo sapiens
ttatcattcatgcacctgaagcaacctcttttagttactgctttccatgccagttaccagggctcctgaacaaacaggaagtatttactcacacataaattaatcagcatctatgtttttaacttggaatagaaaggttttttaaaaaaaattttcatcctttgtgtttatgagatgcttggatacttaattctgcacatc

SEQ ID NO: 374181 - DNA, 201 bp, Homo sapiens
gtgaatgggatctgggccctccaaaaagagacatccttttctgggttatcattcatgcacctgaagcaacctcttttagttactgctttccatgccagttrccagggctcctgaacaaacaggaagtatttactcacacataaattaatcagcatctatgtttttaacttggaatagaaaggttttttaaaaaaaattttc

SEQ ID NO: 374182 - DNA, 201 bp, Homo sapiens
gtaattgcgacttttgtcgttacttttaatggcaaaaccacaattacttatgcaccaacctaataaaatatattcacaggtttcgagattagtaggtggaygccttcaggagaccattctgcccagtgaatgggatctgggccctccaaaaagagacatccttttctgggttatcattcatgcacctgaagcaacctcttt

SEQ ID NO: 374183 - DNA, 201 bp, Homo sapiens
tctccaaaggcaggaagggtgggttgagtgctcctcacacccatcattctgacctgctgttttgcctcttaaggtgtcatgtgataacactggcccacttrgataatttaggataatcttccttttttaaagttagcttattagcaacctcaattccaaccacagctttaatttcattttgccaagtaatgtaccagattg

SEQ ID NO: 374184 - DNA, 201 bp, Homo sapiens
agatcattggtttgttcacaggaataagcaaggttagtctaaattgcagacaaaaactcaaaaagaactgatgagactagaatcttttaacaggtttgccrtcattcttgaaacacaatttttctccctccaatctccattttcattaaaaacaaatcatgataggactgatttgtttgcaaaataagctttagtcttgtt

SEQ ID NO: 374185 - DNA, 201 bp, Homo sapiens
tgctccagaggggtgggccagctgccgacatttcttgtgtcctaattgtgaggaaggttcttaaccatagaatgttaatgtaaacacaagaaaaaaaaaaagaaaaaaaaaacttctgcttaacctcagcccatttgaagcagaaagaaaattgcagggaaacccaaatctgtggtcctgattctgctgttgctttaagat

SEQ ID NO: 374186 - DNA, 201 bp, Homo sapiens
ctcacaattatggcggaaggtgagaaaggtggcaaagatacagataaagcactgttcctgaataacatttcaagtcttgaccttttttttttttttttttataactttacagacttacctattccctgcaactcattcagggtatggatgatcttgttttatggtcttgctgcaattcatagcctgttagtagctgtgtct

SEQ ID NO: 374187 - DNA, 201 bp, Homo sapiens
tcgtgatctgctcacctcggcctcccaaagtgctgggattacaggcgtgagccactgcacctggctgatgttgtttctttttattgctgcatagtattccrtggggtatacgtagcacattttctttatgcagtctgtcgttgataggcatttgggttgattctatgtctttgctattgtgaatagtgctgcaatgaacac

SEQ ID NO: 374188 - DNA, 201 bp, Homo sapiens
aggtcctatagcagtatatcacagacacatgttaacaaatggctgcccaaaaagttacatcttcaaaaataccatgttgatttgggcaaaaaaaaaaaaaatgcttatcaaattagtaagacaaaaccttttgctttttgtggcagcagttgtgggggtgaaggaaaataaaaataataagtctaaaagtaataggtctac

SEQ ID NO: 374189 - DNA, 201 bp, Homo sapiens
ctttggccaataggagttcattcaagttgtctcttgtgttttttttttaacataaccccaaaactttggagatcttctggtacaacaggatgttcttagcycatcttctgtattgtctgccccatggctggaatcagtcatttctctaataaaccctggtttcttttactggaaaatggcatttagagaccacaatctgac

SEQ ID NO: 374190 - DNA, 201 bp, Homo sapiens
tctgttcatgcagtattattcatgatagctgaaagttagaagcaaccaagtgtcctttgacagaagagtggataaacaaaaatgtggtctatccatacaayggagtactattcagtcttaaaaaggaaggaaatcctgacacatgctacaacatggatcagccttgaggacatcatgctacatgaaataagccagtcacag

SEQ ID NO: 374191 - DNA, 201 bp, Homo sapiens
aagggtaagttgaacaaattgacttttgtaaaggcctcttctgagctggactttatatgattactgtaacagttcctaaagtaacccctatttcttgactsaacctaatgggaactctttttaaagaagattttattttaaaaaaagagtgtggggaacatagctaccaatttttcatcttataggaggaaagtgtcagag

SEQ ID NO: 374192 - DNA, 201 bp, Homo sapiens
cggcccctactgggaggtgtctcctagtcaggatacacgggggtcagggacccacttgaggaggcactctgtcccttatcagagcttcaacactgtgctgktagatctgctgttctcttcagagctgccaggtagggacatttaagtctgctgaagctgcgcccacagctgccctttcccccaggtgcttcgtcccaggga

SEQ ID NO: 374193 - DNA, 201 bp, Homo sapiens
gtatcaccagcggagacagcagaccagcaaagattgctgcctgttccttcctctggaagcttcataccagaggggcaaccacgagatgccgctcagagctstcctgtatgaggtgtctgtcggcccctactgggaggtgtctcctagtcaggatacacgggggtcagggacccacttgaggaggcactctgtcccttatca

SEQ ID NO: 374194 - DNA, 201 bp, Homo sapiens
cttgtcttgtgccagtttttaaagggagtgcttccaacttttgcccattcactatgatattggctgtgggtttgtcataaatagctcttattatttcgggktgtgttccaccgatacctagcttattcagtttttagcatggagggctgttgaattttgtcaaagaccttttctgcatctattgagataatcatgtggttt

SEQ ID NO: 374195 - DNA, 201 bp, Homo sapiens
atgcttgttatttttgcgttgattttgtatcctgagactttgctgaagttacttatcagcttaaggagattaggggctgagacgatggggttttctaaatrcacaatcatgtcttctgcaaagagataatttgacttcctctcttcctgtttgaataccctttctcttgcctgattgctctggccagaacttccaatacta

SEQ ID NO: 374196 - DNA, 201 bp, Homo sapiens
gctctctgtttgtctgttattggtgtataggaatgcttgttatttttgcgttgattttgtatcctgagactttgctgaagttacttatcagcttaaggagrttaggggctgagacgatggggttttctaaatacacaatcatgtcttctgcaaagagataatttgacttcctctcttcctgtttgaataccctttctcttg

SEQ ID NO: 374197 - DNA, 201 bp, Homo sapiens
tggcctatatatccgttttgataccagtaccatgctgttttggttactgtagccttgtagtatagtttgaagtcaggtagcatgatgcctccagttttgtyctttttacttagattgtcttggctatgtgggctcttttttggttccatatgaagttaaagtagttttttccaattctatgaagaacgtcaatggtagctt

SEQ ID NO: 374198 - DNA, 201 bp, Homo sapiens
gatcttggtgctctggtagaccacagtccagaatctggggaaagatgccacctctcaactccacacctgcctctgtgctttcagtgagaaacaggcagacrgatttgttcaaaggacagtgaccagatgatcaatggcaggaagccacaccatccaaggaagcactgaaagaacaaggactcttgggaagaaaaattagta

SEQ ID NO: 374199 - DNA, 201 bp, Homo sapiens
aaacaaatcataacagaaatacaacatacctaaacctatgggattttcctcttaatttcttcgattggttgttcactagcatgtttttaaatttccacgtrtttgcatatttactgaggttccttttgttactgatttctagttttattccattgaggtcagaaaagatacttcatattatttctacttttttaaatttgt

SEQ ID NO: 374200 - DNA, 201 bp, Homo sapiens
aatacagttatcagcaagaaaaccacccatgtgtttggggattattgaatggttgaattaaggacaaactgagttccccattttattaactcctgaaatakttattacctataccactaactcttatttgtagttgatatttatatccataccatatcatctcaccatatatacgattttacataaattatctaacaacct

SEQ ID NO: 374201 - DNA, 201 bp, Homo sapiens
acctgagtagtaaaacagttcatggaaaatgaactgtagaaaaatgttacatggatgtgggtggtgtgtcttaaagatcacagataatttctaactgagtrgcattacctttattaataataacacatgaaaagttaaggaaacttcagttctggatctgagcactgacttctctgtgaagctaagtgccatttatctctc

SEQ ID NO: 374202 - DNA, 201 bp, Homo sapiens
attttggccaaggaagaaaggtctttgtcaaaatgtcgtctctaggagaggtggctcattaagttatcttaaatatgacatctctaactagctgtcacctygataagttgacatctttagattctcccttgtaaaatgacatttgattcaaggatctctccaatatcttaaagagtatgaggattgtcatcagcttatgtc

SEQ ID NO: 374203 - DNA, 201 bp, Homo sapiens
tagagcttttaggagaagaaatatctaagatgacagatggcaagatttaacaataataattagaaaatctggatatagtaaatgcaactggagagaaggcrgtagacatggaagagagaacaagatgatccaacataaggataacaggcattcctgatacagagaactaaaaacaagacaaaaaggtggtcaaacatatga

SEQ ID NO: 374204 - DNA, 201 bp, Homo sapiens
acaaaggcaggtgtgtgtgtgcacattcaagtgtgtgagctggggaagtgttgctgaaccgagacagaacatagccctttgccttggaggccttccacagygggctgaagggagactcggaggttctgtccatatctgtgagaggtgaaaaggaaaatggcttctattacaacctggattagaaaaattcctagacatggt

SEQ ID NO: 374205 - DNA, 201 bp, Homo sapiens
actacactcagagcaggagtttagtaaatatctattgggaaaaaatttaatgtatgcaggtgattatttctgaattcaccggttaagaacagtaatagttygtgtgccggatgtgaagtgttcacattcttcaaatgataatcatgggaaatcaaagcacaaaacagtcactgaacactataataaatattctcacagcag

SEQ ID NO: 374206 - DNA, 201 bp, Homo sapiens
taaaggaataacttgaaaacaattgagtgaaggtagttctatgggaggcaaagatgatgtataactgatttgatttagaaacaaatcagcctacctcacarggtaaaaaatagcttcttttaaatgatcatcctcaaagcccacttctcgggactgagttttgacagtggggacaacagtagtactcttgaagtgtcttgg

SEQ ID NO: 374207 - DNA, 201 bp, Homo sapiens
tccatatgtgagatttatatttcataaaacttatatatgatgaagtatttaaattcaacagaagctacattcacaaaatggtaagccttgctttgggaatrtcccctattaacatgcctttctagggcttgctcttcccgtacagcaagctgagtagtactggcactgccactcaaacaagtttctgatcataatgaagaa

SEQ ID NO: 374208 - DNA, 201 bp, Homo sapiens
tgttcaccaaaatgtggaacataggaactacaaaatggggtgggggcactaaaaatggagagttcagctttgcacattttttttctttttctttattataytttaagttctgaggtacatgtgcagaatgagcagttttgttacataggtatacacgtgccatggtggtttgctttacccatcatcccatcacctatatta

SEQ ID NO: 374209 - DNA, 201 bp, Homo sapiens
tcttcaaatgataatcatgggaaatcaaagcacaaaacagtcactgaacactataataaatattctcacagcaggagagatggtggctacctcatgttatygtctccttcagaagctgtagatggaacaaaactgacatgaatcagcaaagtgaaacaatatattctaaggaccttcaggattaactgtacttatgattcc

SEQ ID NO: 374210 - DNA, 201 bp, Homo sapiens
catcaaggcttgctgcgtttcatgtgcagggccatcagtgctactgggaccagcatttctgtccagcaattaaaggaggaaattccctaggaagaagtggycgggagccaggaggctgaactaaatagcattccaaattagttgcaattgtccgaaagaggaaattgctaaggccctggttcccaaactgtgggccaaggc

SEQ ID NO: 374211 - DNA, 201 bp, Homo sapiens
ttgactaattataaataaactgaaatgcatagccatgtggtagtaattctaagagtcaagagttaattcttgtgtcttatcaaaatgaaatgttaaggaarcatcaagtcagtggcctaaagttggatagattaacaaaaggcttttctattttctgttcatctaagtcaacctcaaatattacagatattttttaaagaa

SEQ ID NO: 374212 - DNA, 201 bp, Homo sapiens
attcagaatagggcccaccctcttttaaggtctctagccttaattttatccacaaaatgtcttttgccatttaatatagcatcctcacaggatccagaaawctgagtgtgaacttctttggggggccattctgcacaccacagtcaacaattattgttattacagacttaaaaaaattctgtactcaatgaatagcagaaa

SEQ ID NO: 374213 - DNA, 201 bp, Homo sapiens
ggtggtttgcacctttaatcccagctgatcagaaggctgagacagaaggattgcaagcccaggagttcgagaccagcttgggcaatatagtgagaccccccatctcaaaaatagataaataataggctagtgtggtggctcacacctataatcccaactctttgggaggctgagacgggcagatcaccctgaggtcaggag

SEQ ID NO: 374214 - DNA, 201 bp, Homo sapiens
cttctttggggggccattctgcacaccacagtcaacaattattgttattacagacttaaaaaaattctgtactcaatgaatagcagaaaaaaaaagcgggycattaacctgttgaagctctgccaagaagtgatctcttagtcacatgtttcatgaataatcttattttttagctttaaaagaatcatttcaacccttagc

SEQ ID NO: 374215 - DNA, 201 bp, Homo sapiens
tcccactccctttcctctttcaggtctctgctcgaatgttattttctcagtaattccttctccaatcccccatcctaatagctgccttgccttcaccccccagcccactccccttgatttttctctacagctagcctggccagacactgcctacaatattggtttaccttggtgtctgtcttccccacaaggatttaagtt

SEQ ID NO: 374216 - DNA, 201 bp, Homo sapiens
ggagagaccatgtggtcaggattcctgcatagatcagaagctgagaagcaggcaggtaggaatgtaaatccatgcaagctccttggaagttttagatgcawgcctaggcctggggggaaaccatgaattggctgagatttgtttttgctacccgtagactaagagttagaataaaaattaagctgaatgctggaaaataaa

SEQ ID NO: 374217 - DNA, 201 bp, Homo sapiens
ttctcctccctggatgtcactctcccactccctttcctctttcaggtctctgctcgaatgttattttctcagtaattccttctccaatcccccatcctaayagctgccttgccttcaccccccagcccactccccttgatttttctctacagctagcctggccagacactgcctacaatattggtttaccttggtgtctgt

SEQ ID NO: 374218 - DNA, 201 bp, Homo sapiens
gtgtcacagggatgcttctgtatctctgatctgaacactggtcacacccctccccaatgtaagtctgagtggggatcaccccctaccttttttttttcccctcctcttccccttcttcatcctaactaggaggagtgaagagacggcccagggctctgcatgctcttggatacagccacagccccacttcccaccctcact

SEQ ID NO: 374219 - DNA, 201 bp, Homo sapiens
taagcacgtcaagaattttctagtttgaacaatttcagggctctggggcacaaagtttgccactagttgtcttgtacctggccttggagtgattaggaaakgggaatagtgagccagagtataagattccataaaggaggtggctgggggtatagactccagattggatggttggtgtattagtcacggttctttaaaggg

SEQ ID NO: 374220 - DNA, 201 bp, Homo sapiens
gcattcccaggaagaaaaacaataatatgtaatttaaatgaaaaatctaggaggtgttttgtgattatgtataatgtgaagaaggaacagctggaaaaaaactaaacaagactgcaaaggattttaattctctgggcaacaagacctgaatgaactgtctcacaatgatctttaaaacaaggatgttgctgtttttaagaa

SEQ ID NO: 374221 - DNA, 201 bp, Homo sapiens
ctatcctttgcacaactggaaatgcaccaatccccaacccaaatgctattacataaagttaacaatacttaaatgctgatatgaagtcaataaatatctamgtcacatgataaaggaaaaagaaaggaaataaaatgaagatgttttcttagtacaagtgtatacatgcacaaacatgttcttaaaataaggaggaaacag

SEQ ID NO: 374222 - DNA, 201 bp, Homo sapiens
gtcatccattctgtgacgcgatggatgaaaaaacagatctagagaagtctagatggctcttccaggtctcagatcttctctgcctttttttttttttttttgtactctcctttgctttggtaagggtatgaccctgtatagctttaaacaaaacattatggattaaatttacacatacagatcaacttaaaagtagattca

SEQ ID NO: 374223 - DNA, 201 bp, Homo sapiens
ctcttcagttcagaaatgtttccctggaaggttccaggcctcttatgttgccaggctgatgatcctctgggcacagccacctcccgtgggtgacttccccsgaaagcaccacggtggcctcgcctctctttggcttctctcatggcagctgggccctttccattgattcttcacagcacagagaccaaactgccatttgca

SEQ ID NO: 374224 - DNA, 201 bp, Homo sapiens
tcaaaaaacataaaaagagacaagatcagtacataattataaagggatcaattcagcaagaggatataaataacacacacacacacacacacacacacacacctaacactggtgcacaagatatataaagcaaatatcattagcgctaatggaagagatagactccgttacaataacagatggggacttcaacaccaaact

SEQ ID NO: 374225 - DNA, 201 bp, Homo sapiens
tatttagaaaaccacacatgtgatataattgaaaacaagtcaagccagggacagggtcttcttctcattgctagaatgtgaggctcccccatggagcgcaaggcatattgtatttggctgtgataaagtattgcttttgacatgtgctttcttgttaatcagagtattgatggtgcattggtgagccaagcaggaaagttt

SEQ ID NO: 374226 - DNA, 201 bp, Homo sapiens
ctggggtctttctggctaagggtgttgtagaatcaccttggcagccaatgtgccactcgttgaatagctccttcagtgacttgctaggcctgatgttgacrgaagacaagccattctcttaaggcccagaaaggtcttggttgtgatcctagagctgctgctgttgatgaaggcagggatggcttttgctggactatttta

SEQ ID NO: 374227 - DNA, 201 bp, Homo sapiens
aatagtgcaagtctgggtatccttttataacagggtttctaaccatagttcagctttgctgtattaatagtattgttgatgtcagcactttcttggaagamatgttttttgcttattcaacttttgcctcatgttagatttttttttctgctaaacattgctgttatcttagtgtttgttttttgttgactggctgtttgg

SEQ ID NO: 374228 - DNA, 201 bp, Homo sapiens
ttaatcttgtgccatttaatttggtaatctggttagtgctaggaatttttcatatttaggggagagagaataataataactacagaaacagtatatagttycttgagcccctaggcatgctaggcactgtcacacacaaatgcttacactggcctgggagaaaggtgccaccattatttgcattttactgatgaggggact

SEQ ID NO: 374229 - DNA, 201 bp, Homo sapiens
gtcttggcattagtgacagcacctggaaatactcattccaattcaaatgagtctgaagtgggccctggaggggctgcatggggaaatttgcaagtggtgtytgtgccgggaatgttaagtattgatggtgatgctgaatttatgaatatggaaagaatgcgtgtactcagaaggaggatgcaaacagattttaaattttat

SEQ ID NO: 374230 - DNA, 201 bp, Homo sapiens
ctggagaattttagagctctctgggagcagggtggggtatgggataagggaagatgtgatgaaagagcagcctttcccagttagaacagatgtaggaagcragcaaccccagaaacatctggaaaactcttaaagtgcaggctagtccctgtgcaccccataaggtcgactgattagaggcagtggaggcagatgtcaggg

SEQ ID NO: 374231 - DNA, 201 bp, Homo sapiens
gggataagtttgtggtcagttaagtgaaagttaggaagaaatgtttaatttttcctttgaaatctattttttgacattttataaaggcatatgcaatttttgttaatgtttttaatgaaaagttaaaatggggaaagaacgaactgggtctctatgtaaacaaaacagtttgcaaggatatctagaatttagctatcttgt

SEQ ID NO: 374232 - DNA, 201 bp, Homo sapiens
gaaccagagaacatgtgttaaatgaatccaaatcaaacctactagttatacaaatgatttaagcgttattgtggaaatttacataaaactcagactcagcrtaaaacagtacaaacaccaaggccaaatgagttaccacagtaataaagtacacacagggcaacgtgcctgtgatatagggaaggctgtctttaaagtact

SEQ ID NO: 374233 - DNA, 201 bp, Homo sapiens
ttccccagtacctctccagcctagtctctgaggagccatccctgtcatctgggaggcctctgccttccttctctggtacatggaagcagcagaaggaacasgtgcccttctgtcttctcttgagaagtcctcccctcccttcctgtaaggtggcaggcctcaacatttttggcaccagagactagtttcatggaagacaat

SEQ ID NO: 374234 - DNA, 201 bp, Homo sapiens
taggaatgcttgtgatttttgcacattgattatgtatcctgagactttgctgaagttgcttgtcagcttatggagattttgggctgagaggatgggtttttctaaatatacaatcatgtcatctgcaaacagagacaatttgacttcctcttttcctagttgaataccctttatttctttctcttgcctgattgccctggc

SEQ ID NO: 374235 - DNA, 201 bp, Homo sapiens
tagtttgtaccctttgatttgtgatgccttttacttcaccccaaacccccgtgacatttaagatgcgtgctatacaaaatacggttcctggctaaccagcwccataacgcttgttaagctttttctattctgcagaggcgatagctctgaaatatagaagtgattgcattaaatccttggctggcaattttgtgtgggatt

SEQ ID NO: 374236 - DNA, 201 bp, Homo sapiens
gagtgggttaaaaattctgtgccattctctctaagcctgagtcttttagttttgattaaaaagagcacagtgaatgaattacttagatcccttcctaaggkgcttgctggcttagagaccacactgataaaacaagaaagattaactacactccatttctgatatgtggcccagactctctttgggtgaatgacgaggcct

SEQ ID NO: 374237 - DNA, 201 bp, Homo sapiens
ttctttcttttctttctttctttctctttctttctttctttctttctttctttctttctttctttctttctttctttctttcttttctttctttctcccttccccttccccttccccttccttccttccttccttccttccttccttccttccttcttttttttctattttttcacaggctagagcaaagataaatgggta

SEQ ID NO: 374238 - DNA, 201 bp, Homo sapiens
gcactttgggaggccgaggtgggaggatcacctgggtccaggagtttaagaccagcctgggcaacatggcgaaatccagtgtctccaaaaaaaaaaaaaaacaacaaaattagcaggacatggtggcgtgtgcctgtagttgcagctactcaggaggctgaggctggaagatcgcttgagcctgggaggtcgaggcttcag

SEQ ID NO: 374239 - DNA, 201 bp, Homo sapiens
accctttgatttgtgatgccttttacttcaccccaaacccccgtgacatttaagatgcgtgctatacaaaatacggttcctggctaaccagcaccataacscttgttaagctttttctattctgcagaggcgatagctctgaaatatagaagtgattgcattaaatccttggctggcaattttgtgtgggattgggtattg

SEQ ID NO: 374240 - DNA, 201 bp, Homo sapiens
gggcttgctggcttagagaccacactgataaaacaagaaagattaactacactccatttctgatatgtggcccagactctctttgggtgaatgacgaggcytagttttggttacacagacgactgagtagatttttcaggtgagaacaagtggaaaaggcaagaatacagtatatgatgtatctaatggtaatttttatgt

SEQ ID NO: 374241 - DNA, 201 bp, Homo sapiens
cgttctttcttttctttctttctttctctttctttctttctttctttctttctttctttctttctttctttctttctttctttcttttctttctttctcccttccccttccccttccccttccttccttccttccttccttccttccttccttccttcttttttttctattttttcacaggctagagcaaagataaatggg

SEQ ID NO: 374242 - DNA, 201 bp, Homo sapiens
tttgaagcatcctctaatttctaaaaatataaattattgttatatcattataatcagaaaaggttgttgtatttttgttggcaaggttgtggagaaagggkaactctcatcctatactgttggtgggattgtaaattagttcagcccctttgtaaagcagcttggatacttctcaaagaactgaacagagacttactgttc

SEQ ID NO: 374243 - DNA, 201 bp, Homo sapiens
tcgttctttcttttctttctttctttctctttctttctttctttctttctttctttctttctttctttctttctttctttctttcttttctttctttctcccttccccttccccttccccttccttccttccttccttccttccttccttccttccttcttttttttctattttttcacaggctagagcaaagataaatgg

SEQ ID NO: 374244 - DNA, 201 bp, Homo sapiens
ccatgttgagcccatggtgaattgtaagtgatcataatatagccaaaaatgtgtaattcagaaaagatacaggggctgttctggagctttgcttttgcatrttgcttccttataggaatagaatagttgtatttctaacttcaggtcagacaggtttggacatttttggctcaaatcatttcttttttttttttttttttt

SEQ ID NO: 374245 - DNA, 201 bp, Homo sapiens
gggcaaaattatttcccttttatcttagccaacaccctctttggaggaagctcttcattagagttgtgtgggaaaaatgtcacttaatttctagggaataygattttatacaacagcagtctctcttctctactaatttagttttttttccgacgagtcttgtattggaaagtagcttaatagttaagaaactagtattaa

SEQ ID NO: 374246 - DNA, 201 bp, Homo sapiens
cactcatggagctgtcatctcccagaataacaaggccttctgctgtctacctcctgaaggtcctgcctgaggctgcttcacagttaactttttttttttttagtataagtagaatgctgtaaaataagtattaaaaaagtatattatagtaaaaccataaaccagtaacatagttgtctattatcattagcaagtattagg

SEQ ID NO: 374247 - DNA, 201 bp, Homo sapiens
agattggaattgaatcaaatggatggtttgttgaccaaacgatgaaaaaacaagataatcagaaaaatttgtgtaaatttttaaagtgtgtttcctccctycccccaaagtgaatgaaaatacttattaagtaagggatcattgcattctactcatacccatgtatgagactttaattaaacaattttctgctattagata

SEQ ID NO: 374248 - DNA, 201 bp, Homo sapiens
ttcgttctttcttttctttctttctttctctttctttctttctttctttctttctttctttctttctttctttctttctttctttcttttctttctttctcccttccccttccccttccccttccttccttccttccttccttccttccttccttccttcttttttttctattttttcacaggctagagcaaagataaatg

SEQ ID NO: 374249 - DNA, 201 bp, Homo sapiens
caccccacatggattccctggatatctccaactcctctgctctataatgcccctgagcgtcttactcctcccccttggccgtgcctgtcttcgcagcccamaaaatatttttttctaccagtgtctcttacctgaatcagtacttcaagctgcccactcattttggccagaaacctgaattgcccttgagtctttctacta

SEQ ID NO: 374250 - DNA, 201 bp, Homo sapiens
cccttcgttctttcttttctttctttctttctctttctttctttctttctttctttctttctttctttctttctttctttctttctttcttttctttctttctcccttccccttccccttccccttccttccttccttccttccttccttccttccttccttcttttttttctattttttcacaggctagagcaaagataa

SEQ ID NO: 374251 - DNA, 201 bp, Homo sapiens
acttcatgtgtagcatcaacttggattcctctgtattctcccttgagactttgggggcaaggggaaccaacaagaacacaaagctcatgttgctttgtgccatgcacaaagctttgctttgttgttcataatacagttctatgtctctggcccaggagtctcctgtcttctgccagcatccatgaaacagtggcaggcaaa

SEQ ID NO: 374252 - DNA, 201 bp, Homo sapiens
taacattatgctgcatattcatgattgctgtttctgtttaaagttaattttttaaagcattaatcaaaatacttaatgttatgctatttctgttttaaagytcttatttttttaaagcattaatcaaaatatttcatgttatgaacataacatttattaaatgtagaattttaaggaaatgtgcctaggaaaaaagaagag

SEQ ID NO: 374253 - DNA, 201 bp, Homo sapiens
ttgccagcacagcagtctgagatcaaaccgcaaggcggcagcgaggctgggggaggggcgcccgccattgcccaggcttgattaggtaaacaaagcagcckggaagctcgaactgggtggagcccaccacagctctaggaggcctgcctgcctctgtaggctccacctctgggggcagggcacagacaaacaaaaagacag

SEQ ID NO: 374254 - DNA, 201 bp, Homo sapiens
ctcttatttttttaaagcattaatcaaaatatttcatgttatgaacataacatttattaaatgtagaattttaaggaaatgtgcctaggaaaaaagaagaratgaaaagttgttcataataccactacttctaatgctttggggttttagtatacctatttccagaatgcaaagtattcctgtaggatgagtgagatcttg

SEQ ID NO: 374255 - DNA, 201 bp, Homo sapiens
atgtgttgcaattattagtgacatgataagtgtttttgacacttttaactttttggagggttctgcccccactctaacactttttttttttttttttttttgagacggagtttcgctcttgtgtacccaggctggagtgcaatgtgcaatggcatgatctcggctcactgcaacctccgcctcccagttacaagcgattct

SEQ ID NO: 374256 - DNA, 201 bp, Homo sapiens
ttattttagatgtggtttataatgtttggaatgacagctaccatgaatataagcagatattcattaaagaacaaaggctagcaatcaaacgattttgagakccctgaaactgaattctaaaatttcctgggcaaagatgaagtaatacaaaccccccaaacctgcccaacctggccagagatttcccaaatgtccctggga

SEQ ID NO: 374257 - DNA, 201 bp, Homo sapiens
aagaaaaagaaatgatcacatgttcactggaacctgggaaaactttttgttttgcctccttaaggtgtggtcgggatagaaaatagcatagtgacccagggtccctgttctgcagggtggcaaaaaaatagaataactgcaaatacttcatttacatatgagacactgttatgctgtggttgtggatgtgttgcaattatt

SEQ ID NO: 374258 - DNA, 201 bp, Homo sapiens
attagaagtctttaataaatgtgatgtgtaagaagtatacacatttttataaatgtgattttttataaaagcgatagtgtttttataacttccatttttttaaatgattgagtgagttttaatatctgtctgcgtagagctatatatttgtctgcctagtatctgcctagttagagctttttacataactataataaaaac

SEQ ID NO: 374259 - DNA, 201 bp, Homo sapiens
attgggtctggatggtctagctctttgaagagtgaacattaagtgccactgcacagtgtatgaatgaggcatgaaatgatgccatcagagcagcagtggcrcagaggtgctgggtggatcttgtcagtttgaggttgaaccgaagcacagaagcacagaacagggtatgtctaaaacctgacatggcttctttgtgctatt

SEQ ID NO: 374260 - DNA, 201 bp, Homo sapiens
acatctgtagtcccagctacttggaaggctgagataggaggataacttgagcccaggagttggagattgcagtgagctgtaatcacaccactgcactccakcatcgacagagtaaaaccctgtctctaatatatatatattactcacatacctacacacaacacatgtgtatacaatacagtgtcagataaatgataaatg

SEQ ID NO: 374261 - DNA, 201 bp, Homo sapiens
ttcttcctgtgtaaacactgaaatgaaattttggaatgaacctaaggtggtcctgaagtgctgtgttactagaaaaagatataattggtggaaagggtggrtggatacacaggaagaagcaagaacctgaactcctgctggctgatggaagaaaatgggtgatcaagtttttgcttctgaatatttgacataaacatcata

SEQ ID NO: 374262 - DNA, 201 bp, Homo sapiens
tccaatattctgaatgcagatattactgaaatgtttattaaagatgttaaagagattagttttaggctcaaataacaattcatgaaataacctgagcccarttttccatggactatttaaaaatacctacttcctataacatgctacagacaatgcatatttgaaagatgtagaaaatatttcccattcagatcttttgaa

SEQ ID NO: 374263 - DNA, 201 bp, Homo sapiens
agaatgttgctaactctggataacacttggggacttgagtccctgaaaggctgattgacaaccagattgacaactctgattgacaaccttgcttactttgrtagggcttactatacttagtatgatagtttttaaattaatttagagcagaacctttccaagggatctgtgacaagaatggttaaatactgaagtgttgaa

SEQ ID NO: 374264 - DNA, 201 bp, Homo sapiens
acaaggggtgcctggtgctgagtacaggaggtgggagagcaaatgaaaattaattggcaaaggagggagggaaggtgttccaggcagaggcaaccacaggrccctggagggaagctgcagggattcagtatgaaccaggggagatagggaatggggattctagggagaactgaggccttgtcatggatataccacgtcagg

SEQ ID NO: 374265 - DNA, 201 bp, Homo sapiens
ttcccccatagggccttttattcaacaggaagaaaaactgtgaggttacatctttctctcaggtgcagccctttaaaaggagagagctgaaactaataccyatgtactttccaaagtgctggcttccccgtgcctctggcaacatgagtccttgcaaagcaaagctactcctttacagcctggttcattcaaaattgaaca

SEQ ID NO: 374266 - DNA, 201 bp, Homo sapiens
acataatgaatatttcacttcactttgttcttgtttgaatggtttctgaggagaagtgcaatgtaattcttatcctcactcctctgtaagtaacgtgttttccccccttggattttttttaagactttatctttgtctgcaatttgaatatgatattactaggtgtagattttttggcatttatcctgcttggtgttcttt

SEQ ID NO: 374267 - DNA, 201 bp, Homo sapiens
ataaaataataataggctgggtgcagtggctcacacctataaccccagtgatttgggaggctcaggaggattgcttgaggccaggagtttgagaccagtcrgcaacctagtgagaccccgtgtctactaagtaaataaataaataaataaacaaaactttataaaataatagcagctaaaacttacgcagtgcttattgta

SEQ ID NO: 374268 - DNA, 201 bp, Homo sapiens
tccttcaacataatgaatatttcacttcactttgttcttgtttgaatggtttctgaggagaagtgcaatgtaattcttatcctcactcctctgtaagtaamgtgttttccccccttggattttttttaagactttatctttgtctgcaatttgaatatgatattactaggtgtagattttttggcatttatcctgcttggt

SEQ ID NO: 374269 - DNA, 201 bp, Homo sapiens
gttattgtaggaaaaactaggaaataccagaaagtattaaaaggaagataaaacatactacctactcaaagtagcactactaacaatttgttgtatttttscagatttccatgcacgtatatatgtattatacatgtgtacttactgttgtgtataatagtgaatacagctatataggcagtttttacagcctgcctgttt

SEQ ID NO: 374270 - DNA, 201 bp, Homo sapiens
taggttggtggctttttccttcaacataatgaatatttcacttcactttgttcttgtttgaatggtttctgaggagaagtgcaatgtaattcttatcctcrctcctctgtaagtaacgtgttttccccccttggattttttttaagactttatctttgtctgcaatttgaatatgatattactaggtgtagattttttggc

SEQ ID NO: 374271 - DNA, 201 bp, Homo sapiens
gtgtacttactgttgtgtataatagtgaatacagctatataggcagtttttacagcctgcctgtttcagtggtcgagatcatcatgatttttccatgcttkgaaatagtcttagaaaatatgatttttaatagctgcatgtgactttaatactattccataatttatatattattttttgggttgttggtatttaggctcc

SEQ ID NO: 374272 - DNA, 201 bp, Homo sapiens
aattgtatttttagtagagatggggtttcaccatgttggttaggctggtctcacactcctaacttcaagctatctgcccacctcggcctcccaaagtgctrggattacaggtgtgagccaccgcacctggcccagattccctcaatttgtatttgagaaagtctttgtttttccttcacttttgagggataaattcacagg

SEQ ID NO: 374273 - DNA, 201 bp, Homo sapiens
cgtgtatcctgggcaagtttcttaacctctttgtgcctcagattctgcttttttttttgggacagggtatcactctgttgtccaggctggagtgcagtggygtcatcatggcttactgcagccttgacttcctgggttcaagtgatccttctcccaagtagctgggactgtaggtgcgtgctgccacattcagctaatttt

SEQ ID NO: 374274 - DNA, 201 bp, Homo sapiens
tcccttcgttctttcttttctttctttctttctctttctttctttctttctttctttctttctttctttctttctttctttctttctttcttttctttctttctcccttccccttccccttccccttccttccttccttccttccttccttccttccttccttcttttttttctattttttcacaggctagagcaaagata

SEQ ID NO: 374275 - DNA, 201 bp, Homo sapiens
caggcatatagtgtagtgtcacgtgagccagtggtaatttacatggggacccttaggttgggttggcttatgtgccatgtgaaagtgagagcctgtgcccrggatctgatttcctctttaattgagtatcaaattaaattcagagatcccggggactaccggccagaaacattttccctcatcctgatttgcttttctgtt

SEQ ID NO: 374276 - DNA, 201 bp, Homo sapiens
ctcccttcgttctttcttttctttctttctttctctttctttctttctttctttctttctttctttctttctttctttctttctttctttcttttctttctttctcccttccccttccccttccccttccttccttccttccttccttccttccttccttccttcttttttttctattttttcacaggctagagcaaagat

SEQ ID NO: 374277 - DNA, 201 bp, Homo sapiens
tcctcccttcgttctttcttttctttctttctttctctttctttctttctttctttctttctttctttctttctttctttctttctttctttcttttctttctttctcccttccccttccccttccccttccttccttccttccttccttccttccttccttccttcttttttttctattttttcacaggctagagcaaag

SEQ ID NO: 374278 - DNA, 201 bp, Homo sapiens
agtcatgagattacaaagtaatcttgaatccaatcctctgtaattttaaccaaatcactcagtatctttaagctcaaaatgtcctgtcagctttaaattgraactgaatcccactgagaaaatattatgcagtctcatcaaaacctgtgctaatttcttttttgtttttacccatcctttcttaaagaatcaataagcttg

SEQ ID NO: 374279 - DNA, 201 bp, Homo sapiens
gtttataatgtttggaatgacagctaccatgaatataagcagatattcattaaagaacaaaggctagcaatcaaacgattttgagatccctgaaactgaaytctaaaatttcctgggcaaagatgaagtaatacaaaccccccaaacctgcccaacctggccagagatttcccaaatgtccctgggaactcagagctgctg

SEQ ID NO: 374280 - DNA, 201 bp, Homo sapiens
gctgagccaagtggaagctacaagcagatcttttaaagcagaaatgagccattgaaagagcttcagtgttggtaagcataagcagacaaatgtagggaatmatgaggtaaactgtgcttattggattatggattcacaatagagtatttctagcatcttactttgtgctgggcaccctgttagatgctgtcacacattttt

SEQ ID NO: 374281 - DNA, 201 bp, Homo sapiens
ttcctcccttcgttctttcttttctttctttctttctctttctttctttctttctttctttctttctttctttctttctttctttctttctttcttttctttctttctcccttccccttccccttccccttccttccttccttccttccttccttccttccttccttcttttttttctattttttcacaggctagagcaaa

SEQ ID NO: 374282 - DNA, 201 bp, Homo sapiens
gaataatgaggtaaactgtgcttattggattatggattcacaatagagtatttctagcatcttactttgtgctgggcaccctgttagatgctgtcacacaytttttttttaaacataatcctcaaaacaaatgctgcaaagtcatttatactcattttacatataaagaatctgacattggaaagtgtaagttacccaagg

SEQ ID NO: 374283 - DNA, 201 bp, Homo sapiens
cttcctcccttcgttctttcttttctttctttctttctctttctttctttctttctttctttctttctttctttctttctttctttctttctttcttttctttctttctcccttccccttccccttccccttccttccttccttccttccttccttccttccttccttcttttttttctattttttcacaggctagagcaa

SEQ ID NO: 374284 - DNA, 201 bp, Homo sapiens
aataatgaggtaaactgtgcttattggattatggattcacaatagagtatttctagcatcttactttgtgctgggcaccctgttagatgctgtcacacatwttttttttaaacataatcctcaaaacaaatgctgcaaagtcatttatactcattttacatataaagaatctgacattggaaagtgtaagttacccaaggc

SEQ ID NO: 374285 - DNA, 201 bp, Homo sapiens
ttcctctcttccttccttcctcccttcgttctttcttttctttctttctttctctttctttctttctttctttctttctttctttctttctttctttctttctttctttcttttctttctttctcccttccccttccccttccccttccttccttccttccttccttccttccttccttccttcttttttttctatttttt

SEQ ID NO: 374286 - DNA, 201 bp, Homo sapiens
cagtagagtgacaagatttctgtcttcagaacttatatattttggggtactggaggaagggagtatataggcaacatatatatatatatatatatatatayacacacacacacacacacacacacacgtgtggccaaggcaggaggactgcttgatactaggagtttgaggacagccagggaaacatagcaagactccatt

SEQ ID NO: 374287 - DNA, 201 bp, Homo sapiens
caaaacaaatgctgcaaagtcatttatactcattttacatataaagaatctgacattggaaagtgtaagttacccaaggccaaagcccgcacaagaggcasagccatcctggagcacagccttcatgggccactgagttagaatccaaggagaggtgtggaaagggctatagacttcactccgtaaactctggcatagctt

SEQ ID NO: 374288 - DNA, 201 bp, Homo sapiens
cttcctctcttccttccttcctcccttcgttctttcttttctttctttctttctctttctttctttctttctttctttctttctttctttctttctttctttctttctttcttttctttctttctcccttccccttccccttccccttccttccttccttccttccttccttccttccttccttcttttttttctattttt

SEQ ID NO: 374289 - DNA, 201 bp, Homo sapiens
gccagtagagtgacaagatttctgtcttcagaacttatatattttggggtactggaggaagggagtatataggcaacatatatatatatatatatatatayatacacacacacacacacacacacacacgtgtggccaaggcaggaggactgcttgatactaggagtttgaggacagccagggaaacatagcaagactcca

SEQ ID NO: 374290 - DNA, 201 bp, Homo sapiens
tttacatataaagaatctgacattggaaagtgtaagttacccaaggccaaagcccgcacaagaggcagagccatcctggagcacagccttcatgggccacygagttagaatccaaggagaggtgtggaaagggctatagacttcactccgtaaactctggcatagcttttactgtagcaaacactgttaatacattatttt

SEQ ID NO: 374291 - DNA, 201 bp, Homo sapiens
tccttcctctcttccttccttcctcccttcgttctttcttttctttctttctttctctttctttctttctttctttctttctttctttctttctttctttctttctttctttcttttctttctttctcccttccccttccccttccccttccttccttccttccttccttccttccttccttccttcttttttttctattt

SEQ ID NO: 374292 - DNA, 201 bp, Homo sapiens
cacaaaggtgtatgacaaaatgagacaaaatgaaacaaaattgctccacatgctacagtggcctactgttgactagaagccttactgataacagaaacagytgattgacacatatttttaaataaatataatatttctctagttaggttttctatttcattttattttaaagatgacaaaaactaaatatgcttctcaaac

SEQ ID NO: 374293 - DNA, 201 bp, Homo sapiens
ctgccagtagagtgacaagatttctgtcttcagaacttatatattttggggtactggaggaagggagtatataggcaacatatatatatatatatatatayatatacacacacacacacacacacacacacgtgtggccaaggcaggaggactgcttgatactaggagtttgaggacagccagggaaacatagcaagactc

SEQ ID NO: 374294 - DNA, 201 bp, Homo sapiens
tctgaaaattggtgtgcagggaaatgtatcttcactgggaaatatgaaattcatagttgatcccattttccagtagttcaataatcattcataagtcccggaaagaaccatatcatactttatttgtttcatttcaagtgataagaacagctttgtgtaatgggaaaattataacctggcaccagtgttgtattagtcttc

SEQ ID NO: 374295 - DNA, 201 bp, Homo sapiens
gccactgtgaaggaggaacgccattagttcaaggataacagggtcagtttgaaatgaccatgtactcattttggggagaaaaatctatttgagcttgtcaragtttttctgtagcttcaaaaatatcaaactgtaggagttataaaactccacttttagataatatacttcttagcattaagaatttagaccttttaagaa

SEQ ID NO: 374296 - DNA, 201 bp, Homo sapiens
ccctgccagtagagtgacaagatttctgtcttcagaacttatatattttggggtactggaggaagggagtatataggcaacatatatatatatatatatayatatatacacacacacacacacacacacacacgtgtggccaaggcaggaggactgcttgatactaggagtttgaggacagccagggaaacatagcaagac

SEQ ID NO: 374297 - DNA, 201 bp, Homo sapiens
ttgtgattgcatttgggggacatctgcaatattcagattaaatctcccaggtcaagaatcttaaagtaatcacatctttgaagactgctttttcctcatayggtagcatttgcttgttccaggattagaacttgatatctttgggtgactgttattcaactaattatacttaggcagaattaatgagacgaaatattgttt

SEQ ID NO: 374298 - DNA, 201 bp, Homo sapiens
atctgaaaattggtgtgcagggaaatgtatcttcactgggaaatatgaaattcatagttgatcccattttccagtagttcaataatcattcataagtcccsgaaagaaccatatcatactttatttgtttcatttcaagtgataagaacagctttgtgtaatgggaaaattataacctggcaccagtgttgtattagtctt

SEQ ID NO: 374299 - DNA, 201 bp, Homo sapiens
ttcaatttgtttgaaaataaaaattttcaaattggttcagaaaatattatgaaccaatctgttttagttaacccttgaacagtgtaggggctggggaaccrcagttgaaaattcacgtctaacttgtggctccccaaaaacttctaatggcctactgttgaccagaagccttactgataacataaaccatcgattaacaca

SEQ ID NO: 374300 - DNA, 201 bp, Homo sapiens
ccaaaagcaggttagaatttcattgtttagactggagagagactgtgatctgtttcaattctagtcactagcagccccacctacataatgtttccagtccygttcttttttttttttttacacatttttgccttttcttttggttttgtgtctgtacatctcagctattgacacattgctgtatatatatccactgattat

SEQ ID NO: 374301 - DNA, 201 bp, Homo sapiens
caggtcttcctgagaattcttgtgaggtttatttttcctctttccattgtccaaagatgttccttatcctggcctttcatcttgtttttcttttagcatcrcctgactcccactccatttctctttttttctcacctcaaaggtctcctaattgaaatgtgctgaagcaattgaaatgtggtaccttggcaaattactgtc

SEQ ID NO: 374302 - DNA, 201 bp, Homo sapiens
cattttaaaaaaccggttttgatgaggccatagattctcttaggtgcattgtgcactgctgttgctcttccttttatctctctccttccataagcaggagmatattttataagctgcttttctctttctagtcgaggtacctggaggcagccccattcacatttgtgggactgatggtgaatggtattttgcagtggaaag

SEQ ID NO: 374303 - DNA, 201 bp, Homo sapiens
gtgtatttttttttcatccagaatgtagactagtgggaaacacatgaaagagctggactactcaagggtgattggcagtggcctcgtgctgcctcttgcastggggagggtggaggaggaagagtggtagcaaaaggccatttgctagcccaaccctgtcctgcagggctcctgtcaagaagggaggggaagatggaggag

SEQ ID NO: 374304 - DNA, 201 bp, Homo sapiens
tgtcctttcacttgaattaagaaatattttaaattgcattttatcactttgtacagattaagattcttgccttctccttccttccttctttacctctttcwtcctttccctttgggaaaatttgttgaaaatgcaaatgtggccgggcacagtggctcatgcctgtaatcccagcactttgggaggctgaggcgggtggat

SEQ ID NO: 374305 - DNA, 201 bp, Homo sapiens
gtggtgggtgtcaacacgtgacacaggaggctcggggaccagatctgtcatttgtgctccttaattgtttctcggggtttcattgcgtcacggccattacygctaatggaagttgtgtgcactcagcgagggacgagacccctgataattgtaggattctgtgtttgaaaagtaaaggcacatttaatgttttacactttc

SEQ ID NO: 374306 - DNA, 201 bp, Homo sapiens
acattttaaaaaaccggttttgatgaggccatagattctcttaggtgcattgtgcactgctgttgctcttccttttatctctctccttccataagcaggascatattttataagctgcttttctctttctagtcgaggtacctggaggcagccccattcacatttgtgggactgatggtgaatggtattttgcagtggaaa

SEQ ID NO: 374307 - DNA, 201 bp, Homo sapiens
ccttctcatagttcatccctcctttttgtagagaagaaaaccaggatttgttgccaccgtggtttccctttctgtgtttctggttactctctagtggaccyatctgtgtggtcacggttctgcaagttggagagacgccactggggggcattgacctgtgctacttgagcactatagtgaattctcacctttttcaaagta

SEQ ID NO: 374308 - DNA, 201 bp, Homo sapiens
atttccgcacactgccacagctcatgacaatttgcatgcagttaggactcaaatatgaaatttaactttttctccaattataattttatggccatattttrtatatagatatattttttaatgagataacatgctagatactactagttttataaggttattaccttgaggcaattactttaaaatatacactaacatttt

SEQ ID NO: 374309 - DNA, 201 bp, Homo sapiens
tgctcttattttggtagtcactgttctttcatatgagtagttattttaaaatgagaaaggaacctaaattagcattatacattttaagatgtacatttgcwtccatcataaactttaatttatactttggacaaataattgtaacagttgctataaaatcagttatttaataatagtttttaccactatattgaatgcagc

SEQ ID NO: 374310 - DNA, 201 bp, Homo sapiens
ttgaggctgaaggtgtctttgaaaaccacaggtcagaagaagaggcagggaaaggaggtaaaattctttgagccagattcacttttaaagtggcttatagrgatacaaagattatagactgcaggagatgaaagacaggagaaggaggtgagcttcagggtagattcattgggaatatgtttggatgtcatgaagataatt

SEQ ID NO: 374311 - DNA, 201 bp, Homo sapiens
tactaatacttataaataacatgttaaagatagcctctttcctgattataaaatacacacacacacacacacacacacacacacacacacacacacacacaggtttccgctttcagggctagatatttgtccatattcgtatttgtctatgggggactgttggtgtgagaaactttatatatatgtgtgtgtatatatatt

SEQ ID NO: 374312 - DNA, 201 bp, Homo sapiens
ttgtccagattttcatcattatctcatactatttccatttatgaaatttctgtacccatcagtatggttgactgccagacctcagaaatgtcctgttcccyaaaccactgagttttgttttcatggtctcacagcctgcccaaaccttgtccattctgaaagacccagttcaagaaagaggattcaccatgttgaaaacag

SEQ ID NO: 374313 - DNA, 201 bp, Homo sapiens
ttactaatacttataaataacatgttaaagatagcctctttcctgattataaaatacacacacacacacacacacacacacacacacacacacacacacacaggtttccgctttcagggctagatatttgtccatattcgtatttgtctatgggggactgttggtgtgagaaactttatatatatgtgtgtgtatatatat

SEQ ID NO: 374314 - DNA, 201 bp, Homo sapiens
gcacgcctgtagtcccaactacttgggagtctgaggcaggagaatcgcttgaatccaggaggcggaggtcgcagtgagccaagatcgcaccactgcactcyagcctgggggacagagcaagactctatctcaaaaaaataaataaataaaaaataaaaaaatcactttttgctttacacctcccttttcttccatgtaaaa

SEQ ID NO: 374315 - DNA, 201 bp, Homo sapiens
aagcattaaatattttaaatatagaaagaatattcatatagtgaaaaaaattacaaatatggcaggctccccaagtacttttatacaacatttttttttawgtttttttgagacaatcttgctgtgttgcccaggctggagtgcagtggcacgatctcagctcactgcaacctccacctcccgggtttaagtgattctcat

SEQ ID NO: 374316 - DNA, 201 bp, Homo sapiens
tgtggaaactgatcctgccccatgcccacagccaccccaagaacctgggtgacaccacacagagtccacagtctcacatcaccactaggttactctgcacycaggtctagatgacctgctggagctcccactgtctttcatcatctatgacttgaagttggtaatggctccttccaaggtcactttgctagctagatgcaa

SEQ ID NO: 374317 - DNA, 201 bp, Homo sapiens
aaattacctcagttagataacaaatacatattattttgttctcaatattcctaagagtttaatttccatttcacttctctgtaggatacttgtcaactctrtccaaaaggtaagactagatctgtgctcctcccagtgttaaaccgcatcattccctctagataattatcctttgcatagcttatctaaaccaacctctca

SEQ ID NO: 374318 - DNA, 201 bp, Homo sapiens
cagaacccacttttccttcatcagtgctggcagtgttgcaaagataattctcagctcttgagccctttaaaatatttagctttttaatacgtgaaaaaaaraaaataccttaaaaaagaaaaagtggaactcaaaggaaaccccttcttttaaatataatggttcaattttaagatgaagatgagtagcatttgttggggg

SEQ ID NO: 374319 - DNA, 201 bp, Homo sapiens
cagccttctgagtagctgagattacaagcatgcgccaccatgcccggctaattgtatttttagtagagatggggtttcaccatgttggttaggctggtctyacactcctaacttcaagctatctgcccacctcggcctcccaaagtgctgggattacaggtgtgagccaccgcacctggcccagattccctcaatttgtat

SEQ ID NO: 374320 - DNA, 201 bp, Homo sapiens
gcagtgcaatggcacgatctcagctcactgcaacctcaacctcccgggttcaagcgattctcctgcctcagccttctgagtagctgagattacaagcatgygccaccatgcccggctaattgtatttttagtagagatggggtttcaccatgttggttaggctggtctcacactcctaacttcaagctatctgcccacctc

SEQ ID NO: 374321 - DNA, 201 bp, Homo sapiens
accctgtgagcttgaatataatgtgtattctgctgctggtggatgaaggattcttaagatgtcagtaatatccagttgattgatggtgctcttgaattcarccatgtccttactgattttctgcctgctgagctgtccattactgacagaggggttgaaatctccaactatagtagtggattcatctatttctccttgcag

SEQ ID NO: 374322 - DNA, 201 bp, Homo sapiens
tagtctaacagcagacaccgtatgatttctaatctttttaatttgttaagctgtgtttaatggctcatgatgcggtctatctggtgaatgtaccctgtgarcttgaatataatgtgtattctgctgctggtggatgaaggattcttaagatgtcagtaatatccagttgattgatggtgctcttgaattcaaccatgtcct

SEQ ID NO: 374323 - DNA, 201 bp, Homo sapiens
taattccaacgcctctgccatatcagagtctggttttgttgtttgctctgtctcttcacactgttttgtgtgttttttttttttttttttttttttttttkgcgaagctacacatggtgtattgagtaacaggaactgtggtaaataggcctttagtaacatggtgtaaggtgtggggggaggggaggcactctgtagtca

SEQ ID NO: 374324 - DNA, 201 bp, Homo sapiens
gaggacattctggccttgatcctggtatttgtgggaaagcttttatttttgcaacattaagtataatattagctatagcgttttagtagatcttttttttatcaagttgaggggtgttcccctctattcctactttgctgaaaacatttatcaagactgggtattggattttgtcaactctttttctgcatctattaatat

SEQ ID NO: 374325 - DNA, 201 bp, Homo sapiens
ttcccactctgttaattccaacgcctctgccatatcagagtctggttttgttgtttgctctgtctcttcacactgttttgtgtgttttttttttttttttkttttttttttttgcgaagctacacatggtgtattgagtaacaggaactgtggtaaataggcctttagtaacatggtgtaaggtgtggggggaggggaggc

SEQ ID NO: 374326 - DNA, 201 bp, Homo sapiens
atcgtggttgttttaaattcccactctgttaattccaacgcctctgccatatcagagtctggttttgttgtttgctctgtctcttcacactgttttgtgtktttttttttttttttttttttttttttttgcgaagctacacatggtgtattgagtaacaggaactgtggtaaataggcctttagtaacatggtgtaaggt

SEQ ID NO: 374327 - DNA, 201 bp, Homo sapiens
ttctgacataactcttttgttgagggaatcacaaggacccagccaggttcaaggggagaagatacagatgtctggatatattactggggctgtatttttasaaaatactatctgccaccgtaagatggtatgtgagatggggatgagataggatgtgagatgtcattaactgtgatgtagaagtttgtgggggaaaacagg

SEQ ID NO: 374328 - DNA, 201 bp, Homo sapiens
tagatcaatttgggaagaattgacatgtggacaatattaaatctttcatttatttagttctttgatttctttcatcagaattttacagttttcctctatastttttgtacgtatttgttagatttatgcctaattatttcacttttggagatgctaatgtaaatggtattacgtctttaatgtcaaattacagttgctcat

SEQ ID NO: 374329 - DNA, 201 bp, Homo sapiens
aacgtattgatgcttcattacacagcagcttcttattacaacaggtgcaaatgaagacaattttaatattaaatggaaccccctcgggcctataggtcccmaagcactaacacagaattattttatgaggataatattttaacaggcattctagttgaattataggttatttgataactgtgaagaagccagaaagcaatg

SEQ ID NO: 374330 - DNA, 201 bp, Homo sapiens
aaagcggctgcttcacgctggcagctcccctctcacttttgccttccttaatggcttttgaagttcccagggctctgttttaacatagaaatggtcttcargggcagatcttgcctagagaaacatagtgtcccctgtgaggtggtgggaactttggaagactcccctccacagcctagtgcactgcccaggaagtgaaca

SEQ ID NO: 374331 - DNA, 201 bp, Homo sapiens
agcgtttcttttttggctttcttagaatttccatctctctgcttacattacctatctgttcttgcatgctatctactttatcaattagacattagagctcrtagcatactaatcgtggttgttttaaattcccactctgttaattccaacgcctctgccatatcagagtctggttttgttgtttgctctgtctcttcacac

SEQ ID NO: 374332 - DNA, 201 bp, Homo sapiens
cccttccaggcctttcctctaatggctccagctgcagctttcatcactcaccaggttttatgggcaggagtgatggggctttttccaaatcagtggtgcaygctgaaggacaggggtgatttttcgtgaaataaatggaggcttagatggccgaaccagaagggagcttgcggtcccagcccacgattctatcgtaactta

SEQ ID NO: 374333 - DNA, 201 bp, Homo sapiens
gatctgaaaattggtgtgcagggaaatgtatcttcactgggaaatatgaaattcatagttgatcccattttccagtagttcaataatcattcataagtccsggaaagaaccatatcatactttatttgtttcatttcaagtgataagaacagctttgtgtaatgggaaaattataacctggcaccagtgttgtattagtct

SEQ ID NO: 374334 - DNA, 201 bp, Homo sapiens
cttgaggagagagtgactgcagagttgatgcagggatagtgcgggatgagcctggaccattatgtggttgcagagagtaaagaaataaaacaggctggggrcttgtcagaaaagaacaaaagagccagcctgacggagctcccactggccaaagctggaacaatgtgaacaaaatcaatattagtacccttggattttagc

SEQ ID NO: 374335 - DNA, 201 bp, Homo sapiens
cgtgatgtctccagctttgttctttttgcttaggattggcttggatatgcaggctcttttttggttccatatgatatttaaagtagttttttctaattctrtgaagaaagtcaatggtagcttgatggggatagcattgaatctataaattcctttgggcagtatggccattttcatgatattgattcttcttatccatga

SEQ ID NO: 374336 - DNA, 201 bp, Homo sapiens
catctcaaaaaaaaaaaaggtcccttatctccttgaggagagagtgactgcagagttgatgcagggatagtgcgggatgagcctggaccattatgtggttkcagagagtaaagaaataaaacaggctggggacttgtcagaaaagaacaaaagagccagcctgacggagctcccactggccaaagctggaacaatgtgaac

SEQ ID NO: 374337 - DNA, 201 bp, Homo sapiens
tcagttcaatttggtgggtaaatgaaatacacttaatatttgcatttgtagtagttaacataagatttcaaggggggaaaaaaaaagcaaattttagacayacgccaagatagttaagtaagaaaatttcaactggactatgtgagagaaaatgtaaaataaaaaataccaaagtacggctgggacccggggctcacgcct

SEQ ID NO: 374338 - DNA, 201 bp, Homo sapiens
aaataaaaaggtcccatggccgggcgcggtggctcacacctgtaatcccagcactttgggaggccggggcgggcagatcactaggtcaggagattgagacyatcctggctaacacggtgaaaccccatctctactaaaaaaatacaaaaaaattagccgggcatggtggcaggtgcctgtagtcccagctactcgggaggc

SEQ ID NO: 374339 - DNA, 201 bp, Homo sapiens
tgtcaacattatattattggtaaaggatcagaacaagctgcagaggaatgtgtcagcttattattctttgaataaagtaggaaaagttttaaaaaaaaaaatcccttcgtatatgtgtctgtatgtttatttgtatataaagaagtatcctgagggaaacatactattgtctaaatgggataagtttgtggtcagttaagt

SEQ ID NO: 374340 - DNA, 201 bp, Homo sapiens
ttcaactttgttggccatttacgttggtattgaccttcatatctctaactgtcatgtttatactgttaatttaggactttgccattgactcccaccttggragatgagaattcagctctttatttttctaccacccctcaccacaaccactcccatactgcagaaacaccacacttctgtcctctcaatagagttgtatga

SEQ ID NO: 374341 - DNA, 201 bp, Homo sapiens
ttatactttagttaaaaaactgattcagaatttcataatgggctgatcaagctgatatccgaacacgatgatctctcttaaaaccataaaacaagggacarccagatatttttggcttgcttcctaatgaaagtatactttaagtatccttgtataaataaatcaatcttgaattcttaccaagccctggaactacctacc

SEQ ID NO: 374342 - DNA, 201 bp, Homo sapiens
gctaggcctcgaatatattctttttttaaaaaaatttctataatttcaaaaggtaggaaacatgacagtaatggttagttttagattttatttatttttaktttttaagacggagtctcttgctcttgtcgcccaggctggagtgcgatggcgtgatctcggctcactgcaacctctgctttccgggttcaagtgattctc

SEQ ID NO: 374343 - DNA, 201 bp, Homo sapiens
atacagaggacaattagaacaagagggcactagggctgattctggttgccgattgaatatctgtgaaatttgacaaaaatgacactattatgcaggaataygacatctacatttctaccaagcaaatatttttgtttaaaaaatccaagtaaatcttttggtagggaaacaaaatgaaacctaaatgttcaatcaagattt

SEQ ID NO: 374344 - DNA, 201 bp, Homo sapiens
ctgttgctgcctcctttgtgcccatgtgttctcagtgtttaactctcactaacaagtgagaacatacagtgtttgatttttccgttcctgcgattggtcasttaggataatggcctccagctttatccatgttgctgcaaaggacataatctcattcttttttatggctgcatagtattccatggtatatttgtactacat

SEQ ID NO: 374345 - DNA, 201 bp, Homo sapiens
ttacaagacaaacacaaagaacactatatttaggcacatcatcatcaaatagctgaaaaccaaagacaaagagaaaatgctagaacagccagaaaaaaaaagacatgtaatcttcaaagaagcaacaataagattttcagttgatttctcaacagaaacaatggaatccagaagacaatgacatgatctttttgaagtcct

SEQ ID NO: 374346 - DNA, 201 bp, Homo sapiens
aatctgaaggttgagaagaaaccaactatgcaaaagtattgttcctaggcagaaagaatgaaaaattagtgccaaagaaatggctaggtaatgttgataaytgggaaagacaagtaggtggggtttgagctgggcctgctgggcggtactgaaggtcagttcactcaacccccattcccagtcccattctcccctgccttc

SEQ ID NO: 374347 - DNA, 201 bp, Homo sapiens
tcggcacacaggtcttccaccttttactcaaaatcttgtgcacctttcttgggataggtagtggaatgaagactgtttgatattggggtgtgtgtgtgtgwgagagagagagagagagagagaatctgcacataaacaggaagccaaaatgctaatatagacaagcagtaaacctactctcttacccccaccctgcaaagt

SEQ ID NO: 374348 - DNA, 201 bp, Homo sapiens
gaatggcgtgaacccgggaggcagagcttgcagtgagcagagatggcgccactgcactccagcctgggcagccaagtgagactccatctcaaaaaaaaaaagagaatatgcagagtccccaccagcaagaaggccctcaccagatgaggccatttgacctgggcttcttagcctccattactgaaagaaataaatttcttc

SEQ ID NO: 374349 - DNA, 201 bp, Homo sapiens
ggtcagaagactgcttttgtgtagggagttgtttcccctagttcaggatgcaggagtgcaaggagagggtacagcgtgacctgttgccccaggtggcctcrgtgtcaggcagccctggtgttctgcccgcacttggatcaaggaagtcaccaggagacctgggctgtccccagcagagtatacaaagcaactctcagaggg

SEQ ID NO: 374350 - DNA, 201 bp, Homo sapiens
tatctgttcctgttttttgccaaatttttaatggggttatttggcttttgcttgttaatttgtttaagttccttatagactctggatattagacctttgtyggatgcatagtttgaaaatgttttctcccattctgtaggtttttctgtttattctctggatagtttttcttgttgtgcagaagctctttaattaggtctg

SEQ ID NO: 374351 - DNA, 201 bp, Homo sapiens
aaatccacttttctcgtcgcacatcacaatctgatcgagaagtggttcgttgttgcacagaataagagaagatggcactcaaaaatgacagttttttttttctaattttcgctcacctcatgaggcatccatttactgagctttttcccctttccaatttgtttcaaatgccaaaccacagtaaagtggtcgacgttgagt

SEQ ID NO: 374352 - DNA, 201 bp, Homo sapiens
taataggaaaaaagcattaaatattttaaatatagaaagaatattcatatagtgaaaaaaattacaaatatggcaggctccccaagtacttttatacaacwtttttttttatgtttttttgagacaatcttgctgtgttgcccaggctggagtgcagtggcacgatctcagctcactgcaacctccacctcccgggtttaa

SEQ ID NO: 374353 - DNA, 201 bp, Homo sapiens
caagctccgcctcccgggttcatgccattctcctgcctcagcctcccgagtagctgggactataggcgcccgccaccacacccggctatttttttttttttgtatttttagtagagacggggtttcaccgtgttagccaggatggtctcgatctcctgacctcgagatccacccgcctcggcctcccaaagtgctgggatt

SEQ ID NO: 374354 - DNA, 201 bp, Homo sapiens
tgcatattacattatgaggcttcctttctggccttcctgtgtaatttatcacaaactttgtgagaaaatacttgcaccaaaggcatccttgcacaaaacarcacaggtaaaggaggcttcctcctcctgcttctctcatcttttggcttttcccgggagtggaattggcatatttcttgccctttctccaggaaaccatgg

SEQ ID NO: 374355 - DNA, 201 bp, Homo sapiens
ggaggctgaggcgggcagatcatgaggtcaggagattgagaccatcctggtgaacacggtgaaaccccatctctactaaaaatacaaaaaaaaaaaaaaaattatccaggcatggtggcgggcacgtgtagtcccagctatttgggaggcagaggcagggagaatggcgtgaacccgggaggcagagcttgcagtgagcag

SEQ ID NO: 374356 - DNA, 201 bp, Homo sapiens
taataaataatcaagtttgctcagcgcctcagagtttacacagagctttcacatgtaattccatttctacaagtcaggaagtggaaatgaactcatttaaytcacacagttggaattcaaatgaagttggactctagatagtgctagctctctcctttatcccttccttccttcttcccttcctttcatcctcctaccttc

SEQ ID NO: 374357 - DNA, 201 bp, Homo sapiens
cacgatctcagctcactgcaagctccgcctcccgggttcatgccattctcctgcctcagcctcccgagtagctgggactataggcgcccgccaccacaccyggctatttttttttttttgtatttttagtagagacggggtttcaccgtgttagccaggatggtctcgatctcctgacctcgagatccacccgcctcggcc

SEQ ID NO: 374358 - DNA, 201 bp, Homo sapiens
ttccatgagtgagagccacatgagttacagtggccctgttcgcataataaatgtttagcaggaagcatttgcatattacattatgaggcttcctttctggycttcctgtgtaatttatcacaaactttgtgagaaaatacttgcaccaaaggcatccttgcacaaaacaacacaggtaaaggaggcttcctcctcctgctt

SEQ ID NO: 374359 - DNA, 201 bp, Homo sapiens
gttgctgactgacgacacacagaacctctaaaacattcttttactttccctgttcgtctccattgtaaatagggattctttgtctagggtttggggtttaagcctgttaatttagtagaacctcatttttctcttctacccctggaagatttttttccactgaggctgtgattcctagagtcagccagtatttcttgagtt

SEQ ID NO: 374360 - DNA, 201 bp, Homo sapiens
aagctactgagcatttgaaatgtagctagtgtcactgaggaacagaacacctgaaatgctgttaggtgctaccatacagaacagcaaagctttcaatcacygctgtcaatggaacacaaattaagtgaaaatctcaattataacaacacagtgattttactaaagagaaatatcaattttatagaataaatatatatgaat

SEQ ID NO: 374361 - DNA, 201 bp, Homo sapiens
ggctcaaatacatctttattaatcaaaataggaaccattgcaatcaacacatttttgccaacgagaagtaagtttgtttattcctgtagcataaaaatccrtgcttcgggattcagtgaactcttggaaagcattttctgcattctgctggttgtggaagcgttttccctgcagaaagttgtttagatgcttgaagaagtg

SEQ ID NO: 374362 - DNA, 201 bp, Homo sapiens
ggggaggatggagggagaagtcagagagtgacctctgagtttcctagcccatctcagggcagaaaggggcaagtggaatttcagtttctgtgtcctgcttrgtgggggggcggggagggaatggtctgcatgatctttctgatgttgtggttttctcagcttctttcagcttaaatacttagtatgccaaggtgccatatt

SEQ ID NO: 374363 - DNA, 201 bp, Homo sapiens
gcctatcaaagaaaatctagatatgtataatgtctagcagatatgcataattcagttgctgatattttgctttttgtcatataaaatctgtaggttttatmtttcaattttattgttatatgtgtcaaggtaggaatatacatagtagtttgctagcttaattaataactttgaaatattaggcatatggtaagtggctat

SEQ ID NO: 374364 - DNA, 201 bp, Homo sapiens
gttgagccatgattgcaccaccgcactccagcttgggtgacaaagggccatgtttcttaaaaagaaaaaaaaaaaaaaaagaaaggagggagaaattaatyccctgtctgatgaagaactggtctatgggtcccagaggatctcaaacatttccccttctgtacctttcctcgtcctgttgcctccgcctggaatgcctgt

SEQ ID NO: 374365 - DNA, 201 bp, Homo sapiens
gacaaaagatgggtcagtgatttatttaacaacccaggacattcggtcactgtgctttgcatggtgtctgaggtttttgttcccaacaactgtgtcctaggctgtctctcccagtgaactctcatatggtaaagaacagtgcgatgcccatccttcatcattttttatggtccttctgtcacgctattaagaatgtagagt

SEQ ID NO: 374366 - DNA, 201 bp, Homo sapiens
gtgcctttgcttcccaccatgattgtgaggcctccccagccatgtggaactgtcagtgcattaaacccctttcttttataaattacccagtcttgggtatrtgtttattagcagcatgagaacagactaatacagttggcaaatttgggcatcccatttccagtatagacaacagaattattctccagatttagaaagaga

SEQ ID NO: 374367 - DNA, 201 bp, Homo sapiens
taataaaatgaagcagtgtcagtataaacatgctcagtcatatcacacaagccatattgataattctgtgttaacattcataatgttccagttaggttctrttactatattttgcatgactgaaaaattgagtcattatatttaagaaggtgggggatgagggaaaatagaaaggggaaataagtttcctttagccggttt

SEQ ID NO: 374368 - DNA, 201 bp, Homo sapiens
taggaatatacatagtagtttgctagcttaattaataactttgaaatattaggcatatggtaagtggctatgcatttgtactcttgcccaagcctaccaaygtcaggggctggcctgacagcacccctaactctgagcagccattctgcaaatgtcactattgtcctcagtgagtcaggagtgaaatgtggttaaaactaa

SEQ ID NO: 374369 - DNA, 201 bp, Homo sapiens
agttggataatacagactattttcactattgaagaaatgaaagtgccgtttaatccccacctgtatgtctgaggaagggggactggctcagagctccctgctgatgcctgcgtactcagagcagctccaaaatgcctgagattgattaatttgctgcaagtgctgctaacttcccagacctcaatttctttcaatcattgc

SEQ ID NO: 374370 - DNA, 201 bp, Homo sapiens
ttctgatagtgttccaagttttcacttgaaaaaagtaaggtctgaaacgggaggctcaaaagagggagaaagaaaaagagagaaacaaactattacttatygacaatcctaacagagtctctttcttgatgtaaccctttcagccatctgtagttatggacaaaagcatttgacctgtacaggcatacattgatttactgt

SEQ ID NO: 374371 - DNA, 201 bp, Homo sapiens
tagagacaggattttgccatgctggtaaggctgatctcaaacttctggcctcaagtgatctacccgccttggcctcccaaactgctgggattacagatgtragccactctccctggcctgtatagcattatttattgtgcatttggatgattattgtatactttatgaatttttataatttgtattcattccttttccaat

SEQ ID NO: 374372 - DNA, 201 bp, Homo sapiens
aagttggataatacagactattttcactattgaagaaatgaaagtgccgtttaatccccacctgtatgtctgaggaagggggactggctcagagctccctgctgatgcctgcgtactcagagcagctccaaaatgcctgagattgattaatttgctgcaagtgctgctaacttcccagacctcaatttctttcaatcattg

SEQ ID NO: 374373 - DNA, 201 bp, Homo sapiens
cattttaatgagttttatgcttttcaacagtgaaacatttttcttaggggttatgtccaccatgcattttactttagttctgagattcttctctttgaaamccaactttcctatagtttcactttttagtgtgcttactatctttatgaatataacatgcatgttaataggcttattttataagcgagggaaggtttaatt

SEQ ID NO: 374374 - DNA, 201 bp, Homo sapiens
tacttgtgtctttacataagattgcaaagaaaattgtttcaactttagttttcctacacaaaagactttgtttcattaagttcacaaagcttttctgatartgttccaagttttcacttgaaaaaagtaaggtctgaaacgggaggctcaaaagagggagaaagaaaaagagagaaacaaactattacttatcgacaatcc

SEQ ID NO: 374375 - DNA, 201 bp, Homo sapiens
aaagttggataatacagactattttcactattgaagaaatgaaagtgccgtttaatccccacctgtatgtctgaggaagggggactggctcagagctccctgctgatgcctgcgtactcagagcagctccaaaatgcctgagattgattaatttgctgcaagtgctgctaacttcccagacctcaatttctttcaatcatt

SEQ ID NO: 374376 - DNA, 201 bp, Homo sapiens
taagactgaaactatgaaactgcttaaagaaaatgtaggagaattgatttggtacatcattggtctgggcaaatattttttgttaaaatattgaaaacacrtgggaaccaaagcaaaaaatagacaattcagattttttaaaaagctgcacagcaaaggagacaatcaagaaagtgaagagacaacctacagaatgggaga

SEQ ID NO: 374377 - DNA, 201 bp, Homo sapiens
acttgaccccgggaggcagaggttgcagtgagctgagattgcaccattgcattccagaccagaagacagagtgacattccatctcaaaaaaaaaaaaaaawatatatatatatatatatgagatttatacatgggcttttttttttaagctcatcagctgttgttagtgtattttacatgtggcccaagacacttcttctt

SEQ ID NO: 374378 - DNA, 201 bp, Homo sapiens
tgtatacatgcatcaaaatattacatgtactccacaattatgtgaaatttttatgtatcaatttttaaaaattaaaacatgacactattaaaagtactgcrtttattcctcatgaagatatttgtggactaataggaaaaaagcattaaatattttaaatatagaaagaatattcatatagtgaaaaaaattacaaatatg

SEQ ID NO: 374379 - DNA, 201 bp, Homo sapiens
gtgttaagaaaactggatctctgcatgcagaataataaaactagacccccatcaccaaatataaaactcaaataaaaatgatgtagacttaaatctaagaytgaaactatgaaactgcttaaagaaaatgtaggagaattgatttggtacatcattggtctgggcaaatattttttgttaaaatattgaaaacacgtggga

SEQ ID NO: 374380 - DNA, 201 bp, Homo sapiens
acagcatggtgctgcataaaaacagacacatagaccaacggaacagaagagaacctgttaataaatctacatatttatagtcaactcgtttttgataaagscttcaagagcatacgatagggagatgacagtctcttcaaaaaatagtgttaagaaaactggatctctgcatgcagaataataaaactagacccccatcac

SEQ ID NO: 374381 - DNA, 201 bp, Homo sapiens
atttattaggcaaaagagatagcaaggaggggggtggtggttgtcaggtaattgtcagtcggccatttggttcacagcaggcttgtgagactgcattcctsgaacaatgggtactagatgtctcaggagataacttcaaggagtcccgcaccaggaagtgatggtcctcagcaaaccttttggcgacaggagcagtttgag

SEQ ID NO: 374382 - DNA, 201 bp, Homo sapiens
gtttcctttctataaaacgtctgcaggctccccaccacgttccaagcaggttttctcctttaaacctccagagatcctgcccatttgtctccacttggccygtgtgggtatttggtgtacagctgcttgtcacaggaacactgaattctgttcctgtacccgttgctcgtcacagctggacagagagtatgtacttaaaag

SEQ ID NO: 374383 - DNA, 201 bp, Homo sapiens
accttttgtagttgccccatggttttgggatattctgacattttgtgtgtttttgtttttgtttttgtcttttttctcttttcagttttggaggtttttaytgagataatcttcaagctcagagattcttttctcaaccatttccagtctgctaatgaactatcacaggcgttttcattctgttacaacgttttttgtctc

SEQ ID NO: 374384 - DNA, 201 bp, Homo sapiens
tttggggacatattgagatgcttttgaaacatgcaaatgcgatgccaagcagacagttctgtagactgctgtgaaatctgaaagagagggatctgggctgsattataaatcagtgacccatttcatgggtcatatgggtggtggtagaagccattggcaggaggaggtgatctgtggagggagcaaggagggcatagagag

SEQ ID NO: 374385 - DNA, 201 bp, Homo sapiens
tatttcttctgttcctttctcctccttcttgtattcccattacatgtaagttacaccttttgtagttgccccatggttttgggatattctgacattttgtrtgtttttgtttttgtttttgtcttttttctcttttcagttttggaggtttttattgagataatcttcaagctcagagattcttttctcaaccatttccag

SEQ ID NO: 374386 - DNA, 201 bp, Homo sapiens
attataaatcagtgacccatttcatgggtcatatgggtggtggtagaagccattggcaggaggaggtgatctgtggagggagcaaggagggcatagagagyccaagacccagctaaaggggctttaataatgggcggtcctgagacagaactgctcagcggtgcagggagcactctcatggagagaaggggtgctgctagt

SEQ ID NO: 374387 - DNA, 201 bp, Homo sapiens
ttataagatgtgttaactaacttgactgtggtaatcatttcacaatatatatgttacatgaaatattttaaaaacataggttgacaagtacccttaatagmttgtcagttatgattaggttaaggaaattccctttaatccctggtttatttatattatttaccatggatagatactggatttgataggatcctttttagc

SEQ ID NO: 374388 - DNA, 201 bp, Homo sapiens
gttttaggaaatagttattattgcttcaaatatttcttctgttcctttctcctccttcttgtattcccattacatgtaagttacaccttttgtagttgccycatggttttgggatattctgacattttgtgtgtttttgtttttgtttttgtcttttttctcttttcagttttggaggtttttattgagataatcttcaag

SEQ ID NO: 374389 - DNA, 201 bp, Homo sapiens
gatctgtggtttcataaaattagaaatcagtaatagaaaaataactggaaaaatccaaaatgtttggaagataaatgacatgctttaaacattagttttargaaatagttattattgcttcaaatatttcttctgttcctttctcctccttcttgtattcccattacatgtaagttacaccttttgtagttgccccatggt

SEQ ID NO: 374390 - DNA, 201 bp, Homo sapiens
ggcaggaggatcactggagaagagggcttcaagaccagcctgggcaacatagcgagatccctgtgtctccaaaaatacaaaaattagccaggcatggtagyacacacctgtggccccagctacttgagaggtttaggtgcaagggttgcttgagcccaggagctcaaggctgcagtgagccatgatcgcaccactgcactc

SEQ ID NO: 374391 - DNA, 201 bp, Homo sapiens
catggtgaaaccccctctccactaaaaatacaaaaattagccgggcgtggtggcgcatgcctgtagtccctactactcaggaggccgaggcaaaagaatcrcttgaacccggggggcggagtttgtggtgagccgagatcacaccactgcactccaacctggcgacagaacgagcttctgcctcaaaaaaaaaaaaaaaaa

SEQ ID NO: 374392 - DNA, 201 bp, Homo sapiens
ttctgaagcctgctactgggagtcctcatctaatctacctaacaagaactttggcttccacaacttcccttatcttaaagtcaagcattttttttttttttcctgttgacttcaacttcaggtaaagctgaactcttttaaccaattgccaatcaggaaatctttgaatccttctttgacctgaaagcaccgcctcccccc

SEQ ID NO: 374393 - DNA, 201 bp, Homo sapiens
cttttagcgaacactaaactgagcatttgaatgtaaaggctttgcaattctacaagaatagcactcaactattttaagtatttataggtccggttcacggrcgtgttatgcaccatttaagccattttctacatggtttacttgggcagagcatagaatgcaatgtgccaagaggcaagtgcaacccacgtcactcatatt

SEQ ID NO: 374394 - DNA, 201 bp, Homo sapiens
atagtgacaccccatctatactgaaaatacaaaaattagttgagcatggtggtgggcggcgcctgtaatcccagctactcgggagactgaggcaggagaayagcttgaacctggaaggtagaagaagttgcagtgagccgagattgtgccactgcattccagcctggccaacagagggagactctgtctcaaaagcaagca

SEQ ID NO: 374395 - DNA, 201 bp, Homo sapiens
atttggtgcataaattgttgtctgacactgtttgaatatttaatggccagtcatttctatgttacccctaaggatgtcttcctttacttttagagttcctrtggttcctcctcaagttatgaattagtgttttcatgaggtagcagagaagtgtccatattaccttaaagcacacataattagaaacataaatgcactgaa

SEQ ID NO: 374396 - DNA, 201 bp, Homo sapiens
ggcaggcagatcacttgaggtcaggagtttgacactggcctggccaacatagtgacaccccatctatactgaaaatacaaaaattagttgagcatggtggygggcggcgcctgtaatcccagctactcgggagactgaggcaggagaacagcttgaacctggaaggtagaagaagttgcagtgagccgagattgtgccact

SEQ ID NO: 374397 - DNA, 201 bp, Homo sapiens
agtggtcagaataagacgggtccatcagtctgttcccccatcctcatgcagattacagatttaagcataggaaccctgtgctttcataagtgaaaaagtgktgaatattggcaatttcacatgattcagactaacacatcccctttctgggtccaaggctttgatagttgtggtgctgggaggttgtataagtgacataga

SEQ ID NO: 374398 - DNA, 201 bp, Homo sapiens
caaacagagggtccctgtaagcaggtttccacctcacaaactgaataccagagccaccatgcaggagttgaagaggccaggctcctcccctgcataaggcrcaaattcctggtggctccaccccattcccccagtgcatgtgggcctccagtccactgtgggcatgcccaggcaagccccctgggcaggttctcttttctg

SEQ ID NO: 374399 - DNA, 201 bp, Homo sapiens
gttagaaagccagattcaaatgcatgttttgtagtagctggaacttttatattgaactgaaaacctcagtcaaagctggcctgcatcaaacagggaatttkttggctcttgtaacaggtaacagagaaggccaaaggtgggcacgggattccaagtcttccttgctaagcatcttttctctctatgtgatgtttctaagga

SEQ ID NO: 374400 - DNA, 201 bp, Homo sapiens
tacatatcatttatatacttctccaatgtgatcctattaggtgaagatgacagcactggtattttagggtttatggaactgaggcctcaacacatttcagratgtcccatggacagtggctacagctgattttagatccaaaagtgctcatttccctgggcccaaagcctgttttcttgtccctgtctgttgggtccaaag

SEQ ID NO: 374401 - DNA, 201 bp, Homo sapiens
ttcatccatgtccctgcaaaggacatgatctcattcttttttatggctgcatagtattccatggtgtatatgtgccacattttctttattcagtctatcawtgataggcatttgggctggctccaagtctttgctattgtaaatagtgctgcagtaaacatacgtgtgcatgtgtctttatagtagaatgatttataatcc

SEQ ID NO: 374402 - DNA, 201 bp, Homo sapiens
ccccgactgcttaattccttatagcttaaactctagtaaagaatggcattttcacagagaagtaaagcttcagcatttgtgggttattaaatgaagacatrttaacacatgggtgccaaggaagtcttatctcgaaatctgcagttgtttgcttttctggtctttcaaagcacataaaaattctgaatttcttctttgctc

SEQ ID NO: 374403 - DNA, 201 bp, Homo sapiens
atgatgatcagagcattcttgtgaacatgcatagtatcaggtggctgttaatcattgctttttcttggtgaaagtcttgtggcctcctacaggctattcttaacaggctggtcagcccattcccagcgctgctggtattttcttttatctttcttgaacatcctgttttcctgaggctgtattagatgaataatctacaaa

SEQ ID NO: 374404 - DNA, 201 bp, Homo sapiens
ataaccagagcaatcttagcaaaaagaacaaggctagaggcatcccactacctgatttgacaatatgctacaaagctataataagcaaaacagcatggtgytgcataaaaacagacacatagaccaacggaacagaagagaacctgttaataaatctacatatttatagtcaactcgtttttgataaaggcttcaagagca

SEQ ID NO: 374405 - DNA, 201 bp, Homo sapiens
aatgatgatcagagcattcttgtgaacatgcatagtatcaggtggctgttaatcattgctttttcttggtgaaagtcttgtggcctcctacaggctattcttaacaggctggtcagcccattcccagcgctgctggtattttcttttatctttcttgaacatcctgttttcctgaggctgtattagatgaataatctacaa

SEQ ID NO: 374406 - DNA, 201 bp, Homo sapiens
aaatacctgtattacctaaagcaatccatagattcattgcaatccctaacaaaatacaaatgacattgttcacagaaatagaaaaacaatcctgatattcrtatggaaccacagaaaatcctgaataaccagagcaatcttagcaaaaagaacaaggctagaggcatcccactacctgatttgacaatatgctacaaagct

SEQ ID NO: 374407 - DNA, 201 bp, Homo sapiens
gtcacatgcaaataacatggtaccagagaaggaaatacatgtttttaaatgttgttattagaaaagaagaaataccaactaagcatctaattcaagaagayagatgaagaacagagcaaaaccaaagaaagaaaaaaaggaaataataaacatgaatagaaatgtattaactaaacagcacagaagcaataacaaagtgca

SEQ ID NO: 374408 - DNA, 201 bp, Homo sapiens
aaatgatgatcagagcattcttgtgaacatgcatagtatcaggtggctgttaatcattgctttttcttggtgaaagtcttgtggcctcctacaggctattcttaacaggctggtcagcccattcccagcgctgctggtattttcttttatctttcttgaacatcctgttttcctgaggctgtattagatgaataatctaca

SEQ ID NO: 374409 - DNA, 201 bp, Homo sapiens
ttatatggcagtttattaaattacaaaatatagcactcttctcctaagtcttcctcttgagaaaaatctaaagagtctctttctctctctctctctctcttacacacatacacaccacagaacacttcataggcctttttgtcatttgaatttccaagctgtaagcttaaacttagaaattaataatacatattttacttt

SEQ ID NO: 374410 - DNA, 201 bp, Homo sapiens
tctaattccagtattccttggtttttctgggcttctgaaggtttttactatgtagtgatttcagaaagttcattattgcttagtctgctgtgtttagttcycttcaaggttttgtaaaagagacaaaagcttttatttcttggtaggtaaagcatgttgaagttatccatttactctttttttcctttttttctttccttt

SEQ ID NO: 374411 - DNA, 201 bp, Homo sapiens
ggaaatacatgtttttaaatgttgttattagaaaagaagaaataccaactaagcatctaattcaagaagacagatgaagaacagagcaaaaccaaagaaaraaaaaaaggaaataataaacatgaatagaaatgtattaactaaacagcacagaagcaataacaaagtgcaacaaaataaaaagctggttttgtgaaaagg

SEQ ID NO: 374412 - DNA, 201 bp, Homo sapiens
taaagaaagcctttctataactcaaaaccaagatgaaataaaagaaaagattgacaggtttgccagtggcaacataaaaactttcaagaaaaagtttttatgtatgaagaaaactaccataagcaaaaccaaaagacaaatcataaactgggaataaatgtttacaacacatcatatataaagggataatctacctaatat

SEQ ID NO: 374413 - DNA, 201 bp, Homo sapiens
acttatatggcagtttattaaattacaaaatatagcactcttctcctaagtcttcctcttgagaaaaatctaaagagtctctttctctctctctctctctcttacacacatacacaccacagaacacttcataggcctttttgtcatttgaatttccaagctgtaagcttaaacttagaaattaataatacatattttact

SEQ ID NO: 374414 - DNA, 201 bp, Homo sapiens
atatttagtggtgctgaggttagggcttctaatgatcccatcaaccaaacagtgaacatagtccccagtaggtagtttttaaacccttgccctccttcctytctcctcccttttatattccccagtgtttattcccatctttgtgccgtgtatacccaacgtttagctcccacttacaagtgagaacatagtatatttggt

SEQ ID NO: 374415 - DNA, 201 bp, Homo sapiens
ataaagaaagcctttctataactcaaaaccaagatgaaataaaagaaaagattgacaggtttgccagtggcaacataaaaactttcaagaaaaagtttttatgtatgaagaaaactaccataagcaaaaccaaaagacaaatcataaactgggaataaatgtttacaacacatcatatataaagggataatctacctaata

SEQ ID NO: 374416 - DNA, 201 bp, Homo sapiens
ctccccatcccccagccaccggaaactatcattctactttgtgcctctcattttgactactctaggtatcccatataaggagaatcatacaatatttatcwttttgtgactggcttatttcacttagggtaatgtccttaaggttcatgcatgtggcatgtcagaatttccttcctttgtaaggatgaataatgttccatt

SEQ ID NO: 374417 - DNA, 201 bp, Homo sapiens
cactacatcaatagtataaaagacaaaagtcatatgatcatctctataggtgcagaaaaagcttttgataaaatttaatatctcctcatgataaagtctctcaatgaacttggacatacctcagaattttaaaggcaatatatgacatacagctaacatcataccaaacagaataatttgaagcttttcctctaaaatctg

SEQ ID NO: 374418 - DNA, 201 bp, Homo sapiens
gctttatactacattttgaaatcaggtagtatatgatgcctccagcttttttctttttgctcaggcttgctttggctatttggaatattttctggttccayataaattttagcattatattttctatttctgttaagaatggcattgatattttgatagggattccattgaatttgtaatttttgagtagtattgtcattt

SEQ ID NO: 374419 - DNA, 201 bp, Homo sapiens
tactgggttctctgttctgttgcattgatctatgtgtctgtttttatgctggtaccatgctgttttggttactaaagctttatactacattttgaaatcargtagtatatgatgcctccagcttttttctttttgctcaggcttgctttggctatttggaatattttctggttccatataaattttagcattatattttct

SEQ ID NO: 374420 - DNA, 201 bp, Homo sapiens
tatcctgtgcgttgttaataatatcattttatatttaattttttaagctctcatagaaggattactaatcttttacttgcacacttctggtacccagaagktcttcagtagaggtttatgaataaatgagtggtgtatctttacctcccttctcaactactaaccaaactaaatatgcttagttcctcagttgagcctcat

SEQ ID NO: 374421 - DNA, 201 bp, Homo sapiens
aggagtgcagatatctttttgatatattgatttcctttcttttggatatataccaagtagtggaattgctggatcttatggtagttctatgtttagtttttgagaaacctcaatgcagtttttcataggggctgtactaatttatattcccaccaacactgtacaagggttcccctttctccacatgctcaccagtatccg

SEQ ID NO: 374422 - DNA, 201 bp, Homo sapiens
ttaggctggtctttgagtgttatattatctcttcctggctcttttaattttctgctacagacagaacttccattgtatttaaaatagcatttattttatartaaggctgaaaaaaaaacagtacaaaagacttagaagaatatagtcaaggtagagttgatgtcaaatggaaatggtaacattcatttaagtagagcaatt

SEQ ID NO: 374423 - DNA, 201 bp, Homo sapiens
gacaggatttcatgcttttttgtggctgaataatattccataatgtaatatgagatattgtgttcttgtgtgtttgtgtgtgtgtgtgtgtgtgtgtgtgkatgtgtattacattttctttatttacttatttattgatggacacttaggatgactccatattttggcaattatgaatagtgctgcaataaacataggagt

SEQ ID NO: 374424 - DNA, 201 bp, Homo sapiens
agcaacagctgtgggctgttaccctcctggatcacacaccccaacactgaggggggtgggctggcagtagttcaagtagaagtcctggagttgagtctcaytagaccaccttgagttgtgtgttcatttctgagccagtcactgtggccagggagatgtgatcttgggcaggccggagttaatagttgactaccctgctat

SEQ ID NO: 374425 - DNA, 201 bp, Homo sapiens
ttatggtgaggaccctcttctgggttgcagacttccatcttttttgttgtgtcctcacatggcagacagagggggaaagagctgagtccttttcttttttwaaaaaaatgttattttattttaaataataaaaacaaaaaataaatcgacacataattgtacatacctatgaggtatagagtgatattttgaaacatgtat

SEQ ID NO: 374426 - DNA, 201 bp, Homo sapiens
gtctttctttgtttcttttgcccacttcctatcattttgtacccacttcaccctccttcaggaagatattgcacatttattgcggttctagccatcggcasgtacactcttgccttcccatcagacattctggtcatgtaaatcatttagttagaacttcatgttgagatcattaggagaaatgtgtccatcaattcctta

SEQ ID NO: 374427 - DNA, 201 bp, Homo sapiens
acaagaatgaaaactggatcagaagccgtttcctttgccactcttgtcaatagcaaacatattcaagggtggaggtttaattttgagaaatgttttctacwttccagaaactgatatttaccttgctcagaaaaagagtcttagatcagttaagagctgtagttcagcacttgaggttgctggaactgaaatctaacaaag

SEQ ID NO: 374428 - DNA, 201 bp, Homo sapiens
gactttacatctgggaaaggagaaattgtaggtctctcttactctgggatatttttgatagagcaaaggtatccatgatgtaaatttctgagatattatakataagccctttataaagtcacaaataatattcccataatgaggggggaaaagattccaaagaaggctgagcacttactgagggcagggaccatcattgtc

SEQ ID NO: 374429 - DNA, 201 bp, Homo sapiens
tgaaggagttgggagcgcatctcccaataatcccaaagaaaccgagctttcagtgcatgcaaggggcatttgatttccctcatttctgagcactgaagcastccactgtcatatttttgaaattcgagaacaaggaggttaaagagtctaaatggaagactaggtgaccatccaaaatatcatacatcaattgcatcttgt

SEQ ID NO: 374430 - DNA, 201 bp, Homo sapiens
tctctggtttccaaatttaaatagggatgctttgagaaaatgtgatttatatacaggcgaacagtgactccataaaagtcactgtcgtaagtattccagckacccagggccaagtttatacagaccctgcctgcattttaccaaccatctgtggttttacaagaaagaatgaacaattgcaattagcagcttatccagaaa

SEQ ID NO: 374431 - DNA, 201 bp, Homo sapiens
gggcgcccggcttcatccggccgcgggggaccaggagcctgagagcctggaactgggtgcggggggacagccagcccgagagggcccagggtcggatttcrgatggaaccagagctcgctccagggagttgaaggagttgggagcgcatctcccaataatcccaaagaaaccgagctttcagtgcatgcaaggggcatttg

SEQ ID NO: 374432 - DNA, 201 bp, Homo sapiens
tataaagaaagcctttctataactcaaaaccaagatgaaataaaagaaaagattgacaggtttgccagtggcaacataaaaactttcaagaaaaagtttttatgtatgaagaaaactaccataagcaaaaccaaaagacaaatcataaactgggaataaatgtttacaacacatcatatataaagggataatctacctaat

SEQ ID NO: 374433 - DNA, 201 bp, Homo sapiens
agccctggcggctgctgcctgcagccgacgcgcgggggcgcccggcttcatccggccgcgggggaccaggagcctgagagcctggaactgggtgcgggggsacagccagcccgagagggcccagggtcggatttcggatggaaccagagctcgctccagggagttgaaggagttgggagcgcatctcccaataatcccaaa

SEQ ID NO: 374434 - DNA, 201 bp, Homo sapiens
atataaagaaagcctttctataactcaaaaccaagatgaaataaaagaaaagattgacaggtttgccagtggcaacataaaaactttcaagaaaaagtttttatgtatgaagaaaactaccataagcaaaaccaaaagacaaatcataaactgggaataaatgtttacaacacatcatatataaagggataatctacctaa

SEQ ID NO: 374435 - DNA, 201 bp, Homo sapiens
ggcccaaacacaactattaatagaagtatggatactcggtttggatatctctttcaaaacaaagaagagtctcttaaaaactcttgagaaatcaaaacttstaactgccttattctttttcatcccttcttcccctttaaagttgtatttattggatcacattatggtgcccccaacttaagagctaacaagtacatttct

SEQ ID NO: 374436 - DNA, 201 bp, Homo sapiens
gatataaagaaagcctttctataactcaaaaccaagatgaaataaaagaaaagattgacaggtttgccagtggcaacataaaaactttcaagaaaaagtttttatgtatgaagaaaactaccataagcaaaaccaaaagacaaatcataaactgggaataaatgtttacaacacatcatatataaagggataatctaccta

SEQ ID NO: 374437 - DNA, 201 bp, Homo sapiens
taaaggcatgaaagagggatttacttatgatatgaagttatttcccaaactgaaactatccagacttccagaagctcttgatgtagtgccagttttgaaayaatcttcaaggatgtttcccaaggaaggtcccccttccaaataaagccagtatgaaaggaagaatctaggaaagctatgataagccaggtacttaatcag

SEQ ID NO: 374438 - DNA, 201 bp, Homo sapiens
aaaaaattacctgtcttcctctgggtatttatttttgctacagcttgagctcctctcttagtttcagtgccacttgatagtatggacagataaaactccayggtgggggtcacacacacacacgttaaccaaaaataaaattctaagccctgcaaccaactgaatggatcccccttatggccgaggggattccaaagaaac

SEQ ID NO: 374439 - DNA, 201 bp, Homo sapiens
accacagagactataatattttacattctcaccaatagtgtgaaagggttccggtttctccacatcatcatcaacacttattattttctttttttttttttgatattagctattccagtgggcatgaggtgatatctgattgggttttgatttgcgtttccctaatgattaatgatgtttggcatctttttatattctttt

SEQ ID NO: 374440 - DNA, 201 bp, Homo sapiens
ctgatatgtgcctgttatcctgccaccccagtcctgaagctgctgccctcttctcaagcagtgtgaaggatccaagcaagccgctggtgatggggttgccwgacacctagtcctgggtgatccccggccccaactgctcccagctctgccatatccgacctactcacacatcccttgtcgcaattagttcgcaccttgcac

SEQ ID NO: 374441 - DNA, 201 bp, Homo sapiens
aacctaactacctcaggcatatgttctcaggacctccgaaggctgtgtcacaggtcatggtactcacatttgattcagaataaatctctctgaatattttrtagagtttggctttttttggtcaacactcacatgacttcagggctgagagacaagtgaccttagtcactaagtggctgggcataagaagggtcacaactg

SEQ ID NO: 374442 - DNA, 201 bp, Homo sapiens
aaatcgcccacagttaccatgcttcagttcattcatgtgatctcatttttcttggacactggacaaaagctcaggatccattagtgtagatacaaaaggcwgtcacactagttcattgccttcactggcagagggcagctgcctcatgcgaaaaggcaaagggcccactgagctgttaacacttaagtcatctgtggacag

SEQ ID NO: 374443 - DNA, 201 bp, Homo sapiens
acaacctaaggaagagggtgagggtggtgagactcagattgacccgtgtcttttgtaaattcttcttcctttcttccttccttcacccctagagccctttrtttcctcaaagagatgaactgggacaggtacgcacttcagactgtctcagaggcatttagccctgattaatgcctctgaaattaaagcttgttatcttcc

SEQ ID NO: 374444 - DNA, 201 bp, Homo sapiens
tttttttggtcaacactcacatgacttcagggctgagagacaagtgaccttagtcactaagtggctgggcataagaagggtcacaactgcttagctccagrtaggaatataggtctagttttggcagatcttctgagttttcataaatgccaaactctggaatttattttatttatttttattttaattttttttgagatg

SEQ ID NO: 374445 - DNA, 201 bp, Homo sapiens
ctgcggagagccactttgatcagcagtaaaatcgcccacagttaccatgcttcagttcattcatgtgatctcatttttcttggacactggacaaaagctcrggatccattagtgtagatacaaaaggcagtcacactagttcattgccttcactggcagagggcagctgcctcatgcgaaaaggcaaagggcccactgagc

SEQ ID NO: 374446 - DNA, 201 bp, Homo sapiens
ctggagagtgtgtgtgtgtgtgcgtgtgtgcgtgtgtgtgcgcgtgcgcgtgcatgctttttgggagaatgtgtatattgggagcatttggttacagccartgtccccagaatgaggcttccaggccagcaggttttgcaggtgctaaatatgggcacccctgctacacatagcccgcagccttacctgcacattgagaat

SEQ ID NO: 374447 - DNA, 201 bp, Homo sapiens
gctaatgtcagtgaatttttcttgaatattcgggacataaaacagaaaaggagtttatacgtagtgtaattatttcttacatatgttttggtcagtaagcyggtttatagagaaacctatgcttgttccttaaactgtagattaagaatataggagttattaaaattaataatacttttgtttacataaaagtaggactgc

SEQ ID NO: 374448 - DNA, 201 bp, Homo sapiens
ccaaaacagatatatagaccaatggaacagaacagaggcctcagaaatcactccacacgtctgcaaccatctggactctgacaaacccaagaaaaagaagmaatggggaaaagattccctatttaataaatggtgttgggaaaactggctagccatatgtagaaaaccttttacaaaaattaactcaagatggattaaaga

SEQ ID NO: 374449 - DNA, 201 bp, Homo sapiens
gctcttttctaagaggcttcatgagtatcccgaaataactgcaaaattcatcaaatggaaatgattaccatgaaatcaggcttctgacttagatttttccrcaattagtgggaaagcatcacacgtggatttatgttatttggacagactggggaaagcctaaaccagactatacattttcaagaattactcagtagagct

SEQ ID NO: 374450 - DNA, 201 bp, Homo sapiens
tattcaggagacccatcttatgtgcaaaaacacgcataggctcaaaataaagggatagaggaatattttccaagcaaatggaaagcaaaaaaaaaaaaaaaggaggggtcgcaatcctggtttctgataaaacagactttaaaccaacaaagatcaaaagacacgaagggcattacataatggtaaaggtatcaatgcaac

SEQ ID NO: 374451 - DNA, 201 bp, Homo sapiens
taacccaaatgatacaagagcactatagtgatttatatatatatatataaaaggtaacataccatatataaatttatatatttatatataatatatatacyataatagaaaacatactatatatgtgtgtgtatatacatatatatagagagagtatgatttttgttaccttttaaaatagttctttttgattctctattc

SEQ ID NO: 374452 - DNA, 201 bp, Homo sapiens
gatagtaatcagacaaatcaaacaactagtagtagtggagagacacgtagccctacaggaaggggtagaattatcattaaaaacacagacaaaccagagaytgcctgaaaaaaaaaaaaagatgaactggaaagattcaaagtaggctctattggaggtgagtatggaaaacaagcttagctttttattttgaagtttcct

SEQ ID NO: 374453 - DNA, 201 bp, Homo sapiens
gtatttaattctctttgtagcaattgtgaatgtgagttcactcatggtttgcctctctgttggtctattattggtgtatagaaatgcttgtgatttttgcrcattgattttgtatcttgagactttgctgaagttgcttatcagcttaaggagattttgggttgagatgatggggttttctaaatatacaatcatgtcctc

SEQ ID NO: 374454 - DNA, 201 bp, Homo sapiens
ctacaggaaggggtagaattatcattaaaaacacagacaaaccagagactgcctgaaaaaaaaaaaaagatgaactggaaagattcaaagtaggctctatkggaggtgagtatggaaaacaagcttagctttttattttgaagtttccttccaggagttggatactgtgatctcttcaatcagcatgtttatatagtgagg

SEQ ID NO: 374455 - DNA, 201 bp, Homo sapiens
aaaaaaaaaagatgaactggaaagattcaaagtaggctctattggaggtgagtatggaaaacaagcttagctttttattttgaagtttccttccaggagtkggatactgtgatctcttcaatcagcatgtttatatagtgaggaggaagaccagaaatgagaagaggaataagaaaatggcagcacagccttttggggtat

SEQ ID NO: 374456 - DNA, 201 bp, Homo sapiens
tcaattgagcataatcctcacttcttctggccttcaaatgtgggaaagcagcacccaggagaatgtgctgtgatgacagcagcagcagaatccctggaacrtcgagttcctagaagattgtctttttcatagcaagggcctggatgacacctgcagtgtttcaggcaatctagtgtgttctttagccacagtcttgagagc

SEQ ID NO: 374457 - DNA, 201 bp, Homo sapiens
agaaatgagaagaggaataagaaaatggcagcacagccttttggggtatggataagggtggtcttcctgctacagcagaggagaggggcatgtgtggcccrtgtggaagagcaactgagttggtggctgactgaatttgggtccgaagcaaaaataggatatgaggataggtataagaattttattttgtgctatgtgtgt

SEQ ID NO: 374458 - DNA, 201 bp, Homo sapiens
ctcctgtgtctctgctgttgccagtgttagaaaccttaaccccttggagtctgttcatctctcttgctggttctgctccctggtatgcgtgcagctagtgmctgtgcaggcatcaggtgacctctccgcctactttaggcaaaagccagagaataaaagagaggatccttcaagacatgtacaacccaattatagaggtat

SEQ ID NO: 374459 - DNA, 201 bp, Homo sapiens
attcctgttttcttccccagggtatgtttgtgctattattaaatgattacacatgcttgttcattccttcctagtgtatactttctagctaatgtcatttsaagctaaaaataagtctggtccttagttagagttcctgagatttttctgcccagccgtctgtctttctcctgagatttgggtcttctcacatcatagtga

SEQ ID NO: 374460 - DNA, 201 bp, Homo sapiens
ggccgaggtgggcagatcacctgaggtcaggagtttgagaccagcctggccaaccaacatggtgaaaccccttctttactaaaaatataaaaattagccgrgcgtggtggcaggcacctgtaatcccagctacttgggaggctgaggcagaagaatcacttgaactcaggaggcagaggttgcagtgagctgagatcgcac

SEQ ID NO: 374461 - DNA, 201 bp, Homo sapiens
cctggccaaacacggtggctcacgcctgtaatcccagcacttagggaggccgaggtgggcagatcacctgaggtcaggagtttgagaccagcctggccaamcaacatggtgaaaccccttctttactaaaaatataaaaattagccgggcgtggtggcaggcacctgtaatcccagctacttgggaggctgaggcagaaga

SEQ ID NO: 374462 - DNA, 201 bp, Homo sapiens
ttttctttaaaaagagcctctatgttttatagataaataatgaaatgccaatggatttgttgttgttgttgttgttgtttgagagggagtctcgctctgtygcccaggctggagtgcagtagcacaatctcggctcactgcaagctccacctcccgggttcacgccattctcctgcctcagcctcccgagtagctgggact

SEQ ID NO: 374463 - DNA, 201 bp, Homo sapiens
agtcaagatcgtgccactgcactctagcctgggcgacagagcaagactctgtctcaaaaagaaaataataataataataataataataataataataataaagatgtcccgaatagccaatgagcatagaaaagttactcaatattattcatttttaggcaaatccacattgaaaccaggatcacatgccactgtgtactc

SEQ ID NO: 374464 - DNA, 201 bp, Homo sapiens
gagtcaagatcgtgccactgcactctagcctgggcgacagagcaagactctgtctcaaaaagaaaataataataataataataataataataataataataaagatgtcccgaatagccaatgagcatagaaaagttactcaatattattcatttttaggcaaatccacattgaaaccaggatcacatgccactgtgtact

SEQ ID NO: 374465 - DNA, 201 bp, Homo sapiens
tgagtcaagatcgtgccactgcactctagcctgggcgacagagcaagactctgtctcaaaaagaaaataataataataataataataataataataataataaagatgtcccgaatagccaatgagcatagaaaagttactcaatattattcatttttaggcaaatccacattgaaaccaggatcacatgccactgtgtac

SEQ ID NO: 374466 - DNA, 201 bp, Homo sapiens
aggagatgcaaaaacatatacaattataaaacaacttcatttaaccaggaaacacttaattgactacaaactgggtaatgattttgaaaaatatgagactraaagaaacacatactcgcagactaaagcaaggagaaaaccatataacttttttctccaatcttattgaaggcttattcagtattttaaatactaagttct

SEQ ID NO: 374467 - DNA, 201 bp, Homo sapiens
cagacgcttgggggctggctgtgcttgtgaagctgaatttgattctgtatcagtgggaggcccttggattggagtagttaaaggagggaagtgacctgagrtcatgtaccctagaacttaaagtataatttaaaaaaatatatatatatatggaaaaaaattaaaaaaaatgaaaacctagaaagatacaaggttctatgt

SEQ ID NO: 374468 - DNA, 201 bp, Homo sapiens
gttgaaaccccgtctctactaaaaacacaaaaaattagccaggcatggtggtgggcacctgtagtcccagctactcgggagactgaggcaggagaatggcrtgaacccgggaggcggagcttgcagtgagccgagatggcgccactgcactccagcctgggggacagagcgagactccatctcaaagaaaagaaaaaaaaa

SEQ ID NO: 374469 - DNA, 201 bp, Homo sapiens
ccgtgtctttacctagtgatcagcagggccgcagcgggttcctgcctgcagtagggagggggtccttggagagaatgtggtttctttggaggactctcacratcgtttaatgaagatatctatgcatgccccgttgtgttctgtataattgcaagtgtgactgttacctctggaagatctccttaggcaacgaaatggcta

SEQ ID NO: 374470 - DNA, 201 bp, Homo sapiens
tgcatttggatggtgtgccgctgccgcacaagcaagcactgaccgtttcattaggacccctgcctccgccgcccactgccaagagagaaaaaaaaaaaaaacactggctcttgagagccaattgttaagttttcaggaattttctgagctgggtcttcaactgttggtaacttgaattcatccatggtagaaggatttaca

SEQ ID NO: 374471 - DNA, 201 bp, Homo sapiens
caactaagtaaagggttcatgttaacctttggggccttcttgtagtagaccagaaaaagcagtggtgtggatggctctgtgtaggtgtgtaacatctttargacatggcttgtctgtacttttcttacgtctgcaaggagtgacttctacagcactgagggtttaggtatgtaattcaagaagtcatgaaaatctgcctgg

SEQ ID NO: 374472 - DNA, 201 bp, Homo sapiens
tttgaaaataatctaatctgactacagtaaactaagatttttgaagaaatatatccttttcagaagttctcaaaattacttaaagctatccccccaatttrtcaactgccacaatcagtcgcacccggtgagcacatttccgtgtctttacctagtgatcagcagggccgcagcgggttcctgcctgcagtagggaggggg

SEQ ID NO: 374473 - DNA, 201 bp, Homo sapiens
ctgcaggtgatctgcctgctgggattacaagtgtgagccactgcacctggccaaaagctattaattttaatagagtctaacttacaagtttttttttttttaatagttaacattttctgtggcctgtttaagtttttttagcctatgccagggtcaccaatatactctgtgattttccgtgaacactttattgctttattt

SEQ ID NO: 374474 - DNA, 201 bp, Homo sapiens
actgtcactcccttgggagagagccctccgctcccatgtcctctgcactgttttcacatgaattgtgtagaggatctggaatggaatgttgccatgtgatyaggtaccagtgagacaaattctgtcagtgatccttctgtattttaatttatgcagaccataaaagatattcagtctgttctctaatttatagaccttctt

SEQ ID NO: 374475 - DNA, 201 bp, Homo sapiens
gtgggtctgcacttgaataacattagcacacactacctgcagtttttagttggagtaaatgtgcaaacttatagtagcccacgaagtcattgttgagagcmagagtatccataaagatatatatatatatatttttttttttttttgagttggagtttcactcttgttgcccaggctggagggcaatggcatgatcttggc

SEQ ID NO: 374476 - DNA, 201 bp, Homo sapiens
tgcttttgaacatactgcctttgaatttgattaggtgtagacagtcaatagtaggaaacgtaggaaactcccttcttccttccttccttttttttttttttcgacagagtctcgctctgttgcccaggctggactgcggtagtgcggtcttggctcactgcaacctctgccacccgggttcaagtgattctcctgcctcag

SEQ ID NO: 374477 - DNA, 201 bp, Homo sapiens
ggatgcaggtaggtggaatcccaggacagccaatagcccaaatcctccaggtactagtggcaggggaatgtgactccaaggagaatagggtgttgtgagcrtttctaggtgaactgaaaaccaacccattcttaccccacaccttactttttgcaaccttggaatgaagggaattatccatatgaactctaaaattccatg

SEQ ID NO: 374478 - DNA, 201 bp, Homo sapiens
gtgagaccctgtttctgaaacagaaaaaacaaaaaacaacaaaaacaaaaaaacaattggtcatggtggcacatgctcgtagtccaagctactcaggcggytgaggtgggaggatggctagatcccaggaggttaaggaggtgggaggatggctagatcccaggaggttaaggaggtgggaggatggctagatcccaggag

SEQ ID NO: 374479 - DNA, 201 bp, Homo sapiens
atttagtggatctagaacctccttttagaacagaatgataaatatttgtatatctcagtagagataaatttggtttttaaagtgtacagatgatttacgtktactgggtcaagatgtcatgactatgagtcacaataaaaaaaacaatttttaatatactgctttaaatggtagactctatttcttgtcaatttgttttcc

SEQ ID NO: 374480 - DNA, 201 bp, Homo sapiens
ctcctcaccaaggaaagatgttgatctcctcatacttaggaaatactccacaaatgcttttaaaattccaatgacatctacgctagggttacagttaagcyctatggcctcctgctcattttttaatcaacttgatctcaggcctgaaagtaaccagaatgttcatgtgtactgttcttccatgaggtaattaattgaatg

SEQ ID NO: 374481 - DNA, 201 bp, Homo sapiens
ggagggaagctgcagggattcagtatgaaccaggggagatagggaatggggattctagggagaactgaggccttgtcatggatataccacgtcaggaattkggcttcagctcatgaatgacagagagccccaaaggatttgggtgtggaagtgacaaggggaaagggccacactggagatactgcagagacagagtggatc

SEQ ID NO: 374482 - DNA, 201 bp, Homo sapiens
aggaagatggtgactagtgagctctaatcagcttggagcttgattattgcaatggaccctttttcaggctatgacattggacatccctttaggactttagrtctgcagatttggtgataagtttgctccactcaggattcaaactgtgaaacatgttgttctgatttggatttcagatacaacacaatttttacacttttt

SEQ ID NO: 374483 - DNA, 201 bp, Homo sapiens
atcacttgagcccaggaggtctaggctgtggtgagccatgatcatgccactgcactccagcctgggcaacagagcaagaccctgtctcaaaaaaaaaaaaagtcatcaagagtgtgcctgctttgaatgacactactgttatctccatatctaagctgtagacagatggtgtatatgcagacaataagaggcagtatcagt

SEQ ID NO: 374484 - DNA, 201 bp, Homo sapiens
tctcgtgatgggcctggtagattgggtggcattatcctcattttacaacataggaaactgaagttcagaaaaggaatactttacccaggcatccatggcasaacgacagccttcacttttgttctttggagtacccttatgtattctcttcacgtgagaacatgcatctggggaagaggctagtctttcatttcaggtgca

SEQ ID NO: 374485 - DNA, 201 bp, Homo sapiens
acagctccctggtggtagagccctaaggctggcgtcggggccgggcggggggcgcggcgggccggacaccgcttctgcctgtgagccgggcgctgggcgakgggccgtggggctggcaggcacccagtcctcgggcgggcggagcggacggaccccgagggcgagctccccagccgggactgccagctcggccgccgtcct

SEQ ID NO: 374486 - DNA, 201 bp, Homo sapiens
gaagaaacctctgctagaagaaaggaaagagaataatggagaaggaaagattctgtgggggaaatacacaagatggtccttccagaaaagctgctcagacrtctgaagcttttgtctatgagtattgttggccaattgttggaggactgaggcttctacctttcttcctgcgaaggtcgaggacaggttaggtgttgggta

SEQ ID NO: 374487 - DNA, 201 bp, Homo sapiens
agtagacataagagtaactgggagtctgaaaagaagatgtaattgccttctcaaactaaaggtacaagaaaaggggaaaagtgacagaggaaaatcacagmcaagacagaaggggatgccttcagttcataagcatatgctgcattcacaccactcaatgtgcagtcacagaaagccagggatgctaagacaaattaagtg

SEQ ID NO: 374488 - DNA, 201 bp, Homo sapiens
gttcaagtgggtaatatctacttctattttctgaattagaaattaaaactgagaaagtttgaaaacacaagagtccataaacatctcttccattgggcatsagagcagtggtgtagacctgtgagagttgagcgtgaactgagaataataaagtcaaataatgtcttcttatgatcatgaaaatagttttgaccttgtggc

SEQ ID NO: 374489 - DNA, 201 bp, Homo sapiens
agagaagaaacctctgctagaagaaaggaaagagaataatggagaaggaaagattctgtgggggaaatacacaagatggtccttccagaaaagctgctcaracatctgaagcttttgtctatgagtattgttggccaattgttggaggactgaggcttctacctttcttcctgcgaaggtcgaggacaggttaggtgttgg

SEQ ID NO: 374490 - DNA, 201 bp, Homo sapiens
tgagatctgagaataggacacatctgaattcagtaggccctgtggtctagatccctttttttttcagattaaagaactttccaaagaaaaggaaactcttkgttttttgctaagaatttacataatagaaaaaacgtatgtcttggtgtaacactagatgctgtgacaaataaatctcacaatgtcagtaacactgtggac

SEQ ID NO: 374491 - DNA, 201 bp, Homo sapiens
attctctagtcgtgccttcatggaggcatactgagcatatggcatcatattttgtcacactctcacgtatctgctagtgtaagctacttcccagcccggtmgcacttttgaaagacttacattgggctttttgtggcggaaatggggagcaggatttgttctttgtctttctgaacctgttttagcactgcacaccctctc

SEQ ID NO: 374492 - DNA, 201 bp, Homo sapiens
ctgacacataatacattttttaaaaggtcaatcacaaattttaaaataatttttgaaaaattgtattttaaattaacaaaagtgtttttttgtttgtttgyttttgctttttattttgagatagggtctcattctgtcgccagctggagtgcagtggtgcgatcacggcttactgcagccttcacctccccaggctttggg

SEQ ID NO: 374493 - DNA, 201 bp, Homo sapiens
aaacattctctagtcgtgccttcatggaggcatactgagcatatggcatcatattttgtcacactctcacgtatctgctagtgtaagctacttcccagccyggtagcacttttgaaagacttacattgggctttttgtggcggaaatggggagcaggatttgttctttgtctttctgaacctgttttagcactgcacaccc

SEQ ID NO: 374494 - DNA, 201 bp, Homo sapiens
accgtgatgttcttataagaagtaaatgagagaatgtgtacagagcttaggacaatgtctgatgcagaatccaattaatcattttcttttcttatgggtamtacttttaatattgtatctcacaatgaggagcactttctcttatgttttctcttaaatttttttcacttaccttccttctaaatgacaatgttccactgt

SEQ ID NO: 374495 - DNA, 201 bp, Homo sapiens
ttttttaaaactctgaggagatttttaaacctctaaggagaacaattttgaatggtgcctgtgtaactcagggttcttctctttctttcctgacaacattyttaggtttatagaagaaattaattgtgcttgttctggaaaaaaaaaaaaaaagctatattggagtacccagagaagccactttgagactttcgtaaactc

SEQ ID NO: 374496 - DNA, 201 bp, Homo sapiens
ttttttttttttaagacggagtctcactgtgtcaccagactggagtgcagtggtgcaatctcggctcactgcaacctccgcctcccgggttcaagtgattstcctgcttcagcctcccgaatagccaggactacaggcacacgccaccatgcccagctaatttttgtatttttagtagagacagggtttcaccatgttggc

SEQ ID NO: 374497 - DNA, 201 bp, Homo sapiens
aactacttacaaatattaaaaatatgaatataaaaattattcaatattcagccaaaatcttttagggttaaaagcctcaaatgggttatttttatgattcrggagttcttcccaaaaggatggcaatgctgattggcattgattcatggagatgaagctcttagccttctgtccttcaggcttaaacagaggaggtataca

SEQ ID NO: 374498 - DNA, 201 bp, Homo sapiens
  misc_feature (1)...(201): n = A,T,C or G
ggctgcagatcacagtacagatcccctaactttgaattttgaggaaaagaaacacacacatgcgtaacctataagagtaaacaaaaatcacttgcattacnatgcaaacttagaccacatggttcaaaaagtgtgggcaggagggcatgggtacactttttaccctgcctttgctggagccaattcattctgggagagcag

SEQ ID NO: 374499 - DNA, 201 bp, Homo sapiens
agagcaaataactattgctaaggttagagaatatagtacctttatttaagtacatattgcttattattattaatacatattcaattaatacttgttggtcwtaggtaagttgtaaattcactctatatttgtttttgtggctattacatttatcctaattaccactgacacaaacctgagagagcagcaatgttgatgggt

SEQ ID NO: 374500 - DNA, 201 bp, Homo sapiens
ctaattctcatcttgtctgtcttgggtacacaaaacaatctctggtagcaagatctataaaaatttgtgttacctgtttatttatgttagtttccctttargtcttctggcttttgtacaggtgtcagtcattttagatgttgagtttttgatggtcagtgagcaggatgcagaggccaggattaacctatgtctccaaaa

SEQ ID NO: 374501 - DNA, 201 bp, Homo sapiens
acttaaaacgacaacctccactcctcccctccacctagtcccagacaacttttattctattttctttctctgtgaatatgcatattctgggtatctcatamaagtggaatcataccatggttttccacgtgtctgacttatttcaacaagcatgatattttcaagatctattcatgttggtagcatatattaaaatttcct

SEQ ID NO: 374502 - DNA, 201 bp, Homo sapiens
aaaatttgtgttacctgtttatttatgttagtttccctttaggtcttctggcttttgtacaggtgtcagtcattttagatgttgagtttttgatggtcagygagcaggatgcagaggccaggattaacctatgtctccaaaagaattagaaatctctctgcttttttttcattctcttccactgaaagagggaacaaagaa

SEQ ID NO: 374503 - DNA, 201 bp, Homo sapiens
acatgtatcttcctgccttgttaacttcagttacaaattctttaaggttttctgtagattattctgtaatttttatatgcatatataacatccttattttrttcctgatcttaaaaggaaatatttccatgaaacatcattaatcattaaataatggtatttactaagatccctttatgctgtccttacctttaactgggg

SEQ ID NO: 374504 - DNA, 201 bp, Homo sapiens
ttgggatttgggacagggtcatagccttttgagaattcagtaccttccccttgatcctcctacagcctgagctctctgagctttgtaggttctgtgtcagkttctgctccctgtatgaacatactccaattatacgttcttgactcctcacctagttctgttctttagttttaacaatgtgccttttagattcatctgtta

SEQ ID NO: 374505 - DNA, 201 bp, Homo sapiens
aagttgtcttattaatttaaggcacccagtttgacaggttggagtatcatgtaatggacaaatcaaataattgaataagaattttcaaagaagtaatccawatcttagttatccaatttaaaggttacagttggtcatatagtcatgtgtcttttaatagcagggatacattctgagaaatgcattgttcaggcagttcta

SEQ ID NO: 374506 - DNA, 201 bp, Homo sapiens
tcagagaaagataaacactgtatggttttacttacatgtggaatctaaaaaagtcatagaaacagagtagaacgatgattgccaggggatgggggttagargaaatggagatgttggtcaaaaggtacaaactttagttattagatgaagaagttccgggaaactaatgtacagcatggtacagcatggtgactgtagtta

SEQ ID NO: 374507 - DNA, 201 bp, Homo sapiens
ccaccacacaattaaaaaaacattaatgacatatcataaaaaaggattcctggcactgaaaaatttaatgaatgaaataacaatacagttgacaccttcarcagtggattaggtcaagcagaagaaagaatgactaaagttaaagataggtcttttgaaataacccagtcagacataaatgaatgaaaaaaataattttaa

SEQ ID NO: 374508 - DNA, 201 bp, Homo sapiens
ggtgggttaaatcaaagaatacatatttacaaacaaagttattatgagcatctgttaccatcctaccaccacacaattaaaaaaacattaatgacatatcrtaaaaaaggattcctggcactgaaaaatttaatgaatgaaataacaatacagttgacaccttcaacagtggattaggtcaagcagaagaaagaatgacta

SEQ ID NO: 374509 - DNA, 201 bp, Homo sapiens
aattatttattcaatttttggtgaatcagtgaatgatggcagtagtagtagtagtattggtgggttaaatcaaagaatacatatttacaaacaaagttatwatgagcatctgttaccatcctaccaccacacaattaaaaaaacattaatgacatatcataaaaaaggattcctggcactgaaaaatttaatgaatgaaat

SEQ ID NO: 374510 - DNA, 201 bp, Homo sapiens
agtcatttcagttgtaggctgctgaaatgggccttggttgttgcaaagtattaaaagcacaaatgctaatataaactgtgtagcctcagaagcaatatatrtgtgagctgtcttttctgccactgtggaatgctactcattttggctgtgagaccaataataattcaatatataacacagataaagaccagcgatggtgcc

SEQ ID NO: 374511 - DNA, 201 bp, Homo sapiens
accatcctggccaacatggtgaaaccccctctccactaaaaatacaaaaattagccgggcgtggtggcgcatgcctgtagtccctactactcaggaggccraggcaaaagaatcgcttgaacccggggggcggagtttgtggtgagccgagatcacaccactgcactccaacctggcgacagaacgagcttctgcctcaaa

SEQ ID NO: 374512 - DNA, 201 bp, Homo sapiens
taataaagtagttctccccttgcctttccataggccacctgtccctcagctaaatcagaaagataaaagttagatgcggccaggcgcagtggctcacaccrgtaatcccagcactttgggaggccgaggcgggtggatcatgaggtcaagagatcgagaccatcctggccaacatggtgaaaccccctctccactaaaaat

SEQ ID NO: 374513 - DNA, 201 bp, Homo sapiens
gtccctgggctccctcctgcatctccccatttcagggccaagggcacaaggaatccaggcaattatctgttcaagtgatctacctggcattccctgttccytccctccctccctcccttccccctttttgtttttcctctcataaacaaaccaaacaaacccaggagttttccaggtaacagaatcaagagcccaaatttg

SEQ ID NO: 374514 - DNA, 201 bp, Homo sapiens
acctcccataatgcctggggcagtgtagtcactcagattgctagcaattggatgaatgggtaaaatatttacccacattaaaaagagaaacctaacaaacagagctgtaaatgcaaatgagctctctgacctgtctagttggaaaggtgtcctcattcattcctactgcaagcatcatctgagcatgctcagtgagtgtgc

SEQ ID NO: 374515 - DNA, 201 bp, Homo sapiens
cacctcccataatgcctggggcagtgtagtcactcagattgctagcaattggatgaatgggtaaaatatttacccacattaaaaagagaaacctaacaaacagagctgtaaatgcaaatgagctctctgacctgtctagttggaaaggtgtcctcattcattcctactgcaagcatcatctgagcatgctcagtgagtgtg

SEQ ID NO: 374516 - DNA, 201 bp, Homo sapiens
gcacctcccataatgcctggggcagtgtagtcactcagattgctagcaattggatgaatgggtaaaatatttacccacattaaaaagagaaacctaacaaacagagctgtaaatgcaaatgagctctctgacctgtctagttggaaaggtgtcctcattcattcctactgcaagcatcatctgagcatgctcagtgagtgt

SEQ ID NO: 374517 - DNA, 201 bp, Homo sapiens
agcacctcccataatgcctggggcagtgtagtcactcagattgctagcaattggatgaatgggtaaaatatttacccacattaaaaagagaaacctaacaaacagagctgtaaatgcaaatgagctctctgacctgtctagttggaaaggtgtcctcattcattcctactgcaagcatcatctgagcatgctcagtgagtg

SEQ ID NO: 374518 - DNA, 201 bp, Homo sapiens
agcttatgaggagtatacagtttgggtgttatggtgggtaggtggtgctgataaggaaggaggagaacttgagaatgaaccagggtttctaccactgtgayttgggttgctataaaggatattaaccaagaatgggtatctctttccagcccacccccacacccccaaataaaagtaggtgtaaggagaggcaatgtgttt

SEQ ID NO: 374519 - DNA, 201 bp, Homo sapiens
cactttgatgtcaattttttccttcttaggcagaattggaaaaaaaaaaaacacatggaggatttttgtatggctgttggcaagagcactcatgaataaccgcattaaaacagcgataaaagaccctcaatatttttttctttaaaaaaaaatccaaaagccatcatttaaacatggagtttttttgaacaatagtcagct

SEQ ID NO: 374520 - DNA, 201 bp, Homo sapiens
acagagctttgaggtggtcacgtgttcctgcccagcctctggtcctgctctcctctcgttgatgtctagaaaaacattcttaccaaaaaaaaaaaaaaaaatacaatttgctaggagaatttcaaaaatatgacagtggagtgcttcagtgctcagaaatgagggaaatcaaatgccccttgcatgcaaaattcttccacc

SEQ ID NO: 374521 - DNA, 201 bp, Homo sapiens
tattgttagtccctttaacctgagtggaaactggatcagagaggttcctgtgtgtcccaaggtcacactgatagcaaggggtggaatcaggactgtgaatycccaaaagaagcatctatgagtcacgtggcctaatggagctatctgaacatacagaggacaattagaacaagagggcactagggctgattctggttgccg

SEQ ID NO: 374522 - DNA, 201 bp, Homo sapiens
catattcttatttgcataatatcaatgaaatcctttgactagtgtataagaagggtccatttagcatatcatgatgaaaacggattgccaaaaaaaaaaaactgcaagcaaatacagaggagccaaaaatcattgtctgttatcctggagtcatgttcactgattatttatttgtaaggtgaatataaactacaaaaataa

SEQ ID NO: 374523 - DNA, 201 bp, Homo sapiens
acagctctcacccgtatattataatacctgagaactttttttgcctctattatgttgaatctcttgtatcccaaattctatactttttttgagacagggtmtctctctgtcaccaaggctggagtgctgtgatacaatcacgactcactgcaacctagacctccttggctcagatcatcccacctcagcctcctgagtagc

SEQ ID NO: 374524 - DNA, 201 bp, Homo sapiens
aagaacagtctcatgtcaggcttgccatgcacatttaatgacgactgcccatgaaatccctggcactggattggcttgccattttttttttttttttttttgagatggggtcttgctctgtcgcctagactagagtacagtggtgcaatcatgccttactgcagcctcgaactcctgggctcaagccatccatcctccctc

SEQ ID NO: 374525 - DNA, 201 bp, Homo sapiens
ggtttgttaaatgggtatatttagtggtgctgaggttagggcttctaatgatcccatcaaccaaacagtgaacatagtccccagtaggtagtttttaaacmcttgccctccttcctctctcctcccttttatattccccagtgtttattcccatctttgtgccgtgtatacccaacgtttagctcccacttacaagtgaga

SEQ ID NO: 374526 - DNA, 201 bp, Homo sapiens
gttttatggtgggttataattgtctctagtagattctgtgagtctaaaacaataggaagactgtgctccattagcttgtcatgcaatttttaactttgacmatagactttttttgaaaaaaaaaatattttattttttgcgacaagatctcactcggtcactcaggctggagtgcagtggcatgatcacagctcaccacag

SEQ ID NO: 374527 - DNA, 201 bp, Homo sapiens
ctccaggaaagatggttccctggctgccctggtgaacctggaggttttctctgcctgaaaacctcagttcccctctgtaaaaagttcaaccaaagagctcratttgtcatgttcacaaattagcccaaagataggctttttaatcccttctcagcacaatttaacccaacatttagtgctgtacttactgtatctatgaca

SEQ ID NO: 374528 - DNA, 201 bp, Homo sapiens
cttcagaaagggggtagtatccaatctgagaccaccagaactgtaagcatttatggtgggaggatggggaaaggaagaatgttctagataaatatattggyaggttattgctgttgtaacaagttaccacacactttgtagcttatattaagaaaaaacttcttatcttactgttctagagactagaaacccccaaatgca

SEQ ID NO: 374529 - DNA, 201 bp, Homo sapiens
gtaactggatttagagaaaattaacctttcattcgtaagtgaattaaataaagaattggacattgccaggtgggggcagagaaagccagagtttttaaatkaaaaaaataagcaaataaaatctttaaacataaatggagataagatttgaattgtatcatatatggtaacctcttttttggctggtgtaccgaagtctaa

SEQ ID NO: 374530 - DNA, 201 bp, Homo sapiens
tgggctgagacttgggcagggcactcccactggacatactctgaactgaacccacagtggaaactgggccctagctttcccttttctgtttgatgagccamattttcattgtgtggaagaaccaagctcaggaactaatgtcaaatttggtctgcaaattcagacaccccatatgacctcatcagggatgtctccacaacc

SEQ ID NO: 374531 - DNA, 201 bp, Homo sapiens
tttcagtaaacttcctgatggatagctttgccgttccctccccatgcaaggcacatgtggtgagagggttagggagagaatgcatgctatcttttactttrttttttttgagacggagttttgctcttgttgcccaggctggagtgcagtggtgcaatcttggcttactgcaacctccacctcctgggttcaagagattct

SEQ ID NO: 374532 - DNA, 201 bp, Homo sapiens
ctgttgtgtgatacagacctggtgaggcataaaagccaacctgtccttctttctgaagagagagcaccttcagtccatgctggagactcttcccagcttgyaaaccgataacccccataaagctctcctttctactgtccagccatcctggtggtcttttagacaacaccatcttctatccattccatgtgtcagtgctgc

SEQ ID NO: 374533 - DNA, 201 bp, Homo sapiens
attacagggtagtgctactgcttctcaaaccctgctcacaccccagcccccaatctcatgaaggtctttaggaaatgcactgccaactcccagcctcagasactctgtaaacatagggcagggcctgggaatccatcatttctaaaaagcttcagtgataaaaggctttccaagtttgaaatcactctgatgcagggaaca

SEQ ID NO: 374534 - DNA, 201 bp, Homo sapiens
ggacatactctgaactgaacccacagtggaaactgggccctagctttcccttttctgtttgatgagccaaattttcattgtgtggaagaaccaagctcagraactaatgtcaaatttggtctgcaaattcagacaccccatatgacctcatcagggatgtctccacaacccaggttactcaagggacttccacgaggataa

SEQ ID NO: 374535 - DNA, 201 bp, Homo sapiens
tgatcacctctgaggcatgaaattaaagggttgagagagtggaagacttaatttttactttttaaacttttgaaatgttaggagtttttttttttttttttacaactgatatatgtttttaaaaatggatttttaatgacctagaagttttctgtgtaaatgcattgttatataaagggtatggaagagaagcttcactgc

SEQ ID NO: 374536 - DNA, 201 bp, Homo sapiens
ccataaccaaatgccacaagccaggaggcttacacaacagacatgtactatcttcctgttctggaggctggaaagtcccaatccgggtctggcaggattcygcttctggtgcaggccctcctcctggctttcatgtggccaccttcttgcggcaacctcacgtgtcagagagagcgcacgctctgtggtgtctcttcttac

SEQ ID NO: 374537 - DNA, 201 bp, Homo sapiens
acagaaacaagattaatcaattacagataataaacactaaaggaccacaacctgcaaggaacaataagggcattaaaattaatcacagactaatttggggraaggggagtctacaaattaaaatatagcaatgaaaaattttaaaaaatcaattgactgatttatgagcaaaaagggcatcattgtcttggaaagatggag

SEQ ID NO: 374538 - DNA, 201 bp, Homo sapiens
tcgcttgaaccttggaggctgaggttacagtgagtcgagatcatgccactgcattccagcctgggtgacaaagagagacaatttctcaaaaaaaaaaatartaaaataagtaaagcaagcagtagaagtgggtttggtcgatttatgcttcaagaggtttttgtatggtggcccaggctgagaagctgagtgtgattaaaa

SEQ ID NO: 374539 - DNA, 201 bp, Homo sapiens
gtcttggaaagatggagccacaaccacattctgtattattttgtgcagtgcagtgctgggctgtggccagagactctggccgctctgtggagcgcaggcaytgctggtggtaaggacattcttcatttattttccccctttctctttaaatttagatgaccttattttagttgcctttgtaatgtggaggtgaatttataa

SEQ ID NO: 374540 - DNA, 201 bp, Homo sapiens
aatcgcttgaaccttggaggctgaggttacagtgagtcgagatcatgccactgcattccagcctgggtgacaaagagagacaatttctcaaaaaaaaaaawaataaaataagtaaagcaagcagtagaagtgggtttggtcgatttatgcttcaagaggtttttgtatggtggcccaggctgagaagctgagtgtgattaa

SEQ ID NO: 374541 - DNA, 201 bp, Homo sapiens
gattatttttaaaaaaaacctagattatatgacttctagagtggcttccaactcttctatgctcctaaaaattttcattttccaaataactgtgtgtgtgygcacacatacacgcgttgtgtgtgtgtgttttatatgtatctcacattgggtctattaacaatcttagggacttttaatattttttatttaaactcaatg

SEQ ID NO: 374542 - DNA, 201 bp, Homo sapiens
gtcgtattgctgacgtttatgtggttgaagaattacatctaagtaatatttgaatatatgcgatttttgacttcataataattgacgcagtgtgggtagartctatgtaatgttaccgttggttaaatgggtgtaggttttgccccccataatttaccctgcaggtacaaacataaccttttattttttactcctcggatt

SEQ ID NO: 374543 - DNA, 201 bp, Homo sapiens
gaatcgcttgaaccttggaggctgaggttacagtgagtcgagatcatgccactgcattccagcctgggtgacaaagagagacaatttctcaaaaaaaaaaataataaaataagtaaagcaagcagtagaagtgggtttggtcgatttatgcttcaagaggtttttgtatggtggcccaggctgagaagctgagtgtgatta

SEQ ID NO: 374544 - DNA, 201 bp, Homo sapiens
atctccccagatgattatgatgatcaaacagattatttttaaaaaaaacctagattatatgacttctagagtggcttccaactcttctatgctcctaaaarttttcattttccaaataactgtgtgtgtgtgcacacatacacgcgttgtgtgtgtgtgttttatatgtatctcacattgggtctattaacaatcttaggg

SEQ ID NO: 374545 - DNA, 201 bp, Homo sapiens
gttgggttgggagcttgttacacatagacatcctggttgaaaaggactctgcatcttcaacatgtattttccaagattctagatgtcaagtggacatccasatggcacaggaaaagtccctggaggatctgtgtggaggtttctgtgggctaagtctggaagtggagagaaaggcagctgggagtatggtttagttggatg

SEQ ID NO: 374546 - DNA, 201 bp, Homo sapiens
atgtaatgttaccgttggttaaatgggtgtaggttttgccccccataatttaccctgcaggtacaaacataaccttttattttttactcctcggattcgtrgctctttttttctcactccagagataaagtagcatatctttcctgctgtccaaggaagacgagtgttcctgtgtccctgcgtcttatgcatattcataac

SEQ ID NO: 374547 - DNA, 201 bp, Homo sapiens
ctccagcatgatccctagaaagcctgagaatctattaaaaacattgtggcttcctaaaattaaagtaaatttatatatatatatatatatatatatatatwcatacacacacacacacgctataaaaatgaacaactttagtacaagaggtagcagaatggtcggtcactgatgcagacgtttctcaaggattttagcttc

SEQ ID NO: 374548 - DNA, 201 bp, Homo sapiens
ttcaacgtgaatttgcagtgagtataagatgttcacatctgatttgtagcacattcctcattggaagaaacataagcaatacagacttccagattttaacracaacagtaataacagctgctgattatggagtacctgctctaagtcagacgccctgggaggttttccccatgaatttaattctcagcagtcattacccac

SEQ ID NO: 374549 - DNA, 201 bp, Homo sapiens
ccatgaatttaattctcagcagtcattacccacatgtgacagttaaggaccctgagacttgaggaggctaaggattcaatctcagtccctggagctggtgrgtgttcccatgaggcttctagcctggctttctctctcatcagcccccttcatcacctggtgttttccaggatgccggtaggaggcggcaggcaagagagt

SEQ ID NO: 374550 - DNA, 201 bp, Homo sapiens
aggcgggcgagcatcaccacctgagttccacctcctgtcagatcagcagcggccattagattttcgtgggagtgcaaaccctattatgaactgtgcatgcragggatctaagttgcaagctccttaggagaatctagtgcctgatgatctgagggggaacagtttcatcccgaagctatccccccaacctggttagtggga

SEQ ID NO: 374551 - DNA, 201 bp, Homo sapiens
gctttctctctcatcagcccccttcatcacctggtgttttccaggatgccggtaggaggcggcaggcaagagagtgaagctctctctccagggcttggccraattgctctgcttctctgtgctctattttccatctgcaaataacagcacctagctcatgagtagggctccatgagttagttcaggaagcgagatttaaag

SEQ ID NO: 374552 - DNA, 201 bp, Homo sapiens
agggagaggaggacagggataaacttctctctggtccagtctgtcagtggtcttcactggggaatggatgtctgaactacctttctgactttttaaaaatrtaaatacctgcccacctattgtctcctccctgtctggccacacccatattgagtcagaatatccagggacacagcctctgttataaaacctccaatgagt

SEQ ID NO: 374553 - DNA, 201 bp, Homo sapiens
tctctcctcccttctcctccccacccagtactttgaggacatcccctcatttctcctccattagtcccaaagtgcatttgctgccttacgcgtgtcttctyagaatggggctgatagagagcctgatgttgctcttgcacctgacacattttttgctttaagaaccaaggaggggtctctgaatgtgtgcatgtcaggatt

SEQ ID NO: 374554 - DNA, 201 bp, Homo sapiens
tttccagtagtgatgaaggttttcagcagatgctggttttgcacagcccttcctgccctcttgcccaggacccctcactcccccttgaacattttctcagkccattctttagaggtcgtgaagacatgtaaacctttcgtcatggaccaggtctttctaatctagagttgtaatacactaacacctgtctgcgtgtaaact

SEQ ID NO: 374555 - DNA, 201 bp, Homo sapiens
aagtttccatttaaaatgcgtatttaaacattataatgtgttggcagcagaagatgtttatatcaggtagaatgatgatttccttaatggacagcaatacygtacctcatattttatggtaaaggagatggattaaaattactttttactacatgtaccttctatgtttgcatggagcataaacaaggagctataagattt

SEQ ID NO: 374556 - DNA, 201 bp, Homo sapiens
actagatctcttttacaattttcacattccccatatctgatcagaggttcttcccaaatgtatgcacatgacacgcacacacacacacacacacacacacmtgcatacacttggacatgcacacacacacatccctatctccatttcagaaatgttctttgctttgttgggagcaggaagccactgtttgttctgagtgca

SEQ ID NO: 374557 - DNA, 201 bp, Homo sapiens
gcaaaaacatatacaattataaaacaacttcatttaaccaggaaacacttaattgactacaaactgggtaatgattttgaaaaatatgagactaaaagaaacacatactcgcagactaaagcaaggagaaaaccatataacttttttctccaatcttattgaaggcttattcagtattttaaatactaagttctgcatttt

SEQ ID NO: 374558 - DNA, 201 bp, Homo sapiens
cgctcgaacccaggaggcggaggttgcagtgagcctagatcgcaccattgcactccagcctgggtgacagagtgagattccgtcttaaaaaaaaaaaaaaagtgtaatgcaaagtgataaccactgcaacagaacagagttcttgggagaaagtggaaagagaaaagaggaggactcacaacagaacactggagaatatct

SEQ ID NO: 374559 - DNA, 201 bp, Homo sapiens
tcgctcgaacccaggaggcggaggttgcagtgagcctagatcgcaccattgcactccagcctgggtgacagagtgagattccgtcttaaaaaaaaaaaaaaagtgtaatgcaaagtgataaccactgcaacagaacagagttcttgggagaaagtggaaagagaaaagaggaggactcacaacagaacactggagaatatc

SEQ ID NO: 374560 - DNA, 201 bp, Homo sapiens
gaatatggcatgtcctgttcttaaggatctgattataatatggaaggaaagaggataggtatgtaggtaattcaagtataaatgccacataaatgagatataaagtaactgggattcatggaagaaagaactgcatcctggttgacgagattttaaaaaagtttgtatcaatcaatcaaaaactttgtgtcaatgcagaga

SEQ ID NO: 374561 - DNA, 201 bp, Homo sapiens
ttaggataatggcctccagctgtacccatgttgtaccaaaggacatgatttcattcttttttttttctttttttttttttggtttgttttttttttgtttktttgtttgtttgttttgttttttgagatggagtctcactctgtcacccaggctggagtgcagtggcacgatcttggctcactgcaacctccgcctcctgg

SEQ ID NO: 374562 - DNA, 201 bp, Homo sapiens
tcacttaggataatggcctccagctgtacccatgttgtaccaaaggacatgatttcattcttttttttttctttttttttttttggtttgttttttttttktttgtttgtttgtttgttttgttttttgagatggagtctcactctgtcacccaggctggagtgcagtggcacgatcttggctcactgcaacctccgcctc

SEQ ID NO: 374563 - DNA, 201 bp, Homo sapiens
tctgagttaattcacttaggataatggcctccagctgtacccatgttgtaccaaaggacatgatttcattcttttttttttctttttttttttttggtttgttttttttttgtttgtttgtttgtttgttttgttttttgagatggagtctcactctgtcacccaggctggagtgcagtggcacgatcttggctcactgca

SEQ ID NO: 374564 - DNA, 201 bp, Homo sapiens
gaacatagtatatttggttttgtttctgagttaattcacttaggataatggcctccagctgtacccatgttgtaccaaaggacatgatttcattctttttyttttctttttttttttttggtttgttttttttttgtttgtttgtttgtttgttttgttttttgagatggagtctcactctgtcacccaggctggagtgca

SEQ ID NO: 374565 - DNA, 201 bp, Homo sapiens
catgtttttaaatgttgttattagaaaagaagaaataccaactaagcatctaattcaagaagacagatgaagaacagagcaaaaccaaagaaagaaaaaaaggaaataataaacatgaatagaaatgtattaactaaacagcacagaagcaataacaaagtgcaacaaaataaaaagctggttttgtgaaaaggttaataa

SEQ ID NO: 374566 - DNA, 201 bp, Homo sapiens
tgccctttgaccagcctctcctggtccgttcattcttaaatgctgttctgggctctggggtgactcaattgtagaagctatacagcatttgtctctttttstccagcatgatccctagaaagcctgagaatctattaaaaacattgtggcttcctaaaattaaagtaaatttatatatatatatatatatatatatatata

SEQ ID NO: 374567 - DNA, 201 bp, Homo sapiens
aaaaaatgaaattgccacagccactccaaccttcagcagccattaccctcatcagccagcagccatccacatcaaggcaagaccttccaccacaaaaaaaattatgactagccataggctcagataacgattagcattttttttagcaataacatatttttaaattaaggtatgtacatttttttaaagacataatgctat

SEQ ID NO: 374568 - DNA, 201 bp, Homo sapiens
ctcctgcctcagcctcctgagtagctgggattacaggcacctgccaccacgcctggctgatttttgtatttttagtagagatggggtttcaccgtgttggytgggctggtctggtctcgaactcctgacctcaggtgacccacccgccttggcctcccaaagtgctgggattacaggcttgagccaccgctctcggcctct

SEQ ID NO: 374569 - DNA, 201 bp, Homo sapiens
gtacagaaaggaaatatccaccaacccagaattctacttctaatgaaggagaaataaaattatttttataccaacaacaaacaaaaaaacaaaaaaaaaamtgaggaaattaattaccagcagaattgcaccaaaggaaacactaaaaggagttcttttggcaaaagaaaatgatcctagataaagcatgatcgtgcaggg

SEQ ID NO: 374570 - DNA, 201 bp, Homo sapiens
ggtacagaaaggaaatatccaccaacccagaattctacttctaatgaaggagaaataaaattatttttataccaacaacaaacaaaaaaacaaaaaaaaaactgaggaaattaattaccagcagaattgcaccaaaggaaacactaaaaggagttcttttggcaaaagaaaatgatcctagataaagcatgatcgtgcagg

SEQ ID NO: 374571 - DNA, 201 bp, Homo sapiens
aggtacagaaaggaaatatccaccaacccagaattctacttctaatgaaggagaaataaaattatttttataccaacaacaaacaaaaaaacaaaaaaaamactgaggaaattaattaccagcagaattgcaccaaaggaaacactaaaaggagttcttttggcaaaagaaaatgatcctagataaagcatgatcgtgcag

SEQ ID NO: 374572 - DNA, 201 bp, Homo sapiens
caagaaataacatgcatatgacaacaaattaggatatgttattttcatattaaatgtccctaagataataagcaatgaattattaatgtatcacacaggcrtatcttttattttattttttgttttttcaaatgtaaaaacaaaactaaatttgtcctaccagaagctcatagggtatgtttaggctttcagggaaaataa

SEQ ID NO: 374573 - DNA, 201 bp, Homo sapiens
atagctttcttctctaaaaaaagtaagataaaaagtctaaatcttaggcaagtggcagcacagtattttcagatcagtctgccttagaaaacaaagtaatsttgtacatataaatgacactaagcagtcaacaacatttgcttttttgttctgtatcatttggttctcgtgatgggcctggtagattgggtggcattatcc

SEQ ID NO: 374574 - DNA, 201 bp, Homo sapiens
tcctcctttcctctgaaatttgctgccacttgtatagcatttatcacatttcgcctttgtaagttatttgtgaacatctttctcttttgttattcttgtaraatccttgacgatggatttcttttcatttcagatctattgttgcatccctagttatcaccttttacacagtgtttagccaacttatttacaaatagaaac

SEQ ID NO: 374575 - DNA, 201 bp, Homo sapiens
ttgttttggtcaacagtggaccacatgtatgaggacacatataatcccatacaattataatggagctgaaaacttcctattgcccaatgacatcatagtcytcagaagattgtagcacaacgcattatttgtgtttgtggtgatgctggtgtaaacaaacctactgtgttgtcagtcatataaaagtattacacaattctg

SEQ ID NO: 374576 - DNA, 201 bp, Homo sapiens
tgcgtggatacatccatgctctcaggaatcctgacagaatgagtgggagtaaattgcctgtcccttctaaccagaatgccacccacttctttaagctctargtttggggtttgccctgccttggtattctccagttgcattcttgtttctttcttttaagcattaatctggaggctgctcatttttcatcttgagtggtgt

SEQ ID NO: 374577 - DNA, 201 bp, Homo sapiens
gcctgaaatagaatgaggtggaagaaggcaagacaaattatttgtatgtgatggtgctagatcccccattacatacagcagtggtgtttttggttgatttstttttgtttctaaataaaggaaaatgtttatattactgtacagtgaataaaacaatgaattctgttccaaaagaatcataggtaacttcaaactcttttg

SEQ ID NO: 374578 - DNA, 201 bp, Homo sapiens
  misc_feature (1)...(201): n = A,T,C or G
gcacagctcctgagtggaaagacctaatcagatttagtttggcatcaaacttggcatcaagtctaaggcttcctgcaatcatcatagcttattctagaggnctggttggtatttacattactttttattcttttacattttaggtggctgcctctttgatgagccgtatagcacatgtggatatagtcaatctgaaggtga

SEQ ID NO: 374579 - DNA, 201 bp, Homo sapiens
aattctacagaaattgaaatctaaaatgaacagtctttaaggataggtgtgtggttttaataattgtaagtaatatgaatttaatgatgataatgagtatmtggtgtgtgtgaggcaataacatcaagttctgttgcatcaagtgctgtggccgttgtgatatgagaaggcctaaccacaaggtgagcgaatctacagaag

SEQ ID NO: 374580 - DNA, 201 bp, Homo sapiens
tttcatctgccacccagaaaaagttgggggaggcagtgtgcaaaggaagtagtctctggtccttttgtcacttgggtgtggaaagttgggattttcctttkgatttagttctaggaagtcagcatgattcggcctcaggttccttgcctctagaccctattctcccgacttactctggccaccactcctagccctaggcaa

SEQ ID NO: 374581 - DNA, 201 bp, Homo sapiens
gctccatcttccacatctggccactagccagcataagagctcctgaagtgtagtgccttctattttactggattttagtcattgtgtgcagcaaagacctraagacttcatgcttatcagtgccttcctaaaacatgtctcaagcaattttgttcttcccataggagagagctttctgtagccatagaaatggtgtttatc

SEQ ID NO: 374582 - DNA, 201 bp, Homo sapiens
cgcttgggtcatgtccacattttccctcaattccacgccactgtctttgttgcgggcatcacttgcctctgcttggagcccatttctgttctctacctttycaagtcctttaggttggttccactaggaccagctcaactcctgcctcctccttgaagtcttcccacccaacccatccatccctcactgttttctcctttc

SEQ ID NO: 374583 - DNA, 201 bp, Homo sapiens
ggcctgtgatgattcccatccagacactgccaggcttcacgccactacccccagcacatcagccaagaaaggaggcactaacgaatactgagctatcagcrgcaggagaaaggccttctacagactcctcaacaccagctcctccaggaaagatggttccctggctgccctggtgaacctggaggttttctctgcctgaaa

SEQ ID NO: 374584 - DNA, 201 bp, Homo sapiens
ggcaagcaccaccacacccggctaatttttgtatttttagtagagacagggtttcaccatgttggccaggctggtctcgaactcctgacctcaagtgatcyacctgcctagggctcccaaagtgctaggataacaggtgtgagccaccactcccagctgaggatgaacatttttaatacatgtttgctttacatttcttat

SEQ ID NO: 374585 - DNA, 201 bp, Homo sapiens
acatgtttttaaatgttgttattagaaaagaagaaataccaactaagcatctaattcaagaagacagatgaagaacagagcaaaaccaaagaaagaaaaaraggaaataataaacatgaatagaaatgtattaactaaacagcacagaagcaataacaaagtgcaacaaaataaaaagctggttttgtgaaaaggttaata

SEQ ID NO: 374586 - DNA, 201 bp, Homo sapiens
tcattctatataccacttccctgggatatctgctaattgttagcagaaagagtaatgttatctattttttaaaatttcactcttgagtactatggagataatagctaaatgatggagaaataactttctttcacggtagtagtttaagaagggtaaaaagagctcaaaggcagatgtttgatgacatgagaaaattcagcg

SEQ ID NO: 374587 - DNA, 201 bp, Homo sapiens
tatgttctgccaggaatctttatgttcagtgagaggaagtgcaactgcttaaaactcttaacttctctctctcactttagaaagtcaagcagaaaaaaaaatggattaatttgacagatagcacagaataagaaaaatattagaaacaagaagaggccatttttcctatagaggctcatttcattctatataccacttccc

SEQ ID NO: 374588 - DNA, 201 bp, Homo sapiens
gacctctgattcatccactggagccattgtcatcagaactatttctggaagtttctgagtaggtggcacagccctgtgtacctagtgaagccccccccccctttgattcaggggtcacattgggctgtttgcgcaaagaaggactcactgcttctttttccccttgtgaataagtaacaagctgttaagtacacaatgaat

SEQ ID NO: 374589 - DNA, 201 bp, Homo sapiens
ttgattctgtatcagtgggaggcccttggattggagtagttaaaggagggaagtgacctgagatcatgtaccctagaacttaaagtataatttaaaaaaawatatatatatatggaaaaaaattaaaaaaaatgaaaacctagaaagatacaaggttctatgtcattacattaaaattgtaatgcttaaaaaaaaaaaaac

SEQ ID NO: 374590 - DNA, 201 bp, Homo sapiens
tgggaggctgaggcgggcagatcatgaggtcaggagatcgagacgttggtgaaaccccatctctgctaaaaatacaaaaattatacaaaaattagctgggygtggtggtgcgtgcctgtagtctcagctactcagaaggctgagccaggagaattgcttgaacccaggagatggaggttgcagtgagccaagatcacgcca

SEQ ID NO: 374591 - DNA, 201 bp, Homo sapiens
aagaagagaggaggagggggagggagaggaggaggaggaggaaaaagaaggagaagaaggaggaggaggaggagagaaggaggaagagaggggaagggaarggaaagggaaaggtagggtcacacctgtaatttcagcactttgggaggctgaggcgggcagatcatgaggtcaggagatcgagacgttggtgaaacccca

SEQ ID NO: 374592 - DNA, 201 bp, Homo sapiens
ttgttcactgttctttactgttcacattcaacatattcctgtttcttaggagttgttttgttcaatggaaagagtagacccttctgctctggacactggcrtctgtccagaacatgcaggagagctcagtgggagcctttggacttggctttggatagctgggctcagtttaccatttctctcagcccaccgtaccttgct

SEQ ID NO: 374593 - DNA, 201 bp, Homo sapiens
ctcagcagctttggcggagttccttcatcccttcagtggattcaggatttcaagagtctgagtaggagcttatcataaagtgtctgacagtgcatacatcrgaagggtttattggataaagatgcaatctgagtccatctgctccagatattttatcactttctcattcttttgcagatcacctacaaagcagtcagttcc

SEQ ID NO: 374594 - DNA, 201 bp, Homo sapiens
tgaatgctctgtacctccgccagcaggatgtttctgtgctgtggacatctgtcatgttccttccttccgaggccacagcactttctcctgcgcctcttttyagctccccatgcatgccgccattcggtctgtcccagggatcagggactgaaggtccctctggaagcagtgtctctatctctgcattgtatagcatattgt

SEQ ID NO: 374595 - DNA, 201 bp, Homo sapiens
tactcacaccttagaagccccctcataccatctcccaacttcaactcaagatcacagaggacagtatgggctgcttttagcagctgtccctgtgattctakgtagggagtatatgtgaagcttgctcgtggttgttgatagctgcaatgtaaagtaaatgcactgtgttcttaatgctctttgtaaaagaaagtggaaact

SEQ ID NO: 374596 - DNA, 201 bp, Homo sapiens
ctcccgagtagctggggctataggcgcccgccaccatgcccggctaattttttgtatttttagtagagatggggtttcactgtgttagccaggatggtctygatctcctgacctcgtgatccgcccaccttggcctcccaaagtgctgggattacaggcgtgagccacagcgcctggccaattttttttttttttttaaga

SEQ ID NO: 374597 - DNA, 201 bp, Homo sapiens
tcctgggctcgagcgatcctcccacctcagcctcctgagtagttgggagcataggtgcatcaccatgcctggctaattaatttttttttttttttttttttgagacggagtcttgctctgtcgcccaggctggagtacaatggcgtgatcttggctcactgcaagctccacctcccaggttcatgccattctcctgcctca

SEQ ID NO: 374598 - DNA, 201 bp, Homo sapiens
aaaacccagcagagaaaaataagttgggctgccttgggtggagaggaggaaagatttagtcaccaagcttcctagtctgtagtgcccccatcattggtgargaggctggcaaggccagggcataattaagggtctgggagtatgtgagagaaaaagacaaaaacaggatgagaagagaagtgttgtgtactcaggtgtggg

SEQ ID NO: 374599 - DNA, 201 bp, Homo sapiens
ttttgttttagatttcattaagtttctagaatgagcatgtattatctaaatatcccaaggcttagttttcatttagggaatcaggcattttaatgagtttyatgcttttcaacagtgaaacatttttcttaggggttatgtccaccatgcattttactttagttctgagattcttctctttgaaaaccaactttcctatag

SEQ ID NO: 374600 - DNA, 201 bp, Homo sapiens
atccattagctattctttctgatcctctctctccccgcaaccccctgacaggccccagggtgtgttgtgccctaccatgtgtccatgtgctctcatcattyggctcccacttataagtgacaccatgtggtatttggttttcagttcctgcattagtttgctgagggtaacggcttccagctccatccatgtccctgcaaa

SEQ ID NO: 374601 - DNA, 201 bp, Homo sapiens
gagagagaaacatatatatatatatgtttctcgtgtgtatatatatatatgtttctcatatgtgtgtgtgtgtgtgtgtgtatatatatatatatatagakagagagagagagagagagagagagagagattatatgagccaggttcctctggagattcatgtagtgcctttatgtttctcatatatctactattgattct

SEQ ID NO: 374602 - DNA, 201 bp, Homo sapiens
aagagcaatttttcaaattcctatacatctggaaactatgaattttaaatttgcttaggtcttactttcttttttttcttttctttgtttttttttttttktttgtttgtttgttttttgagacagattttcgccctgtcgcccaggctggagtgcaatggcatgatctcggctcactgcaacctccgcctcttgggttca

SEQ ID NO: 374603 - DNA, 201 bp, Homo sapiens
gagagagagaaacatatatatatatatgtttctcgtgtgtatatatatatatgtttctcatatgtgtgtgtgtgtgtgtgtgtatatatatatatatatakagagagagagagagagagagagagagagagattatatgagccaggttcctctggagattcatgtagtgcctttatgtttctcatatatctactattgatt

SEQ ID NO: 374604 - DNA, 201 bp, Homo sapiens
gtggatctgaaaattggtgtgcagggaaatgtatcttcactgggaaatatgaaattcatagttgatcccattttccagtagttcaataatcattcataagycccggaaagaaccatatcatactttatttgtttcatttcaagtgataagaacagctttgtgtaatgggaaaattataacctggcaccagtgttgtattag

SEQ ID NO: 374605 - DNA, 201 bp, Homo sapiens
tggggtgtgtaaaagtgctagaacaaaacaacctacttatattttgaaatttttattcttcatagatataaatatgacaatttatgttattatttttttttctttgctgctctctttagcttttcttgttgactttggctttttcagaggcttacttagtatgaaggagtgtgactgtaggtccagttccttgagcaggtg

SEQ ID NO: 374606 - DNA, 201 bp, Homo sapiens
ggtggggacacagagccaacacatcattctgtccctggcccctcccaaatctcaagtcttttcacatttcaaaacttatcatgccttcccaacagtccccyaaagtcttaactcattttagcattaacccaaagtccacagtccaaagtctcatttgagacaaggcagtttccttttgcctatgagcctgtaaaatcaaaa

SEQ ID NO: 374607 - DNA, 201 bp, Homo sapiens
gaacagcataaaggaaaccgcccccatgatccaatcacctccctccctcgacatgtgggaattacacgtgagatgagatttgggtggggacacagagccamcacatcattctgtccctggcccctcccaaatctcaagtcttttcacatttcaaaacttatcatgccttcccaacagtcccccaaagtcttaactcatttt

SEQ ID NO: 374608 - DNA, 201 bp, Homo sapiens
gaatgaaggctaggggtggatctgaaaattggtgtgcagggaaatgtatcttcactgggaaatatgaaattcatagttgatcccattttccagtagttcartaatcattcataagtcccggaaagaaccatatcatactttatttgtttcatttcaagtgataagaacagctttgtgtaatgggaaaattataacctggca

SEQ ID NO: 374609 - DNA, 201 bp, Homo sapiens
atggtcacataaggtttcctttggggtgaaaatgggccattttctttatagcttatgacttaatgatttcatactactcttggatcaactgaatcatcctyagctgttccaaagaaataaaaaagataaatatcctccattatgcaagtgacaatattttattttcataaatcaagaatgacctttatcaacaactagcct

SEQ ID NO: 374610 - DNA, 201 bp, Homo sapiens
gaaaaaaactgacttcttcataatttcctctaactcaaatcttgttgactgggaaactgaggctgggagtaaggaaacgacttgtgcagttttgcagtgcrtctgtttacagaagtgcctggcaaggccactgttaccaacaccctctgataactggtgcctgctcctctcagcgcactttgcttttagcctcactacaaa

SEQ ID NO: 374611 - DNA, 201 bp, Homo sapiens
tatgttgattccatgtccttgctgttgtgaatagtgctgcagtgaacatacacatgcatgtgtctttatggtagaatgatttatattcctctgggtatatmcccagtaatggggttgctgggttgaatgggatttctgtttttaggtctttgagggatcatcacagtgctttccacaatggctgaactgatttacactccc

SEQ ID NO: 374612 - DNA, 201 bp, Homo sapiens
cacccatccccattatcagtggaagtgccgagatcattattctgagcacaggatctttttctaagaggattttatggttttaaagggagtttggaaaaggsacatttgggaagcttgaagtgatgggacagaaatatcgatttgtaggttgaataattagactcctcctcgatgttcaggtcttgctgcagtgtcccctgc

SEQ ID NO: 374613 - DNA, 201 bp, Homo sapiens
ctaggaaagtgagttgttggcttttcccactctgtcaagggagctgggcctcaacttttactgagaaacatatagtgctgagcaactgaacaccgcaaatrtgtgtgtgtgtgtgtgtatgcgcatgtgtgtgctctttcccataatccccaagggtttataaaagcaaaaaagtaaggattgccttttataaatgctaat

SEQ ID NO: 374614 - DNA, 201 bp, Homo sapiens
tcccttgctcattcagcagtctctccactccaggccctgcccttcccctgcttcctcactagctgcaggagggagtaacctgctggtgctggctgtgccaytgtgtgctcttgctgcctgcaccggtaagcttgcttgatgcacaccaggctgtggcccaagaggtgcctagaggaagacgctgcgcccctcagttcccct

SEQ ID NO: 374615 - DNA, 201 bp, Homo sapiens
ctctgtatctgtgctgcccagtgtggtagctacttgtcacacgtggctattgagcacttgaaacacagttggtgtgaatgaggacacgcattttaaatatsgaattttaatttttattttaaataatcacctgtgactcctgactgctagacctaaggcgagtctacaaacattatgctacatttctgttatttagaagtc

SEQ ID NO: 374616 - DNA, 201 bp, Homo sapiens
ccatttataagtcctgtgctgaggccctgggagccaggcctgtgctgagcattgaagatataaaggtttccaagatgagggtttgtcgttaaggagctcayaggaaaactgaagggatatccaagcaagtcgagccctctatttctcaactgacatagacagcgtggaaattagggagggagagaggaggttgctccttcc

SEQ ID NO: 374617 - DNA, 201 bp, Homo sapiens
agaccagcctgggcaacatagtaagaccctctctctacaaaataaaaaataaaaaaaattagcagggtgtggtgatgcacacctatgatcccagctactcrggaggctgaaatgggaggatcacttgagcccaggaggtcgaggctgctatgagccgtgactctgccactgcactccagcctgggggacagagtgagaccc

SEQ ID NO: 374618 - DNA, 201 bp, Homo sapiens
catttttcagagtgactttaaaaaattatgcaattatgaattcagacattttatcaaaattatttatgaagtaatggtcattgtcaacagatgcaagtttrtaagtaagtactgattttggaaagattcctgggcagatagagataaaatgaggtgtttgtcgtcgattgttagggatgagaaagacctcaggactgggct

SEQ ID NO: 374619 - DNA, 201 bp, Homo sapiens
tggcacaagacaagatgcccactttcgccactcctattcaacacagtaatggaagtcctagccagagcagttaaacaagagaaaaaaataaaaagcatccmaattggaaaagaggaagccaaactgccgctgtttgctgatgaaatgattgtatacctagaaaaccctaaagattcatccaaaaactccttgatttgataa

SEQ ID NO: 374620 - DNA, 201 bp, Homo sapiens
gtaggattggtattagttcatatttaaatgttcgttagaattcagcagtgaagccatcatcaggtcctggcattttctttactataaggctttttattacwacttcaatcccattactcgttattggtctgttcaagttttgaatttcttcgtggttcaatcttggtagcttttatgtgtttagggatttgttcgtttctt

SEQ ID NO: 374621 - DNA, 201 bp, Homo sapiens
tcccttcactttacttccttgacagaaggcagccagatcctttgggtcaccaaacccctccattctgaaggctgccgttcattttttttttttttgtcctygattgccgtctctctgttcccctctttacagcatgcgcaagtacccaagctcagtttctgagcgttctctttggagaccgacactgatgaatgctctgta

SEQ ID NO: 374622 - DNA, 201 bp, Homo sapiens
actctttggtcttaggactcctttatactctgtaaatgttttgaaaaatccgcagagcttttgttcaagtgggtaatatctacttctattttctgaattakaaattaaaactgagaaagtttgaaaacacaagagtccataaacatctcttccattgggcatcagagcagtggtgtagacctgtgagagttgagcgtgaac

SEQ ID NO: 374623 - DNA, 201 bp, Homo sapiens
ctgcactgagctatgtctagggagccaatttatctgtatttcattcatttattagatttattctcttttttcttaaataaaagaggattccacttgtgtamtgagaagagcttaattaaggaagatagagactaatgaaagcttttatttctctggcagtagcccctgaagcatatgaatataggctgttcccttcacttt

SEQ ID NO: 374624 - DNA, 201 bp, Homo sapiens
aacctaggagaaacgtcatatgttaagacagacctgttcccccatagggccttttattcaacaggaagaaaaactgtgaggttacatctttctctcaggtkcagccctttaaaaggagagagctgaaactaatacccatgtactttccaaagtgctggcttccccgtgcctctggcaacatgagtccttgcaaagcaaagc

SEQ ID NO: 374625 - DNA, 201 bp, Homo sapiens
acaatctcctgcgaactaaaggatcatgttctaacccaatgcaaggaagctaagaatcttgaaaaaaggttagaggaattgctaagtggaataaccagttkagagaagaacataaatgacctgatggaactgaaaaacacagcacgagaacttcgtgaagcatacacaagtatcaatagccaaatcaatcaagcggaagaa

SEQ ID NO: 374626 - DNA, 201 bp, Homo sapiens
tgccaattagccaaatggtcactttcatagacatttctcatccctgtgctctaaataaacttgctcattagcaatgagaacatttaaaggaagagttaaarttaaaagatgaagtaaaaaatagagcatgtcaggtaacatccacctatgttgttatagatgccataaggaaaatgtggccctctaataagagaaccaaaa

SEQ ID NO: 374627 - DNA, 201 bp, Homo sapiens
tattaatattattgaataataaatggtgctgggataactggctagccatatgcagaagattgaaactggaccccttccttataccatatacaaaaatcaaytcaagatgaattaaagaattaaatgtgaaacctcaaactataaaaatcctggaatataacctaagaaatagcattttggacataggccccagcaaagggg

SEQ ID NO: 374628 - DNA, 201 bp, Homo sapiens
acttgaaactgtactacatggctacagtaaccaaaacagcatggtactggtacaaaagcacacacgtagaccaacagaacagaatagagagcccagaaatrgtgccacacacctacaaccatctgacctttgcaaagttgacaaaaacaagcaatggggaaaggactccccattattaatattattgaataataaatggtg

SEQ ID NO: 374629 - DNA, 201 bp, Homo sapiens
gtaaactgcatgtcatgagggtttggtgtacagattattttgtcacccagataataagcataatacccgataggtagttttttaatcctctccttcctccyaccctctaccctcaggtaggtcccagtgtctgttgctgcctcctttgtgcccatgtgttctcagtgtttaactctcactaacaagtgagaacatacagtg

SEQ ID NO: 374630 - DNA, 201 bp, Homo sapiens
atataactgtctataccagtataacagaatgtgtgttaaacccttggcatattgccaatgacatcccaaacacaaatgaaattctgttgcaaattctcagyttgtttgcactttgtaagagtaatgctcatgttatttcagagaatccataagttgttagtgtttcttgctcatccatcatctcatagccagttatgatta

SEQ ID NO: 374631 - DNA, 201 bp, Homo sapiens
atacagagacagaaaagatgagagaagaggcgtttacagggaagaaatacagttatcagcaagaaaaccacccatgtgtttggggattattgaatggttgrattaaggacaaactgagttccccattttattaactcctgaaatagttattacctataccactaactcttatttgtagttgatatttatatccataccata

SEQ ID NO: 374632 - DNA, 201 bp, Homo sapiens
ctaactcagggctctttagctgtgatacaaactgacttcatgtgtagcatcaacttggattcctctgtattctcccttgagactttgggggcaaggggaamcaacaagaacacaaagctcatgttgctttgtgccatgcacaaagctttgctttgttgttcataatacagttctatgtctctggcccaggagtctcctgtc

SEQ ID NO: 374633 - DNA, 201 bp, Homo sapiens
ctggagtgcaatggtgtgatcttggctcactgcaacctccacctcctgggatcaagtaattctcctgcctcagcctcctgagtagctggtattacaggcayctgccaccacgcccagctaatttttgtatttttgtagagacggagttttgccatgttggccaggctggtctcaaactcctgacctcaggtgatctgcctt

SEQ ID NO: 374634 - DNA, 201 bp, Homo sapiens
aatcatcccatcggcctttctggtcttcttcaatctgtatattatcaggaaaagccagtcatttatgttgtaaaatttttttgaagtagtgatgttctctytgctgaacaggtttcaaccaattcttctttatcgttttcaagacagcagtgtctcaaaattggcctaaacaccagaaggattcattactgatcaagtagc

SEQ ID NO: 374635 - DNA, 201 bp, Homo sapiens
aagatcaaaagacacgaagggcattacataatggtaaaggtatcaatgcaacaagaagagctaactatcctaaatgtatatgcacccaatacaggagcacycagattcataaaggaagttcttggagaccttcaaagagacttagactcccacatagtaatagtgggagactttaacaccccactgtcaatattagattgg

SEQ ID NO: 374636 - DNA, 201 bp, Homo sapiens
tgtattaaaactgaaatttaggctgggcgtggtggctcacgcctgtaatcccagcactttgggaagctgaggcaggtggatcacctgaggtcagtggttcsagaacagcctggtcaacatggtgaaatcccatctctacttaaaatataaaaattagccaggcgtggaggtgtgtgcctgtaatcccagctactcaggagg

SEQ ID NO: 374637 - DNA, 201 bp, Homo sapiens
aattaaatttagccaggtttatttgagcaaagaccaattcatgagtcaggcagccctcagaaacagaagaggttcagagagccacacctacaagtgtgagwggcaggcttttgtaggccaaacagagaagcaaagtagagaaatcacctaattggctacagctaggcatctgccttatttgagcatggtgtgatgagtttg

SEQ ID NO: 374638 - DNA, 201 bp, Homo sapiens
tttaaggtcagtgccattaagtactgttaaaagaaaaactttagacaaattaaatttagccaggtttatttgagcaaagaccaattcatgagtcaggcagycctcagaaacagaagaggttcagagagccacacctacaagtgtgagtggcaggcttttgtaggccaaacagagaagcaaagtagagaaatcacctaattg

SEQ ID NO: 374639 - DNA, 201 bp, Homo sapiens
gaggagaattgcttgaacccaggaggcagagctttcagggagccaagatcgcgccattgcactccagcctgggcaacaagagtgaaactctgtctcaaaamaaaaaaataaaaataaaaaaaagaaagctatagagtcaccgtcactcctgccttgatttcatcagggaaagggaactcaccatctcaggaaaatgtgcct

SEQ ID NO: 374640 - DNA, 201 bp, Homo sapiens
tcccagtgcctgtgaaactgaatgttaccaacccgtaatgccttggatggtttctaagtcgagcccagcctcattaatgttgcgtagcaatgctgagacaygcgctagattgatgaaaccccttctcccagggcccgcactatccatcccccacactaaactgctctccgtcatccatgactgcatcaaggcactgacagg

SEQ ID NO: 374641 - DNA, 201 bp, Homo sapiens
gggaatctaggggcattttctgtatgagttgaggctgtggatttactggaagacttcaaggtctcaaagtcacttttcttcttccatcttcctacaaaaaacaaaatctgagaactttttagatgggtggaaaaggcagagggaagtgaaattggtaattaatcatgacaaactcaaagtggaattaaatttttggaagtc

SEQ ID NO: 374642 - DNA, 201 bp, Homo sapiens
atatatatgtatatatatgtatatatgtatatacatatatatacacacatatgtatatatatacatatatgtatatatgtgtgtgtatgtatatatatacmtatatatacacatatatatatatacatatatatacacatatatatatatacatatatatacacatatatatatatacatatatatatacacatatatata

SEQ ID NO: 374643 - DNA, 201 bp, Homo sapiens
gctgtccacggggagcatctggaggcctcctttcaaaggctgcttcctggggcccagctgtggtgattctgatgtccacgacagaggtcccccagcatccytgggtggtcagggtttgtagccacagttgaagaaacgttgtcctgaaagaggaggtttttgttttgttttgttttgttttgttttgttttttttgagaca

SEQ ID NO: 374644 - DNA, 201 bp, Homo sapiens
caaatgctttcgagcattgaatattaatgatcttttaaaacttaaaaaatcaatttattggtttttaaattatatgttcttgttttaattcgcatttcctsttttccatgcatgtattcagtatatttcttcctcagcaaattgtccatttctgtccttaggatgctttctaatcttttcctttttaaattgtagggatac

SEQ ID NO: 374645 - DNA, 201 bp, Homo sapiens
ttaagactttagtaggtgctgtcagattactttctacaaggctctatcaagttatgctctaccagcaaggtgtcacaatgtcagggtcctcaaatgctttygagcattgaatattaatgatcttttaaaacttaaaaaatcaatttattggtttttaaattatatgttcttgttttaattcgcatttcctgttttccatgc

SEQ ID NO: 374646 - DNA, 201 bp, Homo sapiens
accaccaatgttgactacatgtcctgaaaacttttcttctgtaaaaagtttagaccaatttgtccatgttaaactctagtataatttcagaattcctccaytgatatttcttgattacaatttaaatggtctgtttctcatgatgagacaactgcatttgaggagcagtttcacttacctgtgacatgttcttaagtcttc

SEQ ID NO: 374647 - DNA, 201 bp, Homo sapiens
agataccagaatgcaacctgacaactttctcctaattgtgaatgacagaaaaaaaggatgatttgtagagatttgccaaaactgtaattttttttttttttgagacagtctcactctgttgcccaggctggagttcagtgacgcagagtttcactgcaacctcccctgcctgggttcaattgattctcctgcctcagcccc

SEQ ID NO: 374648 - DNA, 201 bp, Homo sapiens
cagataccagaatgcaacctgacaactttctcctaattgtgaatgacagaaaaaaaggatgatttgtagagatttgccaaaactgtaattttttttttttttgagacagtctcactctgttgcccaggctggagttcagtgacgcagagtttcactgcaacctcccctgcctgggttcaattgattctcctgcctcagccc

SEQ ID NO: 374649 - DNA, 201 bp, Homo sapiens
ccctatttttaaataagacctgattctgaggtcccgaggggttaggagtacaacataagaatctggggggatgaaatgaggacagaatttgacccataacrtttggcatttcaaggggaccatttttatataaggaatgtatgaaaagtttaaaagcctgtatttgaggattatctctgtggaggtgacacctttgagatt

SEQ ID NO: 374650 - DNA, 201 bp, Homo sapiens
gagaaaccagagcaaaaaggctgaaaattgcaaaaactggaatgccgaatgcctcttcttattcaaaggatcacaactccttactggcaagggaacaaaastggatggagaatgagtttgatgaattcacagaagtaggcttcaaaaggtgggtaataacaatctcctgcgaactaaaggatcatgttctaacccaatgca

SEQ ID NO: 374651 - DNA, 201 bp, Homo sapiens
taacatcggctttttcatgatcatcctacagagctctgcgcagccagaaatctggaggcagcaatcttgtctcccctttcaaatccagcacataacacacyacttgctccccacaccaacccacaagtgttgactgaattgcactgactttacttgcaaatgcatttcctgacttcagtgtcaccagacctcatcagtctg

SEQ ID NO: 374652 - DNA, 201 bp, Homo sapiens
tttttcaccatgttggccaggctggtctcgaactcctgacctcaggtatctgcccatcttggcctcccaaagtgttgggattacaggtgtgagccaccctstctggccccagatctccctcttatttacttgcctcctacctcagtgaagccagctgttcttgtctgtttaatgtggctacaacagaatacctggggctcg

SEQ ID NO: 374653 - DNA, 201 bp, Homo sapiens
tatttagcccctcctctcttgatggatagtcaggttttgttcattaataaagggaatatttcagtaaatatctataaatatatatagtatacaattatttygatttctataagttaagtttacagttttaaggtagaattgcagggccaaagatatatgcatttaagactttagtaggtgctgtcagattactttctacaa

SEQ ID NO: 374654 - DNA, 201 bp, Homo sapiens
tgtggtcgggatagaaaatagcatagtgacccagggtccctgttctgcagggtggcaaaaaaatagaataactgcaaatacttcatttacatatgagacaytgttatgctgtggttgtggatgtgttgcaattattagtgacatgataagtgtttttgacacttttaactttttggagggttctgcccccactctaacact

SEQ ID NO: 374655 - DNA, 201 bp, Homo sapiens
tggaacctgggaaaactttttgttttgcctccttaaggtgtggtcgggatagaaaatagcatagtgacccagggtccctgttctgcagggtggcaaaaaartagaataactgcaaatacttcatttacatatgagacactgttatgctgtggttgtggatgtgttgcaattattagtgacatgataagtgtttttgacact

SEQ ID NO: 374656 - DNA, 201 bp, Homo sapiens
agtactttggtcacctggtggctcccgaatgaatcctaagtaggtttactattaaatgctgatacaaaattatgttttgttaccacaagggaaacacactsctatggtgaaatctttcaataggacttttaagctgaatggattgggttgcatttgacacatatacaagttgcagtttaagcaaaacaaaaaatatgtatg

SEQ ID NO: 374657 - DNA, 201 bp, Homo sapiens
gttttagattttatgcaatgaaaatgaattatttttagagaaattatattacatgttcttgtattttaacaatttattgagacagaaaaaataaaataggyagagtggagtcccaaagagagggactgattttatgaatcagtaaatgccagtgttatccctggaccagcaatgaggttgctgaataaaaaagtgtatgtt

SEQ ID NO: 374658 - DNA, 201 bp, Homo sapiens
cccaaagagagggactgattttatgaatcagtaaatgccagtgttatccctggaccagcaatgaggttgctgaataaaaaagtgtatgtttgtgtgtgttrgtgtgttgtaaagctaggaaaaatgtttggcagtttgaaagaaatatatctgccaacaaatattcagaaattacgtgccatattttttaaaaaagaaaac

SEQ ID NO: 374659 - DNA, 201 bp, Homo sapiens
gtctagaacctcagggagcaacaaaggatgggcatggtcagcaaccataaccgtaagctgagctctttcagactcctgcaggccttggcctgatgcgtgcyctcctgtgcagccacgccacttgtacacagttcattttagtgcaggcgagttatctaaatcccacagtaaacaccctcagtatgactagtgcacaggtac

SEQ ID NO: 374660 - DNA, 201 bp, Homo sapiens
gtgtattttcaaatagctggtcttcaaactcattggttgtttcttctgcctgacctattctactatcaaatgactcatgcattcttcagtatgctaattgmgtttttcagctctagaaatactgattgatactttttaattatttcagtctttttgttaaatttgtctgatagaattctgaattccttctctgtgttatct

SEQ ID NO: 374661 - DNA, 201 bp, Homo sapiens
cattaacatccttttctttctaatcgaggtactccctttaacatttcttgtaggacaggtctgctgttgatgaaatccctcaatttttgtttgtctatgayagtctttattccccttcatgtttgaagaatatttttttccagacatattcttctaggataaaagttttttttccttcagcacttcaaatatgtcatgcta

SEQ ID NO: 374662 - DNA, 201 bp, Homo sapiens
atgaaaaaatgttcgtcagtgttgggctccttagtttgatttggccaagttaacccagttaacagttgggatatttgattttaagaccacagaacttctarttttgctggcatttctagttactgcatttattaggtatattctatattatttggattaacttctagataaaatttaaatacaggtttattaaatgatgtt

SEQ ID NO: 374663 - DNA, 201 bp, Homo sapiens
tgaacatagagatgctcattactactttatttattttattgtttattgtttttggatcttctcattggagagagctaagatatcttggtatgcacacatayacacatttaaagacaaactgtgccctgagtgcatactgacaattcctatgcaaattcaaaactgtagggattttaacctcctttatcttacatctttatc

SEQ ID NO: 374664 - DNA, 201 bp, Homo sapiens
atgagtagtgacaggttccttggcaagggggcattacatgaagcccaaactgcaccatgcctgcattcaaccgaaggctgacctcgctgctatttatttaytatttttagtttgtttctgtgggaaaaaaggaaataattctggttgaaatgggaataatctgaaattaaaccctgccaaaacctgatgtattttctctta

SEQ ID NO: 374665 - DNA, 201 bp, Homo sapiens
caattgagttttgagttggtgggaaagaaatcatggccgaggtgttcaaaaccaagagctgatatgtggaaaacaagcattaaaacagtgtcactagaaartgacggcggtggaaagttgtccatagagtaactctgctttcagggctccgtgtgaggactgagggggcaccctgaaatccacactggaaacaggcaggcc

SEQ ID NO: 374666 - DNA, 201 bp, Homo sapiens
cagttttgtgaatctcctatttttttgtgatgacagtcgtactgttgcacttgaacagatgtatttgtgtagctttcttgtatgcctgccttgttcttctrtgaacaaataacatacataaacaaacatatatttgggggtattggagggagggaatatataggcaacatatatatacatatggaggataaacaaaggatt

SEQ ID NO: 374667 - DNA, 201 bp, Homo sapiens
ctgatgattagtcctctgtcaaatggatagtttgcaagtattttctcccattccatgggctcccttcactttgttgattgtttcctttgctgtgtagaagstttttagcttaatgtagtcccatttgtctgtttttgttttggttgctcttgaggtcttacacaaaaattctttgcccagaccaatgttctggaatgtttc

SEQ ID NO: 374668 - DNA, 201 bp, Homo sapiens
aatagctatcatatctgcagtattttcagtggcagaagatactggacataccttgccactatttggagtcatttcacctttcaatctttgttctgtgaaaygttcagtgtctgcttatcccatttgtgatatgcagttttgtgaatctcctatttttttgtgatgacagtcgtactgttgcacttgaacagatgtatttgt

SEQ ID NO: 374669 - DNA, 201 bp, Homo sapiens
tgctaactgaagagaagttggcatcatgagatttgccctcagcaaaggcagcctagaggttatcctagaattgaaacagtgagacaggagccataaagggkttgtctcttaagattctcaggtttcaggaggcacaaaccaggaagaagaaagacatcacaattctctcataatgagaatattcagtaagtaggatatata

SEQ ID NO: 374670 - DNA, 201 bp, Homo sapiens
atattctaggtgtatattttccattttctacttcagacctagaattggccatttttccagggaatcctggttgtttttctgtgggaaatggccattagaamttacaatctgaacatagagatgctcattactactttatttattttattgtttattgtttttggatcttctcattggagagagctaagatatcttggtatg

SEQ ID NO: 374671 - DNA, 201 bp, Homo sapiens
tcgcccttggcaggcatggaatccaggccggtagtgtcagccgagcgcagcctgccaagccaagtgggcccgctgggcccgagcaaaactcaggtaaaggygccactggccacagaggtttctggctggcgaagcaacaccccaaggatcccataacattatcagccattgatgatcattgccttggttcattaattcatt

SEQ ID NO: 374672 - DNA, 201 bp, Homo sapiens
tcactcacacacccgtcacctctcccaactcgcccttggcaggcatggaatccaggccggtagtgtcagccgagcgcagcctgccaagccaagtgggcccrctgggcccgagcaaaactcaggtaaaggtgccactggccacagaggtttctggctggcgaagcaacaccccaaggatcccataacattatcagccattga

SEQ ID NO: 374673 - DNA, 201 bp, Homo sapiens
ccagcgcacacctgacatcaggctcctctgcgcaccaacatgctgagccaagtggaagctacaagcagatcttttaaagcagaaatgagccattgaaagarcttcagtgttggtaagcataagcagacaaatgtagggaataatgaggtaaactgtgcttattggattatggattcacaatagagtatttctagcatctta

SEQ ID NO: 374674 - DNA, 201 bp, Homo sapiens
cctggtgtctgaagtttctgggtgccaccacgttccccattgccagccttggaagctgcttgcagggagctggtgcccatgccggcacctggagctgcccrtcccaccacagccagtgtgcctggctgtgctcagtggccagatcccatgctcgctcactcacacacccgtcacctctcccaactcgcccttggcaggcat

SEQ ID NO: 374675 - DNA, 201 bp, Homo sapiens
ttcgtggctctgcagttcctggtgtctgaagtttctgggtgccaccacgttccccattgccagccttggaagctgcttgcagggagctggtgcccatgccrgcacctggagctgcccatcccaccacagccagtgtgcctggctgtgctcagtggccagatcccatgctcgctcactcacacacccgtcacctctcccaac

SEQ ID NO: 374676 - DNA, 201 bp, Homo sapiens
gactcgagcactcaggccgacctgcctggagagagaagctgcccactccagggtctcctctctgctgagagctgagcacttgactggatgacctgcctgcrtacaggagctacccactcaagggtctcctctctgctgagtgctaaacacttgttgggacaccctcactgtggagcaaagctgaccactatgggtttcctt

SEQ ID NO: 374677 - DNA, 201 bp, Homo sapiens
caagtgtcacagggatgcttctgtatctctgatctgaacactggtcacacccctccccaatgtaagtctgagtggggatcaccccctaccttttttttttyccctcctcttccccttcttcatcctaactaggaggagtgaagagacggcccagggctctgcatgctcttggatacagccacagccccacttcccaccctc

SEQ ID NO: 374678 - DNA, 201 bp, Homo sapiens
gtttaaaagacatcatgcactgataaagctttccctttatttgagaggacagttgcccctcatcacttcacaacatgaatgtcctgcaaaaaattgcacakaaaccaagaggacttgtgtgtaatagggatgtcactcccctgtctagtaatcctctatgagttaatctgcactacagaagcatgcctcaaagcaaaatag

SEQ ID NO: 374679 - DNA, 201 bp, Homo sapiens
agcatttcatgctggaatggagcagagtggatttagcattggaggcaggctgtgtagctagtaaaataacagttttggaaaactgggtgatttccttaacwgtaatggtagaaaggtacccagtttatgtaaatatgtgaaaggaggcccctctgagtgcttcacaggatgtgggcaacacttattttgccgtcctgtgta

SEQ ID NO: 374680 - DNA, 201 bp, Homo sapiens
ccactgtcaaggagaagtcagttgttccagtgatggaggtggggtactggtgctgaagtgcaagaggatcgtattacattgacagcagggaacagatgggrccaatatcatgaccctaagatgcacagcccacccaatcttttgtctttctctaggttatacagagtgattactgagtattgctaacatgatgggacagtg

SEQ ID NO: 374681 - DNA, 201 bp, Homo sapiens
cagatacagcttaattcaaaagaaaaatgggctcatcactatcatttatttaaacgatcatttatttttaagccacctttgaaatattttttataaatcgkgtattccattgcatttttataaccaacatcaattgagattaacaagtcctttgttcaaaaaaacgaataaacctccttaagatgaaatttttttaaggga

SEQ ID NO: 374682 - DNA, 201 bp, Homo sapiens
tacacatgttgtcttataccaaccaggaaaggacaacggatcatttcctggtcgtgctacccctttacccacgtgctcattcataccctgtgatgcatgcmaatggcaccactggcctgcatcctacttcgtgatagctggttcttgctcagaaatccaagagaacttaggcatcagttatcttgtaggtgatatggccag

SEQ ID NO: 374683 - DNA, 201 bp, Homo sapiens
ttatcttaagcttgggtgaaactgtgcaggatcttctgggaaagacatggaggggtctcttacaagacctcttgttgtgcctgcctgtatccagcttccatattagctatatccactcttagccagatgccatactcaatggcagtgggaagctttgtccttggagctgcctgccacaggtacatctacagaggtacatta

SEQ ID NO: 374684 - DNA, 201 bp, Homo sapiens
tgtagtatccgttctactcttgttgccctattcaggatttaatattccatagccccaggatgcttacaaagcttccccatgcagaaactctcttccctccrctccctgcagagacacagaatagagcaagctgacactgtggtgtttccctgggtgaaaggttatttggagacttcacaagtacagactaagaaaacagaa

SEQ ID NO: 374685 - DNA, 201 bp, Homo sapiens
attggccccttgcactggctgtacaagagccaaaggagtgagtgcccccttgtccttccctctctaacgtgcatatcttccatccccactcctaggccacyttcactgtcatctcacagacaaatccctggtcttcatccgggcctcattgtggtctccctttctagtaccccgaaggtcagagcaccattgttcttgcct

SEQ ID NO: 374686 - DNA, 201 bp, Homo sapiens
tttacatttccaccaactgtatatgaaggttcccttttctccatatccttgccagcatttgttattgcctgtcttttggatataagccgttttaactgggrcgagatgatatctcattgtagttttgatttgcatatctctgatgaccagtgatattgaacaccttttcatatgcctgtttgccacttgtatgtcttcttt

SEQ ID NO: 374687 - DNA, 201 bp, Homo sapiens
aatcaaggtatcagctggctggtctcttatctggaggctctggaaagaatccacttggaagccattcaagctgttggcaaaatccagttccttacggttgkaggactgaaatcctcatatcctttctggctgccagctgggggcttccctgagttcctaggtgtctctctggtccttgcatgtgggcgtctacatacaaga

SEQ ID NO: 374688 - DNA, 201 bp, Homo sapiens
aatgttcccaggtccacagcatcacaacactggggttgatgttaaaaattaaaataaagggacttaagagggagttgagagtcaagctgaatttgaggaastagccatggtcctcatgcagtttaagaagtcataatagcagtgctccaggctggctaatagtagtgaccaatgacaacgagctcccaaacgtgtcccact

SEQ ID NO: 374689 - DNA, 201 bp, Homo sapiens
ggaaggttcacttgctcttcttgcttccaagtatccgaggctatcccatgagaaaggaagacagagatggccatggttggggctgcctgcttcatggggcyggcgggaactgggaacaggtagaagccccacccactgctgagctggcagggcaggaacctcatgctccctgagcacagctgcggctgcccagccatggct

SEQ ID NO: 374690 - DNA, 201 bp, Homo sapiens
ttgtcacccaggtggcgaacataatacctgttaggtagttttttgaccctcaccttcctcccaccctccaccctaaagtagaccctgtgtctgaaattggrcttttaaaactactggtcaggttgtgtcagtctggagggcagaagagaaggaagggcatcaccactaatcttaaggtctgcttcctttggccctacaaac

SEQ ID NO: 374691 - DNA, 201 bp, Homo sapiens
tttgtcacccaggtggcgaacataatacctgttaggtagttttttgaccctcaccttcctcccaccctccaccctaaagtagaccctgtgtctgaaattgsgcttttaaaactactggtcaggttgtgtcagtctggagggcagaagagaaggaagggcatcaccactaatcttaaggtctgcttcctttggccctacaaa

SEQ ID NO: 374692 - DNA, 201 bp, Homo sapiens
atgcccccttcctgtgcctataaaaactatgagaccctagcaggtagatacacaagctgctggatgttgagaggaacacattggcggaagaagatagaagyggctggatgttgaggggagcacactggcagaagagcacaccgacaaaagagcacaccgacagttgtcatcaaccagtggaatgacgcagaatttggccag

SEQ ID NO: 374693 - DNA, 201 bp, Homo sapiens
tgagccttaatgagctactgaatatcagttgcctagaacaaactcttacatatagcatgtggtcaatcagagttaactaccatttaataaatttttgtctyttaatattttcattcagaagaattagacactggctacctcattacccaatgttttagaaatattgcttatctgggaaatctaaaatctgagaaccatgat

SEQ ID NO: 374694 - DNA, 201 bp, Homo sapiens
gccagagtcagcggttgagaacacaggctctgggagcagctacctgagttttagtgttggctctgcctggcactagacataggactagagaaaaactgctraccctctctgggcctgagttgccttatctataaaacagaggtgatgataataataatatgtgtttcattgttttgttgtgagccttaatgagctactgaa

SEQ ID NO: 374695 - DNA, 201 bp, Homo sapiens
ttttatttttttctttccagcttttattttaggtcagagggtacacatgcaggtttgttacatgggtagattttgtgttgctggggtttggtgtacaagtrgttttgtcacccaggtggcgaacataatacctgttaggtagttttttgaccctcaccttcctcccaccctccaccctaaagtagaccctgtgtctgaaat

SEQ ID NO: 374696 - DNA, 201 bp, Homo sapiens
cttgaaattggactttttatttttatttttttctttccagcttttattttaggtcagagggtacacatgcaggtttgttacatgggtagattttgtgttgytggggtttggtgtacaagtggttttgtcacccaggtggcgaacataatacctgttaggtagttttttgaccctcaccttcctcccaccctccaccctaaa

SEQ ID NO: 374697 - DNA, 201 bp, Homo sapiens
ttcagaacaattttgttattatgtataaaagccacaaaatgatatgaaaagaagtaaaattatggttcccttcacaagcttaacttgggtattttatgccrtatatattaaagcagaaatttaacatcacttagcattccagaaaatactagaaatgcataaaggaggactgtctttagttgctatgggaaccatttgctc

SEQ ID NO: 374698 - DNA, 201 bp, Homo sapiens
gtacaaggatatttgcccaagtattttcattgtatcctactaactttacatatctctagtgagtaaataccagactcctggtcatgagactaacacatggmttgttttaaaagctttagtatgtctgagatattggaaaaagacaaaagtagaaaaggtactgttccttttctgttgaagtaactaccccatcagcaacca

SEQ ID NO: 374699 - DNA, 201 bp, Homo sapiens
tttacaacaggcacatacagcttcctcccggagctgaagatacatgttgaaccagattcagtacctctctggagaatcacagacttctgagacaaaatcaygctaaggaaatcaaacacttgccccaaaagaagcagggaccatggcaacattgttttctgtcatggagtcacatttgaatactggtaaaaatcagagggt

SEQ ID NO: 374700 - DNA, 201 bp, Homo sapiens
gatttaattgttatatatggtgtgagatagaaatccaacttcattcttgtgcatgtggatatccagttgtgccagtagcattggttgaaaagattaatctrtcctcattaaatgttcccagtactcttactgaaaatcaatgtactgcaactgtaagggtttcttgagtactgggattctcagttcgattccatatctata

SEQ ID NO: 374701 - DNA, 201 bp, Homo sapiens
cctaatacagcagttttatgtcattcttcatagcactagctccactgaatatatcttttttatattcgtgacacatgttttctttgacctttggggtgccyctggcaatgaagactcaagtgtcaatgggttgatgggaatcctggtgccaaaagaaatggcccggtctgtaaacttgcttaatctagtgcagaagcctta

SEQ ID NO: 374702 - DNA, 201 bp, Homo sapiens
gatcagagcaaagacatatgggtttgaggttttacaatgtaagaattgtaatatattatagttgatttgatgaaagaattatcaaccaagcagtataagcwcaatactgaccaagtgtggaggattattgagctcagaaatagtcatgcagtaagaggcgagggaaatctatagggaaagtgcaatttgctgtatcttatt

SEQ ID NO: 374703 - DNA, 201 bp, Homo sapiens
ccaacttcattttaggaatgaggcaaatgtgacctaaagaggttcaatgatttgtccaaattgcacaatttaatcatttattagtcttaagtcagaacccrggcctcccatatgaatcagcattttttttgtgccaaacaacacttgactttaattggaataactgtaaatgttctacatttatatataagtagcctctaa

SEQ ID NO: 374704 - DNA, 201 bp, Homo sapiens
tataagcacaatactgaccaagtgtggaggattattgagctcagaaatagtcatgcagtaagaggcgagggaaatctatagggaaagtgcaatttgctgtmtcttattaaaataaaaatatgccttgctacctgagtaagaatgcacatactttttttaaaaaaaatctttgtcatatgactgcctattactgtttgaatc

SEQ ID NO: 374705 - DNA, 201 bp, Homo sapiens
agggtttcaatgttaaaattaacttggctgggtatagtaactcatgcctataatcccagtactttgggaggccaacacaggaggggaccacttgagcccasgagattgagaccagcctgggaaacatagtgagaccctatcactacaaaaattaaaaataaattagctggcatgctggtgcatacctatggtcccagctac

SEQ ID NO: 374706 - DNA, 201 bp, Homo sapiens
tacacagacagaagcctttgttttcagtcctgaattttaatttaagtatatattttcttggataaggaatactgaatgatgcagacttatttatgcagtgraaaatagttttccattgaaattaagttagaactgtacttcttgtttaaactaatatctgaagcctttagtcattttattagtcagtaaaattgatgaaaa

SEQ ID NO: 374707 - DNA, 201 bp, Homo sapiens
gagtctttagggagataatcaatttaaaatgagacaattagggtagaccctaatccaatattttataaggacaagaacagaaaaccagacaccgcaggttytcactcataagtgggagtcgaacaatgagaacacatggacacagggaggcgaacaacacacaccagggcctgtcagggtgaggggtaaggggagggagag

SEQ ID NO: 374708 - DNA, 201 bp, Homo sapiens
caacattacctaacaccactagggagtgctccttctaggctgtcaattgtggcctatgtttagagtgttattttcccttacctgagatctgtgttcttacygtaagtgtatatcctagtcattttattatacaagataatcctgaatgtttgccataacatgtaaataagaattccagctttcaaatatgatggaagttta

SEQ ID NO: 374709 - DNA, 201 bp, Homo sapiens
atttgcttgttctccatattcatttaaatgcagttgcgctatatgtggccctttgtgtctggcttccttcacttagcgtgtttcaaagttcatccatgttrtagtgtatatcaatatttcactccttcttaaaaccaaatagtattttattccatggatataccacattttatgtaagcatgcatcagttgatggacattc

SEQ ID NO: 374710 - DNA, 201 bp, Homo sapiens
cagaggtacaatgtgggttagctgtggccttggatggtaacctgcctgactgctctcttcctcctgatgtgacagccctgagttccatttcatatctagcrctaagtttccaagaatgagattcagaagtttgggtgaggggagggggagcaacaactgtacccaagtgtcagagccaggctgcactcaggcctgaggctc

SEQ ID NO: 374711 - DNA, 201 bp, Homo sapiens
agctgagtataccacttaccctctgtgtatcttgcatctattttctatcttgtatccatcctgtgtcagcactgttgcgttgatgtttttaaatcagttcycaacttgcagcaggggagggagggagcggtcagggacgaagtatgattccctatcccagcccctccccagggccccagtccgtgtgtctctgggtcctcc

SEQ ID NO: 374712 - DNA, 201 bp, Homo sapiens
aggagaatggcgtgaacctgggaggcggaggttgcagtgagcccagctcgcgccactgtactccagcctgggcgacagagtgagactctgtctaaaaaaawatatacttttttattgatacataatataagtgcatatttgggggtacatgtgataatttaatacatgtatacaatttgtaaaaatggaagcagtgtaact

SEQ ID NO: 374713 - DNA, 201 bp, Homo sapiens
atgtggggagtgaaggtttatagtggaaatatttacagagcctcaaacactgcacaacagttcaaactttgttgtagtgccttcattctttttgctgtcartttgtttttcttctatctttattccacatacttctggtataggtttaataaggatttttcaaaaagataaatatggtttatattttcccagctcaaaatt

SEQ ID NO: 374714 - DNA, 201 bp, Homo sapiens
cctgccaggaggacttgtgaaaacacagattgctgggccccagctccaaagttggggtcgggcctaataatttgcatttttaatgtattctcaggtgatgmacatgctgctggtctttggaccacccttggagaactgttggtatacaggcttacctcgttttattgtgctttgctttattgcgtttcatagatatacttt

SEQ ID NO: 374715 - DNA, 201 bp, Homo sapiens
aaggagaacaattttgaatggtgcctgtgtaactcagggttcttctctttctttcctgacaacattcttaggtttatagaagaaattaattgtgcttgttytggaaaaaaaaaaaaaaagctatattggagtacccagagaagccactttgagactttcgtaaactctttgttatgtctttgtttgtgagagtgttatgat

SEQ ID NO: 374716 - DNA, 201 bp, Homo sapiens
ttttgagccccaatgtatgctaaacatgatggtaattattgtaggagaggaaggattataagaaatgactttttctctttaggaacttatctacttggggraaaaaagttacaaaaatacaattagtgaacaatctaaaatgatatataattaagtgtgctatagactggaagtgttctaaaagcagtttctcaatatcaa

SEQ ID NO: 374717 - DNA, 201 bp, Homo sapiens
gtattgtggatcgtcgttgttctccatcgagtgcctctgattttctgttgccattgtattttggcattagactggtggccagtggtgtcatttgatgtagraattctgtcagtaagctcttctatcttctctctgaccgtagcctggttcatcagcctttcagctgtttttaggagcgtctcagagtgggatctgtttttt

SEQ ID NO: 374718 - DNA, 201 bp, Homo sapiens
ctgccagtgcccaaaggagggagcccaggtttcctgcagctgctttgccttaacatccctcccctttcccttcgcacttctgccattcagtgtgtaccccyacccaccacacactccctccttcaggtcccagaaccacgctagaaacaaacattctggtgatgcgctcaaacgggccctggtctcgggcagttcagttca

SEQ ID NO: 374719 - DNA, 201 bp, Homo sapiens
gaaaaagacatagatagttcctcatgaattcataagtatcatgtaatttaaatgatagcattgatcagaatgtacaattaaagttgtttttgtatgtatgygatgttgccttggctttcgtgttatggatatatgcttttggtcaacctttctaggtggcttttagtttcatttgttgattataaggaaaaaaatcacaac

SEQ ID NO: 374720 - DNA, 201 bp, Homo sapiens
atccccatgaacataagaaatatacctttaataaggatattccacttgagtttgcacaatggcaacacctgtgtcatagtaatagatgaattaaacctacsccatccaccttttgtaaagaatgtaattccatttgagctcttcctttgaggagtttaattttcttaaaaaaacttacttagagttaacagtttttcagct

SEQ ID NO: 374721 - DNA, 201 bp, Homo sapiens
catatgttggagtaattttagaagcaaatatggtcaatatatcatctttcctaaatcttcatttcttgtaccctttgcctaggttttcttattctgtcatraaacttctgtcctaattcttcctgtaaaaactttcttgccgtggcatccacattaaacgttatagacatacacctttatttttttccatgatccccatga

SEQ ID NO: 374722 - DNA, 201 bp, Homo sapiens
agtgtagtcactcagattgctagcaattggatgaatgggtaaaatatttacccacattaaaaagagaaacctaacaaacagagctgtaaatgcaaatgagytctctgacctgtctagttggaaaggtgtcctcattcattcctactgcaagcatcatctgagcatgctcagtgagtgtgcaccactccagtccctgctgtg

SEQ ID NO: 374723 - DNA, 201 bp, Homo sapiens
tctggtcccagctactcaaaaggccaaggtgggaggatcacttgagcctgggaggcggaggttgcagtcagctgtgatcgcaccactgtactccagcctgrgtgacaatgtgagactgtctcaaaacaaaacttaaacacgaatgttcacagcaacatttgtcataatggccaaaaagtggaaacaacatatagttctcat

SEQ ID NO: 374724 - DNA, 201 bp, Homo sapiens
aaaaaaaaaaaaaagaaaaaacagaaaataaaaacaaaaaccatgagatacaactttatacccactaggatttctataaaaaaatatggaaaataataagygttggccaggatgtggaaaaattgaatccctcgtatattgctggtgggaatgtaaaataatacacccacttcataaaacagtctgacagttcctcagatg

SEQ ID NO: 374725 - DNA, 201 bp, Homo sapiens
tggaaaggtgtcctcattcattcctactgcaagcatcatctgagcatgctcagtgagtgtgcaccactccagtccctgctgtgagaggtaccaggatgccrgaaagccccaacacggagttggtattgagcacacagacatcctttaatttcttcaggcccctcttctgtgcctctttctctacagactctcacctcacca

SEQ ID NO: 374726 - DNA, 201 bp, Homo sapiens
taaaaagcagaaagggagggttaatccatgtgaaaccatctgggtttgttagctagtgcttatagaagttaagtttctactctttggcagagaccgggctyctgcaccctctaagactgggagtcagggagccctatcttcaagtgattgccacggaacaaacaacaaattctctgtctggagttttctcaggcaggcact

SEQ ID NO: 374727 - DNA, 201 bp, Homo sapiens
aaactgcactttattacagcaaatgcggtcattttcaatatccttctattctttttaaatgcttttcttggaattgccatctatgttgctggcttgaacartcacataacctctgactccttctcccctacccttgagcttcagatctagtgtaagtgacatgctgggtgtcctttgaggatatctcaagcagcaagcagt

SEQ ID NO: 374728 - DNA, 201 bp, Homo sapiens
gatatgttctgttctggataattttgtatgtactaatgaaaagaaagtgtattccatagcatttgggtgaaatgttctgtagacgtcagttatgactattwggtgtagcgtgtagtttaactttaatgtttctttgttgactttctgtctgaatgattggtctgttgatgttccctgctatgactgtattacagtttatct

SEQ ID NO: 374729 - DNA, 201 bp, Homo sapiens
cttgtggttgggattcaaagtccccacagtagagcttgagttggcttaagcagatgaacaatcgtcagacttagttactctttgttgacttacatctgtaytgtggcacctagggtgcagtggggcaaactgtcactgccacaagggtgaagtgaaaagtatatgtctatactcttttatctttcatttatcagctagaca

SEQ ID NO: 374730 - DNA, 201 bp, Homo sapiens
ttgcagttatttcccatgtctaactaaaattatagatccctatttattattttccaggatagaagatttttagaggtgacaggccatgtagataaggctgragaagttcttgaacctttaaaattatgagaaggaccttttcatatgcatggatacctgggccctgctcagaaataattgaaaaccccaattaagaaaaca

SEQ ID NO: 374731 - DNA, 201 bp, Homo sapiens
aaaatttggcttggaaatttcagctaaattgaataaaaagtttaattcttagatttattctatctgtgaagaaaaataacctgcaaatcatgcagaaaaartataatcatccctcagtatccaggggggattagttccaagactgcccccctcctccccaccaggacaccaaaatctgcagctactcaagtccctgatata

SEQ ID NO: 374732 - DNA, 201 bp, Homo sapiens
catcaaaacatgaggacagaattactttgtttgtttaaattatcttgctagtccctgaagctggagcatgcattacttccaaataaaaatctattgttttyctagcacactagcgtttcattaattagaaaaaactttaatttcaaattatattttgtaacccctccaaaaaaaatacttcagaaaaggcagagagaagaa

SEQ ID NO: 374733 - DNA, 201 bp, Homo sapiens
ttcttctatagcaataggcgtgatattgagtaagtaataaacaccccaaaataccttaggtctttaaatgaaataataaagtattgttgataagcatttarttcatgttttaataaacaataatggttacatcaatgagagaaataaaatgcagtcacttccagatatatattgctaaagcatgaacctattgaacactat

SEQ ID NO: 374734 - DNA, 201 bp, Homo sapiens
gtggagagctggttgtaggctgtcagaaaggggcctttcttagtattgtaatgattcatagccactcatgattcttctttgctccctcattatgttatttrtatgtatttttttctttttattgtaaactacttgacaagaagtactgtctgtttttcttctatagcaataggcgtgatattgagtaagtaataaacaccc

SEQ ID NO: 374735 - DNA, 201 bp, Homo sapiens
caaatccttattattttatgctgaaatttctataattgtttctaccttttctttgtggttccagcctttttctattctaatgtccccctactcactcactmactaatcttaaaaatgtattttcatcttggctgtctctctacaaaagtcttgagtggctcttcacttaatcttcattccagtgccttggctgtcaaggtc

SEQ ID NO: 374736 - DNA, 201 bp, Homo sapiens
tttgggtattagattatttatataaaatgtttacctaaatatatttaaatggcattctgaaacattttcctagttcagataaaatttcagcactaaatagrggctgcccttgcttttcaacacagtcttgagaaactgtaagttggtggtcatgaaacaggtcatttttctccacaggaacaatgttgaaaccggatgtta

SEQ ID NO: 374737 - DNA, 201 bp, Homo sapiens
atataaaatcattggactgaaaaattgttgttttgggtattagattatttatataaaatgtttacctaaatatatttaaatggcattctgaaacattttcmtagttcagataaaatttcagcactaaatagaggctgcccttgcttttcaacacagtcttgagaaactgtaagttggtggtcatgaaacaggtcatttttc

SEQ ID NO: 374738 - DNA, 201 bp, Homo sapiens; identical to SEQ ID NO: 80849

SEQ ID NO: 374739 - DNA, 201 bp, Homo sapiens
gttttcatctttggttcttagatttattacaggacagagtagcatgaatgatctttattaatcccattttatgattgcagcagatatctggtaaatgctaygttgcatatttaacattattccattttaaacattttcatttgtcagaggttgcaggtaaaaaggggggattttaagttctctctgtggcataattgatgg

SEQ ID NO: 374740 - DNA, 201 bp, Homo sapiens
tgctctgaatcctgcaaaacagaaaaattctgcacaatttcacgttggattaagttgcaataaaaagtggccagagattagcagcttctttaaaagatcartgaatgttcacatttagatttcggtttgtttagaaacctagttcgtgtgtctagattcttgttttcacccagtcctcacctctcttagccgtgaagcatc

SEQ ID NO: 374741 - DNA, 201 bp, Homo sapiens
gcacaatataattgagagttttactgttttgcaagcagagtttggcatttattataagtaatgcaccagaatagccttttaaaatgattccataatatgcwttagtttatacaaatagaaaaggaaatcagatgatgttactgtaaagtacagtagtcccctcttatccgagattttcacgttccatggtttctgttacct

SEQ ID NO: 374742 - DNA, 201 bp, Homo sapiens
tccatgctctcaggaatcctgacagaatgagtgggagtaaattgcctgtcccttctaaccagaatgccacccacttctttaagctctaggtttggggtttsccctgccttggtattctccagttgcattcttgtttctttcttttaagcattaatctggaggctgctcatttttcatcttgagtggtgttgattttttgtc

SEQ ID NO: 374743 - DNA, 201 bp, Homo sapiens
tacggactgaatttctgggtatgtgttgtattaaaagaaaacaacaacacaaatttcggaagtttttgtagaacaactggctttcattctttaaaaaggtyggtgtcattaaaggaagaaatgctggggattgttttaggttaaagaaacatgatgacttaatgtggtgcttgatccttgattcttgagcaaaatgaaaag

SEQ ID NO: 374744 - DNA, 201 bp, Homo sapiens
gtgaactcattgaagatatatatgagaacagctctctgtacttctaagaggtttcataatcatattaacttttatgttctgaaataagaacttctaagtamttttatgttttgaattaagaacttccagacttcttgtcttcacagtaatgccaagtttttctggaccttctttgcactattattttgaccagcaaatcct

SEQ ID NO: 374745 - DNA, 201 bp, Homo sapiens
acgcctctgcctctggcccctgtgtctgatgggcactgtcagtggacgaaatccaaggagcaaaagaaagaaaactcgaactatggtgggttggggagggrgggggaagggaccgtcttgcagtcagccacaggaagtttgcatctttcgaaaactgcacgtgagaggagtccgctgccaaggcttcttgtcctcatgttc

SEQ ID NO: 374746 - DNA, 201 bp, Homo sapiens
gcctctgcctctggcccctgtgtctgatgggcactgtcagtggacgaaatccaaggagcaaaagaaagaaaactcgaactatggtgggttggggagggagsgggaagggaccgtcttgcagtcagccacaggaagtttgcatctttcgaaaactgcacgtgagaggagtccgctgccaaggcttcttgtcctcatgttcct

SEQ ID NO: 374747 - DNA, 201 bp, Homo sapiens
gggagggagagcattaggacaaataactgatacatgtggggcttaaaacctagatgatgggttgataggtgcagcaaaccaccatggcacaggtatacctrtgtaacaaacctgcactttctgcacatgtatcccggaacttgaagtaaaattaaaaaaaaaaaaaaaaaaaaaaaaaaaaaaggtgctcgggcaaggtgg

SEQ ID NO: 374748 - DNA, 201 bp, Homo sapiens
ttaggacaaataactgatacatgtggggcttaaaacctagatgatgggttgataggtgcagcaaaccaccatggcacaggtatacctgtgtaacaaacctrcactttctgcacatgtatcccggaacttgaagtaaaattaaaaaaaaaaaaaaaaaaaaaaaaaaaaaaggtgctcgggcaaggtggctcatgcctcatg

SEQ ID NO: 374749 - DNA, 201 bp, Homo sapiens
gacaaataactgatacatgtggggcttaaaacctagatgatgggttgataggtgcagcaaaccaccatggcacaggtatacctgtgtaacaaacctgcacwttctgcacatgtatcccggaacttgaagtaaaattaaaaaaaaaaaaaaaaaaaaaaaaaaaaaaggtgctcgggcaaggtggctcatgcctcatgccta

SEQ ID NO: 374750 - DNA, 201 bp, Homo sapiens
acaaataactgatacatgtggggcttaaaacctagatgatgggttgataggtgcagcaaaccaccatggcacaggtatacctgtgtaacaaacctgcactytctgcacatgtatcccggaacttgaagtaaaattaaaaaaaaaaaaaaaaaaaaaaaaaaaaaaggtgctcgggcaaggtggctcatgcctcatgcctat

SEQ ID NO: 374751 - DNA, 201 bp, Homo sapiens
gcatttcctttatgttattgtatgtatctgcttttccagccatttccccatccctcttaactttgcgtttggaccctggtaagagaaaatgacagtactcyatctgaagtggaccatgtccctgtgtcatggtattgatttaacttatcctgtaagcttttgacaaatgagaatcagagtcaaagaggccttcatccctat

SEQ ID NO: 374752 - DNA, 201 bp, Homo sapiens
tctgctttctcactgcccaagctgaagctgcctgggaggaagggctgagcatgcctagcccagccccttctttggggagctgactgcctatgggaaccctstccctccatcctgtgagttttacagcagcactgaacatatgggaggccttgtggttttctagggtggcctgggactgggttagtgagtctgtttattctg

SEQ ID NO: 374753 - DNA, 201 bp, Homo sapiens
tttcctacaactagtggtcctatgaataccatttattacccttttatctaactgtaagagatctatattgtgcacatagaatgcttgtaatgctgtgccaygttttggggggacagtgtttgtattctactcccagaaatgcagtgtgagttgcaattagcctaccaaaattacacatttctggttatgaagttgccattt

SEQ ID NO: 374754 - DNA, 201 bp, Homo sapiens
gccactataatattagttactcagacctttgctctgatttcactaaatagtaaagtaaagggagctattgctttattattttgtcaccctctagtgtgacyggtgaggcaggagtacagtagctggaggtcctgaaggggcccaccatgccattctggttgttattccctttattgtaatacacctccatagagttcattg

SEQ ID NO: 374755 - DNA, 201 bp, Homo sapiens
aggtttttgttttatttcaacagtgtttttatttctaaaagttacgttagctgtttttaaaattggtcattttcagtgacgtattacatgttcatttttakaattacatttttaattttagaagtggcacgcaaattttatattctgaatctggtaatttgagtgatgtgaatctgttgtttcttatctcttttgactctg

SEQ ID NO: 374756 - DNA, 201 bp, Homo sapiens
cacctttaccacattgagtctgcccattcataaacatggtataactccaattattttggtcctcactaatgtctttcaatgaggttttggatttttatctrttattggtgtcttgtaagatttattcctgggctccttatatcatttgatcttgttgtaaatgaaaaaaattcagtaatgtttcagtttgataatatacaa

SEQ ID NO: 374757 - DNA, 201 bp, Homo sapiens
gcttttaaataactcttggcatctgatagaacaaattttcctacctcattcttcctacggagtgttctgtttggggacctttgcacgtctttatttacttyagaatcaatttatcaagttccttaaaactctaattaggttttaattgaaattgtagtgattctatagattagcttggggagaactgacacctttaccaca

SEQ ID NO: 374758 - DNA, 201 bp, Homo sapiens
aaatctaagtctctggggatgaggcctagagagttttatagggtcatgtgttgcataatgacattttggtcaaccgcagaccacatataccactgtggtcscatatgattataataccatgttttcactgtaccgtttctatgtttagatacaaaaatagttaccactgtgtttctgttgcctacaacattcaatacagaa

SEQ ID NO: 374759 - DNA, 201 bp, Homo sapiens
gtaaagacatttctgcacatgtctcctggagcccagtgggaagaatttctctaggagtgcatttttcaaaccctttagatgcagcatgaaatgtattttcrttgttacatggttattacatgatacaatccatatcttttaaaatccattttcatgtttcttttctattctctttcattaaaacaaatgccactgtgatat

SEQ ID NO: 374760 - DNA, 201 bp, Homo sapiens
ttgtttccttgcttttcttttttattcttttgacaataatgctggtaaagacatttctgcacatgtctcctggagcccagtgggaagaatttctctaggartgcatttttcaaaccctttagatgcagcatgaaatgtattttcattgttacatggttattacatgatacaatccatatcttttaaaatccattttcatgt

SEQ ID NO: 374761 - DNA, 201 bp, Homo sapiens
aattagccgggcgtggtggcacatgcctgtagtctcagctactcgagaggcttaggcaggataattgcttgaacctgggaggtggagattacagtgagccrcgatcgcaccactgcactccagcctgggagacagagcgggactctgtctcaaaaataaataaataagtaataaataaaaactggttgactaattataaat

SEQ ID NO: 374762 - DNA, 201 bp, Homo sapiens
ggctagtgtggtggctcacacctataatcccaactctttgggaggctgagacgggcagatcaccctgaggtcaggagttcgagaccagcctggtcaacatkgcgaaaccccgtctctactaagagtacaaaaattagccgggcgtggtggcacatgcctgtagtctcagctactcgagaggcttaggcaggataattgctt

SEQ ID NO: 374763 - DNA, 201 bp, Homo sapiens
taggctagtgtggtggctcacacctataatcccaactctttgggaggctgagacgggcagatcaccctgaggtcaggagttcgagaccagcctggtcaacrttgcgaaaccccgtctctactaagagtacaaaaattagccgggcgtggtggcacatgcctgtagtctcagctactcgagaggcttaggcaggataattgc

SEQ ID NO: 374764 - DNA, 201 bp, Homo sapiens
ttgtctcccaccacgtagctgcactggagtctctgagcctactttggcttgggaggctgcccaattcaagaatcattctttgctcagttaaactccattamatttaatttggctaaagattttcttttaacactgacctgctaagataagttgtggtttgtccataagaactcaagtatgcaaatatggaggttttttcag

SEQ ID NO: 374765 - DNA, 201 bp, Homo sapiens
tttctgtccataaattgtctcccaccacgtagctgcactggagtctctgagcctactttggcttgggaggctgcccaattcaagaatcattctttgctcarttaaactccattacatttaatttggctaaagattttcttttaacactgacctgctaagataagttgtggtttgtccataagaactcaagtatgcaaatat

SEQ ID NO: 374766 - DNA, 201 bp, Homo sapiens
ataccacactgtacccagttcattgtttctgtacctcacttcagttttctgtatgtacctcacttttctttttctgtccataaattgtctcccaccacgtrgctgcactggagtctctgagcctactttggcttgggaggctgcccaattcaagaatcattctttgctcagttaaactccattacatttaatttggctaaa

SEQ ID NO: 374767 - DNA, 201 bp, Homo sapiens
gttaatggcaactattttttctgggaaagctctgttttagtcaactacttgaagttcagataagatttctttctgcatcttcttttgctcaaatgttttcrctttaaaataatctgtataccaactctggggatctgaatgggtccccgtattttccctatgtagaagttccttcaaaaaaagaaagtgggttgattgctg

SEQ ID NO: 374768 - DNA, 201 bp, Homo sapiens
aggatatgcacattctgcatttggatggtgtgccgctgccgcacaagcaagcactgaccgtttcattaggacccctgcctccgccgcccactgccaagagrgaaaaaaaaaaaaaacactggctcttgagagccaattgttaagttttcaggaattttctgagctgggtcttcaactgttggtaacttgaattcatccatg

SEQ ID NO: 374769 - DNA, 201 bp, Homo sapiens
tgaacccgggaggcggagtttgccatgagcagagattgcaccactgcattccagccaaggcgacagagagagactctgcctcaaaaaaaggggttgggggyggggtggaaattgagacacagggagagaatgtgaagagacacagggagaaggctgcgggaggacagaggcagagattggaggggtcctgccacaacccaa

SEQ ID NO: 374770 - DNA, 201 bp, Homo sapiens
ctgcattccagccaaggcgacagagagagactctgcctcaaaaaaaggggttgggggcggggtggaaattgagacacagggagagaatgtgaagagacacrgggagaaggctgcgggaggacagaggcagagattggaggggtcctgccacaacccaaggaacatctgggccaccagaagctgaaagaacaaggaattgtc

SEQ ID NO: 374771 - DNA, 201 bp, Homo sapiens
ggctcaagtgatcctctcatctcagtctcctgagtagctgagactacaggctcatgccactaggctcagctactttttttcgttcattttttgtagagacyaggtctccctatttttcccaggctggtcttgaactcctggactcaagggatcctcctgccttgacctcccaaagtgctgcaattacaggatcaccacacc

SEQ ID NO: 374772 - DNA, 201 bp, Homo sapiens
taaatttttcctttgctcttctcttacattgttattaaaatagttttatcgcatacgtatgtattcttaaaccatttccttttgcatgtttttcaggtttrtaagattgcatcatagtagtcctgtgggacttgtttttttaattcaatataatgtgtttctgaaacacattatagctcatagccatagctaattctgtag

SEQ ID NO: 374773 - DNA, 201 bp, Homo sapiens
ccattgtacctctctcagaagaaccaagatatactgttatccagaaaagaaatctcaaagagccaacaatctttctaggatattcatgcctttcctataayaatgttttctgaagttatgtaatatttgatacaaacaaaaggacatacgtaacctacataaattgtgcagcataacaataatcaacttcccatcttaaaa

SEQ ID NO: 374774 - DNA, 201 bp, Homo sapiens
ccatttgcgtagacttgtaaacaacttcaaatagaaaactatctaatcataagaagattgtaaataccaaaataggaggctctaaacaggtaaaaatattktaagtaacacttatctgcttagtattaactagaggtaatagttacatttgggcaaaactgaaattgtatttgattcacttttttcatcactaattacatt

SEQ ID NO: 374775 - DNA, 201 bp, Homo sapiens
tgaatgctttaccttattaagatgattcaatgtattccatagtttttaggccacttctaagcagtatttcaaggaaacatacttggtagtaataaaaaaawtttttgtggcaaataaacaattaaaaatgaaagatatgcacatcaaactgtgattcatttttataagtttaatgaagaattagctatatgataattctta

SEQ ID NO: 374776 - DNA, 201 bp, Homo sapiens
ttcacgagatctgatggttttataagtgcttgtcatttcccttctggcacttattgtctctgctgccaccctgtgaagaggtaccttctgccatgactgtwagtttcctgagatctccccaaccgtccagccatgcagaattatgagtcaatgaaacctcttttctttataaattatccagtctcaggtatttcctcatag

SEQ ID NO: 374777 - DNA, 201 bp, Homo sapiens
ggcctgacaagagtttgttcaaggggagaatcttggtaagctctcacttcaccctatgagaaaaatgattcattgaatagatgacatttgaaaagggaacygaagatattcagtctgtttcttctgggcattgtccacgggacacaaatgctcttttctgcaactagaggtaaattaaccatccctaggtgggagtgcaga

SEQ ID NO: 374778 - DNA, 201 bp, Homo sapiens
gtggggcaaactgtcactgccacaagggtgaagtgaaaagtatatgtctatactcttttatctttcatttatcagctagacacatgtttccttcatgcaarggaaagaaaatcacaagggcccatgcttgtctctctttagaactctctagaattagcttgtcatgaaatgtaaaactaatgtgcagttgtaaaaactgct

SEQ ID NO: 374779 - DNA, 201 bp, Homo sapiens
agtcagattacagttttctacattttggagaggaaggagttacaggcaaagacataaatcaatacatggaagatattgattagtttagcccataaaggtgrgatatcttgaggtggaggcttacaagtcaatagatggattcagagattctttaatttgcaattggttaaaggaacaaaacttggtctaaaaacttggagt

SEQ ID NO: 374780 - DNA, 201 bp, Homo sapiens
agatttttaagaggcttattctggccaagcccggtggcttacgcctgtaatcccagcactttgggaggccgagacgggtggatcatgaggtcaggcgatcragaccatcctggctaacatggtgaaaccccgtctctacttaaaatacaaaaaattagccgggcgtggtggaggacgcctgtagtcccagctactcgggag

SEQ ID NO: 374781 - DNA, 201 bp, Homo sapiens
gcactggatttctgaatcttctcttcttctcaaacagttatttgttggctattaagagcatctccattgattagaagtggtagagacatacttgtgccttyggaaagggggaatagaatgtgaacacaacctattcttgaaagagcttgaaataatattctataccaagctgattctctttggaactgctgttgtccacca

SEQ ID NO: 374782 - DNA, 201 bp, Homo sapiens
cttgaattggtctgaatattagtaaataactggaactattttcaggggtttttttttgccagaattatattagagaaaacctgatacattttatgattttwtgcaactcagaagtaattaccaaattcataattctgtaagagatttttaatacttgcattattagaatataccagatttattatctagaaaccagccttt

SEQ ID NO: 374783 - DNA, 201 bp, Homo sapiens
aatgtttgtcaaatctctaatctttgttacagagtggaatattaattacgcttttaactatgagaggtaaataaaatgagcatccactgcacgcccagggrtaaattgcagattaccaacaacgtgacataatgcactaaatgtcagttttgtcaaacaaatttagaagaacggttaaactattagcttcctgttgttcta

SEQ ID NO: 374784 - DNA, 201 bp, Homo sapiens
tctggagaatctgttgaaggagggtttttgcatatatgctggtttaaaggaaatggaggtgttgaactttagaaccatgttgcttatggaaatagcttcgygtagagtaactcttagtccattttgaaaccctcttccctagaaatttctatctctttcatttaatactgtggcaaggttaataatatttacacatacttt

SEQ ID NO: 374785 - DNA, 201 bp, Homo sapiens
ttttctgaaagaccaaacctttcatttggttacccctttcaaaaattttgttttttgtttttctttcaactgttgacatactctctctgagacatatggtracatattatttccatggggcatgcctaggcattttgtgggaaattacatgtatttcacagaagtagatgctctttttgaccaatatttttattttaaatg

SEQ ID NO: 374786 - DNA, 201 bp, Homo sapiens
tttccggttactttctgctgggcagattgggggttggggtttcacagatattgaagtctggttttcttccctctgctcagaaatttttcatgtctctggcycctggaatagtctcatcctcatatttgagttcttgggtattgctggtgataatctctgtgctgtatatttatttattttttgtgggagtgagtgaagcca

SEQ ID NO: 374787 - DNA, 201 bp, Homo sapiens
acttgttattgctcatcctgtaaggcaaagaaaacacattctgctgatgtctttgttttcaatactttttctctcattcattgtgatcagggtggtaatayacctgttttaatttatttttgatcatttttcctattttgttttgtttttctgaaagaccaaacctttcatttggttacccctttcaaaaattttgttttt

SEQ ID NO: 374788 - DNA, 201 bp, Homo sapiens
tgagacctgttttctggcctaagatatgttctgttctggataattttgtatgtactaatgaaaagaaagtgtattccatagcatttgggtgaaatgttctrtagacgtcagttatgactatttggtgtagcgtgtagtttaactttaatgtttctttgttgactttctgtctgaatgattggtctgttgatgttccctgct

SEQ ID NO: 374789 - DNA, 201 bp, Homo sapiens
ccatcagggttgcaaatactattgtataactcattattttaagctgataacaacactgcataaacaaacaaaccagcaaaaagaaaacgaataatgctctrtgcctctttaatattttgtagtttctgtttatatcttcttgcactatgtcttgaaaagttgttatagtttttttattggttcattgttaattctttctaa

SEQ ID NO: 374790 - DNA, 201 bp, Homo sapiens
tagtcacccagcatcctttgccaaacacagtgaaagacttttggagactggtcctggattatcactgcacatccgtagttatgctaaatgatgtggatccygcccaggtgagacccggacttcttacagtcagaactagtgccagggggtcaagattgtttttacactgagtttgtttgcacccgagaagtgcaggcccta

SEQ ID NO: 374791 - DNA, 201 bp, Homo sapiens
gaagacaggaacctgtgcagttttaaaaacccagctttctgggttttgtttttattttttcctcaattagcttttagattttttttttttttttttttggkgttatttgagacagagtctcactctgtcgcccaaactggagtgcagtggtgcaatctcagctcaatgcaacctccacttcctgggttcaagtgattcttg

SEQ ID NO: 374792 - DNA, 201 bp, Homo sapiens
tgtgctttttcttatagtagctttgtggcctctcctcacacttaataccttcattagttacaattagcacatctttttctcatccactttacaggaaatamatttcttatatctttactaaattccaggctctcagaaatgtgtttgtgaggaaaaatattttctgcttcagataatggcttctttagatgtttgaaaagt

SEQ ID NO: 374793 - DNA, 201 bp, Homo sapiens
tggccatatttacaactgatgatgtaaatacagtttttctcatgtccacagtggcataaattttaaatgcaggaaagttgctgtttactgggtgtttatcrgtcctaaggtttatgcttaatgaacttcctctgcttctgaactgggatcatgggctccttgttttatgaaagaaatcattccctaagcaaatgagtctct

SEQ ID NO: 374794 - DNA, 201 bp, Homo sapiens
cctgcaacattgaagacttaatttgggcgcttcgcttgagtgcacatgtaatgtgggtatatccaaattggatatgtgttgttgtggctcaaagatggccwtatttacaactgatgatgtaaatacagtttttctcatgtccacagtggcataaattttaaatgcaggaaagttgctgtttactgggtgtttatcggtcct

SEQ ID NO: 374795 - DNA, 201 bp, Homo sapiens
aataacttgttcaattctagaaccacagtctgtcatatctacatataacagtaatagcagttcagatatgtaaaacttgttattgctcatcctgtaaggcraagaaaacacattctgctgatgtctttgttttcaatactttttctctcattcattgtgatcagggtggtaatatacctgttttaatttatttttgatcat

SEQ ID NO: 374796 - DNA, 201 bp, Homo sapiens
tgatcctctcatctcagtctcctgagtagctgagactacaggctcatgccactaggctcagctactttttttcgttcattttttgtagagaccaggtctcsctatttttcccaggctggtcttgaactcctggactcaagggatcctcctgccttgacctcccaaagtgctgcaattacaggatcaccacaccaggcagct

SEQ ID NO: 374797 - DNA, 201 bp, Homo sapiens
ctgacatagctgaactaaactgttaaaaagttgactttaggcaagaaacttaatatccaaaaataggaaactttacactgataagaggttcaatataaacrgaaaataccacccttttaaatgttttctaccttacagcataatctcaaatatgtaaaagacatcatgttgcctaatattttagtggtttgacttcaaaga

SEQ ID NO: 374798 - DNA, 201 bp, Homo sapiens
agttttcaatagttggtttgtatttctaatacgaaattcagaacatccttgatcatgattttatttatttattttgagatggagcctctctctgtcacccmggctggagtgcaatggcgcaatctcggtccactgcaacttcagcctcccaggttcaagcgattctcctacctcagcctcctgagtagcgggattacaggc

SEQ ID NO: 374799 - DNA, 201 bp, Homo sapiens
taattccagtgttttaggaggccgaggtgggaggatcactagaggccaggagttcaagaccatcctgggcaacaaagctggatcctgtctctacaaaaaawttttttttagaaaagaaacaactttgggaggccgagactggcagatcatgaggtcagaagatcgagaccatcctggctaacacggtgaaaccacatctct

SEQ ID NO: 374800 - DNA, 201 bp, Homo sapiens
tatgaagatatagaaaggatgcaataaaaggttatatcagctgggcatggtagctcatacttgtaattccagtgttttaggaggccgaggtgggaggatcrctagaggccaggagttcaagaccatcctgggcaacaaagctggatcctgtctctacaaaaaaattttttttagaaaagaaacaactttgggaggccgaga

SEQ ID NO: 374801 - DNA, 201 bp, Homo sapiens
ggtggcaggtgcactaatatcccagacttcattgctatccatgtaaccaaaaaccacttgttcccctaaagctattataaaaacttgttttgcaagaaatygaaacaaattttagaaaacttttaaaaaattatgactctggattcctataaatgtctgcttctgtttggtgttgtatctatagcaacatagtgacaatat

SEQ ID NO: 374802 - DNA, 201 bp, Homo sapiens
taagctatgggtacgcaaaagcagacagaatggtataatggacactggagactcggaggggggcaggtaggggagtgagacatgaaaaactacctattggkgtacagtgtacactgttttggtggcaggtgcactaatatcccagacttcattgctatccatgtaaccaaaaaccacttgttcccctaaagctattataaa

SEQ ID NO: 374803 - DNA, 201 bp, Homo sapiens
ttccaaaccttgtcacaaaatagccttattcccaatagtggttataaatccacatgcaatcccagccagcagagcgtggagatctgggcattaagagttgyatagccatcttgagtaccttacatcctggggtggcacctagtgcctctccccggggcctgatgagagttcccttcaccatgcaaaaggggacatggcgac

SEQ ID NO: 374804 - DNA, 201 bp, Homo sapiens
agtgggagctaagctatgggtacgcaaaagcagacagaatggtataatggacactggagactcggaggggggcaggtaggggagtgagacatgaaaaactrcctattggtgtacagtgtacactgttttggtggcaggtgcactaatatcccagacttcattgctatccatgtaaccaaaaaccacttgttcccctaaagc

SEQ ID NO: 374805 - DNA, 201 bp, Homo sapiens
atcataacagaaatacaacatacctaaacctatgggattttcctcttaatttcttcgattggttgttcactagcatgtttttaaatttccacgtatttgcrtatttactgaggttccttttgttactgatttctagttttattccattgaggtcagaaaagatacttcatattatttctacttttttaaatttgttgagac

SEQ ID NO: 374806 - DNA, 201 bp, Homo sapiens
aagtaactcaggaatggaaaaccaaataccacatgttctcacttataagtgggagctaagctatgggtacgcaaaagcagacagaatggtataatggacaytggagactcggaggggggcaggtaggggagtgagacatgaaaaactacctattggtgtacagtgtacactgttttggtggcaggtgcactaatatcccag

SEQ ID NO: 374807 - DNA, 201 bp, Homo sapiens
aaaactaaaagtgtatctaccattcgatccagcagtcccactactgggtatgtaaccaaaggaaaataaatcattatatcaaaaagacacctgcatgcatrcgcttgtcactgcactgttcacaattgcaaagatacggaatcagcccaaatgcccatcatccgatgagtggataaataatatttatagaaatatttatat

SEQ ID NO: 374808 - DNA, 201 bp, Homo sapiens
ggccacatgtgtgttgaagccctgcttgtgtttaactgagagggttttgtgaactcctacaggtgtctgtccatttgcatgcctattgggcccccagtttytagagcagcattgattgccatagctcagctgatttataaagcatgtgcttgcctgggagattggggtcacggtttgcttggaaactttttgcagcaggaa

SEQ ID NO: 374809 - DNA, 201 bp, Homo sapiens
ccctttaaaaagacaaaaaaagcaaaagtcgttttcactcaaatatcgatgaaatacaaatcaggcttcagagacaattctttatgtgctataagtcatckgacacttttgtgtcagccatctctcatgctgccacagtggcaggatattacaggatcaaagcaaatttgcaggtctgaataacaagtgctgctctgagca

SEQ ID NO: 374810 - DNA, 201 bp, Homo sapiens
ttttaagtttcttgagattttcaggatatggcatatgtacaaactgatattgaacttcagtaatttagggagccatattgtaatctctacagcaatcacawaaagaatagagaagggatatgtaaagaacaagctactggcatggaaattataataataaaaacaccaatctagaagagagcagtaaaggggagataaaca

SEQ ID NO: 374811 - DNA, 201 bp, Homo sapiens
accttatttaaaaatcaactcaacatgtatcaaagacttaaatctaagacctgaaaccataagcattctggaaaataacaacagaaaaactcttttagacrttggcttcagccaagaatttgtgactaacaactcaaaagcaaatgcaacaaaaacaaaaataaacaaatgggacctaattaaactaaaaagcttcggcac

SEQ ID NO: 374812 - DNA, 201 bp, Homo sapiens
tctttcaccttatttaaaaatcaactcaacatgtatcaaagacttaaatctaagacctgaaaccataagcattctggaaaataacaacagaaaaactcttytagacattggcttcagccaagaatttgtgactaacaactcaaaagcaaatgcaacaaaaacaaaaataaacaaatgggacctaattaaactaaaaagctt

SEQ ID NO: 374813 - DNA, 201 bp, Homo sapiens
gtgaaaccactgaagcagtggggagctttcggaggcttaggggagaattcagcagggggatcctgctggtcacaacaccgaatccattcctccattgcttyttggttaccagtcctttggaaagtatgcctctgcctggtaggagtgacaatactacgagagccacacatgtggcttgggtgttgagcagggatggccaca

SEQ ID NO: 374814 - DNA, 201 bp, Homo sapiens
gtccccggtacatctgccaggacctgtcattatctaagacttccttgtcaccaccatgcctccccttttagcccacgtgttctgggaagagacccttgtcrgttttcctggcacctgccaccggctgcacacctggcattgaaatggcgctggaacgtgttgtgattattttccctctttaatgaacccacctgagggaca

SEQ ID NO: 374815 - DNA, 201 bp, Homo sapiens
acagtccatcttgttaaactaactttgcttggctctaccctgaccctgtttgtgtaacccctgtccccatacatataatcagttttgtctgtagttataayttgtccataatttgaaaaagagaagcctaaaaagttccctccagacactttcagctaggaacaaacttttatgtgaaaataataaaaatgtggggagtga

SEQ ID NO: 374816 - DNA, 201 bp, Homo sapiens
aaaaagtatttaactggatatacagagaagaacaaaagaacggaaaacaccagaaagaatgtacaagctgtatgacatggcaggtctagcatacataattrgagtatcttcaggaaagtcaaaaggcagaggaattgaagcaatattttagtagatagtcactggaggttttccaaaactgacatcaagccacagatgtaa

SEQ ID NO: 374817 - DNA, 201 bp, Homo sapiens
aactccagaaaaaccaccagtataagacacataactatcttccaaacagcatggtatgtaagatgctacttacgttgacatttattttaatactagtaatmataatagtttgctaacatgtatttgtaacatgttaactttcctaaacacattcatgtgttttatttatttcctcaaagacacctatgacattggtagtaa

SEQ ID NO: 374818 - DNA, 201 bp, Homo sapiens
tagacattgccaggtgtccccctgggggacagaaatacctggttgagaaccactggtctaacaaccatttccactccttccctctgaaggcagacatggamtagtccccaacaccatggctccttgtccacagcataaccatggcacagttacaccatggaagtgtgtgttcagactttccaaccaagagctctccattgt

SEQ ID NO: 374819 - DNA, 201 bp, Homo sapiens
tccattctcatgctgctgtgaagaaatacccaaggctaggcacagtggctcactcctgtaatcccagcaggtgaatcccaaggcaggtgaatcacttgagrtaaggagttcgagaccagcctggccaacagggtgaaaccccatctgtactaaaaatacaaaaagtcagctgggcgtggtggtgcatgcctgtaattccag

SEQ ID NO: 374820 - DNA, 201 bp, Homo sapiens
atttaaaaacagaatttttaaatactaggcattccttgcacattgataagttcacatctgaaatttgcatgacataaacatacagttgagaaggagagaaygtatgccctatggtaaatattgacattttaaaatacaacttgtacaaacatcttttaaaggtatccattgtaaagacccaagtaccaaagggattcgata

SEQ ID NO: 374821 - DNA, 201 bp, Homo sapiens
gcaaaaattgggaaaccaagtagtctcaaaaggatttgttgcccagttatgcaccctctcatttgctgggaagtagaccaagaggctttgcaaagatttcytcaatgactgttaatttcacctgttgttttttaacttaaaagcatcttgtttaacccagaaatatgaagaagtcattgggaaaacaaaaataatattagt

SEQ ID NO: 374822 - DNA, 201 bp, Homo sapiens
tttgaaagcttccttgaaagcagcaggtcatgtggttcctttggtggctgcatgggagtgtttacaggtgaggggtatggctttcttttggcagctatgargtctgttgagaaacagcaaatgggaaaggagaatctacctgatcctagcacagaaacgggtgccctttggcctgtcggtgttctgtacccctgagtttcc

SEQ ID NO: 374823 - DNA, 201 bp, Homo sapiens
ttgaaagacaaaaattttaaaaataaaataaaatttgctttgggaaatttctactttacacagtgagagtaagccactgtttctaaaatgaagtttttttwaaattttcatttaaaatgttggtaatttaatgtataaagttggacattaactttggaaagttaaatagctttcactgaaaatgtggtaaattttcatata

SEQ ID NO: 374824 - DNA, 201 bp, Homo sapiens
gctgggacaggaggattgcttgagtccgagagtttaaggctgtagtaaactagtgtcacaccactgtactccagcctgtgtgacagaccaaaatactgccytgaaagacaaaaattttaaaaataaaataaaatttgctttgggaaatttctactttacacagtgagagtaagccactgtttctaaaatgaagtttttttt

SEQ ID NO: 374825 - DNA, 201 bp, Homo sapiens
gtagacactcaggtgcctaacctgggaggttttcatgggaacttcacaaaagacttcagaaaggtggagaaggaattgccgtttatttagtactcagtgtrtgccaggccctgggtgcaaagttgccagtgttactgcatcaaacattctcaccagctccttaagggagcttaaattaacacaattttaatgatgcagaaa

SEQ ID NO: 374826 - DNA, 201 bp, Homo sapiens
ctgaacacgatttccttttgccccgctgtctgatatttaatcccgaatggtgtagggggtgaagagagtggagtgaggcagtagccagcttattacagctycagccttaccagctgcctgtgtggtggccttttagggccattgggccctcctgctctacaggatctctctcccacctgttgcagtaatgagtgaaaccct

SEQ ID NO: 374827 - DNA, 201 bp, Homo sapiens
agtggaccacatgtatgaggacacatataatcccatacaattataatggagctgaaaacttcctattgcccaatgacatcatagtcttcagaagattgtarcacaacgcattatttgtgtttgtggtgatgctggtgtaaacaaacctactgtgttgtcagtcatataaaagtattacacaattctgttcagcacatgatt

SEQ ID NO: 374828 - DNA, 201 bp, Homo sapiens
cctctgttaatctgtaagctctttaaaggcataacctcccctttttcttttatttccctggagcaactattatacatacaataaagatttattgaaatgartcagatagtgtcttcttatttttgggaaaaaacatagttttccagagtaaatttagaagttatttgcttaattgaaaaaatataatccttaatcaaaaaa

SEQ ID NO: 374829 - DNA, 201 bp, Homo sapiens
cggcagagactgggctcttgagaagcgagtggactggaatctgttctctgagatgttgccttgaatctgacttgttgatgacagacccatattggaaataytattccactgttaataagaacattttattttcacatgcaacttgttaaatatgtagccaaaaatcctgaaacaaaacaaaccccctctccactcaaaaaa

SEQ ID NO: 374830 - DNA, 201 bp, Homo sapiens
gtgcggtgctacagtgactagagtcagaaggagttccattgattccaaataagaggccctgcacaaatggagattctgatgtatgcagctctctacctgtrtctatttgaaaacaaaaagccaccttattttgtctaaaataatttgaagaatttttagatggccacatgacaaagataccatttcaataagtaatataaa

SEQ ID NO: 374831 - DNA, 201 bp, Homo sapiens
tgtactttccgtgcatgcttgagcaattttaattcttctatcagcccaaagaaggcactattactatcccagtttaacaatgaggaagctgaggttggcarggttcgcagtttccagctcatctccatctacgtgatgctggtttcatgaccactgtgcagtcacttgctttagagtggtttgaaccattgagttagcttc

SEQ ID NO: 374832 - DNA, 201 bp, Homo sapiens
aatagctaaggcaattttataatgcagggcccaagtctcatttcctttctgctcttccaccaggtaagtagtacttcttgatttaatgcactgatattttstataaagtgcttagcatagtactatgtgcttaataggtagttagcacccaataaatattagcttctattattcataaagaagtgaccttctcttttcaga

SEQ ID NO: 374833 - DNA, 201 bp, Homo sapiens
aattgcatggccctccattggacaagtggggctaaaatgtaagcaaggtgggcttcctagagaagcctacagcctaagggggagatgagacctgcttacayggctgtcagtacaggacagaggaggcgcgtgctacacagtaaaggacttcagaggagggaaatagtctgtacagtctgcaggatgccaaagcacttcaga

SEQ ID NO: 374834 - DNA, 201 bp, Homo sapiens
tggacaagtggggctaaaatgtaagcaaggtgggcttcctagagaagcctacagcctaagggggagatgagacctgcttacatggctgtcagtacaggacrgaggaggcgcgtgctacacagtaaaggacttcagaggagggaaatagtctgtacagtctgcaggatgccaaagcacttcagagaagaagttgcattttaa

SEQ ID NO: 374835 - DNA, 201 bp, Homo sapiens
tagcttaatcataaatggggatttattggcttgtgtagttgggagtggaggaatagagtttggtttcaggcatagctggatccagcagctcaatgacaacygggctctgtctccctttccagagctcagctcacttctcactgtgctgtggcttcattctgaggcagagtttctcctataacataagagatgacaggctca

SEQ ID NO: 374836 - DNA, 201 bp, Homo sapiens
gggagatgagacctgcttacatggctgtcagtacaggacagaggaggcgcgtgctacacagtaaaggacttcagaggagggaaatagtctgtacagtctgsaggatgccaaagcacttcagagaagaagttgcattttaagcaagactttgaaggagatgttggatttaaacaaagggactgggttggaggtttagagtga

SEQ ID NO: 374837 - DNA, 201 bp, Homo sapiens
ttgaaagcatccacattttgtgtctgccctagttttttaatgattttaagtgcatttttaatggttgaaactgttatgtagaccatcttctgaggcaaaawcatgaagtactacatcacaatattaagttcttcaaattagaattacagttttagtgcatttgttatttaagtattattaggttagttcttatgctaattt

SEQ ID NO: 374838 - DNA, 201 bp, Homo sapiens
ctatatttgccttgttgaggttgtcagacccacagtatctgtgcggattactggtacagtattcaggggatgcagagctcttagatgtggagggctgactktttgtattaatgggttctgcagggtgtactacaggacttcggcattcgtaggttttcatatcttcaaggggccctggaaccaatccttgcagatactaag

SEQ ID NO: 374839 - DNA, 201 bp, Homo sapiens
aatccttgcagatactaagggccaactgcattcttgggataaaaggtagattttaaccagccctatatttgtttaaggaaaggataaaaagtctttaaaasaaataatttactatgtctgaagccaatgatcattttgcttgattctgaaattcttaatgagaaaactcatttgtatattatatccctcttgggaaacaat

SEQ ID NO: 374840 - DNA, 201 bp, Homo sapiens
tagacttaagtttaaccaccttgagcaactttcaagtctttatactttaatgaaattaaactgttttaaaaacactaatcaattaatacatttgaagaggttttttttacttaaaaaaattattctatcaaggctctgtcatccatgaagagcgttttaaaatgtctcttaaaattaggaaatacccatttttaatgaaat

SEQ ID NO: 374841 - DNA, 201 bp, Homo sapiens
tttagtcatgaagtctttgcccatgcctatgtcctgaatggtgttgcctaggtttgcttctagggtttttatggttttaggcctcacatttatgtctttartccaccttgagttaattttttaataaggtgtaaggaaggggtccagttttagttttctgaatatgcgtagccatttattaaatagggaatcctttcccca

SEQ ID NO: 374842 - DNA, 201 bp, Homo sapiens
ccatgaagagcgttttaaaatgtctcttaaaattaggaaatacccatttttaatgaaatcagataaattggatgggattgactatcctgcttgataaaagrgaggaagagaaggtgcaataattcagtcttgagtgtttcagaggaatattttaaagaagagcatttttgtaaggatttaaaatactaaggaacacgcatg

SEQ ID NO: 374843 - DNA, 201 bp, Homo sapiens
catgtagccgactttgactctcaactgtgtcagttctgggctagagactgttactttatacaaagagagataaactgtgtcccttgtcctcaaataaatargttggactactagggtatttacaaaacagagtgtaggtgaagaaaaggaaatttcagtgacaaattaggaggcacttaagaaatactggacgttttcaat

SEQ ID NO: 374844 - DNA, 201 bp, Homo sapiens
aagaatcataggtaacttcaaactcttttgactgttttcctgtatttgctataacgagtaagaactgtttttctctaggatgttagggtgttgctgtggcractggtgtcctatgctgtacttgttattgcctcatccttcatctgggcctggtggccctctcccgtgcttctgtagccgggaattatgcacagcatggtt

SEQ ID NO: 374845 - DNA, 201 bp, Homo sapiens
taaaaatttttcgatacactgaaacctaaatatcctataggacaaatgaaacagtctgattagaaatgtttttctgttgctgttgatttctccttttcacrtttatggacaacattccctgttattctaagtttgacagtgtctttttatttttgcccttcgtatttcaatggaggaaatttagaaataagacttccttat

SEQ ID NO: 374846 - DNA, 201 bp, Homo sapiens; identical to SEQ ID NO: 80895

SEQ ID NO: 374847 - DNA, 201 bp, Homo sapiens
tgagaacttcaaggtctttgactttgaactgagcagccaggatatgacctccttactcagctgcaacaggaactgaagggtctgtgccttggtaagctgarccgcccccaaggatcacccattccatgaagagtttcgaagctgtggatgtctgctcttccgcaagtaacctacacctggttttcccgcctcattgttttc

SEQ ID NO: 374848 - DNA, 201 bp, Homo sapiens
aggcaggaaaatcgcttgaacccaggagatggaggttgcagtgagccaagatcgtgccactgcactccagcctgggcaacagagtgagactccgtctcaawgggaaaaaaaaaagtgtaagccagcagtggttcatcagattgagcgccactggtaggtccctaactcaagagaacttaatccagtactaccagtccaagg

SEQ ID NO: 374849 - DNA, 201 bp, Homo sapiens
ttggccaggtgcagcagcttatagccgtaatcccaacactttgagaggctgaggtgggaggatcacttgagcccaggagtttgagaccaggttgggcaacrtaatgggatcccatatctacaaaaaataaaaaattagccaggcatggtggtgtgcgcatgcagtcccagctacttgaggggctgaggtgggaagatcgct

SEQ ID NO: 374850 - DNA, 201 bp, Homo sapiens
ggagactgaggcaggaaaatcgcttgaacccaggagatggaggttgcagtgagccaagatcgtgccactgcactccagcctgggcaacagagtgagactcygtctcaatgggaaaaaaaaaagtgtaagccagcagtggttcatcagattgagcgccactggtaggtccctaactcaagagaacttaatccagtactacca

SEQ ID NO: 374851 - DNA, 201 bp, Homo sapiens; identical to SEQ ID NO: 80897

SEQ ID NO: 374852 - DNA, 201 bp, Homo sapiens
ccgggtgtggcggcgtgtgcctgtagtcccagctacttgggagactgaggcaggaaaatcgcttgaacccaggagatggaggttgcagtgagccaagatcrtgccactgcactccagcctgggcaacagagtgagactccgtctcaatgggaaaaaaaaaagtgtaagccagcagtggttcatcagattgagcgccactgg

SEQ ID NO: 374853 - DNA, 201 bp, Homo sapiens
tacaactctattagggatagaaataaaataagtacatgcctcttttgttcctattgattagactaatttaatctgatcaattttaaaccggggggggggggtgctattttagtaaaatgaaagtgaagatgacctgtctgtgtaagtccaagaagaattgcaatgttgcatttcaaatgtagtgtatcaaaaaattacgca

SEQ ID NO: 374854 - DNA, 201 bp, Homo sapiens
ttacaactctattagggatagaaataaaataagtacatgcctcttttgttcctattgattagactaatttaatctgatcaattttaaaccggggggggggggtgctattttagtaaaatgaaagtgaagatgacctgtctgtgtaagtccaagaagaattgcaatgttgcatttcaaatgtagtgtatcaaaaaattacgc

SEQ ID NO: 374855 - DNA, 201 bp, Homo sapiens
caaggaataatagtcagctcttctaaaacaaatacatatataaacatatgcacatgtgctgtagcctcagaataccatttactctaagaatgtaagctatyctcctatgctcaaaataatgtaaatttaaggattgagaacttcagtggtaaactgtcacctgtatctctatggtttaaacaaataaagaaaagaataaga

SEQ ID NO: 374856 - DNA, 201 bp, Homo sapiens
gtggctcatgcctgtaatcccatcactttgggaggcccaggcaggcagatcatgaggtcaggagatcgaaaccatcctggccaacatggtgaaaccccgtstctacaaaaaatacaaaaaactagccgggcgtggtggtgggtgcctgtagtcccagctactcgggaggctgaggcaggaaagtggcatgaacctgggagg

SEQ ID NO: 374857 - DNA, 201 bp, Homo sapiens
ctcccctgcctcccaccagccctctagcgtatcctggcttcagttgcttgcagcacctcgtagaaccctccacctcccttcctgccttccaggtgcaaggyagtacctgggcatcagtgcccacacctgctccccaggagatatctcccttccctacttcctcctcccagctagtgctgctggcctgcagaaagacttaaa

SEQ ID NO: 374858 - DNA, 201 bp, Homo sapiens
tgaatgttagctgttgttatttagactagcaactaacatttattgagaaagtcctctgtgccagatgctgaggtaatggccttctctaatttatttagccytgtgaagaattccatgaggtaggaactgctttacaaatgagaagattcaggcttagagttattaagcaacttgtccaagatcatacaactgattaatagt

SEQ ID NO: 374859 - DNA, 201 bp, Homo sapiens
aagcatatatatatacacagatgtttctacacatctctggattccttacttgtgttcacattgcagatttagaattggggattttgaaaggaatatgaacyaagaaaccatacttggaactgcctatctctttctttaaaaccagagttccatccagggactccaaagtaaaggttttcaatgagttgtcatgttgataaa

SEQ ID NO: 374860 - DNA, 201 bp, Homo sapiens
ctaaacacagtttcaatgtatgggtgatttttcttaagtaaggcaaatattctccttcttaatttctagttctgcacttccaataggctctgtaaacatayaagtttccaagggacacatcagcatgttataaaattccttttgtttttttagcacaaaggagactgtgtctaagcatatatatatacacagatgtttcta

SEQ ID NO: 374861 - DNA, 201 bp, Homo sapiens
ctgactctcaagaaaaattattttaattattttgagtgaaataaaccagacacaaacgtgtatacatactgtctgagttcatttgtagtcaattcaaaaayagacaaaactaatctatgatgatagaaattataacaatgcttgtctctggtttggagggagggaattggtgagaagaggcataaaagaactttctggggc

SEQ ID NO: 374862 - DNA, 201 bp, Homo sapiens
cacaaatctattgactgaggacaaaaatttcttgaggctgaattattctctggtgtcttcagttattatcaatcattatttttagagaatcaacaaacackatataatttgttactttcagcagtggttcttaactggaggtacacaccacagttacccagtgagtttttctgaaaggtccaacctagtccttctggagca

SEQ ID NO: 374863 - DNA, 201 bp, Homo sapiens
aaatttccctagaaagaatgtaaagagaatctgtgtgtcttttagatggcactggggcaaaagatagtgcagccacttccttccagccgtcccacaaacargatatccttttacatgagccctactggagcatcctcttcacatttgcttcctctgtgtggttggaccctgagatgggggagtggtgatgtaatacatatg

SEQ ID NO: 374864 - DNA, 201 bp, Homo sapiens
aaacatactcctttactatgacccagaaattctatacctagatatttacccaagaggaatgaaagtgtgtgtccattaaaagtcttgtacaagaatgttcrtagcatctttattcataatagccaaaatctggaaacaatccgaatgtctaccaacaggatagtagaaaaaactattatttatttatacaatagaacacta

SEQ ID NO: 374865 - DNA, 201 bp, Homo sapiens
aagcattgaacttcttggatgtgatcactgaattgtgattttttataggagaatgtcctgttcttagggaaggtgaggtagaggcttatagataactcctmaatgttccgccagaaaaattacaaatatgcatatatctagagtacaaatatatgggaatttttgtggcttttgcctcaaaaaaactcaaagcatgctgta

SEQ ID NO: 374866 - DNA, 201 bp, Homo sapiens
aggagaacagaattttaacagataaataagttgaattatttaggacacgaagagggaacagcatgtgtaaaatacataggtttggaggaactagaatatgkaatggtggtcaaagaaaagaccagagatgaaagcaggtgccaaatggcaatgagccatgtaatgacaatcatgctggtgtttgaaattgttcctcagaaa

SEQ ID NO: 374867 - DNA, 201 bp, Homo sapiens
ataccatagaaaaggcatgcccatatacgaggaaggacaaagagctgcccaaaacccttcctgagaaagtctgcaatgtctgtgcaaaagtggtgagaggrgaacagaattttaacagataaataagttgaattatttaggacacgaagagggaacagcatgtgtaaaatacataggtttggaggaactagaatatggaat

SEQ ID NO: 374868 - DNA, 201 bp, Homo sapiens
tgcaacttctcagagctaatatttattaagcatttatttggacaaaatatttgtcctacattacccatttattttttcattcaataaaccaattattgagmacctactatgtcctcatataagggaagatacaagacatacaaagatgaacaagacctatgtattttaaatttatgtagtttagagtctaatgggggaaac

SEQ ID NO: 374869 - DNA, 201 bp, Homo sapiens
tattcacatagcagctggagagagttctgagaggacaaaagcactcaaggcattttgaggcatagacccagaaccaccacaccatcacctctgccatataytactgaacaaagaaaatcacaaggccagcccagattaatccgccttttgatggaagcaactgcgaagttggattgcaaagatgcatgggtacagacagtg

SEQ ID NO: 374870 - DNA, 201 bp, Homo sapiens
gagaaactgtgaatgttgaaaatgcttgtgagcaacaatgcccacacatacctaagagagatagaaaagtgatgggcagggaccaggcccaggctcggaaktgggaatgaatgtgactaatgaaggagggtgaggaggacatgaacctaccccaaagcagaggatctcgattcccaagagctctttccaaatcaccttcat

SEQ ID NO: 374871 - DNA, 201 bp, Homo sapiens
atctgccttattagggaattggccctatcctaaatagcaaatcctcctgtccctctaattctcctcaccttgctttaatttttttttttttttttttttttgacatggagtctcactctgtcacccaggctggagtgcagtggtgccatctcggctcactgcaacctccacctctcgggctcaagtgactcttgtgcctca

SEQ ID NO: 374872 - DNA, 201 bp, Homo sapiens
ctagatggcagcaagaattagagcgtgtctggcagagattcgttagcctacgctgagatctgccctaaaacagcaagatgcaaaaccttgaaaacataggrgctgtttccaagacctgggcggtgagcaggagggcatttgagaaaatgcctgtatccctgatgacttaaaaatcagtcagatacacacctgtgtggaatg

SEQ ID NO: 374873 - DNA, 201 bp, Homo sapiens
aaatttttaacgaagcataactctacttcctgaaccaaaggcacctgaataaaccgaagcaagccaattcttgaaatgttgtcaaatttggtggatgtcayatttttccccctagagtagcttcatttgatacccactttaaacaaaggctcgcgactagcagaagtaaacaccagttcaccatgattctctctcatgctc

SEQ ID NO: 374874 - DNA, 201 bp, Homo sapiens
cctttcatgactcaatttttttttttcgtattatttaaagacacacaaagcctagagaagctcctgagagatgctgtcatctatggccagcctcgaacccrcagagcttggaaaaagattctcatcctggtggagggtgtctacaggtatgtaaataacaggacacattttacgactcggaggcctgcagcaagctgacca

SEQ ID NO: 374875 - DNA, 201 bp, Homo sapiens
atctggtgaaaggttaaatgttcccttcctagactgtcgaagcagtaggagcagagggtctcaaatttaggagctccctgatcctggctacattgctctgwgagcttgtggttttgtgattactttagcagcagttctgaactacaaaatttttaacgaagcataactctacttcctgaaccaaaggcacctgaataaacc

SEQ ID NO: 374876 - DNA, 201 bp, Homo sapiens
tattttcaaagaaacaaaggaaagtagaagaaaaagaaaattgacagaattatcagccaagtttcaggtagttctgcctgacacatcttttgaagcagtgraagtcatacagtgaatgatcacactggcctcatttgcaacaatggctgctttaaatcaaatgagcaggacaggttaggaatattgcattagctcacccct

SEQ ID NO: 374877 - DNA, 201 bp, Homo sapiens
tggaaggatggttaattagctgcccgcagtgtctacaaacactgtgggccattaactttggcttctgtcaaattcagttccagaacaaaaaaatggctatktgtggcatgtcaggttttttggcatatttgtgttaccaacttataacattttaaagagaagaaaattctagatttctgaggacctgcagccatttattat

SEQ ID NO: 374878 - DNA, 201 bp, Homo sapiens
cttcatctgtaacacaggggcattgaaacgtaaaacccaaagtttcatgaatgcatgatttggggtttaaaactaaaatagtattatttcagtgttctgawctgtatgttttcattaagtatcattttaaaatcacattttctaatttcatgtctctgagaagtctagatcccttatcaactcatagtggttgagaatctc

SEQ ID NO: 374879 - DNA, 201 bp, Homo sapiens
ccaggtgtggtggtgcactcccataatcccagttactgaggaggctaaggcacaagaatcacttgaacctgggaggcagaggttgcagtgagccaagatcrtgccactgcactccagcctgggagacagagagagactctgtctcaacaacaacaacaaaaaaaaattatttcccataggattttccaaaggagggttagg

SEQ ID NO: 374880 - DNA, 201 bp, Homo sapiens
gtgattctcctgccttagcctcctgagtagtcaggactacaggtgtgcaccaacaggcatgcaccaccatgcccagctaatttttttttttttttttttttggagacagagtttcgctcttgtcacccaagctggagtacaatggtgcgatctcagctcactgcaacctccgcctcctgggttcaagcaatactcctgcct

SEQ ID NO: 374881 - DNA, 201 bp, Homo sapiens
tgatgtctagtccataagccaaggagacattatttcagagtgcccaatcctgaatcaattctcaaacaatcctgacgttaggcaaattgagggggatatcycctataatgatagaaaagtgaaaaatattaaaaggaaggaagtgaaggctgttcaactttaagacaaggaggagtgtggctacaaaggagacttgaggat

SEQ ID NO: 374882 - DNA, 201 bp, Homo sapiens
aattggggtctgtgttctcctggaccccctaacaccacaccaagcttactcttctggggagaagtctggagaagtcgagtgtggcctaagggtggggctcyacagccagcttctttaggtccaaatccttgttctaccaccttttgggaataattgtgtaaacttttctgtgattcagttgttctgtctataaaatgggaa

SEQ ID NO: 374883 - DNA, 201 bp, Homo sapiens
tgtaaccctgtgcaaaatgagagagttgaaacagagacactccaagaagcttttatattttggtcccttcctcccgccccatgctcccagttctaagaatytttcaattggccattgattaacaatactcggccaggcgtggtggctcatgcctgtaatcacagcactttgggaggccaaggccggcggattaccagaggt

SEQ ID NO: 374884 - DNA, 201 bp, Homo sapiens
tcttatcaatatgccttaaaaattctgatctgctgggattagactgttaagtgagtgttggccctgtcattctagtgccaatatcaccaagaggtttgtgraaaaaaaaaacaaaaaaaaacaataaatatttgagagaaatttaaaaggagggaaaggaaagggacaaagaaaatccaatattcaaacctgggtttgaga

SEQ ID NO: 374885 - DNA, 201 bp, Homo sapiens
tcttgtttctttcaacttaagattgttttttaagaagagctaatatcacagagtactaaatatatgctaagtaaggctattagacctcagcgattacccayggagggtaggatgtttagccctagtttataaatgaagatgctaagacttagaaaggtcaaattactttctaaagccgggtacggtagctcatgcctgtaa

SEQ ID NO: 374886 - DNA, 201 bp, Homo sapiens
tatcaggaagggccattcgagattgtattaggcaactattactggaacaaacctcagttgccaataataatcagcaagtatttctcactggaggctgcagktgagctggggtaaccgtgccctacgtgccattaatcctctcccagggccaacctgagaccagggggctagcctgggcattttcttttcctgtcactagca

SEQ ID NO: 374887 - DNA, 201 bp, Homo sapiens
acatgcctttttgtctgaccttggctctcagcacaagatatttacagcctttgagcttgatattctagaattgttacagagattagctctggaaaagaaakagactagaaggataaagggaaggaatcatagcttatgaaggttttactctgcatcagaccgctttctagttctatgacttaacgtcctataggctgtaag

SEQ ID NO: 374888 - DNA, 201 bp, Homo sapiens
tctttgaagaggggatgtgatgagacagaaaatggcatcattatcagaaaattaaaaattgcaatttaaaaacatgaactgattaggctaattctttgaaytgaatgagtttgagtgcaccccagtcactcactcagctctccttgggtacttttgggaccatagacgaaaaggaagctaataaatttgaacaggcagcaa

SEQ ID NO: 374889 - DNA, 201 bp, Homo sapiens
tgatctgcctgcctcggcctcccaaagcactgggattacaggcacgagccaccacacctggccaatttttgtatttgtagtcgagacggggtttcaccacrttggccatgctggtcgggaacacctggcctcaagtgatttgcccaccccaggctcctaaagtgctgggattacaggcgtgagccactgtgcctgtcttaa

SEQ ID NO: 374890 - DNA, 201 bp, Homo sapiens
actgtgctactttgctcaacccaaattaatcctctttttgaaaaattgtttcataaaagcctcttggaactctccctccatcttgcagagatggtttatasagattctaccacatgtcacacaccagaggggatacggtgctgaataaggcagttcttgctgccaggcaaactggtgagcacatttatggaagtagcaatt

SEQ ID NO: 374891 - DNA, 201 bp, Homo sapiens
acacactgtgctgaggaagagaaactgtgaatgttgaaaatgcttgtgagcaacaatgcccacacatacctaagagagatagaaaagtgatgggcagggaycaggcccaggctcggaagtgggaatgaatgtgactaatgaaggagggtgaggaggacatgaacctaccccaaagcagaggatctcgattcccaagagctc

SEQ ID NO: 374892 - DNA, 201 bp, Homo sapiens
ctggtgggaggtggaggcagggtgttttcccagagccctcgaaatcaggccatgccgacggctgcccacccctgatgtccagcctgctcctgcgtgcattmcacaggggcaagactgagcagcctggagagcccttggaacatgtgtatgtgactataaaacatgctgtagccctggaatcccgacatcaaaagggagagc

SEQ ID NO: 374893 - DNA, 201 bp, Homo sapiens
aagaatccaggtctcagaaagaggaagtaccttgcccaagatggtagagtttactttgaacccagcaaattggcttcatactgtttgagtgcttggctgaraagtcattgtcctgggcacaaggcaaaagtctggggggcttccccatcaatttttccccataccctcctccctgaggcctgttcagtgcatcctacccta

SEQ ID NO: 374894 - DNA, 201 bp, Homo sapiens
ctgttcctttgttcaacttctctcttctgccaccctccctccacgttttcttttcccccttaattatcttcattcttcaaggcctaatcatatctcctcaytggaaccttctctaactacttcagctagaaggaccctctctctttcctctgcatcttgcaggcctgttgcatgtcctagtttgcatggactgtgacttat

SEQ ID NO: 374895 - DNA, 201 bp, Homo sapiens
tgaaaactatatgcaaatgtcgcagtgaacatgtaatctcttaaaacaattcccatctccatcagctaactgctatacatgattttgtccacatagacacyaggttaaactcttggccttttaaaattaaagtgagttttagaaattgtgttataggttttagagtgtcttcctgtccccacaagttgtttttccttggtt

SEQ ID NO: 374896 - DNA, 201 bp, Homo sapiens
tttgggggaagccctaaaacagatctgagcacagactggagactcaaagacaaagttgaagggctctccattgagaccaagaactgcagctaatttgagcytagaccagtgagtgataagccaatgcacatacgcttcttgagagctttgtctgtagtggtcaaaaccagtactgactatgcagctttagatttatctttt

SEQ ID NO: 374897 - DNA, 201 bp, Homo sapiens
tatgggttccagaccccagggatactgagcatacaaacgtctgggccctgacccacaccaactgattcaaaatctctgagtagaaatttcgagaatctgcrttttaactggttacccagatgattatttctattcatcctgaaggttgagaaccactggaagattaatgagaaaatagaaaaaaaagtcaaggagaaaaca

SEQ ID NO: 374898 - DNA, 201 bp, Homo sapiens
ccctgacccacaccaactgattcaaaatctctgagtagaaatttcgagaatctgcgttttaactggttacccagatgattatttctattcatcctgaaggytgagaaccactggaagattaatgagaaaatagaaaaaaaagtcaaggagaaaacataaaaggaaaatgggttaaaagaggaaatagtgctcacaaagaat

SEQ ID NO: 374899 - DNA, 201 bp, Homo sapiens
ggtggaaaatgggccagtaatgtagtctgcagcaagttccatcttggaaatgggtttgaggttcccatatttgtctaaaaaatggtaagaaaaacattatrtcgatcaaagtagaggtctcgctttgcgttatgggttccagaccccagggatactgagcatacaaacgtctgggccctgacccacaccaactgattcaaa

SEQ ID NO: 374900 - DNA, 201 bp, Homo sapiens
catcacgtaagatgtgcctttccccttccgccatgattgtgaggcttccccagccacgtggagctgtaagtccattaaacctcattttctttataaattamccagtctcaggtatgtctttatcagtagcgtgaaaatggactaatacaccaccaaaccagctcaatccttttagtcctctacaaaccaaaagaaacctcc

SEQ ID NO: 374901 - DNA, 201 bp, Homo sapiens
ataaaggttttcccctttcacttggctcccactctctcgtctgccatcacgtaagatgtgcctttccccttccgccatgattgtgaggcttccccagccaygtggagctgtaagtccattaaacctcattttctttataaattacccagtctcaggtatgtctttatcagtagcgtgaaaatggactaatacaccaccaaa

SEQ ID NO: 374902 - DNA, 201 bp, Homo sapiens
aataagtctcacgagatctaatggtgttataaaggttttcccctttcacttggctcccactctctcgtctgccatcacgtaagatgtgcctttccccttcygccatgattgtgaggcttccccagccacgtggagctgtaagtccattaaacctcattttctttataaattacccagtctcaggtatgtctttatcagtag

SEQ ID NO: 374903 - DNA, 201 bp, Homo sapiens
ctgccctgacccattggctcaagtacatcatgaggccagccccgattcaaaagaaggtgaaatagaccctaccccctgatggaggatccacttgtatgtakaaggatgggaagctttgcaggcagccatctttggaagccatccaccacagtggctcaatcaacctggtgatgacacagagtgaagtccccactttccaag

SEQ ID NO: 374904 - DNA, 201 bp, Homo sapiens
cccataattcccatgtgttgtgggagggacccagtgggagataattgaattatgggggcggttccccctatactgttctcgtggtagtgaataagtctcaygagatctaatggtgttataaaggttttcccctttcacttggctcccactctctcgtctgccatcacgtaagatgtgcctttccccttccgccatgattgt

SEQ ID NO: 374905 - DNA, 201 bp, Homo sapiens
tgccttaaaaattctgatctgctgggattagactgttaagtgagtgttggccctgtcattctagtgccaatatcaccaagaggtttgtggaaaaaaaaaamaaaaaaaaacaataaatatttgagagaaatttaaaaggagggaaaggaaagggacaaagaaaatccaatattcaaacctgggtttgagagataaaggagc

SEQ ID NO: 374906 - DNA, 201 bp, Homo sapiens
caccagaacatggtctccacattttcatttcttatagctagatatttataaccatctgatagggtttggctgtgtccccacccaaatctcatcttgaattktagctcccataattcccatgtgttgtgggagggacccagtgggagataattgaattatgggggcggttccccctatactgttctcgtggtagtgaataag

SEQ ID NO: 374907 - DNA, 201 bp, Homo sapiens
accgactgaatcagaaactctggggtaggagtctagcaatctgtgttttaacaaatccttcagaggattctgatgttcactcaactttctgttcctctgtctaaaggaacagaaagaggagacacctcggtctttgacttgaagtgggtattgaacaagaggtctcaaagacttcctattttactttaattaacactatga

SEQ ID NO: 374908 - DNA, 201 bp, Homo sapiens
gctaagagcatttgtcacctaagcctgattgtagctttggacacatagttggattattccaagtatttagtaattcagtaatccagttaactatgctggcraaaggctaggactgttttgcactaggcaccagaacatggtctccacattttcatttcttatagctagatatttataaccatctgatagggtttggctgtg

SEQ ID NO: 374909 - DNA, 201 bp, Homo sapiens
cacatttgggctgaatcttgaaggatgaaactgcatgtccaaaggaataagaggagtggatatagagatggggggtaagggactaggaacagtaaaaagtracattcattcatcatccatccatcttttcatttacaaaatatgagtgccgctgataggcagacacaaaaatatttttgctgagcaacccagagagtaggg

SEQ ID NO: 374910 - DNA, 201 bp, Homo sapiens
  misc_feature (1)...(201): n = A,T,C or G
aaggatcttggatgaacttctctactgaaaactatatgcaaatgtcgcagtgaacatgtaatctcttaaaacaattcccatctccatcagctaactgctanacatgattttgtccacatagacaccaggttaaactcttggccttttaaaattaaagtgagttttagaaattgtgttataggttttagagtgtcttcctgt

SEQ ID NO: 374911 - DNA, 201 bp, Homo sapiens
ctgtaaggttctctgcgtgaacacttctttcctggcctcctttctgccccattcctcttaaactcagttgctgagtttattatccctgtgcatccctgggyatgttcattcacatatgaaacaatcaggagaccttgctatttcttatctctgatttgatggaaaatataatctttggcgctgcagtgggaatattggctt

SEQ ID NO: 374912 - DNA, 201 bp, Homo sapiens
  misc_feature (1)...(201): n = A,T,C or G
gcctcattttaagtgatgagttaaaccacacatcgcttgtgcttggggcccgactctcaggtgcaaccataagaatcttcaaacacaacagtgagtatcantgtatttactcaacatgtactggattgctcctagaagaaagtaaagattattgatgaggctttgttctgctcttcaaggtgacaacgtagcctcatgaaa

SEQ ID NO: 374913 - DNA, 201 bp, Homo sapiens
cacacctgtgtggaatgattttggtcagactgtgataaacctgggtaaactggcttcctttcggcttaatgagcccatgatttgatggaacttatgtatcygttcctttgtacctttaattctttttaattatgttaagtttcattatgtataatttcaagtcaaacatatattttattcctatgaacttcagataatttt

SEQ ID NO: 374914 - DNA, 201 bp, Homo sapiens
cactggcctgtgggaatcagctgggtaatgctaaaaccattgggaaagcccaggatcttacaaaattcagctaaatctggtgaaaggttaaatgttccctycctagactgtcgaagcagtaggagcagagggtctcaaatttaggagctccctgatcctggctacattgctctgtgagcttgtggttttgtgattacttta

SEQ ID NO: 374915 - DNA, 201 bp, Homo sapiens
ttttctgctgcatgagtggataatgagcagcagcagaagtgtgcctttattccttttaagaaaaaaaaagtgaattctcccaactctaaaataataataakaagaagcttggtttcattttatttttaacatttttaactccagtacttctgcccccatggttagggttctggatgttcccagtcctactgtgggaaatgc

SEQ ID NO: 374916 - DNA, 201 bp, Homo sapiens
tcttcactggcctgtgggaatcagctgggtaatgctaaaaccattgggaaagcccaggatcttacaaaattcagctaaatctggtgaaaggttaaatgttyccttcctagactgtcgaagcagtaggagcagagggtctcaaatttaggagctccctgatcctggctacattgctctgtgagcttgtggttttgtgattac

SEQ ID NO: 374917 - DNA, 201 bp, Homo sapiens
gacaaggaggagtgtggctacaaaggagacttgaggatagacataggatttctttcagcccgctaatctcattagtccctgagtgcacattttttctgctrcatgagtggataatgagcagcagcagaagtgtgcctttattccttttaagaaaaaaaaagtgaattctcccaactctaaaataataataataagaagctt

SEQ ID NO: 374918 - DNA, 201 bp, Homo sapiens
ttgagagataaaggagccagttatctgaacaatgagaggatagccttgtccaaattctgacacctatctcagacaaacctacacctgtcccaaagagcagrtgtgacagtgatgttggctcagcctaggatgccacaccaggcccaaaaccagtgcatgcaagtggtatcaacaaaaatccccactttcttacctattgtg

SEQ ID NO: 374919 - DNA, 201 bp, Homo sapiens
ttcttatagctagatatttataaccatctgatagggtttggctgtgtccccacccaaatctcatcttgaattgtagctcccataattcccatgtgttgtgrgagggacccagtgggagataattgaattatgggggcggttccccctatactgttctcgtggtagtgaataagtctcacgagatctaatggtgttataaag

SEQ ID NO: 374920 - DNA, 201 bp, Homo sapiens
taccgactgaatcagaaactctggggtaggagtctagcaatctgtgttttaacaaatccttcagaggattctgatgttcactcaactttctgttcctctgyctaaaggaacagaaagaggagacacctcggtctttgacttgaagtgggtattgaacaagaggtctcaaagacttcctattttactttaattaacactatg

SEQ ID NO: 374921 - DNA, 201 bp, Homo sapiens
acactactgcattccagcctggatgacagagcgagactctatctcaaaaaaaaaaaaaaaaaaaaaaaacaatgtgctattttacattctttttgtcatcrtactatggcttcagaaaatggtacatactttacacttacagcacatcttcataaagacattaaatttccaataattaatatgaaatgtaatgctatcaaa

SEQ ID NO: 374922 - DNA, 201 bp, Homo sapiens
gaacccgagaggctgaggttgcagtgagtcaagatcacactactgcattccagcctggatgacagagcgagactctatctcaaaaaaaaaaaaaaaaaaamaaaacaatgtgctattttacattctttttgtcatcatactatggcttcagaaaatggtacatactttacacttacagcacatcttcataaagacattaaa

SEQ ID NO: 374923 - DNA, 201 bp, Homo sapiens
atttgccacttggttgccagctggagagaccgaaagaggctgagggcatggagagctgcattttctaaatggtttcaggcccctggcatttcagcaatagstaatacaaaacagatgttggtgctatgctccactggctttcaactgagggcctgcctcagtccatgattaatcacctgtgctggggggcaaaaaagttct

SEQ ID NO: 374924 - DNA, 201 bp, Homo sapiens
atgcatatttggatacagagggtcgcattgttcattccctctcctctccctcctttttcctccccacctttctctgtcttctcttcccttcatgttacacygcagtgtctaaatttaccactagatggcagcaagaattagagcgtgtctggcagagattcgttagcctacgctgagatctgccctaaaacagcaagatgc

SEQ ID NO: 374925 - DNA, 201 bp, Homo sapiens
tgactttcaaaaaataattgttttgcttgacaaaattggtcattgtgattttgtttccgccgaaaggctaaaaaagggggacagtcctccccaccaccatsttaaaagtaagaataatttctttgtcatcattcatagctatttaaatacccgctacttactatttcacatttgggctgaatcttgaaggatgaaactgca

SEQ ID NO: 374926 - DNA, 201 bp, Homo sapiens
gctgtttcttcagcttagagagttgtcatgaggtcagaggtccaggcaggtcaagaatttggagtagtttaaaagaaaaagtggaaaggaagaaccaaaaytctgcctactaaagaccaagaggaggaagaaaaagaaggccagtgtttgccagaaaactctgagcactacctagtctgcagaacaagggctcgagaggtt

SEQ ID NO: 374927 - DNA, 201 bp, Homo sapiens
  misc_feature (1)...(201): n = A,T,C or G
taagttcctgaatgtggaagcagctatggtctttgggatgggattcgcaactaactcaatgaatatcccagcattagttggaaaggtgagaattgttaacntaattgtcttctactgtattactcctaagaactgtaactctgagtaggtccttgttagaagtatggctgagatgggcacggtggttcacgcctgtaatcc

SEQ ID NO: 374928 - DNA, 201 bp, Homo sapiens
gcacacgaggtacttgggggctcttgttaaaatgcagactctgagtgagcaggtctgggtgggggcctgagatcctgcattctgacaagctcctgggtgcygctgctgctactgctgctgctgctgccatgcagaaccacactcagagcagcgagactgcaggcaacctcggtcctcaagtgagtcactaagactttctta

SEQ ID NO: 374929 - DNA, 201 bp, Homo sapiens
taattacttgtgagatgtagagtaaaaagagagaagaattgtggggtttttttgtaaattatatttcatttacagcatggtgaaaagtgcaccagtcatargtatacagctcaatggatctccacaaagcaaacatacctatgtaacaaatgcagaaatagaacattcagagaatctaaaaaccatcctcatgctcctaac

SEQ ID NO: 374930 - DNA, 201 bp, Homo sapiens
cccagcagcagaccttgagacacggatgtaatcacaagtcacttattcagaaagtgatgccaggaagcaccagtaggtgagcagggcacaggaagcaccagtaggtgaccagggcacaggaaggcagccaacatggtgcattgtcaagcaagtgaccagagtggacaacaggacctcgattctactaggaaactctgggtg

SEQ ID NO: 374931 - DNA, 201 bp, Homo sapiens
ttagctaactggttcatttaattttaacagcaacccagatacagagttcttttcattatcctcattttattaaagagaaaactaatcctcaaagtgattayatgacctgcctaaggtcaggcaaatgataaatcacaggggtcaaaatgcagacccaagtctgttgcttttgtcttggtttgcttcccccagcagcagacc

SEQ ID NO: 374932 - DNA, 201 bp, Homo sapiens
gaggctgaggcaggaaagtggcatgaacctgggaggtggagcttgcagtgagccgagattgcaccactgcactctagccagggcaacagagcaagactccrtctaaaaaaataataataataataagttttttagcatgccacatcattcccaccagttggccctttgttcacagatctgggtcaggaaaacattgcatga

SEQ ID NO: 374933 - DNA, 201 bp, Homo sapiens
gctttatatatttgaataaagaattattcccttaattcttcattatttcattatatatttcctttattttttcattatttatgtgatgttttcttaaggaygttaaaggaagtcaaatagtgtattaacactactgtttggatttccaagagatcttgctagtatgcagcatcttattcatgtcacatgctttttctgaat

SEQ ID NO: 374934 - DNA, 201 bp, Homo sapiens
gagccaggcctggtggctcatatctgtaagcccaactactcggttagctaagatgaaaggctcacttaaggccaggagttcaagaccagcctgggcaacayagcaagacctcatttcttaaacaataacaacaacaacaaaaaaaacacctgagtaccagaatcttttatcaccatagattagttcttctataatagtaca

SEQ ID NO: 374935 - DNA, 201 bp, Homo sapiens
tatgggatgcaggttagagcactgaatcctgtcaccagacaaccccaaattaggaatgttctatttttaaaaagggaattgtattctctaaacatgtcaayaccataagagacagtgaaaggctgaggaaatggcccagattaaaggataagaaagaacagtatcagccaagtgcaatggcgggtcctagactagattcca

SEQ ID NO: 374936 - DNA, 201 bp, Homo sapiens
ataggtaaggatcctcctggttgaaaggttttgattctaatttgttattgtcgttggaaaattcccttctttctgtgcatgtgtacatgcatgcacacacatgcactcacacacatgcacacacgtgtacacacacaaatttgttttctctttcttccttaccacctttctctcctgccttcccttccccttcatttttcc

SEQ ID NO: 374937 - DNA, 201 bp, Homo sapiens
ttaagtgatgagttaaaccacacatcgcttgtgcttggggcccgactctcaggtgcaaccataagaatcttcaaacacaacagtgagtatcaatgtatttwctcaacatgtactggattgctcctagaagaaagtaaagattattgatgaggctttgttctgctcttcaaggtgacaacgtagcctcatgaaacacaatta

SEQ ID NO: 374938 - DNA, 201 bp, Homo sapiens
tgtgttaaggtcaggtaaaaaattagcctgttccttagaagaatgcctcctttcactttgcccacccacagatgctcagatccccacccaacaaaaccatytattcgacttcattgaaatgtcctttcagggtctggtttgtgtggctgggtggtgaggagcaggcagaaggctatttcttcttttagggtcttgatgagg

SEQ ID NO: 374939 - DNA, 201 bp, Homo sapiens
tctattctgattcaggcactatgttagccctttgaaggactataaaagtgataagtaatatcttagctatctgagggcttggaatctagtaggaaaggtaratatgcatgcaagttactgtataaagtgaaaagggccatgatgacatcaagcagtggttaagagtataggctttggctacggtgctttctcacacccact

SEQ ID NO: 374940 - DNA, 201 bp, Homo sapiens
gatcacaggacttgaagtacttttgcaacttacaatatcatgaaaaataaaacagttagggctaaaacaaaagagttcatctacagcagtggccctctatrtgtggtccgcaaccattggtggcagcatctcctgggagcttggcaaaaatgcacgttctcagcccacccaataccgactgaatcagaaactctggggtag

SEQ ID NO: 374941 - DNA, 201 bp, Homo sapiens
tagactcaatatcccactatgggaaaaggctcaattcaaatttgatcacattgtgaaaatgaaaacttagtgtgggtgaatataactctataaaagctgarttctccctaggactctgtgtgtgccctgcattaactccaaaagtcagcagtattgtagagtcattaatcttagaggaagaaatataaaccaggtgggcag

SEQ ID NO: 374942 - DNA, 201 bp, Homo sapiens
tttagaaattgtgttataggttttagagtgtcttcctgtccccacaagttgtttttccttggttttatttattggcttgtgttttgtgtgcttgttttctrcacagggatgcctcattttaagtgatgagttaaaccacacatcgcttgtgcttggggcccgactctcaggtgcaaccataagaatcttcaaacacaacag

SEQ ID NO: 374943 - DNA, 201 bp, Homo sapiens
tcttgttttctgtatcatttttggcactgttttttgacagcaattcatgggaataacatagatagcctttttatgcatgcgctagactcaatatcccactrtgggaaaaggctcaattcaaatttgatcacattgtgaaaatgaaaacttagtgtgggtgaatataactctataaaagctgaattctccctaggactctgt

SEQ ID NO: 374944 - DNA, 201 bp, Homo sapiens
aaatatcgggccaggtgcagtggctcacgcctgtaatcccagcactttgggaggccacagcgggtggattgactgagctcaggagttcgagaccagcctgygcaacaaggtgaaacctcgtctctactaaaatacaaaaaattagctgggcatgggggcatgcacctgcagtcccagctacttgggaggctgaggcaggag

SEQ ID NO: 374945 - DNA, 201 bp, Homo sapiens; identical to SEQ ID NO: 80901

SEQ ID NO: 374946 - DNA, 201 bp, Homo sapiens
gacacagagtgaagtccccactttccaagaattttccttcacaagaaagttcctttcatttcacccacacaggaatgttgactttaaatgagaccaagacytaaaaggccacattcacagataggtaacagggcatctctttgacaagcctcaatcgctcttgggggcttcaatttcctcatctgtaaaataaagatagcc

SEQ ID NO: 374947 - DNA, 201 bp, Homo sapiens
cacaaacagccaccttcactctgcagccaggctgcttgtggagttaatgcacacaggctgaggggctgcaggccgtgcatgcattccatatgcaccaagayccttttaatctcctggtctgtcactctgaggagtgcagtgagcccaaaagtggagatttgatttctccatcctaatggatgctgggtggtcttccagcca

SEQ ID NO: 374948 - DNA, 201 bp, Homo sapiens
ttgactgccccagagtttcaaaggcgtttcgcagctgggttattcaagatcaaaacactccttgcctttatgactggtagaaattgttgatgggtggcccrgatgcccctacctggacagcacgcccaacccccagctgcttgctgaactttgttagtgattgccatcaatacaaaagatctgcctgttttccccaaggta

SEQ ID NO: 374949 - DNA, 201 bp, Homo sapiens
tttttttttctttttttgcttttccttaagggcttttgcaaggcatatgctagagaaaaaaattggagtggtggtcgtgggatttccagccactcccctcrcagaagctcgggctcggttttgtgtttcagcggcacatacccgggagatgttagacacggtgagtacaccacaggccaacgggatctcagtaccagtacc

SEQ ID NO: 374950 - DNA, 201 bp, Homo sapiens
tgttctctgaaagtttaggtctgagtgtgaacataaaacatctggaaaaagaaagtggaaaaggaaaagtaaaccctttcatgactcaatttttttttttsgtattatttaaagacacacaaagcctagagaagctcctgagagatgctgtcatctatggccagcctcgaacccgcagagcttggaaaaagattctcatcc

SEQ ID NO: 374951 - DNA, 201 bp, Homo sapiens
aacccaagcccagtcatcaacctctgatagcagataaatgaattgtcactattgattatatttgacattagaagttaacaagattattctgccagacattyatcctcccttgttctacatcaccatttcatttgagaagaagggacaatggctttcacataaggcagcaaagggtagtgttacaaatgtggattacagtac

SEQ ID NO: 374952 - DNA, 201 bp, Homo sapiens
gtttaaaaacttcaatcatcttccacttattatcataaaaaagaaaaaagaaaaaagaaaaaatcaattagccatattccttttttgtcaggataattttktcttttcccaactaaccactttttttttttctttttttgcttttccttaagggcttttgcaaggcatatgctagagaaaaaaattggagtggtggtcgtg

SEQ ID NO: 374953 - DNA, 201 bp, Homo sapiens
gtgcagtggtgtgatctcggctcactgcaacatccgtctcctgggttcaagcaattctcctgtctcagcctcccaagtagctgggattagaggtgcctacmaccatacccacttaattttttgtatttttagtagagactgggtttcaccatgttggtcccgaactcctgacctcaaagatttagctttgctagatgtcac

SEQ ID NO: 374954 - DNA, 201 bp, Homo sapiens
cacacacacaccatcatgagtggcaccaagtgactgactgcctgtttatttgtcaattttatttgacagaagtttaaaaacttcaatcatcttccacttaktatcataaaaaagaaaaaagaaaaaagaaaaaatcaattagccatattccttttttgtcaggataattttgtcttttcccaactaaccactttttttttt

SEQ ID NO: 374955 - DNA, 201 bp, Homo sapiens
taattttatgtgcaggcaccttggataagcacaaggagttggaggaccttgtggctaagttcctgaatgtggaagcagctatggtctttgggatgggattygcaactaactcaatgaatatcccagcattagttggaaaggtgagaattgttaacataattgtcttctactgtattactcctaagaactgtaactctgagt

SEQ ID NO: 374956 - DNA, 201 bp, Homo sapiens
tatcaatgtatttactcaacatgtactggattgctcctagaagaaagtaaagattattgatgaggctttgttctgctcttcaaggtgacaacgtagcctcmtgaaacacaattatgtttatattcactcctggcttgttaacctctggtgacctggaacaaatggttgaaatgcattaaacatccaaattgttaagtgtaa

SEQ ID NO: 374957 - DNA, 201 bp, Homo sapiens
agggactggttattctaattttcattgcatcctgtggtccaaatgggaggctgaattctgacatttgcaagtcaactgctctgagaagttatcacagatamaaaccaataaaatatccaacaacagaagttcagaataggagcaaaaggagactttgttttgctgtggcatataacagcgctcccttttattcagcccagc

SEQ ID NO: 374958 - DNA, 201 bp, Homo sapiens
tttcacggcctcagctacagagtcagctgcaaccaggaaccaacacatttgttctccatggtgtttctggtgcattttgaggaaatgagcaaataatgaarttatttttccccaatatttctcaggctttcatatgcacacgaggtacttgggggctcttgttaaaatgcagactctgagtgagcaggtctgggtgggggc

SEQ ID NO: 374959 - DNA, 201 bp, Homo sapiens
ttaaaatgcagactctgagtgagcaggtctgggtgggggcctgagatcctgcattctgacaagctcctgggtgccgctgctgctactgctgctgctgctgycatgcagaaccacactcagagcagcgagactgcaggcaacctcggtcctcaagtgagtcactaagactttcttaagctagcctcggagaaaagctgtttc

SEQ ID NO: 374960 - DNA, 201 bp, Homo sapiens
gtgcaaccataagaatcttcaaacacaacagtgagtatcaatgtatttactcaacatgtactggattgctcctagaagaaagtaaagattattgatgaggytttgttctgctcttcaaggtgacaacgtagcctcatgaaacacaattatgtttatattcactcctggcttgttaacctctggtgacctggaacaaatggt

SEQ ID NO: 374961 - DNA, 201 bp, Homo sapiens
gtgttctcttagaatttctctattctctgtttttgtgttgttttgttttgttgttgtttttccatttgctattacctggaagtcatcagtgaggggcagayggaccctgtgtgtctccagatatgataccctaaaaagcctttgacatcatttatatgggatgcaggttagagcactgaatcctgtcaccagacaacccca

SEQ ID NO: 374962 - DNA, 201 bp, Homo sapiens
tggatcatttcaccatagtccaggggtagacaacttatgacctgtgaactaagaacacttttacatatttaaagcgtcgtataaagaaaaagaagactacrcaacagagactgtatgtggtccacaaagcctaaagtaaaactatctggcttttttatagaaaaggtttgctgaatcctgctgtaattgtatgagaatacc

SEQ ID NO: 374963 - DNA, 201 bp, Homo sapiens
gtccctggtttctaggttctgcctgtccttcatctcatgcctacagagtcaaaagttgctgcaattaccccctccccctgcagggtaaacaggccctgtcmctagcacctgcctcacccataagcccaacccaggtcacctgctctcagctgtcttttgcactcttccaagaagatccctttgcttctttcaactgcctaa

SEQ ID NO: 374964 - DNA, 201 bp, Homo sapiens
ataatatatctttgataatacaaagtttgaaattacaatgtaaacttttaacattgcaccaaatcttgagtcagattgactactagaacacttgttttttkttgttgttgttgttgtttgtttttgtctttgtttttgttttttgagatggagtcttgctctgtcgcccaggctggagtgcagtggcaccatctcagctca

SEQ ID NO: 374965 - DNA, 201 bp, Homo sapiens
tctgaactcggccatccaaaactacctcgtggaacacacaaatgctgcacccagtgatcatgatactctctccaaaccaacacccgttggtctgggtgacwgtgcacacagccagctggactgttttgactgaatcgacccaacacttaagcttattttttaatacattaaatttaatctaataaataattaggggaaaaa

SEQ ID NO: 374966 - DNA, 201 bp, Homo sapiens
ttttcctgtcactagcagaagcacaagagaaagagtagaaatgcataagacctcttcagatctaggtttggaactagcaaactgtctcttctctgtattcygttagccaaagcaagtcacttggctgaacccaagccaaggggcagggaaacgttctccactggtgagaggaaaggactgcaaagtcacagaagaaggaac

SEQ ID NO: 374967 - DNA, 201 bp, Homo sapiens
aatgctgcacccagtgatcatgatactctctccaaaccaacacccgttggtctgggtgactgtgcacacagccagctggactgttttgactgaatcgaccyaacacttaagcttattttttaatacattaaatttaatctaataaataattaggggaaaaaggagacgttcaactctgtttgattcaatgaattagctctt

SEQ ID NO: 374968 - DNA, 201 bp, Homo sapiens
gcctacagaacataaatcacaatcccttaaatctgcgggtttgtaacccacgcactgtagccttgtagaacgacagagaaccagagaggaacatgccaggrgctaaggtggggccagaatccaggccgagcgcagtcttcccttttcctgtgtagcttctgtgattctaagaggtcggagagttcatcccctgcaggagga

SEQ ID NO: 374969 - DNA, 201 bp, Homo sapiens
caaaattatacttttattttaatttccgtatctcagaattttcttattaaatcaacaagaacaggtttgtttggagggcttttgtttggggaacttttttwaacaaaacttctggcattgtttttttcatctgcaaaaaacaaaaacctaacagtccttccctacttctcagaggtgtcatggggattaacataatgcaag

SEQ ID NO: 374970 - DNA, 201 bp, Homo sapiens
cctatactgttctcgtggtagtgaataagtctcacgagatctaatggtgttataaaggttttcccctttcacttggctcccactctctcgtctgccatcaygtaagatgtgcctttccccttccgccatgattgtgaggcttccccagccacgtggagctgtaagtccattaaacctcattttctttataaattacccagt

SEQ ID NO: 374971 - DNA, 201 bp, Homo sapiens
cagccacacccactattttgtgtattgtctgactgctttcactttacaatagcagagttgaatagttgcaacaacaaccatatggcctgcaaagcccaaamcatttattctctagatctctatcaaaagtttgctgatctagacaagtacttgacatcacaatgatttagagaaaataaatcctccagatttatagcactg

SEQ ID NO: 374972 - DNA, 201 bp, Homo sapiens
ctcattttaagtgatgagttaaaccacacatcgcttgtgcttggggcccgactctcaggtgcaaccataagaatcttcaaacacaacagtgagtatcaatktatttactcaacatgtactggattgctcctagaagaaagtaaagattattgatgaggctttgttctgctcttcaaggtgacaacgtagcctcatgaaaca

SEQ ID NO: 374973 - DNA, 201 bp, Homo sapiens
ataaactagcatagctggagcactaactttcaaaataaaattaatcaaggaataatagtcagctcttctaaaacaaatacatatataaacatatgcacatrtgctgtagcctcagaataccatttactctaagaatgtaagctattctcctatgctcaaaataatgtaaatttaaggattgagaacttcagtggtaaactg

SEQ ID NO: 374974 - DNA, 201 bp, Homo sapiens
aaatacccgctacttactatttcacatttgggctgaatcttgaaggatgaaactgcatgtccaaaggaataagaggagtggatatagagatggggggtaarggactaggaacagtaaaaagtgacattcattcatcatccatccatcttttcatttacaaaatatgagtgccgctgataggcagacacaaaaatatttttg

SEQ ID NO: 374975 - DNA, 201 bp, Homo sapiens
gataggtaaggatcctcctggttgaaaggttttgattctaatttgttattgtcgttggaaaattcccttctttctgtgcatgtgtacatgcatgcacacacatgcactcacacacatgcacacacgtgtacacacacaaatttgttttctctttcttccttaccacctttctctcctgccttcccttccccttcatttttc

SEQ ID NO: 374976 - DNA, 201 bp, Homo sapiens
gggtatatttctgaacatatattttcaagcctgggaaatagtaaaataagtcatcccatggtatctgggcatattcatgttttctgttagaaaacgagatkgcaaagtctgcagaaaatagaccatgacaatggtattggctcacaaactcacaaactcgtcaaccccatctcttttgcttaggattacgggggaaatgca

SEQ ID NO: 374977 - DNA, 201 bp, Homo sapiens
taattgttttgcttgacaaaattggtcattgtgattttgtttccgccgaaaggctaaaaaagggggacagtcctccccaccaccatcttaaaagtaagaawaatttctttgtcatcattcatagctatttaaatacccgctacttactatttcacatttgggctgaatcttgaaggatgaaactgcatgtccaaaggaata

SEQ ID NO: 374978 - DNA, 201 bp, Homo sapiens
ttctctgattctgaatttgttctctgaaagtttaggtctgagtgtgaacataaaacatctggaaaaagaaagtggaaaaggaaaagtaaaccctttcatgwctcaatttttttttttcgtattatttaaagacacacaaagcctagagaagctcctgagagatgctgtcatctatggccagcctcgaacccgcagagcttg

SEQ ID NO: 374979 - DNA, 201 bp, Homo sapiens
aactgtaagataagtttgtgttgtcttaaagtcactaagtgtattctaacttcttacagcagcaataggaaaccactaggctttcattcacaggtgcacaraacccttgttcccacacacccacatgtttaatacaactttgaaacacgagcatattctgctgctgttgtatttacatcacaaaaacagaccccttgagag

SEQ ID NO: 374980 - DNA, 201 bp, Homo sapiens
tgagaaagacttaaagagcccttgctggctttgaagatgaaagaagaccacaagctaaggaatgcaggaagcatttccctagaagccggaaaaaccaaggrcatggattctcccctagagcttccagacagaaatacagccctgccaatatcttgattttcacccagtcgaacccatttcagacttctgacctctagaact

SEQ ID NO: 374981 - DNA, 201 bp, Homo sapiens
gatggaattcaggccgcaaaacagctaaccttaaagagactatccacgtaggtctagtgcaatcatagggttgttaaatgtggaaaagagtggcaaaagartgaggatcagggcaatgcaatgtgagaaagacttaaagagcccttgctggctttgaagatgaaagaagaccacaagctaaggaatgcaggaagcatttcc

SEQ ID NO: 374982 - DNA, 201 bp, Homo sapiens
cagtctatcagctagacccttcccacaggtcttatagaaagggaaccaaaggtgctgagactgagctctctccctaaattcaagttctgtgaatttagggwaatcacttatctccctcagcctcacctgtaaattaagcacaatcctgagcctccttctgacccaagatcgttctcagggagaacttctgaagatcatctc

SEQ ID NO: 374983 - DNA, 201 bp, Homo sapiens
ttctgcctgtccttcatctcatgcctacagagtcaaaagttgctgcaattaccccctccccctgcagggtaaacaggccctgtccctagcacctgcctcayccataagcccaacccaggtcacctgctctcagctgtcttttgcactcttccaagaagatccctttgcttctttcaactgcctaaggctgtgcgacatcta

SEQ ID NO: 374984 - DNA, 201 bp, Homo sapiens
tgctactcttatctcctttttgacagatgaagaagaaacatctataaagtggtgaagtgacttagatacacagagctagtaagagtcagagctggtaaacytaggaagtctgactccagagtctccgtttttaagcatgacacgctacctcctttcctggccttttctaccctctgtttgcccctggatggcagagtgatg

SEQ ID NO: 374985 - DNA, 201 bp, Homo sapiens
tcagggacatagccaaccctcaggctgcccttgtgctatccagccattctccagccatttcacggcctcagctacagagtcagctgcaaccaggaaccaamacatttgttctccatggtgtttctggtgcattttgaggaaatgagcaaataatgaagttatttttccccaatatttctcaggctttcatatgcacacgag

SEQ ID NO: 374986 - DNA, 201 bp, Homo sapiens
aacttgcgaaaaacacaagatacttcagacaaagactgcaggaaatgggattcattatctatggcaatgagaatgcttctgttgttcctctgcttctttayatgcctggtaaagtagcgtaagtatccaaggcatctcataatcacacctaaaccccaaggtgacctaagatggctttttggcacaggcgttagattatgc

SEQ ID NO: 374987 - DNA, 201 bp, Homo sapiens
atgccctccctttgtactcatgaaaaatagataatagttactatctctatcctaacaatgaatgttagctgttgttatttagactagcaactaacatttaytgagaaagtcctctgtgccagatgctgaggtaatggccttctctaatttatttagccctgtgaagaattccatgaggtaggaactgctttacaaatgaga

SEQ ID NO: 374988 - DNA, 201 bp, Homo sapiens
gccaaaatctggaaacaatccgaatgtctaccaacaggatagtagaaaaaactattatttatttatacaatagaacactactccacaattaaaaaaaaaaagcaacaagctactgctacacataacatggctgactctcaagaaaaattattttaattattttgagtgaaataaaccagacacaaacgtgtatacatactg

SEQ ID NO: 374989 - DNA, 201 bp, Homo sapiens; identical to SEQ ID NO: 80900

SEQ ID NO: 374990 - DNA, 201 bp, Homo sapiens
agttacctgggcatggtggcacgcacctgtagtcccagctacttgggaggctaaggcaggagaattgcttgaacccaggaagtggaggttgcaatgagccragatcgggccactgcactctagcctggtgacagagtgagactctgtctcaaaaaaaaaaaagaaaaaaagaagaagtatggctgagaaggttcttttcgt

SEQ ID NO: 374991 - DNA, 201 bp, Homo sapiens
acctaagatggctttttggcacaggcgttagattatgcatctggaatggggtgagtgagttcagaattcactcgtacggcttctcggaagccacctgtcastctatcagctagacccttcccacaggtcttatagaaagggaaccaaaggtgctgagactgagctctctccctaaattcaagttctgtgaatttagggaaa

SEQ ID NO: 374992 - DNA, 201 bp, Homo sapiens
ctctactaaaaatacaaaaattagccaggagtggtggcacacgcctgtattcccagctactcgggaggctgaagcaggagaattgctggagcccaggagaygaaggttgcagtgagccaaggtcatgccactgcactccagcctggccgacagagcaagactctgtctaaaaaaaaaaaaagtcaccaactgcatcaggta

SEQ ID NO: 374993 - DNA, 201 bp, Homo sapiens
tcccagttctaagaatctttcaattggccattgattaacaatactcggccaggcgtggtggctcatgcctgtaatcacagcactttgggaggccaaggccrgcggattaccagaggtcaggagttcgagaccagcctggccaacatggtgaaaccccatctctactaaaaatacaaaaattagccaggagtggtggcacac

SEQ ID NO: 374994 - DNA, 201 bp, Homo sapiens
gacattgtcttatggtgtcctgatgtacgtggggtgtgcatgtgtgtgtgtgtgtgtgtgcatgtgtctttgtgtgtgtgagaaggacagagagaaatgtatgtttcactgaaacatttgaaacgaccaatttcactttattgtgcctgtaaaatgttagttttaaaataaataaaaataatatgaaaataattgatggtt

SEQ ID NO: 374995 - DNA, 201 bp, Homo sapiens
acttgtgagacaggttttaagaatggccacctgcaccagagcattcttaaacaatgggattgtggaatttcatgcaactctaaacttgttctgctctcacrgactgtcctctgcttcatgtcctctccttacaccttaacaatactcttctgcctgttggagaggaggaggttctattttttagcagtaccaatggaagtg

SEQ ID NO: 374996 - DNA, 201 bp, Homo sapiens; identical to SEQ ID NO: 80903

SEQ ID NO: 374997 - DNA, 201 bp, Homo sapiens; identical to SEQ ID NO: 80905

SEQ ID NO: 374998 - DNA, 201 bp, Homo sapiens; identical to SEQ ID NO: 80906

SEQ ID NO: 374999 - DNA, 201 bp, Homo sapiens
caggcgtagtagcatgtgcctgtaatcccagctactcgaactgctgaggcaggagaatcacttgaacccgggaggcggaggttgcagtgagccgagatcaygccactgcactccagcctgggcaacagagtgagacgctgtctcaaaaaaaaaaaaaaaaaaaaaaatagaaatcctaatgttttcctcctgcatcctcca

SEQ ID NO: 375000 - DNA, 201 bp, Homo sapiens
tataaatgatctatgcaataccaatatattacgtacattatataagagacacacaaataaaagtttaaaaggttgagataaaaatgaatagaggtcgggcrcagtggctcacgcctataatcccagcactttgggaggttgaggtgggcggatgacctgaggtcaggagttcgagaccagcctggccaacatggtgaaacc

SEQ ID NO: 375001 - DNA, 201 bp, Homo sapiens
tcatctcaggcacaagctcaaatgcagtgagaagccactcccatcttcctgtcactaagatgcccacggttcttctgcagtgtcctccctctcccatctcmgcaagctaaagaaacctaactctgagcacgagtgtgttctgggtggtcttggatcagcagacattaacataaattctttataaatgatctatgcaatacc

SEQ ID NO: 375002 - DNA, 201 bp, Homo sapiens
tttctcagacaattatgagctctcattctgtgcagttccgtgggcagccttccatagggtgatcaagaaagagaaagaacagcctctgttttcaagctttmtcagctagaaagcttcatctccttctaaccttcctagttgaaatcaaagggctaatgttgcctcgcccaagccagggagccagagaggctgtgtgtcttg

SEQ ID NO: 375003 - DNA, 201 bp, Homo sapiens
attatccctgtgcatccctgggcatgttcattcacatatgaaacaatcaggagaccttgctatttcttatctctgatttgatggaaaatataatctttggygctgcagtgggaatattggcttggggttggatactacagaccctctgatcttggtcttcaaattatactcattaagtataggctcattgaaatttccaca

SEQ ID NO: 375004 - DNA, 201 bp, Homo sapiens
gagggtaggatgtttagccctagtttataaatgaagatgctaagacttagaaaggtcaaattactttctaaagccgggtacggtagctcatgcctgtaatmccaacactttaggaggctgaggcagatggatcacctgaggtcaggagtttgaaaccagcctggccaaccctgtttctactaaaagtacaaaaaaaaaaaa

SEQ ID NO: 375005 - DNA, 201 bp, Homo sapiens
ggttttagagtgtcttcctgtccccacaagttgtttttccttggttttatttattggcttgtgttttgtgtgcttgttttctgcacagggatgcctcattktaagtgatgagttaaaccacacatcgcttgtgcttggggcccgactctcaggtgcaaccataagaatcttcaaacacaacagtgagtatcaatgtattta

SEQ ID NO: 375006 - DNA, 201 bp, Homo sapiens
tgctctgtgataatgttaaggagggttgacaacagtgattgaaagtagcagacaattcaaagatctttaaccatctgatttttgaagacacatacaaacayacacacacacacagacacacatacatttattcaaaatgattggggaaatgatgtgtgttggaagaaatattccaaacttggctcaggtttatctaatatt

SEQ ID NO: 375007 - DNA, 201 bp, Homo sapiens
atcatgaggtcaggagatcgaaaccatcctggccaacatggtgaaaccccgtgtctacaaaaaatacaaaaaactagccgggcgtggtggtgggtgcctgkagtcccagctactcgggaggctgaggcaggaaagtggcatgaacctgggaggtggagcttgcagtgagccgagattgcaccactgcactctagccagggc

SEQ ID NO: 375008 - DNA, 201 bp, Homo sapiens
aggctgaggcaggtggatcacctgaggtcaggagttcgagaccagcctggccaacatggtgagaccctgtctctactaaaaatacaaaaattaggtgggcmtggtggtgcatgcctgtagtcctagctactagggaggccgaggcaggaggatcacttgacaccaggaggcagaggttgcatgagcagagattgtgccact

SEQ ID NO: 375009 - DNA, 201 bp, Homo sapiens
tttagtagacacagggtttcaccatgttagccaggatggtcttgagctcctgaccttgtgatccacctgcctcagcctcccaaagtgctgggattacaggygtgagccaccgcacctggcctactatgtgtattcttgaaaaaaaaattctagaaaccctgatgtgtttctctggttaagaatcactgattttgaggcaag

SEQ ID NO: 375010 - DNA, 201 bp, Homo sapiens
aggtctactatgtgtgtgtgtgtatatatatatacacagatttttttgagacggagtctcgctctgtcgcccaggctggagtgcagtggcgcaatcttggytcactgcaagctccgcctcccaggttcacaccattctcctgcctcagcctcccaagtagctgggactacaggcacccgccaccacgcccagctaattttt

SEQ ID NO: 375011 - DNA, 201 bp, Homo sapiens
accctaggaggcagaagttgcagtgagattaaatcgaaccactgcactccagcctgggcaacagagtgagacctcatctaaaaacatatatatatatataatatacatgtaaaaattatatacatgtatatataaataaaagttatatattatatacttatatagtatataaataaaagttatatatatttatatataata

SEQ ID NO: 375012 - DNA, 201 bp, Homo sapiens
ttgaccctaggaggcagaagttgcagtgagattaaatcgaaccactgcactccagcctgggcaacagagtgagacctcatctaaaaacatatatatatatrtaatatacatgtaaaaattatatacatgtatatataaataaaagttatatattatatacttatatagtatataaataaaagttatatatatttatatata

SEQ ID NO: 375013 - DNA, 201 bp, Homo sapiens
atccctgctgctgctcctcaggagcacggaacatgccactgtgaaggacagccctggctgtggctactctggcaaatgactgctgctgtctctttgaggcrcctcagatactccaaagtgaactttccggataccctgtggctgatgaattcagtcaggccagcatcatgcacatactcttcagatatggggaaaacccac

SEQ ID NO: 375014 - DNA, 201 bp, Homo sapiens
taacagaaaagaaacagatctgtgcagtgggagaagtaaagtgaacagaggatggaattctggcagatgcaaacaaaggtaaaggacctagcaaaaaaaaagaaaaaaggaggaagaagagcaggcagaagaataagaaaaagcccgaaagagaaaagcatgaaatgtgtttggatccatttctttaaatctgtgtttaaa

SEQ ID NO: 375015 - DNA, 201 bp, Homo sapiens
aaaacagggaagaacattttaaatactcatactcctaccaccaagaaatcaattactgttaacaagttggaggaaatcttaattaatgtcagtttgaaagrtttcccaaagaggaaagtccataagatctattagtcacccattctaacattaacaaccctcaccttaccttttcaaagcattagaccctaatattatctt

SEQ ID NO: 375016 - DNA, 201 bp, Homo sapiens
ttgttggtacctacacaaagcctcctttgaattttaacttccagattttttctcttgcttatggtctgccaccatgggtaaagcacccccacatacatcascacagagcccacatacatcaattttttcataacccccaaagagagcagtcagccaaatcagaaagtttcagggagatatcaagatagaaaaggctagata

SEQ ID NO: 375017 - DNA, 201 bp, Homo sapiens; identical to SEQ ID NO: 80908

SEQ ID NO: 375018 - DNA, 201 bp, Homo sapiens; identical to SEQ ID NO: 80909

SEQ ID NO: 375019 - DNA, 201 bp, Homo sapiens; identical to SEQ ID NO: 80910

SEQ ID NO: 375020 - DNA, 201 bp, Homo sapiens
gtctcaagaaaaaagaaaaaaaagaaattatacactcatgtttaaattagcttaagttgaattaggtaggtggaaagcttactgggggaaaatatgtcatrttttgtaagcacaaaaaaagtgtaaactttttattcataatgtataaccagttctctacttatggggaacaatctggaattcaccattttcagtaacttc

SEQ ID NO: 375021 - DNA, 201 bp, Homo sapiens
aatttaattttatcttaatttaatagtattaataaaggaaacatcaccaaatattaacatttagtaattctgtatcagtagttgtcaatgcgtcttttgtscctggaccagcagcatttgtaatcatctgagaacttttagaaatacaggccccagtctagatctacaaaatctgaaatttggggggtagacccacgaaac

SEQ ID NO: 375022 - DNA, 201 bp, Homo sapiens
tccagtgtaggttagctcatgggaagagaatgcattattcatgtcctctcaaatatactggttgccctgacagttgtttcttattgtatgaactggacttsaggcaatgggctggagctgcaggtgcttatacttctgtttctgggacagatctgtttctttttgaacattgatactattttggttttataaatcagtctt

SEQ ID NO: 375023 - DNA, 201 bp, Homo sapiens
ctgaggcttgtgcattcatcacgtagttctcgtgccttggttttcagctccatccggtcctttaaggacttctctgcattggttattctagttagccattyatcagatcttaatgaacaatttgatgagttttgaaaaatgtacatatatctgtataactaattccctaatcagtcctcaccacccatgggcaacactgtt

SEQ ID NO: 375024 - DNA, 201 bp, Homo sapiens
gtattttctgttttgcatttgataatgatttaattcttgtactattgtttaaaacagctagtgtccttgatttgcactgctcccagggtgatgcctcttascctgtggatttgtcatgttgctacttcacatttggtacccttgatctgtatttatagtagccttgcaggagttatttcatgtcccaagaatttcattaga

SEQ ID NO: 375025 - DNA, 201 bp, Homo sapiens
aatacttttccaattgcaagatttgactataattttattgaatgagagttttagtcagaaagaaggggcagagggtatcagtaatgaaaatagaaaaagawaagacagatattaaaagtgactgtccaagttctgtgcaagagtaaagtaacatttgtccctaacacagagatggatgtagagagttgtatcagtgtgcat

SEQ ID NO: 375026 - DNA, 201 bp, Homo sapiens
atgggatttccccatgttagccaggatggtctcgatctcttgacctcgtgatccgcctgcctcagcctcccaaagtgctgggattacaggcgtgagccacygcgcccggcccagaacacagctttttaaacatcttgctgaccctccccattctccttccttctcatcttgctccctttcctcccaggttcacactgccaa

SEQ ID NO: 375027 - DNA, 201 bp, Homo sapiens
ttatgttcttaacatgattatagaaaaacctctacttcaggaatgatggaagaatgcattctcagaaaaattgaatgatgtttccttttattgacatattwgtttcctggtattgcagttatgtaaaggttaagtaggattttatatgccaatcatccgtggttgatgtagtgaaaaaggtctggactgttaacattctcc

SEQ ID NO: 375028 - DNA, 201 bp, Homo sapiens
cattgtattaattcaggactctgccaggggcacatttcagcgatgagttgtccctgctctcaaaggcttcacagaaatgaaaactaagagtgaatatagckaagattaatacattgtcatttatggtattattggaggcccaaatctggttcttcctgaatttaaccaaagtttatgttactctttcttaggtgaaaataa

SEQ ID NO: 375029 - DNA, 201 bp, Homo sapiens
tgatatgataattatcattttaaaagagattttacaaggatacttacttctccaatatacttcattctcctggtggtcaccttttcatttttcttcttttkttcactatagcttcttattttcttctctctaggctgttgctatttataaaatatttgtagttttaaacattgttttattaaactaaaccctgcatttata

SEQ ID NO: 375030 - DNA, 201 bp, Homo sapiens
aggaagatgattaggaatgagatgtcaagttcttcaaagacagtgaggatttacatagtgaaacagaagagataaaatgaggtgaggagaagaagaaaaakaatgcaagaatataagaatcataattgaatggaatgtattggtttcttaatgctgctgtaaaaaaactaccagaaatttagtgacttaaaatagcacaca

SEQ ID NO: 375031 - DNA, 201 bp, Homo sapiens
ctcatctgttgctctgtcagggtctgtgggtcagtcccggcagccttcctttcttgttagaacagtaaaatatataccagggtttggttttataaaatagyttctcatttttgtcacggaggcagtgctgtttcagttcagtccttatagcttagctgaccatttaggcaggatttcttaggccagaattttcctcatctt

SEQ ID NO: 375032 - DNA, 201 bp, Homo sapiens
tgttctgttttttacttccacaatgaattttctaagtctcttacactttcaaacttgttctgttagcctgtttgaactggctaaacacctacatcattccratgctccaaatggcaccttattttagttcctttctatcaataaaatttgggagacctgcatgcctgcagagtttttttgagtaggccttaatgaattttt

SEQ ID NO: 375033 - DNA, 201 bp, Homo sapiens
tcacatgctacagaggaatctatcatgaaaggaagagtcaatccgtggtggcaacttcattgttgtcttatgctaagaaatttccacaacagccccgtccktcagcaaccaccaccctgatcattcggcagccatcaacatcaaagttaagacccttcaccagcaaaaagtttatagctagctaaagactaaggtgattgt

SEQ ID NO: 375034 - DNA, 201 bp, Homo sapiens
aagtttataagaatcattttgataaaaattctaaaaatattttaaagctttttttttctttctttctttttttttttttcgagacggagtattgctctgtyacccaggctggagtgcagtggcgcaatctcggctcattgcaagccgagtttacgccattctcctgcctcagactcccgagtagctgggaccacaggtgcc

SEQ ID NO: 375035 - DNA, 201 bp, Homo sapiens; identical to SEQ ID NO: 80916
  misc_feature (1)...(201): n = A,T,C or G

SEQ ID NO: 375036 - DNA, 201 bp, Homo sapiens
gtatatcttccttttaaaaactaaaaagattcaaaaagtatcagctaatttttatgagatttatactttggcgaatccaagtgattaacacctaccgaaaytcataaattgaggcattcatgaaatcagatatgtaattccaactacaaaatacaaaaataaatgttttttagaatttaagttttatgattgtgtctgctc

SEQ ID NO: 375037 - DNA, 201 bp, Homo sapiens
taaaattgtcttttttttttgagagagtctcactttgtcacccaggctgaagtgcagtggtgcagtggtgtcatcatacctcactacagcctcgaactcckgggctcaagcaaccctcctgcctcagtctccccagtagttaggatcataggcacatgctatcatgcccagctaattttttaatttttcctagagacaggg

SEQ ID NO: 375038 - DNA, 201 bp, Homo sapiens
ttttaaacatcaaattaatgtgcatatttatattttcctaaaactattggcaaatttagtgtcttttactttttaatataagctaattttgagagaagcakactttatgcttggtatgctgcaatcagatatataaagttatgtatatagaagtcagcctttattaagatgttcattaaagcaattgtcctctattgtttt

SEQ ID NO: 375039 - DNA, 201 bp, Homo sapiens
tattgattgtttacaaaatatcctggtacctttcagtgacactggtttttaaagacattggtaccaactctggaaagctgttttaatggagtagttgactrctgaatactaaagtctgaattataacataggccggaaaatgcaggaagatttttaagattcactgaaatatctaagctctttatttgcctcttattcttg

SEQ ID NO: 375040 - DNA, 201 bp, Homo sapiens
tcagaacaagttatgtgttttaaacatcaaattaatgtgcatatttatattttcctaaaactattggcaaatttagtgtcttttactttttaatataagcyaattttgagagaagcagactttatgcttggtatgctgcaatcagatatataaagttatgtatatagaagtcagcctttattaagatgttcattaaagcaa

SEQ ID NO: 375041 - DNA, 201 bp, Homo sapiens
ttaactgtggatcatgaaaacccaaaataaaaatagcttaaacaagaacacagtattattactctctcctgtaaaagcccagaggtagccagctcaggctyggtgctgtagctgtgctccacaaagaccttggggaccaagacacctttggactttctaccttacatccctaggatatggccctttccttcagggtcaagg

SEQ ID NO: 375042 - DNA, 201 bp, Homo sapiens
ctttaccacttagttgctggctgacaaaccaggatggaactggttaatccctttgatcttcagtttcctcatctgcaaaatgagggcaataaaaggatctrccttaaagggttattgggaagattaaatgcattcatgtgagtgaagggtttaacgtagttcctggcacactggaagtgcatcagctactattctttaaaa

SEQ ID NO: 375043 - DNA, 201 bp, Homo sapiens
taaccacctaattgcatttcgtagtccagcccctaagtgggtcaatgagtggatactgtgtgcctttaaagtactttggtatcctaagacagtgtgatggkttgaagaggatatacttgaatgccagctctaccatttatatcaaccttgagcacattatttttcactgagcctttgattgtctagaaagcaaaaagatgg

SEQ ID NO: 375044 - DNA, 201 bp, Homo sapiens
ttattgattatcatattagaaaatataagtgtaattaaataagtaaagactactactttaaaaaattgtggatacagtgtagaagaatgtagaagtcagaytgattgtatttaaatgtaagtatttaagttgcaccacatactgggcttactagctgtgagacttcatgtaaattatttaatctctcaaagcctcagtttc

SEQ ID NO: 375045 - DNA, 201 bp, Homo sapiens
ttccagtgtcgccttaggctataagtttcaactccataattaatggcttattaagaaaataaagtttttactgccacacaaagttctcagatatggatggrtttcttaatattaagcaaaggctagagccaaaaatgggaagacataattaattattatttgaatatgcattgttcagttagtacattaccctaaaaaatt

SEQ ID NO: 375046 - DNA, 201 bp, Homo sapiens
gggaactggaatgggagcccagacccccagattttgtttccagctttgctattagctaactttgtgactggctcaagttaatgaacctcaaactttaagaygggaggtgaaagagggtgaagactcaaggcggagagattcataagtgagcttaaaaatctctttcagctgtaagagttcttttttctcaccaggagagcc

SEQ ID NO: 375047 - DNA, 201 bp, Homo sapiens
gtatcaccctacttttaggatttacccaagtaagtacccatggataagaactaaaacagccaatttaatccataaattacctatagcagagtgttaaagcrttgttttatcagatattaaaactgtgctccagtttagaattatgaagtattgctatggtgttcatcataggtaattattgtattttttttacatttgttg

SEQ ID NO: 375048 - DNA, 201 bp, Homo sapiens
catctcaaggtcagtcattccaagccatgttgtccaaagattatatagatcatttgcttttcctcctttcccttgctccccacaacttctgaccatttcaygactcctttataccgtcattcaagcttagttgggcaggaaaaggagttactgccaagcaagtaactcttgtttctttttatttgattttggcaggagaag

SEQ ID NO: 375049 - DNA, 201 bp, Homo sapiens
gtgtcaatattaatgcaagcaaagcaaaggctcatagatttaatgtcatgaggtttctaactcaggaagaggttaacattttcttctacggcctctttctrtggaagcacattacttaatgatgtgcctaaagactgcccaagtgagtttagtttccatatataatttcagagtataaaaattgggaaatctcaaatgaca

SEQ ID NO: 375050 - DNA, 201 bp, Homo sapiens
actatttaatttaatcattaacttaattgagtccatcattttaagagtgccacacttttcatttagttacaaaatatgagcacatagtatgtgtaaaatgraatagcattgtatttttgccgtgtgtaattttgataaaataaactctttgttaaaactattgtaaaagttgataaccattcaccttctaagcttcctaac

SEQ ID NO: 375051 - DNA, 201 bp, Homo sapiens
tgagtccatcattttaagagtgccacacttttcatttagttacaaaatatgagcacatagtatgtgtaaaatgaaatagcattgtatttttgccgtgtgtmattttgataaaataaactctttgttaaaactattgtaaaagttgataaccattcaccttctaagcttcctaacctccagaattcctttttttttttatca

SEQ ID NO: 375052 - DNA, 201 bp, Homo sapiens
tgaggttttgaaaaaaatggaaatcatagctaattctaattatgtaaatttcaatttgaaattttaacaggcaaatgaaaatatgttagtttatatttcayctaactagaagatttggattctgttatcactgaattccctcttcattttacacttatttggaaaaaagagttaataaattatcagttaaactgaatattt

SEQ ID NO: 375053 - DNA, 201 bp, Homo sapiens
ttgcttccaggtttgcagggcagttagcaaagatacacttatacatgaaagtggagagtccagattattagtacttgtggtaaaagctacagatgcttcartggaatttgtttctgttttgttgtttttgctcagatggctatgatgtaatttaaactgttctcttttttttttcttttttttttttgaacttagtaggag

SEQ ID NO: 375054 - DNA, 201 bp, Homo sapiens
tgtcaagttcttcaaagacagtgaggatttacatagtgaaacagaagagataaaatgaggtgaggagaagaagaaaaagaatgcaagaatataagaatcayaattgaatggaatgtattggtttcttaatgctgctgtaaaaaaactaccagaaatttagtgacttaaaatagcacacatgtattatttgaagctttggac

SEQ ID NO: 375055 - DNA, 201 bp, Homo sapiens
atgttgaagagatcttgaaatgcttccatgtgcattttctaatttgactcacacatcaaccctgtgcagtgagtgaaggagccagaagacttttcccctayttaaaaatgaggaagttgaagggcaaaaagaagttaagttgacagacccaaggaccacttcttgtcctattcatactgcaaactgtggtggggagtctta

SEQ ID NO: 375056 - DNA, 201 bp, Homo sapiens
ttgttttgtttttttcctaaggaacatccagagttggtgtcaatttagtcactttcagggttttttgacagaggggaaggctccgggattaatcttttctmtttaataacccagcccttcttttaaaatcgtcttcccccgctttcaccttcttccttcaaaatcctaaatcttgagcgcccagaggatagccctgaaagg

SEQ ID NO: 375057 - DNA, 201 bp, Homo sapiens
caaatagtagaatgggtgtggttcagacatttaattagcttcatattttagaaagtaggaccattaatgcctgcctcaccaggtttaaataaaattatggkttttttttcagtagcactaatgtgaatatttttcaaaaccccctagaattaataaagggaaaggaaaatagaggtcctatcctagaccatcgaagtgatt

SEQ ID NO: 375058 - DNA, 201 bp, Homo sapiens
tccctctttttctgttgtttggaatggtttcagaaggaatggtaccagctcctccttgtacctctggtagaatttggctgtgaatccatctggtcctggactttttttggttggtaagctattaattattgctcaatttcagagcctattattggtctattcagagattcaacttcttcctggtttagtcttgggaggggg

SEQ ID NO: 375059 - DNA, 201 bp, Homo sapiens
tttgttttgtttttttcctaaggaacatccagagttggtgtcaatttagtcactttcagggttttttgacagaggggaaggctccgggattaatcttttcwctttaataacccagcccttcttttaaaatcgtcttcccccgctttcaccttcttccttcaaaatcctaaatcttgagcgcccagaggatagccctgaaag

SEQ ID NO: 375060 - DNA, 201 bp, Homo sapiens
ctttggagacaaaacaaggtacttccttcagcatccccctacgtcccttcccactttttccgggggcgcggcgggtctcgggtgctgggtggtggcgcccyggtggcaccagtgggacgatgtatcattgaaaattgactgtataacttttgttgttgttgttattctttgctctcttgcagatgtattaataagggtctt

SEQ ID NO: 375061 - DNA, 201 bp, Homo sapiens
aaccaaatgtttaaggtaggtaaagcaaactgagtgttaagtttataagaatcattttgataaaaattctaaaaatattttaaagctttttttttctttctttctttttttttttttcgagacggagtattgctctgttacccaggctggagtgcagtggcgcaatctcggctcattgcaagccgagtttacgccattctc

SEQ ID NO: 375062 - DNA, 201 bp, Homo sapiens
caaatgtttaaggtaggtaaagcaaactgagtgttaagtttataagaatcattttgataaaaattctaaaaatattttaaagctttttttttctttctttytttttttttttttcgagacggagtattgctctgttacccaggctggagtgcagtggcgcaatctcggctcattgcaagccgagtttacgccattctcctg

SEQ ID NO: 375063 - DNA, 201 bp, Homo sapiens
aaatttagagttagtagggatcatataatctcatttttcttttctttttttttttttgagatggagtctcgctctgtcgcccaggctggagtgcagtggcrtgatctcggctcaccacaagctccgcttcccgggttcaggccattctcttgcctcagcctcccgagtagctgggactacaggcgcccaccaccatgcctg

SEQ ID NO: 375064 - DNA, 201 bp, Homo sapiens
caccacaagctccgcttcccgggttcaggccattctcttgcctcagcctcccgagtagctgggactacaggcgcccaccaccatgcctggctaatgttttrtatttttttttattggagatggagtttcaccttgttggccaggatggtcttgatctcctgacttggtgatccccccgcctcggcctcccaaagtgctggg

SEQ ID NO: 375065 - DNA, 201 bp, Homo sapiens
ccgggttcaggccattctcttgcctcagcctcccgagtagctgggactacaggcgcccaccaccatgcctggctaatgttttgtatttttttttattggaratggagtttcaccttgttggccaggatggtcttgatctcctgacttggtgatccccccgcctcggcctcccaaagtgctgggattacaggcgtgagccac

SEQ ID NO: 375066 - DNA, 201 bp, Homo sapiens
aatggacttgctatatggacatttttgaggtccaaggattggtatcaccctacttttaggatttacccaagtaagtacccatggataagaactaaaacagccaatttaatccataaattacctatagcagagtgttaaagcgttgttttatcagatattaaaactgtgctccagtttagaattatgaagtattgctatggt

SEQ ID NO: 375067 - DNA, 201 bp, Homo sapiens
gttaaagcgttgttttatcagatattaaaactgtgctccagtttagaattatgaagtattgctatggtgttcatcataggtaattattgtattttttttamatttgttgtcaaacagttttaacttttatattttgggaaaaaatagtccccaaatctataacttatttttgacaaaaaaaaagtctctaagtagtactga

SEQ ID NO: 375068 - DNA, 201 bp, Homo sapiens
ctcgaacacatttattatacttcttttcagtacattgctttagacttataaaatgtgacctgttttcagagaaacatagatatgttggaatttagttagattttttttttatggacactatccttaagaatctttgttccctgagtccttagaaatagtgtttttaccttaagaaaacagtgtgtggtccttttatgacct

SEQ ID NO: 375069 - DNA, 201 bp, Homo sapiens
atgctgcaccaggcactgcaagtatacaagcataaattagtcacggtcagttgtgagacttacacatccaaggggtgatgaacagtaatcgctaaaacacaatgttgattttctgtaataaacacaccagcatttagatattcaaaagactgttgtaccttttgatgcttcaggaggcttcatttatttattcatttactt

SEQ ID NO: 375070 - DNA, 201 bp, Homo sapiens
cctttctacagaaagtatcctcaggatatacattcttccatattatgactgccggtgaggatgatttaaattaaataaaaaattaaaaaaacacagctatrttgagatataattcgcgtactgacatgatttgtctgtgtccccacccaaaatctcaccttaaattataatccccataatccctacgtatcaagggcggga

SEQ ID NO: 375071 - DNA, 201 bp, Homo sapiens
gtttcattctccaaaaatgaaagactaggcttccttactctttttatatatatatatactcatgtgctcaagccacatttctagctctttctagattttartatctttctctttagactacagaatttcctttcgcacttcttatagtacatacagtgctgacaaatactctcagttttagtttatctgaaaatgccttta

SEQ ID NO: 375072 - DNA, 201 bp, Homo sapiens
ctcgccctggccctggctgggcggggaagctggggtgagggacgagtccacgggacagcccaaaggcaacatgacggaaccttgccaaagtgagtgcggtygccttttccccccttccagtctcctgcttgtcccgcgcgcctcctttcactcgcttttccgccgaaggctgtgccgccaaaagtagagctctgcagaggg

SEQ ID NO: 375073 - DNA, 201 bp, Homo sapiens
cactgcaaaattaaaatatttttataactctcactactgctttaactcaagacattcctgcactcaaagattaactctcgttccactcttagtgacttttyatgtccagagttgaattttttttaatttttaatttttgcaagaatggtgaaaagagggccatggtattagaaaaggatcataaaaagacttatgatataa

SEQ ID NO: 375074 - DNA, 201 bp, Homo sapiens
ccccagaagtcggcttggcacacagcgcaccccagcggccgcgcggcctccttccagccgccgccacttggcttccggagagctcgccgggcgctgccgcygccgccgccgccgccgcctcctgggaaccaggggactgaagagcctgcgagagcggaacactgccggaccccgggtgggggggcgcagcagctgcgcctg

SEQ ID NO: 375075 - DNA, 201 bp, Homo sapiens
tagattatttggggaggagaggataaggggtagaaagcaggactttatgaaataatgcaaatttcttatttctctgaaatttctctgaattctctgaattmtctgaaatttctctgaattcctcaagaattttctctgaaaatttcttactgatatgaactagagattatatccaataatgtctttcaggctaggctgaac

SEQ ID NO: 375076 - DNA, 201 bp, Homo sapiens
ccagttgatctagatctattttagtgttaaagaattggctagttacatgtttttgaaaacttagaaattggccaggcatggtggctcacacctgtaatccyagcacttggggaagtcgaggcaggtggatcatgaggtcaggagatcgagaccatcctggctaacaaggtgaaaccccgtctctactaaaaatacaaaaaa

SEQ ID NO: 375077 - DNA, 201 bp, Homo sapiens
tgtaatcccagctactcaggaggctgaggcaggggaattgcgtgaaccagggaggtggaggttgcagtgagccgagatcttgccactgcatgccagcctgaaaaaaaaaaaaaaaaaggaaaagttacaaattgttcactgcatttattccccacagtattctttcttgtagttttgttttagaaacaaaagtgctgcgca

SEQ ID NO: 375078 - DNA, 201 bp, Homo sapiens
gggaaaagaggaagtagagcatgaaaaagggaacactaaggaaaaaagagaagatgtttgcctctttgtatggtggcaaactattgaggtattaaaagacttttttttttttttttgagacagagtttcactcttgtcgcccaggctggagtgcagtggcatgatctcagctcactgcaacccccacctcccgggttcaag

SEQ ID NO: 375079 - DNA, 201 bp, Homo sapiens
cttgtggaaataccaagagaattagaattagaaatatagccagaagatgtaactgaattgccgcaatctcatgataaaacttggacagatgaactgttgcytcttatagatgagcaaagaaagtggtttcttgagatggactctatccctgctgtaaatgctgtgaatattgttgaaagacagcaaaggatttagaatatt

SEQ ID NO: 375080 - DNA, 201 bp, Homo sapiens
acttggcacatgggcctccactttcacataccttcagcaattacatattcatttgcttttaaaatgttttaaaattcacgtacagtgaaactcacagatcttttttttttttattatactttaagttttagggtacatgtgcacaacatgcaggttagttacatatgtatacatgtgccatgttggtgtgctgcacccagt

SEQ ID NO: 375081 - DNA, 201 bp, Homo sapiens
gtatacatgtgccatgttggtgtgctgcacccagtaactcatcatttaacattaggtatatctccaaatgctatccctccccactccccccaccccacaasaggccccagagtgtgatgttccccttcctgtgtccatgtgttctcattgttcaattcccacctatgagtgagaacatgcagtgtttggtttttttgtcct

SEQ ID NO: 375082 - DNA, 201 bp, Homo sapiens
atgtgttctcattgttcaattcccacctatgagtgagaacatgcagtgtttggtttttttgtccttgtgatagtttgctgagaatgatggtttccagcttyatccatgtccctacaaaggacatgaactcatcattttgtatggctgcatagtattccatggtgtatatgtgccacattttcttaatccagtctatcattg

SEQ ID NO: 375083 - DNA, 201 bp, Homo sapiens
acatgcagtgtttggtttttttgtccttgtgatagtttgctgagaatgatggtttccagctttatccatgtccctacaaaggacatgaactcatcattttktatggctgcatagtattccatggtgtatatgtgccacattttcttaatccagtctatcattgttggacatttgggttggttccaagtctttgcttttgtg

SEQ ID NO: 375084 - DNA, 201 bp, Homo sapiens
agcagcatgatttataatcctttgggtatatacccagtaatgggattgctgggtcaaatggtatttctagttctagattcctgaggaatcgccacactgamttccacaatgattgaactagtttacagtcccaccaacagtgtaaaagtgttcctatttctccacatcctctccagcacctgttgtttcctgactttttaa

SEQ ID NO: 375085 - DNA, 201 bp, Homo sapiens
attatagtcttcatgggaaactagttacagtcagagctgcaattctacattctttcattaattcggaaaacatttttttagttcctactatatgctaggcrttttgccagctgaagtggagctgaaaaaaataaataaaactctaagcccaagatactgacagtctagaaagagagagagaaataaaatttaccatgatac

SEQ ID NO: 375086 - DNA, 201 bp, Homo sapiens
tacacacggacataaagatggaaataatagacactggggactccaaaagggggaaaggtgggaaaagaacaaggggtgaagaacaacctactgggtacaaygttcactgtttgggtaatgggtatactagaagcccagtccccaccaatacacaatatacatatataccagacatgcacatataccccctaaatctaaaat

SEQ ID NO: 375087 - DNA, 201 bp, Homo sapiens
aacagtaggtacacacggacataaagatggaaataatagacactggggactccaaaagggggaaaggtgggaaaagaacaaggggtgaagaacaacctacygggtacaatgttcactgtttgggtaatgggtatactagaagcccagtccccaccaatacacaatatacatatataccagacatgcacatataccccctaa

SEQ ID NO: 375088 - DNA, 201 bp, Homo sapiens
cccaaaagcaaagtagtgctatctcagatactcataggaaacttaaggggtttgagaacctggctgaaatttaatttttcttccctctacttcaaaccacrtaaaggcctccgttggtccagttaatagcctgatctagctaaaacagttaacaaagtgctgacagggtaaatggtccaaggtcagaggagtggaggttcc

SEQ ID NO: 375089 - DNA, 201 bp, Homo sapiens
atgttttttgaaagtagtcaggatatgaaaatatattctaatgttttctgagtcctagctctttaaacatgcatctgtaaaaatgacactgtatggcagtrtttcttaagcttatttgatcgtagaccactttaaaggatgtaatgtcactgtgggaaaccaagagaggtgtctgtgaaacagaataatactcagattgat

SEQ ID NO: 375090 - DNA, 201 bp, Homo sapiens
cctgtgaggacataacatccatttgtgctgtgcatagtgccagtaaaatagaaaacagaaaggcttttttgcgcttttacagaaatagcgtggagtgcccrtatctgagagtacagttagccagcaggtaggcaaaagtgaatggacattctgatatggaagctaatgcttttaggggtgctgcctctcacatggagtctg

SEQ ID NO: 375091 - DNA, 201 bp, Homo sapiens
ttgtagttaaacagtaataaaaatgtactgataaatggcatattaaggaaactgatcttttttcctttcttcaacaaaatactttcagaagtgaacatccmcttgcccagctttactgccattcaatcatggaacaccatcattttgaccagtgcctgatgattcttaatagtccagtaagtacctaatttattgttgtgg

SEQ ID NO: 375092 - DNA, 201 bp, Homo sapiens
tggctgcataaatgtcttcttttgagaagtgtctgttcatatccttcacccactttttgatggggttgtttgtttttttcttgtaaatttgtttgagttcwttgtagattctggatattagccctttgtcagataagtagattgcaaaaattgtctcccattttgtaggttgcctgttcactctgatagtagtttcttttg

SEQ ID NO: 375093 - DNA, 201 bp, Homo sapiens
tttgtttgagttcattgtagattctggatattagccctttgtcagataagtagattgcaaaaattgtctcccattttgtaggttgcctgttcactctgatrgtagtttcttttgctgtgcagaagctctttagtttaattagatcccatttgtcaattttggcttttgttgtcattgcttttggtgttttagacatgaagt

SEQ ID NO: 375094 - DNA, 201 bp, Homo sapiens
tttggaatggtttcagaaggaatggtaccagctcctccttgtacctctggtagaatttggctgtgaatccatctggtcctggactttttttggttggtaarctattaattattgctcaatttcagagcctattattggtctattcagagattcaacttcttcctggtttagtcttgggagggggtatgtttcgaggaattt

SEQ ID NO: 375095 - DNA, 201 bp, Homo sapiens
gaatggtttcagaaggaatggtaccagctcctccttgtacctctggtagaatttggctgtgaatccatctggtcctggactttttttggttggtaagctaytaattattgctcaatttcagagcctattattggtctattcagagattcaacttcttcctggtttagtcttgggagggggtatgtttcgaggaatttatcc

SEQ ID NO: 375096 - DNA, 201 bp, Homo sapiens
tggtcctggactttttttggttggtaagctattaattattgctcaatttcagagcctattattggtctattcagagattcaacttcttcctggtttagtcktgggagggggtatgtttcgaggaatttatccatttcttctagattttctagtttatttgcgtagaggtgtttatagtagtctctgatggtagttttattt

SEQ ID NO: 375097 - DNA, 201 bp, Homo sapiens
tttctagtttatttgcgtagaggtgtttatagtagtctctgatggtagttttatttctctgggatcagtggtgatttcccctttatcattttttattgcayctatttgattcttctctcttttcttctttattagtcttgctagcagtctatcaattttgttgatcttttcaaaaaaccagctcctggattcattgatttt

SEQ ID NO: 375098 - DNA, 201 bp, Homo sapiens
ttctagtttatttgcgtagaggtgtttatagtagtctctgatggtagttttatttctctgggatcagtggtgatttcccctttatcattttttattgcatstatttgattcttctctcttttcttctttattagtcttgctagcagtctatcaattttgttgatcttttcaaaaaaccagctcctggattcattgattttt

SEQ ID NO: 375099 - DNA, 201 bp, Homo sapiens
tatagtagtctctgatggtagttttatttctctgggatcagtggtgatttcccctttatcattttttattgcatctatttgattcttctctcttttcttctttattagtcttgctagcagtctatcaattttgttgatcttttcaaaaaaccagctcctggattcattgattttttgacgggttttttgtgtctctgtttc

SEQ ID NO: 375100 - DNA, 201 bp, Homo sapiens
atagtagtctctgatggtagttttatttctctgggatcagtggtgatttcccctttatcattttttattgcatctatttgattcttctctcttttcttctttattagtcttgctagcagtctatcaattttgttgatcttttcaaaaaaccagctcctggattcattgattttttgacgggttttttgtgtctctgtttcc

SEQ ID NO: 375101 - DNA, 201 bp, Homo sapiens
gattttgaaaaactataagcacattataaaactttctatagtcggtgcctctttcttattgagatttaaagggattcacttatataatgttagaaaaaaargaaaaatcatataacatgttgatgctgttattaaagaaaatatactagtccagtcccactgtgcctgattcatttctttactgtctgcaagatttactga

SEQ ID NO: 375102 - DNA, 201 bp, Homo sapiens
tagtagtctctgatggtagttttatttctctgggatcagtggtgatttcccctttatcattttttattgcatctatttgattcttctctcttttcttctttattagtcttgctagcagtctatcaattttgttgatcttttcaaaaaaccagctcctggattcattgattttttgacgggttttttgtgtctctgtttcct

SEQ ID NO: 375103 - DNA, 201 bp, Homo sapiens
tctcactcataagtgggagccaaacagtaggtacacacggacataaagatggaaataatagacactggggactccaaaagggggaaaggtgggaaaagaayaaggggtgaagaacaacctactgggtacaatgttcactgtttgggtaatgggtatactagaagcccagtccccaccaatacacaatatacatatatacca

SEQ ID NO: 375104 - DNA, 201 bp, Homo sapiens
atgtggtttcttacctcttcatacttggagaatgggaagggagaataggtaagaaacatcaaaacattcttaacagactggtactgatatgagtgccttgcttttagactttccagacaagagtcagacacaagtctactctagccccacctccacccactaaatgataggagacatacacaggaactccacacccctctc

SEQ ID NO: 375105 - DNA, 201 bp, Homo sapiens
tttataaactgccatttccattgtttagagggttttaacttttttttattagtaactatttactgagggtatataataacacaaaagtaaataggagtttkgggtttcttttttccataacagggcaatgctgatgacagcttgtgatctttctgcaattacaaaaccctggcctattcaacaacgggtatgttacttagt

SEQ ID NO: 375106 - DNA, 201 bp, Homo sapiens
cagctgaaaatctagaactgcataagacatatagtgtataataaagataacatttccagtgactggaggaaagagagagataagtggataaccaaatggaraaagacaaaattggatctactctacagacttaaattccaactgaagcatagagttcaatgtagagaattaaatcatacaagcattaaataaaaatataga

SEQ ID NO: 375107 - DNA, 201 bp, Homo sapiens
ccctctacttcaaaccacgtaaaggcctccgttggtccagttaatagcctgatctagctaaaacagttaacaaagtgctgacagggtaaatggtccaaggkcagaggagtggaggttcctttaaattcccatcccacagggcccagcaaaacatctaggagaggagcctgtgcgctctgctcagtctgagggagccagggc

SEQ ID NO: 375108 - DNA, 201 bp, Homo sapiens
caccctggggtgaattttgactataaaataattttcatgttttcatgtattcttgaagagttaaggtgattgttaatgaaattgctgctctcaatagataygtacaaacatctatactcatccattaatgtctaagattccataggtaaagtgctttatcaagtgttaaataccctgtattccttgttgttaaatgcttat

SEQ ID NO: 375109 - DNA, 201 bp, Homo sapiens
gagccagatcactagaggagttcttagtgttgctcactgttccaggtacagtctaagggtgacaactcccttttctccacttagcctactttgaaccataytaattacccttatgtggctcagttttaaaaatgcagagagtggagttgccactgtacaaaaaggtttctagtgtctttcattaaaaaggaaaaaaaagcc

SEQ ID NO: 375110 - DNA, 201 bp, Homo sapiens
agcatgtttcatactaatctgagccaatctgctccagagaagaaccatgactacaaatgaagcataatgaaaaaaaaagttacaggtatgtgaatttttayggctgctattaaatttatttcaaagttaattctggatttttcagacctgggcacttagaccagtttttatctttgtcatttgtattaattatttctataa

SEQ ID NO: 375111 - DNA, 201 bp, Homo sapiens
atttgatgaatttgagatatgtatattcgatcatgtaaccaccactgcaatcaagatatagaacatttctgtcacttcaaatgttcccctgtaccccttcrtagttgatctcctcctcccttaacccacagctcctgacaagcactgatctgctttttgtcactattgttttgctttttctagaatgtcatttaaatggaa

SEQ ID NO: 375112 - DNA, 201 bp, Homo sapiens
agaaagtgaacattgatggtggtaaaggggcttaatgtgcaaccgtcttccagactctatgaaatccttttgtgctccaggaaaaataaaggataatagastattatagtcttcatgggaaactagttacagtcagagctgcaattctacattctttcattaattcggaaaacatttttttagttcctactatatgctagg

SEQ ID NO: 375113 - DNA, 201 bp, Homo sapiens
taagcccaagatactgacagtctagaaagagagagagaaataaaatttaccatgatacaccaactggtcatgttaagggaatagaaaaatgcctgcctcayctgtaagttagaggcctcctggaggtcattgggaaggaggtatagggatcaactggtgaggcgggagggaaggcaatggggagcagtgcagacctgtgga

SEQ ID NO: 375114 - DNA, 201 bp, Homo sapiens
gagtgtatattctgttgatttggggtggagagttctgtagatgtctattaggtccacctggtgcagagctgagttcaagtcctggatatccttgttaactytctgtctcgttcatctgtctaatgttgacagtagggtgttaaagtctcccattattaatgtgtgggagtctaagtctctttgtaggtctctaagggcttg

SEQ ID NO: 375115 - DNA, 201 bp, Homo sapiens
ttctgttgatttggggtggagagttctgtagatgtctattaggtccacctggtgcagagctgagttcaagtcctggatatccttgttaactctctgtctcrttcatctgtctaatgttgacagtagggtgttaaagtctcccattattaatgtgtgggagtctaagtctctttgtaggtctctaagggcttgctttatgaa

SEQ ID NO: 375116 - DNA, 201 bp, Homo sapiens
aactctctgtctcgttcatctgtctaatgttgacagtagggtgttaaagtctcccattattaatgtgtgggagtctaagtctctttgtaggtctctaaggrcttgctttatgaatctgggtgctcctgtattgggtacatatatttaggatagttagctcttcttgttgaattgatccctttaccattatgtaatggcctt

SEQ ID NO: 375117 - DNA, 201 bp, Homo sapiens
tagggtgttaaagtctcccattattaatgtgtgggagtctaagtctctttgtaggtctctaagggcttgctttatgaatctgggtgctcctgtattgggtrcatatatttaggatagttagctcttcttgttgaattgatccctttaccattatgtaatggccttctttgtctcttttgatctttgttggtttaaaatctg

SEQ ID NO: 375118 - DNA, 201 bp, Homo sapiens
gggtgttaaagtctcccattattaatgtgtgggagtctaagtctctttgtaggtctctaagggcttgctttatgaatctgggtgctcctgtattgggtacwtatatttaggatagttagctcttcttgttgaattgatccctttaccattatgtaatggccttctttgtctcttttgatctttgttggtttaaaatctgtt

SEQ ID NO: 375119 - DNA, 201 bp, Homo sapiens
gtctcttttgatctttgttggtttaaaatctgttttatcagagactacgattgcaacccctgcctttttttgttttccatttgcttggtagattttcctgygtccctttattttgagcctatgtatgtctctgcacttgagatgggtttcctgaatacagcacactgatgggtcttgactctttatccaatttgccagtct

SEQ ID NO: 375120 - DNA, 201 bp, Homo sapiens
tctcttttgatctttgttggtttaaaatctgttttatcagagactacgattgcaacccctgcctttttttgttttccatttgcttggtagattttcctgcrtccctttattttgagcctatgtatgtctctgcacttgagatgggtttcctgaatacagcacactgatgggtcttgactctttatccaatttgccagtctg

SEQ ID NO: 375121 - DNA, 201 bp, Homo sapiens
attctgggttgaaaattcttttctttaagaatgttgaatattggcccccactctcttcaggcttgtagagtttctgctgagagatcagctgttagtctgakgggcttccctttgtgggtaacccaacctttctctctggctgtccttaacattttttccttcattttaacttcggtgaatctgacaattatgtgtcttgga

SEQ ID NO: 375122 - DNA, 201 bp, Homo sapiens
atctgacaattatgtgtcttggagttgctcttctcgaggagtatctttgtggcgttctctgtatttcctgaatttgaatgttggcctgccttgctagattsgggaagttctcctgtataatatcctgcagagtgttttccaacttggttctattctccctgtcactttcaggtacaccagtcagacatagatttggtcttt

SEQ ID NO: 375123 - DNA, 201 bp, Homo sapiens
cagtggaaatctgtttcaaatatatatgtacacatatacacacaaatatatatttcaaatatagtttcaattaggtgcatatacacatgtacatatgtgtwcaaatagctttaaatatacagatacacatatatacatatatctatatatgtgtttattataaaatatataaatataatttttaatctaattttttcagtt

SEQ ID NO: 375124 - DNA, 201 bp, Homo sapiens
agatcgcaaggtcaggagtttgagactagcctaaccaacatggtgaaaccccgtctctactaaaaatacaaaaattagccggggcgtggtggcgggcacakgtaatcccagctactcaggaggctgaggcaggagaattgcttgaacccgggagccagaggttgcagtgagccgagagcgcatcattacactccagcctgg

SEQ ID NO: 375125 - DNA, 201 bp, Homo sapiens
tctgtttacttctctagcttatatttgtgggggttaatttgcttatttcgacatactaagcattcctaagagaaaagtgtaagacaatctttgggtgtgtktgttaaagtccacaaaaactatgataatcaacaataacatttgctcaatttctcggattgttataggggtttgccaacttgttaataagatggaggagaa

SEQ ID NO: 375126 - DNA, 201 bp, Homo sapiens
ccttaatgaatttttgaatcattgattgtcactaccacgtcatcttatcttactctgttaatttattttggctttatttaataaattactcgggtggaccwttaaataggtgaatacatggagagataagctgctcatctgtgtgttgcagtagaattccaaggcataaataagtattctaatgttatatcgcttaagttt

SEQ ID NO: 375127 - DNA, 201 bp, Homo sapiens
gccaaggttgagaaccactgccaatcatattagaagtacttgatgcttctacttgatttatattcaaattctgacatttattctccttcctccatctagtstgttaccaaaccccattgatttttttcattagaatgtttctgatttcaatatttttttctttttattcgtgctacctgcatgcaccatgattcagatttt

SEQ ID NO: 375128 - DNA, 201 bp, Homo sapiens
tcttcctctgcctttttgttctgtttgggcccttagtggattggatgatgcccacctacattggtgagggagaatctttttcactcagtctactgattcaratgctaatttcttctgggaacaccctcacagacacacgcggaaatgttttaccagttatctgggtatagcatttaaaaattctaatgccgaggtttcacc

SEQ ID NO: 375129 - DNA, 201 bp, Homo sapiens
gctcttcctctgcctttttgttctgtttgggcccttagtggattggatgatgcccacctacattggtgagggagaatctttttcactcagtctactgattsaaatgctaatttcttctgggaacaccctcacagacacacgcggaaatgttttaccagttatctgggtatagcatttaaaaattctaatgccgaggtttca

SEQ ID NO: 375130 - DNA, 201 bp, Homo sapiens
gagtatttgaagttctgttgtctcagaggagggagaagatggatgtcccagcttccgaagagagagcaatatatgctcttcctctgcctttttgttctgtytgggcccttagtggattggatgatgcccacctacattggtgagggagaatctttttcactcagtctactgattcaaatgctaatttcttctgggaacacc

SEQ ID NO: 375131 - DNA, 201 bp, Homo sapiens
aaagctgaagttttttacccagttaattttctcactattttttcctcactgttagtttttattgcaattatttgttacaatatgatgatcttaaaagcggycagatttctccagagggttgtacaaagagtaaatttgaatatttacttgaaaagaaatgcatttgcaaatccaagtgaatgaactgttcctttgttctag

SEQ ID NO: 375132 - DNA, 201 bp, Homo sapiens
ggatccactactcagaccagtgattctcatgtagacccataaataccaatgaaaagattagttggtaaatgctacctgtacattgatgttcagtcacacayggtctcatgcatcagcccaccatcatgcaactaccttcaatgtgccacaccatgtatgtatgtatgtatgtatgtatgtatgtatttattttaagccaga

SEQ ID NO: 375133 - DNA, 201 bp, Homo sapiens
gtacaccaaatattattatattcactgaataataacaaatattattttattttaaactttacctagtctttgtttacttcagaagcacttcacaactttakatatttttatcccctaccatgaaataaatgataaactgaaacctatagatcttattatgccatgcacttaaaatacctgaaatcattctcagcatcaaat

SEQ ID NO: 375134 - DNA, 201 bp, Homo sapiens
tacttaattggtttttagagcattttgaggttaagacaaaataatatatattaatagtaaacttcagtttattaaaaataattgcagaataaggattatcraattaccaagaatttgaaaaatacctgtaaccacaatgcctttctaagctttacaggccacatgggtctctcctttgaacccttatgaaacatacttttc

SEQ ID NO: 375135 - DNA, 201 bp, Homo sapiens
tcatggtcctaagtgtctccagccctgagaattcttcacttatatgtgttttatttaatctgcctaccatcttcaaagttttgacaatgtattttctgttktgcatttgataatgatttaattcttgtactattgtttaaaacagctagtgtccttgatttgcactgctcccagggtgatgcctcttagcctgtggatttg

SEQ ID NO: 375136 - DNA, 201 bp, Homo sapiens
ctgtgggaaaccaagagaggtgtctgtgaaacagaataatactcagattgatgctgagaattttttttaaagtctcataaagttaattataacaaatgacytatatttagttcacttttaaaactttgtaacagaaaatgatataaactgatataaatttgaaaaattctatagttttattactgataagaaaacatattc

SEQ ID NO: 375137 - DNA, 201 bp, Homo sapiens
catatgtcttaaggatttacattgtcaaaacatctctccttctcccaagtcaattagagtgcaaaactcagactcatgtcctgtttctactccaggacagwcactccatgtgaaccatgatttctagagagaaaacttagagggtcttagggaagggtcaaattgccacttatgtggccttgaccatgtagctattattcc

SEQ ID NO: 375138 - DNA, 201 bp, Homo sapiens
tgtaactgtgcccctgggaacacagtttgggaactgctgtgtctatgcttgttcaatgtttcaggcattgtcttaaaaattccactctgtggaagaaaacmagccttataatttgtcaagtcatctgtgttgtttcctttttaaaattttctgttatttttattttgatataattttaaactcacagaaaagttgcaagac

SEQ ID NO: 375139 - DNA, 201 bp, Homo sapiens
tatcctcaggatatacattcttccatattatgactgccggtgaggatgatttaaattaaataaaaaattaaaaaaacacagctatattgagatataattcrcgtactgacatgatttgtctgtgtccccacccaaaatctcaccttaaattataatccccataatccctacgtatcaagggcgggaccaggtggaggtaat

SEQ ID NO: 375140 - DNA, 201 bp, Homo sapiens
atttcatcagttgtcccatcctattaataagctttagagttattttcccccaatccaagatagtattcaggatcccatattgcacatagttgtaatgtctstttagtctcccctccatctgaaacagtttctcagcatttctttatctttttaaatttagacattgttaaagggtacaggcctgttattttgtagaatgtc

SEQ ID NO: 375141 - DNA, 201 bp, Homo sapiens
tattaaggatattttaaaatcgtggcccccaaaacagctttgtaccggcaaagggattcagcctgaattatgccctgattaagcttctctttctagatagygtgaacaatttctccaacagtcaggattgggggaactgatgagaatgcaacagaatcactaggaagaagtgagtaggatggccctttctacagaaagtat

SEQ ID NO: 375142 - DNA, 201 bp, Homo sapiens
attccgtgcacttaggaagacaatgttcagcttttagttattaaggatattttaaaatcgtggcccccaaaacagctttgtaccggcaaagggattcagcytgaattatgccctgattaagcttctctttctagatagcgtgaacaatttctccaacagtcaggattgggggaactgatgagaatgcaacagaatcactag

SEQ ID NO: 375143 - DNA, 201 bp, Homo sapiens
gatgtaactttctgagattcagtttcctcatctgtaaaatgagaatagtcacatctacctcacagaataaattgagaagactggagatcatgtgtctaccraagtatttagcacaatgcctatcccacagtgggcacatggtagaagtttgttattatatactcagagacagaagtgataaggactttaacaacactttgt

SEQ ID NO: 375144 - DNA, 201 bp, Homo sapiens
cagtggagatcttctgaggctgagagagagggatagctatgatttgtagtctgtcctttcctcctttgcttttagtttccatgctgagcatcccctgaacyggggatggggaaatgtattgggattgatgtatgacctcagtaaatgtctggggcagctgcttattgaagaagaaattgctcactgtggcaatgatcagtt

SEQ ID NO: 375145 - DNA, 201 bp, Homo sapiens
gctgtgggtttaaaatttttttgtcaaacattttctatcacagttggatacaaaggaccaactatattttcctggtctaatagtctcttgacagaacttgttttttttttaatatttctttatttattggtacaaatttacagggtatatgtgaaactttgttacatgtatataatgcatagtgatcaaatgagggtattt

SEQ ID NO: 375146 - DNA, 201 bp, Homo sapiens
tccctacattaagaattatttttgccctaatgatcctcctgcattctttccatgattggccactaggtcctgtttcatttttagtaaaagagcatttagcygttttggaatattatatttaaaacccatataaaatgttcatattcttatatactttattggaactgtaatcaaaatgtgttgtttatatttaaaaactat

SEQ ID NO: 375147 - DNA, 201 bp, Homo sapiens
gaattgatttgaatttttaaggctctatcacattgtggataagatatgctgtctaaatatttatttcaatcaataattaatactattaattattattaattataataatattaattaataataattaatagtcaatcaataattaatataattagaaacacattaccctagtatagtttaatgaggatgatagatccatgt

SEQ ID NO: 375148 - DNA, 201 bp, Homo sapiens
aattgatttgaatttttaaggctctatcacattgtggataagatatgctgtctaaatatttatttcaatcaataattaatactattaattattattaattataataatattaattaataataattaatagtcaatcaataattaatataattagaaacacattaccctagtatagtttaatgaggatgatagatccatgtt

SEQ ID NO: 375149 - DNA, 201 bp, Homo sapiens
gtaggctctcattataggccatctccctggatgatctcacctactcgcatgccaggattaccatctgcattgttggtgcattccaaatctatatctccagyccagaactgagttgacatttatatccatttgggtatatttcaggcaccttaaaatgaacagatccaacattcagctagtcaggttcccctgcttcatccc

SEQ ID NO: 375150 - DNA, 201 bp, Homo sapiens
ttgatttgaatttttaaggctctatcacattgtggataagatatgctgtctaaatatttatttcaatcaataattaatactattaattattattaattataataatattaattaataataattaatagtcaatcaataattaatataattagaaacacattaccctagtatagtttaatgaggatgatagatccatgttaa

SEQ ID NO: 375151 - DNA, 201 bp, Homo sapiens
acctcctgaaaatagttaccatgggaatgtctgtgtgctgcttctaccaatggctacactgtcttcatggagaaatatattgtcattacagtgtgctgacttttcatggtcaggaatactggtgacctagttgctatgaacaggcagaccagactcctcattctggatgggttgggtataaaaatttcttcttactagaaa

SEQ ID NO: 375152 - DNA, 201 bp, Homo sapiens
cctcctgaaaatagttaccatgggaatgtctgtgtgctgcttctaccaatggctacactgtcttcatggagaaatatattgtcattacagtgtgctgacttttcatggtcaggaatactggtgacctagttgctatgaacaggcagaccagactcctcattctggatgggttgggtataaaaatttcttcttactagaaat

SEQ ID NO: 375153 - DNA, 201 bp, Homo sapiens
ctcctgaaaatagttaccatgggaatgtctgtgtgctgcttctaccaatggctacactgtcttcatggagaaatatattgtcattacagtgtgctgacttttcatggtcaggaatactggtgacctagttgctatgaacaggcagaccagactcctcattctggatgggttgggtataaaaatttcttcttactagaaatt

SEQ ID NO: 375154 - DNA, 201 bp, Homo sapiens
tcctgaaaatagttaccatgggaatgtctgtgtgctgcttctaccaatggctacactgtcttcatggagaaatatattgtcattacagtgtgctgacttttcatggtcaggaatactggtgacctagttgctatgaacaggcagaccagactcctcattctggatgggttgggtataaaaatttcttcttactagaaattg

SEQ ID NO: 375155 - DNA, 201 bp, Homo sapiens
ttgatactgcattattattcacttttccttgatacataggattttttttaatgttgcataagtggttcttggctgtgaaaacttgttacgagacttataayctaagtccaagaaaccagcttttagcagccactttggattgtctttgtttcttagagttataattttgaaattgttccattccctttgatgaaaatgtgc

SEQ ID NO: 375156 - DNA, 201 bp, Homo sapiens
tatatggtctagtacagattgtttttctacaacatgtgactgtttaatgtgaattatatcatgtgtgattgggaggtagaagaatggtatcagtatactayagacgttctatcatttcatacacgacttctctggggtaagaggtgccagaattatagaagttgaattctgaccttcagcaataaaggaaaaagccctccc

SEQ ID NO: 375157 - DNA, 201 bp, Homo sapiens
gtgatttgtacagtacacttacctaccacattgcttttgtgcttcttcaaatttgtaatacctctttattagaaagtcagtcaattcataaggccagtgakgttgttttcctttaaattactcattggatatttttaaatttattttttaattgacaagaattttatgtatttaaggtgtacagcatgatgctttgatgta

SEQ ID NO: 375158 - DNA, 201 bp, Homo sapiens
ctgtttctggaatatttctttttgctgtagttgtttgttttctttttcctttagtccctaagaataggttgttcatttgtggattaataggaaagagagcrtgcactatcacttgtataggtcaattataatctacatatgatatccgaagttatgttttggggcaaagtagaataataaaaggtattcagtacttaattt

SEQ ID NO: 375159 - DNA, 201 bp, Homo sapiens
gagaggaacctatttgtaggggattacaagagctcaggttttattctcagttcaatgaaaagccaagtagggtagctaagatgttgacatactttgctgaraatttactgtggctgctgtgtggagaatgggattgcaagggggtaagtataggatcagagagattaattaggggactatggcaacaatccaactgagaga

SEQ ID NO: 375160 - DNA, 201 bp, Homo sapiens
atgtgtgggaatgaggggagtcagggaatcactctcaggatttccttgtaacatgagtctctctccctctgtaaggaattcacattcatggttgtagttaytcttaggagaagtaaaaacacatagaaaaaacacaaaaacatctgccagatatctactgttatacatctagaagtaactgcatgtgcctacttaattggt

SEQ ID NO: 375161 - DNA, 201 bp, Homo sapiens
gtgtgtgtgtgtgtgtgtatgtttaacttctggtttctcagtaaggaaaggagatctgtttgacccaaaattctgatgtgcatcaaaatcgttctcttggcaagtgtacaaaaatccaattagcttccaaaggacaaattgtctttggggactcaactgatctaaaattcgtgaccgagtctggaagaaaatagtactcta

SEQ ID NO: 375162 - DNA, 201 bp, Homo sapiens
tagaaaatactttcctgcatttgagcaatcataagtttccaactcctagctgagatctttgacgcatgtgtgggaatgaggggagtcagggaatcactctyaggatttccttgtaacatgagtctctctccctctgtaaggaattcacattcatggttgtagttactcttaggagaagtaaaaacacatagaaaaaacaca

SEQ ID NO: 375163 - DNA, 201 bp, Homo sapiens
tacattttagaccatagcatatgtcttatataagaattttaatttcaatttgcaggtgatttgtatttgcatacagactgaagtattttttaaaaatcagyggagtatagatattagtcttaagggcaaaggcccacttcatttggccatatagattgtgcactgcagaactccaaggaatgctcaaagggaaagatgtgt

SEQ ID NO: 375164 - DNA, 201 bp, Homo sapiens
gggaggtaccatgtacttttaaacaaacaacttttaaacaaggccatgaactcactcatcatgaaggggatggtgtgaagccattcatgagggatctgccsccataatccaattacctctcactaagccccaccttcaacactggggattacatttcaacatgagattttgaggggacatccaaactacatcaggcactaa

SEQ ID NO: 375165 - DNA, 201 bp, Homo sapiens
gggactgaccgaggaacactctttctcacaaaggaccagccgactccaacagggtcagtcctttctatatatgtttcactaactgccttgaaattattcarttgatgtaacatggagatttcttatctagttgaaattagagaaaatcagtgtttgggatataataacatttccctcaatctctcttaagtacataactaa

SEQ ID NO: 375166 - DNA, 201 bp, Homo sapiens
atatcaaagagagtttatagatcttacttaaaagtctctcagtaagattagtctcccagtaagattcatccatcaccttcctgacagactctattcagatrtgaaaaaatggtgtaagaagctgcagtatgcttggggtgaacacattcaatcttaggcacacagaaatcctccgcttggaatatggcaactcagtgggta

SEQ ID NO: 375167 - DNA, 201 bp, Homo sapiens
aaaacctacccagtgccctaccctgccaaaaatacccttcttagggatgtcttgtgttttatatcaatttaattagcatggtacttaacatggtaggctgyggagtcaaattgctcaagttagaattttggccccatccctaactaacaatatgaccttcagcaagttacctctctgagtgtcagttttcttgtctgtaag

SEQ ID NO: 375168 - DNA, 201 bp, Homo sapiens
agtaatgagagagggaatgtaagtacagatatcaaagacattttaaaagatacttgatattacagtgtagcaaataggaattaacatttggtgaaatgggraatttctataaaaattggtaataaccaatactaactcaagaggattttagaattgttcatgggagtaactgagaaagaatttgttatttaaaaaaaaaaa

SEQ ID NO: 375169 - DNA, 201 bp, Homo sapiens
aacctacccagtgccctaccctgccaaaaatacccttcttagggatgtcttgtgttttatatcaatttaattagcatggtacttaacatggtaggctgtgragtcaaattgctcaagttagaattttggccccatccctaactaacaatatgaccttcagcaagttacctctctgagtgtcagttttcttgtctgtaagat

SEQ ID NO: 375170 - DNA, 201 bp, Homo sapiens
agctagaaaatactttcctgcatttgagcaatcataagtttccaactcctagctgagatctttgacgcatgtgtgggaatgaggggagtcagggaatcacwctcaggatttccttgtaacatgagtctctctccctctgtaaggaattcacattcatggttgtagttactcttaggagaagtaaaaacacatagaaaaaac

SEQ ID NO: 375171 - DNA, 201 bp, Homo sapiens; identical to SEQ ID NO: 80913

SEQ ID NO: 375172 - DNA, 201 bp, Homo sapiens
gttacaagagttttctttaaacatagggagtataactttttgttttccaaaacaagcaatggaatctaaatctgggtttttcactgttgaagaaaacagcraacaagatttggcattctgaggagtctaattatctctccaagaagacttagcagaattccaagcttgaagttctagtctacatgtggtagttctctcctg

SEQ ID NO: 375173 - DNA, 201 bp, Homo sapiens
ctgatacctactctgtattatcaagaattgagagtgattttaatttctgaccatatggcttataaaatgctgtttgaaattggggtcaaataaggtcagtwcctgaattctctttgcattatttagcatacaatgagagaaaagcacatggatatgtaagtagatgtatgttgtaggtcttggtttggaatggcttggttg

SEQ ID NO: 375174 - DNA, 201 bp, Homo sapiens
ctatcaaatattttcttaatttttattttaacaaatttattcttaagagaattaaatctactaaatatttacgcctgtgtccagaaaaatttctccagttrtaacaaagtaattagtggataggaaattcagaatctttattttttccacttctgttgcttgagtgttgtatcccattataaatctaaccttctcttggct

SEQ ID NO: 375175 - DNA, 201 bp, Homo sapiens
gaaaatagttaccatgggaatgtctgtgtgctgcttctaccaatggctacactgtcttcatggagaaatatattgtcattacagtgtgctgacttttcatggtcaggaatactggtgacctagttgctatgaacaggcagaccagactcctcattctggatgggttgggtataaaaatttcttcttactagaaattgtata

SEQ ID NO: 375176 - DNA, 201 bp, Homo sapiens
ttatttgttgtttaaaagtacatcaacaacatgagcaaaggtgaaaatgtaagaaggaaagaaatgtacagatttcttccatccccagattaaactatcattttttttttctgttttcttccaattctgtataaatagagcatgggcataatgtgctgttctgctttttaatgtgatttaaaaaattttttttctttctta

SEQ ID NO: 375177 - DNA, 201 bp, Homo sapiens
aatagatcataacatctattgagagctgtagctggacatttttctttgtacttttttcacctttttaaatgtctattaataagttaccgtactatttttgaagtaatttagctattacctacataatgtcaatgacattccttagataatattgctagagtttttgccttatttgcaaaaattagtttctgtgtggcttga

SEQ ID NO: 375178 - DNA, 201 bp, Homo sapiens
ttgagtaggccttaatgaatttttgaatcattgattgtcactaccacgtcatcttatcttactctgttaatttattttggctttatttaataaattactcrggtggacctttaaataggtgaatacatggagagataagctgctcatctgtgtgttgcagtagaattccaaggcataaataagtattctaatgttatatcg

SEQ ID NO: 375179 - DNA, 201 bp, Homo sapiens
gtgaaatggggaatttctataaaaattggtaataaccaatactaactcaagaggattttagaattgttcatgggagtaactgagaaagaatttgttatttaaaaaaaaaaaaaaaaaactattgcccaaagaaattctaaccaaagcaattagaagggaggcaaggttgaaataagatgagacacagaaaaaaaggaggca

SEQ ID NO: 375180 - DNA, 201 bp, Homo sapiens
tctataaaaattggtaataaccaatactaactcaagaggattttagaattgttcatgggagtaactgagaaagaatttgttatttaaaaaaaaaaaaaaamaactattgcccaaagaaattctaaccaaagcaattagaagggaggcaaggttgaaataagatgagacacagaaaaaaaggaggcaaaataaaataactta

SEQ ID NO: 375181 - DNA, 201 bp, Homo sapiens
caaaattctctgagcagcagcatgacactcaaaaggaaatgctcattagaggattttggatttcagatttttaggtttgggatgctcaacttgtaattagaaatgattgcttttgaaaatggaaattaagttaataagcctgattttttaactctaagtaatggaacgtgtataggttaggaattgaaagctgggtcctaa

SEQ ID NO: 375182 - DNA, 201 bp, Homo sapiens
cagttatgtaaggaatgagaaaagtgtgaacagatcattgagagtctttttctgtcatcctcatcatagtttgccacatgctaaactctttgtgcccttaygtacatcttctcatgtaaactgcacaactgttttctcatgtaaacttcataactatgttatgaaggccgcactgaagcctggagaagcccagtgacttgc

SEQ ID NO: 375183 - DNA, 201 bp, Homo sapiens
acttccctgaaactgcaggtttgatttaggacaagataagtttgaggtgctggttgaacaaccaagtgaacatcttcagcaatcagaaaaggcaggactcragcgatgaggtggtggtgtttagaactagaggtggagatttgggagttaacatcccatggtagtgaaatcataggggtgcatcaattgggagagaatgca

SEQ ID NO: 375184 - DNA, 201 bp, Homo sapiens
gggtgcatcaattgggagagaatgcagagaggtagagagactgagaacagaactcctgtgaatatagccttagatggaaggaacaggaaaagaaaacagcyaagaaggtagagaagtggtagttaaacaaggaggaagatttaggatagtgcagtggcacagaaggcaaaataaagtagtttcaaaaagggaggagatctc

SEQ ID NO: 375185 - DNA, 201 bp, Homo sapiens
tgaaaatagttaccatgggaatgtctgtgtgctgcttctaccaatggctacactgtcttcatggagaaatatattgtcattacagtgtgctgacttttcatggtcaggaatactggtgacctagttgctatgaacaggcagaccagactcctcattctggatgggttgggtataaaaatttcttcttactagaaattgtat

SEQ ID NO: 375186 - DNA, 201 bp, Homo sapiens
ttttcatattaaattttatcacttggcaatatcactattcatttgtttataattgtacattgtcttccatggtatacattgcttgtattacttaaagtatycaggttttttcccagttagagaattgtaaattatgcttagttataatgagcacaaggaaataagactgtagggtgtaagggcagtaataggtggaagaaa

SEQ ID NO: 375187 - DNA, 201 bp, Homo sapiens
atttgtttataattgtacattgtcttccatggtatacattgcttgtattacttaaagtatccaggttttttcccagttagagaattgtaaattatgcttasttataatgagcacaaggaaataagactgtagggtgtaagggcagtaataggtggaagaaaactagaaaaaaatagaattaagatattatagtttagaatt

SEQ ID NO: 375188 - DNA, 201 bp, Homo sapiens
tgtcattttaagtggttcactattaggaagaaatctgaaatgaacattctggtggctaaatatttatggcactataattggtacataataatgccacaccraattatgaatctttattataatataatcctggataaaagcctatttaagtacattgtatgaaaccattccctagaaaaacgcaaaaactaagcagttccc

SEQ ID NO: 375189 - DNA, 201 bp, Homo sapiens
catgcctgtgatgccagcactttgggaggccaaggcagtcagatcccttgaggtcaggagttctagaccagcctggccaacatggtgaaaccctgtcgctrataaaaataaaaaatcagccaggcgtggtactgcacacctgactagggaggctgaggcaggagaatagcttaaacttgggaggtggaggttgcagtgagc

SEQ ID NO: 375190 - DNA, 201 bp, Homo sapiens
atcactattcatttgtttataattgtacattgtcttccatggtatacattgcttgtattacttaaagtatccaggttttttcccagttagagaattgtaarttatgcttagttataatgagcacaaggaaataagactgtagggtgtaagggcagtaataggtggaagaaaactagaaaaaaatagaattaagatattata

SEQ ID NO: 375191 - DNA, 201 bp, Homo sapiens
tccagtaaggcagtggtacccaacctttttggcaccagggactgattttgtggaagacaatttttccaggggttgggttggggggcgggcggaatggagayatagtcagtatgggaatagttttgggatgaaactgtttcacctcagatcatcaggcattagattctcataaggagcatgcaaccgagatccctcacatgt

SEQ ID NO: 375192 - DNA, 201 bp, Homo sapiens
tttctttttgtattagttgctgtctgaccttcctaggctaacccactgattcacctttctagagccagctttgtgttctttaaataaatgcacacaatggytcatgcctgtgatgccagcactttgggaggccaaggcagtcagatcccttgaggtcaggagttctagaccagcctggccaacatggtgaaaccctgtcgc

SEQ ID NO: 375193 - DNA, 201 bp, Homo sapiens
tggattcacttccctcttcgaaaaagataaattctaaaagccttataaactaattgtgtggtttcttctttaaaaacacccctcttgggcatgcggaaagyggagaaaagagataatggtcttccataaggtgtaatgtggcagctgtcaaggtggctttattcaaagacctggaattaaactgctctccattaagaagta

SEQ ID NO: 375194 - DNA, 201 bp, Homo sapiens
ctttgttcgtttctttttattcttttttctctaaacgtctcttctcacttcatttcattcatttgatcttccatcactgataccctttcttccagttgatygaatcggctactgaggcttgtgcattcatcacgtagttctcgtgccttggttttcagctccatccggtcctttaaggacttctctgcattggttattcta

SEQ ID NO: 375195 - DNA, 201 bp, Homo sapiens
aatttgtataattacaattaggaaaaagaggtgggactgtaaagtataaaacattgtgaaattacatagaaacatattctagagtgaatggtctaagatayatgtcattatccagatcttttcatatgtctcaatttcatttcttggtgctccactccttcctaatcagtgctttaactttcacataggagatgtggcaag

SEQ ID NO: 375196 - DNA, 201 bp, Homo sapiens
gggttacctggtcccctagcctgctctttcattggatatctgggtcagagtgcattttctcatctgttgctctgtcagggtctgtgggtcagtcccggcarccttcctttcttgttagaacagtaaaatatataccagggtttggttttataaaatagcttctcatttttgtcacggaggcagtgctgtttcagttcagtc

SEQ ID NO: 375197 - DNA, 201 bp, Homo sapiens
tatattgaataaataccaaggagcaatataacaaaatacctttatacaacactgaggctaattggaagaatttgacattttatgaaagaccaagttccatyactgccattcttttcacactactttaataaataactttctgaataaagagccttttcttttcttagcagttggctattaggaattgtttccagtttccgt

SEQ ID NO: 375198 - DNA, 201 bp, Homo sapiens
ctcatcttttacctttccctcataatcactcatggtgtgtgtgtgttccgtcattgtgtcctcaccaaaattatgtgatttagatgatgagatccttattrtcctcaactaaagaatgaaagaaactaagactcagaatatttaagaaacttgtcaaatgtcatataaccaaaccacaactcaggatgtttatccctttat

SEQ ID NO: 375199 - DNA, 201 bp, Homo sapiens
aagctactaacatacttccttctgttattccacttaaaaaatatgtatttcatttatgtatctatctttcccttcaggctgttagttcttggtgataatartaatagctgtcatttagtgattgcttaacatgaacttggtttatgtgttttgtctaatgattgaatcaatgaatgaatcaatgaatggattctggaaaac

SEQ ID NO: 375200 - DNA, 201 bp, Homo sapiens
gtggcaataggtgggggagggaacatcaattttcaatatctagtagcaataccattgaaatctttatgttcctatgatgttccaagcctttttgcactagygattccaataataagcactcaaaaaattatacactcatttttttggccaggcgtggtggctcacacctgtaatctcaacactttgggaggccaaggtgga

SEQ ID NO: 375201 - DNA, 201 bp, Homo sapiens
agtttgagtggcagatacaattgaagaactcagaagaatacatataccatcaaattgtttgtcagattgaatctttaacccaatgagctttgtttttttattttttttttgcattccatatttggttaatttgacattaaaaccatagtcctgtaagagcttaaccatatttgaattaaacactaatatctaaactaactg

SEQ ID NO: 375202 - DNA, 201 bp, Homo sapiens
atctggaactgtatatacatcctatgccagaaataccacatactttattccctgcttagtaaatttatttcctgctattagtaaaatgtacaatattttatcctacaatgtgataagtaaaaataataggtaattatgttttacttaaaatcacctttatcccaagcctttctaagttaaacagaaagttgaattctcttg

SEQ ID NO: 375203 - DNA, 201 bp, Homo sapiens
tctggaactgtatatacatcctatgccagaaataccacatactttattccctgcttagtaaatttatttcctgctattagtaaaatgtacaatattttatcctacaatgtgataagtaaaaataataggtaattatgttttacttaaaatcacctttatcccaagcctttctaagttaaacagaaagttgaattctcttgt

SEQ ID NO: 375204 - DNA, 201 bp, Homo sapiens
tttgagttaaaaggtgggcttttccccacctccacacttcccaaacttgagttaccgctccatctctgatgttggaggctggaataaacaactaagccctttatctaaacattttaaatccttctttcttcccctatttcggcccacacattagcctatggaattgacttaacagaatgcatattttctggtcagttttgg

SEQ ID NO: 375205 - DNA, 201 bp, Homo sapiens
ttgagttaaaaggtgggcttttccccacctccacacttcccaaacttgagttaccgctccatctctgatgttggaggctggaataaacaactaagccctttatctaaacattttaaatccttctttcttcccctatttcggcccacacattagcctatggaattgacttaacagaatgcatattttctggtcagttttggt

SEQ ID NO: 375206 - DNA, 201 bp, Homo sapiens
gtatcattgaaaattgactgtataacttttgttgttgttgttattctttgctctcttgcagatgtattaataagggtcttaaattgggccctttttaatcktgttttgttttgttttgttttgtttttttcctaaggaacatccagagttggtgtcaatttagtcactttcagggttttttgacagaggggaaggctccgg

SEQ ID NO: 375207 - DNA, 201 bp, Homo sapiens
tgagttaaaaggtgggcttttccccacctccacacttcccaaacttgagttaccgctccatctctgatgttggaggctggaataaacaactaagccctttatctaaacattttaaatccttctttcttcccctatttcggcccacacattagcctatggaattgacttaacagaatgcatattttctggtcagttttggtc

SEQ ID NO: 375208 - DNA, 201 bp, Homo sapiens
gattataaaaatgcaaaccactaaccccagtgtggttcacattttgtggtaaaaacttattgcatacgttttaactttacagctaaggatttttttttttwaaagtaggagctcacattactttgcttttcccctctttttacactttgtaagtgtaaaatgaatattgtatgtgattcaggaaacccatgaaacaaaata

SEQ ID NO: 375209 - DNA, 201 bp, Homo sapiens
ccaagattgctccactatactccagcctgggcaacagagtgagactccatctcaaaaaaaaaaaaaaaaagctataacttggagctttttagttatcacarcctgtttatgtccatttgaaggtgtcaattgaatgattcagaacatagtcggttggcataaaaattaatttgaggccaataaatcacatctggaaaactc

SEQ ID NO: 375210 - DNA, 201 bp, Homo sapiens
aacagactactattagaagaagatgccatttcagactttcatagccagagaggagaagtcaatgtctggcttcaaagcatcaaaggataggccgactctgwtgttatgggctaatgcagctggtgaatttaagcagaagccagtgctcacttaccattctaaaaatcctagggcccttaagaattatgctaattcaactca

SEQ ID NO: 375211 - DNA, 201 bp, Homo sapiens
ttaaatcaaaagctagaaatgaataagcttagtgaggaaggcatgttgaaagccaagataggccaaaaactaggattcttgggccagttagccaagttgtrgacacaaaggaaaagttattgaaggagactgtaagtgccactccaatgaatacatgagtgctaagaaagtcaaatagccttattgctgatacaaagtttg

SEQ ID NO: 375212 - DNA, 201 bp, Homo sapiens
ccaccaccacacctggctaattttttgtatttttagtagagatggggtttcactgtgttggccaggcaggtctcaaactcctgaccttgtgatccgcccayctcggcctcccaaattgctgggattacaggcgtgagccaccgcacccggccaagacttttaaaatattatgccacaaatactaacagttctacataagat

SEQ ID NO: 375213 - DNA, 201 bp, Homo sapiens
ttttttttttttttgagacagagtttcactcttgtcgcccaggctggagtgcagtggcatgatctcagctcactgcaacccccacctcccgggttcaagcrattctcctgcctcagcctcccgaatagctggaattacaggtgcccaccaccacacctggctaattttttgtatttttagtagagatggggtttcactgtg

SEQ ID NO: 375214 - DNA, 201 bp, Homo sapiens
actgcctttttacatagagtatggatctcagatacaagtaaagattcctctcagcccacttctgttttttggaatgagtttccttgaaataaaacataagrgttttcctctttttttctttttgtattagttgctgtctgaccttcctaggctaacccactgattcacctttctagagccagctttgtgttctttaaataa

SEQ ID NO: 375215 - DNA, 201 bp, Homo sapiens
caaagctcatcaaaagatgagcttttccagtgtggatattccatattctctgaagggaattccaactgcgtagtttttggagcagtgatgctattattagrttaagcatgtaactccccaaggctatcgctttgaagggaacagcactcattcagatgtttatgtcctggaatgcttgattccattccactctaacctcat

SEQ ID NO: 375216 - DNA, 201 bp, Homo sapiens
aaagactcttgggttcatcatattgtatcagtgttctttgtaatttgtttttttccgcttaagtattagaaaccacttttcattttaacaaatattcttaygtattatcatgattacatgaaatcgatgtaaccataatttacctacgtcccttggtgtaatatttgcagtgttcactattacaaacagcactgtgataaa

SEQ ID NO: 375217 - DNA, 201 bp, Homo sapiens
caattcatataactttgagcatgtttgcagaaaaagcaaaaatgtagtagtgtttataatataaaatatttatattgatttttcaccattttatacctttkcttttgaaattatctttaagctaagttgggccctctcagttgaaaattggcctcatttctgaccccaattgatggaatctagtgtaatcacttcattcac

SEQ ID NO: 375218 - DNA, 201 bp, Homo sapiens
taaatatataacatggcatataatacatattttgtatttttatattattatttatatctatttttgtctatgtgtctataagcttttcagattatttatawttgcttttgtaacttaatttcacagtattttttttcattcatcatgctggtatctgtatgttggttcatctctttggaggtttaagcaaactgtttactt

SEQ ID NO: 375219 - DNA, 201 bp, Homo sapiens
catctcaattcatataactttgagcatgtttgcagaaaaagcaaaaatgtagtagtgtttataatataaaatatttatattgatttttcaccattttatascttttcttttgaaattatctttaagctaagttgggccctctcagttgaaaattggcctcatttctgaccccaattgatggaatctagtgtaatcacttca

SEQ ID NO: 375220 - DNA, 201 bp, Homo sapiens
ccccaaactccattatattaggcatcctgttgagttccccttctgcttctgtttgcagaggtccaaactgaggttctccaacctttcttcttccaagctamactatttagccctatgcctgctacactagtgtcatcatagaacttttcttcattgctttcttagattccactatcttttggatcccctacttctttctca

SEQ ID NO: 375221 - DNA, 201 bp, Homo sapiens
ttatcttgtctgctttctttagacaatatctaaagataaaataagaattttattaggaagattcagctaaagtttttctctgcatctcaattcatataacwttgagcatgtttgcagaaaaagcaaaaatgtagtagtgtttataatataaaatatttatattgatttttcaccattttataccttttcttttgaaattat

SEQ ID NO: 375222 - DNA, 201 bp, Homo sapiens
gcaattctaaagaaactatttataagcactataattatgtaaatgttgttcatactacctttgttacagaacttttcatttttcctgatgtttctgaattkttttccttgaactctttgctctagtatagcctcatgttcttgtttcctcctctccccaaactccattatattaggcatcctgttgagttccccttctgct

SEQ ID NO: 375223 - DNA, 201 bp, Homo sapiens
gggacccaagaatttgcatttttaacaagttcccagatgctgatgctgctggtccaggaacttaactttgagaactgctgctctaatggaaacggatcccytctgccttcaaactcatcaggtcaaatattcaaacttttgagagtctgttgcctacacatgctttcgttgcaaaatagagcatcaacagggttcaactgc

SEQ ID NO: 375224 - DNA, 201 bp, Homo sapiens
aaattcttaaaatgttattctctgtctctactttcatagggtgcacattttaactggctaaatctaaaagaagtgattgttattaaagaagtgaggtgcawttaaatacaatagtagtattttcctaccttagcaaacacgtgtaggttgagtatcccttatccgaaatgggacaagaagtgttttggacttcagattttt

SEQ ID NO: 375225 - DNA, 201 bp, Homo sapiens
ttacagaaagcaaaaccaataaaaggcataataaagactcttgggttcatcatattgtatcagtgttctttgtaatttgtttttttccgcttaagtattasaaaccacttttcattttaacaaatattcttatgtattatcatgattacatgaaatcgatgtaaccataatttacctacgtcccttggtgtaatatttgca

SEQ ID NO: 375226 - DNA, 201 bp, Homo sapiens
  misc_feature (1)...(201): n = A,T,C or G
aagttacgcatcaggcccctttgtcactttatgtgaaggtaaatgagagcgagttagacgacatggaaagagtgctggactgggggtcggactcacagcantgtgttagcgccactcatcttcagccacacttatgggcacattactcacctctgtggagttgaacttaataacttttcagatctgttcaaaattcacatt

SEQ ID NO: 375227 - DNA, 201 bp, Homo sapiens
aaactcatcaggtcaaatattcaaacttttgagagtctgttgcctacacatgctttcgttgcaaaatagagcatcaacagggttcaactgcaggtagtagsaactactgtagctattttaagcagaaaagaatttaactaagtactttcaaatcattggaaagggtaggtaagtcatcccaggaataagtcctagaacaaa

SEQ ID NO: 375228 - DNA, 201 bp, Homo sapiens
tttagcttgagagtatattatgtaactttttaaagccaagttttcatttcaaatcattttctttctattgttttgcttgaattaacattgtctgcattccytaaggacacagcaactgatagcagagagtgaacagaatctgcagggaattaaaagaggaaaaaaacaattatttaaagtttattatgattatttcacata

SEQ ID NO: 375229 - DNA, 201 bp, Homo sapiens
  misc_feature (1)...(201): n = A,T,C or G
agtggctggaggaagttacgcatcaggcccctttgtcactttatgtgaaggtaaatgagagcgagttagacgacatggaaagagtgctggactgggggtcngactcacagcattgtgttagcgccactcatcttcagccacacttatgggcacattactcacctctgtggagttgaacttaataacttttcagatctgttc

SEQ ID NO: 375230 - DNA, 201 bp, Homo sapiens
atcacaaggactagtgaatgtttccctgatgcagctgagacataaaaaaagttaaagaattagctacgtgaaaacatgggaatatgcattctaggcagagragaaacaaagaggcctggaagagagccttctttttctctcttgtgagagagattattaattaaccttaaaaacagatgacaaatacatagacacttcccc

SEQ ID NO: 375231 - DNA, 201 bp, Homo sapiens
ttatttcagatagcagaacttgtagcaactgaattttttgatcaaggagacagagagagaaaagaactcaacatagaacccactgtaagtatgaaaccttrttggtaggaattattcaaattgttttttttttaattgtagactcctttttatggctctatgggatctttccttaggaccacaatttctcattttattttt

SEQ ID NO: 375232 - DNA, 201 bp, Homo sapiens
caccaaaattatgtgatttagatgatgagatccttattgtcctcaactaaagaatgaaagaaactaagactcagaatatttaagaaacttgtcaaatgtcrtataaccaaaccacaactcaggatgtttatccctttatgcctttgctttttctgcagaaagcaatattgactttaataatccattgacacagatgactac

SEQ ID NO: 375233 - DNA, 201 bp, Homo sapiens
tgaaaggaagagtcaatccgtggtggcaacttcattgttgtcttatgctaagaaatttccacaacagccccgtccgtcagcaaccaccaccctgatcattyggcagccatcaacatcaaagttaagacccttcaccagcaaaaagtttatagctagctaaagactaaggtgattgttaccatttttcagcaataaagtatt

SEQ ID NO: 375234 - DNA, 201 bp, Homo sapiens
agttaaaaggtgggcttttccccacctccacacttcccaaacttgagttaccgctccatctctgatgttggaggctggaataaacaactaagccctttatctaaacattttaaatccttctttcttcccctatttcggcccacacattagcctatggaattgacttaacagaatgcatattttctggtcagttttggtctt

SEQ ID NO: 375235 - DNA, 201 bp, Homo sapiens
gttaaattatatggatatctagctttcagtggctacatatgtggttagctagaccagtagaggcaacagcagtgatccagacacttagttcagctctagtraagaaggcattctctcaacccctttgataccaactttaatttttaaattctattcagcctatttagtgttttgatgcacaaaacttgctttttaccattt

SEQ ID NO: 375236 - DNA, 201 bp, Homo sapiens
attgtcagtataattttaggatgatgaaataaaaatgttaatgctagagaggatgttaacatcatgaagctgttgtgactaagaatatttcatattgaaavatcttcatgttctctgcatggcttctaaatctttagttattctcctataatgactgtaaccattgcctcttgctgatctctgaaacagattcttcattct

SEQ ID NO: 375237 - DNA, 201 bp, Homo sapiens
ttcatatatctaatacattttgttgcttagtagtaaaatttatagcatattctttcaatttcactttaaggtgcacaatgatttaaaataatatttgctgccacttacataataagttatatttcgttaattaaagaggactaatctggcaaaactacttcgttgctaattttcttccatatatgatatatatggcatatt

SEQ ID NO: 375238 - DNA, 201 bp, Homo sapiens
attgttttgcttgaattaacattgtctgcattccttaaggacacagcaactgatagcagagagtgaacagaatctgcagggaattaaaagaggaaaaaaacaattatttaaagtttattatgattatttcacataataattaagaattagcaatacttactataggtggacagattattaatttattgaggcatttcagct

SEQ ID NO: 375239 - DNA, 201 bp, Homo sapiens
aaaaaaaagaaagaaaaagaaaaagaaaacatcctgggaaaaagtcattgactgcagaatcttgctttcacacacacaccacaaagcagacttcaactttaaaaaaaaaaaaaaagttaaagcagtttcaaagatttttatttcttcctacatccctgtggtttcagtagaggaaaccaagaattttccagggatttttct

SEQ ID NO: 375240 - DNA, 201 bp, Homo sapiens
agtgtcaaggaggtcagagaattctgaggtcaaaaggtgaaatgaatcatcattatgaatatttatgtcattgaatatgattatagacaatgagaaggcaaaaaaaaaaaaggttgattgggagaagaaagcaatagtgatgatttgaagagaaatgatgaagtaaagaactaaatgggattgaaggttacaaagaggttg

SEQ ID NO: 375241 - DNA, 201 bp, Homo sapiens
taatcatcttctcccttttcctgtgtcagtaaatgaggtcagcatcccaaggcagaaagtttaacattcatactttttccctttatctccctcatcccctyatctccctcatcccactcctagtcaggagtcattaccagttcctatctgatctactcttaaacagctctcagatgtctgcttctcttcctttgggctgct

SEQ ID NO: 375242 - DNA, 201 bp, Homo sapiens
taataagaaaaaatgaaagttttaactattacattgaacatacacaatgcatgacatataatcttaaagcaattttacaatattgctaagtttactcagtkgggctaattctttcctgagccctggaaaaaaattcagggattcccatcacttttctggtcactattttataagtaaaagccctctagttactttaggttc

SEQ ID NO: 375243 - DNA, 201 bp, Homo sapiens
tactcctgggtagcagtccaaattttgaacatgatttaaagtttcaggttttctgttactgcactggtaggcttctcccattccctaccttgtgtttcttctaactccttcctctctccccaacctccatgtggtttcttacctcttcatacttggagaatgggaagggagaataggtaagaaacatcaaaacattcttaa

SEQ ID NO: 375244 - DNA, 201 bp, Homo sapiens
tagatgtatgtaacattaactgggctacatgtttttcacattggcaagacctactagattttctgtttgattctttctgccttcatgtgacaagctaatcytgtctgttttgatttgattttactagtgggttacttccagtgataagcttagctccaaaatatgagggcactgttcttgagcttcttctttactaactac

SEQ ID NO: 375245 - DNA, 201 bp, Homo sapiens
cttttggtcactgcttcctaaccatcttccttccaaccccccagcacagcccctgtgctttatactttccaaccacttcagaagtttggagctccattcarttctgtttcaaagcgttgctctcattgggtagcacctgccttctctaaagcaggaaaacgccctcaggcagaaagccagaatgttgaatggcaattactt

SEQ ID NO: 375246 - DNA, 201 bp, Homo sapiens
tctttcaatccttctgaatggatactttctgttgatttatcttcagagtcactgactcttcagctgttttcggtgggctgttaaatgtattaatgaacttsgtgttttacacactatacttttcagttctagaattttcatttgactattttaatagttttttctttccttgcagagattcctatctctgcaaagaagtta

SEQ ID NO: 375247 - DNA, 201 bp, Homo sapiens
ggcatatttatgtgatgtaagtattgatgatgttaaatttgataacttttttaaagtgatatctaccaggtttctccaatagtttttcccattgtaattartaagtatcatatgggcagatactttgagactgtgtaaatactgtgttcatcaacaacctattgaccagctttagcatccactgattttctaactccatca

SEQ ID NO: 375248 - DNA, 201 bp, Homo sapiens
ttgcaaatatggaaatacactagtatcactcaagaaatcccatggcctttaggaggtctgtgtcaggaactgggaacaaagatcagaaacatgtttaattrtaccacacaccttcgtagtgtatcttataaggaggcatatttatgtgatgtaagtattgatgatgttaaatttgataacttttttaaagtgatatctacc

SEQ ID NO: 375249 - DNA, 201 bp, Homo sapiens
agatattactcttgatttcatactttgtaagacaggtgtcttagcatcccctgttctctttatctctttttcccaactaccgctccttagccctgcttttyccatctggactttttcttttacaattgcccacattggtaatatatactgttctacaaccatgatgaacttttcctgggctttgtctaggttaattctaaa

SEQ ID NO: 375250 - DNA, 201 bp, Homo sapiens
tcactgctggagaacaagagaaatcaggtcagtctgattactaaagaaagtgcatagaaatactttttaaaaattgttacatttttatccaagtaatgtaygcagatgattaaaaatttagatagtacagattcagtttctcaatactttattttttctagtagtcatttgtatttcctattttccatgcttagttgttta

SEQ ID NO: 375251 - DNA, 201 bp, Homo sapiens
aattatgttttaatgtctgcctagtgttctcttgtataagtgtgccatgatgtatttagtcagccttctattggtgatattagtttgcttcttatctgctrtagcaaacgtacttactatatacagtaaatacccttgtatttcctttgtcacatgtgtaaaatctctggaacaaaggatacatacatttaaaatttgtta

SEQ ID NO: 375252 - DNA, 201 bp, Homo sapiens
aaatagatcataacatctattgagagctgtagctggacatttttctttgtacttttttcacctttttaaatgtctattaataagttaccgtactatttttraagtaatttagctattacctacataatgtcaatgacattccttagataatattgctagagtttttgccttatttgcaaaaattagtttctgtgtggcttg

SEQ ID NO: 375253 - DNA, 201 bp, Homo sapiens
cttgagagtatattatgtaactttttaaagccaagttttcatttcaaatcattttctttctattgttttgcttgaattaacattgtctgcattccttaagkacacagcaactgatagcagagagtgaacagaatctgcagggaattaaaagaggaaaaaaacaattatttaaagtttattatgattatttcacataataat

SEQ ID NO: 375254 - DNA, 201 bp, Homo sapiens
ataaaagaaaactgccaagggtgccttacaatatgataccaagtaaatgttataaaattttatttcttagggaggtcaaggggaaaactatattataaatrttatgctgtttaaaatgcttttttataagtataaagatttactacaagctgtctttggcctttgaaaatgtgaaattaaattccagaaggaatgcattat

SEQ ID NO: 375255 - DNA, 201 bp, Homo sapiens
ttgagagtatattatgtaactttttaaagccaagttttcatttcaaatcattttctttctattgttttgcttgaattaacattgtctgcattccttaaggwcacagcaactgatagcagagagtgaacagaatctgcagggaattaaaagaggaaaaaaacaattatttaaagtttattatgattatttcacataataatt

SEQ ID NO: 375256 - DNA, 201 bp, Homo sapiens
agtctgttatttatttcagatagcagaacttgtagcaactgaattttttgatcaaggagacagagagagaaaagaactcaacatagaacccactgtaagtrtgaaaccttgttggtaggaattattcaaattgttttttttttaattgtagactcctttttatggctctatgggatctttccttaggaccacaatttctca

SEQ ID NO: 375257 - DNA, 201 bp, Homo sapiens
tgtctgtttttaggattctttttctagtgtgtttcacatggagtgtgaggaattagaaaaatcatctgatacattaacaaggtaaaagcacgtattctctrcttgtctttatcacatgatataatattggctaaatagttatttcatgaccagtttgatttaagaaatataagctacagattattttattgtctcttgtct

SEQ ID NO: 375258 - DNA, 201 bp, Homo sapiens
ataaatcaatgaacaaagcagaaattcctgccctcaggagcttatgttcttaacatgattatagaaaaacctctacttcaggaatgatggaagaatgcatkctcagaaaaattgaatgatgtttccttttattgacatatttgtttcctggtattgcagttatgtaaaggttaagtaggattttatatgccaatcatccgt

SEQ ID NO: 375259 - DNA, 201 bp, Homo sapiens
ggaagctaccaaagacagagagatgtacctaagtgaaaaagagtataatgtaatagttaagagagcacgctttggacatggactacttgtcttcgggtatsaagctgctgcttatttgctataaaatggagatatacagctcctaacagggccttcattcacggtctctgttttaaagaatgatatgcttttcattgtcaa

SEQ ID NO: 375260 - DNA, 201 bp, Homo sapiens
atgatgagatccttattgtcctcaactaaagaatgaaagaaactaagactcagaatatttaagaaacttgtcaaatgtcatataaccaaaccacaactcargatgtttatccctttatgcctttgctttttctgcagaaagcaatattgactttaataatccattgacacagatgactactgccaattatctgtctctttc

SEQ ID NO: 375261 - DNA, 201 bp, Homo sapiens
tactaattgcacctgaaaggttaaggtcctttttgagttaacctcatatggaattgtctatatttattttgtatgttgatgacagtatttgaagtgatgarcagtttttcaattatttacaaagctttacaggtttaaagtattattcacctcaggcttaattggcccatttgtctattcttcctagaaggatgtagtttt

SEQ ID NO: 375262 - DNA, 201 bp, Homo sapiens
gaaaagtcagtttttaaaatttagaacattattgcaataagaagagaggctaccacatattgagtctaaccctccactactttaacccagtagaggctagkgtcctccatttaagccaggagctgtgaaatatccctcctcctacctgtgaggaagcaggaccaaagtgatgtgtatggaatcgagcatgaaaaatacaac

SEQ ID NO: 375263 - DNA, 201 bp, Homo sapiens
actcctgggtagcagtccaaattttgaacatgatttaaagtttcaggttttctgttactgcactggtaggcttctcccattccctaccttgtgtttcttctaactccttcctctctccccaacctccatgtggtttcttacctcttcatacttggagaatgggaagggagaataggtaagaaacatcaaaacattcttaac

SEQ ID NO: 375264 - DNA, 201 bp, Homo sapiens
ctcctgggtagcagtccaaattttgaacatgatttaaagtttcaggttttctgttactgcactggtaggcttctcccattccctaccttgtgtttcttctaactccttcctctctccccaacctccatgtggtttcttacctcttcatacttggagaatgggaagggagaataggtaagaaacatcaaaacattcttaaca

SEQ ID NO: 375265 - DNA, 201 bp, Homo sapiens
tcctgggtagcagtccaaattttgaacatgatttaaagtttcaggttttctgttactgcactggtaggcttctcccattccctaccttgtgtttcttctaactccttcctctctccccaacctccatgtggtttcttacctcttcatacttggagaatgggaagggagaataggtaagaaacatcaaaacattcttaacag

SEQ ID NO: 375266 - DNA, 201 bp, Homo sapiens
tctcaggatttccttgtaacatgagtctctctccctctgtaaggaattcacattcatggttgtagttactcttaggagaagtaaaaacacatagaaaaaayacaaaaacatctgccagatatctactgttatacatctagaagtaactgcatgtgcctacttaattggtttttagagcattttgaggttaagacaaaataa

SEQ ID NO: 375267 - DNA, 201 bp, Homo sapiens
tttgggtaatgggtatactagaagcccagtccccaccaatacacaatatacatatataccagacatgcacatataccccctaaatctaaaataaaaaaaatttttttaagtaagtttttactcttaaaggtagcttctgaagtaagtatggaattttttttggaatttttaagtagtattaaaaacagataattggacata

SEQ ID NO: 375268 - DNA, 201 bp, Homo sapiens
actgtaagtatgaaaccttgttggtaggaattattcaaattgttttttttttaattgtagactcctttttatggctctatgggatctttccttaggaccamaatttctcattttattttttaaaacttttttctcattggaagaattatacatgttcattacagaaagcaaaaccaataaaaggcataataaagactcttg

SEQ ID NO: 375269 - DNA, 201 bp, Homo sapiens
aataatgctttagtgacaaattagctataaagttcttaaatgttctgcttgattttttttctatttagatttttagttacagggcctaattctgataattrctttactatgcccatttacttagaaataaattttatgcatgtcatattctacctcccctcttcctgaaggcgttattctatcttaagatatgtaattatg

SEQ ID NO: 375270 - DNA, 201 bp, Homo sapiens
agtaaagtcatttattgaaaaggttgttctggaggcacaatagaatcaggttgtgagatgatattacagaggtggagagatgccactttttcctgaatttwagtacagctatctaaagtggttaatattttgaattttctttatttctgaacatttgttcgagtctgtatttttttctcttaaacactagctgcttataaa

SEQ ID NO: 375271 - DNA, 201 bp, Homo sapiens
tatatacttaaaatgtgattgctaaaataatttcattcaaaatgcagggtgaaatcacaggatcaaacatagtttgggccctaataaattaaaaacattcraattcttattaggatgaaagaatgtggtaaatgatgtaaagcttgctcaaatgctgatgaggggttttgcttttgttttgtagactagtgttattttaaa

SEQ ID NO: 375272 - DNA, 201 bp, Homo sapiens
cagtgatggtgccattgatgaaaatgaaagagctgggaaatatgtatatgtgtgcactgagagagagggttggcaagaatggaagttatgggagttttggyaataagtccagtagaagataataaatagggtggtagttagaagtggtaaaatgatcgaacgaatgtgtttttttcaaggttagagatgcaatacaatcag

SEQ ID NO: 375273 - DNA, 201 bp, Homo sapiens
gtttgcccatgcttttttttaactgcacagagggaactcatatctgttattttcacagggaacatgatgcaaacaaaatcaattacatgtatgctcagtaygtcaaaaatactatggaaccacttaatatcccagatgtcagtaaggataaaagatttccctggacagtaagtaacccaattttagacttgaagctagaag

SEQ ID NO: 375274 - DNA, 201 bp, Homo sapiens
tgctatttaaataattgttatgttgtactattgtttaaatttatgttattttttatttttgttttttttctttggtttattttcagtactgcagttgggtktatccaaagacgtggacttgtgggtacagagggccaactgtattttattttgaaatgtctactattgttaggttttcctacttctttagtgatattacaa

SEQ ID NO: 375275 - DNA, 201 bp, Homo sapiens
tagtctatgtctagaaaatctatattgtcttagtccatgctggctgctataacaaatagcttagactggataatttataaacacaaatttgttgctcacartttcagatgctgggaagtccaagatcaaggcaccagcagattctggtggaggcttcttcctcatagatgtcaacttttatgtgtcctcacagaagggcaa

SEQ ID NO: 375276 - DNA, 201 bp, Homo sapiens
ccacaaggctcttatggaaaatgtttgcatgtccccactgggtcagctcagaatgtttgagttgtagtgtggtgtgaccaaacaatcaaaagaaaagattmttttctcttagtagagagagagattaggaattacagtagataatggaaagaggcacaagctatgctggcttccatcctgtagcttttagaatgttctttg

SEQ ID NO: 375277 - DNA, 201 bp, Homo sapiens
  misc_feature (1)...(201): n = A,T,C or G
aagaggtgcttgagccctgtggatacagagataaatgtattaatatatcagagaatgttaaaccttagagatagtctactccaacttccttcttttacacnttcaaaaaagcaggcagagagattgaacatcttgttcagggtgacaaagtcagtggaacatctggactagcacccccaatagccgacattcctttttatc

SEQ ID NO: 375278 - DNA, 201 bp, Homo sapiens
cacattggaggtgggtgaagtttagggacctctcacactgtacagccaaaccctcatcttttacctttccctcataatcactcatggtgtgtgtgtgttcygtcattgtgtcctcaccaaaattatgtgatttagatgatgagatccttattgtcctcaactaaagaatgaaagaaactaagactcagaatatttaagaaa

SEQ ID NO: 375279 - DNA, 201 bp, Homo sapiens
  misc_feature (1)...(201): n = A,T,C or G
gagatgatctctggtcaggttggagatcttgagagcctggagatctgactatgaataaagtgaaagttcaattcaattagtcctatgtcagtagtaaatantaataatagaagctaaaactttatataggccttatgccatttgaaacgtttttgcactttttatatattagttcatttagtccttataccaccatgcagt

SEQ ID NO: 375280 - DNA, 201 bp, Homo sapiens
atcaggaaacggtgggacatttactgaaaaagatgaaaaggtaccaaaacttgtgtcagacatgagccaatttaggaagatgctttctctttatagtatayacacctctaggtttagctgttgctgaaattgttggtcacacaaaaaaattagagttaaaaatgatctgaaatgttcaagtgtatcttaggctaaataaag

SEQ ID NO: 375281 - DNA, 201 bp, Homo sapiens
cgtttttgcactttttatatattagttcatttagtccttataccaccatgcagtggctgtgatggttatggtagttaagagccaacttgagccagatgccyagcttcaaatcttggcttctctctcctcttactctgtgaccttgtgcaagtcattaaacttctctatgtccctgtttccttctttgtataatggaataat

SEQ ID NO: 375282 - DNA, 201 bp, Homo sapiens
accggaaattttgtcctaagtcacagcatgcatctatgaaacattaggacaattatatgtttttaaaaatctgtgtaggtatatgcttgtgatttgtacartacacttacctaccacattgcttttgtgcttcttcaaatttgtaatacctctttattagaaagtcagtcaattcataaggccagtgatgttgttttcctt

SEQ ID NO: 375283 - DNA, 201 bp, Homo sapiens
ttgtcttcttatatttttgagtgagcaggagctttctctttattttcttgcttagtacattgcttcatacagttccaggtacagatagcatatcaatgtayactttttgtactgcatatttatcagaaactttgcataatactttctatatctgtttgaaactcatctttcttaaaacacagatttaaagtttatgtcttt

SEQ ID NO: 375284 - DNA, 201 bp, Homo sapiens
aatgcatagtgatcaaatgagggtatttctggtgtctattacccctaatacaatacatttttgttaagtatagtcaccctcctatactataaaacatttawtttatttcttctatcttactgtatgtttgtaatcccagcactttgggaggccagagcaggaggattgcttgagtgcagggcatagtgagaccagcctggg

SEQ ID NO: 375285 - DNA, 201 bp, Homo sapiens
tcagtgtgcatataggctatttgtgaatatgaccccagggagcaggaatgcagaactgggaaggaagcagggaagaaaggaaaggcagtagagggatgagytatccagatgtccacccatactggtgcttagtcttcccaggcacttttgaggagtcttatgaaataagacccagaactgttgactggcaagacaaaggca

SEQ ID NO: 375286 - DNA, 201 bp, Homo sapiens
tagtctcttgacagaacttgttttttttttaatatttctttatttattggtacaaatttacagggtatatgtgaaactttgttacatgtatataatgcatrgtgatcaaatgagggtatttctggtgtctattacccctaatacaatacatttttgttaagtatagtcaccctcctatactataaaacatttaatttattt

SEQ ID NO: 375287 - DNA, 201 bp, Homo sapiens
ttaccctcaaggagcaatactgtatatactatgcgttagcatattctttttttaagtctaaattttagcctaaataaagaaaagtaatccaactttttctyattgtcataatgtggctttactctagttataaaaattcttctgagattaaaaggaaggaggtagaatattgcaggttcccatttccacgtatctgctggc

SEQ ID NO: 375288 - DNA, 201 bp, Homo sapiens
tcttcccaatctaaagtgtaatggaaaattaaactttacctttgtttctttaattcatacttagaaatttaacacctcagaagtcctttatgattattggrtgtgtataatgtgccttgtaaaaggggaaattcaaaagattaaaggattgtttacaatctgactcaatgagattgtgtatatatgtgtataatttaaact

SEQ ID NO: 375289 - DNA, 201 bp, Homo sapiens
cagaactgttgactggcaagacaaaggcagttgtccctaggtctttgtacccccctggtccaaggtggtccacaggccttcactctttgacactttcaggwtgaacaagtatgagtgcagagaacattcctctgggcaccagttgtggggtcagaaagctctaaggcagaagtgagaggtattaaagataggctgggacaa

SEQ ID NO: 375290 - DNA, 201 bp, Homo sapiens
ccaaaatctgcagacactaaagtcccttgtataaaatgatgtagtatttgcctataacctatgcacatccactctatattacttataatacctaatacaaygtaaatgctatttaaataattgttatgttgtactattgtttaaatttatgttattttttatttttgttttttttctttggtttattttcagtactgcagt

SEQ ID NO: 375291 - DNA, 201 bp, Homo sapiens; identical to SEQ ID NO: 80915

SEQ ID NO: 375292 - DNA, 201 bp, Homo sapiens
taatcagtattaaaaccaatgaaattgttcatactttactctggcaatggtcacattggtatttgaaaacaatttgactctttgtatttgtttcccagagrttatctcacacttttctcagtaaaaggagagaaaattgttagttgattaattttgtgaagtagcctcttttgtagttaaacagtaataaaaatgtactga

SEQ ID NO: 375293 - DNA, 201 bp, Homo sapiens
aaaatagcttaaacaagaacacagtattattactctctcctgtaaaagcccagaggtagccagctcaggcttggtgctgtagctgtgctccacaaagaccytggggaccaagacacctttggactttctaccttacatccctaggatatggccctttccttcagggtcaaggatgcagctccagtcattatatccacattt

SEQ ID NO: 375294 - DNA, 201 bp, Homo sapiens; identical to SEQ ID NO: 80917

SEQ ID NO: 375295 - DNA, 201 bp, Homo sapiens
acctcagtgcaaacttgttgatggcttccagagcacagcaacttgagacattggtcagctactctttctacaattggagctctgaggcacattctaaaggmcactataatattcccatcagtaaaagaatgagatccatattccttgtattacactttcaaaatctttcactatctgtcctagcctaacattttcagcctg

SEQ ID NO: 375296 - DNA, 201 bp, Homo sapiens; identical to SEQ ID NO: 80918

SEQ ID NO: 375297 - DNA, 201 bp, Homo sapiens
aaaaaaaaaaaaaaaaggaaaagttacaaattgttcactgcatttattccccacagtattctttcttgtagttttgttttagaaacaaaagtgctgcgcaragtttctgtttgttctggacttgaggttgtgatagtgacaatcctttctttttccttctgcacactgccctttaaataacaaagtatatattatgaagat

SEQ ID NO: 375298 - DNA, 201 bp, Homo sapiens
gcacctcaagatgaggaaatttttagtattttgattatgctatgcaaccaaatttcctttttaaattattctgcttaaataaatgatttgactctggtctsaagtattatttcttttgaaatatttggaattctgttaaggttgtataggtaaagcttgtagcttcgcccttatctgattatagggagtgtgtcctacttt

SEQ ID NO: 375299 - DNA, 201 bp, Homo sapiens; identical to SEQ ID NO: 80919

SEQ ID NO: 375300 - DNA, 201 bp, Homo sapiens
aaacttaaataggcttgtggtatcattcagtagctttttttcagtctgtcatctgatgatctgtagaaattgtcaatattttcacacgtttatgtcctcarcacctcaagatgaggaaatttttagtattttgattatgctatgcaaccaaatttcctttttaaattattctgcttaaataaatgatttgactctggtctc

SEQ ID NO: 375301 - DNA, 201 bp, Homo sapiens
cccctgttgaattgtgcccttcgttcacccctgttcccaggccctttgcttttgaagtaggtcctcggtcctgttacgaggtagaaacctcaactctaagygagcacagtcgaaaaactcaagtgtcggatttgatacaacttgctcacaaagttcaaatacaaaaatgtacttgccgacctcccaccctcacccccgacc

SEQ ID NO: 375302 - DNA, 201 bp, Homo sapiens
caaattcagacccatgttagagcctaaactacatgattcctaaaaatgtggtagaattaatgcaatggcaattagtgtagatggatatcttcaaataaatmgatttgcttagtataacacaaacttaaataggcttgtggtatcattcagtagctttttttcagtctgtcatctgatgatctgtagaaattgtcaatattt

SEQ ID NO: 375303 - DNA, 201 bp, Homo sapiens
ttttaagaaataacctgagaaataggtatttgaagtcttttcattgtttcaaacttttgacatccatattgagaaatttcaaagcagaaatgtcctggcaraactgcttatcagaatacggagcagtttctgaaagggtagccagaaaagtctactcctttggcttatactgctgaaaattaagaatacctattatttctg

SEQ ID NO: 375304 - DNA, 201 bp, Homo sapiens
acagaggggttgggtgggaacatagaggggaaactttatttcatggtatttaagtgtgtcctccacattcattagaatactgggcatgtgtttaagatatrtgaatatatttctagattttgttcttgtcagcagcttctccaggatgttaatactggttttctttttttataaagggcaatcagattctcagtggcctct

SEQ ID NO: 375305 - DNA, 201 bp, Homo sapiens
atttgaaaaatacctgtaaccacaatgcctttctaagctttacaggccacatgggtctctcctttgaacccttatgaaacatacttttcattttttataaycatatactatcagttttattacgtaagtttttcttgagtcttgtgtctccaggtagatattaaacactgcgaaaagaaaaatttttgtcttatgccttct

SEQ ID NO: 375306 - DNA, 201 bp, Homo sapiens
atctcacctactcgcatgccaggattaccatctgcattgttggtgcattccaaatctatatctccagcccagaactgagttgacatttatatccatttggrtatatttcaggcaccttaaaatgaacagatccaacattcagctagtcaggttcccctgcttcatcccccatctttaatcatcttctcccttttcctgtgt

SEQ ID NO: 375307 - DNA, 201 bp, Homo sapiens
agatttctctcactttacccattttttcccccacattacatttcttcagtcttaggtagcttctctatcttcaacaaattaaatgcaaagtaaaataatcrttcagatagtaataggaagaaataacaaatcagttgtattatccaacacttgtatatggagctttacaattcacaaacccctttcctataaattttatga

SEQ ID NO: 375308 - DNA, 201 bp, Homo sapiens
gtgagtgctctgtacgtaattgtcctactatatttattttatgttatttttattgctgtgggtttaaaatttttttgtcaaacattttctatcacagttgkatacaaaggaccaactatattttcctggtctaatagtctcttgacagaacttgttttttttttaatatttctttatttattggtacaaatttacagggta

SEQ ID NO: 375309 - DNA, 201 bp, Homo sapiens
aatttctggcattcagtaagtgttagctattatttccatgtctctttgattttttttttatttgtctttggtttacattacctgcagtgactcccatttamttctaaagcacagaaatttatcttttcaagctccacgtacctaattctctcatcccaacaatgcactcatatacagttcattgatacacattgtacaaaa

SEQ ID NO: 375310 - DNA, 201 bp, Homo sapiens
attgaagaagaaattgctcactgtggcaatgatcagttgccctgaaacaaccagctgtcacattccatactgctcgcccagtgagagtcaagtcttggccyttgcattcctaaaagaacactcgaccctgtgaggacataacatccatttgtgctgtgcatagtgccagtaaaatagaaaacagaaaggcttttttgcgct

SEQ ID NO: 375311 - DNA, 201 bp, Homo sapiens
atttaagaaatataagctacagattattttattgtctcttgtcttttctcacatttacggtcctaagtcgtcctccatcaagatggagagactattgaccacagtgacttaaagttgttactttgttaagtatttatatttaaatcaaaactcattactagactattattttgacaatgtggtacaaggaagggccttttc

SEQ ID NO: 375312 - DNA, 201 bp, Homo sapiens
ggcatgcccacaacatccagctaatttttgtatttttagtagagtaggggttttgccatgttggccagtctggtctcaaattcctggcctcaagtgatccrcccaccttggcctcccaaagtgttgggattataggcatgaaccaccacacctttaatgtaatttcaaaagtatttctctatgttgttaaaattttcacag

SEQ ID NO: 375313 - DNA, 201 bp, Homo sapiens
cattataatttttgaatagtctatattcatttcttccaccatttacttttaccttttgcagtttcacttccctgaaactgcaggtttgatttaggacaagrtaagtttgaggtgctggttgaacaaccaagtgaacatcttcagcaatcagaaaaggcaggactcaagcgatgaggtggtggtgtttagaactagaggtgg

SEQ ID NO: 375314 - DNA, 201 bp, Homo sapiens
tgaattatatcatgtgtgattgggaggtagaagaatggtatcagtatactatagacgttctatcatttcatacacgacttctctggggtaagaggtgccasaattatagaagttgaattctgaccttcagcaataaaggaaaaagccctccctttggctcgtgcatatacagccctttccattctatcttaggaatattaa

SEQ ID NO: 375315 - DNA, 201 bp, Homo sapiens
ttaagatttaaaatatatttatattcacccagatcgtccatctgcaccagtaatcaggcttgctgataaaaacaatttctgcattattgttgtcattcgayattcatgcatgattttccatccttttctcagactaaatgatctacactcaatggtagttattgaacatcaaggttctggcattcctaaattctcaaacac

SEQ ID NO: 375316 - DNA, 201 bp, Homo sapiens
cgggcagatcacgacgtcaggagttcaagaccagcctgactgaccaacatggtgaaaccccgtctctactaaaaatacaaaaattagccaggcatggcgcrcgcctgtaatcccagctactaaggagaatcgcttgaacccgggaggcagaggttgcagtgagccaagattgctccactatactccagcctgggcaacaga

SEQ ID NO: 375317 - DNA, 201 bp, Homo sapiens
agtatccttgggaaattagttccaggaacccctacagataccaaaatctgcagacactaaagtcccttgtataaaatgatgtagtatttgcctataacctrtgcacatccactctatattacttataatacctaatacaatgtaaatgctatttaaataattgttatgttgtactattgtttaaatttatgttatttttta

SEQ ID NO: 375318 - DNA, 201 bp, Homo sapiens
ccttctaaaagaaaggctcctgagagaaatggttgattccaggtttggagaagaggaagaacaaggtgagcctggtatatcttcttttgtcaaaaagagtrgaaggactgtaatggaatcatgtcaaaggacagaagagccagcttgaaggaggctcccactggcccaatttgagacaatatgagtattcagtgcaattaa

SEQ ID NO: 375319 - DNA, 201 bp, Homo sapiens
atcattccttggagaaagtaagttggacttatgtggtggctttgactcactttccctttcagttggctggggtgatttttctaacttagagccctctcacrtaggtataaggaagtaccaagaactgcaggtgagaaattgatgagaatttccaacttaatagatccctttataaagccagaaataggaggtcagggagaa

SEQ ID NO: 375320 - DNA, 201 bp, Homo sapiens
aactacgtagtaaatttgtgagtgacagagtaaaggggcaagaggctggaggagatgagtataaccatctttcattcacttagacttcctgaatgaagccrttcatactgagttttgagcaatgagaggattttggaagttctgtttttaataaatggctccaactcttctagtacttactaattgtattaaggtgaacct

SEQ ID NO: 375321 - DNA, 201 bp, Homo sapiens; identical to SEQ ID NO: 80948

SEQ ID NO: 375322 - DNA, 201 bp, Homo sapiens
gtaatcccagcactttgggaggccgaggcaggaggatcacaaggtcaggagatcgagaccatcatggccaacatggtgaaaccccatctctactaaaaacmcaaaaaaaattagctgggtgtggcagcacacacctgtagtcccagctacccgggaggctgaggcaggagaatcgcttgaacccaggaggtggaggttgca

SEQ ID NO: 375323 - DNA, 201 bp, Homo sapiens
aggtcaggagatcgagaccatcatggccaacatggtgaaaccccatctctactaaaaacacaaaaaaaattagctgggtgtggcagcacacacctgtagtmccagctacccgggaggctgaggcaggagaatcgcttgaacccaggaggtggaggttgcagtgagccaagatcgcaccactgtactccagcctggcaacag

SEQ ID NO: 375324 - DNA, 201 bp, Homo sapiens
cctcttgttggccatcagaatccacaaacaacttaagacttgaaagctgacttgaaagtgtactgggaagaaagacagtattatggactttcggataaacrcttctctctctatggaacttaagtcttgggattttgttctctcttccttctgttctcagcatgtggtgattacacacagagtagtttctgttttcctcct

SEQ ID NO: 375325 - DNA, 201 bp, Homo sapiens; identical to SEQ ID NO: 80943

SEQ ID NO: 375326 - DNA, 201 bp, Homo sapiens; identical to SEQ ID NO: 80944

SEQ ID NO: 375327 - DNA, 201 bp, Homo sapiens
ttattataatttagaactgaatagtaattcagaacacatgctaatgaggtgcgtcagaagcattcctgtcatgtgaagggcaacctacgtgcatagaccaraattttttctagcctgaaatctgagaatccccagttgaagacaaattcttaccacaaattttccttttgattattgtcaatactatcagtgcctattgtg

SEQ ID NO: 375328 - DNA, 201 bp, Homo sapiens; identical to SEQ ID NO: 80946

SEQ ID NO: 375329 - DNA, 201 bp, Homo sapiens
tctcaagtttgggaatgtgagtattgcatttttataaagaatgtcaaccctgattatactggatacattttattataatttagaactgaatagtaattcaraacacatgctaatgaggtgcgtcagaagcattcctgtcatgtgaagggcaacctacgtgcatagaccagaattttttctagcctgaaatctgagaatccc

SEQ ID NO: 375330 - DNA, 201 bp, Homo sapiens; identical to SEQ ID NO: 80947

SEQ ID NO: 375331 - DNA, 201 bp, Homo sapiens
gtatagaatttacgccaggacttgtcagaatcactgaaaggagatttcataggttggcatttcctatcttcacatcattagtatctcttgattctccttaragtggctgctgttgtagtagcagtctttaaaacaggagttggggtgtaagaagatcctctttttaagatttctccgcaggtattgattacatctcttttt

SEQ ID NO: 375332 - DNA, 201 bp, Homo sapiens; identical to SEQ ID NO: 80962

SEQ ID NO: 375333 - DNA, 201 bp, Homo sapiens
cagaaatggcattgtcagagaccctgtggaagaataagggagactggtgccctggggaatgactgcagggatcccacccaggctggggaggggccctggaraaggtgctctgtttccgattgttttttggaattctcatatggaagacataagtgttaaccaatcactctctctctttacagatactaatggaccatacta

SEQ ID NO: 375334 - DNA, 201 bp, Homo sapiens
tgtgctttcgctgttttctcacaaaattaagaatttaattcctttaaaagattgtggaagattccttgactctgaggcatctgattaactttagtgctgaragttcagttgactgctttgttgggacaatgaccctttgcaatctgcactattctttggagaaacagtcacagtccttataagcagaatgattgagggtgg

SEQ ID NO: 375335 - DNA, 201 bp, Homo sapiens
cactccagaaatcaaatgcaagatcaaaaaagacgagtcgccattgtgtgctttcgctgttttctcacaaaattaagaatttaattcctttaaaagattgkggaagattccttgactctgaggcatctgattaactttagtgctgagagttcagttgactgctttgttgggacaatgaccctttgcaatctgcactattct

SEQ ID NO: 375336 - DNA, 201 bp, Homo sapiens
tgtctgtttccacagcctgaagaggaccacagatgtgatgtttggtgggaaacaagtggtggtgtgtggctatggtgaggtaaatagctgggtctcagtgyctctttctttttgtgtacttattagaaatattgggtaaaggaggcttgtgctgtcaatctagagtcactgatacaaggtttaaatttttttagataatgt

SEQ ID NO: 375337 - DNA, 201 bp, Homo sapiens
ttagccgggtgtggtggcgggcacctgtcatcccagttactcaggtggctgaggcacgagaatcacttgaacctgggaggcggaggttgcagtgagctggratcatgccactgcactccagcctgggtgatggagtgagactctgtcttaaaaacaaacaaacaaacaaaaaaactgttccagttaacaaggtagatagag

SEQ ID NO: 375338 - DNA, 201 bp, Homo sapiens
ttttttttaagtgaattaacctgccactccagaaatcaaatgcaagatcaaaaaagacgagtcgccattgtgtgctttcgctgttttctcacaaaattaaraatttaattcctttaaaagattgtggaagattccttgactctgaggcatctgattaactttagtgctgagagttcagttgactgctttgttgggacaatg

SEQ ID NO: 375339 - DNA, 201 bp, Homo sapiens
tttatactgcttgatctgaagaccagatagcctaaggagcggttatgcatgtcttctctcagaatgtctacatgttctttaatgccagcaagcctctggtytcctatgttctacctgaaagccagccagtacctttgttgcccggcatctctttccttaaccacccatcttttcttttaggaaataagaatgtagtgacac

SEQ ID NO: 375340 - DNA, 201 bp, Homo sapiens
ttctttgcatcattttacttttctgaaaattaataaaggtttttggaacttaaagaattattttcctttaccagtgcttacaaatctttatctggtgttayaagctcagaaagcttatagtgcaacagtagaccactccaaggtaaactgaccccttggaaataaaggggaaagctgctgtttccccagcctattccaaaa

SEQ ID NO: 375341 - DNA, 201 bp, Homo sapiens
gtttacaaatcataaagtttagaaggagaacacctgtgttaagcaccttatttctctacctagtttataattaggaggggatggttgatgagattagtttyggcccttgcattcaggaggtggagcccctcctatttggggagcagggggttcataattctgtacattcttttcttactccgcagcgaggggattagctga

SEQ ID NO: 375342 - DNA, 201 bp, Homo sapiens
tgtaattcacattgtaaggcttgttcacgactgtcactggtgatttcagatggtatggctaggaaaatttgaggtaagaaaaggaatccttgagttttaasagttaagtgtaccacaactgaagaagatccttgtttaatgttggcagttatcggtcaaaccaagtaagtaatctagttccccataaccactggttattta

SEQ ID NO: 375343 - DNA, 201 bp, Homo sapiens
attaaggcagggattcttgttcacctttgtatccagtgtgcctagctttgtacccagcatacagtaggtactcaaatattaattgctcacctggctaactrgtaactgagatgtccatgtggccacctaccatgaataactatcccttttcctctcttcttcccaggaggaatattactaatgtgtattattgtcaggcca

SEQ ID NO: 375344 - DNA, 201 bp, Homo sapiens
aagtatccaaacgtgtttaagaagatccgaggcattgtggaagagagcgtgactggtgttcacaggtaacagattctggagtagctgccccttgtgtcctygcctcagcaaactctcctggtctctgttaggctttaggactgtgtttcagacttataactaaatgggaatatcttcattagataaaacttttgagttttt

SEQ ID NO: 375345 - DNA, 201 bp, Homo sapiens; identical to SEQ ID NO: 80945

SEQ ID NO: 375346 - DNA, 201 bp, Homo sapiens
gtaggggcactgcactggttagtaagctgctaagctgcttgcaacacagtccagtatttttagatgggaaagattttgcttaggtttaggctactgatgarctttattaatataaggggaaattatgactattcggtttttaagttgctgaagaaacacatttctctcttgccacagccacctttctatatgaaaaactgc

SEQ ID NO: 375347 - DNA, 201 bp, Homo sapiens
tcagaaagcaagaccatttgccaactttaggaatgtgctacaagggaatattctgaaacaaaaaccaaaaaaccccagtagcactatgagattctgttttytgaaagatttgggaagaagggtaaagagtttaatctgtcagggttataagaggggaaaaaaacttgatggaatgtgagaaagatttataaaattgaacat

SEQ ID NO: 375348 - DNA, 201 bp, Homo sapiens
gtttaatgggatgcagggctgaacaaagcaagggctgcaggaatagttaagtccttgaggcttcaactagttaagctgtcttaagtgggagagatggctcttttttttttttttaagtgaattaacctgccactccagaaatcaaatgcaagatcaaaaaagacgagtcgccattgtgtgctttcgctgttttctcacaaa

SEQ ID NO: 375349 - DNA, 201 bp, Homo sapiens; identical to SEQ ID NO: 80941

SEQ ID NO: 375350 - DNA, 201 bp, Homo sapiens
cttgtctgtttccacagcctgaagaggaccacagatgtgatgtttggtgggaaacaagtggtggtgtgtggctatggtgaggtaaatagctgggtctcagwgtctctttctttttgtgtacttattagaaatattgggtaaaggaggcttgtgctgtcaatctagagtcactgatacaaggtttaaatttttttagataat

SEQ ID NO: 375351 - DNA, 201 bp, Homo sapiens
ctagttggcactacattttgtgtgttctgtttcacttcaagtgtataacttaggcaagattcaggggaaaaggagaccttcagaattttgctattttgtgttgtttgtttgtttgtttgagatggatttttgctcttgtcgcccaggctggagtgtgatggcacgatctcggctcactgcaatctccacctcccgggttca

SEQ ID NO: 375352 - DNA, 201 bp, Homo sapiens
ttatgaagttatatagttaaaaattgctactaagttttcggaaaaattattcttaaaaattataattaaaaattcttattcttgggccaggtgtggtggcycttgcctgtaatgctagcactttgggaggccaaagcaggaggatcccctgagcccaggagtttgaggtcagcctgggcaacacaaggagaccctgtctct

SEQ ID NO: 375353 - DNA, 201 bp, Homo sapiens
ctcatcactgtagcctaaagcaaacctaggaatccttttaaccattttacaccaacaaatttgactgtatttccactctctaagcctgctctagggagctytgaggagtactcttccaaaacatacagggctctcttactagtacagaaagtgggttcaaagttccccccagccctagcagcctgaatgcccatagaagtc

SEQ ID NO: 375354 - DNA, 201 bp, Homo sapiens
accttagcccctcctcccaaatcctgcagaaacaattgggaagagacagtgattgacgtgttgggagaagtcagagagtagcctcggccttcccccatttytggtgggaaagttgctggcttagtaggaaccatgtgattacatggcttttagggaaagacaatgtatccttaaaaaaaaaaacatttcatggattttcct

SEQ ID NO: 375355 - DNA, 201 bp, Homo sapiens
ggtaaagagtttaatctgtcagggttataagaggggaaaaaaacttgatggaatgtgagaaagatttataaaattgaacatatactaaacgaaattggttyttaaccttagcccctcctcccaaatcctgcagaaacaattgggaagagacagtgattgacgtgttgggagaagtcagagagtagcctcggccttccccca

SEQ ID NO: 375356 - DNA, 201 bp, Homo sapiens
tcaccctgtcttcctacacttctacacaggtgttgattgagacactctgtgccctgggggctcagtgccgctggtctgcttgtaacatctactcaactcaraatgaagtagctgcagcactggctgaggctggtaagttcggttttttcccaccaactttgccccaaaatagttatccaaacatataacttttttgtatca

SEQ ID NO: 375357 - DNA, 201 bp, Homo sapiens
ggcaccctaatgcccatcaccatttctaggcatctcttcataattctttcagaaagcaagaccatttgccaactttaggaatgtgctacaagggaatattytgaaacaaaaaccaaaaaaccccagtagcactatgagattctgttttctgaaagatttgggaagaagggtaaagagtttaatctgtcagggttataagag

SEQ ID NO: 375358 - DNA, 201 bp, Homo sapiens
atttttagtagagacggggcttcaccgtcttggccaggctggtctccatctcctgacctcgtgatctacccaaagtgttgggattacaggcgtgagccacygtacctggcccatttaaggaagtttttaatacaaagtttaccaagtcattattttctccttccttcagattagtcctaatgagttagaatttactatagt

SEQ ID NO: 375359 - DNA, 201 bp, Homo sapiens
agtatttttagatgggaaagattttgcttaggtttaggctactgatgagctttattaatataaggggaaattatgactattcggtttttaagttgctgaaraaacacatttctctcttgccacagccacctttctatatgaaaaactgcaagtgttattgcagttccctcccccaccctcaccctccatgtacctggtatc

SEQ ID NO: 375360 - DNA, 201 bp, Homo sapiens
tggctgtctgccatattctcttcctttcctctgaaaaaggagtgggtgagggtagaatctgtagaagaaaaaataaattaaccagaaaatatgtgtgaaaragggattagaaaagatgtaggaatcttgaaaagtgttctgacacactatgcttagtaatgatgatcttgttaaaatatctagttttttattgttactttt

SEQ ID NO: 375361 - DNA, 201 bp, Homo sapiens
taaagtagtctagattagattgcccatacattctcctccttactccatccccagaagacaatggaagtgtattctagaatggaacattttgttaccacagygtttgggctctgctattactgggctctcctcaccctttccagatctatggagcagtacttttcaatggcaatttgttggcaacgtaaaaacattacattt

SEQ ID NO: 375362 - DNA, 201 bp, Homo sapiens
caggattccctgactaagacttttagggccctagaggtgaatatttcacactctccccagccctgaacacaaatcagtggggaaaatgccatttcaaaccraaacttccttcttgaaagggtatgccctgttaaaaacctgggaggtttctggatgttaaaaggtggtcctggccaggcgcggtggctcacgcctgtaatc

SEQ ID NO: 375363 - DNA, 201 bp, Homo sapiens; identical to SEQ ID NO: 80961

SEQ ID NO: 375364 - DNA, 201 bp, Homo sapiens
cagattctggagtagctgccccttgtgtccttgcctcagcaaactctcctggtctctgttaggctttaggactgtgtttcagacttataactaaatgggartatcttcattagataaaacttttgagtttttacttttgaaaaatcaagttgatcctagaaggaagttatttcaggttctagttcatacatttttctctcc

SEQ ID NO: 375365 - DNA, 201 bp, Homo sapiens
attctttggcttctctattatatttggttgcgaatcactcagaatcagcatcttgcattcagtgctttaggtcttttgatagaaatggtgtttatttactrgtgatgaaacgtgaggggaaaacaatgagtttagtcaagatcagagctccagatttctaatttgtggtttagtgtgtacatgcataatgagagttgaatc

SEQ ID NO: 375366 - DNA, 201 bp, Homo sapiens
gcttgcagtgagccgagatcgcgccactgcactccagcctgggtgacagagcgagactccatctcaaaaaaaaaaaaaaaaaaaaaagaaatgaagagcaktagaccagtgagatttaggtacatgactggtttaccagtggaatttatgaaatctccattcctaagtatgtttgagaagacatgggataggcttttgaga

SEQ ID NO: 375367 - DNA, 201 bp, Homo sapiens; identical to SEQ ID NO: 80977

SEQ ID NO: 375368 - DNA, 201 bp, Homo sapiens
atccacaggagctgaatatgattagcagaaacccttcctgacagctccaaagaggatccctcaaatgcatattctattgagtgcatctcattgctgctgasagccgctttatcaattaaattccacattccgtcttcagagatgccatgaacctccctacctaataaatcataggcccccagttattgttaaatgtcccat

SEQ ID NO: 375369 - DNA, 201 bp, Homo sapiens; identical to SEQ ID NO: 80982

SEQ ID NO: 375370 - DNA, 201 bp, Homo sapiens; identical to SEQ ID NO: 80975

SEQ ID NO: 375371 - DNA, 201 bp, Homo sapiens; identical to SEQ ID NO: 80978

SEQ ID NO: 375372 - DNA, 201 bp, Homo sapiens
atttgattttattctttgatacaaggggggatattttacctcttaaattgttgtgaaggtaattcttgccatattctcctttgtcaccatgtggaaagaayagcatctttaatttgaatactattttgaaaaattggagtgaaatgttttcttttgatttcagttcagtcatttgttctgcttctttttaagtgccctctt

SEQ ID NO: 375373 - DNA, 201 bp, Homo sapiens
tttttaaggagtaacttggtatatagtaaaaagttagaaaactagtgttcagaaagacaattttattagaatctctcttatagccacatataacttaattstataaaaccaagtttgtctgtattgtgttaagataaaaatattttttctttagaatttttttttttaataattgttaaaatgctggagattgctaactga

SEQ ID NO: 375374 - DNA, 201 bp, Homo sapiens
cagctgattcagccaactgtggatcaaaatactcagggcaggatggaggaacaataaaaaataatacaacaatcaaaagatataaacaaaaatacggtgtraccatttacatagcatttaaattgtattaggtattataaataatctagagatggtttaaaatatgtgggaggatgtacataggtaatatacagatatatg

SEQ ID NO: 375375 - DNA, 201 bp, Homo sapiens
aattttcaggcttatttttcattggaatttgatatgtcaatattctatttttaaggagtaacttggtatatagtaaaaagttagaaaactagtgttcagaragacaattttattagaatctctcttatagccacatataacttaattctataaaaccaagtttgtctgtattgtgttaagataaaaatattttttctttag

SEQ ID NO: 375376 - DNA, 201 bp, Homo sapiens
ttttagaaatagggaaaattcagaaaaattaggacgtaccagaaaacaaaatctgtaatcttactacctagagagaaactgctattaacagttttggcatrttttctcctagtccttttttttttttttttttaaatcaatttttttttcttgtagttaagagcacaaagttttgttttctcctcctccagtagttacatt

SEQ ID NO: 375377 - DNA, 201 bp, Homo sapiens
actgttcagcagaattccatttaatcaagctttagtcttttctaatttgcacagcaggtaatgtaacttaaaaggtcatctggggaacttgtgaaataaawggatagtcatggggcaatatttgtaaatttgtaaccatttatgttatatttcatagagcacaacatttggctgatatcctttcttctaaaggctttcctg

SEQ ID NO: 375378 - DNA, 201 bp, Homo sapiens
  misc_feature (1)...(201): n = A,T,C or G
tgatgaagcagataagcttttagaagaaggcagcttccaggagcaaataaagtaagaaaaataactaacttgactattaaaacagtgttccgaagtatctntctttagcttttccaagtggtgattattgtttgaataatttacatggtatctgtttttattttgcagttggatttattcttccttgcctgccagtaaaca

SEQ ID NO: 375379 - DNA, 201 bp, Homo sapiens
tcttccaggttgtcttagagtgtttctaagattgccttacccaaattagcaggaaatttgagtttggggatcatttctccaacaaaggtttgttgagtccstattacgtataaacagtgtgccaggcattggggattcaaagatgaattagatgtgattctcatagccttacttggtagtttagttgttatggcagactgt

SEQ ID NO: 375380 - DNA, 201 bp, Homo sapiens
ttcttcttttacttactgactagattaatgtgagacttaacatttgacttgattcatggtaatgtagtgctctggctattgttggtaactgcagagtttgttttttttttttgagacggtgtcgctttgtcacctaggctggagtgcagtggcggatcattgctcactgcaaccttgaacttctgggctccagtgatcctc

SEQ ID NO: 375381 - DNA, 201 bp, Homo sapiens
agacggtgtcgctttgtcacctaggctggagtgcagtggcggatcattgctcactgcaaccttgaacttctgggctccagtgatcctcccacccatcttcmtaagtatttgggactacaggtgtgtgccaccacacctggctagttcttgtattttttgtagagatggggtctccagtgttgcacagaccagccttgaact

SEQ ID NO: 375382 - DNA, 201 bp, Homo sapiens
tggtaactgcagagtttgttttttttttttgagacggtgtcgctttgtcacctaggctggagtgcagtggcggatcattgctcactgcaaccttgaacttstgggctccagtgatcctcccacccatcttcctaagtatttgggactacaggtgtgtgccaccacacctggctagttcttgtattttttgtagagatgggg

SEQ ID NO: 375383 - DNA, 201 bp, Homo sapiens
aagtatttgggactacaggtgtgtgccaccacacctggctagttcttgtattttttgtagagatggggtctccagtgttgcacagaccagccttgaactcstgggttcaagcaatcctcccacctttgcctcccaaagtactgggattacaggcatgagccaccacagccggtatgcaggtggttcttaaagctctgtaaa

SEQ ID NO: 375384 - DNA, 201 bp, Homo sapiens
gacttaacatttgacttgattcatggtaatgtagtgctctggctattgttggtaactgcagagtttgttttttttttttgagacggtgtcgctttgtcacmtaggctggagtgcagtggcggatcattgctcactgcaaccttgaacttctgggctccagtgatcctcccacccatcttcctaagtatttgggactacagg

SEQ ID NO: 375385 - DNA, 201 bp, Homo sapiens
cctgagttagtctaattgtagactaagatgtatttgagattttggcttctgacaatttggcagcagataaaatgctgaaatcctggaaaagtttcatcaaytcatttttttttgagaccgagtctcactctgttgcccaggctggagtcagtggcacaatcttggctcactgcaacctctgcctcccaggttcaagtgatt

SEQ ID NO: 375386 - DNA, 201 bp, Homo sapiens
gcaggccgggcgcggtggctcacgcctgtaatcccagcactttgggaggccgaggcgggcggatcacgaggtcaggagatcgagaccatcctggctaacayggtgaaaccccgtctctactaaaaatacaaaaaattagccgggcgtggtagcgggcgcctgtagtcccagctactcgggaggctgaggcaggagaatggc

SEQ ID NO: 375387 - DNA, 201 bp, Homo sapiens
ttaaatagaataaagctaccatatatgtcaattttgtcactacttggtaatacagacagggattcttcttttacttactgactagattaatgtgagacttmacatttgacttgattcatggtaatgtagtgctctggctattgttggtaactgcagagtttgttttttttttttgagacggtgtcgctttgtcacctaggc

SEQ ID NO: 375388 - DNA, 201 bp, Homo sapiens
ggcggatcacgaggtcaggagatcgagaccatcctggctaacacggtgaaaccccgtctctactaaaaatacaaaaaattagccgggcgtggtagcgggcrcctgtagtcccagctactcgggaggctgaggcaggagaatggcgtgaacccgggaggcggagcttgcagtgagccgagatcgcgccactgcactccagcc

SEQ ID NO: 375389 - DNA, 201 bp, Homo sapiens
gtcaggagatcgagaccatcctggctaacacggtgaaaccccgtctctactaaaaatacaaaaaattagccgggcgtggtagcgggcgcctgtagtcccasctactcgggaggctgaggcaggagaatggcgtgaacccgggaggcggagcttgcagtgagccgagatcgcgccactgcactccagcctgggtgacagagc

SEQ ID NO: 375390 - DNA, 201 bp, Homo sapiens
gaggctgaggcaggagaatggcgtgaacccgggaggcggagcttgcagtgagccgagatcgcgccactgcactccagcctgggtgacagagcgagactccrtctcaaaaaaaaaaaaaaaaaaaaaagaaatgaagagcattagaccagtgagatttaggtacatgactggtttaccagtggaatttatgaaatctccatt

SEQ ID NO: 375391 - DNA, 201 bp, Homo sapiens
accaaaagctgttttcctcagtttctcagaagttctcactctctcccacgacagccacactttgaacaactaaggccctgaaaaaatgtcagtactgcatrtgattttacaccagcttgtgctacttgcatatttcatgcttgatcatttccccagctgggctgtcaactcttttaggacagaggatagaaagagcctaga

SEQ ID NO: 375392 - DNA, 201 bp, Homo sapiens
cagagctccagatttctaatttgtggtttagtgtgtacatgcataatgagagttgaatcaggaaattcagcagaacaacctgtaagtaataagtagagtamcaatattggctgagatttacacaaatttggtacatcataaatatttcaattttttttttttaattaggcagaattaagcaactcatagaacttgactact

SEQ ID NO: 375393 - DNA, 201 bp, Homo sapiens
ggccgacttcgagtcactgctgctttcgcggccggtgctggaggggctgcgggcggccggcttcgagaggccctcgccggtgcagctcaaggccatcccgytggggcgctgcgggctcggtgagagcgggggcccgggataggtcggggggtggggtgggagaagggggaccgacgggcggcggcggccaggcccgcgccg

SEQ ID NO: 375394 - DNA, 201 bp, Homo sapiens
gtgtcatgtctttattggagggaccccattatcacaagacaaaaccagacttaaaaagtgtcatattgctgttggatctcctggtaagataacaatgcctkttggtaaccagggcttttaaggaactacacacttttaatataacaataaagatatatgggagtctttgataactgtgataattattttgattagaaatga

SEQ ID NO: 375395 - DNA, 201 bp, Homo sapiens
gccgttgatagataaaatcgaatgctttacctgttagcgaacatccacaaatacagcatacaagcaggcaagaaccatcagcgatatcatagaggagttgyttatgtttacattgagggatggagtgggaagattactctaggcctttaataacccttctaagattctgtgagttttctctagcaaggtagaaagccaatc

SEQ ID NO: 375396 - DNA, 201 bp, Homo sapiens; identical to SEQ ID NO: 80993

SEQ ID NO: 375397 - DNA, 201 bp, Homo sapiens
tataaacaaaaatacggtgtgaccatttacatagcatttaaattgtattaggtattataaataatctagagatggtttaaaatatgtgggaggatgtacayaggtaatatacagatatatgcaattttatataacagacttgagcatctgccagttttggtatttgggggcttcctggaaccaatcccctgtggataccaa

SEQ ID NO: 375398 - DNA, 201 bp, Homo sapiens
tgcaagctaaccactggcacatgaaaaatgagagctggctaggcgcagtggctcacgcctgtaatcccagcactttgggaggccaggacaggtggatcacmtgaggtcaggagttcaagacgagcctggtcaatgtggtgaaacctcttctctactaaaaatacaaaaattagctgggcgtggtggcaggtgcctgtaatc

SEQ ID NO: 375399 - DNA, 201 bp, Homo sapiens
gagatggggtctccagtgttgcacagaccagccttgaactcctgggttcaagcaatcctcccacctttgcctcccaaagtactgggattacaggcatgagycaccacagccggtatgcaggtggttcttaaagctctgtaaatgtatcatattgatctcccatcttccaggttgtcttagagtgtttctaagattgcctta

SEQ ID NO: 375400 - DNA, 201 bp, Homo sapiens
gagcagggccctgccgggggctaggcgctacgctcagttaacttatttgtaaaactaacgtgcactattgaacttgaggatagttaagacctttttttaascactgacaaatggttctaagtttgagaagataaacggtaaacgttcagggactaggcgtgttctcatacgtttttgagaatcaactaaaaatgaaggtgc

SEQ ID NO: 375401 - DNA, 201 bp, Homo sapiens; identical to SEQ ID NO: 80984

SEQ ID NO: 375402 - DNA, 201 bp, Homo sapiens; identical to SEQ ID NO: 80974

SEQ ID NO: 375403 - DNA, 201 bp, Homo sapiens
ctgcgggcggccggcttcgagaggccctcgccggtgcagctcaaggccatcccgctggggcgctgcgggctcggtgagagcgggggcccgggataggtcgsggggtggggtgggagaagggggaccgacgggcggcggcggccaggcccgcgccgcagctcaggaagagccctcggtcggcccccggagcagggccctgcc

SEQ ID NO: 375404 - DNA, 201 bp, Homo sapiens
agaatgttatatattcaggcatggcctgatcactatttaggattgatttttgaatttcaagttgattgcctaaaccatagtttaaaagattttaactttgsatcttaacctagatttgcacagaaggacagaattaactgtggttggtgtattaaaagtgttaagactgggtgttatgctttttactttttgtggattgga

SEQ ID NO: 375405 - DNA, 201 bp, Homo sapiens
caggtacagcagtggcacacgactcaatactgtaaatgatatacatgttttaacatatgcactacagtttcaaaagaagacgacaggaaactcaagggtgtttttttttttcatagaaagttttcatgttttatcttcctgcagttttgtacagtatatttcttctttgccattgtgatgttgataagcaaagcccattta

SEQ ID NO: 375406 - DNA, 201 bp, Homo sapiens
tgggacaattaatcaatgtgggccttgtgcagagaggaatctggtctgaagcctgagggaggatcacctggggttctcttccaaagccagtcaggcaatcyccatggtggggggtggctgtgcagtgggcatgggctcaggcttttgctagttctccctctttcctaattcctgaggctagtcaccccataagccatgaga

SEQ ID NO: 375407 - DNA, 201 bp, Homo sapiens
aattgggcccctttctcgaaagaagagcaaacacgccaccttcctccctaaagactgaggcagtggtgttaaatgggacaattaatcaatgtgggccttgkgcagagaggaatctggtctgaagcctgagggaggatcacctggggttctcttccaaagccagtcaggcaatccccatggtggggggtggctgtgcagtgg

SEQ ID NO: 375408 - DNA, 201 bp, Homo sapiens
tgaataccaaaagctgttttcctcagtttctcagaagttctcactctctcccacgacagccacactttgaacaactaaggccctgaaaaaatgtcagtackgcatatgattttacaccagcttgtgctacttgcatatttcatgcttgatcatttccccagctgggctgtcaactcttttaggacagaggatagaaagagc

SEQ ID NO: 375409 - DNA, 201 bp, Homo sapiens
aatagctaacagagtgcttatgatgtgctgggtactgttcccagtcctgtatgtacgttaactcatttacttctcaccacactcctatgaggtgtgtgcawttgttttgtagatgaggatatttagacatagagagggtaagtaaaggtgttacagctagtaagtagcacggagaggagtgcaagctaaccactggcacat

SEQ ID NO: 375410 - DNA, 201 bp, Homo sapiens
ctacaggtgtgtgccaccacacctggctagttcttgtattttttgtagagatggggtctccagtgttgcacagaccagccttgaactcctgggttcaagcratcctcccacctttgcctcccaaagtactgggattacaggcatgagccaccacagccggtatgcaggtggttcttaaagctctgtaaatgtatcatattg

SEQ ID NO: 375411 - DNA, 201 bp, Homo sapiens
ttattggagggaccccattatcacaagacaaaaccagacttaaaaagtgtcatattgctgttggatctcctggtaagataacaatgcctgttggtaaccarggcttttaaggaactacacacttttaatataacaataaagatatatgggagtctttgataactgtgataattattttgattagaaatgaagagcaggccg

SEQ ID NO: 375412 - DNA, 201 bp, Homo sapiens
ggcagtatacgcctctttattcttgatgaagcagataagcttttagaagaaggcagcttccaggagcaaataaagtaagaaaaataactaacttgactatwaaaacagtgttccgaagtatctatctttagcttttccaagtggtgattattgtttgaataatttacatggtatctgtttttattttgcagttggatttat

SEQ ID NO: 375413 - DNA, 201 bp, Homo sapiens
cagaggagcagcgagtcagggtacggagcgggtagcgttggggaagaggtggccgcgaagcgagacaggccagcggaacggaaaacggaagcacgagacgsgggcgtgacgcaccgggcgcatcacaaagaacggcgagagggcggtggcgccgggggcacggctgggcggctccgcccagaagagggccgagaggcgggg

SEQ ID NO: 375414 - DNA, 201 bp, Homo sapiens; identical to SEQ ID NO: 80979

SEQ ID NO: 375415 - DNA, 201 bp, Homo sapiens; identical to SEQ ID NO: 80980

SEQ ID NO: 375416 - DNA, 201 bp, Homo sapiens
aggcacatacaagtaaccaagcaaatacaacataagagccagactggaattatttatagtgtgatgtgggaccctggggtggggaataaaaaagggtatcraaaggagcaggatcaaaaggagcaggatctggagctggacccaaacagcttaagatatccacttaagaaagatcactccagcacctgtggggtacatggc

SEQ ID NO: 375417 - DNA, 201 bp, Homo sapiens; identical to SEQ ID NO: 80981

SEQ ID NO: 375418 - DNA, 201 bp, Homo sapiens
gctatgtgcatggagacccagaagagatttttgagcaagaaggtgtcagccattcaatgtttattgggtctaccaggtgcttggtgctggcctggagggcytaggatgacaaaattactgtccttgagaagctcacagtttatttaatgtgaggcacatacaagtaaccaagcaaatacaacataagagccagactggaat

SEQ ID NO: 375419 - DNA, 201 bp, Homo sapiens
aaactccctgccaaaaggggcaggttatttattatgctgcctggacaagaataaattgggcccctttctcgaaagaagagcaaacacgccaccttcctccytaaagactgaggcagtggtgttaaatgggacaattaatcaatgtgggccttgtgcagagaggaatctggtctgaagcctgagggaggatcacctggggtt

SEQ ID NO: 375420 - DNA, 201 bp, Homo sapiens; identical to SEQ ID NO: 80983

SEQ ID NO: 375421 - DNA, 201 bp, Homo sapiens
tgtcccatcagtctctaataaactccctgccaaaaggggcaggttatttattatgctgcctggacaagaataaattgggcccctttctcgaaagaagagcwaacacgccaccttcctccctaaagactgaggcagtggtgttaaatgggacaattaatcaatgtgggccttgtgcagagaggaatctggtctgaagcctga

SEQ ID NO: 375422 - DNA, 201 bp, Homo sapiens
  misc_feature (1)...(201): n = A,T,C or G
caggcttgtacattactcctagagtaagctctttttctagtgagagtgaggggagatagtgcttgtgagtatgggatgggtcttacatatttcttaggcangtttctttattacaggattgcttcagtctttaaaaatgttatatctattaaacatcttagtatatttgcatattgtttcttaaatgtatttgatcataga

SEQ ID NO: 375423 - DNA, 201 bp, Homo sapiens; identical to SEQ ID NO: 80976

SEQ ID NO: 375424 - DNA, 201 bp, Homo sapiens
acccttcctgacagctccaaagaggatccctcaaatgcatattctattgagtgcatctcattgctgctgacagccgctttatcaattaaattccacattcygtcttcagagatgccatgaacctccctacctaataaatcataggcccccagttattgttaaatgtcccatcagtctctaataaactccctgccaaaaggg

SEQ ID NO: 375425 - DNA, 201 bp, Homo sapiens
gcaaattttttaaaaattagaaatgtcatttctgattttcatagtcacagatcttttcatagtcatctagttttttcccctatagaggttttctctttatygttaagggcagtgatttctccctgttggaatattgggtgacagatttagttgggtgtacagagttgcagttgtattatttcctagttgataagctttggg

SEQ ID NO: 375426 - DNA, 201 bp, Homo sapiens
atcaactgagtaggaatgagagttttaatcatagaatctgttcagcaaaggatcaagagacttcattgaagtatccagacctgtgggatttatagataacrtggagcataaatagcaacaacaggcaagatctttgtaaagcaggggcttgatatatcttgtctgcctaagacaaaaattgatcacactttgaaaggtctg

SEQ ID NO: 375427 - DNA, 201 bp, Homo sapiens
acgcatgtttaaaactagtaatgatctcttaaaaacaaaaaattctaaaaaacccttgagtggaaatatggcatttttgacgtgcatgttatacagaaaaygtgcactataaatagtgtctattcatatatagatgtatgtctatatagaaaaatacacatataggtcacgcctgtaatgccagcactttgggaggctgag

SEQ ID NO: 375428 - DNA, 201 bp, Homo sapiens
agaaaaatgagagctatgttagctctattttattagttagtggctttgcaatttgattttattctttgatacaaggggggatattttacctcttaaattgytgtgaaggtaattcttgccatattctcctttgtcaccatgtggaaagaacagcatctttaatttgaatactattttgaaaaattggagtgaaatgttttc

SEQ ID NO: 375429 - DNA, 201 bp, Homo sapiens
gctgagaaggtgaatctggttgtaaatctggatgtaccattggattgggagacatacatgcatcggattgggagagctggccgttttggtaaaaaaaaaawaaaaagtttgagtgctttctttaaggggagggatctataatgtgacaggtgggctttgaatattatttttgtgaaaatgatttactacctaacattctct

SEQ ID NO: 375430 - DNA, 201 bp, Homo sapiens
gtttatctttgtccttgaaattagtcattaggaatgaatttccttttcctctgctcctcagtattcagttcttaatttgtctcttgactgtactggaagartataatatgcattggtatccatgctgtatagttaatgcaaacaaataattgctatcttcttcaattcaagacttctcgtgggattgatgctgagaaggtg

SEQ ID NO: 375431 - DNA, 201 bp, Homo sapiens
tagagtaaaggaattttcaggcttatttttcattggaatttgatatgtcaatattctatttttaaggagtaacttggtatatagtaaaaagttagaaaackagtgttcagaaagacaattttattagaatctctcttatagccacatataacttaattctataaaaccaagtttgtctgtattgtgttaagataaaaatat

SEQ ID NO: 375432 - DNA, 201 bp, Homo sapiens
taattatgtattactttgcgggggggggggtgatatgcaaaactttcccttgtgaaaaaagatgaaagtcatactaaaaggaatactcagaagagtgttgyttctcacttgtctctactattctctgtccattttcttcttctttccagctaattcccttctcctcctgcagatttagttatcttttgttaatggcacctc

SEQ ID NO: 375433 - DNA, 201 bp, Homo sapiens
cccacccttctggaccaaaccaatgttcatcttacctatgttgattgatgtcttatgtctccctaaaatgtataaaaccaaactgtgctctgaccaccttrgcctgatgtcatcagggcctcctgaggctgtgtcgtggatgtgtgtcatcaatcttggcaaaataaactttctaaattaactgagacctgtctcagatat

SEQ ID NO: 375434 - DNA, 201 bp, Homo sapiens
ctgcatagaaataagagctaaatccctgaactcgaatgagctcatccagagagtggctgagacagagaagggcaactccagagggcaggtcccacaaacayacctgcatttggggggccagcagagatgggatggggggattagccacaggagggcaggcggcacagtgcagccttgtgaagcccagagggagagagagtt

SEQ ID NO: 375435 - DNA, 201 bp, Homo sapiens
aatatcctgtgaagtgcagaaggtcttttcttttgccttttggtaactggcctaatagattttaaggtttattgaaacaattcctatgtattattattaakttttggtttgcttaggaaaaggcagataaaattttttaaaattaaggttattatattcatgtatctttctgtatgtgcttttaagtatttgtgacattga

SEQ ID NO: 375436 - DNA, 201 bp, Homo sapiens
cccaaatctcaccttgaattgtagtgatccccacatatcatgggaaggacacagtgggaggttattgaatcatgagggtgggtttttcccttgctgttctyatgatagtgaataagactcacaaaacctgatggttttataaaggggagttcccctgcacatgttatgtgctcttgcctgctgccatgtccctttgctctt

SEQ ID NO: 375437 - DNA, 201 bp, Homo sapiens
tggagggaggtattgaggacaaaagagtgtaccggttgggcaccacagggtggataggcaaaacaatttggttgataaggtggagatcctgaacttacccrtaggacttgtccagtttttggacaggtaaaatgggggaattgtaaagagagtttataggctttaggaggccatgctgtaacaggcaattgataacaggat

SEQ ID NO: 375438 - DNA, 201 bp, Homo sapiens
ggataagggagaaacaggaggaatggagggtggaaagttgcccatagtgaaggaggcaagccagagaaaagagagggtagagacacggagagaagtggttkgtggtggtacttgcccccctggggaggtggtgcttgctaccaaggtgaaagatcaaggcaagcatccctgcggtgatcagacacctctgaaatgtgggtg

SEQ ID NO: 375439 - DNA, 201 bp, Homo sapiens
gtgacctgggtttgggctacctgagcctttgtgggtgagacctgatatcctcaactatagaggaattttaaaagctgagtggtgtgttggatggacaggtyaaaggaggggctacagagaaggaggttattgatgtattggaggagggtgttaggagcaaggggaagttcagctaggtccttggtgaaggcctgttcgaat

SEQ ID NO: 375440 - DNA, 201 bp, Homo sapiens
tgagcttgatgtaaaaaactcatacactaaataattggttagaacaatgaaattttcttaaggaattgatttattcttaataaattataagagcttttaattttttttaaccctgatatgatttggctctgtgtccccacccaaatctcaccttgaattgtagtgatccccacatatcatgggaaggacacagtgggaggt

SEQ ID NO: 375441 - DNA, 201 bp, Homo sapiens
tgaaaaacaaatttaattggcttcatgctgttttattagggtttatagtttggaaaatgaagtctcctttctcaaataataaaggtttttgactttttttkgggaaatacttgagttatcactttggttaaatgaatgacttattttacaatgacttctgatatcaagtgttttaaagctttgatattttacaaactttcc

SEQ ID NO: 375442 - DNA, 201 bp, Homo sapiens
attgacttagtgtatattatctatagtaattatgttatgttaattagttatgatcatttaaaatagttatgttaaattattgtgtgccacagaggtaatamattcccttgtcaattgtgtctttgactatggctgccctgaaactttttgtcatccacagacaattgtcttgtttaggtcctctttagaagatgctattat

SEQ ID NO: 375443 - DNA, 201 bp, Homo sapiens
ccccttgggaaaactggcctcatacctagtctatacagtccctgtacagggttcctgacctgaggtaagtaaagaatgacagtttctgacaggcccaggarccccaagtttatcttggaacctcaaggggagaggaattcacccaattcaagtatttgatggtaaaaatctatggctgggcttggctttaacaaagtttta

SEQ ID NO: 375444 - DNA, 201 bp, Homo sapiens
tgtgtatctgtgtatattccattctgtacagtttttaggtagttcaagaattgcaggcttttaatcagatcacaaaaagaatagaccttcagcattagctyggtcaggtttcttaaacttaggtttataatgtaaccgtctgtaatatatctctcatttgaccctgtgggccataaaataaaatttataaactagatattg

SEQ ID NO: 375445 - DNA, 201 bp, Homo sapiens
gcaaatcagtcctaccatgatttttctttattaaaaatgggaaactgccgagatcgcgccactgcactccagcctgggcgacagagcgagactccatctcaaaaaaaaaaaaaaaaaaaatgggaaactggagaatgaaaaattatgtttcaaaaaatatagtacacctgtttttaccttggattgaattataatttttct

SEQ ID NO: 375446 - DNA, 201 bp, Homo sapiens
caaatcagtcctaccatgatttttctttattaaaaatgggaaactgccgagatcgcgccactgcactccagcctgggcgacagagcgagactccatctcaaaaaaaaaaaaaaaaaaaatgggaaactggagaatgaaaaattatgtttcaaaaaatatagtacacctgtttttaccttggattgaattataatttttctt

SEQ ID NO: 375447 - DNA, 201 bp, Homo sapiens
cacagcagaggcaagtaattgtaactcagaaatgcattactgtctagctgcctcctctctattattgtacaccttgaaggcaaggatgattaattcctgtygtggggggggtttgaggtctggattctaatttttgaagttgtatttaatgtctggagcagattaggtaataaaatgcatgttgagaataagacagccttc

SEQ ID NO: 375448 - DNA, 201 bp, Homo sapiens
agccagactgggtgtgaggaggggaggtgatagaaggattataggatggaggagcggaggctgaggaagaattggagcctgattcagcctggcagggtgcratctgaggtggagcagtctagggaggaggggagaggtcagatgggtcggtagaaaaggaagatagaaaagacttagcagcgtttggggttgggactgagg

SEQ ID NO: 375449 - DNA, 201 bp, Homo sapiens
tttttgagttttacttgcttccaacaaggaaagcaagatttcctgtttccatgatgttggaaggcaggtaactcctttatggaatttgagctcactcccarcaggcaggatgagtttgagtttcttcctgcttctaggatggtagaggacagtcttcagcctgagacccatccctaggtaagtagctgaatttgggttttg

SEQ ID NO: 375450 - DNA, 201 bp, Homo sapiens
gccagaggagtcgtgcattcactcagcaaactcttactgagcacctactatgtgccaagtgttgggttacagaggcgaagcagacgcagagcctaccctcrtggagttctcagtttactggaaagacataatcacaatatttatggtagttatgacttactgagcacctacagggtgccaggcactgtcccgggccgttct

SEQ ID NO: 375451 - DNA, 201 bp, Homo sapiens
  misc_feature (1)...(201): n = A,T,C or G
tcagtttactggaaagacataatcacaatatttatggtagttatgacttactgagcacctacagggtgccaggcactgtcccgggccgttctgcctgactnatctcatcgaattatcagcgttactaagtgagtctggttctatgattatcctattttacacagataaaactgagacccaaagaggagaaaaagctggttc

SEQ ID NO: 375452 - DNA, 201 bp, Homo sapiens
agacattgatatttgtttaatgaaactagctacatcttgaatttagtaagattaccataacttctaatcttgtggctttaggcagtctagtccacagacartaaggtttgttttgggaaaggactgttatcatctttatttcaaagctaaactataaactaagttcctccaaaagttagtttggcctatgcccaggtatga

SEQ ID NO: 375453 - DNA, 201 bp, Homo sapiens
agtggtagttttttttttttttttttgagatgggatcttactctgttgcccaggctggagtgcaatggcacaatctctgctcactgtaacctccgcctccygggttcaagcgattctcctgcctcagcctcctgagtagctgggattacaggcatgtgccaccatgcctggctaattttatatttttagtagagacggggt

SEQ ID NO: 375454 - DNA, 201 bp, Homo sapiens
gtctgggggtttaaccccctgtgatttgcagcagccctgcagggaaatcctcaacaacaattaatttgaaagaataaggctcatccaggaaactcatatamgggctgattgcccagcgttttgagccctctctgaagtcctagacctctggagagagaaactgagacatgtaagagggtggaaacaactcagtggtgacac

SEQ ID NO: 375455 - DNA, 201 bp, Homo sapiens
gagtaaccaggggccttgtgggagtgtctgggggtttaaccccctgtgatttgcagcagccctgcagggaaatcctcaacaacaattaatttgaaagaatraggctcatccaggaaactcatataagggctgattgcccagcgttttgagccctctctgaagtcctagacctctggagagagaaactgagacatgtaagag

SEQ ID NO: 375456 - DNA, 201 bp, Homo sapiens
atcaaaaatctagaaaaggcttttaatgacttgaacccctttaaataattcagaacaaaggcaccaatcaccccttttgggatgttcttctttctttgtgraatttcgagagtcatgggcagattcttcttaggtctaaagctctgttttcctgtattgaatgagctgacctttttggctttgggggtaccagagattact

SEQ ID NO: 375457 - DNA, 201 bp, Homo sapiens
gatacaaatgaatctacctcttcatcttttccagagagcatacttcatgctgttttctactttaagaattgttgccccagaatagccatctcacatccacmccaccctggcctgactgccccactcatattataaatctctcagcacataccaggcatggtggctcacacctctaatcccagcgctttgggaggctgaggc

SEQ ID NO: 375458 - DNA, 201 bp, Homo sapiens
gcttccgtgtttcccagctcacaggtgcactcctaccctggggcctttgtacttgctcttccctctgcctggagctttcttcccctaggatgtccccatarcttgctccttcacggctttactcaagtgtcacctccccagcaagacctttcttggccaccctgtttaaagtggccactccagcccagtgtggtggctcat

SEQ ID NO: 375459 - DNA, 201 bp, Homo sapiens
ttatgaaatttatttttcatatagttatatttctttgtgattgtattctattttgggttctattcacatcctagttgattttaattatgtattactttgcgggggggggggtgatatgcaaaactttcccttgtgaaaaaagatgaaagtcatactaaaaggaatactcagaagagtgttgcttctcacttgtctctacta

SEQ ID NO: 375460 - DNA, 201 bp, Homo sapiens
gactgcaaacaagatgctgtttggaccatgttcctatgtgaagatcataaccctccacttggtcctcctccatgctcctccatggcctcaactcctagagktcctctccataggcagttacaacatgacagttaccttcttcaaggccaccaggagaatttctcaattcaatccgctaaggcagagtcttctataatgtaa

SEQ ID NO: 375461 - DNA, 201 bp, Homo sapiens
tctaatttttgttatttcttttcttctacttactttggacttaatttgctctcctttttttatttcataaagtagaagcttagattattggttttaggtctttttttttttctaatgtgtgtgttcaatgctatacattttcctttaaacactgttgtcactgcatcccataaattttttggggggtaatttctgctttgc

SEQ ID NO: 375462 - DNA, 201 bp, Homo sapiens
ccttccctttacttttaatctatatatgtctttatatttaaagagtctcgctctgtcacccaggctggagtgcagtggcacaatcttggctcactgcaacstccacctcctgggttcaagcgattctcctgcctcagcctcccaagtagctgggactacaggcatgtgccaccacacccagctaatttttgtatttttagt

SEQ ID NO: 375463 - DNA, 201 bp, Homo sapiens
attacaggcatgagccaccgcaccctactgcatcttacaaattttggtgttatattttcattttaatttagttcaaaatatttttaaattcctcttgagattttttttttgacccacgtgttatttagaagtgtgttgtttaatctccaattattctgagattttctagctatcttatgttactgatttctagtttaattc

SEQ ID NO: 375464 - DNA, 201 bp, Homo sapiens
aaattagccaggcatggtggtgtgcacctgtaatcccagctactcaggaggctgaggtgagagaatcacccagactgggtgatagagtgagactgtctcaaaaaaaaaaaaaaaaaaaagggctcacatgaccgagtgtggtggctcatgcctataatcccagcactttgagagaccaaggcaggaggatcgcttgagctc

SEQ ID NO: 375465 - DNA, 201 bp, Homo sapiens
ccatgcttttggaggtagaacactgttaaccagcccttatcttcaatcagttcactatttactgactttcttttttcttcttttttttttttttttttttktgagacagagtctcactctgtcacccaggctggagtgcagtggtgcaatcttggctcactgcaacctctgcctcccagattcaagcgattctcctgcctc

SEQ ID NO: 375466 - DNA, 201 bp, Homo sapiens
ttaagactcaaaggaaacaagtggctagtgttagaatgacttttaggaggaggccaacagcccacttagggctacatagagcaagtctttctttcttttcttttttttttttgagatggagttttggtcttgttgcccaggctggagtgcaatggcgcacctctgcctcccagtttcaagcgattctcctgcctcagaccc

SEQ ID NO: 375467 - DNA, 201 bp, Homo sapiens
acatagagcaagtctttctttcttttcttttttttttttgagatggagttttggtcttgttgcccaggctggagtgcaatggcgcacctctgcctcccagkttcaagcgattctcctgcctcagacccctgagtagctgggattacaggcatgagccaccatgcccagctaattttgtatttttggtagagatgggatttt

SEQ ID NO: 375468 - DNA, 201 bp, Homo sapiens
acataccaggcatggtggctcacacctctaatcccagcgctttgggaggctgaggcaggaggatcacttgagctcaggagttcgagatcagcttgggcaacctagggagaccgcatctttagaaacaaaattaaaaataagctggatatgatggcacacatctgtagtcccaactactcaggaggctgaggtgggaggatt

SEQ ID NO: 375469 - DNA, 201 bp, Homo sapiens
aaaaaaggaaaaaaaaaaaaaaggaaacagaatacaaggtcaggcatggtaactcacacctgtaatcccagcactttgggaggccaaggtgggaggattgyttgaggccaggagttcgaggccagcctggccaacatagtaagaccctgtatctacaataaaagaaaaagaaagaaaacagagtacaaagggtggagtctg

SEQ ID NO: 375470 - DNA, 201 bp, Homo sapiens
aagaattgtatagagttcccatataccgcccccttatcccaacatatacagattttcctcttattaacatcatgaattagtgtggcacacttgttaaaatkgactcaatattgatatattattattaaagcccatagtatacattaaggttcacctttgtgatgtgcagttctatgggttttgacaaatgcataatgtcat

SEQ ID NO: 375471 - DNA, 201 bp, Homo sapiens
ttcccgttcgggccattggaagagcacctgactttaagttcagctgccctagagaacagccagcctgtatcttgttgggggaggaggagttgggtgcagawctgggacgagaggagcaggattattgcagctgtatcagacccccagggtagggctgaatcatccactgggtgcaaaagtgcttgacatgcttcctttttc

SEQ ID NO: 375472 - DNA, 201 bp, Homo sapiens
gcaggagaattccttgaacctgggaggcagaggttgcagtgagctgagattgcactgctgcactccagcctgggcgacagagtgagactctgtctcaaacaaaaaaaaaaattatagtaattaggcagagtgatattagggcaagtgtagaaaaatagatcaaagcaacataagggaagcccagaaatagatctaagcata

SEQ ID NO: 375473 - DNA, 201 bp, Homo sapiens
caccatctgtgtttacttctgtcttcacgatctgtttcccaccagccacaagggcagctctgtgaaggcacaagttctgtctcattcaccgtgggatcccwgtgcctggcacgtagtagacacttcataaatatttttgatattgagttgaattcacagggttcttccgggagcccagtggttagtcctaggaagagaagg

SEQ ID NO: 375474 - DNA, 201 bp, Homo sapiens
ttgaatcctggataaagtttttgttccaactttttgtttttccaagttgaatagttgttgaagggggccagcccctccacacttgtggctatttctcgtcrggtgggatgagagactgagaaaagaaataagacacagagaaaaagtatagagagagaagagtggacccaggggaccagcgcttagcatacgaaggaccag

SEQ ID NO: 375475 - DNA, 201 bp, Homo sapiens
tgttaaactcatgttacagagaggcatgcaggactttgcaaacaaggtactaaacattactgattgataacttgtatggcatgaaagttaaaagtggtagttttttttttttttttttgagatgggatcttactctgttgcccaggctggagtgcaatggcacaatctctgctcactgtaacctccgcctcctgggttcaa

SEQ ID NO: 375476 - DNA, 201 bp, Homo sapiens
gacctcagctgatccgcccacctcggcctcccaaagtgctgggattacaggagtgagcccccacgcccggccaaaagtttttatattataaaaatgccatmaataaaagacaactggcatgcttacagaatatatttgcaacatatatagcaaacacttgttgtcttgttttccaatgtgttgcctcctggaagccgctga

SEQ ID NO: 375477 - DNA, 201 bp, Homo sapiens
ggaatgtaaactggcacatccattgaagagagtattttaggaatgactggtaacgttgaaaatgtgcatgcccctcatctgacctatgcaatatgcttacaaaaaacatttaacctgataatcatgaggaagcaataggcaaatccaaattggtgagtattctgcaagacaactggtctgggttcaagagcatcaatgtca

SEQ ID NO: 375478 - DNA, 201 bp, Homo sapiens
tcccattttccttcaattgtgatattctggatgacagagaagagaacccagtccagacttctcccttctcccatgggggtcaggtgggaggcagggcagtrttttgctggtaagttctgcaggagggggtgtgggcaggcccttctcattggcacatcccagctcagagtcccagcatccacacaggagcaggatgctatg

SEQ ID NO: 375479 - DNA, 201 bp, Homo sapiens
tccgactggagacggggagcccgcgagacccgggtctccagggtctgcccaaggaagttgctcatgggagcagacctctagagcaggatttgaggccaggscaaagaggttagttactgatgggggctgcataaattgggggttgtggagggacgccagctgggagggagagactggagaagggggtgtgtggagagccca

SEQ ID NO: 375480 - DNA, 201 bp, Homo sapiens
ggatcacttgaggccaggagatcgagaccaatctggccaacatggtgaagccctgtccctactaaaaatacaaaaattagccaggtatgatggtgcacagytgtagtcccacctactcaggaggctgaggcaggagaattgcttgaacccaggtggcggaggttgcagtgagctgagatcgcaccgctgcgctccagcctg

SEQ ID NO: 375481 - DNA, 201 bp, Homo sapiens
tagaccttctgcactcaggtgattctcccacctcagcctcctgagtagctgggactgcaggcacgtgccaccatgcctggctaattatatatacatttttwaatagagacagggtttcaccatgttgcccaggctggtctcaaactcctggacttgagcagtctgccttggcctcccaaactgctgagattataggcatga

SEQ ID NO: 375482 - DNA, 201 bp, Homo sapiens
tcactttgcatttggtcctcgtagtgcctaacgggacctctgcccacaaaattgctcaagaaagatttgctgggttggattgggattgaggcaggtggagyggccttgaattgtagatgattcaggctcatgagcctagaaccttgggcaccatctgtgatcttgccaggcagagtgacagcctttcctagggtttctccc

SEQ ID NO: 375483 - DNA, 201 bp, Homo sapiens; identical to SEQ ID NO: 81002

SEQ ID NO: 375484 - DNA, 201 bp, Homo sapiens
ggcggctggaggagaagggctgcaacattcgcacacagtcctacaaatacagattcgcgtggggcgtggtcacctgcggtaaggctggggcttcccgttcrggccattggaagagcacctgactttaagttcagctgccctagagaacagccagcctgtatcttgttgggggaggaggagttgggtgcagaactgggacga

SEQ ID NO: 375485 - DNA, 201 bp, Homo sapiens
tatgggcggctggaggagaagggctgcaacattcgcacacagtcctacaaatacagattcgcgtggggcgtggtcacctgcggtaaggctggggcttcccrttcgggccattggaagagcacctgactttaagttcagctgccctagagaacagccagcctgtatcttgttgggggaggaggagttgggtgcagaactggg

SEQ ID NO: 375486 - DNA, 201 bp, Homo sapiens
aacaaatgctcgcctgttgtctgactggatagaagaggggagtccaaatgggaggataatgcgggtaatacagagaatagaagtgacagtgtgtgtgtggtttttttttttttgatggtggtaggaaaagtttctgtccatccagagaatgtatctattattgtcagaaggtactggatttgttttacagggggtcatgtg

SEQ ID NO: 375487 - DNA, 201 bp, Homo sapiens
tgagcacctcctctgggccaggcactattctcagtggtagaatagaggtgtgcatccgcccagcctctgcctgcaaagaaccatcagggtagacatccttraaaacaggcaactacagcactgtgagctaaaaggagtatgagatgtagaatcaccggctttccttctgccctcctgctgtgggcgtcaagtgctctctgt

SEQ ID NO: 375488 - DNA, 201 bp, Homo sapiens
gcaggagggaagatggcttgagcccaggaggtggaggctgcagtgagatgtgattgtgtctctgcactccagcctgggggacagagacagaccctgtctcaaaaaaaaaaaaaaaaaaaaaatccaagtcttctcaaaaaagtgtgtgtggggtggtggtgtgaagggtggaattaacagaagtagaaaatggagaatact

SEQ ID NO: 375489 - DNA, 201 bp, Homo sapiens
gaaaatcaaaagcatgtttagtgcccagggatgctcagaggcagtggagtagagtcagtcaaggaaatagattcacagttctgggctaaacccttggggamctcacttcaattgtctgagcctcaatttccttatctgtaaaatcaacaactgttattcattgaacaagtgactgtttaaaaggacagacaccgggcctgc

SEQ ID NO: 375490 - DNA, 201 bp, Homo sapiens
gtaatctcagctacttgggaggctgaggcaggagaatcacttgaacctgggaggtggaggttgcagtgagccgagatggtgccactgcactccagcctggygacagagtgagacaaaaaaaagaattcgactgagggacataaggcagaaggagagactgaggcaagtttcacagcagaagtgaaagcttattaaaaagct

SEQ ID NO: 375491 - DNA, 201 bp, Homo sapiens
tcaaagcgtcctaaaatatagaaaatcaaaagcatgtttagtgcccagggatgctcagaggcagtggagtagagtcagtcaaggaaatagattcacagttmtgggctaaacccttggggaactcacttcaattgtctgagcctcaatttccttatctgtaaaatcaacaactgttattcattgaacaagtgactgtttaaa

SEQ ID NO: 375492 - DNA, 201 bp, Homo sapiens
ttgggaggctgaggcaggagaatcacttgaacctgggaggtggaggttgcagtgagccgagatggtgccactgcactccagcctggcgacagagtgagacaaaaaaaagaattcgactgagggacataaggcagaaggagagactgaggcaagtttcacagcagaagtgaaagcttattaaaaagctttagagcagggatg

SEQ ID NO: 375493 - DNA, 201 bp, Homo sapiens
gtttgaaccagggaggcagaggctgcagtgatctgagatagggctactgtcctccagtctgagggaaagccagacttcgtctcaaaaaaacaaccaaaatmaacaactgcttctgaatacacaatggaaaaaaatccccaggggttgtgccagggtgaggggaagtagggcttcctgtgtgacttaccaggaatcttggag

SEQ ID NO: 375494 - DNA, 201 bp, Homo sapiens
gctggtctcgaactcctgacctcaattcgggcctgcctcgggctcccaaagtgctggtattacaggcatgagccactgtgcctggcctggaaatgtggatktctgtctaggatctcttagcatttatacattggcagctaattccattttgttttttttaaagcaccgtgtagatcaagcaaagcatttcttagggctgta

SEQ ID NO: 375495 - DNA, 201 bp, Homo sapiens
ccaccacacccagctaatttttgtactttttagtagagacagggtttcacctcactggccaggctggtctcgaactcctgacctcaattcgggcctgcctygggctcccaaagtgctggtattacaggcatgagccactgtgcctggcctggaaatgtggatgtctgtctaggatctcttagcatttatacattggcagct

SEQ ID NO: 375496 - DNA, 201 bp, Homo sapiens
tggtataaggcaaggctggcgtaggttgggggccaagctgtgcgaggccatgtcctgtgaggggagacaggtgcctctgacttgggcggatgtgctatgtsctgttacagaggttaggaagattgacccaggaaaaaaggaggaagccatgaactctgctggggagctatcagggaaggtgtctcaaaagaggaggcacct

SEQ ID NO: 375497 - DNA, 201 bp, Homo sapiens
ctttcttcccctaggatgtccccatagcttgctccttcacggctttactcaagtgtcacctccccagcaagacctttcttggccaccctgtttaaagtggmcactccagcccagtgtggtggctcatgcctgtaatcccagcactttgggaggccgacgtgggtggatcacttgaggccaggagatcgagaccaatctggc

SEQ ID NO: 375498 - DNA, 201 bp, Homo sapiens
ggcctggagagcgggctcttaaggaggccaggccacacctcaagggaagatggaggttaccggaaggtcatacctaaaattacgggcaaaaccagggagarttatgaacaggctgagttaggacttgtgtttacgttaatctgaggccttgcttggatttctttttaacctaaaccacaggcaaatattcccctttaggga

SEQ ID NO: 375499 - DNA, 201 bp, Homo sapiens
  misc_feature (1)...(201): n = A,T,C or G
actcagcaaactcttactgagcacctactatgtgccaagtgttgggttacagaggcgaagcagacgcagagcctaccctcatggagttctcagtttactgnaaagacataatcacaatatttatggtagttatgacttactgagcacctacagggtgccaggcactgtcccgggccgttctgcctgacttatctcatcgaa

SEQ ID NO: 375500 - DNA, 201 bp, Homo sapiens
aggcccagggggaggtgcgcaggcacagcctctgttgaaggagtctctctaaggctgctagggtccttcacctgtcattgtcaggcctggagagcgggctyttaaggaggccaggccacacctcaagggaagatggaggttaccggaaggtcatacctaaaattacgggcaaaaccagggagaattatgaacaggctgagt

SEQ ID NO: 375501 - DNA, 201 bp, Homo sapiens
aggaacccccaaggatggcaccgattggtgagctgatcgctataactgccctttaggctccaggctctgcacccatgttttcttattcaattccatatcarttctggaagatgagtattaaagtaccattttacaaataagaaaactaagcctcaaagaaattagctggcaatcccaagatctcagtggcctaaggtgtca

SEQ ID NO: 375502 - DNA, 201 bp, Homo sapiens
gagaaggtgacagggaagaacgccctgacaaactacggcttctacggctgttactgcggctggggcggccgaggaacccccaaggatggcaccgattggtragctgatcgctataactgccctttaggctccaggctctgcacccatgttttcttattcaattccatatcagttctggaagatgagtattaaagtaccatt

SEQ ID NO: 375503 - DNA, 201 bp, Homo sapiens
ggtggagagccagggtgggatctgaatgggccacgggggcattgcctgatagatctgttgtgggatgtgtttttttttccagaaccccagagatgaaaggyctcctcccactggcttggttcctggcttgtagtaagtgctggccccgtgaccttcgaatgaacttttaccccatgggagtaacagggtggtgaaaaggac

SEQ ID NO: 375504 - DNA, 201 bp, Homo sapiens
gggccctcagtggacctacagttttttgcctcatcttttctggctggactcatcttgtttattgcccaccatgacggggagtggaatagatggggcctggwggagagccagggtgggatctgaatgggccacgggggcattgcctgatagatctgttgtgggatgtgtttttttttccagaaccccagagatgaaaggcct

SEQ ID NO: 375505 - DNA, 201 bp, Homo sapiens
ggtaatgtatgaagttgacaaagggggccctactgccagaggctgggggtggagacttagagtatctcacaaagaagacaaaaggagatttgagtgggagwgaaattttggaagataccctgcagccatagctcctggattagtgtaggaaataggagtggtctatccagggatgtggggaaggaataacaggaaagatct

SEQ ID NO: 375506 - DNA, 201 bp, Homo sapiens
tattctggaacccctgtggaagtccatattagttgggtggatgtgtgagtatcaggatctgaccaagtgaaagtagaaagactttgggaagccagatccargggaatagtaaaaaaggcattctttggatccaatacagaaaagtgtgtggtagataggggaatatgggagactagagtatgtgggttggggaccactgga

SEQ ID NO: 375507 - DNA, 201 bp, Homo sapiens
aggacagccagccacaggccctgattgtgcaggacttcctgcctctgcaaaggcagtcgggggctgagcagggttctacccggctgggtccaggcagaagkttttcctccccacctccgggtttgtcctcatcatcggtcactcccattcacagctttaagattctggaggccaagaatttgactccccccggatccatgg

SEQ ID NO: 375508 - DNA, 201 bp, Homo sapiens
agtggctaaagccgtgacctggatatttcaggactcaaatccacccgcattggaattctctgggtgactgcccagcccctttggcaggacagccagccacrggccctgattgtgcaggacttcctgcctctgcaaaggcagtcgggggctgagcagggttctacccggctgggtccaggcagaagtttttcctccccacct

SEQ ID NO: 375509 - DNA, 201 bp, Homo sapiens
agaaagaaagaaaccagattaaagaactttctagattaaaggacaccaaagagccacaacaattagatgcaatgcctgattcttgttgggattctggatcrgaaaaaagccaacaaattggatataaaaaccattattgggacaataggggaaatttgtatattagatagttttactgtatactagatacagtattgtgtt

SEQ ID NO: 375510 - DNA, 201 bp, Homo sapiens
tgcctgctgtgcaaggaggcttgctggacctaaaatcaatgatcgagaaggtgacagggaagaacgccctgacaaactacggcttctacggctgttactgyggctggggcggccgaggaacccccaaggatggcaccgattggtgagctgatcgctataactgccctttaggctccaggctctgcacccatgttttcttat

SEQ ID NO: 375511 - DNA, 201 bp, Homo sapiens
caataggcaaatccaaattggtgagtattctgcaagacaactggtctgggttcaagagcatcaatgtcattttaaaaaagaaaccagattaagtctggccrtggtggctcacacctgtaattccagcactttggaaggctgaggcaggtggatcatttgaactcaggagtttgagaccagactgggcaatatggtgaaacc

SEQ ID NO: 375512 - DNA, 201 bp, Homo sapiens
ggctggaggagaagggctgcaacattcgcacacagtcctacaaatacagattcgcgtggggcgtggtcacctgcggtaaggctggggcttcccgttcgggycattggaagagcacctgactttaagttcagctgccctagagaacagccagcctgtatcttgttgggggaggaggagttgggtgcagaactgggacgagag

SEQ ID NO: 375513 - DNA, 201 bp, Homo sapiens
tttaacctgataatcatgaggaagcaataggcaaatccaaattggtgagtattctgcaagacaactggtctgggttcaagagcatcaatgtcattttaaaraagaaaccagattaagtctggccgtggtggctcacacctgtaattccagcactttggaaggctgaggcaggtggatcatttgaactcaggagtttgagac

SEQ ID NO: 375514 - DNA, 201 bp, Homo sapiens
cagaccattcgttgaagaagaaatccaaatggccataaggtgtgtgtaaaaatgctcagttgcaccaacagctaggggaagcaagtgaaaacaatgatacrcaattttatactcatcagattgggaagaattgacaaatgtgatattatcaagtgctggctatggtgccgctaggaatgtaaactggcacatccattgaag

SEQ ID NO: 375515 - DNA, 201 bp, Homo sapiens
tgaattaaaggattaaagccctaagtgtaaaaccccgaaatttagaaccaataggagaaagatactgagaaaaatattgttaaactcatgttacagagagkcatgcaggactttgcaaacaaggtactaaacattactgattgataacttgtatggcatgaaagttaaaagtggtagttttttttttttttttttgagatg

SEQ ID NO: 375516 - DNA, 201 bp, Homo sapiens
  misc_feature (1)...(201): n = A,T,C or G
ctcagcaaactcttactgagcacctactatgtgccaagtgttgggttacagaggcgaagcagacgcagagcctaccctcatggagttctcagtttactggnaagacataatcacaatatttatggtagttatgacttactgagcacctacagggtgccaggcactgtcccgggccgttctgcctgacttatctcatcgaat

SEQ ID NO: 375517 - DNA, 201 bp, Homo sapiens
ttctgcctcatactacacatgaaaataaactccaaatgaattaaaggattaaagccctaagtgtaaaaccccgaaatttagaaccaataggagaaagataytgagaaaaatattgttaaactcatgttacagagaggcatgcaggactttgcaaacaaggtactaaacattactgattgataacttgtatggcatgaaagt

SEQ ID NO: 375518 - DNA, 201 bp, Homo sapiens
aaaaaaataaataaaaaataaatacataaaaataaaataaaatcagaggggaaacactgggctgttcaacaaaaggtgctggaatcattgactttccttaygggtaaataaaactaaatttctgcctcatactacacatgaaaataaactccaaatgaattaaaggattaaagccctaagtgtaaaaccccgaaatttaga

SEQ ID NO: 375519 - DNA, 201 bp, Homo sapiens
gcaacataagggaagcccagaaatagatctaagcataggtggaaacttacgtgataaagaaaacattaaaatcagaggggaggccgggcgcggtggctcaygcctgtaatcccaacactttgagaggctgaggcaggcggatctcctgaggtaaggagttcgtgaccagcctcgccaacatggtggaacctcatctctact

SEQ ID NO: 375520 - DNA, 201 bp, Homo sapiens
gcccattccatcattttttcagtcgactttctgagtctatcaaactgcagtaaattctcctttggcctcaggatggagccaggatcttctccagtcaaatrtctctgaggccagctggggtcagtggaaactgtggggagagggatggggaagagcaggttctatctttgctcacatcctggagttgtttctgacctgccc

SEQ ID NO: 375521 - DNA, 201 bp, Homo sapiens
gtcaggtgccaaaaaagggctaccacctggacgtggcaggcaacattctgtggtgtttctgcaggcatctcccgagtcaccccagctcaggaacaaggcaraaaaagttgggggttggcaagttaggaacaagaggaagaggacggggacaaagctgcaagtccgggagcggggctgcctgtcttctctggcagttcctgg

SEQ ID NO: 375522 - DNA, 201 bp, Homo sapiens; identical to SEQ ID NO: 81004

SEQ ID NO: 375523 - DNA, 201 bp, Homo sapiens
catttctcttagtctgtgacttttgtattgttcacaaagcaggagtttcatattttaataaagtccaacttaacatttcttttcccagctccacattcagyggtatcatgttggtaacttgggatcagccatattgggggtatttacactgaagaaattggcagactctacaaatcagggatttccaccttccttacaaga

SEQ ID NO: 375524 - DNA, 201 bp, Homo sapiens
ggggcttctcaaagcctgggggtctctaaggatagaggctaacacagttcggatgtttgtccccacccagatctcatgttgaaatgtaattcccaatattrgaggtggagcctggtgggaggtgttcggatcatggaggcagatccctcaagaatggcttgggccatccctttggtgatgagtgacctctcactctgagat

SEQ ID NO: 375525 - DNA, 201 bp, Homo sapiens
atctcgactcactgcaacctctgcctcctgggttcaagtgattttcctgcctcagcctctggagtagctgggattacaggcctgtgccaccacacctggcyaattttgtatttttagtagagacagggtttctccatgttggtcacgctggtctcgaactcccgacctcagctgacctgcccacctcagcctcccaaactg

SEQ ID NO: 375526 - DNA, 201 bp, Homo sapiens
agatttcttcttggtttggatttattggtggtgagctagtgtgatcttatgggggtgttaaagaaccttgctctgtcatattaccagaattgattttctcrttccttctcatttggggtagactatgtcagaggaaagatctggggttcaagcgttgctgttcagattcttttgttccatggggtgatcccttgatgtggt

SEQ ID NO: 375527 - DNA, 201 bp, Homo sapiens
gtaagtattcaggtttttcaggcaatgggcgggatcatagagctcccaagagattatgttttttgtctttggctaccagggctggtagagatggaccatcwggtgggagcagggttaggcatgtctgagctcagactctccttgggtggggcttgctgcaatggctgtgggggatagggatgtggttctcaggccaatgac

SEQ ID NO: 375528 - DNA, 201 bp, Homo sapiens
ttattttggaccgggttcgtgtggttagattaacaggaagggctgtgaacagctggatttgtgtggacaaacaaatctaacagttggaaaaaagaggggakcgtgactgatttaagaggtaatgtatgaagttgacaaagggggccctactgccagaggctgggggtggagacttagagtatctcacaaagaagacaaaag

SEQ ID NO: 375529 - DNA, 201 bp, Homo sapiens
ttgtagtgctggcttggtaatggcaaattctctcagcatttgtttgtctgaaaaggactttatctttctttcatttctgaagcttagttttgctagatacragattcttggttgataattgttttgtttaaagagactaaagatacaaccccaatcccttctagcttgtagggtttctgctgagaaatctgctgttaatct

SEQ ID NO: 375530 - DNA, 201 bp, Homo sapiens
gcagtggggtgagaatggagctggagccagaggagtcgtgcattcactcagcaaactcttactgagcacctactatgtgccaagtgttgggttacagaggygaagcagacgcagagcctaccctcatggagttctcagtttactggaaagacataatcacaatatttatggtagttatgacttactgagcacctacagggt

SEQ ID NO: 375531 - DNA, 201 bp, Homo sapiens
aaaatggagtttcttatgtcttctttctacatagacacagtaacagtctgatctctctttctttccctgacagttgttagtaagggtatcccctgtgaagscttgttggtcagggaggagatgaaggctgtttggttttggagagacagagagagggagagagagaaatgggtttttgtaattaatagccattgtggttct

SEQ ID NO: 375532 - DNA, 201 bp, Homo sapiens
gcagcggctgcctccaccatcagactgggagtcccccagaggaaggaaggtgcttcctctatcagactgggaactccctgagggcaggagctgtctcctgsactgaaacctcaccctgagcagcagctgtgccccttccatcagattctctattcccccgatttaggagccatgcctcttccatcaggctgaaagctcctc

SEQ ID NO: 375533 - DNA, 201 bp, Homo sapiens
tgggatcctgggacagaaaaaggacattaggtaaaaactagggaactctgaatcaattatggcttttttttttttacaattagtgagataatgatgtattwtttagtgaataattatcaataatgtatcaatattggttcattaattctaacatgggtctcatactaatataagatattagtaataggaggaactgggtgt

SEQ ID NO: 375534 - DNA, 201 bp, Homo sapiens
gatactgctagacatatataaaggaaagggatgattaagcaaatgaaggacagatggttggggccaagtttctcactgttggagtgggataagccagggcrggaagccagaatgatccatgtgcaaaaggactaaagttggagacatcagtatggactcctgtttagcttattgtagatacagatgtttacatgtggaagt

SEQ ID NO: 375535 - DNA, 201 bp, Homo sapiens
aagagggattttccttagtatatatgaagacttaaaaaaaattacagtaattaggccaggtttggtggctcacgcctgtaattccagcactttgggaggcygaggcgggcagcttgcctgagctcaggagttcgagaccagcttgggcaacacggtgaaactctgtctttacaaaaatacaaaaaattagccaggtgtggt

SEQ ID NO: 375536 - DNA, 201 bp, Homo sapiens
tcccgagtcaccccagctcaggaacaaggcagaaaaagttgggggttggcaagttaggaacaagaggaagaggacggggacaaagctgcaagtccgggagyggggctgcctgtcttctctggcagttcctgggttgaggctgagcaaaacaggataaaatctgagcaggagcccacggctgggggacttggcaaagaccca

SEQ ID NO: 375537 - DNA, 201 bp, Homo sapiens
tgagaatggagctggagccagaggagtcgtgcattcactcagcaaactcttactgagcacctactatgtgccaagtgttgggttacagaggcgaagcagaygcagagcctaccctcatggagttctcagtttactggaaagacataatcacaatatttatggtagttatgacttactgagcacctacagggtgccaggcac

SEQ ID NO: 375538 - DNA, 201 bp, Homo sapiens
aaactgtcttccaaagtggccgtgccattttgaatttccactggcattgaatgagagtccctgttccacatccttggcagcatttgtggtgttaacgtttyggattttagccatcctcgtaggtatgtcatagttattttgatttgcaatttctaatgacatatgatattgaatgtgttttcatatgcttaactgtcatct

SEQ ID NO: 375539 - DNA, 201 bp, Homo sapiens
tataaaaaatgcacaaagaaattagccaggcatggtggtgcccactgtagtctcagctactcgagaggcagaggcaggagggaagatggcttgagcccagraggtggaggctgcagtgagatgtgattgtgtctctgcactccagcctgggggacagagacagaccctgtctcaaaaaaaaaaaaaaaaaaaaaatccaag

SEQ ID NO: 375540 - DNA, 201 bp, Homo sapiens
tgctggattgaatggtaacactatatttagctttgtaagaaactgtcaaattggagcagggtgtggtggcatgtacctgtagtcccagctactcaggaggstgaggcaggagggatttcttgggccgaggagtttgagactggagtatgctataatcacacttgtgaatagccactgcacagatgcacaaaagaaactgtc

SEQ ID NO: 375541 - DNA, 201 bp, Homo sapiens
tgttgggtaaatacttaggagtacaattgctggattgaatggtaacactatatttagctttgtaagaaactgtcaaattggagcagggtgtggtggcatgyacctgtagtcccagctactcaggaggctgaggcaggagggatttcttgggccgaggagtttgagactggagtatgctataatcacacttgtgaatagcca

SEQ ID NO: 375542 - DNA, 201 bp, Homo sapiens
gctgtaaacatttgtgtgcaggtttttgagtgaccataagttttcagctctgttgggtaaatacttaggagtacaattgctggattgaatggtaacactayatttagctttgtaagaaactgtcaaattggagcagggtgtggtggcatgtacctgtagtcccagctactcaggaggctgaggcaggagggatttcttggg

SEQ ID NO: 375543 - DNA, 201 bp, Homo sapiens
aataaactttctaaattaactgaaacctgtctcagatattcagcatttacattttggcaaccacaaagggattctgagtggaggtacccctgatctttgaygaatctcctataggtgcttggtatcagcataagctaagtttatggcccaaatcaatagaacaatttgctgaggtctgggagcaccccctccagagtgtca

SEQ ID NO: 375544 - DNA, 201 bp, Homo sapiens
tttatacattcatctattgaaaactcttttggttgcatccattttgggaaaatgatgaataaggctgctgtaaacatttgtgtgcaggtttttgagtgacyataagttttcagctctgttgggtaaatacttaggagtacaattgctggattgaatggtaacactatatttagctttgtaagaaactgtcaaattggagca

SEQ ID NO: 375545 - DNA, 201 bp, Homo sapiens
ctctgaggccagctggggtcagtggaaactgtggggagagggatggggaagagcaggttctatctttgctcacatcctggagttgtttctgacctgcccargagaggctgcccctccagaactagactcttccttggctttaagatgtgaagtcgagcagctggaaggacagacacctcatctgaccactgttctatggac

SEQ ID NO: 375546 - DNA, 201 bp, Homo sapiens
ggcagctcatgcctgtaatcctagcactttgggaggccaaagtgggaggatcagttgagctcaggagtttcagaccagcctgggcaacatagggaaacctygttaagtattaaaacaaacaaacaaacaaaccaccaaaattcagaggggacaggggaggtggcacactgctgtccttctttttcccctaccatgtagcac

SEQ ID NO: 375547 - DNA, 201 bp, Homo sapiens
aaaccaatgcggagttcccagacacagaagatgagcagggacatcctctgagaggaaaactctggtggcttcaggggaatcaaagcaagtccccacttctstcctctcctgagctgaaaactcagagcaggctgggtgtggcagctcatgcctgtaatcctagcactttgggaggccaaagtgggaggatcagttgagctc

SEQ ID NO: 375548 - DNA, 201 bp, Homo sapiens
tgtgtttggtttacattgaagccaggcatagtgccatgtgcctgtagttctagctactctggagggtgaggtgggaggatgggagcccgggagttcaaggstgcagtgagctatgatcacgccactgtactctagcccaggcaacagagtgagaccacctccctaaaaaaataaaaatgaagatgaaaatgaaaaaaacca

SEQ ID NO: 375549 - DNA, 201 bp, Homo sapiens
gaaattggcagactctacaaatcagggatttccaccttccttacaagagttgattgttaaaccattttatagcacacgactgcctcctatgaactttctaytgaatcattccagttggtctattactttagttataactttttttatgtaccagagaagctttttgttttgtgtacatatgtaagatattggtattttatt

SEQ ID NO: 375550 - DNA, 201 bp, Homo sapiens
cagtggggtgagaatggagctggagccagaggagtcgtgcattcactcagcaaactcttactgagcacctactatgtgccaagtgttgggttacagaggcsaagcagacgcagagcctaccctcatggagttctcagtttactggaaagacataatcacaatatttatggtagttatgacttactgagcacctacagggtg

SEQ ID NO: 375551 - DNA, 201 bp, Homo sapiens
atttagttcaaaatatttttaaattcctcttgagattttttttttgacccacgtgttatttagaagtgtgttgtttaatctccaattattctgagattttmtagctatcttatgttactgatttctagtttaattccattgtggtctaaaagcatgcattgtatgatttctattcttttacacttgttaaggtatgtttta

SEQ ID NO: 375552 - DNA, 201 bp, Homo sapiens
gagtaggtgggagtgaccaaagagaaggagaaaaactggcagtgagggacagaagttggaacgctaggtgcttctttagctaccttatcagcataagcatyggcctgagcaatgggatctgatgtcttttgatggcccttgcagtgaatgactccagcttcctttggaagtaaagcagccttgagaagagtttttattaaa

SEQ ID NO: 375553 - DNA, 201 bp, Homo sapiens
gtgccaggcactgtcccgggccgttctgcctgacttatctcatcgaattatcagcgttactaagtgagtctggttctatgattatcctattttacacagayaaaactgagacccaaagaggagaaaaagctggttcaggtgacacagtggtcacagctgagacacagatttgaacacacgtctctcctacgttggatcttg

SEQ ID NO: 375554 - DNA, 201 bp, Homo sapiens
ggtgggagcagattttagggctgtttttaaggaatggaaagaagaatggtgaaaggatttaggatctatggggtcagctaggtttactttgtgagtttatrtaatggtttagtcaggttggcaaaaccaggtatccaaaggtgaaagtacctgaccatgcctaggaaggaaagcagctgttactttgtagaaggggttggg

SEQ ID NO: 375555 - DNA, 201 bp, Homo sapiens
gactgcttagcgcgtccgtgcctggtgggtgttggttccgcaatctggagccacatgggacagttctgattcctcctactccccacagcccttcagagatytggagacagactgggtacccccagccactttccaaacccaagtcagccccaattccctcccttctgtctcctgtgatccagacacctcctaagcctcctc

SEQ ID NO: 375556 - DNA, 201 bp, Homo sapiens
ctgtgaaggcacaagttctgtctcattcaccgtgggatcccagtgcctggcacgtagtagacacttcataaatatttttgatattgagttgaattcacagrgttcttccgggagcccagtggttagtcctaggaagagaagggttcatgggggccttaaggaggggcttctctctgatgctaccatgacaagagagaggga

SEQ ID NO: 375557 - DNA, 201 bp, Homo sapiens
tggtctcgaactcctgacctcaattcgggcctgcctcgggctcccaaagtgctggtattacaggcatgagccactgtgcctggcctggaaatgtggatgtmtgtctaggatctcttagcatttatacattggcagctaattccattttgttttttttaaagcaccgtgtagatcaagcaaagcatttcttagggctgtatg

SEQ ID NO: 375558 - DNA, 201 bp, Homo sapiens
acatggtgaaaccccgtctctatgaaaaatacaaaaattagcccagcgtggtaatcccagctactcaagaggctgaggcaggagaatcacttgaacctgasaggcggaggttgcagtgagccgagatcacaccattgcactccagcctgggcgacagagggagactccatccaaaaaaaaaagaagatatgcattaggccc

SEQ ID NO: 375559 - DNA, 201 bp, Homo sapiens
aataacagatgaaaagggaacagggggagggagagagagacagagaaagagagagagagattgaaattagtgagtttaaggaactaaaagccttcacatcsagcttattcccaggaatgcgttaggggtggtataaggcaaggctggcgtaggttgggggccaagctgtgcgaggccatgtcctgtgaggggagacaggtg

SEQ ID NO: 375560 - DNA, 201 bp, Homo sapiens
tgtcaaagtattaataaaagacactgtccctgtccgcaggttgctcacagcctggtgggagagacattgcaacacaatgtgattggtgctgtgaagagagrgagcacacggtactgggagagctcagggcagggggttgatccagttccgggcagggcgatggattcacaagacattttggcaaaggtagacccagcttcc

SEQ ID NO: 375561 - DNA, 201 bp, Homo sapiens
cttattgcaatttacttagtctgattctactagctcttcttttgttgtaaacatttcctataaataggaaatatcatttgagaaagtgaggggaagtggaragagagagagagagagaagccattttttgtgtgccatgtcttataagaactttacatactgactgtgtatctgtgtatattccattctgtacagttttta

SEQ ID NO: 375562 - DNA, 201 bp, Homo sapiens
taaaatgagagaagccccataaagaacttagtgtggtatctgggctcaataaggcatcagctatttttattagccattcaacaaacattttttcctaggayccaatctgtgccatgcagagtgctaggtgctgccagggagagataaatgagacaccctcaaggattcacagtctagtttgttcatttgttgattgatttc

SEQ ID NO: 375563 - DNA, 201 bp, Homo sapiens
gtcatttttttttcttcaagcctcagtgtcccaatctgcaaagtgcatatgatggtaatatctacctcatagggtcaccctagggataaaatgagagaagscccataaagaacttagtgtggtatctgggctcaataaggcatcagctatttttattagccattcaacaaacattttttcctaggacccaatctgtgccat

SEQ ID NO: 375564 - DNA, 201 bp, Homo sapiens
gccaaagaggttagttactgatgggggctgcataaattgggggttgtggagggacgccagctgggagggagagactggagaagggggtgtgtggagagccmaagaggaggcccagggggaggtgcgcaggcacagcctctgttgaaggagtctctctaaggctgctagggtccttcacctgtcattgtcaggcctggagag

SEQ ID NO: 375565 - DNA, 201 bp, Homo sapiens
gtaatcatatttgacgtgtggactgggcagtggggtgagaatggagctggagccagaggagtcgtgcattcactcagcaaactcttactgagcacctactrtgtgccaagtgttgggttacagaggcgaagcagacgcagagcctaccctcatggagttctcagtttactggaaagacataatcacaatatttatggtagt

SEQ ID NO: 375566 - DNA, 201 bp, Homo sapiens
aaagatgcaagaaacttcagtttaaaaccaatgcggagttcccagacacagaagatgagcagggacatcctctgagaggaaaactctggtggcttcagggsaatcaaagcaagtccccacttctgtcctctcctgagctgaaaactcagagcaggctgggtgtggcagctcatgcctgtaatcctagcactttgggaggcc

SEQ ID NO: 375567 - DNA, 201 bp, Homo sapiens
ttcaggactcaaatccacccgcattggaattctctgggtgactgcccagcccctttggcaggacagccagccacaggccctgattgtgcaggacttcctgmctctgcaaaggcagtcgggggctgagcagggttctacccggctgggtccaggcagaagtttttcctccccacctccgggtttgtcctcatcatcggtcac

SEQ ID NO: 375568 - DNA, 201 bp, Homo sapiens
cctagagcaagtcttttgttgcagcaggaaactggactggatggcccttcatggaccaggcagcctggtgattccggacctcctcccagattggcctcatytctccattgctctcacctctctgtgggatctgacccagggatacaaatgaatctacctcttcatcttttccagagagcatacttcatgctgttttctact

SEQ ID NO: 375569 - DNA, 201 bp, Homo sapiens
gccgggattacaggcatgagccatcgcacccggcctagagcaagtcttttgttgcagcaggaaactggactggatggcccttcatggaccaggcagcctgktgattccggacctcctcccagattggcctcatctctccattgctctcacctctctgtgggatctgacccagggatacaaatgaatctacctcttcatctt

SEQ ID NO: 375570 - DNA, 201 bp, Homo sapiens
atgctactgaacaataggctcaaaggaggaccacttagttggaagtgaagtacaaatatgggaagagggttatgcatcagtcagataaatgaaaggattaytaactgtggaggttatctatgaactggcttgctcaacatctatttcatctccttctagtgtacctttctactctgcagaggctggaaaggcaaaaatgat

SEQ ID NO: 375571 - DNA, 201 bp, Homo sapiens
cttgctggctctgttcattactgagagagggtggttatgtctccaactataatagtggctttgtctatttctcctgcagtcctctcagtttttgcctcacktattttgacactccgttgtgaggggcatacacattaaggactgttatgtcttcttgaaaaatcgacctcttcatcattatgtaaatgcccctctttattc

SEQ ID NO: 375572 - DNA, 201 bp, Homo sapiens
tgagttagggagtattcattctgcttctaccttctggaagagattgtacagaattaatatgattttttccttaaatattggtggaatttaccagtgaaacyatctgggcctaatagtttctattttagaaggttattaattattgattcaatttatttaatagatgctggtctattcaaatgatctatttcttcttatgtg

SEQ ID NO: 375573 - DNA, 201 bp, Homo sapiens
ctaaaccacaggcaaatattcccctttagggagagaattcgccgacatctatttaacatcccttaattgttgagagcatccactgtgtgccagacacttcsgtacacacagaaagaaacccagaggagggtaagatgcccttatagggagatctttctcctcccttcctccatctctccctctctctctctctcgcttccc

SEQ ID NO: 375574 - DNA, 201 bp, Homo sapiens
ctcctggtatctgtccctaaattccagaggctaaaaggctaaacactgcatttccctttccctctttccccttcttttaaaagattttactttttagagcygcgaggttcaaagcaaaattgagctgaaagtacaaatgtttcccacataccccttccacccaaaatacacatcctcttgcatcatcagcatcctgcccca

SEQ ID NO: 375575 - DNA, 201 bp, Homo sapiens
acattttatctgaggtctgcagggagtttaggagttatctgggtaagtattttctgcatcttggctcactcaacatttattccagcctcctggtatctgtycctaaattccagaggctaaaaggctaaacactgcatttccctttccctctttccccttcttttaaaagattttactttttagagccgcgaggttcaaagc

SEQ ID NO: 375576 - DNA, 201 bp, Homo sapiens
attgatgtcttatgtctccctaaaatgtataaaaccaaactgtgctctgaccaccttggcctgatgtcatcagggcctcctgaggctgtgtcgtggatgtrtgtcatcaatcttggcaaaataaactttctaaattaactgagacctgtctcagatattcaggtttcacaattctcaagccttctctttttcaatttataa

SEQ ID NO: 375577 - DNA, 201 bp, Homo sapiens
gaggctaatgcgaaactcaaaagaatgccaccatctgtctgttatctacctatgacctggaagccccctccccacttcaaattgtcctgccttttctttgrgtagtcccacccttctggaccaaaccaatgttcatcttacctatgttgattgatgtcttatgtctccctaaaatgtataaaaccaaactgtgctctgacc

SEQ ID NO: 375578 - DNA, 201 bp, Homo sapiens
aaggtgaaagtacctgaccatgcctaggaaggaaagcagctgttactttgtagaaggggttggggtttgggagattagccggacatgatcagcagggagascacgtgtgtttttattaagaattatgctgagataggtaatggatgaggaagaaatttgggctttggagggagatacgcaatattcttttgagaatagatg

SEQ ID NO: 375579 - DNA, 201 bp, Homo sapiens
aaagcatgaggaactgccacacccaagaggagcctaaagagacaagaccatgggccgggcgcggtggctcacgcctgtaatcccagcactttgggaggccragacaggtggatgacctgaggtcgggagtttgagaccagcctgaccaatgtggaaaaaccccatctctactaaaaatacaaaattatctgggcatggtgg

SEQ ID NO: 375580 - DNA, 201 bp, Homo sapiens
atcagacaaaacctgagactagagactcattttcttctaaaattctttctccaaactatttttaaaaagaaaagggggaaatgtgaaaggaaagtaaatcytgtggcccccaaatcactaagctaaagggaaaagtcaagcttggaactgctcagggcaaatttgcctcccattctattcaaagtcaccccctgcccacta

SEQ ID NO: 375581 - DNA, 201 bp, Homo sapiens
gcagggatgaaaagaagtaaagtacacttggaagaggggccaaccaggcgacttgagagattcaggggttctgtttgacctttgacttggggttttatacrtggcatacttcaggggtcttgttttccttatcccctgattcctcccttgggttggtggggtgggctgtccgcacgctcagtgacctgccagcacttggga

SEQ ID NO: 375582 - DNA, 201 bp, Homo sapiens
atagatgttggaggagcaggagggtgtcctgttgggaagatttgtaggaggggctataaagtagaaggttgtcaaaatattcaataaggtgagaagcagayggacggaaagaaagtaaatcatgagaaagggcttgactgaagtaatgggggctgttcctgaagccttgcagcaatacagcctaggtatgttgttgagact

SEQ ID NO: 375583 - DNA, 201 bp, Homo sapiens
aattgttgggcaggtgggggagggctagtcacggaatgaaactgtaagccagactgggtgtgaggaggggaggtgatagaaggattataggatggaggagyggaggctgaggaagaattggagcctgattcagcctggcagggtgcgatctgaggtggagcagtctagggaggaggggagaggtcagatgggtcggtagaa

SEQ ID NO: 375584 - DNA, 201 bp, Homo sapiens
cctctgactgcccccaccaaactccatgtagttctgctgttttggtggcctgccagcatgctattgcctgttggtgcattcctctcaacgtccagccaccygtgtgttcctcccctgatacgttcctccgctgacatgttcctccgctgacatgttcctccgctgatatgttcctccgctgatatgctcctctcaaggtcc

SEQ ID NO: 375585 - DNA, 201 bp, Homo sapiens
cagatgggtcggtagaaaaggaagatagaaaagacttagcagcgtttggggttgggactgaggggacagaggggagggaaaggaggatttgggatgggtcrcattgggaacagagactagggtgggactgatgtgtaaaagaatgcctggatatcaggcatctcagaccatgtgcccattttacgacaagaattatctaga

SEQ ID NO: 375586 - DNA, 201 bp, Homo sapiens
ctctgactgcccccaccaaactccatgtagttctgctgttttggtggcctgccagcatgctattgcctgttggtgcattcctctcaacgtccagccacccstgtgttcctcccctgatacgttcctccgctgacatgttcctccgctgacatgttcctccgctgatatgttcctccgctgatatgctcctctcaaggtcca

SEQ ID NO: 375587 - DNA, 201 bp, Homo sapiens
gttcctccgctgacatgttcctccgctgacatgttcctccgctgatatgttcctccgctgatatgctcctctcaaggtccagctgcctgtgtgttcttccrctgatctgctcctcttgacgtgcagccgctgtgtgtctgcctgctagcgtcccgggtttttataggcacaagatgggggcatggcaggcgagggtggtct

SEQ ID NO: 375588 - DNA, 201 bp, Homo sapiens
gtaggccagatttatgtttgactttacacaagcatctcagtgcggtaaagagcagtattgccaccagcatgtctcacctccagccataaggcggttttctyctatctcagtaaatataatgtatgatcgagttttacaccgagacattccattcccagggatgagcaggagacagatgccttcctcttatctcaattgcaa

SEQ ID NO: 375589 - DNA, 201 bp, Homo sapiens
atagccattgtggttctgatagggctgaaggatataggttgcagtcgagagaatggattggccgactaggtgagatgtaggtttattttggaccgggttcrtgtggttagattaacaggaagggctgtgaacagctggatttgtgtggacaaacaaatctaacagttggaaaaaagaggggatcgtgactgatttaagagg

SEQ ID NO: 375590 - DNA, 201 bp, Homo sapiens
tgtctgggccccagtcaactcaccactggacagatctctgagagatctgtggccccaagtttctagagcccaggctttactactgagaagatccgtggacktggggaagcacctactcatagtccctcagagagtctgtgtttggtttacattgaagccaggcatagtgccatgtgcctgtagttctagctactctggagg

SEQ ID NO: 375591 - DNA, 201 bp, Homo sapiens
gctgcttgtctgggccccagtcaactcaccactggacagatctctgagagatctgtggccccaagtttctagagcccaggctttactactgagaagatccrtggacttggggaagcacctactcatagtccctcagagagtctgtgtttggtttacattgaagccaggcatagtgccatgtgcctgtagttctagctactc

SEQ ID NO: 375592 - DNA, 201 bp, Homo sapiens
ggcccattccagacaccaggtagtaaggcagccagatgagttctaggcctggccttcgagagactctgagatgatggacaagctgcttgtctgggccccartcaactcaccactggacagatctctgagagatctgtggccccaagtttctagagcccaggctttactactgagaagatccgtggacttggggaagcacct

SEQ ID NO: 375593 - DNA, 201 bp, Homo sapiens
ggcctagagcaagtcttttgttgcagcaggaaactggactggatggcccttcatggaccaggcagcctggtgattccggacctcctcccagattggcctcwtctctccattgctctcacctctctgtgggatctgacccagggatacaaatgaatctacctcttcatcttttccagagagcatacttcatgctgttttcta

SEQ ID NO: 375594 - DNA, 201 bp, Homo sapiens
gtatctttctgtatgtgcttttaagtatttgtgacattgagttacagggctttgactcctgggtctaaaaaggacaccaagtcctgctagatcttaaacamtgtcagtaattaaagcctcatcttcaggcccagtagaagatgccaatcaaaataaactgcattcttagacacagggctagaaattaaagctaatcaactc

SEQ ID NO: 375595 - DNA, 201 bp, Homo sapiens
cctgctattccaagtgtggaccatgtaccagctccatgggaatcaccagggagcttgttaaaaatgtaaaaatctcaggctttcccccagacctggtagakcacaacctgtatcttagcaagatcccccagttgacttgtagacacaggaaaatttgagatgtactgcctgagagcaccaaaacatgtcaaacacaaaata

SEQ ID NO: 375596 - DNA, 201 bp, Homo sapiens
caaatgatgtaagaatgaggagaaaacaaagagaatgactcctctgtgagcactctgtaggttttatggcatctctacttgccagagtttatgtaaaatgraagtagtatggtctttgtgcacatttacattgagaaaaagagccctaaggtcaacctgcaaagtatagagttcataagttctctttttttctctatttta

SEQ ID NO: 375597 - DNA, 201 bp, Homo sapiens
ctctaatttttgttatttcttttcttctacttactttggacttaatttgctctcctttttttatttcataaagtagaagcttagattattggttttaggtstttttttttttctaatgtgtgtgttcaatgctatacattttcctttaaacactgttgtcactgcatcccataaattttttggggggtaatttctgctttg

SEQ ID NO: 375598 - DNA, 201 bp, Homo sapiens
tgttgacatattatcaaacaaagttcacagtttaattagggttgactctttgtgttgtatattccatggattttgacaaatgaataaggatgtgtttccasttttatagtaccatactacacaaactaatttacagtattagttatctattgctgtgtaataagttttcagaaacttaaaatttaaaacaaaacaagcagc

SEQ ID NO: 375599 - DNA, 201 bp, Homo sapiens
tgagctcatccagagagtggctgagacagagaagggcaactccagagggcaggtcccacaaacacacctgcatttggggggccagcagagatgggatgggsggattagccacaggagggcaggcggcacagtgcagccttgtgaagcccagagggagagagagtttcgagaaggaggaggtggacttcaagatgagtgccc

SEQ ID NO: 375600 - DNA, 201 bp, Homo sapiens
gcacagcccctcatctccctctccctacgagaagctgaaggagttcagctgccagcctgtgttgaacagctaccagttccacatcgtcaatggcgcagtgrtttgtgagtagccttttctgtatggaaatgtcttttaacctgggcctttccttaacgttcacctcctctttgacccagagatcttttagaaaatgaaatg

SEQ ID NO: 375601 - DNA, 201 bp, Homo sapiens
acatggggcgtggccctggcatccggagcgtgttctgcggctggtagggtatgggtatgtgcagggcaatcctggcctagacagcaggcacatttggaggyacgggacagtagtctttcgtgagcaccatcctttccagcatagccagggtggatcctggggtcctgggctgggagggtgaagagcaacaaataaagaagt

SEQ ID NO: 375602 - DNA, 201 bp, Homo sapiens
cagcctccgtcacctgagctcaagcaatccacccacttcagcctcctgagtagctgggaccacaggctggtgccaccatgcctggctttttttttttttttaaacttaaaaaacataggcggtctccctatgttgcccaggctggtctcaaactcctggactgaagcgatcctcctgccttatcctcacaaagtgctggga

SEQ ID NO: 375603 - DNA, 201 bp, Homo sapiens
aagtgttaaatgaatgaatgggcctaggtttgtgtcctgggtctatcattctccagctgcctaagtttgggaaattggcctcttggaatctcagtccctcycctacaaaagggcagcaatgattgtactttataggtttctatgagtagctaatgagatagcaacagatactagagagggctcaggaaatgctactggtta

SEQ ID NO: 375604 - DNA, 201 bp, Homo sapiens
agctaatcttgaagcttcccttgacaactgctgctgttgagaacatgtttccttgtttctgtgattttgttaacaaaacggctcagctgtcttccagttgracaaatatttattaagggcgactgcatgccaagcactaagataggtgctgccagggccacaaaagcaaataggtgggaagggaagggggactcacatgtt

SEQ ID NO: 375605 - DNA, 201 bp, Homo sapiens
cactgcaggctgaaggcctgtgagtgtgacaagcaatccgtgcactgcttcaaagagagcctgcccacctatgagaaaaacttcaagcagttctccagccrgcccaggtgtggcagacataagccctggtgctagggacaccacagggtccctctcatcatccagcatccgctctagtgttgctcttccaggaagccttct

SEQ ID NO: 375606 - DNA, 201 bp, Homo sapiens
atggaaatgtcttttaacctgggcctttccttaacgttcacctcctctttgacccagagatcttttagaaaatgaaatgcttccaagtgcttggaaggagrtattcctgagctttctcctgatgctccagagcttctcagagtgtccgtgctcatcctgccctggtctctcccacccatgagtgtacctcctgaactctct

SEQ ID NO: 375607 - DNA, 201 bp, Homo sapiens
ctcagagtgtccgtgctcatcctgccctggtctctcccacccatgagtgtacctcctgaactctctgggggcccagagcctggcagatagtacatgctcartaaatacttgttcacttgagctaatcttgaagcttcccttgacaactgctgctgttgagaacatgtttccttgtttctgtgattttgttaacaaaacggc

SEQ ID NO: 375608 - DNA, 201 bp, Homo sapiens
cattgcactccagcctgggtaacaacagcgaaactccgtctcaaaaaaaaaaaaaaaagaaggaaagggaacacacgcttattatgaaaagacatgagacwgcggagacgtgtataaaatgaatgttgcctgtttctttctctctcttcaatcccaattgcctagagatagtgctatcaaatgtagtttatttttgagaca

SEQ ID NO: 375609 - DNA, 201 bp, Homo sapiens
tcagtggctttcctttctgtccttaacccttggccccttacagtgagctcccagttctccccagccttagaaccaaaccctggggctgggctgggagcccycagtgaccctctgtgtctctgtaggtggatgcacccttggtcctggtgccagctgccactgcaggctgaaggcctgtgagtgtgacaagcaatccgtgca

SEQ ID NO: 375610 - DNA, 201 bp, Homo sapiens
ggcagatagtacatgctcagtaaatacttgttcacttgagctaatcttgaagcttcccttgacaactgctgctgttgagaacatgtttccttgtttctgtsattttgttaacaaaacggctcagctgtcttccagttggacaaatatttattaagggcgactgcatgccaagcactaagataggtgctgccagggccacaa

SEQ ID NO: 375611 - DNA, 201 bp, Homo sapiens
acatgcacacatatgcatacacgtatccctttcagtggctttcctttctgtccttaacccttggccccttacagtgagctcccagttctccccagccttaraaccaaaccctggggctgggctgggagcccccagtgaccctctgtgtctctgtaggtggatgcacccttggtcctggtgccagctgccactgcaggctga

SEQ ID NO: 375612 - DNA, 201 bp, Homo sapiens
aacctatttccctatcctaattgcacctccattcaaagagctgcccctgcaagagttaaccaactccctagcctcccatgagttctgaaatcctgcacccrggcctggtcccaggttgcctagcaaccgggggctgctctgggatgcagtaggtaagcaggggagggagaggaagaaaacaacttggtctgtccacgactc

SEQ ID NO: 375613 - DNA, 201 bp, Homo sapiens
gacctgctgatgggttcagcgtggggtgtgaagggaacagaggctgcaccccaggctcctggcctgagtggctgtagatagtggcaccaaatactgagctygtgaagatggggggagagctgatgatgaagacagcaagagtttggtgtgagtcaccttgagtttgagacacgtgtcagacatgtaaggggtaggcaggtg

SEQ ID NO: 375614 - DNA, 201 bp, Homo sapiens
taaaagatgcaagatctggagttaagcttgtttttaaaaggtggcctccaaagacggtttttcttggcctggggctgtctcatcatccaggtcatgacagrcccggtccatggttgaggaatgccacagaagtgacagtccactgcaaaagactgctgctccagatcagttctggaaggcctggcaatggggcaggccact

SEQ ID NO: 375615 - DNA, 201 bp, Homo sapiens
ccacacccaatctgttggcactaccttcacaatgcatctagattctgtatttataaaatgcttccatcaaatgtttacatggaaaaaaaaaaagagagagrggggaaaaaatctagaatccagccacttcttatgactttcactgccgccttcttgggtaggagccaccatcactggtgccaccatcaccgtcactgcagc

SEQ ID NO: 375616 - DNA, 201 bp, Homo sapiens
ggctcaatcagagctcactgcagcctccgtcacctgagctcaagcaatccacccacttcagcctcctgagtagctgggaccacaggctggtgccaccatgyctggctttttttttttttttaaacttaaaaaacataggcggtctccctatgttgcccaggctggtctcaaactcctggactgaagcgatcctcctgcctt

SEQ ID NO: 375617 - DNA, 201 bp, Homo sapiens
aggacaggaagaccaaatgagaaagggagagggggcagggagaaaggaaggagagctagagacttgaggcaaaggaaacaagagatggaatagaagaagasagaggaccagaagacagtgagaccaacagaaagagagagggacgagaaagaaggtggctgaggaaggtgagaaaagtgtttccagggcgacagcaactgg

SEQ ID NO: 375618 - DNA, 201 bp, Homo sapiens
gtgggcttggggataaagggatccccgtggatgacactgacaggtgggtgcagaggctctaaggccacttatcatttgttttgcattaaagttcatgctcraagccagagagagggtgttaggattcttgcctggcaaataacagaaaacaactcaggctaatggaaggaagaactgaacgggatttggaggatgggtctt

SEQ ID NO: 375619 - DNA, 201 bp, Homo sapiens
gggaagctgtggctgagagccctaaacacacacatgcacacgcacacacacatacacaggcacatgcacacacgaccatacacacacacaaatgcacgcasatgcacacaaatgcatatgcacgcacacaaatgcatatgcacacacacacatgcacacatatgcatacacgtatccctttcagtggctttcctttctgtc

SEQ ID NO: 375620 - DNA, 201 bp, Homo sapiens
ccccttgcacttcgctttggggatctggtgatatttcgaatgctcagcactctagtaaggggaggggacatcaaggcagcatcatgctcattgcaacttcyttcttcctttttttctcatcggtggtggcagcccccacccacagcagtttctggcagtttcagaggagggtcaaacacatcacggggcgaagtgccttct

SEQ ID NO: 375621 - DNA, 201 bp, Homo sapiens
gccgcacacagcttatgcttctttgaggggaggcagacacaagccaggaaaccaataagagaagttaagtaaaaagcacagtgagtgagacaaacgggtayggaggacatggccagagagagctttagttcaggtggtcagggagcacctctctgaggaggtgaaatttgaccaagcctcaaacagtggcagggatcccac

SEQ ID NO: 375622 - DNA, 201 bp, Homo sapiens
cttcccaggtgtatttattcagagctgtgagtgcaccttggagttcctctgtttcctcctgaggtcagggaactaccacctctctgccactcatcccctakggcgggagatacatcctccatcccgtagtgggttccagggctcagaaccctggtctcctgagctcccccaacccaccacttcagctcagcacacaccaat

SEQ ID NO: 375623 - DNA, 201 bp, Homo sapiens
cagagatttgggcagtggccaaagacatagagagaagagggcagaacatgggctattttaaacacagagaagattagcgggacccgctggcagaccggacrtgaaatgtggaaggagcgggggcagcgaggtcggctcctagtttcctgagaatgtgggtgaatcacgggctcacaggcagagggagcactaggatatcaa

SEQ ID NO: 375624 - DNA, 201 bp, Homo sapiens
gtgagctgtgattgcaccactgcactccagcctgggcaacagagtgagaccctacctcaaaaaagaaaagcaacaacagaaaaacctatttccctatcctrattgcacctccattcaaagagctgcccctgcaagagttaaccaactccctagcctcccatgagttctgaaatcctgcacccaggcctggtcccaggttgc

SEQ ID NO: 375625 - DNA, 201 bp, Homo sapiens
ggctggctgcctggttgcgtgtgagttttccatcctcctgtgcgggaggcaagagggacaccttctatcctcataatacaggcaggaaaactgaggttccragcaagggaaaggacctgcccacggccgcctaatacgcagtggaaccaggactccaaggccacagacccagcgactcccaggccctgaacggtgacggag

SEQ ID NO: 375626 - DNA, 201 bp, Homo sapiens
gcacccacgtgatggggctgtggtcctgcttgaaaggggcttggcacagcgcctggtgcatagcaagtacttggtgagggctggctgcctggttgcgtgtragttttccatcctcctgtgcgggaggcaagagggacaccttctatcctcataatacaggcaggaaaactgaggttccaagcaagggaaaggacctgccca

SEQ ID NO: 375627 - DNA, 201 bp, Homo sapiens
cttggtgagggctggctgcctggttgcgtgtgagttttccatcctcctgtgcgggaggcaagagggacaccttctatcctcataatacaggcaggaaaacygaggttccaagcaagggaaaggacctgcccacggccgcctaatacgcagtggaaccaggactccaaggccacagacccagcgactcccaggccctgaacg

SEQ ID NO: 375628 - DNA, 201 bp, Homo sapiens
  misc_feature (1)...(201): n = A,T,C or G
gatgtcactggcaatattattacttattaccacggttgttgttgagagtgggttgctttggggaggtgagcttaactggacaactggagagatgcctgtgntcagatttgaggggacatcaggggaagttggctgcagagggtggggccctccctctccctctccctctccctctctgcagtggctctggtcaccgggaac

SEQ ID NO: 375629 - DNA, 201 bp, Homo sapiens
tgaccctgaggccagttttgcctgagccagcggtggctggagcagaggggaggagaatgcaggctgggaggggtgaggggcatgggccaggggctggcgcktcccggatggcacaccctaggctccttctcctatcctagcttccatgtttggctccaacctgccaaggtgggcaggattcagtcccatggctgagtcagg

SEQ ID NO: 375630 - DNA, 201 bp, Homo sapiens
ttatgctccttgtgcacctcccttccccccaacctgggatgaaatctccccacgtgctggtgttcctttgcctcctgggtaagtgatctttgtgaccttcrgccttctgccccatctggcaaccccaagctccctggatgcccctgagcctggccctaccgagggtgtggtggatgccaaacactggaggctgcccccttc

SEQ ID NO: 375631 - DNA, 201 bp, Homo sapiens
ttctgtggtccctgactcactttgtcccatccagccggcaggaccacctgccagcggctgacctgcgagtgtgacaagagggctgccctctgctttcgccrcaacctgggcacctacaaccgcaaatatgcccattatcccaacaagctgtgcaccgggcccaccccgccctgctgaggctatgctcggcctcccccccgt

SEQ ID NO: 375632 - DNA, 201 bp, Homo sapiens
cccgagcagcccctggtccagcccagcctggctcacaggtccctccaggtcaaccatgacccttacaggtgctgccacgcccacgactgctgctacgggcrtctggagaagctgggctgtgagcccaaactggaaaagtatcttttctctgtcagcgaacgtggcattttctgcggtaggtggagagccctgaagtgacct

SEQ ID NO: 375633 - DNA, 201 bp, Homo sapiens
tggacaactggagagatgcctgtgatcagatttgaggggacatcaggggaagttggctgcagagggtggggccctccctctccctctccctctccctctcygcagtggctctggtcaccgggaacctggttcagtttggggtgatgatcgagaagatgacaggcaagtccgccctgcagtacaacgactatggctgttact

SEQ ID NO: 375634 - DNA, 201 bp, Homo sapiens
acccatccgtgaaacaacccgggagcttgggcttccatcagaatggagttggtccaggtcaagaacgtggacccagaagcagccaagagctgtcccacacrtatcctgagcttctgtggtccctgactcactttgtcccatccagccggcaggaccacctgccagcggctgacctgcgagtgtgacaagagggctgccctc

SEQ ID NO: 375635 - DNA, 201 bp, Homo sapiens
tggcaaccccaagctccctggatgcccctgagcctggccctaccgagggtgtggtggatgccaaacactggaggctgcccccttcctgccaccagggtgamcctgaggccagttttgcctgagccagcggtggctggagcagaggggaggagaatgcaggctgggaggggtgaggggcatgggccaggggctggcgcttcc

SEQ ID NO: 375636 - DNA, 201 bp, Homo sapiens
gaccggctcggcgttaagagtcccttccaaccctgggtgttgctgacatagcgggcgtgggcagagccctgacgggagacgaaggctcaacttcaagaggkgaaatgaggcacctggcctgagctgtgagatacagtcatggggacaaaagggagccagggccactgcaggcagaggtgacagaggcagctgcagtggaga

SEQ ID NO: 375637 - DNA, 201 bp, Homo sapiens
aggatcagggctgaggggaggaggcaggtgggtggagacacaagctctggattctacccagggcgtcaccttccacctgcctgtgactttggacaagtgawgtaatccctggaaagcctctgtttcctcacctagaaaacggagaggcttatacccacttccccagctcagcccagctcctggaaaaagccccccaaaaga

SEQ ID NO: 375638 - DNA, 201 bp, Homo sapiens
ccaaggcctcaacaggagctaaaggtgaagtccttcggacagaacgagctggggctttgactggggacagcagatgctgtttccaaaggctgactcctcamtgggactgtcaggctggacccatttgctcagctgtgccatgtccagtgcccatttggaccaattagctttccttcagtcccaggcccaggcaagcagcct

SEQ ID NO: 375639 - DNA, 201 bp, Homo sapiens
tggttcagtttggggtgatgatcgagaagatgacaggcaagtccgccctgcagtacaacgactatggctgttactgcggcatcggtggctcccactggcckgtggaccagactgactggtgaggaagcagcctgcagggggacctccatggggatggaggagctgggggatcctgggaggatcctgggagaaggagggaag

SEQ ID NO: 375640 - DNA, 201 bp, Homo sapiens
gacctgggtatttaactaattaggaggctccctgagatcagaggtggccctgctgctttcttctgctgccttttatgctccttgtgcacctcccttccccscaacctgggatgaaatctccccacgtgctggtgttcctttgcctcctgggtaagtgatctttgtgaccttcagccttctgccccatctggcaaccccaag

SEQ ID NO: 375641 - DNA, 201 bp, Homo sapiens
gtgggcagagccctgacgggagacgaaggctcaacttcaagaggggaaatgaggcacctggcctgagctgtgagatacagtcatggggacaaaagggagcsagggccactgcaggcagaggtgacagaggcagctgcagtggagacaggaggagccttctgggcccctacagagctgatgccagctggctctaggaaggac

SEQ ID NO: 375642 - DNA, 201 bp, Homo sapiens
ggcaggattcagtcccatggctgagtcaggagcaccgggaagaatttggggaggtcagctgaggtggtcaggagacaggtccagtgccatctgatgagacytggggggacagagtgttcctgggtgagataagggctgacacctggggaggactggtggctggtggggagcccctggaaggggtgaatgagtgacactgta

SEQ ID NO: 375643 - DNA, 201 bp, Homo sapiens
ctctacaggtggtgaaaattgacactaattttcagttgtttagaaggtaactccgcagtgattcattgtttgggctcttgtaacccaggcgaggagagccrggggctgccaggagatcaaaaggaaatggtgaacaaaggtctcccttttcaggagaccatgactcacagctgctaggggaatggtactaaaccattagaa

SEQ ID NO: 375644 - DNA, 201 bp, Homo sapiens
agacctggggggacagagtgttcctgggtgagataagggctgacacctggggaggactggtggctggtggggagcccctggaaggggtgaatgagtgacaytgtagtagatagaagagtgggaggggacactgggggcgctgacacactggaggagaggactaggggatgaaggtgcaacggatgtcactggcaatattat

SEQ ID NO: 375645 - DNA, 201 bp, Homo sapiens
tgcatgtgcctcagtttccctcctctgtaagatggggatgactgcagcacccacgtgatggggctgtggtcctgcttgaaaggggcttggcacagcgcctrgtgcatagcaagtacttggtgagggctggctgcctggttgcgtgtgagttttccatcctcctgtgcgggaggcaagagggacaccttctatcctcataat

SEQ ID NO: 375646 - DNA, 201 bp, Homo sapiens
gaacgtggcattttctgcggtaggtggagagccctgaagtgacctagacaccctgcggtgaggtgggtggaggcagcttaagacaggaagcccctcctgayggtgaccttgggccttatcagagccagaccctgggctggaggcatggggtttcccgttaccacgtaacagtggagacccagatgttcaccaggcacccag

SEQ ID NO: 375647 - DNA, 201 bp, Homo sapiens
tgaggtgggtggaggcagcttaagacaggaagcccctcctgatggtgaccttgggccttatcagagccagaccctgggctggaggcatggggtttcccgtyaccacgtaacagtggagacccagatgttcaccaggcacccaggccagagaagcccgtaccccatcagtgcagccctcagccccaggtatctccctaccca

SEQ ID NO: 375648 - DNA, 201 bp, Homo sapiens
tgggtggaggcagcttaagacaggaagcccctcctgatggtgaccttgggccttatcagagccagaccctgggctggaggcatggggtttcccgttaccaygtaacagtggagacccagatgttcaccaggcacccaggccagagaagcccgtaccccatcagtgcagccctcagccccaggtatctccctacccacagac

SEQ ID NO: 375649 - DNA, 201 bp, Homo sapiens
ggggggccgtggccagcccaaggatgaggtggactggtaggtaccagaggcctgggctcctgtcaggggccaaatgaggacagctgaaggtcagactgacyttgccctccatccctgagtgggggagaccttctttccccaaaggatccagcttctttgatgacttggtgaccagagcctggtctttgactatgttctttc

SEQ ID NO: 375650 - DNA, 201 bp, Homo sapiens
agatttctttcctctggcttagctgcccacgcttcttgccccagcttcctctcctgctttctccttccttctcccacctaccctaggtattgggaggatgrtcagtccagactctcaggatgagagaggctgggagcggccagccccggggcaggggctcagagcaccccctggttctcttgcagttctgtccacagctca

SEQ ID NO: 375651 - DNA, 201 bp, Homo sapiens
cgcagggatgtgggtgcacaccatacatggtaccttgcagatttctttcctctggcttagctgcccacgcttcttgccccagcttcctctcctgctttctycttccttctcccacctaccctaggtattgggaggatggtcagtccagactctcaggatgagagaggctgggagcggccagccccggggcaggggctcaga

SEQ ID NO: 375652 - DNA, 201 bp, Homo sapiens
ttaaacctcgccagaacacagcctggcttgaggaaaagaaataaatgacaaaaaccaaaataaggttccacgtggccagacgtgagagagggctggttgcrttcaggcaaagtgacttgttattgagaagacgactgcttgagttcagtccaagccactggttaggggcagagccttcaacccaactgaatgcggacttgg

SEQ ID NO: 375653 - DNA, 201 bp, Homo sapiens
ctgggcttctgcttcttgtctcagcccagcaggctgcacccaattctggggctgtttacccctccagccacctgtaaacatgcatttatgagccctggggsgcagggcgcagggctgagcaagcatcgtaaaatgctggtgttggctgggcatttgtgtacctgaatgtgtactagtgtgtgtccatcagactggagttaa

SEQ ID NO: 375654 - DNA, 201 bp, Homo sapiens
accgtggcttcctcaatgtctactgccagggccccacgcccaactgcagcatctatgaaccgccccctgaggaggtcacctgcagtcaccaatccccagcrccccccgcccctccctagagcctctgaggtttgagagagagagcgggaggagggtctggcttggggaccagacgaggtgcagggagggtaggagccaggc

SEQ ID NO: 375655 - DNA, 201 bp, Homo sapiens
agcaggctgcacccaattctggggctgtttacccctccagccacctgtaaacatgcatttatgagccctggggggcagggcgcagggctgagcaagcatcrtaaaatgctggtgttggctgggcatttgtgtacctgaatgtgtactagtgtgtgtccatcagactggagttaatgattttgtgtgcagacaggcacaggc

SEQ ID NO: 375656 - DNA, 201 bp, Homo sapiens
gtagacttcttgctcttcttctcttgccacatgggagttgactgtcgggggtcctgggactggaggtgccccctcccgggtaacacttacaaggccagggscagatggggaggcagccagggcctcgcagtggttgggtccctcctcaaggcgctgtgtgggccaggcactctacacaccttcatgatcacacttcaacct

SEQ ID NO: 375657 - DNA, 201 bp, Homo sapiens
tatgtgggggtgagtgtgagtttgaggtgtctgggaatgagtgtgtatgcaagtgcatgtggtgtgtaaaggagagtgtgaggtgggcaggtgtgtgagtrtgtgtgagatgggtgtgtgtgtgtcagtgtgtgttcaccctgtgcatggccacgtagacttcttgctcttcttctcttgccacatgggagttgactgtcg

SEQ ID NO: 375658 - DNA, 201 bp, Homo sapiens
tcggtttagccagagtctcccaaccccccatgacccctgatgtttcttctggttaactttccaacctcagaccccaccctgctccttggctatgaattccygctttttcttattgtatctgctgttgagtccagtctctcttccccactgcggaagccactgccatggccctacacctgtccccatggcccctttgaacaa

SEQ ID NO: 375659 - DNA, 201 bp, Homo sapiens
tcccgagtagctgggattacaggcgtccaccaccacgcctggctaattttttgtatttttagtagagatggggtttcatcatgttggccaggctggtctcmaactcctgacctcaggtgatccacctgtcttggcctcccaaagtgctgggattacaggcgtaagccactgcgcccggcaataactccctcttcactgggc

SEQ ID NO: 375660 - DNA, 201 bp, Homo sapiens
gggctcctccttctctcccactcccagcttgtctcccgtgaccttgggcgcctgagttatggttccactgaccagcctaggttccttcctgtctctgggcytctgcttcttgtctcagcccagcaggctgcacccaattctggggctgtttacccctccagccacctgtaaacatgcatttatgagccctggggggcaggg

SEQ ID NO: 375661 - DNA, 201 bp, Homo sapiens
tagacttcttgctcttcttctcttgccacatgggagttgactgtcgggggtcctgggactggaggtgccccctcccgggtaacacttacaaggccaggggsagatggggaggcagccagggcctcgcagtggttgggtccctcctcaaggcgctgtgtgggccaggcactctacacaccttcatgatcacacttcaacctc

SEQ ID NO: 375662 - DNA, 201 bp, Homo sapiens
gtattttatcattaagcagcttcttctggggccgtctgatgcatcagctttctttaaagagtttcgtttaagaaacaggattttgctggtagaaggtatgraaagtttgcagaccgatcaagctagttggaggttctcaaagggtagcccctgaaccagcaacagcagcagctgcagcacccaggaacttgttagaaatgc

SEQ ID NO: 375663 - DNA, 201 bp, Homo sapiens
cactgggccctctttgcccccatgtcttcacctggtggtaccagttgttgcttattaatagctcacaagcaacgctggctttgcaaagacactcaaatctyctgtcattgggaaggagtctagtggagactggggtgcacttgggaccccttgggggcccagatctctgtggtcctcatgttctgctgttcaaacatgagg

SEQ ID NO: 375664 - DNA, 201 bp, Homo sapiens
cagcactttgggaggccgaggcgggcggatcacttgaggtcaggagttcgagaccatcctggctaatgtggtgaaaacccgtcgctagtaaaaatacaaamattagctgggcttggtggcatgtgccagtaatcccagctgctggagaggctgagatacgagaaccactttgaacttgggaggcagaagttgcagtgagcc

SEQ ID NO: 375665 - DNA, 201 bp, Homo sapiens
tcagcaaatattagtggacatagtcaaacatttttccccaccacatatgttcttaaagtttaaattaatgtttgtaatgatagctgaaagcagtgtcacayatttcttggaaatgctatctaaaactattcttatggctccaagtaactttgaagttttcattaaggcaggatctctgattcaaattaagctttttgtcct

SEQ ID NO: 375666 - DNA, 201 bp, Homo sapiens
aatatgcaaattagcctgacaacagtatgcccaatgagagggagctgatatgaacaaaatggacttgggagccagactgaccagagttccaatccctttgmcacttctactttgtaaagttggcttcaacccagagtggatattataactctctccaatatagcagatagatgatatgcccgaaatactgtatgtacaagt

SEQ ID NO: 375667 - DNA, 201 bp, Homo sapiens
taaaataagctaagaattatttatgtcactgatttacaggaaatcgaaaaatagaaaccaaattttcctacctattccttaaactattggatcaaattcartgtgtatcatgacaaatcaatgtatttgtttgataccaatattatttctccatgaccttttccttaatatgcatgtcccctattctatttagccaacaat

SEQ ID NO: 375668 - DNA, 201 bp, Homo sapiens
agccactttggtagtatggaaagaaaagggtaaaccatgaaggttttttaaatagcacactgggtttcagaagtgattttgtcaaataaaatttcattatrgactttaacagaggctgaaagacagccagataacatgattgtgccactccaagcagtccttcagggttggttaatctaccaaataagaatctagccatgt

SEQ ID NO: 375669 - DNA, 201 bp, Homo sapiens
attaaatgattacggtggttccaccctatctgcacaggatgtgttccaagacccccagtgggcacctgtaaccgcagatagtaccaaaccctatgtatatwtaccatgttttttcctatcacacatatttatgataaagtttaacttataagttaggcacagtaagagattaacagtaactaacaataaattagaacagtt

SEQ ID NO: 375670 - DNA, 201 bp, Homo sapiens
ctagcacattgagcttcctggctctgctgattttcaaacctgccaataattggtcctttaagaccaagaaagtgatgcttttcagaatctagtcatgttcmccctacacttttaggcagttggtactggtagaagctaaagaagttcaaattatataagaaagtttatttgtggattaagtaggaatgacactcctaagta

SEQ ID NO: 375671 - DNA, 201 bp, Homo sapiens
tttgcctgaagaagtccccaaagacttctcaaaggaggtgaaatttaaactaggtcttgaagaatgagtaggagctttccaggtgcagaagaaaaaaaataaaaaacaaactgataaaattcgaattgcttgtacaaaggcacagagctcagaaagggactgacatagtttagaaataatggtaaaaagttcagtgtggcc

SEQ ID NO: 375672 - DNA, 201 bp, Homo sapiens
aaaggtcttgaaatgaatattgagatatttgagatttggatcatcagggggcacagcctgtgttgtatgcatagtgattcaaggaataaaaatgagaagtsaattcatttattcaataaatattgtaagcacatctgttgtctgaatgtttgttccccctaaaattcatatgttgaaacctgatccccaatgtgatggtat

SEQ ID NO: 375673 - DNA, 201 bp, Homo sapiens
aaggaggtgaaatttaaactaggtcttgaagaatgagtaggagctttccaggtgcagaagaaaaaaaataaaaaacaaactgataaaattcgaattgcttrtacaaaggcacagagctcagaaagggactgacatagtttagaaataatggtaaaaagttcagtgtggcccagaatatggacagtggtaagatatttgact

SEQ ID NO: 375674 - DNA, 201 bp, Homo sapiens
agtgctgtgagtggggatagttgcaaggtgcaccaaatcgcccataccttagagatctacagattactgttaccagaagggggtcctgatccagaccccamgataggattcttggatctcacacaagaaagaatttgggtgaatccgtaaaatgaaagcaagttttattaagaaagtaaaggggccgggcgcagtggctca

SEQ ID NO: 375675 - DNA, 201 bp, Homo sapiens
gagatctacagattactgttaccagaagggggtcctgatccagaccccaagataggattcttggatctcacacaagaaagaatttgggtgaatccgtaaartgaaagcaagttttattaagaaagtaaaggggccgggcgcagtggctcatgcctgtaatccctgcactttgggaggccgaggcgggcagatcacgaggtc

SEQ ID NO: 375676 - DNA, 201 bp, Homo sapiens
agcctgggtgactgagcgaaactctgtctcagaaaaaaaaaaaaaaaaagaaagtaaagaaataggccaggtgcggtggctggtgcctgtaatctcagcaytttgggaggctgaggcaggtggatcacttgaggccaggagtttgagaccagcctggctaacatggtgaaaccccatctctactttaaaaaaacacaaaaa

SEQ ID NO: 375677 - DNA, 201 bp, Homo sapiens
tagaagattctaaacgcgccaatcagcactctgtaaaatggaccaatcactgctctgtaaaatggaccaatcagcaggacatgggcagggacaaataaggraataaaagctggccacttcagccagcagtggcaacccgctggggtccccttccatgctgtggaaactttgttctttggctcttcatagtaaatcttgctg

SEQ ID NO: 375678 - DNA, 201 bp, Homo sapiens
caggcagatcacgaggtcaagagttcaagaccagcctggccaacatgataaaaccccttctctacaaaaatacaaaaattagctgggcatggtggtatgcrcctgtaatccaagctacttggaaggctgaggcaggagaatcgcttgaacctgggagacaggttgcagtgagccaagatcatgccattgcactccagccta

SEQ ID NO: 375679 - DNA, 201 bp, Homo sapiens
ggtttatatactgtatagtatatcatcttaataaaaggggatacaggggtataggacttctagtgaaaacatgcaggcatagtagcttctgacaaagtttygttatgcaatttctcatctaggtgctaatggtcagtctccttcctggctgaaagcttccccaaccccctcaatcccccactcctactcaggggattaatg

SEQ ID NO: 375680 - DNA, 201 bp, Homo sapiens
cttgtaattggcaaatgtataggaaaattgtcataccattcaccattccaaaatatgatggaactaatctaaatatggtttaaaatcacatatttttataagttaaaaggatactataccttttgtagtatgtgaaaatcagatatgctttaatatggttaaaatcacatatttttataagttaaaaggttactatacctt

SEQ ID NO: 375681 - DNA, 201 bp, Homo sapiens
ttgtaattggcaaatgtataggaaaattgtcataccattcaccattccaaaatatgatggaactaatctaaatatggtttaaaatcacatatttttataagttaaaaggatactataccttttgtagtatgtgaaaatcagatatgctttaatatggttaaaatcacatatttttataagttaaaaggttactataccttt

SEQ ID NO: 375682 - DNA, 201 bp, Homo sapiens
tgtaattggcaaatgtataggaaaattgtcataccattcaccattccaaaatatgatggaactaatctaaatatggtttaaaatcacatatttttataagttaaaaggatactataccttttgtagtatgtgaaaatcagatatgctttaatatggttaaaatcacatatttttataagttaaaaggttactatacctttt

SEQ ID NO: 375683 - DNA, 201 bp, Homo sapiens
cgtttttgcatctcctcccggcttccccatccctaaaccaacgtctgttgaattaaactaccaaacaaaataagtgagtggcggtgggggaggaggttttycccgcttaactggagcggggcaaattgctgagaagggctggtggaccacttcgcggtctccttggcatagctctgcagagtggtaaccccagctcaactc

SEQ ID NO: 375684 - DNA, 201 bp, Homo sapiens
tgactttaggcaagccagtcatttcattagtacaaattgagccccagtgcataatgtagggttaccctggaggattgcaaatgcatggaatattaaatagrattggaaaaaatagctaatggaagagatatcattaggtcatatgtaataagttctaataaattgtacagacatagtagtctttaaattcataatggtgag

SEQ ID NO: 375685 - DNA, 201 bp, Homo sapiens
agaaatcaaactcccagagcaatctgtacttgaaatatgtaattgaaaaggaaagaattgagttgggctatatttttaaaacagggtaatagtgaaaactrtgtttaataaatttgcctgaattccaggtaaaccactaaaacttttatggttctctgttaatcatggttgcacttaatgcgtctctagttttattcatct

SEQ ID NO: 375686 - DNA, 201 bp, Homo sapiens
aaataagtgaaagtgttttctgaaatgtttcttagtgtttttcaacatagtcagaaaacaaagggagatccagacctaatgacaaaacaaataaataggcrtcatcccattgtaggggaaaactcaatccacagtggcactgtttgcatcattctttggaataactgagttcatcctgtaatgtttacttacaaagattca

SEQ ID NO: 375687 - DNA, 201 bp, Homo sapiens
ttactgactagcctgcagtcttagcctccaaatatttgttaaaggatttgaagaaactgtggaagccaggaaaccatttgtcatagatgtgttaggcactkagtgacttatcagagaataactgaatgagagatgacctctcgaagtcctagttctgtctgtgactcatgggtgggaatatgggcatagcactcctaaaat

SEQ ID NO: 375688 - DNA, 201 bp, Homo sapiens
gtacctcactctccccaggcattaatgtcaagtgttttttgcagaggaaaatttaaccctcaacacgagcatatgcacaaattcaaacacatatctaaatygacattcacatgtcctttctctttccctacacacatattccagtccttcatccctaccccaatattttaggtaataaaggacctaacagtgacttaaacc

SEQ ID NO: 375689 - DNA, 201 bp, Homo sapiens
tcctttctctttccctacacacatattccagtccttcatccctaccccaatattttaggtaataaaggacctaacagtgacttaaacccataaactgggtrttcaagagttaagggtagggacccattaattcattcactgaatattactgagttcttatacatactctgctgtatacactgttctaagcactaggtacac

SEQ ID NO: 375690 - DNA, 201 bp, Homo sapiens
aatgttttgagcctttacataatgctactttaactgaaaatctttgatgatacagtttctaaaagtgtaattattattgatttgtacatctctttttttamgtaggagacacagcggttcgagaagtttttgaagagactggtataaaatcagaattcaggtccgtcctgagtattcggcaacagcacacaaatcctggag

SEQ ID NO: 375691 - DNA, 201 bp, Homo sapiens
gtgatactcacaggaaccacgagcacacagaaggcccacattaaggagctagtcccttcctcctccagccttgcagtctaatggtggagcataaaagggartcagctggcaaagcagaaactggttagcagaatcccagctccagcatcactaagcaagtacagaagggcagattcggagctgagagacaataacagcatc

SEQ ID NO: 375692 - DNA, 201 bp, Homo sapiens
taggtacacatcagtgaacaaagtaaagtttctgcatagggagcttacattcaaatgcataagatacaaataataaaacgaatgaatattatataaggtgragatgtgttattaagaaaaatacatggtgcactaagcactaggtatacatcagtgaacagatgtatagtttccacatatggagttaagcaaagtttctac

SEQ ID NO: 375693 - DNA, 201 bp, Homo sapiens
caggagaatggcatgaacctgggaggcggagcttgcagtgagccgagatcgcgccactgcactccaacctgggagacacagcgagactccgtctcaaaaawacaaaacaaaacaaaaaaaaaaaaaaaaaaagataaattgttcaaaaagcaacttcacagggtagcactgaagatacttactgacctcaaaggggaaaaa

SEQ ID NO: 375694 - DNA, 201 bp, Homo sapiens
acaattctccagctccaaaacagacaggtcaggtgttaaacacaaggagggacatacccagtaagaagaaatatgctatgggaagcccaaagctatagctyccagcagtatttatgatccatccacactcttcccagtcccaaggtaggttaccaatcagggatcatttttacttttatcagaagcagcagtagaaggcta

SEQ ID NO: 375695 - DNA, 201 bp, Homo sapiens
tgatttgtacatctctttttttacgtaggagacacagcggttcgagaagtttttgaagagactggtataaaatcagaattcaggtccgtcctgagtattcrgcaacagcacacaaatcctggagcttttgggaagtcagatatgtatatcatctgccgcctaaagccatattcattcaccataaatttttgccaggaagaa

SEQ ID NO: 375696 - DNA, 201 bp, Homo sapiens
gaactttgaaataaatataataaagtcagttataaagcagtgattatataattcttcactttatgaaaattgtatctactatttatttttaatagtcaggwagtcaaaacatagtaaaatgtcatataagaaagtctcaactgagaaataatcccctaacacaacttactgagctcagtatttaagacaaggaaatataaa

SEQ ID NO: 375697 - DNA, 201 bp, Homo sapiens
cggtggtgggtggtttcagtcttcaataagaaaactttttactggctttcaaccttgagcccaatgataagaaagcttggatggaggagccttcactttgraagaagtcgatttagtggtgcagcagtttttcaaacggcctctgagggttttataatctaattgaaggcatagcatgcaaattcaactatggaaaaatct

SEQ ID NO: 375698 - DNA, 201 bp, Homo sapiens
ataaaagggagaatatacattttacaacttttgttatttttctttactgggacaatggttacatattttactactggataaaaaattgtttgaccaattayccaaactgagctatacacatttattttcttttactctcattaacaaatttctaaaatatacttcttctttcatgtgaaatgagattagatgtggccatta

SEQ ID NO: 375699 - DNA, 201 bp, Homo sapiens
aacatcacaaaattagagaaagcccagttagagggaccatctggatgtgtagaaaaagcagccacaaaaatatgttaatggcaataaaaatcctgccacayaaatttgcatttaattgaaaaatcaaccttataaaatgtgaaaacctttgttgaattataaaattatttatattccaagtttcttgaaaactgatcaaac

SEQ ID NO: 375700 - DNA, 201 bp, Homo sapiens
aattaagaagaaaaaaactgccgttggcattagccatacttcctaagcttagtgtaaattaaagctttgcctgaaaattcataaaaccctgaaagcagctrgaaatgaaaactgacagtagaggtctgaaagactatgtctatatgaaggcatttctaactcaacataaaacaaaagatattcttaatgatgaagctgaat

SEQ ID NO: 375701 - DNA, 201 bp, Homo sapiens
tctttccatacagaaggaggtttgttaatactttactcacaagaagagttaattccccaaattttaacaaaaagttttaagtggctaatgttttttaaggsataataatgaatagtttattgtacagaaaatagctattggtatataatgccaaaaataatattggaacattatattacatatgattaacaatctccaaac

SEQ ID NO: 375702 - DNA, 201 bp, Homo sapiens
catatgttcatttgttggtgttctatcagcttcccggatgccccaccttgctagctggcactccctacaatgcttggcatactagaatactaactattccwataacatttgccttttcagccagttcctaatatttcagagaaaagaaacagtaccagggactaagtggatacatgatagaacccacagcttattaattaa

SEQ ID NO: 375703 - DNA, 201 bp, Homo sapiens
gaaacttacatctgtgctgaatgttcagcaatgcaaatttactaaacaactgttttgctcttgaaaacaaactgcatttttttaaaaaaatgagtagtagsgccaaaatttagtggtcaagaaaagtagatgtctaacagagcaacatatgtacaattttcaattgtctccattctgagtttccaagtcatcttcagtgac

SEQ ID NO: 375704 - DNA, 201 bp, Homo sapiens
attcaagttaaactgatcaaaactactcaggcagtgctgattttcagtcagctgctatggtgactgctgagcagggcagatttgctcactacccccatccrgtgcttccacgacatagaaacagcatagatcatgagctacatgccgaacttttgattagtggtactaagagctaaataggatccccataatttattttca

SEQ ID NO: 375705 - DNA, 201 bp, Homo sapiens
ctagagaagaataaaatatagaaattttaatatgcctaaggggttatagaaaggtattttaaaaatcatttctaagcagttatggatcaccttagatattwatttaaaccaaactacttatacagaccttgaaaatttccaggtaacactcagtgttactatctattactttatggctaaaggaaaattataaatgactgt

SEQ ID NO: 375706 - DNA, 201 bp, Homo sapiens
acagaggatgaatagtagcctttaaatgaactttgaaataaatataataaagtcagttataaagcagtgattatataattcttcactttatgaaaattgtwtctactatttatttttaatagtcaggaagtcaaaacatagtaaaatgtcatataagaaagtctcaactgagaaataatcccctaacacaacttactgagc

SEQ ID NO: 375707 - DNA, 201 bp, Homo sapiens
atggcactcttctaaaatgtacggccgcgatctccgctctggagcgcggaggggtcatttgggcaacggacgaattaagcggcgtggagatgcggcagccrctgagctggggccgctggcgcgcgatgcttgcccgaacctacggccccgggccttcggcgggttaccgctgggcctcgggcgcacagggttacgtgcgga

SEQ ID NO: 375708 - DNA, 201 bp, Homo sapiens
tctaatattacagtttattccattagtagaaataatatcattaggaacataccacctattcttctgtttatgactgcttctggattaatctgtctgaaaakgagaagctttggatatacatcagtaaagtttagcattaaaggttattttggatacgactaatattgttgttggaattaaactatgagaaaacaaattcct

SEQ ID NO: 375709 - DNA, 201 bp, Homo sapiens
cttgtttagatgccttggcaaaataaaaatgacaagctcaagtcagcctgtcaattcaaggcacaatatgaataccccaagacctccatggcaccatttawagagacccctatattctccagccacaaaggcaatattgaaaatcaggcctagatccaactgtaagaatatcagagctgcaaaggagactgaatagagttt

SEQ ID NO: 375710 - DNA, 201 bp, Homo sapiens
gagcagaattaactttttagacgttcacccaatttcttgcttgttacagctaagcaaatagtttattcatgtggaatgagttatttgattaaatgattacrgtggttccaccctatctgcacaggatgtgttccaagacccccagtgggcacctgtaaccgcagatagtaccaaaccctatgtatatataccatgtttttt

SEQ ID NO: 375711 - DNA, 201 bp, Homo sapiens
atgttatgtaaggtggagataagtgttattaagaaaaacacatggtgccaagataaaaagaatgactgggtttgccatgtacattatgttcggtatgccchatatacattaacttctttatgcttgccatatacattaacttctgtatgcccaacacctaacaagcaataaatttctattgaatgaatgaacaaacttatg

SEQ ID NO: 375712 - DNA, 201 bp, Homo sapiens
acatcagacttgtaattggcaaatgtataggaaaattgtcataccattcaccattccaaaatatgatggaactaatctaaatatggtttaaaatcacatatttttataagttaaaaggatactataccttttgtagtatgtgaaaatcagatatgctttaatatggttaaaatcacatatttttataagttaaaaggttac

SEQ ID NO: 375713 - DNA, 201 bp, Homo sapiens
agacttgtaattggcaaatgtataggaaaattgtcataccattcaccattccaaaatatgatggaactaatctaaatatggtttaaaatcacatatttttataagttaaaaggatactataccttttgtagtatgtgaaaatcagatatgctttaatatggttaaaatcacatatttttataagttaaaaggttactatac

SEQ ID NO: 375714 - DNA, 201 bp, Homo sapiens
agatttttcttttatgctttcagttgtttctaaccatgtttaacctatgggcaaatctcaattgtaagggaagtcagcatgtaattgaaaaatggcagacraatgccttatgttttaaaacattatactctttctatgcatctttccatagctattagagggaaaaaacaagagcatatccaggggatgggtaagacagtc

SEQ ID NO: 375715 - DNA, 201 bp, Homo sapiens
ctgttagacaatgaggaataagtaagtatcatactgatttctggcagtctctttcaggagggagggactttgccttttaatttcaattcaactatttatcaaaaaaaaaaaaaaaaggatagctggctttcaaaaagacctggaaataatactccaagtaatggaatttaatagctaccacattatttaagataaatgttc

SEQ ID NO: 375716 - DNA, 201 bp, Homo sapiens
gctagaaaaattttgcatgcaattactaaaaaatatattctcaaccactttgaccaattataggtggattttgtgaaatctacatatgtgtgtgttagtgraagttatgttaactttattttctgactttatactgcagttgaaaaatatgtggaagtttccaggaggcctgtcagagcctgaagaagatattggtgtgta

SEQ ID NO: 375717 - DNA, 201 bp, Homo sapiens
cacaacaactcacctacccagagatcatatatgcctcagtcatgtggaattaagaagaaaaaaactgccgttggcattagccatacttcctaagcttagtrtaaattaaagctttgcctgaaaattcataaaaccctgaaagcagctagaaatgaaaactgacagtagaggtctgaaagactatgtctatatgaaggcatt

SEQ ID NO: 375718 - DNA, 201 bp, Homo sapiens
ttaaaaatcatttctaagcagttatggatcaccttagatatttatttaaaccaaactacttatacagaccttgaaaatttccaggtaacactcagtgttamtatctattactttatggctaaaggaaaattataaatgactgtatttaattgggaagacaagtctgctttaatatattaccaagatattcttccattcatt

SEQ ID NO: 375719 - DNA, 201 bp, Homo sapiens
cctgcaaacgtgtgccagtgggcaattgaattacagttttgtttaataagtttgagggaggcaggagttacaagcagagacataaatcaatatgtggatgrtatacatttatttcgcctgaaaaggcaggatgttttgaagaggcaggatgtttaaagagggggcttactggctataggtagattcacagattctctaatt

SEQ ID NO: 375720 - DNA, 201 bp, Homo sapiens
cctgtagcaagtagacattcagaaactctccgttcagctctatttcaaaagattctactcaataatttagtgacagcctcacacttcaatggaaagttatrcaaataattatcattcacgggcacagactcttaagagttcccagttattactacagaattggtaatatatgcaaaaagagtatcctatgaagggcctgtt

SEQ ID NO: 375721 - DNA, 201 bp, Homo sapiens
gtcaccacgatatcctcaagctaaagacagcgagtgacataaagtagatattcaatatttttttaatgaatgggatggaaatgtgagtcttctgagagagmagtttcagtattgttgaggggcagcattgcacagtgagaagagtgtgcctgcctagaatccagacagactggctatcagtcccagttctaccagttagag

SEQ ID NO: 375722 - DNA, 201 bp, Homo sapiens
gggacctgaaaattcaggtgatcttcctggctgtttctgtttttgctgctgctgctgctgctggtggtggtctcagtactaccctttaaggaccaaaattyttagatttctagaaaaactataatagtaagggatccttatgaccttaataaatgaaagcaatgaagcatattagttatttaattaataattttatttgcc

SEQ ID NO: 375723 - DNA, 201 bp, Homo sapiens; identical to SEQ ID NO: 81018

SEQ ID NO: 375724 - DNA, 201 bp, Homo sapiens
cttttatttgtccactctaaaactacagaacatctgttacgtgccaagcattgtctttggtggtatggatataaaggtcagcagtgtaatgactttattcygaaggaattcagtctgatggaaaaatcatataaacaaggtggttactataaaacatggtacttccagtgccagcgatgtgaacaagacatttggggacct

SEQ ID NO: 375725 - DNA, 201 bp, Homo sapiens
gggaaggagcacatgtgaaatgtatggagtgatagaaatgttctataatgttaaagtgtgttatgggcatatgcatatgtcaaatcgcatgaaatgtacasttaagatttgtacatttcactttatgtactttacctcaatttttaaaagatgtcatcagacaaagagagcaaggtgagaaggacctgatcccataattcc

SEQ ID NO: 375726 - DNA, 201 bp, Homo sapiens
agaaagtagccttttaatttgattggaaggattgcctgggaaggagcacatgtgaaatgtatggagtgatagaaatgttctataatgttaaagtgtgttaygggcatatgcatatgtcaaatcgcatgaaatgtacacttaagatttgtacatttcactttatgtactttacctcaatttttaaaagatgtcatcagacaa

SEQ ID NO: 375727 - DNA, 201 bp, Homo sapiens
ccccagctcaactctgagggtattgatggcactcttctaaaatgtacggccgcgatctccgctctggagcgcggaggggtcatttgggcaacggacgaatyaagcggcgtggagatgcggcagccgctgagctggggccgctggcgcgcgatgcttgcccgaacctacggccccgggccttcggcgggttaccgctgggcc

SEQ ID NO: 375728 - DNA, 201 bp, Homo sapiens
ccacaccaggaacagtttccatggaatgatggggtggaagtcaaagaggaataggctagggagagtatgtaagtggtgaggcggcagagaccactccattyaagaagcttggcaatggatagagagacggttgcaggaagaaaatgtggagcttttgttctgatttaagatggaagagaaatgagcatgtttacatgtcaa

SEQ ID NO: 375729 - DNA, 201 bp, Homo sapiens
atgcctttacaatatttaatgcctttacagaatttttatttaatattctctgatttttggataccaacaaaaggtactttttttgtatttaatattaatattaatatttaatgcctttacaatatttaatgcctttacagaatttttatttaatattctctgatttttggataccaacaaaaggtactttttttttttttt

SEQ ID NO: 375730 - DNA, 201 bp, Homo sapiens
  misc_feature (1)...(201): n = A,T,C or G
agaagtgcaatggatttttttttaatttggctttgattttagaaattatggtagagggtgtaggtataacaatatattttagaggatagaggtataacacnatattcaattatatttgccttacctggttatgagtctgtttgaataatataacttttatcatctcaatttgttgatttataaattaatgcaataaatttt

SEQ ID NO: 375731 - DNA, 201 bp, Homo sapiens
tttaatattaatattaatatttaatgcctttacaatatttaatgcctttacagaatttttatttaatattctctgatttttggataccaacaaaaggtacttttttttttttttgagatggagtctcgttctgtcacccaggctggagtgcagtggtgcgatcttggctcactgctgcaacctccacctcccgggtccaag

SEQ ID NO: 375732 - DNA, 201 bp, Homo sapiens
acaaggttattgtgaaattttcagctgaagaataaactagtttttagtctttaaactagttgatgatgatgataaaagtaacacatatgaatggaaataayaagatatcaaatgtccagagtgggaggacatgttggaggaggtgacacatgttaaagcaccactatttattaaaaataaaaatatgcatgccctgagaag

SEQ ID NO: 375733 - DNA, 201 bp, Homo sapiens
  misc_feature (1)...(201): n = A,T,C or G
tgctgtgactcactgaaatgaggaacacagaagaccagcaggttgaagtgtgcggaggagggagggaagagttctgttggggcatgtggagtcgaaggaanctgcaggacatccaaatggagatgtacaggaggcagttagagaaataggtcatgtgcttgggagaaaataatagtccagaaatatcaatgacatgtttag

SEQ ID NO: 375734 - DNA, 201 bp, Homo sapiens
cagaattggtttttcattcccaagagtgatggattaccatgatggtttcattattggttcttaacggggcttcatatgtcacttcagagtgtggggaagcrtttaaaattcccatgcctgaatcccattctaatagattctgattctgaaggcatggacgttgggattttcaaaaaacttcccaagtgattctaatgtaca

SEQ ID NO: 375735 - DNA, 201 bp, Homo sapiens
gtgagaatctctagttggacttacaatgggcagcatggatttgaggagttaactacaatgttactagcacatctgttttaaaaatttggctaaaatccttytaaaatgtgtttacatttatttctcaaacagatatcatggctatatttttggtttctacaagtggcatcatgaacctgctgaattccaggctaaaaccca

SEQ ID NO: 375736 - DNA, 201 bp, Homo sapiens
taataatatgtattgcaatttgtaacgttaatagcttgcgccgggcacaatagttgaagtatggaaagacagcgcatatcctgaggaactcagtagagtcmcagcatctggcttccctgtaatcctttctgctccttggtacttagatttgattagctatggacaagattggaggaaatactataaagtggaacctcttga

SEQ ID NO: 375737 - DNA, 201 bp, Homo sapiens
atccttctaaaatgtgtttacatttatttctcaaacagatatcatggctatatttttggtttctacaagtggcatcatgaacctgctgaattccaggctaraacccaggttcagcaacttcttgtctcaatcacccttcagtcagagtgtgatgctttccccaacatatcttcagatgagtcttgtaagtacctatgcaat

SEQ ID NO: 375738 - DNA, 201 bp, Homo sapiens
ttttggacatctaggtaatttcttaacttttgtctttgaaaacatctgtatccatgatctctatttataatctaattttacagaaagataatgcagagctrggggagagggtgggtacagcagtttcatttgtaatctgctgtacaatataatcaacatttagctgtatgattttgtcctcgttgttgcctaaaacgttat

SEQ ID NO: 375739 - DNA, 201 bp, Homo sapiens
atgtggaattgcaccaaggaatcaaagaagggcagtataaggacatgtgtaatataagattcgtgcaagaaagagcagacaggggaactaagtgtaaagayagaggctggacgctgtggctcatacctgtaatcccagcactttgggaggctgaggtgggtggatcacttaaggccaggagttcaagaccagcctggccaa

SEQ ID NO: 375740 - DNA, 201 bp, Homo sapiens
caatacagatactttacttgtgaaagaaccagtggctgtccttaaggccaacagagtttggggagcattacgaggtaagttccatgcagtttcattgttaytttccagtaaaggaaaattttcagttggtgctttgtgaaattaagcacagcaaaactttgccgccttagatcctttacagaatgctttgttatgtagttc

SEQ ID NO: 375741 - DNA, 201 bp, Homo sapiens
caccaaggaatcaaagaagggcagtataaggacatgtgtaatataagattcgtgcaagaaagagcagacaggggaactaagtgtaaagatagaggctggaygctgtggctcatacctgtaatcccagcactttgggaggctgaggtgggtggatcacttaaggccaggagttcaagaccagcctggccaatatgctgaaac

SEQ ID NO: 375742 - DNA, 201 bp, Homo sapiens
ctacattcaaaagtaagttgtttgaaagcctatttctgtattaatgctttttgtaaaagtttatttagtaatgtgctttattttttacattttctctacawcctttgcctaagtgtagatgtgaaaaatcactaaaggaggcaatacccactgcttgctttaaatcagtaacatggtgactccaagtattttccaatagct

SEQ ID NO: 375743 - DNA, 201 bp, Homo sapiens
ggaatcaaagaagggcagtataaggacatgtgtaatataagattcgtgcaagaaagagcagacaggggaactaagtgtaaagatagaggctggacgctgtrgctcatacctgtaatcccagcactttgggaggctgaggtgggtggatcacttaaggccaggagttcaagaccagcctggccaatatgctgaaactgcatc

SEQ ID NO: 375744 - DNA, 201 bp, Homo sapiens
caattgatactcagcactcagacaccatgtgaagtaggttttgcaacctgaattgagatggaaatggtcattacgttgccaaggaatctttgctgtccatyggcaatacagataacagattgtaaattccacaaaatgaaatgtatcgagactagagagtcatagcttatctttcagtcagttctacaaaccctctttatt

SEQ ID NO: 375745 - DNA, 201 bp, Homo sapiens
ggcaacatggtgcaactccatctctacaaaaagtacacaaattagccaggcatagtggtgtggacctatagtcccagctactctggaggctgaggtgggasgattgcttgagtccaggacgttgaggctgcagcgagcctagatcacaccactgcattccaggctgggcaacagagcaagacccctgtctcaaaaaaatac

SEQ ID NO: 375746 - DNA, 201 bp, Homo sapiens
acgttgaggctgcagcgagcctagatcacaccactgcattccaggctgggcaacagagcaagacccctgtctcaaaaaaatacaaataaataaatacagcrtgggagaaaactcatttgacctctcaaaaaatgtttgaaggttattacattcctgcagtgctgtaattcattgatgctcttgggactgtaatgtttatag

SEQ ID NO: 375747 - DNA, 201 bp, Homo sapiens
ggctgcagtgagccaagatcatgccactgtattccagcctgggcaatggagtgagaccctgtctcaaaaaaaaaaaaaaaaaaaagttttaaaggaagcagacatattggaagcaattccaaatgtagataggtaatatggattgtatatgatatctgcagtaaataatttttaaatatgtttgcttgcaggatgccatgg

SEQ ID NO: 375748 - DNA, 201 bp, Homo sapiens
cccagctttggtcactggaagtccttcaagttgcctcttacatcccttgcaggttccctttaattttggagcactgtcttactttttggcacatgatgttycaggcctgtcttccctgtcccggtcttttctgtgtcctcagacttttcttcaaggaacccttttagtggtgaacaacattttgaaaccaatatctaggct

SEQ ID NO: 375749 - DNA, 201 bp, Homo sapiens
tgtattaataagctcaattccagttaacacctatatttctggctcccttctctgagagtgaaaaccctccttttatcctcaatatatttatctgcacaatycccttgtatgtaaaagatgtcctaactccatcagccaaatccctttagccttgatgaagagggagtctttaagttttgatgatcttgttggacaaatctt

SEQ ID NO: 375750 - DNA, 201 bp, Homo sapiens
tgggcccaagtgatcttcctgcctcagccttccaaagtactggggttacaggtgtgagccaccgtgtctggcctcacaaataaagtttacaggaatatagscacgtacgtttgtttacatactgtctcactctacaattgcagagtggagtaggtgtaacaaactctatggcttgcaaagccaaaatatttactgtctagc

SEQ ID NO: 375751 - DNA, 201 bp, Homo sapiens
attaaggtgccttagctttccttctctgtctaaacacaaaagtgctaaacataaatttaaactgcttgcggggggatgtgtgatttaaattttaggcctcrggcaagtgctgttggtgagagactctggagttccaaagatgtcagagatatggatgacgcctatgacagactgacaaggcaccgctgcaggatggtcgag

SEQ ID NO: 375752 - DNA, 201 bp, Homo sapiens
aattttaggcctcgggcaagtgctgttggtgagagactctggagttccaaagatgtcagagatatggatgacgcctatgacagactgacaaggcaccgctrcaggatggtcgagtaagaaatctattaagtccagtgtgatttttaaccttcttattcagtgttagtttcttttgctataaatagaaatgtatgttaccta

SEQ ID NO: 375753 - DNA, 201 bp, Homo sapiens
ttttttttattggttaatccccaccatcacctgccaatttgtaggggtggggaggtttcctcccatgtttttttgcaccttcacttgatcattatgatgamactatgctatttaaaaattattattattattatttatttatttattttgaaacggagtttcgctcttgttgcccaggctggagtgcaatggcgcgatctc

SEQ ID NO: 375754 - DNA, 201 bp, Homo sapiens
agatgacatgaatatcaatctaaaatatctttatgaatgatatcaatctaaatcaatctaaaatatctttattcatgttatctacagacgtggaatagctrcacaacctctttatgctggatattgtaaccatgagaacatgtaaaaaatggaggggaaaaaggccacagcaatctgtactacaatcaactttattttgaa

SEQ ID NO: 375755 - DNA, 201 bp, Homo sapiens
ctgattatcttttgactattagggaaaagtgatgttgccacttttgtggcttagccatatcacttcctccaaacagatgatttaacttttttcagggtaarttggatataaaaacattgaggacagaaagcagagtagtgcaagtgtgctgcagatgtatttgttagatggctttgccggcaacccaggtgcctgtcctgg

SEQ ID NO: 375756 - DNA, 201 bp, Homo sapiens
tctctcattggttaacttccatacacttccaaacatgtcagaattttccgacctcttctgcaaaaaagcataagacgttcttacacataagtagcatatataaccttctggcttaccaaaatctgtaaaatattatttaaacagttgccctgaagcctatctgatcttttttatttagtgcctttacatttttatttaata

SEQ ID NO: 375757 - DNA, 201 bp, Homo sapiens
ggacgctgtggctcatacctgtaatcccagcactttgggaggctgaggtgggtggatcacttaaggccaggagttcaagaccagcctggccaatatgctgaaactgcatccctactaaaaaatacaaaaagttagccaagcgtgttggtgcgtacctgtaatcccagctactcgggaggctgaggcaggagaatcacttga

SEQ ID NO: 375758 - DNA, 201 bp, Homo sapiens
gggctaactgaaaagtcaatgatataattcctttcacacttcagggaagtgatcattgttaacactaataacttggttgtgaagtaaaaatggaaattctrtagctatgtgtccatatatttagaaaaccaaatttctaattgttatatgtattttccactgagttgaattacagtcctgtttaatatcagccagttgtca

SEQ ID NO: 375759 - DNA, 201 bp, Homo sapiens
tcccaccactttgggaggttgaggcaggcagatcacttgaggtcaggagttcgagaccagactggccaacatggtgaaatcccatctctactaaaaatacaaaaaaaaaatgagccaggcatggtggcgcatgcctgtaatcccaactacttgggagggtgaggcaggagaattgcttgaacctgggagagggaggttgca

SEQ ID NO: 375760 - DNA, 201 bp, Homo sapiens
acagtgtggtacatctttgccatgtttgttgctgatctaatgataaaatatatctccttgttttaatgtgcacttccttgctttttagtgaatataagcctttttttttacatattaattatttgtatattttatattataaactgtaagtttccttttttttttttttttttttttttgagacagtcttgttctgttgcc

SEQ ID NO: 375761 - DNA, 201 bp, Homo sapiens
tgaatggaaataacaagatatcaaatgtccagagtgggaggacatgttggaggaggtgacacatgttaaagcaccactatttattaaaaataaaaatatgyatgccctgagaagtggactagtttttactgcagataaatggacacataaatcaaggatgtttgatgcagtttgcctgtaatgtgaagaactgtcaataaa

SEQ ID NO: 375762 - DNA, 201 bp, Homo sapiens
ggttttaccatgttggccaggctgatcttgaactcctgacctcaggtgatctaccttcctcagcttcccgaagtgctgggattacaggcgtgagcccccaygcctggcaaaatttttttatttttattttttagcaaagaaccctgctaacattttttttttttttaagagatggggttttgccacatttcccaggttggt

SEQ ID NO: 375763 - DNA, 201 bp, Homo sapiens
acgcataaagcaatactatattttctccttccgtgtacatctatgtcaagcctaagaaaatgcccgataagtatttcctctgaggaaggtagagggagttrggtgagtatctcaaaggagattttagccttatctatattatattgcttttaaacagaatatatagatatgtcatttgtatattcaccctccaaaacaaat

SEQ ID NO: 375764 - DNA, 201 bp, Homo sapiens
gcaactgactatctttccttgtcttttttttttttttttttttttttttgagacggagtcttgctctgtcgcccaggctggagtgcagtggcgggatctcrgctcactgcaagctccgcctcccgggttcacgccattctcctgcctcagcctcccaagtagctgggactacaggcgcccgccactacgcccggctaattt

SEQ ID NO: 375765 - DNA, 201 bp, Homo sapiens
ggattagtaggaactgaggaatgtttgcactttcaactaaactcttagcttaactaggaccctactctgttgaggagaagttggagagactaactcttttrggaaaatgaggaaacatggagttgacacccaaattcccgttctgagtgactcaagtgactggatggtggtgctgtgactcactgaaatgaggaacacaga

SEQ ID NO: 375766 - DNA, 201 bp, Homo sapiens
cgggatctcagctcactgcaagctccgcctcccgggttcacgccattctcctgcctcagcctcccaagtagctgggactacaggcgcccgccactacgccyggctaattttttgtatttttagtagagacggggtttcaccgttttagccgggatggtctcgatctcctgacctcgtgatccgcccgcctcggcctcccaa

SEQ ID NO: 375767 - DNA, 201 bp, Homo sapiens
gaaaattctaaaactaaatcaaaattttattttgtcatagttcaccatcaatgaatccaccattattgattctccaaggttttctcacagaggaattttgrttgatacatccagacattatctgccagttaagattattcttaaaactctggtaagtaattacttcattctaatctgttgtctattctgaagatgtctcct

SEQ ID NO: 375768 - DNA, 201 bp, Homo sapiens
tttgtttgtttgtttgagatggagtttcgctcttgtcgcccaggctggagtgcaatggtgcagtctcagctcactgcaacctctgcctcccaggttcaagygattctcctgcctcagcctcctgagtagctggagttacaggcatccgccaccacgcccagctaatttttctatttttagtagagatggggtttcgccatg

SEQ ID NO: 375769 - DNA, 201 bp, Homo sapiens
gcaggtggatcacctgaggtcaggagttcgagaccagcctggccaacatggccaaaccccatctctactaaaaatacaaaaattagccaggcgtggtagcrtgcgcctgtaatcccagctactagggaggctgagacaggagaattgcttgaaccctccccgggtggaggttgcagtgagccgagatcgcaccaccgcact

SEQ ID NO: 375770 - DNA, 201 bp, Homo sapiens
actcctgacctcaggtgatccacctgccttggcctcccaaagtgctgggattgcaggtgtgagccaccgtgcccagccaaaaattattattattattattwtttttttttctttttagttgaagtcttgctctgtcgccaggctggagggcagtggtgcaatcttggctcactgcaacctccgcctcccggattcaagcaa

SEQ ID NO: 375771 - DNA, 201 bp, Homo sapiens
cttctaattccatcactccttctatcatttattacttggcatttcagtgtaaggtagagcaatcccttctcttttatttaagtattcgttatttttatcaktgtggactcatgggttactatgttattcaggattgtaatctgttactttccctgtttttttgtttgtttgtttgagatggagtttcgctcttgtcgccca

SEQ ID NO: 375772 - DNA, 201 bp, Homo sapiens
ttcaagtgattctcctgcctcagcctcctgagtagctggagttacaggcatccgccaccacgcccagctaatttttctatttttagtagagatggggtttygccatgttggccaggctggtcccgagctcctagcctcaggtggtccacccagcttggcctcccaaagtgctgggattacaggcgtgagccactgtgccca

SEQ ID NO: 375773 - DNA, 201 bp, Homo sapiens
cctgtaatcccagctccttgggaggctgaggcaggagaatctcttgaacctgggaggaagagattgcagtgagctgagatcatgccactgtactccagackgagtgacagagtgagactccatctcaaaaaaaaaaaaaaaaaaaaaaaaatggaataaaaaacctgttgcattgaagtagctgtagagggctccacacca

SEQ ID NO: 375774 - DNA, 201 bp, Homo sapiens
agctaatttttctatttttagtagagatggggtttcgccatgttggccaggctggtcccgagctcctagcctcaggtggtccacccagcttggcctcccaragtgctgggattacaggcgtgagccactgtgcccagccactttccttgtttaatagtcaaattatcccagctttggtcactggaagtccttcaagttgcc

SEQ ID NO: 375775 - DNA, 201 bp, Homo sapiens
tcaccaatttggccaggctggtcttgaactcctgacctcaggtgatccgcccgcctcggcctcccaaagtgctggggctacaggcgtgagccaccacgtayggccagcaccgggcatttttcttactttagccatcccgtgtttgaggttgctgtctgggctctgctcctacccgagggcacccctggaggaaattctcga

SEQ ID NO: 375776 - DNA, 201 bp, Homo sapiens
cttgtagaccctctgagcagagagagctagaaaacgtgtgtacctgtgtatgtatacatttgtatgaatacacacacatctttccctatttctatatctgyttatatcaggagttggcaaaccataccccaaaggccaaatccagttcaccatctattttcacaaacatggggttttggtctcactgtcacccccaggctg

SEQ ID NO: 375777 - DNA, 201 bp, Homo sapiens
gttgcattgggatattcagaaagattgcatggaaagtacatgaaggttgtctcagaagatcatgactagggttggaaatctttttaaaaacaaacaccctyattatgtttgccttggagttcagcttgtagaattggattttccttctgtgtcatactgctaagtaaaacaaggacttggtaatatgctgaactaactgtg

SEQ ID NO: 375778 - DNA, 201 bp, Homo sapiens
tgtagaccctctgagcagagagagctagaaaacgtgtgtacctgtgtatgtatacatttgtatgaatacacacacatctttccctatttctatatctgttwatatcaggagttggcaaaccataccccaaaggccaaatccagttcaccatctattttcacaaacatggggttttggtctcactgtcacccccaggctgga

SEQ ID NO: 375779 - DNA, 201 bp, Homo sapiens
cttctctgagagtgaaaaccctccttttatcctcaatatatttatctgcacaatccccttgtatgtaaaagatgtcctaactccatcagccaaatcccttyagccttgatgaagagggagtctttaagttttgatgatcttgttggacaaatcttctcccttattttttttcatcttttaaaaatagtgtttatattttat

SEQ ID NO: 375780 - DNA, 201 bp, Homo sapiens
cctacccgagggcacccctggaggaaattctcgaggtgacctggacagggcgggctgggcgaggacgctcccggggcctggaggcggagtcgggggcgggcgcgcgcagtcatctgactcggtgactcacccgcggccgcgcttcctctgatccgggccgggcgggaagtcgggtcccgaggctccggctcggcagaccgg

SEQ ID NO: 375781 - DNA, 201 bp, Homo sapiens
ctttattcatgttatctacagacgtggaatagctgcacaacctctttatgctggatattgtaaccatgagaacatgtaaaaaatggaggggaaaaaggccmcagcaatctgtactacaatcaactttattttgaaatcatgtaaaataagatattagactgttttttgaataaaatatttttattgattgaacctttgacc

SEQ ID NO: 375782 - DNA, 201 bp, Homo sapiens
tgctcctacccgagggcacccctggaggaaattctcgaggtgacctggacagggcgggctgggcgaggacgctcccggggcctggaggcggagtcgggggygggcgcgcgcagtcatctgactcggtgactcacccgcggccgcgcttcctctgatccgggccgggcgggaagtcgggtcccgaggctccggctcggcaga

SEQ ID NO: 375783 - DNA, 201 bp, Homo sapiens
ttaaattttaggcctcgggcaagtgctgttggtgagagactctggagttccaaagatgtcagagatatggatgacgcctatgacagactgacaaggcaccrctgcaggatggtcgagtaagaaatctattaagtccagtgtgatttttaaccttcttattcagtgttagtttcttttgctataaatagaaatgtatgttac

SEQ ID NO: 375784 - DNA, 201 bp, Homo sapiens
tgaagtgggaggatcacttgagactgggaggtcaaggctgcagtgagccaagatcatgccactgtattccagcctgggcaatggagtgagaccctgtctcaaaaaaaaaaaaaaaaaaaagttttaaaggaagcagacatattggaagcaattccaaatgtagataggtaatatggattgtatatgatatctgcagtaaat

SEQ ID NO: 375785 - DNA, 201 bp, Homo sapiens; identical to SEQ ID NO: 81039

SEQ ID NO: 375786 - DNA, 201 bp, Homo sapiens
accaggttcatctcactagggagtgccagacagtgggcgcaggacagtgggtgcagcgcatcatgcgcgagccgaagcagggtgaggcgttgcctcactcrggaagcgcaaggggtcagggagttccctttcctagtcaaagaaaggggtgacacacggcaccaggaaaatcgggtcactcccacccgaatactgtgcttt

SEQ ID NO: 375787 - DNA, 201 bp, Homo sapiens
ctgcttcttaagggacaccttgggtgctcaggaaccctggtttgagagccggatagtaagtggaagagggagtttgctctgaggccttgttgggcaaatgrcatggacggaggggacaccggagctggggaggaaagtgacagctccttatttgaaggacgtgcaaagggataagttacccgaagggcttagacaagctct

SEQ ID NO: 375788 - DNA, 201 bp, Homo sapiens
tgcgcgagccgaagcagggtgaggcgttgcctcactcaggaagcgcaaggggtcagggagttccctttcctagtcaaagaaaggggtgacacacggcaccrggaaaatcgggtcactcccacccgaatactgtgcttttccgacgggcttaggaaacggcacaccaggatattatatcctgcacctggctcggagggtcct

SEQ ID NO: 375789 - DNA, 201 bp, Homo sapiens
cagaattgtaatttggtgctaactgtactgcctcctggcattccccaagcctgtcgctgtacccagtggatactatagagcttaagtgtgcttgcaggacmctgaacaggtggggagggaatgtaaaactaactgaataatgtgttctgaccccagataggacaggtgcctaggctcaagctgcagaggcccaagatgctg

SEQ ID NO: 375790 - DNA, 201 bp, Homo sapiens
gaagcactaaacatggaaaggaacaaccagtaccagccgctgcaaaatcatgccaaagtgtaaagaccatcgagactaggaagaaactgcatcaactaacragcaaaataaccagctaacatcataatgacaggatcaaattcacacataacaatattaactttaaatgtaaatggactaaatgctccaattaaaagacac

SEQ ID NO: 375791 - DNA, 201 bp, Homo sapiens
gtactgcctcctggcattccccaagcctgtcgctgtacccagtggatactatagagcttaagtgtgcttgcaggacactgaacaggtggggagggaatgtmaaactaactgaataatgtgttctgaccccagataggacaggtgcctaggctcaagctgcagaggcccaagatgctgatggcagaaatggttcattctcta

SEQ ID NO: 375792 - DNA, 201 bp, Homo sapiens
ccacttctccggttgagcagtgtattttgatcttgaggattcatggcttgataagtagatagttctaaggcaaaagtagctgagcctgatgttagcgttcsaagcacagttgaataaccctaatcaaaataatttaagtcatttatattatcaaatttaagcctcaagtttctcttcctgctgattatcttttgactatta

SEQ ID NO: 375793 - DNA, 201 bp, Homo sapiens
acataacaatattaactttaaatgtaaatggactaaatgctccaattaaaagacacagactggcaaattggataaagagtcaagacccatcagtgtgttgkattcaggaaacccatctcacgggcagagacacacataggctcgatataaaaggatggaggaagatctaccaaggaaatggaaaacaaaaaaaggcagggg

SEQ ID NO: 375794 - DNA, 201 bp, Homo sapiens
gtgttgtattcaggaaacccatctcacgggcagagacacacataggctcgatataaaaggatggaggaagatctaccaaggaaatggaaaacaaaaaaagkcaggggttgcaatcctagtctctgataaaacagacttttaaaccaacaaagatcaaaagagacaaagaaggccattacataatggtaaagggatcaattc

SEQ ID NO: 375795 - DNA, 201 bp, Homo sapiens
ctcagcaaatgtaaaagaacagaaattataacaaactatctctcagaccacagtgcaatcaagctagaactcaggattaaggaactcactcaaaactgctyaactacatggaaactgaacaacctgctcctgaatgattactgggtacataacgaaatgaaggcagaaataaagatattctttgaaaccaacaagaacaaa

SEQ ID NO: 375796 - DNA, 201 bp, Homo sapiens
cgagttagtgggtgcagcgcaccagcatggcacatgtatacatacgtaactaacctgcacattgtgcacatgtaccctaaaacttaaagtatgataataawaaaaaaaagaaatgctttaaattttaaaaaaaaattcacatttctccaactgtctttttctcttatttaaaaaattattttaaaacatttgcagtgggat

SEQ ID NO: 375797 - DNA, 201 bp, Homo sapiens
catggcacatgtatacatacgtaactaacctgcacattgtgcacatgtaccctaaaacttaaagtatgataataataaaaaaaagaaatgctttaaatttwaaaaaaaaattcacatttctccaactgtctttttctcttatttaaaaaattattttaaaacatttgcagtgggatacaaataagctccataattgtggtg

SEQ ID NO: 375798 - DNA, 201 bp, Homo sapiens
gtcattgcttgtagaccctctgagcagagagagctagaaaacgtgtgtacctgtgtatgtatacatttgtatgaatacacacacatctttccctatttctrtatctgtttatatcaggagttggcaaaccataccccaaaggccaaatccagttcaccatctattttcacaaacatggggttttggtctcactgtcacccc

SEQ ID NO: 375799 - DNA, 201 bp, Homo sapiens
acttgggagggtgaggcaggagaattgcttgaacctgggagagggaggttgcagtgagctgagctggcaccactgcattccagccttggtgacagagcaaractccatctcaaaaaacaaaataaataaagatttggaatctgactcagagtgttacctaaaataatcattgttatgctatatattttataccataagatt

SEQ ID NO: 375800 - DNA, 201 bp, Homo sapiens
ttagtagagatagggtctcactatgtcatgcaggctggtctcaaactcctgggcccaagtgatcttcctgcctcagccttccaaagtactggggttacagrtgtgagccaccgtgtctggcctcacaaataaagtttacaggaatatagccacgtacgtttgtttacatactgtctcactctacaattgcagagtggagta

SEQ ID NO: 375801 - DNA, 201 bp, Homo sapiens
gggtctcactatgtcatgcaggctggtctcaaactcctgggcccaagtgatcttcctgcctcagccttccaaagtactggggttacaggtgtgagccaccrtgtctggcctcacaaataaagtttacaggaatatagccacgtacgtttgtttacatactgtctcactctacaattgcagagtggagtaggtgtaacaaac

SEQ ID NO: 375802 - DNA, 201 bp, Homo sapiens
acaaattagccaggcatagtggtgtggacctatagtcccagctactctggaggctgaggtgggaggattgcttgagtccaggacgttgaggctgcagcgarcctagatcacaccactgcattccaggctgggcaacagagcaagacccctgtctcaaaaaaatacaaataaataaatacagcatgggagaaaactcatttg

SEQ ID NO: 375803 - DNA, 201 bp, Homo sapiens
gtactggggttacaggtgtgagccaccgtgtctggcctcacaaataaagtttacaggaatatagccacgtacgtttgtttacatactgtctcactctacarttgcagagtggagtaggtgtaacaaactctatggcttgcaaagccaaaatatttactgtctagccctttatgtaaaatgtttaccaacccctggtctatg

SEQ ID NO: 375804 - DNA, 201 bp, Homo sapiens
cacccttattatgtttgccttggagttcagcttgtagaattggattttccttctgtgtcatactgctaagtaaaacaaggacttggtaatatgctgaactractgtgacaagaaagcatgggtgatgtaagttaacaataggtagataaccaggacttaaatcagctgagatggttcgaaggcaaggcttggtatttcaag

SEQ ID NO: 375805 - DNA, 201 bp, Homo sapiens
taaaagatgtcctaactccatcagccaaatccctttagccttgatgaagagggagtctttaagttttgatgatcttgttggacaaatcttctcccttattktttttcatcttttaaaaatagtgtttatattttatataaatattatattggttattcctctagagtatatataaaattaataactcaatttgcccaaaaa

SEQ ID NO: 375806 - DNA, 201 bp, Homo sapiens
ctctgggggaattgtattgagtttgcaatgaaattcttggttgggactcaaatttcagaactgtgggaattataagtcctggtacttaaatgaatgctccrtttttcctttgctctattcccaaacacagtggcagccaagaaccattttgcattcttggcagactgctacatattgggaatcttgctctcctcccataca

SEQ ID NO: 375807 - DNA, 201 bp, Homo sapiens
tttaaagtctgattataaaagtagtacatagtctttgtggaaaatttattaagtacagtaagtgcagaagaagaaataaatcactcataatcccagcagayagaattaatcactgtcattttaggtgtatttttttgcagagtaaaacatgtaaacattttacatagacataaatacaaacatgataagcattgacatgaa

SEQ ID NO: 375808 - DNA, 201 bp, Homo sapiens
attacccccagactgcctcacagttaagtacatgtcttcatcctgctggtttagatgagatttctcaataatacatctctttgaaagaaagctttctttctcttcaattccatagctgttcttagaagagaaataggaaaattcaccaacatcaggtatcatttcaattgatactcagcactcagacaccatgtgaagtag

SEQ ID NO: 375809 - DNA, 201 bp, Homo sapiens
aacatatacagatacagaatagtttaatgaactcccatgttctcatcatgccagttcaaacatgaatacatggtcaaccttgtatcacttaaactcctgcrgacaagccctgccccatcctgttgttttgaataaaatccatcattgtatctcactgtaaaaaggcctgttctttaagaaaaaataaccataatacatgat

SEQ ID NO: 375810 - DNA, 201 bp, Homo sapiens; identical to SEQ ID NO: 81035

SEQ ID NO: 375811 - DNA, 201 bp, Homo sapiens
aaaagagcaactccattacccccagactgcctcacagttaagtacatgtcttcatcctgctggtttagatgagatttctcaataatacatctctttgaaaraaagctttctttctcttcaattccatagctgttcttagaagagaaataggaaaattcaccaacatcaggtatcatttcaattgatactcagcactcagac

SEQ ID NO: 375812 - DNA, 201 bp, Homo sapiens
tgtgctaacagcacttgtgtttttgtttccttttgttttactttttattatggcaaatttcaaacatatacagatacagaatagtttaatgaactcccatrttctcatcatgccagttcaaacatgaatacatggtcaaccttgtatcacttaaactcctgcagacaagccctgccccatcctgttgttttgaataaaatc

SEQ ID NO: 375813 - DNA, 201 bp, Homo sapiens
ataaataaagcaataaaaattgttcttactgaaaatgaagtagctaggtgctcctgaatttctctccaaaaactaaaacatttaggtcaaaccacttctcyggttgagcagtgtattttgatcttgaggattcatggcttgataagtagatagttctaaggcaaaagtagctgagcctgatgttagcgttcgaagcacagt

SEQ ID NO: 375814 - DNA, 201 bp, Homo sapiens
ttggttgcattgggatattcagaaagattgcatggaaagtacatgaaggttgtctcagaagatcatgactagggttggaaatctttttaaaaacaaacacscttattatgtttgccttggagttcagcttgtagaattggattttccttctgtgtcatactgctaagtaaaacaaggacttggtaatatgctgaactaact

SEQ ID NO: 375815 - DNA, 201 bp, Homo sapiens
cgaaggcaaggcttggtatttcaaggcatgtgcgggtgattacctgaagagtttgcctaactcatggcctctgagtgaagcagccattaattatgcctggyattattaggaagcaggtcataaaatgtgttggcccttatggctaagacttgaaggcatgcatgtgagcattctaggaactcagaaggagcagcaggtatc

SEQ ID NO: 375816 - DNA, 201 bp, Homo sapiens
cattaattatgcctggtattattaggaagcaggtcataaaatgtgttggcccttatggctaagacttgaaggcatgcatgtgagcattctaggaactcagraggagcagcaggtatctcagagtaaaagcacagtggagttggaaagatttggaaatatgggagtgttcacaaagtgcgacgtggtcaggaacacacagtc

SEQ ID NO: 375817 - DNA, 201 bp, Homo sapiens
cctcaacacctacatccattccattctctcattggttaacttccatacacttccaaacatgtcagaattttccgacctcttctgcaaaaaagcataagackttcttacacataagtagcatatataaccttctggcttaccaaaatctgtaaaatattatttaaacagttgccctgaagcctatctgatcttttttattta

SEQ ID NO: 375818 - DNA, 201 bp, Homo sapiens
ctttacaatatttaatgcctttacagaatttttatttaatattctctgatttttggataccaacaaaaggtacttttttttttttttgagatggagtctcrttctgtcacccaggctggagtgcagtggtgcgatcttggctcactgctgcaacctccacctcccgggtccaagcagttctcctgcctcagcctcctgagt

SEQ ID NO: 375819 - DNA, 201 bp, Homo sapiens
atttaaaaaattattttaaaacatttgcagtgggatacaaataagctccataattgtggtgagttaatatgtctagtaattcttttttgatctacaggtcygctcttcccacctttttctcctgtaattgttgttgaagaaactgagtcatgtgtcctacagtttcccacagtctgggttttgctgattgcaccccacagt

SEQ ID NO: 375820 - DNA, 201 bp, Homo sapiens
accaacaaaaggtacttttttttttttttgagatggagtctcgttctgtcacccaggctggagtgcagtggtgcgatcttggctcactgctgcaacctccrcctcccgggtccaagcagttctcctgcctcagcctcctgagtagctgggattacaggcgcctgccaccatacccagctgattgtttgtatttttagtaga

SEQ ID NO: 375821 - DNA, 201 bp, Homo sapiens
gtctgctcttcccacctttttctcctgtaattgttgttgaagaaactgagtcatgtgtcctacagtttcccacagtctgggttttgctgattgcaccccayagtgtcaattaatatgtccctgtatttactataaactggtagttgaatctagtcttgatagaaatttgatttgcagtgctgggagacaagactgcttttc

SEQ ID NO: 375822 - DNA, 201 bp, Homo sapiens
gtatggaaagacagcgcatatcctgaggaactcagtagagtcacagcatctggcttccctgtaatcctttctgctccttggtacttagatttgattagctmtggacaagattggaggaaatactataaagtggaacctcttgattttggcggtaagtgaagcagttggtccaagtgttgtgggttactgtgaagctgatgg

SEQ ID NO: 375823 - DNA, 201 bp, Homo sapiens
tttttttttttgagatggagtctcgttctgtcacccaggctggagtgcagtggtgcgatcttggctcactgctgcaacctccacctcccgggtccaagcarttctcctgcctcagcctcctgagtagctgggattacaggcgcctgccaccatacccagctgattgtttgtatttttagtagagactgtgtatttttagtt

SEQ ID NO: 375824 - DNA, 201 bp, Homo sapiens
tgaataaatatggcttttacagggaagctattctttgtctcatgtttatacaccaaatgatgtccgtatggtgattgaatatgccagattacgaggaattygagtcctgccagaatttgatacccctgggcatacactatcttggggaaaaggtaaggagttgtattttatttcattttatcttattttttattttttgag

SEQ ID NO: 375825 - DNA, 201 bp, Homo sapiens
tagtttcactatgtgggccgggctggtcttgaactcctgacctcgtgatcctcccgccttggcctcccaaagtgctgggattacaggcatgagccactgcrgctggccaacaaaaagtaaattttaaaggctctggtgagaattctggaccttcttttggggctttatatgtaagctaggatacttttgcaggaaggtaac

SEQ ID NO: 375826 - DNA, 201 bp, Homo sapiens
gggacaggagggaacatctgaagggtggagcttcaggctctcagatccccttcataaaaaacattctagtttgtccaattttgtacattagcctttagtgmaaaatcactgaaaaaggattttgctgtttaaaaaagtttcaaaaccataggtctattaagaattgataattttatatacaatgcattttatgaggaccaa

SEQ ID NO: 375827 - DNA, 201 bp, Homo sapiens
cttcttttggggctttatatgtaagctaggatacttttgcaggaaggtaacaggaactctgactcaatctggctcaaacaataggaaaacttatttcacayattaggatgtccaaaagtagggatgaatttagggcaagttgaccaagtggctcaacagtgttaccagggatccatattctttccatctctgctctgtcca

SEQ ID NO: 375828 - DNA, 201 bp, Homo sapiens
tttcctcaggtttagagacctttagccagttagtttatcaagattcttatggaactgtaagtatgattattatatgttactaaaaattgttagacaaattrctaatagaaaaaaatgtaacctgtttagctattgcttcctgaagatttcatttccccagatatttgtcttagccggtaaatgtaaatttcatacattttt

SEQ ID NO: 375829 - DNA, 201 bp, Homo sapiens
gtgatctcagctcactaaaacttccaccttccggtttcaagcgattctcctgcctcaggctcctgagtagctgggattacaggcgcccgccaccacgcccractaatttttgtatttttaatagagacggggtttcactttggtggccaggctggtctcgaactcctgaacttgtgatccgccctccttcgccttccaaag

SEQ ID NO: 375830 - DNA, 201 bp, Homo sapiens
atttgtgtagagatagggtctcaccataatgcctcaaactcctggtgtcaaatgatccttccaccttggcctcccaaagtgttgggattataggcatgagscaccatactccaccttatatttatattatatacttacccatcatatgttgttgtgaattttttctaaatttctaaatttgttttaataactgtgtttata

SEQ ID NO: 375831 - DNA, 201 bp, Homo sapiens
cttgatgaaaaattccttttatggcaaagttactaatctagctgaaaaactttttctaccatgaggatttacttagtgaaagagtaaaggctctattaaaycaaatattttaggaaagatttttcttaaggcaggttaaactgtgtcaggtagatattgagcacgaataaaatacacttgctattaagactaaactgtatc

SEQ ID NO: 375832 - DNA, 201 bp, Homo sapiens
gaaataattaaggcaaaattcctatttcatagatcagaaacctgacattaaatgagttcagtgtcatatgacatttactaggaaaagtgaagccaaacaaraagtaggtctcctgattctcagttaagttcactttccatgattctcagtacctcctgaggtgttaattctctttgtgtggccacctagttcacccagagt

SEQ ID NO: 375833 - DNA, 201 bp, Homo sapiens; identical to SEQ ID NO: 81069

SEQ ID NO: 375834 - DNA, 201 bp, Homo sapiens
taaccatctatttggtaagttcacataaatcaaataatggtaaaaggaaatcagaatttatattgagatgtaatctacatgtaatctcagatatttcataktaaaaggagaaataggaaagctggtgtcaagaactttgagagatcagagattctaccttacttttgagctaacaagttagcctgccatagtttaatggat

SEQ ID NO: 375835 - DNA, 201 bp, Homo sapiens
ttgaaattaaaccgagaaacaagaacctcaaatttgaatttaagtaattctcctaaacaaaacaaagacttcaattgttattgcttaccgccttctctttycttttctgtttaatcatattggaaagtactttagctcgagattgtccctctctgtccagcagataggcaggtactgctccctgtggtgtcttttcatcat

SEQ ID NO: 375836 - DNA, 201 bp, Homo sapiens
tagttaatgaaagtaaatgcaagttatagaactctaaaacctttctttataggttgcagatttggatgatgaatttgctgacttggttttagaagaatttwgtgagaattttgatttgttaccagctgaaaaggtaaattttattattcaatggctttcacaaaattttactaattggatgtagtttgatttctctgcctt

SEQ ID NO: 375837 - DNA, 201 bp, Homo sapiens
ttgaagaaatggtaactcagatttacatattttatttatgatcagttcctctgttagactatcaaggttaaatcacaagtatattcatttattcaagaaayatttttaagcacctgttttaaccacttttcttgttgctggggatttagcagtatttccaggggtaatgcttatatggattttacattctagcgaatagga

SEQ ID NO: 375838 - DNA, 201 bp, Homo sapiens
gtaacatacatttctatttatagcaaaagaaactaacactgaataagaaggttaaaaatcacactggacttaatagatttcttactcgaccatcctgcagyggtgccttgtcagtctgtcataggcgtcatccatatctctgacatctttggaactccagagtctctcaccaacagcacttgcccgaggcctaaaatttaa

SEQ ID NO: 375839 - DNA, 201 bp, Homo sapiens
taaattaaaggaaaatttcataaatgtaacagttcaattttaactttcttttcattaggcttaataggaaatgatatcaaatcccttcattccatcatcartcctcccatagctaagtaagtactatcattatatcatgcttttccatagactgtcacgaaaatttacaggttttttctgatggacaagagtgaatgctgt

SEQ ID NO: 375840 - DNA, 201 bp, Homo sapiens
aaatgatttctctaggaaataacagcttaaatatttaattacaagtaagcaacttgtaatatcaaaaacccataaacaatccaaatgtccatcaatagtakaataaagaatattatggcatatttgtcaacatggctgaatctcatacatttactaggaagaaaagtagattacggaagaccacagacgggatggattgta

SEQ ID NO: 375841 - DNA, 201 bp, Homo sapiens
tcaagaggttccactttatagtatttcctccaatcttgtccatagctaatcaaatctaagtaccaaggagcagaaaggattacagggaagccagatgctgkgactctactgagttcctcaggatatgcgctgtctttccatacttcaactattgtgcccggcgcaagctattaacgttacaaattgcaatacatattatta

SEQ ID NO: 375842 - DNA, 201 bp, Homo sapiens
taatagtcaaaagataatcagcaggaagagaaacttgaggcttaaatttgataatataaatgacttaaattattttgattagggttattcaactgtgcttsgaacgctaacatcaggctcagctacttttgccttagaactatctacttatcaagccatgaatcctcaagatcaaaatacactgctcaaccggagaagtgg

SEQ ID NO: 375843 - DNA, 201 bp, Homo sapiens
taatcttttggtttccctgggccacactggaagaattgtctttggccacacataaaatcactaatgataactaacaatagctgatgagctaaaaaaaaatwaaaaaaacctcataatattttaagaaagtttacgaatttatgttgggctgcatataaagatatcgtgggccgcatgtggcctgcaggccacgggttggac

SEQ ID NO: 375844 - DNA, 201 bp, Homo sapiens
tgcaagttatagaactctaaaacctttctttataggttgcagatttggatgatgaatttgctgacttggttttagaagaatttagtgagaattttgatttrttaccagctgaaaaggtaaattttattattcaatggctttcacaaaattttactaattggatgtagtttgatttctctgcctttgatgtgtgtgcatttt

SEQ ID NO: 375845 - DNA, 201 bp, Homo sapiens
ccaatcattttctttgccttctttgaacgttcatgagcctctcgactttccttctttctctttttctcatggtaatccaaacggtatccatagcgtttacrgtgtaattcaatatattcattctgtggctataatgatggaagaaatattattttaattttttaaagtactgacaattattctaaaatgctttcttttaca

SEQ ID NO: 375846 - DNA, 201 bp, Homo sapiens
tcattagtttgtgagaagtcctgatggttacatttcactgaaacttgaaaaattaagcagaatacaggagcaaatagcatgaggcgttctctttctggactgtttatctggaaaaactaaaaatgctagagaactcaaaataacaacttttaatgtctgagctgactagaatgtaatagaattttccagaagtcaaaaagg

SEQ ID NO: 375847 - DNA, 201 bp, Homo sapiens
cccgaggcggtagagcggagaaagcctattttcttttcgtttagatacattgccttttgcctaggctggcgtcgagacttgaggccgttgcagactttggsgcggctcgcgcctcctgcttcaagagcccagcggtgagagctggcctgcggcacgcggcctaatgccaggtgagtactgctccgagctgtgagacatcgc

SEQ ID NO: 375848 - DNA, 201 bp, Homo sapiens
ggctcgcgcctcctgcttcaagagcccagcggtgagagctggcctgcggcacgcggcctaatgccaggtgagtactgctccgagctgtgagacatcgcgcscctgtgaccctgtcacagcgctgggtaccgctgacctttcaggctgcgacggacacagccagccacggaagaggacaacagggcctccggactcccctcg

SEQ ID NO: 375849 - DNA, 201 bp, Homo sapiens
ccagagtcctcaggtcccactaactcagacgctgtgtgtcgcgagcgtccgaggcatcctccttaccatggtgacggccgcagagccgccaggagcagccsctggagtgcgaaaacgctctcaattttcgggtctcaaagacccacaagcccacaccacgcaggccgggacaggaaagagtcaccctttaaaacggccgag

SEQ ID NO: 375850 - DNA, 201 bp, Homo sapiens
atattaatggaaactgcacgtaagtagaagcttagattattttataaaactgtatgcacttctttaaaaatacttttactaacataaaattgtgattttayagggagagaataagtcgtctgcttttgccgtttgctgaccaacatgtagaaatcccttcattgactgctggtaacattgctttgactgttgggcttaaac

SEQ ID NO: 375851 - DNA, 201 bp, Homo sapiens
tttaaagattgttttgtctgatataagaacagttattcctgctcacttttggtgtccgttagcatggggtatctttttcccccctttaccttaagtttatktgagtctttatgtgttaggtgagtctcttgaagacagcaggtacttggtgaactcttatccattctaccattctttatcttttaagtggaacatttaggt

SEQ ID NO: 375852 - DNA, 201 bp, Homo sapiens
ctttatgtgttaggtgagtctcttgaagacagcaggtacttggtgaactcttatccattctaccattctttatcttttaagtggaacatttaggtcatttmcattcaatgttagtattcagatgtgaggtactattgtcactatctattgcctgaataccttgttttttttttttttttcattgtattattgttttatagg

SEQ ID NO: 375853 - DNA, 201 bp, Homo sapiens; identical to SEQ ID NO: 81077

SEQ ID NO: 375854 - DNA, 201 bp, Homo sapiens
aaggcatcttgtgactgtagaagtggaagcaaggccaattgaaacatcatctgttatgcctgtgattgagtttgagtatgctgaaagtatcaatgaaggcyttttgaaggtctcccaagaggccattgaaaatggaattcacagcgcatgtctccaaggtaagacactcaaatgagagtaagcattagtatcccactcaac

SEQ ID NO: 375855 - DNA, 201 bp, Homo sapiens
ctcgaccatcctgcagcggtgccttgtcagtctgtcataggcgtcatccatatctctgacatctttggaactccagagtctctcaccaacagcacttgccygaggcctaaaatttaaatcacacatccccccgcaagcagtttaaatttatgtttagcacttttgtgtttagacagagaaggaaagctaaggcaccttaat

SEQ ID NO: 375856 - DNA, 201 bp, Homo sapiens
taggtaacatacatttctatttatagcaaaagaaactaacactgaataagaaggttaaaaatcacactggacttaatagatttcttactcgaccatcctgyagcggtgccttgtcagtctgtcataggcgtcatccatatctctgacatctttggaactccagagtctctcaccaacagcacttgcccgaggcctaaaatt

SEQ ID NO: 375857 - DNA, 201 bp, Homo sapiens
ttcaaaataaagttgattgtagtacagattgctgtggcctttttcccctccattttttacatgttctcatggttacaatatccagcataaagaggttgtgyagctattccacgtctgtagataacatgaataaagatattttagattgatttagattgatatcattcataaagatattttagattgatattcatgtcatct

SEQ ID NO: 375858 - DNA, 201 bp, Homo sapiens
gaacagaaccatgttctgattgatagtaattaggttctgtactatctgaggtttcaggaatccactgggggtcttggaatataacccctgtggatagggtrtgactgctgtatgggagaacctgtaacccttaagaagccttaccattcgtctacagtttttttgttgttgttgctaagaagccttaccattcatctacaa

SEQ ID NO: 375859 - DNA, 201 bp, Homo sapiens
tgttatgacaaataaatgagaccacttacgtctttttcatttgtattttctcagcatgacgctgtttatggtaaagcttagccttcagaccaatcattttytttgccttctttgaacgttcatgagcctctcgactttccttctttctctttttctcatggtaatccaaacggtatccatagcgtttacggtgtaattcaa

SEQ ID NO: 375860 - DNA, 201 bp, Homo sapiens
tgcagttgcactaattctctgctagaatagggcccaatttatctgacagtagatttttggatctcttcattccaggtctagtaacatagttacttttgttsagtatgtatttttttcctcatctttgctttaggcccagactctcacagtatggaggcaagctgataaacacaatatacctcgaatctgttttttaaacaa

SEQ ID NO: 375861 - DNA, 201 bp, Homo sapiens
atctctcggggattggttgcaggacctcctgtggataccaaaatctgcagatgctcaagtccctgatataaaatgatgtagtatttgcatataacctattsatgtcttcctctatactttaaatcatttctaaattacttataatacctaatacaatgtaaatgctatgtgccattttttgttcatctctctctcccacta

SEQ ID NO: 375862 - DNA, 201 bp, Homo sapiens; identical to SEQ ID NO: 81058

SEQ ID NO: 375863 - DNA, 201 bp, Homo sapiens
ccaggacaggcacctgggttgccggcaaagccatctaacaaatacatctgcagcacacttgcactactctgctttctgtcctcaatgtttttatatccaayttaccctgaaaaaagttaaatcatctgtttggaggaagtgatatggctaagccacaaaagtggcaacatcacttttccctaatagtcaaaagataatcag

SEQ ID NO: 375864 - DNA, 201 bp, Homo sapiens; identical to SEQ ID NO: 81059

SEQ ID NO: 375865 - DNA, 201 bp, Homo sapiens
tatcccactcaaccatttaatcactccttatattacagattatttcagtctttttcctaactttgttagtgttttctccctattcctttgcacttctcagwtacttctcacttcacatctagcagagtatgatacaatttttttcccttgtctaggaccattgcttggatccccaattcaggatgtagcaattactttaca

SEQ ID NO: 375866 - DNA, 201 bp, Homo sapiens
ccagagaagaggcaattaaaatattgatagtaactgaattatgacagatttcttgaaggaaactctgttttgttctgccagggactttccccatggaattwggcaaatttactgtttatttttctttatgaaacgtaagagttgccaagcaaagtatttctaagtaataatctgtaaaatgagccaaagatgagcctagca

SEQ ID NO: 375867 - DNA, 201 bp, Homo sapiens
aaatgccttgaggacagttaagtatagtttttattctagtggaaaaggatcaggtgatgatgcatctggctgcctaagtatatcaaagttaaccaagctgrttgtatcaggagtggccaggcatttaagagcaggggctgcccaaacaaagtaacccatggattctttgaaatatatttgagagtcattttatatttcaga

SEQ ID NO: 375868 - DNA, 201 bp, Homo sapiens
ctttcaaagaaaaacatttttctttatctctttagaagaagtgaagagttgcttggcctaggtaaggtagctgtcttgaaatatttgaatattgtctgttkatggtgtttggacaaattaatagttaatgaaagtaaatgcaagttatagaactctaaaacctttctttataggttgcagatttggatgatgaatttgctg

SEQ ID NO: 375869 - DNA, 201 bp, Homo sapiens
aatacagaaaataggtgttggcaaaggtgtggagaattataactttgcgcactgttggtaggaatgtaaatgttgcggccactatggaaaacaatatggckattcctcaaaaaattaaatatggagttactatattacccaacagttccactttttgggtatatactcaaaagaattgaaaagagtctcaaagagatattt

SEQ ID NO: 375870 - DNA, 201 bp, Homo sapiens
ttcaaagaaaaacatttttctttatctctttagaagaagtgaagagttgcttggcctaggtaaggtagctgtcttgaaatatttgaatattgtctgtttayggtgtttggacaaattaatagttaatgaaagtaaatgcaagttatagaactctaaaacctttctttataggttgcagatttggatgatgaatttgctgac

SEQ ID NO: 375871 - DNA, 201 bp, Homo sapiens
gcattggaatcccaactgcactttattatccttgttaccttgatcaattcatttaatgttaattgcaaagtatagttatgcgaagctcacaataataatamcctaaacagctctgtggctggattagggtaattactgatatctgaaattgacataaaagtttattccagacattttcctatggaaaactgttaaatagtg

SEQ ID NO: 375872 - DNA, 201 bp, Homo sapiens
agaatattaaaaattctagaacaaatgtgatagggagagattgtggcctgtgatgggagaatggcaaaaatgaaacataaactatacctcccctaaaactrcacagtaattaatatgctttgtgtttatctccctctctatagtaattctgaggctgtttgtttaaagaaccttgtcttgattattaatagcccagcaacc

SEQ ID NO: 375873 - DNA, 201 bp, Homo sapiens
ctgtttcctgcatttgaaggtgttcttccatattctctgattttcttagctactgggtaagatactgtcaataaagaactggaagaagagaatgtagatgstgtaagacctgcatgtaggggcagaagagagttaatgctgagatgtattggtcatggtcagagacttacagagtggtggatgcattgtcctgggaatata

SEQ ID NO: 375874 - DNA, 201 bp, Homo sapiens
taaatgctcatttgtatctctgctctgtagctacagactgcaatacatagagtgacactagctcagacagcagtgcctgtgctttgtggaagtgccctgaraaacaaagggatacagcccttgttagatgctgttactatgtacttaccttcacctgaagagcgtaactatgaatttctgtaagtatgcaatcacatatat

SEQ ID NO: 375875 - DNA, 201 bp, Homo sapiens
cctcattagtttgtgagaagtcctgatggttacatttcactgaaacttgaaaaattaagcagaatacaggagcaaatagcatgaggcgttctctttctggactgtttatctggaaaaactaaaaatgctagagaactcaaaataacaacttttaatgtctgagctgactagaatgtaatagaattttccagaagtcaaaaa

SEQ ID NO: 375876 - DNA, 201 bp, Homo sapiens
gaccactcagtctcaggtagcctcccattattattattatatcagcttctttttgtctctgcagtatgtatggctgtttgaaattgtctttttttttttttctttttttgtaaagacggggtttcgccatgttgcccaggctggtcgcaaactcctgggctcaagcgatcattctgtcttggcttcccaaagtgctgggat

SEQ ID NO: 375877 - DNA, 201 bp, Homo sapiens
ccatcagcttcacagtaacccacaacacttggaccaactgcttcacttaccgccaaaatcaagaggttccactttatagtatttcctccaatcttgtccakagctaatcaaatctaagtaccaaggagcagaaaggattacagggaagccagatgctgtgactctactgagttcctcaggatatgcgctgtctttccatac

SEQ ID NO: 375878 - DNA, 201 bp, Homo sapiens
aaactactaacaaataatgtgctttgtaatattaagtatccatggattgagactcttatgaaataaagtttctgttaatatcaaagtacaacataattatrcaatggttgatacaactacttttggctgtcttctgcagagctgttggaagccagcttcttcggcagtctgatatttgtctcaggaacattgttttagtct

SEQ ID NO: 375879 - DNA, 201 bp, Homo sapiens
acaaactggtgaaataaattttcataatatatcaaaatattacttcaatatatcaatattaaaattactaatatttacaatattaaaattattaatattaytgagatattttacattctttttttcacagtaagtctcagaaacctggtgtttattttacatttacagcatctggcagttcataacattaatacccccaaa

SEQ ID NO: 375880 - DNA, 201 bp, Homo sapiens
gaagctgagcttaaccatcacatataatgctttccagaaggatggttaggtacatttctgctatacttaatcctgttaacagtgtggttttttttttttttaccaagtttgaacgttttgctcccttgtactgttatatgcttttgaagctgttttattaatttgtcagctgaatgatcccatttcgtatagtcggatggt

SEQ ID NO: 375881 - DNA, 201 bp, Homo sapiens
gaagcaaggccaattgaaacatcatctgttatgcctgtgattgagtttgagtatgctgaaagtatcaatgaaggccttttgaaggtctcccaagaggccaytgaaaatggaattcacagcgcatgtctccaaggtaagacactcaaatgagagtaagcattagtatcccactcaaccatttaatcactccttatattacag

SEQ ID NO: 375882 - DNA, 201 bp, Homo sapiens
ggatatacaagatcactgggaggttagaatggattcctcctcttcccacccccccattagcaaaagcatcattggaaaatattttggttaacaagtcaacytacacaccttgaatatggcatagagctactgatgtctaatccacaatttaaagataagatagttgcaatacccaccaaagggtcttcttagattcaacta

SEQ ID NO: 375883 - DNA, 201 bp, Homo sapiens
ttcttatgcaagttaaattagctttacttatgcaaagttattaatgagctttttgaattttatttctcttttaagttctgatgaaaagaaagggccacaaraaagttttcttatattgtggttcttggtgtaagatgagcgcttgctaaatgccactttcgttccaagtcatcttgtttgcttgcagactgccactggaga

SEQ ID NO: 375884 - DNA, 201 bp, Homo sapiens
ttttattttattttattttgagacaggagtctcactctgtcgcccaggctggaatgcagtggtgcaatcttggctcactgtaacctctgtctcccgggttyaagcgatccttgtgcctcagcttcccgagtatctgggactacaggcgtgcaccaccacgcctggctaatttttgtatttttagtagagacagagtttcac

SEQ ID NO: 375885 - DNA, 201 bp, Homo sapiens
aaaaagactgcaaaataatgcaactactttggaagactatttggaagtttctttattttattttattttattttattttttattttttttatttttttttwtttttttattttattttattttatttattttattttattttattttattttgagacaggagtctcactctgtcgcccaggctggaatgcagtggtgcaat

SEQ ID NO: 375886 - DNA, 201 bp, Homo sapiens
atgcaaagttattaatgagctttttgaattttatttctcttttaagttctgatgaaaagaaagggccacaaaaaagttttcttatattgtggttcttggtrtaagatgagcgcttgctaaatgccactttcgttccaagtcatcttgtttgcttgcagactgccactggagacaccattgtctcatccaagtccagtgcat

SEQ ID NO: 375887 - DNA, 201 bp, Homo sapiens
aggataccttaaccacctgtgttagggtctaccagggcaagaggcagaggacagacagggacagaaggaggcaagccattgctcagagccttggggccaakgttgtcgacttcctatctaagccctcactcatttaatgcctcttctctttggcagccctctctgggagatggttcaggatggcattgacctcaagagcat

SEQ ID NO: 375888 - DNA, 201 bp, Homo sapiens
caccatgttggtcaggctggtctcaagtgcctgacctcaggtgatccgcctgtctcggcctctcaaaatgctgggattacaggcgtgagccactgcgcccrgctgctatatatatatatataaaatattttatatatataatatataatttttttttatgagacatggtcttgctctgttgcccaggctggagtgcagtga

SEQ ID NO: 375889 - DNA, 201 bp, Homo sapiens
tttagagaaagtgtctcattctgtcacccaggctggagtgcagtggcacagttgtagttcactgtaactttggactcttgggctcaagttatcctcctgcytcagactcccaagtagctaggactacagctgtgtgcccccacacctagctaattttaaaaatatattttctgtggctgggcacggtggctcacgcctgta

SEQ ID NO: 375890 - DNA, 201 bp, Homo sapiens
ttcttttttttttttctgagacagagtcttactctgtcgcccaggctggagtgcagtggcatgatctcagctcactgaagcctctgacttgcaggttcaarcaattctcctgcctcagcctcctgagtagctgggattacagacatgtgccaccaggcccagctaatttttatatttttagtagagacggggtttcaccat

SEQ ID NO: 375891 - DNA, 201 bp, Homo sapiens
ttttttttttttttctgattttctctggttattgggaggcaatttcttgggtttttctacaattatcctatgtgtttacaaacaaatatatacttctcctycagctttcttttttatccagatgatagcatactgtactcactgtttcaatctttcatttttcacctaatggtacatctttttttttttagacagagtctt

SEQ ID NO: 375892 - DNA, 201 bp, Homo sapiens
caaaagctacaaaaaagtgcacagacagccaggtgcagtggcacacgcctgtaattgcagcactttgggaggccgaggcgggcagatcatgaggccaggartttgagaccagcctgtccaacatggtgaaaccccgtctgtactaaaaatacaaaaattagccatgcgtggtggcgggtgcctgtaatcccagctaatcag

SEQ ID NO: 375893 - DNA, 201 bp, Homo sapiens
ggagtcttgctctgtctcccaggctggagtgcagtggcgcgatctctgctcactgcaacctccgcctcccaggttcacgccattctcctgcctcagccccytccccaagtagctggaactataggcgcccgccaccacgcctggctaattttttgtatttttagagatggggtttcactgtgttaggcagtatggtctcgc

SEQ ID NO: 375894 - DNA, 201 bp, Homo sapiens
ccaggctggagtgcagtggcgcgatctctgctcactgcaacctccgcctcccaggttcacgccattctcctgcctcagccccttccccaagtagctggaastataggcgcccgccaccacgcctggctaattttttgtatttttagagatggggtttcactgtgttaggcagtatggtctcgctctcctgaccttgtgatc

SEQ ID NO: 375895 - DNA, 201 bp, Homo sapiens
ctgctactctttttccttttagaacatctctattctccccacatagagatcgccctgtaatttctttaggcacattagcacaaagatctgttaatcttgtttttttttttttattttgttttgtttgttttttaatcaaaagggatctagaaagtaatctgacattttgaaaggctggtgttaatgaggtggtgagaattg

SEQ ID NO: 375896 - DNA, 201 bp, Homo sapiens
cagacttttttttggatttcaccagttttgtaacaatgtatcttggagattttatggtgtcagttcagaacaagcttcttctttttttttttttttttttkgggagacagagtcttgctccatcactcaggctggagtgcagtggcttgatctcagctcactgcaacctctaccacctgggttcatctcatgtctcagcct

SEQ ID NO: 375897 - DNA, 201 bp, Homo sapiens
accttctgatccacccgcctccgcctcccaaagtcctgggattacattcgtgagccaccacacccggctggcagtttctttaattttgtcatttcatactstcatgtggatggaatcatacagtatgtaaccttctgggattggcttttttatttttgtttttgtttttttgttttgttttgttttgttttttgagatgga

SEQ ID NO: 375898 - DNA, 201 bp, Homo sapiens
atctgagtcccacattcagatattctgattcactaggtccggaggaggagtagaaaacatctcaggtgattttaatgttggtggtccgtagatcatgttcttttttttttttctgagacagagtcttactctgtcgcccaggctggagtgcagtggcatgatctcagctcactgaagcctctgacttgcaggttcaagcaa

SEQ ID NO: 375899 - DNA, 201 bp, Homo sapiens; identical to SEQ ID NO: 81101

SEQ ID NO: 375900 - DNA, 201 bp, Homo sapiens
atatttttcatctcctgttacagtttttttctttttccaccctgaagtttttctcagtcgagttctccttatctcttctcataaccttgtgaaagtttctrgagcagtggttctcagacttcattgagtatcacctgggaagtttgtgaaatatgatatctgagtcccacattcagatattctgattcactaggtccggag

SEQ ID NO: 375901 - DNA, 201 bp, Homo sapiens
ttgtacattcagagtcccttgtagaatgcaaatgtcatttagcaatagccagaaacacttgcttgtttgtagaccttagcagttactatacatcaggccawtctttcttgctctctttaacaaatccttagcaagcatgtagatcttaatttggttgaggaaaaatgggttttgtcaaatcaaatttatctagataggccc

SEQ ID NO: 375902 - DNA, 201 bp, Homo sapiens
tcctccaggctgtatcaacctctcctttgcatatgtggaaggggaaagtctgctgatggcactgaaggacgttgccttatcctcagggaggtgagctggayggcatagacagggcctgcggcagggccacttagaagagtcatacaggctattaaacttcccagtgtggagatgataggcacaagacctcttgattaaggg

SEQ ID NO: 375903 - DNA, 201 bp, Homo sapiens
cggccgcggggcggaggcactcgcgcggggggtaattcggggtctgggttctggtgccgcgcagctttccccggtaagactcccgcagcccctgaacgggyggggctgtgcggggctcgtggtgccccttggtggcccggggcggggccttcggaggccttcgagcccgcggcaactagcgccccacacaaagggtcgagg

SEQ ID NO: 375904 - DNA, 201 bp, Homo sapiens
tggagtgcagtggtgcaatctcggctcactgcaacctctgcctcccaggttcaagcgattctcctgcctcagcctccctagtagcttgggactacagggcrcgtgccaccatgcctggctaatgttttgtatttttagtagagacaaggtttcaccatgttagccaggatggtctcgatctcttgactttgtgatacgccc

SEQ ID NO: 375905 - DNA, 201 bp, Homo sapiens
ccgaggtcaagcaattctcctacctcagcctcccgagtagctgggattacaggcacctgccgccatgcccaggtatttttgtatttttagtagagcagtgstttcaccatgttggccaggctggtctcgaactcctgacctcaggtgatctgccgaagtgctgggattacaggcgtgagccaccatacccaggtgtgagcc

SEQ ID NO: 375906 - DNA, 201 bp, Homo sapiens
ttcttttatctttataataattactaccatctttgaaagttctgtttaagaaatgcttaatgggcaatgcgggttagtaactccagggtctgcgtggcctrggcaggtgagatggacaactgcctcattacagaagctttttatcatcaaactagtaagttttgtggagggcaagctatatagattgttgatgagtggtta

SEQ ID NO: 375907 - DNA, 201 bp, Homo sapiens
ttaccacaacctgtttcctgattctatgacagcaacacagctactggttccaagtagacgatgaaggaagatatagtcccttatgtatatagctttttttytttcttgagaattcatcttgagttatcttttatttagataaaaataaagaggcaaggatctactgtcatttgtatgcaatttcctgttaccttgaaaaaa

SEQ ID NO: 375908 - DNA, 201 bp, Homo sapiens
gcctcccaaagtgctgggattacaggcgtgagccaccatacctggcctttctttttttttttttgaggcagagtctcactctgtcacccaggctggattgcagtggtgcaatctcagcttactgcaacctggatttaagcatttctcctgcctcaacctccgaagtggctggggctacaggtgtgtgccaccaggcccagc

SEQ ID NO: 375909 - DNA, 201 bp, Homo sapiens
aagggacagatgtagttggcaaccatggttagcatcggatgcccatcccaatggccatgaatgtgccaaaggtgccgccactctgcatcatggttttcccratgccgcccatcagctctcgaccccgcattccgatcctgaggaggaaaccaagatggagctatttggtaacaaaaatatcagaaagagtattaactgctc

SEQ ID NO: 375910 - DNA, 201 bp, Homo sapiens
caccaaggcacggagactggtagtggccccgaatgccagcctgcgctgatatttattggatacaagacaaaggggcagggtaaggagtgtgagccatctcyaatgataggtaaggtcacgtgggtcacgtgtccattggacagggggcccttccctgcctggcagccaaggcagagagagagagagagagagagaggagag

SEQ ID NO: 375911 - DNA, 201 bp, Homo sapiens
ttttttttaattaattaatttatttatttattttgagatggagtctcaccctgtcgcccaggctagagtgtaggggcatgatctcggctcactgcaacctytgcctcccaggttcaagcgattctcctgcctcatcctcctgagtagccgggattacaggtgcgtgccaccacacctcgctaatttttgtatttttatttt

SEQ ID NO: 375912 - DNA, 201 bp, Homo sapiens
agggaggaagggggaagggggaggagggaaggaaaagaggaaggagaaggggtagaaggagggaggggaggagtttaatatttacaggtcatttactattkgagataattcacagtgcactgtgggactctgacagatgactttccaacattgtgctgtgggtcttcccctctgtttcctcagggcggatttgcagttcca

SEQ ID NO: 375913 - DNA, 201 bp, Homo sapiens
ctcccaaagtgctgggattacaggtgtgagccaccgtacccggcctttctccattctttttatctagtaacaacaagttatatatgtgatttcagggctgycctcctctcagccttcctttttctttctgatcagatctatttgcaacaagttcctcctgtttctttagatatctccattttgaagtgcttgtctttgtgg

SEQ ID NO: 375914 - DNA, 201 bp, Homo sapiens
agtagagacagggtttcactatgttggccaggctggtctcgaactcctgacctcaggtgatccacccacccttggcctcccaaagtgccggaattacaggygtaatcccgtgcccggcccaatgcctggctaatttttaaaacagtttttgtagagatagaggtttcactatgttactcaggcttgaattcctgacctcaa

SEQ ID NO: 375915 - DNA, 201 bp, Homo sapiens
gttggtcaggctggtctcaagtgcctgacctcaggtgatccgcctgtctcggcctctcaaaatgctgggattacaggcgtgagccactgcgcccggctgcwatatatatatatataaaatattttatatatataatatataatttttttttatgagacatggtcttgctctgttgcccaggctggagtgcagtgacatgac

SEQ ID NO: 375916 - DNA, 201 bp, Homo sapiens
ggccggaaggtctggttgtcctgcccagagatcaccgcccgcgcccctcacctgagacaggaaaaggtgccgaagagcgccccggccgccatgcccacggsgcaacccatcacgaagcccattttgacacggtcgaagcagcttggctgggactgtccgtagggacccacggccaccggcatctgcgggggataggaaagt

SEQ ID NO: 375917 - DNA, 201 bp, Homo sapiens
cgaactcctgacctcaggtgatctgccgaagtgctgggattacaggcgtgagccaccatacccaggtgtgagccaccatacccagcaatttctttctttcttttttttttttttttttttttgagatggagtctcactctgttgcccaggctggagtgcatggagtgcagtggtgcaatctcggctcactgcaacctctgc

SEQ ID NO: 375918 - DNA, 201 bp, Homo sapiens
tgtaccactatgcctggctaatttttgtatttttagtagagatgaggttttgccatgttggccaggctggtcttgaactcctaacctcaggtgatccgtcygccttggcctcccaaagtgctgggattacaggcgtgagccactgctcccggccaggtctagcaccttttatggtttttaattttattgcagttgctgcca

SEQ ID NO: 375919 - DNA, 201 bp, Homo sapiens
tacaggtcacggaaaaagcacttgatcaccacccagacagaacacaaatgtgtcttggactcctgccgttcactggaagctgagggctttcaggtcacctwcctcccagtgcagaagagtgggatcattgacctaaaggtaggagtggctattggcaggaggagcaaaaatggaggagcctggcttcagcttgtaaatttc

SEQ ID NO: 375920 - DNA, 201 bp, Homo sapiens; identical to SEQ ID NO: 81102

SEQ ID NO: 375921 - DNA, 201 bp, Homo sapiens
cctgctactctttttccttttagaacatctctattctccccacatagagatcgccctgtaatttctttaggcacattagcacaaagatctgttaatcttgtttttttttttttattttgttttgtttgttttttaatcaaaagggatctagaaagtaatctgacattttgaaaggctggtgttaatgaggtggtgagaatt

SEQ ID NO: 375922 - DNA, 201 bp, Homo sapiens
agatgtcggaacaaggcagtgtttgtagactacctgaggggaggcagaacaatccgagttgggatgggttgtgagtgggagtgtattaggttgatatttgstgggtagttttgtgggaacaaaagaatgtttgaggcctcctctaggcagtgcctgaggggttgagagtgtcttaaggcagggtggccaggtctgaggggt

SEQ ID NO: 375923 - DNA, 201 bp, Homo sapiens
tatgaccatgtttggtgtccattggctcagggccccactgcaattgagcctgaggaacctagttattcctgttagcagttggggagagctctcaggagagytgacaaggacttacagggagctggagagctcaggataccttaaccacctgtgttagggtctaccagggcaagaggcagaggacagacagggacagaagga

SEQ ID NO: 375924 - DNA, 201 bp, Homo sapiens
gaaccctctctccctctcccttacctccttttacagcgtgtcaggtatctggtgttgttttctttccattgagattcgaccctagcatcccttacacttayctcacctccagccagatttttccttctgccctttggatgccatgcgttcatagttgccttcggtcttacttggctactccgttccattttttatcagttg

SEQ ID NO: 375925 - DNA, 201 bp, Homo sapiens
ccttgcatacctgtgaccaggtaagatatctcctgcaactcacggactttcactcctctgccactcaaaatttctgtcttcttggctgggcatgggggctyacacctgtaatccctgcactttgggaggctgaggcgggctgatcacctgaggtcaggagttcgagaccagcctgaccaacatggagaaacgccgtctcta

SEQ ID NO: 375926 - DNA, 201 bp, Homo sapiens
gaggcggaggttgcggtgagccaagatcatgccactgtactccagcctgggcaacaagagcaaaactccatctcaaaaaaaaaaaaaaaatctgtcttccyaaggacttcccgttaaatctaaaactttctgcctagctttcaacaccctacatgatctgacccctctcctctctccctctcctctctcccagattcccgc

SEQ ID NO: 375927 - DNA, 201 bp, Homo sapiens
tgcatacctgtgaccaggtaagatatctcctgcaactcacggactttcactcctctgccactcaaaatttctgtcttcttggctgggcatgggggcttacrcctgtaatccctgcactttgggaggctgaggcgggctgatcacctgaggtcaggagttcgagaccagcctgaccaacatggagaaacgccgtctctacta

SEQ ID NO: 375928 - DNA, 201 bp, Homo sapiens
gatctgacccctctcctctctccctctcctctctcccagattcccgcactggacttcttggggttctccaaacataccagctgcctcacgccttctcacamcttgctccctctgcctggaatgcccttcccttgtctcccaggggaatcctctcttctctcaatatataatgaagaacaactagttggtgctctcttttct

SEQ ID NO: 375929 - DNA, 201 bp, Homo sapiens
gaataaaaccctagcttatttctctctctggatttctggtggcattaaagggctacattctattactgattctgtcttatcaccatgtgactctcttatgytgtatcttaccaaaaaataaaattaaatgagaaaaaagtgaaccctgaagttgaaaacacatcaaatggacctaactatatttaattgataatataaaca

SEQ ID NO: 375930 - DNA, 201 bp, Homo sapiens
gcccattttgtttggtgaatgggtgaagccaggggctcacatcaatggtaagtagagtggctccataaggcatgatgggtggtggccaggctcctctctasacgggaccagtcgactacatttgcagagccagtttattcatgcagaatgcccaagctatttaagggccttgaaaacatgtgagattgaaaaaaacaatat

SEQ ID NO: 375931 - DNA, 201 bp, Homo sapiens
ctgacccctatgccagagtagttcaactttccctccgcatccctgggctcagtgtaacataagcagccaaaaaatggcgccaatatccttcttgttactcycaatgaaggtgaggatatggaaccgcaccaaagaaaatgcagagaagtttgcagacacagtgcaaggagaggtacgggtctgttcttcggtccaggaggc

SEQ ID NO: 375932 - DNA, 201 bp, Homo sapiens
cctgggcttaaggtctgttttgctgtctcttagctgttggagccagcagacctgactggagagaactggatgatgagctcatgaaagaagctgtgctgtaygtggattcccaggaggctgccctgaaggagtctggagatgtcctgctgtcaggggtgaggcccttctgaccccagtcagggctgccacctggctggcctc

SEQ ID NO: 375933 - DNA, 201 bp, Homo sapiens; identical to SEQ ID NO: 81108

SEQ ID NO: 375934 - DNA, 201 bp, Homo sapiens
gaatcttgtattactgtcatttgcaaagagctttagtctttttcaaactcatttccagccccttgtctggactacgagtttctgtgaggaaggcagagaargtattaatggcctcattttacgcataaaagaatagaaacttgggtttcctgaagtcatacaaccaggttcctgcgggtccttttgaggccacatggtctt

SEQ ID NO: 375935 - DNA, 201 bp, Homo sapiens
tatttccaggggctcagatgaactgtttcaataaggaacaaagggtctattttacttgttgccttgagagtagaatattttcttgtccatcatttctcttytatttagggctcttgttggggagaataagtatatggagctctagggtctgatgaacataatacattttttgtgcttgggtctcacataagcttcattgaa

SEQ ID NO: 375936 - DNA, 201 bp, Homo sapiens
tggttttctgttcctgtgttagtttgctgagaatgatggcttccagcttcatccatgtccctgcaaaggacatgatctcatttttttttttttttttttttacagctgcacccatttcactgaatcttaaatgatgctttcaagacagaaggaagaacagtacacctgagatgaccccaaaggtgggccttcttttgagaa

SEQ ID NO: 375937 - DNA, 201 bp, Homo sapiens
acctagaaaggaccacagctcagctaccttgaatcaaagcggaaacaatattgccagagctcccatttttcaaacgaagccacaaatccagaatttcaagsgaaattctgtgatttttaagtgttggctcaaatttaaaagaaaaatatagtaaagtccaaataaaacacatttgtggaccagctccagcccataagctgg

SEQ ID NO: 375938 - DNA, 201 bp, Homo sapiens
gatcactggaggccaggagtttgagaccagcctattcaacatggtgaaaccccatctctactaaaagtacaaaaattagccaggcatggtggtgcgcgccygtagtcccagctactcaggagactgaggcaggagaacctgggaggtggagattgcagtgagccgagattgcgccgccgcactccagcctgggtgacaaag

SEQ ID NO: 375939 - DNA, 201 bp, Homo sapiens
ttgtattcaactagtaaattcctacagcacaataatgcttgtgggtttttaaaaatcacttataggccaggtgaggtggctcatgcctataatcccagcaytttgggaggccgaggctggtggatcactggaggccaggagtttgagaccagcctattcaacatggtgaaaccccatctctactaaaagtacaaaaattag

SEQ ID NO: 375940 - DNA, 201 bp, Homo sapiens
gcaatacaattttatctggagcctggttcaaagacatcacatggatccagttttgtctgaaaacttcaaaggtcatggcagatcagaggtcagccagcccytacttaaggagccaaaatgctgcagaaacttgttctgtcctttttggcaatttttgctttcttacttttggggatcagtttattggtgcattgtttcatc

SEQ ID NO: 375941 - DNA, 201 bp, Homo sapiens
gaaaaaaacaatatttggctgggtgcagtggctcatgcctgtaatcccagcactttgggagactgaggcaggtggattgcttgaggccaggagtttaagaytaacctggtcaacatggcaaaaccccgtctctactaaaaatacaaaagttagccaggcatggtggcttgcacctgtagtcccagctactcatgaggctga

SEQ ID NO: 375942 - DNA, 201 bp, Homo sapiens
ggaacaaagggtctattttacttgttgccttgagagtagaatattttcttgtccatcatttctcttttatttagggctcttgttggggagaataagtatayggagctctagggtctgatgaacataatacattttttgtgcttgggtctcacataagcttcattgaagcctctgatatgttttctcaaggtgatagtatat

SEQ ID NO: 375943 - DNA, 201 bp, Homo sapiens
tatagactattaggtgagtgcaaaagtaattgcagttttggccatgactttttttttttttttttttttgaaatggagtctcgcgctgtcgcccaggctgsagtgcagtggcataatctcggctcactgcaacctccatctcctgggttcaagtgattcttgggcctcagcctcccaagtagcttggattataggcgccca

SEQ ID NO: 375944 - DNA, 201 bp, Homo sapiens
atgaacataatacattttttgtgcttgggtctcacataagcttcattgaagcctctgatatgttttctcaaggtgatagtatatattagggtttagcactracatacatttattcaacaaatatttgagtgtccaccaaatgcaaggttctacgctcagcatggggtaagcaaaaccagatacagtacttgccctcatgta

SEQ ID NO: 375945 - DNA, 201 bp, Homo sapiens
aagcactttgcatagccaatataaaattcctaacagtgcttctatttgatttgattgtgtgtatgtgtgtgtgggtgtgtgtgtgttggcggggggatgakgaagtctctggaggatttatatgcgtgagttttgtttgggggtcgcccttttgggctctgcgcgcccatcgcggctagcgggtgggcctcccgggcgtcg

SEQ ID NO: 375946 - DNA, 201 bp, Homo sapiens
aatgatgaaaataaaaccactgccttgagaaatatagactattaggtgagtgcaaaagtaattgcagttttggccatgactttttttttttttttttttttgaaatggagtctcgcgctgtcgcccaggctgcagtgcagtggcataatctcggctcactgcaacctccatctcctgggttcaagtgattcttgggcctca

SEQ ID NO: 375947 - DNA, 201 bp, Homo sapiens
tccccagtttgttccacctattatcccgcagctccagtgcgccccacctgttgcctcaccagcccaacgttacttcttccctgcttcctcgccagcccgtstgggggcggagacctcacccaccgccccacccacctcgtctcatgctcccacccacctcgtcccatgcgcacacccatctcgtcccttgcgctcacccac

SEQ ID NO: 375948 - DNA, 201 bp, Homo sapiens
acccaggaggcagaggttgcaatgagccaagatcgtgccactgcactccagcctaggcgacagagcgagactccgtctcaaaaaaaaagaaaagaaagaargaaagaaaaagaaataaataaataattttaaaaagtagttgtaagacccagagcaagttcacctttctgttaccagggcaacctcagtctcttcatctgt

SEQ ID NO: 375949 - DNA, 201 bp, Homo sapiens
ggggctgaggtaggataatcactggaacccaggaggcagaggttgcaatgagccaagatcgtgccactgcactccagcctaggcgacagagcgagactccrtctcaaaaaaaaagaaaagaaagaaggaaagaaaaagaaataaataaataattttaaaaagtagttgtaagacccagagcaagttcacctttctgttacc

SEQ ID NO: 375950 - DNA, 201 bp, Homo sapiens
tgaggcaggcagattacctgaggtcaggagttcaagaccagcctgaccaacatggaaaaaccccatctgtactaaaaaaaaaaaaaaaaaaaaaaaaaaawttagctgggcatggtggcaggtgcctgtaatcccagctacttgggaggctgaggcaagggaattgcttgaatcctggaggcggaggttgcagtgagccaa

SEQ ID NO: 375951 - DNA, 201 bp, Homo sapiens
cccattagccaagggaagacttacttactgaatccttgtcgacatggaaaagaaggggtgttctataatccctgggagtcttcagaggggtatacggtgtkacctgttttaatatctaatcatagtttcaaaaggtagcagtagcttgtgtttatggagtactttttataatgcatcaggcacttttctaaacatttcaca

SEQ ID NO: 375952 - DNA, 201 bp, Homo sapiens
atatgggtaatatgattactcccactttatagatgaggaaaccgagtcagagcaactatgttcaacttaccgaggtttatgtaaccaacaattagcatggytggacttcagagctgctcagtctaagtccacggtccataggtccagactcttctaagaccaccgccattttaactgctacatattgggcacttatgtgcc

SEQ ID NO: 375953 - DNA, 201 bp, Homo sapiens
aaggacatgggctttggagtatggaagacgtgactttagagccacactgtgcccttcaatagttgtaagacctggctaggtgcggtggctcacgtctgtartcccagtactttgggaggccgaggtgcacagatcacctgaggtcaggagtttgagaccagcctggccaacatggtgaaaccccatctctattgaaaatac

SEQ ID NO: 375954 - DNA, 201 bp, Homo sapiens
tgggtcttacaatgtccctccttttcccctgaatttctggatcgccaaataatctggccgtttaacactcctttgagaatatctagctttccccaacttayactcatccaaccgagatggcattcatactacctgccaacagcggttccctaggggggtagaacccaaggctttgaaactagatgacagctgaatctgctc

SEQ ID NO: 375955 - DNA, 201 bp, Homo sapiens
ttagctgggcatggtggcaggtgcctgtaatcccagctacttgggaggctgaggcaagggaattgcttgaatcctggaggcggaggttgcagtgagccaaratcacaccactgcactccagcctggacaacgagtgagactcagtctccaaaaaaaaaaaaaaattcacaccaataaatatgaaactacaacgctgacaag

SEQ ID NO: 375956 - DNA, 201 bp, Homo sapiens
aaccgagatggcattcatactacctgccaacagcggttccctaggggggtagaacccaaggctttgaaactagatgacagctgaatctgctcagtgacttsgtgattcacttcctcatctgtaaaatgaggttgatgatgcctattttttgatgatcagctgagatgaataacagagagaggagtgcagaggatggttttt

SEQ ID NO: 375957 - DNA, 201 bp, Homo sapiens
acctgaggtcaggagttcaagaccagcctgaccaacatggaaaaaccccatctgtactaaaaaaaaaaaaaaaaaaaaaaaaaaaattagctgggcatggkggcaggtgcctgtaatcccagctacttgggaggctgaggcaagggaattgcttgaatcctggaggcggaggttgcagtgagccaagatcacaccactgca

SEQ ID NO: 375958 - DNA, 201 bp, Homo sapiens
gacagctgaatctgctcagtgacttggtgattcacttcctcatctgtaaaatgaggttgatgatgcctattttttgatgatcagctgagatgaataacagrgagaggagtgcagaggatggtttttactagcgaggcataattttcaaccttcgctgtgtatcggaatcacctgggctgtctgggtctcactcctggaaga

SEQ ID NO: 375959 - DNA, 201 bp, Homo sapiens
gctgtttgtaggatgctataaaacttcctaagctaatattttagaactgtttcttctaatttatgcagtggacaggggttccccttgctcactgtctctcytttcctccaaggtcatggatggaaatgtcataactgcaaagagaacagctgcagtttctgccattgccaccaaggtaagatgaatggctggctgtaccat

SEQ ID NO: 375960 - DNA, 201 bp, Homo sapiens
tgtctcaatcttgagagactaaaggagaagtggggaacttattttggtttcctgttggacatagctggaactccagatgtcagatatatcagtaattcacraaattattagctaccaattagtgtgcatgaccagatttcaagtaccttatgtgcataattctcaatcttcccatcagtcttgaagaatcgaaatgagaaa

SEQ ID NO: 375961 - DNA, 201 bp, Homo sapiens
tgtacacatttgttaaagggttagatgcatttaagttgggcatcaagccgcaggccaggaaagaactctagtctctaccactaggcaaagtcatagatctmaggagagaaaaagaattggaattcccaggttacacagatcggaaagcaagcagcaggataatgtgatgagattataattttaaatccagagatagaaaag

SEQ ID NO: 375962 - DNA, 201 bp, Homo sapiens
gttgcagcagcaaagaccaggtgttcaggttgcatgtcgaggttttctagatacctgctggggagggaagaatgggaggattaatctggtaattgtatgcraagggagtagaccaacagcacccacctcaatgaactggtttttagttatatccagacctgactcaactgaagtaatcaaggactccttgctatgtttgct

SEQ ID NO: 375963 - DNA, 201 bp, Homo sapiens
cggccaccttctcactgtgtcctcacgtggcctctctgtgtgccttccacctaagtgtctcttcctcttcttaggacaccagtcctaggccaggtgcagtrgctcatgcctgtaatcccagcactctgggaggccgaggcaggtggatcacctgaggtcaggagtttgagaccagcctggccaacatggtgaaaccccgcc

SEQ ID NO: 375964 - DNA, 201 bp, Homo sapiens
ctctttaatcatgcaggccttctgtgtggtggtgagagtttgaaaagcaatggtggctgagcccagtggctcacgcctgtaatcccagcactttgggaggstgaggcaggtggatcacctgaggtcgggagttcgagaccagcctgaccaacatggagaaaccctgtctctactaaaaatacaacattagccaggcttggt

SEQ ID NO: 375965 - DNA, 201 bp, Homo sapiens; identical to SEQ ID NO: 81111

SEQ ID NO: 375966 - DNA, 201 bp, Homo sapiens
catcaggagcgctctggccacccagagcccatgccattggttaagtatccatgccttgcaggttggtaaatgtctttaaaatctctcatgcactggaagayaaaggcaatacaattttatctggagcctggttcaaagacatcacatggatccagttttgtctgaaaacttcaaaggtcatggcagatcagaggtcagcca

SEQ ID NO: 375967 - DNA, 201 bp, Homo sapiens
ccaggcgtggtggtgcacatctgcaatcccagctacttgggaggttgaggcaggagaatcacttgaacccggaaggtggaggttgtagtgagctgacatcrtgcactccagcctgggcaacagagcaagactccatctcaaaaaataaataaataaagtacatgggaacagagctgatacacctaaaacactgaaatactc

SEQ ID NO: 375968 - DNA, 201 bp, Homo sapiens
gtctgtcccttgccccaggtcctcttccaccctatgagattgaaggaaacagaagtacatgggaacaggctgagctcggtggctcacgcctgtaatcccarcactttgggaggccaaggtgggcagatcacttgagctaaggagtttgagaccagcctggccaacatggtgaaactccatctctactaaaaatacaaaaat

SEQ ID NO: 375969 - DNA, 201 bp, Homo sapiens
tgttttgaccaaaggcgaaccaaatttctgtctattctaggaatggcagtggaagacacagttgcagccaaactcatctatgattcctggtcatctggtamataaaacaaaggaacttgatgttgagatggatgcttgaggaatattgctgctggttctcataatttctagagtaaatgagggagtccagtccccagtgaa

SEQ ID NO: 375970 - DNA, 201 bp, Homo sapiens
agtgcatttaatcctcacaataaccctctgaatggctggcattatcttttttacaggtgaggaaaccagtgcttaaagattaaagtgtttgttcaaagttkcatatctcgtaagtggaggaatcggatccaggtctgacgccaaacccatgctgtttgtaggatgctataaaacttcctaagctaatattttagaactgtt

SEQ ID NO: 375971 - DNA, 201 bp, Homo sapiens
aatccaggtttctgataactttggagatcacaccattggagtgggcaaaaacttccagagctctaataaaaaacctgatgcattcatgagggttgctaacycaacatcaagtggaataataattagctacatgggactaaactgatagaggacaaagatgatttttaataacttttttgcttgaaacattgctgattcttt

SEQ ID NO: 375972 - DNA, 201 bp, Homo sapiens
tcccagcactgggaggctgaggtgggagatttgcttgaggccaggcattcaagaccagcctgggaaccataacaagacctgcctccattaaattttttttwtaaataaaaataaaaagtaagaaagaatggctatatttagctgtcaaactttctaaaatttggaaataactctgacaagctggttccagcatgctactgc

SEQ ID NO: 375973 - DNA, 201 bp, Homo sapiens
gtggatcacctgaggtcaggagtttgagaccagcctggccaacatggtgaaaccccgcctctactaaaaatacaaaaacttagccaggcgttgtggtgcaygcctgtaatcccagctactcaggaggctgaggcatgaaaagtgctcgaacctgggaggcgggggttgcagtgagctgagatcacgccactgcactccagc

SEQ ID NO: 375974 - DNA, 201 bp, Homo sapiens
acccaggaggctgaggttgcggtgagctgagatcgtgctattgcactccagcctgggcaacaagagcaaaactgcgtcttaaaaaaaaaaaaaaaaaaaaagcaacagtaaagtagaaagtgacaagagacttacatattaaaaagattacgtgactcaaccagccttgtggagaatgaattaaagacagataaggatact

SEQ ID NO: 375975 - DNA, 201 bp, Homo sapiens
aatcacttgaacccggaaggtggaggttgtagtgagctgacatcatgcactccagcctgggcaacagagcaagactccatctcaaaaaataaataaataaagtacatgggaacagagctgatacacctaaaacactgaaatactcccaaactggttggtaaacagttgctatcctgagcccctcgagagtgccctctgtcc

SEQ ID NO: 375976 - DNA, 201 bp, Homo sapiens
gcaggagaatcacttgagatcatgccactgcactccagtctgggtgacagagagggactttgtttcaaaaaaaaaatttatatatatatatatgcacatayatacatatctatatagatacatagatacatatacatatctatatagatacatagatacgtatatatgtatatacatatatgtttgtgtatatatatatat

SEQ ID NO: 375977 - DNA, 201 bp, Homo sapiens
cgtgtgccatggtcaccttcagctggcccagccgctgatgacagaagtttaagaagattcatgagccgctgctcctcagggtctactggagtttagcagayaacttcccaaaggcccggggtcctgcaaacccctcatgcgggccacccaaaagattccgtcctggagcagaccccgcgccacgcgcgctgtactcgcgtt

SEQ ID NO: 375978 - DNA, 201 bp, Homo sapiens
gaatcacttgaacccggaaggtggaggttgtagtgagctgacatcatgcactccagcctgggcaacagagcaagactccatctcaaaaaataaataaataaagtacatgggaacagagctgatacacctaaaacactgaaatactcccaaactggttggtaaacagttgctatcctgagcccctcgagagtgccctctgtc

SEQ ID NO: 375979 - DNA, 201 bp, Homo sapiens
ccactccggcgtttccacctccgtgtatttctcatgctccccacgttctataatgcttgctcctcttggcgcgccccaccccaattctcgcatccagtgtrgcttcctgtttagaatcgcagcttctgattggatcacaggccaaattcactcttccctgcaatgccggatacgacttgctccagctccgaagttaagctt

SEQ ID NO: 375980 - DNA, 201 bp, Homo sapiens
agaatcacttgaacccggaaggtggaggttgtagtgagctgacatcatgcactccagcctgggcaacagagcaagactccatctcaaaaaataaataaataaagtacatgggaacagagctgatacacctaaaacactgaaatactcccaaactggttggtaaacagttgctatcctgagcccctcgagagtgccctctgt

SEQ ID NO: 375981 - DNA, 201 bp, Homo sapiens
tttcaggaaattttcttgaatgataggttttagtatttgttctgtggttttgctttttatctttgtggactgctttcataattgttttgaattgatattgycttatttctccctgacaagttctcatctatatttccatttgattgtttttctatttttctcttttccaatctccatttcccttacactttccacactatt

SEQ ID NO: 375982 - DNA, 201 bp, Homo sapiens
aagcagtggttgtgcaggggaaatagtccagtgagaaggagtggcctgagaaacgggggttttgttcccaccagcttatgatttatttacaagcttccttagctagtgcttttgttctatagaactctccgcacaaacaaccttcaagatggacatttttacacaactctctttggaaattagaatgagggagaacagaac

SEQ ID NO: 375983 - DNA, 201 bp, Homo sapiens
gagaatcacttgaacccggaaggtggaggttgtagtgagctgacatcatgcactccagcctgggcaacagagcaagactccatctcaaaaaataaataaataaagtacatgggaacagagctgatacacctaaaacactgaaatactcccaaactggttggtaaacagttgctatcctgagcccctcgagagtgccctctg

SEQ ID NO: 375984 - DNA, 201 bp, Homo sapiens
accacaattaaaaacgtttggttcttaaaagatgctttgaaaaaaataaaaggccatagtctgggacaaaatatttgcaaatggcttactacacaaagggytgatattcagaacgtacaaagaattctcaaaacccaatagtaagaaaaaagaccaattcaacaataaatgaaagaaaagttcaccggtcacttcaccaaa

SEQ ID NO: 375985 - DNA, 201 bp, Homo sapiens
gccaacatggtgaaactccatctctactaaaaatacaaaaattagccaggcgtggtggtgcacatctgcaatcccagctacttgggaggttgaggcaggaraatcacttgaacccggaaggtggaggttgtagtgagctgacatcatgcactccagcctgggcaacagagcaagactccatctcaaaaaataaataaataa

SEQ ID NO: 375986 - DNA, 201 bp, Homo sapiens
aaaggaaagaaaatgaaatcaaatctaaggaaagcaaatattaagtaacacagttttgctgggaagccactttccagaaggctctggtcagtcagcctgayttaattgtttgggatgaaaggagacccttcaaccttggcacagacccgcatcttaagggaccgctgtgtctcccccctaaacatgtggtttcacttttta

SEQ ID NO: 375987 - DNA, 201 bp, Homo sapiens
atgctggtgaggctgtggagaaaagagaacacttatacactgttggtgggaatgtaaatttgttcagaaactgtggaaagcagtttggggatttctcaaakaacttagaactaccatttgacccggcattcccattactaggtatatacgcaaaggaaaataaatcattctactaaaagatacatgcgtctgtatgttcat

SEQ ID NO: 375988 - DNA, 201 bp, Homo sapiens
ccatcattcaggtcaattatttacatggtttagcctagtgctaagcccatgaactctggaactgagcagtcctgggtcagagtcccttccccgccactcaraggcaggtgtccttaggcaagtgatctgacctctgtaggcctcagtttcctcaccacctgttaccattgaggattaggtgggatttgcatataaaatgaa

SEQ ID NO: 375989 - DNA, 201 bp, Homo sapiens
tcttgtaaaaacacaaaaattagctggtcgtggtggtgggcgcctataatctcagctacccgggagagtgaggcaggagaaacgtttgaactcaggaggcrgaggttgcaatgagcccagatcgagccactgcactctagcctgggcaacagagtgagtgtcttaaaaaacaaaacaaaaaggaaacaaaacaaaacaaac

SEQ ID NO: 375990 - DNA, 201 bp, Homo sapiens
gcattcaaggtgaagccaactcaatagtcaaaataaagacttttatacaatatttttacattttaaaataaaatgtaaagataaaatttcgtgaggagctrtattggcatctacagcaaaaggaaaagtcagtaatcctgagccgtctttgttgaaaatttttgtactctgttcactgtggattttttggcattgattttt

SEQ ID NO: 375991 - DNA, 201 bp, Homo sapiens
gcagaggcacagatggctgatattacaaggcctatttggggaaccaggagtatagatcagcgtgaccagagtgtgtggagttgggggtaaggggaaagagyggaaaaggaaagaaaatgaaatcaaatctaaggaaagcaaatattaagtaacacagttttgctgggaagccactttccagaaggctctggtcagtcagcc

SEQ ID NO: 375992 - DNA, 201 bp, Homo sapiens
atcacaaaagcaaatgccaccccaaaaggatttcggggccagcctcctccctaatatcattcagtgtacaaaggatctctctcttttttttttttttttttaatcaaatttatctcttatccaattcaggaattccctgggctggcttcaaaagccaaccctgcacagactttagcttcatgcctgggtcagcgtatgttt

SEQ ID NO: 375993 - DNA, 201 bp, Homo sapiens
gaattcctattattgaggtttcttattttgtcattgttaaaataatgaaattactattataatcatgacttaaagaaggttaataaactttctagtaatgygggagtcagaaataagatttctatttaatcggggctaaattcctgaatttactatggaagcaaataaatatctggctttcttatttcatatctcttttag

SEQ ID NO: 375994 - DNA, 201 bp, Homo sapiens
tggtgaaccgaagaaacaaaattgtgtcattgaaatcagcttttcccaaccaccagtgtcttctctctctctctctttctctctcagtgttcacttattacatggctactctgtgccaagcactgttgctaaacacattatgtacaatttctcatttcattggtactgattttgacacttactcatccactgtcttttatc

SEQ ID NO: 375995 - DNA, 201 bp, Homo sapiens
gcattggcagaagacccatctttctaaatgcttactctcttggagcatgtaatttctttcctaggaatcaccattctcagctgcctgactccaagaatcgytctcagttttatcttctgatgctcctagacctcagcaccttattccagcctaacacatctggcaactcactgttcccagagctattcaacatgccttcca

SEQ ID NO: 375996 - DNA, 201 bp, Homo sapiens
gttaccttgtttatttcagcacactctccacctagggaggtattgataccaccatttgattggtggaaaactgagactcagagaggttaagtgacttaccyaagcttacacagctactaagtggcagagctggaaaggttttctgatccagagccagacttctgaacatactgtgcatagtgtctaagggaagggcagagg

SEQ ID NO: 375997 - DNA, 201 bp, Homo sapiens
tgtcccaggacaaggtctcagggaagggcggggaaaagagatttacaccagctttctcaatactgacccctgcattactaaaaagtttattaatcttctttctgttaagtcataattataataataatttcattattttaataataataaaataaacctcaataacacctaatatttaatatgctacttattaataatact

SEQ ID NO: 375998 - DNA, 201 bp, Homo sapiens
ggaaacactggcaaataagaaatggtgcttgactttctttgagtcatatttacataaaagtgttattaaagtatgttccaaaattgtaagaaattcctacwattctgatatgtcttggtatatgttatcggtaatcattacaatgatgttaaattgtatgccacagaaataatcaaatatccttgtcaattatgtctttag

SEQ ID NO: 375999 - DNA, 201 bp, Homo sapiens
atagtttgggataatcaagttcttttgaatccaaaatcaattggccatacatgtgtgaatctatttttgaactctgtatcttattctatctatctatctahccatccatccatctgtcatctatgtctctacttatgttaataccacattgtcttaattactgtagttttataataagttttaaaatgagttgtcacaaaa

SEQ ID NO: 376000 - DNA, 201 bp, Homo sapiens
aaaaaaaaaaaattagctgggcatggtggcaggtgcctgtaatcccagctacttgggaggctgaggcaagggaattgcttgaatcctggaggcggaggttrcagtgagccaagatcacaccactgcactccagcctggacaacgagtgagactcagtctccaaaaaaaaaaaaaaattcacaccaataaatatgaaactac

SEQ ID NO: 376001 - DNA, 201 bp, Homo sapiens
cttgaacccaggaagcagaggttgcagtgagctgagatcacaccgctgcattccagcctgggcgacaaagcgagactgtctcggaaaaaaaaaaaaatttwaaaaatatcaattatcacactattaccagggcaacaaattatcaagtaagacaaccaattagaattacacatttagtttaggaagttgaaggttattttt

SEQ ID NO: 376002 - DNA, 201 bp, Homo sapiens
taacaattaaggaaaaaaatctaattatccttatcagacagcaacataagatttctagtcttgtggatattatcattttgaaaccttttcaaatcagagaygttaaactatattttatggcacagaatggtatctctccttcggtagctgcaggagataaaattaattcctaatatttcagagatgctgttttgctagtaa

SEQ ID NO: 376003 - DNA, 201 bp, Homo sapiens
caggaaatagcagagtggagattggttccaagcctacctggctccagaacttgctctgctaatcattatgctattaatatataatagctatgaagttactraggctgtgcctcttggcctagaagtgaaatacttccactcattttaaaaggggaaagtggtagagaacgctgattttcaaatacctggctaggtgtctaa

SEQ ID NO: 376004 - DNA, 201 bp, Homo sapiens
cagttcacaaaggtagtgtggacccaaacagtgagcagcagcaagatttattgtgaacagcaaaagaaaaaagttcccacagcatggaaggggatccgacrttgccactgctggctctggtggccagcttttattcccttatttggccccacccacatcctgctgattggtccattttacagaacactgattggtccattt

SEQ ID NO: 376005 - DNA, 201 bp, Homo sapiens
  misc_feature (1)...(201): n = A,T,C or G
tttttgctgacaaattgttctccagtttcccgtatattgatacttagttactatttccctctgctttgtggttagtttcctttggcaggtgagggacaggnattttcatcaattgaagtattttgatattcttctgtttccttcttatggcatattaaattgattatctgaaccaacaataacaagtgatttaatggatga

SEQ ID NO: 376006 - DNA, 201 bp, Homo sapiens
tcgtggtctcactgacttaaggaatgaagcctacaaccttcgtggttagtgttacagttcacaaaggtagtgtggacccaaacagtgagcagcagcaagayttattgtgaacagcaaaagaaaaaagttcccacagcatggaaggggatccgacgttgccactgctggctctggtggccagcttttattcccttatttggc

SEQ ID NO: 376007 - DNA, 201 bp, Homo sapiens
taatgagaagttatgcgtattctacctttttgctgacaaattgttctccagtttcccgtatattgatacttagttactatttccctctgctttgtggttastttcctttggcaggtgagggacaggaattttcatcaattgaagtattttgatattcttctgtttccttcttatggcatattaaattgattatctgaacca

SEQ ID NO: 376008 - DNA, 201 bp, Homo sapiens
gccccacccacctcgtctcatgctcccacccacctcgtcccatgcgcacacccatctcgtcccttgcgctcacccacctcgtcccatgcgccctaccctaygccccaagtccctgaaagggccccacctaggtacccttttgggtcgtcttcaggttctttgccttgtcgaccctcctggacgaccccacatttctccgcc

SEQ ID NO: 376009 - DNA, 201 bp, Homo sapiens
aagagattctcctgcctcagcctcccaggtagctgggattacaggcgtgtgctaccatgcccagataatttttgtatttcagtagagacagggtttcaccrtgttggccaggctggtcttgaactcctgacctcaagtgaaccacccacctcagccttccagagtgttaggattacaggcatgagccactgcacccagcct

SEQ ID NO: 376010 - DNA, 201 bp, Homo sapiens
  misc_feature (1)...(201): n = A,T,C or G
atgctaataccacactgtcttaattatcgtagttttataataaggtttcaaataagttggtgcaaagtcttgcaattaaaaaagtatagtttgggataatnaagttcttttgaatccaaaatcaattggccatacatgtgtgaatctatttttgaactctgtatcttattctatctatctatctatccatccatccatctg

SEQ ID NO: 376011 - DNA, 201 bp, Homo sapiens
cttccccccaatttctgttgaggtccttgaggctcaggttagtagagtcactttgcttgaggtcacacatctggttagtgaaagactcaagaatcactccyaggtgtgacagttaactcttaaggtctgtgcgctccaagctgggtcttacaatgtccctccttttcccctgaatttctggatcgccaaataatctggccg

SEQ ID NO: 376012 - DNA, 201 bp, Homo sapiens
ctagttccttcttaatttggtgttttgagaatcctagggcaagaaaagaaaatgggcagttcttgagggctcaccatgtgctagatgtttccagatatgcsagtgcatttaatcctcacaataaccctctgaatggctggcattatcttttttacaggtgaggaaaccagtgcttaaagattaaagtgtttgttcaaagtt

SEQ ID NO: 376013 - DNA, 201 bp, Homo sapiens
ttctcatttcactgaatttttattttgctttaagttctgggatacatgtgcagaacatacaggtctgttacctaggtatacatgtgccatggtggtttgctgcacctgtcaacctgtcatctaggttttaagcccttcatgcagtaggtatttgtcctaatgctctccctcctcttgcccccgaccccccaacaggccccg

SEQ ID NO: 376014 - DNA, 201 bp, Homo sapiens
tagttgtaagacccagagcaagttcacctttctgttaccagggcaacctcagtctcttcatctgtaagaagaagatagtaggagtccccaactcgtagggycaatgtctagactaaatgagatcatgggggcaaagcattggcatacattagctgttcagtgaagccttcttccttcttttcccacttgatacgggggaaa

SEQ ID NO: 376015 - DNA, 201 bp, Homo sapiens
aagattctattatatctcttgtatacattcagttgtccttttagctcctgtctattatgtttttcttaggagaatccagagtttttaagtattcaaggttrtggatcaagaaactgggtgggatgagacctggagaccaggaggccacagcctctctcttttgcagtctccatactggtccaccttccccccactgcgtct

SEQ ID NO: 376016 - DNA, 201 bp, Homo sapiens
ccactgacccctatgccagagtagttcaactttccctccgcatccctgggctcagtgtaacataagcagccaaaaaatggcgccaatatccttcttgttaytcccaatgaaggtgaggatatggaaccgcaccaaagaaaatgcagagaagtttgcagacacagtgcaaggagaggtacgggtctgttcttcggtccagga

SEQ ID NO: 376017 - DNA, 201 bp, Homo sapiens
ggggctggggtccaggcctacagccattatgagatcttcacagagcagttctcctttaaggaggtaagtccaggggtgggggtgggagagaagagggaagsgggtggtccttgacctgtctatactgcttcactgcaccacaggttattctgaaataattaagttgtgagccccatctagaccattcttgtatcttcatga

SEQ ID NO: 376018 - DNA, 201 bp, Homo sapiens
atacagcaagcttactcggttaaaagattctattatatctcttgtatacattcagttgtccttttagctcctgtctattatgtttttcttaggagaatccrgagtttttaagtattcaaggttgtggatcaagaaactgggtgggatgagacctggagaccaggaggccacagcctctctcttttgcagtctccatactgg

SEQ ID NO: 376019 - DNA, 201 bp, Homo sapiens
ggcagaggttgcagtgagccaagattgtgccactgcactttagcctgggcaacagagagagactctgtcttaaaaaacaaacaaacaatatttgctccaaraaatgtaaaagggaaattacaaacctgaaactaaagaatatttaatgttctataaaatgtaagttttttttctttttttgggacagggtctcactctgtc

SEQ ID NO: 376020 - DNA, 201 bp, Homo sapiens
tctgtcttaaaaaacaaacaaacaatatttgctccaaaaaatgtaaaagggaaattacaaacctgaaactaaagaatatttaatgttctataaaatgtaakttttttttctttttttgggacagggtctcactctgtcgctcaggctggagtgcagtggcgagatctcagctcactgcaacctctgcctcctgggttcaag

SEQ ID NO: 376021 - DNA, 201 bp, Homo sapiens
cacgtgggcctggctaattttttgtatttttagtagagacagggtttcactgtgttagccaggatggtctcgatctcctgacctcgtaatctgcctgcctyggcctcccaaagtgctgggattacaggcgtgagccaccacgcctggccattcggattaaattcttaaatgtaatacctgaaactataaaactactagaag

SEQ ID NO: 376022 - DNA, 201 bp, Homo sapiens
ttgtaatttttggtagagacaaggtttcaccatgttggccaggctggtctcgaactcctggcctcaagcactctacccacttcagcctcccaaagtgctgygactgattacaagtatgagccactacgcctgaccataacatgtaaaattatggcaaatggtaattcacagctcaattctaaaatgtgatgaaatttaaat

SEQ ID NO: 376023 - DNA, 201 bp, Homo sapiens
gggaaataccaacaacagattttacttagtttacagctcagcggagggacaggcccagttccaccctgccccatgcctccctcctcctgcccccacacccygtcaagcctgtctgcgaccctcactcatttagccccatcacaaccaagccagagccttgtttgagtcaggcctctctctctttactgcctggcccacctc

SEQ ID NO: 376024 - DNA, 201 bp, Homo sapiens
atgcctccctcctcctgcccccacaccctgtcaagcctgtctgcgaccctcactcatttagccccatcacaaccaagccagagccttgtttgagtcaggcytctctctctttactgcctggcccacctccatccgcctgagtgacctcacacaaccctttgagaactcgcccggctcataagcagtggttgtgcaggggaa

SEQ ID NO: 376025 - DNA, 201 bp, Homo sapiens
catgcctgggtcagcgtatgtttgtttcctaggccgagatctttgctgagctgggagaagtgattaagggagtgaaaccagcccactgtgagaagaccacsgtgttcaagtctttgggtaagatccattgctccctgggcacaaatccaactagcgcacaaggcaggttcacccattggtggaaagagcaatgagtcacca

SEQ ID NO: 376026 - DNA, 201 bp, Homo sapiens
tgagcccagatcgagccactgcactctagcctgggcaacagagtgagtgtcttaaaaaacaaaacaaaaaggaaacaaaacaaaacaaacaaaaacatctkttgagtttaataatgtgttaaatagtaataaataatatgtaattaaataattagtacatattaataaatgattaatagcgtgcttagaatttgctaaaaa

SEQ ID NO: 376027 - DNA, 201 bp, Homo sapiens
ccaaaaagaaaaaaatagatattaaaagaactggttgagggtgaggaatgggaatgatggagatcaagaggagagtgaggtgtgaataagcaccaagtgaygtctctgtttcgggatttttgtgaggaaggtgttcctgttaagcagaagaggtgtgagcgcctaggtgctctctcagacctggattcacccatcagatcc

SEQ ID NO: 376028 - DNA, 201 bp, Homo sapiens
tctcagctacccgggagagtgaggcaggagaaacgtttgaactcaggaggcggaggttgcaatgagcccagatcgagccactgcactctagcctgggcaamagagtgagtgtcttaaaaaacaaaacaaaaaggaaacaaaacaaaacaaacaaaaacatcttttgagtttaataatgtgttaaatagtaataaataatat

SEQ ID NO: 376029 - DNA, 201 bp, Homo sapiens
aggagtctggagatgtcctgctgtcaggggtgaggcccttctgaccccagtcagggctgccacctggctggcctcacctggatcccagggtttcattaacytcccttccagtttggtctgctccagacctcagccaccccacctccttgtaggggaaggagctcctaaacattttgcaaccctctttaattccattccaga

SEQ ID NO: 376030 - DNA, 201 bp, Homo sapiens
ctgtaacaatttctgaagctcacctgtactttcaagaatagattcatattaactgagaacagaagaaaatggtaacaattaaggaaaaaaatctaattatycttatcagacagcaacataagatttctagtcttgtggatattatcattttgaaaccttttcaaatcagagatgttaaactatattttatggcacagaatg

SEQ ID NO: 376031 - DNA, 201 bp, Homo sapiens
agctgcaggagataaaattaattcctaatatttcagagatgctgttttgctagtaattagtagttaagaagacttttcactttttaaatattatactccaraattccagtgagtagcattttataaaagaacagaccacagggaactcaaagtttactaaatggaatagagaaaaggcagaagagggttttatttaataca

SEQ ID NO: 376032 - DNA, 201 bp, Homo sapiens
aacttcccttccagtttggtctgctccagacctcagccaccccacctccttgtaggggaaggagctcctaaacattttgcaaccctctttaattccattcyagaaaaatatgggcattatgggtggtgacatgtgtgttcctggaaggagaagctcagtggattttatttttttgctgggctgtcctctaaagaagtggga

SEQ ID NO: 376033 - DNA, 201 bp, Homo sapiens
caataagccaaaaaaaaaaaaaagttaaaattcaaccctaagtccctatgggttttcatttgttagaggcgcgcgctttcgagctccgcgcgccgaccacsggcagcgggtgggccccctggcgtctggagcagcggccagcgcagaggacgcaggcagaaggaggaagggctggccggggctcccgagcactcactgctc

SEQ ID NO: 376034 - DNA, 201 bp, Homo sapiens
ttccagaaaaatatgggcattatgggtggtgacatgtgtgttcctggaaggagaagctcagtggattttatttttttgctgggctgtcctctaaagaagtrggattggaagcttcttgcagcctggaaaccttcccaatgtggccaacatgataagactgtgttgcccaccttctggcctcattttacggttataatcagc

SEQ ID NO: 376035 - DNA, 201 bp, Homo sapiens
gcttaaagattaaagtgtttgttcaaagttgcatatctcgtaagtggaggaatcggatccaggtctgacgccaaacccatgctgtttgtaggatgctatamaacttcctaagctaatattttagaactgtttcttctaatttatgcagtggacaggggttccccttgctcactgtctctcctttcctccaaggtcatggat

SEQ ID NO: 376036 - DNA, 201 bp, Homo sapiens
agctactaagtggcagagctggaaaggttttctgatccagagccagacttctgaacatactgtgcatagtgtctaagggaagggcagagggatgcgggggytggaagagggccagtggggtggtgaggaaggaaagaaaaaggaaagtatatggatactttctaagagaccccagcattgatgggaaggggctgaagctgc

SEQ ID NO: 376037 - DNA, 201 bp, Homo sapiens
caatagcaaagagagagcttgtgcagggcaactcccatttttaaaaccatcagatctcgtgagactcattcactatcatcagaaccgcaggggaaagaccygcctccatgattcagtcatctcccactgggtccctcccacaagatgtgggaattatgggagctataagaagagatttgggtgtggacatggagccaaacc

SEQ ID NO: 376038 - DNA, 201 bp, Homo sapiens
tgttgttgttgttttttttcttttgtcatgagttaagagagaaccgggggtgaggagagggaaaggggcatagtggcaggcgtctgtggtcccaacagttkgggaggctgaggcgggaggatcacttgagctcaggagtttgaggctgtggtgagtttttgtttgtttgttttttgagatggagtctcactctgtcgcctg

SEQ ID NO: 376039 - DNA, 201 bp, Homo sapiens
tatgaatattcatgaaagtggtcctgatgcatgtgtatttaacaaacatgcatgttacatacaactcatgttcattttggggtggttgcaacatttaaatrtattacaattcagcctgatacgtcaaaaggtcttttcaggacatgaaggcatgcaagtgtgcaacctctgtaagtcagccagaaccatcctatagtcggt

SEQ ID NO: 376040 - DNA, 201 bp, Homo sapiens
gagaagaagctatgaatattcatgaaagtggtcctgatgcatgtgtatttaacaaacatgcatgttacatacaactcatgttcattttggggtggttgcarcatttaaatatattacaattcagcctgatacgtcaaaaggtcttttcaggacatgaaggcatgcaagtgtgcaacctctgtaagtcagccagaaccatcc

SEQ ID NO: 376041 - DNA, 201 bp, Homo sapiens
taaaaaatgataaatttaacttcaccacaattaaaaacgtttggttcttaaaagatgctttgaaaaaaataaaaggccatagtctgggacaaaatatttgyaaatggcttactacacaaagggttgatattcagaacgtacaaagaattctcaaaacccaatagtaagaaaaaagaccaattcaacaataaatgaaagaaa

SEQ ID NO: 376042 - DNA, 201 bp, Homo sapiens
acgtttggttcttaaaagatgctttgaaaaaaataaaaggccatagtctgggacaaaatatttgcaaatggcttactacacaaagggttgatattcagaaygtacaaagaattctcaaaacccaatagtaagaaaaaagaccaattcaacaataaatgaaagaaaagttcaccggtcacttcaccaaagatgatacacatg

SEQ ID NO: 376043 - DNA, 201 bp, Homo sapiens
gatagagtgagactctgtctcaaaaaaaaaaaaaaattctgtctttaactatgtctattctaagagatttgtcattctcaattattgttttattttgattmttctcaaaaagtggtttataatcagctacagtccaaaattggcttcttcttaaggaacttcatggaaagaactatgacaagtactcttgaatccaggttt

SEQ ID NO: 376044 - DNA, 201 bp, Homo sapiens
tacagtccaaaattggcttcttcttaaggaacttcatggaaagaactatgacaagtactcttgaatccaggtttctgataactttggagatcacaccattsgagtgggcaaaaacttccagagctctaataaaaaacctgatgcattcatgagggttgctaacccaacatcaagtggaataataattagctacatgggact

SEQ ID NO: 376045 - DNA, 201 bp, Homo sapiens
gcttgtcccaggacaaggtctcagggaagggcggggaaaagagatttacaccagctttctcaatactgacccctgcattactaaaaagtttattaatcttctttctgttaagtcataattataataataatttcattattttaataataataaaataaacctcaataacacctaatatttaatatgctacttattaataat

SEQ ID NO: 376046 - DNA, 201 bp, Homo sapiens
tttctacaggattcactggagtgaattcctattattgaggtttcttattttgtcattgttaaaataatgaaattactattataatcatgacttaaagaagrttaataaactttctagtaatgcgggagtcagaaataagatttctatttaatcggggctaaattcctgaatttactatggaagcaaataaatatctggctt

SEQ ID NO: 376047 - DNA, 201 bp, Homo sapiens
aacaggtgagagaagaagctatgaatattcatgaaagtggtcctgatgcatgtgtatttaacaaacatgcatgttacatacaactcatgttcattttgggktggttgcaacatttaaatatattacaattcagcctgatacgtcaaaaggtcttttcaggacatgaaggcatgcaagtgtgcaacctctgtaagtcagcca

SEQ ID NO: 376048 - DNA, 201 bp, Homo sapiens
acatacatttattcaacaaatatttgagtgtccaccaaatgcaaggttctacgctcagcatggggtaagcaaaaccagatacagtacttgccctcatgtartacagggtccagtgggggaggcaagatatagtccaaagatcacatcaataggctgggcgcagtggctcacgcctgcaatcccagcactttgggaggctga

SEQ ID NO: 376049 - DNA, 201 bp, Homo sapiens
ggctggcggggcggggcggggttgctccgcccccggaggctgggctgtgaccagcaggcggctccacagagcagcgggcgcgctcataaagggcacagccsagggtacgtggatcgcggtgcggagactgaggttagaaggcacaggtggcgagatgagccgggtaccagcgttcctgagcgcggccgaggtggaggaaca

SEQ ID NO: 376050 - DNA, 201 bp, Homo sapiens
cccagcactgggaggctgaggtgggagatttgcttgaggccaggcattcaagaccagcctgggaaccataacaagacctgcctccattaaatttttttttwaaataaaaataaaaagtaagaaagaatggctatatttagctgtcaaactttctaaaatttggaaataactctgacaagctggttccagcatgctactgct

SEQ ID NO: 376051 - DNA, 201 bp, Homo sapiens
aaaaaaggctaggctcagtggctcgtgcctgtaatcccagcactgggaggctgaggtgggagatttgcttgaggccaggcattcaagaccagcctgggaamcataacaagacctgcctccattaaattttttttttaaataaaaataaaaagtaagaaagaatggctatatttagctgtcaaactttctaaaatttggaaa

SEQ ID NO: 376052 - DNA, 201 bp, Homo sapiens
caagctaccaatgtaacatcactggacagagtttggaagagatacacagtagcgtaccattatcaactatttcccccatgtagatataatggacatgaatyatcttaagagacaggtaagagtgaaatgtattaaaataagtagaaagtgagactttcgtgttatctttttaatataatttgttaaattataagtttatat

SEQ ID NO: 376053 - DNA, 201 bp, Homo sapiens
agagttaataaaccttttttcttttgagctattcatagcttacaaaaattgggtaaatatacctttgtgggcaaatttgaagcatttgcctttctcactastggatttctcccaaatttggaaactgtgagtattcttaatttatggcaaaatagttatttgcataagttcaataaggatctgttttattttataacagga

SEQ ID NO: 376054 - DNA, 201 bp, Homo sapiens
ttccacagcaaggttaaagtgagagaaaggacccaggatctggtttattctataaagagttacagcagcaatcaagctcatctaaactctctcaaacttayttgatcctaaaaactacttggggggtgcttgttaaaatcacaagatttcaaatttcagagttccactccaaatctattgaattggtctctccaggggcct

SEQ ID NO: 376055 - DNA, 201 bp, Homo sapiens; identical to SEQ ID NO: 81123

SEQ ID NO: 376056 - DNA, 201 bp, Homo sapiens
atttaaaaacaacacacaaaaaataagcacattctaaatctaatagaactaaaaattatgaaaagtgtttaatacatagtctttaaaatagtaatcttctyttaaatatatctttttttattggttagcttttctataggagaaaaccaaaaggactaagtggtgccttgcaggaagtaggaatagaattctcaggacgag

SEQ ID NO: 376057 - DNA, 201 bp, Homo sapiens
agacaagaaactggaaactcagtttgcctccatggaagaggactgggtcactggggacaaggtttgaagcaagacttttcactatgtatttttatataccytttgaattttatggcaggtgaattatttcctattcgataattaaataacatcagtttaaatatatttacctgtgatatgagctataacaagaaatacata

SEQ ID NO: 376058 - DNA, 201 bp, Homo sapiens
agaaaaccaaaaggactaagtggtgccttgcaggaagtaggaatagaattctcaggacgagaacattctggttagtatacattaaaaattatgtaagccayttgacttttaaaaaatacttcatatgaatttcattttttggtaatgtcattagtaagggatatcttcagcctaaaaaaaaaaaactcctaatctaaacaa

SEQ ID NO: 376059 - DNA, 201 bp, Homo sapiens; identical to SEQ ID NO: 81125

SEQ ID NO: 376060 - DNA, 201 bp, Homo sapiens
gtttttattcatctgactaaatggaatccagctatgtcttttcagtgaggtcaggtaccgtttcagtctgtccatatccttcgtagatatccaggcccgtsttgtttctccatttttcagtcacgtcaggggtaattggttccccagcactcacacagtgctttaagcttttaaacttatagcttctcagaaaaccagata

SEQ ID NO: 376061 - DNA, 201 bp, Homo sapiens
ggctcaaaatgaatgctatactctcatggaatgtagtgataacatataaatacatgcatatgtataaaatatagttataacaataattactcatatatccrtatttatcaaaacatgagtatattaacatttgcatttatattagcatacttgttatgctatttctagttaatgaatttttcaatttttgatttttatttt

SEQ ID NO: 376062 - DNA, 201 bp, Homo sapiens
caactatctgttaacagagcttttttgcaattaggttcttgcaagcattgtttttttaaacattttctaaccactcaactcctatccctcaaataatcatraggagactgtggacactttggtttttattcatctgactaaatggaatccagctatgtcttttcagtgaggtcaggtaccgtttcagtctgtccatatcct

SEQ ID NO: 376063 - DNA, 201 bp, Homo sapiens
caggcttgggagcagagagggaaagtgctgcagccactgtaaactgaagcctcttcgggcctagttgacctgctcagaaggtcttgacctcccttgcctgmgaggaccagtgttgtgttgtggttaagagtgcagatattggagccagactgcttgggattgaatcccaactctagcagctattagctgtgtgacttctgg

SEQ ID NO: 376064 - DNA, 201 bp, Homo sapiens
gtggatacagagaggctggaaatggccaggcaggcttgggagcagagagggaaagtgctgcagccactgtaaactgaagcctcttcgggcctagttgaccygctcagaaggtcttgacctcccttgcctgagaggaccagtgttgtgttgtggttaagagtgcagatattggagccagactgcttgggattgaatcccaac

SEQ ID NO: 376065 - DNA, 201 bp, Homo sapiens
aaggttgggctttgaagttgtaggaatctgatattcacctggttggaacacatccccagatgccagaatgttactgcagatgcccttagctaaggaacaaraagccccataataacggcccgtggaaaagagttaaaaatgactggggatgcaggcaaagtactgttttcctctcagcctcatcatatttgcattcaaaga

SEQ ID NO: 376066 - DNA, 201 bp, Homo sapiens
acttaggatgttttcaacttatgatgacttattattttgggacataaccctatcataagttgaggagtgtccaaattagtgttaagttcctttggctacayccagctttgaagctcggttgatctgagaacaattttaaccctatataaagcttgctgatggggaactggaattccccctaggcatcaggtggtagtagtg

SEQ ID NO: 376067 - DNA, 201 bp, Homo sapiens
atgaagacttaaaaaaaattttgtgtgtgtgagacaaggtctcactttgtcacccaggctggagtgcagtggtgcaatcatagctcatagctcactgcagsgtcaaacttctggtctcaaacagtcctcacacctcagcttcccaagtatctggggctacaagcacatgtcattatgctcagctaatgtttatttttattt

SEQ ID NO: 376068 - DNA, 201 bp, Homo sapiens
ggacttaacagggtatcttctggcatcaaagatcagttaggggaatcagtcctggggggagatccaccctccactgtaacatgcacatctcctatttttaccttaaacttttttatttttatttttatttttttgaggcggagtcttgttctgttagccaggctggagcacagtggcacgatcttggctcactgtaacctc

SEQ ID NO: 376069 - DNA, 201 bp, Homo sapiens
cctgacctcaggtgatccacccacctcagcctcccaaagtgctaggattacaggtgtgagccactgtgcctggcctgccttaaacttcaggacctatttcrtcccctgagattggataccttctaactctgccctgtgccctgtgcttgaagccctatacctaggatttgagataaggagcttgaatacatggtacagaaa

SEQ ID NO: 376070 - DNA, 201 bp, Homo sapiens
ggaatagaattctcaggacgagaacattctggttagtatacattaaaaattatgtaagccatttgacttttaaaaaatacttcatatgaatttcattttttggtaatgtcattagtaagggatatcttcagcctaaaaaaaaaaaactcctaatctaaacaattcacattgtttctaagactttcaaattaccactttcat

SEQ ID NO: 376071 - DNA, 201 bp, Homo sapiens
attgcccctgcatctccacatccctggggccttgctgacatccccacacgttcccgtagagggctgcagcattccaacaccaggtggatccagtgatagarccaggccactggcacccgagcctacacacagcactctacaccccaggtaacagggagtccagcacatcaagagaggctgccccaggacataaggcactaa

SEQ ID NO: 376072 - DNA, 201 bp, Homo sapiens
atttctaaatattgacctctttgtgctttggcttacttgcaagatagaagtcggctcaaaacggggtaaatggtgtgtgaatacacatgctccctggatcyacggagaaaaaacactactccatgcagactttgcccagcccgtatctgaggtattccacatcacatctgagggtgtcaaatctagccagaacctgggaaa

SEQ ID NO: 376073 - DNA, 201 bp, Homo sapiens
ggtggaagaattagaatagtctttggaatgggttttgggtaacagccaaaatagggaaaagggtattgttaggaaagttgtcttgatattaagtatttacygtgagtccagtaagccaaaggaccaaacaaaataggttcagggtttcattttaatctcaaagattctgattcttacccatatgtcatcagttcagtttgg

SEQ ID NO: 376074 - DNA, 201 bp, Homo sapiens
tgacagatactatgtttgttttatagatatggtaattaatgaaacaactttaaattgtcttccattctttcttcctcagttcatttctttttgtcttcccwctgatagtctttggcagctcttgaataaattctacctgttggcatcaaggggaagaaaattagcctggaaatttttatctttacataaagccaattatat

SEQ ID NO: 376075 - DNA, 201 bp, Homo sapiens
caagtacctatcctaggtatgttttgtggcaaacagggattgttaccaagcacttgagaaataaatagaaaatgagattatttagtaagtcacttactacstaatgagtaaaaaggccaaatggtcggttgggtagaacttgaatgccaatatctccttcttgtccaggaggtagaacattgccatttacatctacaatct

SEQ ID NO: 376076 - DNA, 201 bp, Homo sapiens; identical to SEQ ID NO: 81121

SEQ ID NO: 376077 - DNA, 201 bp, Homo sapiens
ttaacagggtatcttctggcatcaaagatcagttaggggaatcagtcctggggggagatccaccctccactgtaacatgcacatctcctatttttaccttaaacttttttatttttatttttatttttttgaggcggagtcttgttctgttagccaggctggagcacagtggcacgatcttggctcactgtaacctccccg

SEQ ID NO: 376078 - DNA, 201 bp, Homo sapiens
cttaacagggtatcttctggcatcaaagatcagttaggggaatcagtcctggggggagatccaccctccactgtaacatgcacatctcctatttttaccttaaacttttttatttttatttttatttttttgaggcggagtcttgttctgttagccaggctggagcacagtggcacgatcttggctcactgtaacctcccc

SEQ ID NO: 376079 - DNA, 201 bp, Homo sapiens
acttaacagggtatcttctggcatcaaagatcagttaggggaatcagtcctggggggagatccaccctccactgtaacatgcacatctcctatttttaccttaaacttttttatttttatttttatttttttgaggcggagtcttgttctgttagccaggctggagcacagtggcacgatcttggctcactgtaacctccc

SEQ ID NO: 376080 - DNA, 201 bp, Homo sapiens
gacttaacagggtatcttctggcatcaaagatcagttaggggaatcagtcctggggggagatccaccctccactgtaacatgcacatctcctatttttaccttaaacttttttatttttatttttatttttttgaggcggagtcttgttctgttagccaggctggagcacagtggcacgatcttggctcactgtaacctcc

SEQ ID NO: 376081 - DNA, 201 bp, Homo sapiens; identical to SEQ ID NO: 81126

SEQ ID NO: 376082 - DNA, 201 bp, Homo sapiens; identical to SEQ ID NO: 81127

SEQ ID NO: 376083 - DNA, 201 bp, Homo sapiens
accagtttatcatgattaaaattagtagatggtcataaaactaaaactgtgttccaatttctacacaagtggtgtttttctttttaagttatttctttagyactaaggaaatagtactagtaccactaaattcagtgtttgatatctgtatcctcagggttggacgattctcggaatactgcccttcttgcttggaaaatg

SEQ ID NO: 376084 - DNA, 201 bp, Homo sapiens
agcaaactcttggtcttactacaacttaaataagtgcttaaatgtctttggttgacgcagcacaatttaaacattgtttatgttaatgtaaatacattctkaccttttcttgtagaatcatccctcagtgtctgcaggattggttccaggaatgcttaagtcccttatataaaattgtatggtatttgcatataacctatg

SEQ ID NO: 376085 - DNA, 201 bp, Homo sapiens
agggatatcttcagcctaaaaaaaaaaaactcctaatctaaacaattcacattgtttctaagactttcaaattaccactttcataaactattgtaagatamactgccatctagtggctttctagttgctaagaagaatgaaaagaatgagccaaatcaaatggagattaaacaagtgctcaaataatagaatggactagtg

SEQ ID NO: 376086 - DNA, 201 bp, Homo sapiens; identical to SEQ ID NO: 81128

SEQ ID NO: 376087 - DNA, 201 bp, Homo sapiens
agattgctaaatcctgtgtctactggcttggagctatgtttcaggcagaaagatcttttattttatagcttcctcttctcccctctccccactagatgccwatttactaacatttcttacctggttatatcattctgtacaagcattcggtatacagttggtgctgaacagaagactgtgatggggtacttggagagtgtc

SEQ ID NO: 376088 - DNA, 201 bp, Homo sapiens
atttcccaagtgatgggtgtgctaggagtatcttttgttctaatattttgcctttgactctagtttctgatacagagcttctaaattccatggaatttccwgggtaatagaattgtcttttgttctcatgaggcgactctcaatggggctcccgtataggggttggtcacaagaaagactaagccaggaacagaagcttgg

SEQ ID NO: 376089 - DNA, 201 bp, Homo sapiens
gacctaatgtttgattggaccagtataagcatgccagggcaaatatttaggctaaattgtgggagctaagaacataaagtacattgatttctttattatakctagcagatatttaagaatgttagcacaggtctttgaataaattttgctctaagagaagttactatttattcctaattagacggggaaggaagtctttga

SEQ ID NO: 376090 - DNA, 201 bp, Homo sapiens
  misc_feature (1)...(201): n = A,T,C or G
aatacatacaggtgagtggcaggttcactctagaacactgatgatcagttaacacagacatatgcacatatggaaaagaaagttacccagaggataatatnacatcatctgctcttgcaacaaaccagaaatacccatctttatccatatatcctctgtccccagtgatatagaaattgcctcgtagagttgaagctgttt

SEQ ID NO: 376091 - DNA, 201 bp, Homo sapiens
ataagtaaaaaatgctggcatcattgactttgttctattttaatgtacctaatgcagactgggacttgggggtttgcctggagtatgagtgtaaaagaaarcagctgttaaaacctgtgtttttaaattcttggattgatctcagagcaacttacaaggtaatggtaaaaaatgggggcatgtttacttttttctatggaa

SEQ ID NO: 376092 - DNA, 201 bp, Homo sapiens
ataacaaagaaagtttatatgggggtaagcggtaggtaggtagtgtacagattgggttgttaaacattctcctggaaggggatgtgcaaaccttaacatcraaagcaggagaaggttttcccattgagccaggtttaattttcattcccttaaaatttccacagattagcacctagttaagaagaagaaaaagtaagataa

SEQ ID NO: 376093 - DNA, 201 bp, Homo sapiens
ggggcagaaaagaaacagtgtttagaagaaatgttattcttcattatgttagagtagtgtagataccatctatacattctgtatttctcagagtgagttaktcagtttaccaggaagatatctatttatcttgctttcacttatctgcttttgcctttcaagggatttcagagtctatgacccttttggcttaacatgaaa

SEQ ID NO: 376094 - DNA, 201 bp, Homo sapiens
aggctgtcctctttctagggtcccttcctcttgccttcgtggacctggaacagtgatctggcctcaggggaccagcatgcttttcttcagcaagaatttgrgtatttcttcaatttcttgtcttttggattactattcaggacaaccaatctctcaagaaagggtcaagtacctatcctaggtatgttttgtggcaaacag

SEQ ID NO: 376095 - DNA, 201 bp, Homo sapiens
  misc_feature (1)...(201): n = A,T,C or G
aacaaagagtagccctgatgtacataggaaaataaatataaaagaccagtacataagtcatcatctttgcagttttgacacttcaagctgcacttttgtgnaagtataccttccatttacagataatcctaaaccaaaactgctgtgggtgtgtgcagtcattttcggatatccacttgttccactggtaaagaatatggc

SEQ ID NO: 376096 - DNA, 201 bp, Homo sapiens
ccagatgccagaatgttactgcagatgcccttagctaaggaacaagaagccccataataacggcccgtggaaaagagttaaaaatgactggggatgcaggmaaagtactgttttcctctcagcctcatcatatttgcattcaaagatagctgctctagaaaaccactgggctcaaattaatggggagcaggtgggggtacc

SEQ ID NO: 376097 - DNA, 201 bp, Homo sapiens
tgttgcctttccttttgggaagctgttttacaacaagtgtggctactcacttcatcaactccttgaggttcccccacccctctctggagttctctgatacratcagcttggagtgcagattttcacatttggatgcaacagcgtctactgctggggctaaaacatcattggtgataatgcagtttgcttttgaagattgta

SEQ ID NO: 376098 - DNA, 201 bp, Homo sapiens
cccagatgccagaatgttactgcagatgcccttagctaaggaacaagaagccccataataacggcccgtggaaaagagttaaaaatgactggggatgcagrcaaagtactgttttcctctcagcctcatcatatttgcattcaaagatagctgctctagaaaaccactgggctcaaattaatggggagcaggtgggggtac

SEQ ID NO: 376099 - DNA, 201 bp, Homo sapiens
cacagacatatgcacatatggaaaagaaagttacccagaggataatatgacatcatctgctcttgcaacaaaccagaaatacccatctttatccatatatsctctgtccccagtgatatagaaattgcctcgtagagttgaagctgtttttgaaggattatcctgcaaaacaaatagcattttgttgttatggtgaatcca

SEQ ID NO: 376100 - DNA, 201 bp, Homo sapiens
ccactctgggaccctgggcagaatcagaattacccgatctcctctttgtagggaacaggcttctgaaagtatattggcaaattttctggacagagatcccrgttcctcaaaactccatcgcatctcttctccatttctgttgatccaccagaaggctggatttgaaggtttctttccagcctgaggaaagaaaaaccagtc

SEQ ID NO: 376101 - DNA, 201 bp, Homo sapiens; identical to SEQ ID NO: 81124

SEQ ID NO: 376102 - DNA, 201 bp, Homo sapiens
gggaagggaccgagagacaccccaggaaggtcagggaaagcaggcaggccccaaataagctggtcggggcagctgaggcgatgaaagccggttgggatctygaggagagtcagcccgaggccaaggtgagcaacggggatcccgagcaggcggccctaggcggtttggagctcccggaccctcgcccaaccgccgtcgggg

SEQ ID NO: 376103 - DNA, 201 bp, Homo sapiens
taggggaacggggatagttcggtaaactgaattgagaagcggatccgagggaggttgaaagctgtcaagcccgtgtagctctcccgctaggaggcggcacrcgggggaataggggcgctggagtttccccagctctacctcatctttctccacagccatggagccagagagggaagggaccgagagacaccccaggaaggt

SEQ ID NO: 376104 - DNA, 201 bp, Homo sapiens
agtcctgctcagtgacacttaatcctttaatcttttttttttttctaccctggccctcagtcttatttcactctccagcttcctccagtcctggccacatctccttttctcgcagatctctcatacttttgcccccaccatacctgctaaacttagttttttagtcttccagatctccaagggactttgaaggacaaaggc

SEQ ID NO: 376105 - DNA, 201 bp, Homo sapiens
ttgctatgtcttaggtttctaattctgctgcagtatctaatctactgataatccaatccagtgtactttcacctcacacattgtattttttacctctagargttaacttttgttctattttgtatcttccatgtgtctagttaacattcagactttcctctagcttcttaaatttcagaatatagttacaataactatttt

SEQ ID NO: 376106 - DNA, 201 bp, Homo sapiens
ctttatatgggacatgtatactacaatgtcctacctggcctgcttcccatatttacagtatctgtctggctactatagatattttagtttgtttcccgtgwtgcagactcagctgaaataacaatgatctgtgaagaattccagttaatcttttttctttcttttacaaataaaaggcaaagagagcccaggcatagtggc

SEQ ID NO: 376107 - DNA, 201 bp, Homo sapiens
tgtttcccgtgatgcagactcagctgaaataacaatgatctgtgaagaattccagttaatcttttttctttcttttacaaataaaaggcaaagagagcccmggcatagtggctcacagttataatcccagcactttgggaggccaaggtgtgaggatcacttgagtcccagagtctgagaccagcctgggcaacatagcga

SEQ ID NO: 376108 - DNA, 201 bp, Homo sapiens
atgagaaactgagtaacttgcccgagttccagctagtaagtggtagggctgaaatttaagcccaggtgaacctgaagctgaagctctcaacctttttgccrtgtgataccatctattctgatggcaatggcatgctttccaatgaaataatagatttggaagaactttgaaaatacaaagggacttttcttgtctaagttg

SEQ ID NO: 376109 - DNA, 201 bp, Homo sapiens
tgccacctgggttcaagcgatttttgtgcctctcagcctcctgagtagctgggactacaggcgtgcaccaccataccagctaatttttgtatttttagtarcgacagagtttcaccatgtttggccaggctggtattgaacgcttggcctcaagtgatccacctgcctcagcctcttaaaatgctgaaagtacaggcgtga

SEQ ID NO: 376110 - DNA, 201 bp, Homo sapiens
gtcttgaactcctggacttaagcgatctgtccaccttggcctctgcaagttctgggattacaggcatgagccactgcttttttttgtttttttttcgtttktttttttttaaagagagacagggtctccaactcctgggatcaggagattcacctgcctcagcctcccatagtgctggggattacatgtgtgagccactgc

SEQ ID NO: 376111 - DNA, 201 bp, Homo sapiens
ctttgctttctgataagacctcatctgaaaatctgcaagtcatcatttggcagtcaagtgatgttagagcttaatctgccttgacccccaaaacacaaacraatatttttcataacagaaatttgaagctgaaaatgttagtctacttttccaaagattagcatgtaatctcagaatgtacacacagtgactaggcaagaa

SEQ ID NO: 376112 - DNA, 201 bp, Homo sapiens
taatctctcatacttaacagatgaaaagtaggggctagagttggtaagtcacttgcccaaggtcacaaagagacttaatggcagaagccagactagacccytcatcagcaatgtggctcccctagcttggggtcttggaagacccatgtggaggaaaggacagtagctgtcctcccctgaggaagtccttagccaacttgg

SEQ ID NO: 376113 - DNA, 201 bp, Homo sapiens
gggcaaatccaatgttccaaaacccaggtatgagatgaatttaaatggtgggtattgaccagcggtttcttttttttttttttttttttacctctcccaaggctccatcattcaaaccagaggtttcaaactggcttatcgacagtatttttttgctatgcagcatgtcctgaattttttatgatggctgccaagtgttaa

SEQ ID NO: 376114 - DNA, 201 bp, Homo sapiens
gaaagctctacaacagcttgtgcccgggcactctctgcctcatcctgctgccaggaaccaagaggtaaggactagaaagggtatcccttcaggactctgtmccctggatttcagctgttcttagagaaaaagccttttgctgatatttaggcacatagtgaggacttacatgaatcatctctttaattttcaccgttctaa

SEQ ID NO: 376115 - DNA, 201 bp, Homo sapiens
catgttgcccaggttggtcttgaactcctgacctcaagtcatccacctgcctcggcctcccaaagtgctgggattacaggcgtgagtcaccgtgcccagcsaaaactgaatttcttaaagccagccatttgattccctggtttaggaaggaccgcagagtaggttggtatcttagggatgactttgtaaagtgagcttagt

SEQ ID NO: 376116 - DNA, 201 bp, Homo sapiens
gggaggctgaggcacgagaatcacttgaacccagggggcagaggttgcagtgagctgagattgcaccactgcactccagcctgggctacagagtaagactyttatctcaaaaaaaaaaaaaaaaaaagattcttacattctaggagttgacagagcatgaatacctctggccttgaaggtggatcagaagaaattcatttc

SEQ ID NO: 376117 - DNA, 201 bp, Homo sapiens
tacaactgccaaacagctagagctttgctttctgataagacctcatctgaaaatctgcaagtcatcatttggcagtcaagtgatgttagagcttaatctgccttgacccccaaaacacaaacaaatatttttcataacagaaatttgaagctgaaaatgttagtctacttttccaaagattagcatgtaatctcagaatgt

SEQ ID NO: 376118 - DNA, 201 bp, Homo sapiens
gttcatacatcaggtggagacagattctgtgtttgtctttgctcatttctacctgctttgcctcagagagctcctcaacgctgacccagttccatgaataytcattacaaggtggcagggaactaacaagtattgaaggctcctaaattccaagcaccacaccaggttttttacaacaaacattgttaaataagttaatgt

SEQ ID NO: 376119 - DNA, 201 bp, Homo sapiens
tcgtgagtcggcctgccatgtttccatgtgccatttcttaccccttgtaggcaatggcaaagaatgtggtcaggctgtagcctccccaaccagcagacagytttatggaaacttggtatagcagctaaaagagtttagtttgtttatatggcatgtataagttttcaataaatgcctaaagttcaagcatagtatggggat

SEQ ID NO: 376120 - DNA, 201 bp, Homo sapiens
atacctttgtttcttatttattgcagcactcatggttcactctctggtctaggactgatgggaataaaagaggaagaagaaagcgctggcccaggcctgtkttcgtgagtcggcctgccatgtttccatgtgccatttcttaccccttgtaggcaatggcaaagaatgtggtcaggctgtagcctccccaaccagcagaca

SEQ ID NO: 376121 - DNA, 201 bp, Homo sapiens
ggcaaaataatattccatttcatgtatataccacattttgtttatccatttgttgatggacatttgggttgtttcttgtttctaccctttgttttgtttgttttttttttttttgagatagggtcttgctcacccaggctggagttcagtggcgtgatcacaactaactacagcctcaacctcctgggctcgagcaatcct

SEQ ID NO: 376122 - DNA, 201 bp, Homo sapiens
ttgaccctggccaggcagcttggatggtgatcagctttcttggcccttaataacataaggtgggggttcttgctttcagaattcaaaagttttggcagtgcccagcaggccctcaacattctcacaggcaaggactggaagctgaaaggcaggcatgccctaacccccaggcacctccatgcctggctcagaggcttacca

SEQ ID NO: 376123 - DNA, 201 bp, Homo sapiens
aagatagcagcctggcgctggagccggaagattggaaagctctacaacagcttgtgcccgggcactctctgcctcatcctgctgccaggaaccaagaggtraggactagaaagggtatcccttcaggactctgtcccctggatttcagctgttcttagagaaaaagccttttgctgatatttaggcacatagtgaggactt

SEQ ID NO: 376124 - DNA, 201 bp, Homo sapiens
atatcttatttcccttgtttttaatggctacatagtattctgctatatgatatacctattaacatttgtgctttatacatttttgctattacaaataatayttcagtgaacatccttggacatttggcaagtatttatatcaaaaaaatctttggtgaataatcccatgcattgactcatgatttcagttctctttccata

SEQ ID NO: 376125 - DNA, 201 bp, Homo sapiens
gaggaaccattatactgttttccacagtggctataccattttacattcctaccagcaaagaacaaaggttccaacttatctacatcttcactgacacttgktttctattttatttaatagtagccatcctaatggatgtgaaatggtatctcatttgggtttgatttgcgtttccctaatgattagtgatgttgagtgtcg

SEQ ID NO: 376126 - DNA, 201 bp, Homo sapiens
gcactgcttcctcctgatgctgtgttagtgggccactccttagatttggatctcagagcactgaaagtgagtatctgatttaggactttgcattttcagtrtaaatgcctgttccatttatctcaaatctaaagtcttgggctcttctctcccaccctgctagcccacttgttttttcctttagcataagacactactcat

SEQ ID NO: 376127 - DNA, 201 bp, Homo sapiens
tcaaggggccatttggagagtgcaacagtgcagaaaatacaaacaaaagtattaacttttgtcaagtttgtacaacctcaacaaacagacacactggtcayaaaccaagagggatccacaaaggtggagggtcacatgagcagtggactcatcacctcagcggcttaaggcagggtatatctgtgggaccaattcatccaa

SEQ ID NO: 376128 - DNA, 201 bp, Homo sapiens
  misc_feature (1)...(201): n = A,T,C or G
atctttatttgaattctgtgcaataatggctgtcttccagttccaggcagacggtgaatggtgataaattctattaactctcactcactgcttttcctgcnccttctcccctatttcccctctatatgactgtaactgacttaaggccatctgtcttaactgtgttggtttgatttcttggcagctggtgccagctttttc

SEQ ID NO: 376129 - DNA, 201 bp, Homo sapiens
atactactcacagtgaagaataggcaggaggtttagatactagccagctgaaagattcatgatagcagtgtgtttttcaaactgtgggttgtgtcctattrgtaagttataagtaatctttttggttttgcaggaaggtgagtgatagagtagtataggacttatcagagttagttgcatatagtaaggttaggtattgtt

SEQ ID NO: 376130 - DNA, 201 bp, Homo sapiens
ttggatggtattctggtagatggtatctgcatcaaggtagggtgacaagagaaagccccctttgcttgggtctggcctaccacagcctgtatttatagtgycccaggacatataggaaacactctcaagaggcccacgcacaagactttgttatggaaagtcttcagccaagtctaacattctcctactggcagtgattga

SEQ ID NO: 376131 - DNA, 201 bp, Homo sapiens
cttttcacatgcttattagtcatttgtatagcttcagagaactgtctattcagatcctttgtccatttttaaattgggctgtattttatcatggaattatyggagttcttattttctggatgcataaattttatttttttaattttttaagttgatgtaggcgtgttttataggtgccaggcaccgtactaagtgcctttt

SEQ ID NO: 376132 - DNA, 201 bp, Homo sapiens
aggtgggggttcttgctttcagaattcaaaagttttggcagtgcccagcaggccctcaacattctcacaggcaaggactggaagctgaaaggcaggcatgccctaacccccaggcacctccatgcctggctcagaggcttaccacctgaatcaacaaggctcccagggcttcgtgttgtacctcccccctttgaacaggag

SEQ ID NO: 376133 - DNA, 201 bp, Homo sapiens
tggccgatagaacgttaccccctgagctccacctaggcattagattctcataggaatgtgccaaacctattgtgagccctattgtgaactttgcatacgarggtcctaggtggcatgctgcttatgagactctaatgataaatgtaatgcacttgaatcaccccgaaaccatccccccagcccttctcccagtcagtggaa

SEQ ID NO: 376134 - DNA, 201 bp, Homo sapiens
ccactgcactccagcctggcgacagagtgagactcgatctcaaaaaaaaaaaatcacgttttccaactagttactatgtttaatcaggtctttgcatgttrctagaagttgattccttgtgtttgaagaagtattttgttgttgctgccatgaggactttgccttaattgttggtttggcttagttttacaccttgaagat

SEQ ID NO: 376135 - DNA, 201 bp, Homo sapiens
gtcctgctcagtgacacttaatcctttaatcttttttttttttctaccctggccctcagtcttatttcactctccagcttcctccagtcctggccacatctccttttctcgcagatctctcatacttttgcccccaccatacctgctaaacttagttttttagtcttccagatctccaagggactttgaaggacaaaggca

SEQ ID NO: 376136 - DNA, 201 bp, Homo sapiens
acaatctcaaacttttagaaaagttgtaagaatagtatcaaaacctcccctcaaccaacatttgaaagtagttgctgacacaatggtctttttctacccaycctcaagatattttattatatattctctataaacctacataatcacaatgcaaccatcaaaattggaaattaccatggatatatcatgaccatctactcc

SEQ ID NO: 376137 - DNA, 201 bp, Homo sapiens
agtttgagctggaaagcaatgatgaggaaatcttggtctttctgcagcctcatctctgtatacagtatgaagtcctagaagctgcccagctggccatagartccttggatggtattctggtagatggtatctgcatcaaggtagggtgacaagagaaagccccctttgcttgggtctggcctaccacagcctgtatttata

SEQ ID NO: 376138 - DNA, 201 bp, Homo sapiens
tgatcttcaatcttcttgtgaccttaagtcagcagaatattatcttccttgttccagaatctcccaattataatcattatctacaactgccaaacagctaragctttgctttctgataagacctcatctgaaaatctgcaagtcatcatttggcagtcaagtgatgttagagcttaatctgccttgacccccaaaacacaa

SEQ ID NO: 376139 - DNA, 201 bp, Homo sapiens
tcctgctcagtgacacttaatcctttaatcttttttttttttctaccctggccctcagtcttatttcactctccagcttcctccagtcctggccacatctccttttctcgcagatctctcatacttttgcccccaccatacctgctaaacttagttttttagtcttccagatctccaagggactttgaaggacaaaggcag

SEQ ID NO: 376140 - DNA, 201 bp, Homo sapiens
tctccaatttatctgtaaaatggggatgatagtagtacacacttacaaagttgtgagaattaaatgatttaatgcatgtaaaatgatcagaactgtgtttygctaatgtaagagtttaacattagcttaaggccatgggaatacattagcaataatatctaatgtttattaagtacttatgtcaggtactagcctcagtac

SEQ ID NO: 376141 - DNA, 201 bp, Homo sapiens
gtacagcactagctgataatagaatgggcttcataaaaattacctattagtggtatttagcataatactggatatagtacacactccataaatggtagatrcaattattaatattatttgcattcatcttctttgtgcagactacactgtgttgatcctcttaagtgtaacattcagcagcctgcccagctttaatttcac

SEQ ID NO: 376142 - DNA, 201 bp, Homo sapiens
ataatatgggaatacacacttttctgggatattgttgagagtaaatgagatattgtgtataaaattcttagcacagtgtcttgaatatactaagcactatmctggtggtgtggtgattattgtagttaatactaataattataaaaaatctgcatagatttttgttttcttggagtagggggagcatacaattgtttcaac

SEQ ID NO: 376143 - DNA, 201 bp, Homo sapiens
atgcatttccccaggctgtggaagcttgctgtgtgactgacttctctgggccttgtttgtgcagttgtgtccgtgatggcagcagatactcttgggaaacgttggggaaaaaaggaatagcaaaaacaatagaaggtttccttaggctggggtcttgatgcagctcttaatccttacatttttggtagcttcttaaattaa

SEQ ID NO: 376144 - DNA, 201 bp, Homo sapiens
gggtcttgctctattgcccaggctggagtgcagtggcgtgagcagagctcactgcagccttgacctccgggctcaagcgatcctcctgcctcagccacccragtagctgggactacaggcatgtgccaccatgcctggctaatttttaaattttttatacagatgaggtctcattatgttgcccaggctcgtctcaaaact

SEQ ID NO: 376145 - DNA, 201 bp, Homo sapiens
tgcatttccccaggctgtggaagcttgctgtgtgactgacttctctgggccttgtttgtgcagttgtgtccgtgatggcagcagatactcttgggaaacgttggggaaaaaaggaatagcaaaaacaatagaaggtttccttaggctggggtcttgatgcagctcttaatccttacatttttggtagcttcttaaattaat

SEQ ID NO: 376146 - DNA, 201 bp, Homo sapiens
ctgggaccacaggcatgcacgcctggctaattttttgtaagacagggtctctctatgttgcccaggctgatcttgaactcctggactcaagagatccaccyaccttggcctcccaaagttcttggattacaggcgtgagccactgtgcctgaccctgggttgtttctacctttgactatcatgaataatgctgctatgaac

SEQ ID NO: 376147 - DNA, 201 bp, Homo sapiens
tgaattgctgaagtatgcagttctgggcaaatccaatgttccaaaacccaggtatgagatgaatttaaatggtgggtattgaccagcggtttctttttttyttttttttttttacctctcccaaggctccatcattcaaaccagaggtttcaaactggcttatcgacagtatttttttgctatgcagcatgtcctgaattt

SEQ ID NO: 376148 - DNA, 201 bp, Homo sapiens
ttggcttttttattgttgaattgtaggatttctctgtacattctggatattaatcttttattagctatgtgattgcaactatttctccattctgtgggttrctttttgacactgctgttagtgtcctttgatatacaaaaggttttaatttttatgaagtctaatttgtctatttttaattttgttgcctgcctttgatgt

SEQ ID NO: 376149 - DNA, 201 bp, Homo sapiens
gtgaattgctgaagtatgcagttctgggcaaatccaatgttccaaaacccaggtatgagatgaatttaaatggtgggtattgaccagcggtttcttttttytttttttttttttacctctcccaaggctccatcattcaaaccagaggtttcaaactggcttatcgacagtatttttttgctatgcagcatgtcctgaatt

SEQ ID NO: 376150 - DNA, 201 bp, Homo sapiens
caggaggttgaggctgcagtgaactatgatcgcaccactacactccagcctgggattacaggtgtgagccaccaggctcggccaagtgttcttttttatgygtcttttgcttgagcttgttgagcttttgcaatttgcgggtttatcatttttatcaaattagaaaaaatgttgaccattatttctccccattattttttc

SEQ ID NO: 376151 - DNA, 201 bp, Homo sapiens
cctatacaaaatatatgacagtaaccctttccctgccccaatatttcctatacttttctcctccttttcttcaaagcccttatcttacctgatatattacrtatttatttgtttattatccatatttccaactataagttaaatgtcatgaggaattttgttggttttgtgcattggggaattcctagtggccaaaacagt

SEQ ID NO: 376152 - DNA, 201 bp, Homo sapiens
ccctagtagaatggactctttgagagcatgaattatgctttatttatcctattcctagcatgtaaccaagtatctataattcagttttgtgtcaatgatarttactttattaataatgtcatacctaccacatattgttattttaggccatcattttcaattaattagcacttccttatgttagaatatacctgtatgtta

SEQ ID NO: 376153 - DNA, 201 bp, Homo sapiens
aagcagcaggccaagagcctaaaaacacagcagaagtacttcagcacccaaacacaaggtaatattttcagtttgaaacaagagcaaagacaaatggagtrtctagtttcttatttaacaacacctgagaatgtttttatcctcttttgagtctattaaaaactatttaccaaaaaatgataacatctatcacaaaaacca

SEQ ID NO: 376154 - DNA, 201 bp, Homo sapiens
cacaaaccaagagggatccacaaaggtggagggtcacatgagcagtggactcatcacctcagcggcttaaggcagggtatatctgtgggaccaattcatcyaagccccatgtgcctattgcttcacattccccctttaaaacctagtcatattcattagtgcaacaggtaagagcaattaagcacagacggagctggggac

SEQ ID NO: 376155 - DNA, 201 bp, Homo sapiens
gcatttccccaggctgtggaagcttgctgtgtgactgacttctctgggccttgtttgtgcagttgtgtccgtgatggcagcagatactcttgggaaacgtyggggaaaaaaggaatagcaaaaacaatagaaggtttccttaggctggggtcttgatgcagctcttaatccttacatttttggtagcttcttaaattaata

SEQ ID NO: 376156 - DNA, 201 bp, Homo sapiens
tatgtgagatagtgaacattaccgtggcttggcatttttgttggcttgtacctagcccaggtgaatagattatttacagtaagttttctggtatgttaaamgtagctcatccccactcttaccaactttgaggactctggaaggtttcaaggtgccagattgagagctaatcaactatttcagtttcttcatcatatagat

SEQ ID NO: 376157 - DNA, 201 bp, Homo sapiens
gggaggttgaggcaggaaaatggcgtgaacccgggaggtggagcttgcagcagtgagccgaggtcgcgccactgcactccagcctgggcgacagagcaagrctccatctcaaaaaaaaaaaaaaaaggccatctatgtgagatagtgaacattaccgtggcttggcatttttgttggcttgtacctagcccaggtgaatag

SEQ ID NO: 376158 - DNA, 201 bp, Homo sapiens
ttggacaagcttgcactagagcatctgagcttttgagggctcaagggatgaatacatcacagatgcacttggttttgagggcttcctacatgtcagcctcrcctgtgcttctcattcctccccagatttttggattcctggtttgcatgggggtgatcctggccattggcaatgccatctgggagcacgaggtggggatgc

SEQ ID NO: 376159 - DNA, 201 bp, Homo sapiens
gtgcatcgttggacgcctcccctgggtcaagctccccatttacatcttggtgcagttgctgtctgctttctgtgcttcgggagccacctatgttctctacyatggtgacagagggaacagagggagctgtgccttgagagcacctgtgggtgggcaggggtgcctcagaatggttttggatgaatgagcaaagagggaaat

SEQ ID NO: 376160 - DNA, 201 bp, Homo sapiens
ccttcctgtgccccgactgtctgctgcctgcccgccacatgccagcttgtgaaggctggggctagcctctggtgagcttgtttccgccctggctttaaagrgtgtgcggaaacccagcctggtgggcgaggttgtctatcacataagggctccagtcgccccctggtggccattgggcaccaatctcctattttgtttcaa

SEQ ID NO: 376161 - DNA, 201 bp, Homo sapiens
gctacctgctgtgggaggcagagatggggtggctggaaaggcctcgtgtgaacactggggggctctgtggggccatgtggctgttcagtgtgttggtgctyatctgttcttcctggggacagacaccctgtgcagctggccacagaggcctctgcgtcagcctggtcccaggtgctgtgggtcggaggcctctgtgtcagc

SEQ ID NO: 376162 - DNA, 201 bp, Homo sapiens
ctagaaatctgaactccttgttgggctctcctccccttcctgtgccccgactgtctgctgcctgcccgccacatgccagcttgtgaaggctggggctagcytctggtgagcttgtttccgccctggctttaaagggtgtgcggaaacccagcctggtgggcgaggttgtctatcacataagggctccagtcgccccctggt

SEQ ID NO: 376163 - DNA, 201 bp, Homo sapiens
ctgtaattaaggaacattataatttatgacacatttctatacttgcaaaaattatatcattttatggatataagagaaaaatgcctttttataaaatttcratttctgagaagtgtgtaatttgtctcttttctgatgtttaaccaagactggtggtgaaagtaaagacagaaactgtctcttaaatgtaattgagtgggt

SEQ ID NO: 376164 - DNA, 201 bp, Homo sapiens
tctgtctcaaaaaaaaaaaaaaaaaatggaaccaatagattgaatgtggggtccaaagaagagagagaaatgaatcaagataaaaaacaacaaaaaaacagaaattaaaaaaaaatttttacagaaatgaatcaagatccattgcagggtttttagttggagcaactgaatgggttgtggcatttcctgagttgagaaaga

SEQ ID NO: 376165 - DNA, 201 bp, Homo sapiens
ccagcgagaccaacatgaaagtacgtcaggcgattccagtcacctcagaattgggagacatcagtaagcttgccaagtttgacggtgagtaattttggagsagcagcctgaaggtagaggagtggggttgggttttgtttgggggcgttaaattatacattttcctttgggctttttgttgttattatgcaactccctgga

SEQ ID NO: 376166 - DNA, 201 bp, Homo sapiens
ctctgtctcaaaaaaaaaaaaaaaaaatggaaccaatagattgaatgtggggtccaaagaagagagagaaatgaatcaagataaaaaacaacaaaaaaacagaaattaaaaaaaaatttttacagaaatgaatcaagatccattgcagggtttttagttggagcaactgaatgggttgtggcatttcctgagttgagaaag

SEQ ID NO: 376167 - DNA, 201 bp, Homo sapiens
ccgtgagattccagagatgttttgaaaatggaaacaacaggccgggcgcggtggctcaagcctataatcccagtactttgggaggccgaggtaggcggatyacctgaggttgggagttcaagaccagcctgacccacatggagaaaccccatctctactaaaaatacaaaattagccggacttggtggcacatgcctgtaa

SEQ ID NO: 376168 - DNA, 201 bp, Homo sapiens
agtttttgaagaaagtcaaaagaatgtattctgtattctaaaaatgcattctaagtgttacagctcttttagaatttgtctagcaggttttccagttttcmctggaacccctcccccacaaaaagaaaaaaatgcattctaaaaaaaaactaaagaatgctttaggaagtattgactggcagtagtgtacagcatgaatag

SEQ ID NO: 376169 - DNA, 201 bp, Homo sapiens
gagaatcgcttgaaaccggaaggtggaggtagcagtgagccaagatcacgccactgcactctagcctgggcaacgagcgaaactgtgtctcaaaaaacaaygaaacaaacaaacaaacaaaaaagtttttgaagaaagtcaaaagaatgtattctgtattctaaaaatgcattctaagtgttacagctcttttagaatttg

SEQ ID NO: 376170 - DNA, 201 bp, Homo sapiens
agttggccagggtcttgggccaagagcaagagctggaaacatagcttgctcctgattgtggaggcttttgaatatttgcctgtggactttgtatttactaaccattaaaagttattgaaaagactgggcacggtggctcacacctgtaatcccagcactttgggaagccaaggtgggcggataacgaggtcaggaattcga

SEQ ID NO: 376171 - DNA, 201 bp, Homo sapiens
tgtactgtaaacatttgatgttatctgtttatctttgtgggcagagcaaactttttaccacagtttcctggtacttgggactgtattagagaaaaaaaaaatattgatttattcagcacctatttattacatgcctactgtgtacaaagaagtgtgctaggtgccatcacaaataaaagatgaattaggaatggatctcct

SEQ ID NO: 376172 - DNA, 201 bp, Homo sapiens
gaggctgggggaggggcagggtcagagctggagaagagggtcttcaaaagaggtctcatgaggggagggaagggttatcctcagcttcctgacctcattcrtctgtcacttcttgcagggtctcccatgggattgctgggatcttgctgggtgagatggcagtgtgtgcaaaaaagcgccccccaggtaagacaggcaagg

SEQ ID NO: 376173 - DNA, 201 bp, Homo sapiens
gctctgcggctgaaggaaggagctgagttctcctgcttatctctgctccagtgtcctatcttgaaggactgtgtcctgaccccagtgagaaacatgacctrtctgaccctcccaacccttcctggaaactttccagttctcagtgagttgctgggagctgccctgctggacacccgcctggggagggtgtagacttatctt

SEQ ID NO: 376174 - DNA, 201 bp, Homo sapiens
gaatgggtgaagtgtgccgggtgactcttgatgtgtttatgttgggggtctttgcctgtctgaatttttctggcactttcttcacctgccccattcatagkgcggaatccagaggggaagatccgactctactgcaaaggggctgacactatcctactggacagactgcaccactccactcaagagctgctcaacaccacc

SEQ ID NO: 376175 - DNA, 201 bp, Homo sapiens
gatgccactgatgactatgtgagtggttttcattcttctattttgtcccagtcacccacccctactcccagccccacccccatctcatggccaccttcatycagcacaatttcttggtgaccttgacatcccttacccggtccagctagatccatgatgtctttttgctgagcgtggggagagggaatcagggagtgaact

SEQ ID NO: 376176 - DNA, 201 bp, Homo sapiens
actcctgacctcaggtgatccatccgcctcaacctcccaaaatgctgggattacaggcttgagccactgcgcccagcccataatagttttttttttttttataattatttttcatttaacattcagctgttaccaaaatctcatagtgttttaagaaagtttatgaatctgtgttgggccacatgtggcccagagaccatg

SEQ ID NO: 376177 - DNA, 201 bp, Homo sapiens
aactcctgacctcaggtgatccatccgcctcaacctcccaaaatgctgggattacaggcttgagccactgcgcccagcccataatagttttttttttttttataattatttttcatttaacattcagctgttaccaaaatctcatagtgttttaagaaagtttatgaatctgtgttgggccacatgtggcccagagaccat

SEQ ID NO: 376178 - DNA, 201 bp, Homo sapiens
aattctcatgccttggactcctgagtagctgagactacaggcaagtgccatcaggactggctaattttttaaatgtttttagtagagacggggtttcaccrtgttggccaggctggtctcaaactcctgacctcaggtgatccatccgcctcaacctcccaaaatgctgggattacaggcttgagccactgcgcccagccc

SEQ ID NO: 376179 - DNA, 201 bp, Homo sapiens
gtgcccgccaccacacccggctaatttttttgtatttttagtagagatgagagatggggtttcaccatgttggccagactggtctcgaactcctgacctcrtgatctgcccgccttggcctcccaaagtgctgggattataggtgtgagtcactgcacctggccttttttttttttttttgagacaggttcttgctctgtt

SEQ ID NO: 376180 - DNA, 201 bp, Homo sapiens
ttttttctttttttttgagatggagtttcactctgttgcccaggctggagagcagtggtgtgatgtctgttcactgcaacctctgcccctgggttcacgcrattctcctgcctcagcatcccgaatagctgattttacaggcacctgctaccacgcctggctaatatttgtgtttttagtggaaacggggtttcaccatgt

SEQ ID NO: 376181 - DNA, 201 bp, Homo sapiens
cctgggccacattggaagaagaattgtcttgggccacacataaaatacactaacattaacaatagctgataagcttagaaaaaaaaaaattgcaaaaaaaatctcataaatttttttttttttttttgagacggagtctcactctgtcactaggctggagtgtagtgcaatggcattatctcggctcactgcaacctctgc

SEQ ID NO: 376182 - DNA, 201 bp, Homo sapiens
atctctccatcctgcttcctcacactaatgcttggctcacctagacagaaatcaatggcagggcacgaagggcagctgctatcctcttgtatcccccaccygaagtcctctgggggctcatctccactcaggacctctcctgtttgtaccccagatacacactgcatcggtgtgcttgggtggagccttgagacatagtgt

SEQ ID NO: 376183 - DNA, 201 bp, Homo sapiens; identical to SEQ ID NO: 81136

SEQ ID NO: 376184 - DNA, 201 bp, Homo sapiens
ctgcaagatgctgacggatgacatgactgaggttttcatagtcactggccatactgtcctggaggtgcgggaggagctcaggtaaacaagaagcccagggraggcggtgctgtgcgttgtgcccagggctcaggtgggggtttctggaccatttagacttgaatccctgctccccactgccgttctggaagaccacaaccg

SEQ ID NO: 376185 - DNA, 201 bp, Homo sapiens
gggaagggttatcctcagcttcctgacctcattcgtctgtcacttcttgcagggtctcccatgggattgctgggatcttgctgggtgagatggcagtgtgygcaaaaaagcgccccccaggtaagacaggcaaggaggggagatcccgggaaccatcaagagtgggtgttgttatggctcagggagcaaaaggaaaaggga

SEQ ID NO: 376186 - DNA, 201 bp, Homo sapiens
agattccccaaatagccctcaactctctcccagcccccaatcttactgctggtgataataaatagaagatacagcatttctgtgctgagagaatatagttwaggcttttccagggtgtgaagaggagagttgggaggttctgggtttagtcctgcctcctcactggccatgtgacctcaggaaaatccacggtcactcagg

SEQ ID NO: 376187 - DNA, 201 bp, Homo sapiens
gcatcgttggacgcctcccctgggtcaagctccccatttacatcttggtgcagttgctgtctgctttctgtgcttcgggagccacctatgttctctaccayggtgacagagggaacagagggagctgtgccttgagagcacctgtgggtgggcaggggtgcctcagaatggttttggatgaatgagcaaagagggaaatcc

SEQ ID NO: 376188 - DNA, 201 bp, Homo sapiens
ctcctgacctcaggtgatccactcacctcggcctcccaaagtgctgggattacaggtgtgagccaccgtgcccagctagcacagagaaatctgaataaagrgaaagggagcctgccatgtggctctctgggaactgtcaatccaggaagaggaaacagcaatataaaggccttcagccctggcctgggaggaggtcttctg

SEQ ID NO: 376189 - DNA, 201 bp, Homo sapiens
ggaaccagtgctgtagaattcgacctagagtcttctatgtgaagcttggggatacagagatgtataaggtggcctctgcctttagcagcagcagatggatmggtcgaggaggggagatctggacagtgtcagactgagataccatgtgggaggcacagggtgcccggggactgggagagtgtcgctccctaagcaggtagg

SEQ ID NO: 376190 - DNA, 201 bp, Homo sapiens
gccctgccatgggtttgtaccctcaaatgcctatgagttgggtaaattcttttcttttttcccacattctttccctttcttcttcctccactttccccatytcttttcccttccctccttctgcttttctccttcccttgcttgtcttctgtgctcattcatctccttggctgctcccctggccttcccaacctttctccc

SEQ ID NO: 376191 - DNA, 201 bp, Homo sapiens; identical to SEQ ID NO: 81143

SEQ ID NO: 376192 - DNA, 201 bp, Homo sapiens
  misc_feature (1)...(201): n = A,T,C or G
ccgattcctcaggctcaacctgaagccggatctctccgacacggtgagaagccaggctacctgctgtgggaggcagagatggggtggctggaaaggcctcntgtgaacactggggggctctgtggggccatgtggctgttcagtgtgttggtgcttatctgttcttcctggggacagacaccctgtgcagctggccacaga

SEQ ID NO: 376193 - DNA, 201 bp, Homo sapiens
gtgcccagctagcacagagaaatctgaataaagggaaagggagcctgccatgtggctctctgggaactgtcaatccaggaagaggaaacagcaatataaakgccttcagccctggcctgggaggaggtcttctgcacgtggagctggggaggagtggaggaaatgagttggagggtgggggtgtggaatgagtcaggatta

SEQ ID NO: 376194 - DNA, 201 bp, Homo sapiens
tctctggcttcctctccttctggtcctacatcatcatcctcaacaccgttgtgcccatttcactctatgtcaggtatgtgccttctctgacctggggtctstccagggagtcaggcggtcccatagaacttttcttttctatgaagatgaagtccttgagaagtaacgagaagtcctcttcttcctgtactgtaaacattt

SEQ ID NO: 376195 - DNA, 201 bp, Homo sapiens
gcctcgtgactcccaaggccactgactcctcttcatccccagggaatgcccagaacaccttggcccagcccacggtgtggctgaccattgtgctcaccacrgtcgtctgcatcatgcccgtggttgccttccgattcctcaggctcaacctgaagccggatctctccgacacggtgagaagccaggctacctgctgtggga

SEQ ID NO: 376196 - DNA, 201 bp, Homo sapiens
cccaggtttctgtgcccaggtgtcttctccgttcttgtctctccccaggcggagggcctgcagcgaaggcccatgtgggtggggcacctcctcttcttccygacccaagcctcacctcttgtcccctgtgcagtgtggaggtcatccgtctgggccacagctacttcatcaactgggataagaagatgttctgcatgaaga

SEQ ID NO: 376197 - DNA, 201 bp, Homo sapiens
aggctgcggctcctgcagtcggggagcgggcgggggcggaaccctgggcgtgctcggcgtgtccggggccactcagcgcacgctggcatccgccggggggmatggggggcggcggcggcggcgcagctgagctcgcggtgtccccgagcgccggcggccgggaggatggcctgggctgcgggtggggcgcgcgcccgacgg

SEQ ID NO: 376198 - DNA, 201 bp, Homo sapiens
  misc_feature (1)...(201): n = A,T,C or G
gctcaacctgaagccggatctctccgacacggtgagaagccaggctacctgctgtgggaggcagagatggggtggctggaaaggcctcgtgtgaacactgnggggctctgtggggccatgtggctgttcagtgtgttggtgcttatctgttcttcctggggacagacaccctgtgcagctggccacagaggcctctgcgtc

SEQ ID NO: 376199 - DNA, 201 bp, Homo sapiens; identical to SEQ ID NO: 81144

SEQ ID NO: 376200 - DNA, 201 bp, Homo sapiens; identical to SEQ ID NO: 81145

SEQ ID NO: 376201 - DNA, 201 bp, Homo sapiens
gtaaacaagaagcccaggggaggcggtgctgtgcgttgtgcccagggctcaggtgggggtttctggaccatttagacttgaatccctgctccccactgccrttctggaagaccacaaccgtatcatttccacctcgacaggaaagcccgggagaagatgatggactcatcccgctccgtaggcaacggcttcacctatcag

SEQ ID NO: 376202 - DNA, 201 bp, Homo sapiens
ctctcctcctctttccccctcccacacctgtgtttgctagcttttggggtagaggtctggggaagtataaagatgggggaggcagcctcagtctggttctsggttgggactggagactgctcattatcttctctcctactgccatagagtaactgcatcaagacctccaagtacaatattctcaccttcctgcctgtcaac

SEQ ID NO: 376203 - DNA, 201 bp, Homo sapiens
atccaggaactcccctcttctctggaaggagtgagccttctgtccctggggctgccctgggcaccacagttctgtttctgggggaaggggcttttagggcrtgcgcctgcctgactatgcctactttctgcagattgggctcgacacaggctactggacggccatcaaccacttcttcatctggggaagccttgctgttta

SEQ ID NO: 376204 - DNA, 201 bp, Homo sapiens
aagctttcttcttccaagctaacttctgtcctggaggccgttgctggggagtacgccctggtcataaatggtcacagcctggtaggcatcgctatccttarcttgggcagtatctttccagtgagcacttctgtccagggcttttatatcttgttctaatttcccctgatttcagagaagactggtctcaaaggggactgg

SEQ ID NO: 376205 - DNA, 201 bp, Homo sapiens
cagcactttgggaagccaaggtgggcggataacgaggtcaggaattcgagaccagcctggccaacatgttgaaaccccgtctctactaaaaatacaaaaaytagccaggtgtggtggtggttgcctgtaatcccagctacttgggaggctaaggtaggagaatcgcttgaaaccggaaggtggaggtagcagtgagccaag

SEQ ID NO: 376206 - DNA, 201 bp, Homo sapiens
gtcctctcctgatgccctgaccctggtctcagctccaggaattaggggagctccttggctgtttgaagtgagacactggcctctgggcatcctggccaggyggaaccctgctagactctcccctgttgctgctcagggtccttgtgagtctgtggaatgtggctgtggttggacttcccagtgtggcccgtggctgtgctg

SEQ ID NO: 376207 - DNA, 201 bp, Homo sapiens
tgggcgtggtggcaggtgcctgttttcccagctactcggggggctgaggcaggagaattgcttgaatccaggaggtggaggttacagtgagccgagtttgygccattgtactccagcctgggcgacaagagtgaaagtctatcaaaaaaaaaaaaaaattagattctgagagtcctccccttgtcctctcctgatgccctg

SEQ ID NO: 376208 - DNA, 201 bp, Homo sapiens
gaaagggtccatcctggccaggcacggtggctcatgcctatagtcatagcactttgggaggctgaggtgggaggattgctcgagcccaggaatgcgagacmagcctgggcaacatagtgagaccacatccctacaaaaaatttaaaaattagccaggtatggtggcatgcacctgtggtctcagctggccagtgactcagg

SEQ ID NO: 376209 - DNA, 201 bp, Homo sapiens
tgcctgtcaacctctttgagcagttccaggaagttgccaacacttacttcctgttcctcctcattctgcaggtaggtgacccatagtagattttttgcagytccccaaactgaataaagccaaggaagaggaaagggaatgaaggcatcagatggggcctcagaggcatacttctctttctttttttcagttgatccccca

SEQ ID NO: 376210 - DNA, 201 bp, Homo sapiens
agtggaactggggccccacagtttccttaacattggttttttcttccttcctagttgggtctgaggggcctagaagaaagggtccatcctggccaggcacrgtggctcatgcctatagtcatagcactttgggaggctgaggtgggaggattgctcgagcccaggaatgcgagaccagcctgggcaacatagtgagaccac

SEQ ID NO: 376211 - DNA, 201 bp, Homo sapiens
ctggagggaagaatttgatgaccccctcagttgtggagctaactccttaaaatgatattctgtggaaaaaaacagggaaccccccagcaaagtgttggtcyagacctcagtttgctcctcctgactgcagcatcattttgttgcagaagaagaaaggagggcgcgggctaatgaccgagaatacaatgagaaattccagta

SEQ ID NO: 376212 - DNA, 201 bp, Homo sapiens
cggggcgttcctctgctggctgtgtgcagccggctccaccttcaggctctccttgccctttcccacccaggtttctgtgcccaggtgtcttctccgttctygtctctccccaggcggagggcctgcagcgaaggcccatgtgggtggggcacctcctcttcttcccgacccaagcctcacctcttgtcccctgtgcagtgt

SEQ ID NO: 376213 - DNA, 201 bp, Homo sapiens
agaggttctgtcttgtttatcactcagtcccccagggcctagctattttctggtacatactcttaaaaaatgcttattaaaggaggagagaaggagcctcrgaaaatttcttagggttctctgtatgtgacatcagctgtcttcctgtgcctgatgtgtagcaaagaaaggttgcatgctcccttgctccctgttctcttc

SEQ ID NO: 376214 - DNA, 201 bp, Homo sapiens
aacgaattccttcgaggcgggggaaggtgtcttacctttcagttttcttcttttcagttccgccacaagagcgataaccaggtgaataaccgccagtctcrggtgctgatcaatggaatgtgagtgcctgttggagacaagagctctggggacgaagggggtcccttaggaacctctttagctcctgacagcctcttcact

SEQ ID NO: 376215 - DNA, 201 bp, Homo sapiens
aagggacaactggtatgggtctgagggagggtagcttacagcagcccctacccagcttgggggcagcctaggaaaccgaattcttccgcttgatcccaaarctgggttatctgccaggacagcgcagagcaccagccccacgccccgaaacacctgcagtcttatcttcgggcacctgcagctcctgctttctggcctagg

SEQ ID NO: 376216 - DNA, 201 bp, Homo sapiens
cgctccctaagcaggtaggcagagagggagagatggcatttgctctgggctttgagtggtgactgggctggatgaaggtggagccacaatggagaggaggmtgagagggctggaagcaaaggtgtggagatgggagcctgggaatggcctatggaaatagttggccagggtcttgggccaagagcaagagctggaaacata

SEQ ID NO: 376217 - DNA, 201 bp, Homo sapiens
ttcctcatgggccactcttcatttcactcgcagccccgcagtgcacagctacaagctgggggttcatctcttcctggtcccctactaccttgggtgcagcwcttctgccagaaccttctgggcgcctgctgctgtgcctgggctccccacgcagggagggacacccctggggcggaaggcaggcagctgcatagctgagtg

SEQ ID NO: 376218 - DNA, 201 bp, Homo sapiens
tgcaatggcattatctcggctcactgcaacctctgcctctcgggttcacgtgattctcctgcctcagcctccctagtagctgggattacaggtgcccgccrccacacccggctaatttttttgtatttttagtagagatgagagatggggtttcaccatgttggccagactggtctcgaactcctgacctcatgatctgcc

SEQ ID NO: 376219 - DNA, 201 bp, Homo sapiens
gttggcttgtacctagcccaggtgaatagattatttacagtaagttttctggtatgttaaaagtagctcatccccactcttaccaactttgaggactctgraaggtttcaaggtgccagattgagagctaatcaactatttcagtttcttcatcatatagatgaaataatggtcagacagaaggccacatgataattggtg

SEQ ID NO: 376220 - DNA, 201 bp, Homo sapiens
gggaaggcagttctttcagccggggaaggtgtggctggttctccctcctggctgcagctgatctagaactctcttgggttgctgaactaagttagtctggrggtagctggcttgaggttggttctagctgccaaagactttggaaaggaggaggcagggacagagtcagagtctgcccttggtcatccagggtcaaaacgg

SEQ ID NO: 376221 - DNA, 201 bp, Homo sapiens
acttacccaggtgtgcctttccactctgcctccaggagtacgcaggggaagggctgaggaccctggtgctggcctacaaggatctggatgaagagtactaygaggagtgggctgagcgacgcctccaggccagcctggcccaggacagccgggaggacaggctggctagcatctatgaggaggttgagaacaacatgatgg

SEQ ID NO: 376222 - DNA, 201 bp, Homo sapiens
tagttttcccacgtgaaacaggaacaggagtacttgtctcaccttttaataggatgtcttgatataagatattggcttagaagatacattttaaacttaartgactgtacagttactgggtggtagcctgctcattgtgactgttgccactcccttctgcattactatttaaatgcctttgtgcttacaacctaattttgt

SEQ ID NO: 376223 - DNA, 201 bp, Homo sapiens
  misc_feature (1)...(201): n = A,T,C or G
gggcttttatatcttgttctaatttcccctgatttcagagaagactggtctcaaaggggactgggaggagctgagactcccaggtgtctcctggaaagacnggctctctcaggtttctctgtgctccaggcccacgcactggaggcagacatggagctggagtttctggagacagcgtgtgcctgcaaagctgtcatctgc

SEQ ID NO: 376224 - DNA, 201 bp, Homo sapiens
cttgaatccctgctccccactgccgttctggaagaccacaaccgtatcatttccacctcgacaggaaagcccgggagaagatgatggactcatcccgctcygtaggcaacggcttcacctatcaggacaagctttcttcttccaagctaacttctgtcctggaggccgttgctggggagtacgccctggtcataaatggtc

SEQ ID NO: 376225 - DNA, 201 bp, Homo sapiens
ggagcgggtgtagactggggagcaccgggggccaagatttgggagctgcggccagacggggcggggatggcggccgactggagacgaggggctgtcgggtkcccggggacggggcagagcgggggtctgcgtacaggatgggaggatggggtgccgaaggggcgcgtggagagcaggagagcggcgcgagtgccaaggaga

SEQ ID NO: 376226 - DNA, 201 bp, Homo sapiens
agccagatgacatggaatatttggatgagagagggcagatggagcacctggcagctgacagggaaccctctgcctctgttgactccaaggttctgggcacygggatgctgattgtggggctcttggccatcctggacagacggaacaagggagtccctgcgggtctggagcctgtggtggtggggatgctgatcctggccc

SEQ ID NO: 376227 - DNA, 201 bp, Homo sapiens
tcgcgatatagacacacgcctccacggaggctccgggcactcgggctccccgttttctcccctctgccgcaggcatccctggtcttccttccctgcgctgmctgagcacctgggctcctgtgggagtggcttccagcccctaggtccccatcgtcctagtgccttttctgagtgcgtggaggtgaagtctgtccgataccg

SEQ ID NO: 376228 - DNA, 201 bp, Homo sapiens
gccactcttcatttcactcgcagccccgcagtgcacagctacaagctgggggttcatctcttcctggtcccctactaccttgggtgcagcacttctgccaraaccttctgggcgcctgctgctgtgcctgggctccccacgcagggagggacacccctggggcggaaggcaggcagctgcatagctgagtggctgcttcta

SEQ ID NO: 376229 - DNA, 201 bp, Homo sapiens
gaggcgggggaaggtgtcttacctttcagttttcttcttttcagttccgccacaagagcgataaccaggtgaataaccgccagtctcaggtgctgatcaayggaatgtgagtgcctgttggagacaagagctctggggacgaagggggtcccttaggaacctctttagctcctgacagcctcttcactgtcttctcgttgc

SEQ ID NO: 376230 - DNA, 201 bp, Homo sapiens
gaattgtgaagattaaatgaaatgactttcataaaacgcttagcaacagtagattgtagctagatgctagtgttggcctccaccctaggcaggctttactrtgtgtcacatgggcccttcatctgcagtgtggccttgtagtttgtggggggaatagtagggttctaagtgtccttagctcattcagaagccacatgccag

SEQ ID NO: 376231 - DNA, 201 bp, Homo sapiens
tagtgtggatggagccctgaagtgaatttgaagaggtaaagggttggcttaatgtctaagcttggatgggaaagcttaacttaatatagtaaacaacaaaygaattactcaaggaaagcagcgtttagccttttatctacatctgcagatggactgattgaattcacttcattcattaaaaatcactgttggcataaaaac

SEQ ID NO: 376232 - DNA, 201 bp, Homo sapiens
tttaaggaattcttgctctaatagtttatttcattttgctctatttttgttttgttaaccttttttattctagtaacaagcattttagaagtttttagaakacgcgggttagttctttgtgaactaattagaaagatgggaacaagtaaagtgaccctgatgagtcttaggaaatatatgagttaaggcaagtctatcaag

SEQ ID NO: 376233 - DNA, 201 bp, Homo sapiens
ttagggtaaacttaaaaattggaattgctgtgaaagtgtatttactacccccccaactttttaatttgaaaaatatggagaagttgaaagaataatagaayagcatgataaatacccatataccctttatctagtttagcagttgaaaaaattttgcaacatttattttttctcactttgcttataaaaaatttctttctg

SEQ ID NO: 376234 - DNA, 201 bp, Homo sapiens
ctcaggacactagtcctgttggattagggtcctacccttgtgacctcatttaatcttaactatctctttaaaggccttatctccaaatatagtcacatggrgggttagggcttaaacatgaatttggggtaggcagtagggagggaatgacacagttcaatctgtaatatctacctgtaaaattcagagcatattacaaac

SEQ ID NO: 376235 - DNA, 201 bp, Homo sapiens
ggtgccccggggggacttccctgaggggcgaagttccccttaaggttttctccatatctggctctccttccgaactagcgccctgactgacacctacctaycccggggactttggatcccgcagggatctcctgctgctgcgccagcgggtgggggtttgtgagctgtgggagagacgaaaatgaacgtccgttcgcaatc

SEQ ID NO: 376236 - DNA, 201 bp, Homo sapiens
tggtctgatctagcttctgtaatatggatataatttgcatgttaaatgtgaattttggaagtattgaatcctcacagactttttaggaataaaacaatacrtaacaggttgttacaggcattaaataagttaatttctataatgtacttagaacggtgctctgtactagtgtttgttgtgagattggtgatctggtgatct

SEQ ID NO: 376237 - DNA, 201 bp, Homo sapiens
tttgaacattggcattcagtttacattttctgaaaatgctgtgtggaccaaggaaactatatccgtaggtcttgggcagccctgggccccacaggccatcrtgctatctgtctcttttattagtttatctatgtagaatgtattctgaaacatcttggcattccctcaaattataatggaccaactttttttttccattta

SEQ ID NO: 376238 - DNA, 201 bp, Homo sapiens
acatatacagtcatatgttgcttaatgacggggatgagttctgagaaatgcatctttaggcaatgttgttgttgtgtgaatgtcatagtacttacacagayctagatgttacagcctactatatgtgtaggctatacagtgtagcctattgcccctagactacaaacatggacagcatgttactgtactgaatactgtagg

SEQ ID NO: 376239 - DNA, 201 bp, Homo sapiens
ttgcctttagaatattcaggtaggatgtttagtggatgttgtaaaagagcatctagagcttagaaaacaggaggaaaggttgagatttagaagtcatgagktttctaaaagctaaagccctgagtgtcaggagatgtgggttttaatgtagagtctgtcattatattgtcctggggtagtagtcacttctctggcattggc

SEQ ID NO: 376240 - DNA, 201 bp, Homo sapiens
gaaaagattttgtaaacatcagttttagtgactacacggtaaggatgtgtcatgatttatttgaccgttcatcaaatgttgggccttttttttttttttttgagacgtagtctcgctctgtggcccaggctggagtgcagtggcgcgatctcggctcaccgcaagctccgcctcccgggttcacgccattctcctgcctca

SEQ ID NO: 376241 - DNA, 201 bp, Homo sapiens
agaatggctattaaaaagtcaaaaaataacagatgctggcaagtttgtggagaaaaaggaacacttatacactgtcggtgggagtgtaaattagttcagcyattgtggaagatagtgtggtgattcctcaaagacctaaagacagaaataccatttgacccagcagtcctattactgggtatatattcaaaggaatataaa

SEQ ID NO: 376242 - DNA, 201 bp, Homo sapiens
tgaaaccccatctctactaaaaatacaaaaattagctgggcatagtggtgtgcgcctgtagtcccagctactgtaggctgaggcaggagaatcgcttgaayctgggaggcagaggttgtagtaagccaagattacaccactgcactccagcctgggcgaagcgagactctatctcaaaaaaataaaataaaattgttcttt

SEQ ID NO: 376243 - DNA, 201 bp, Homo sapiens; identical to SEQ ID NO: 81166

SEQ ID NO: 376244 - DNA, 201 bp, Homo sapiens; identical to SEQ ID NO: 81161

SEQ ID NO: 376245 - DNA, 201 bp, Homo sapiens
ggtgaccccctacccgcgaggtatctcccagccgtggtgccccggggggacttccctgaggggcgaagttccccttaaggttttctccatatctggctctycttccgaactagcgccctgactgacacctacctatcccggggactttggatcccgcagggatctcctgctgctgcgccagcgggtgggggtttgtgagct

SEQ ID NO: 376246 - DNA, 201 bp, Homo sapiens
gcactccatcctggatgatagagcaagactctgtctcaaaaaaaaaaaaaaagctaaaattagctgggcatggtggctcatgcctgtaattccagctactygggaggctgaggcaggagaattgctggaaaccgggaggcagaggttgcaccacttcgctccagcctgggtgacagagtaagactctgtctccaaaaaaaa

SEQ ID NO: 376247 - DNA, 201 bp, Homo sapiens
aaaaaaaaaaagctaaaattagctgggcatggtggctcatgcctgtaattccagctactcgggaggctgaggcaggagaattgctggaaaccgggaggcaraggttgcaccacttcgctccagcctgggtgacagagtaagactctgtctccaaaaaaaaaaaaaaaaaaaaagtttatttctttttttatactagtaata

SEQ ID NO: 376248 - DNA, 201 bp, Homo sapiens
agctggccagtatccaaaggcaggcttgtagaaaacttttcttctctggcactttgtctcaactcttcccattttcccagaagtttatcatttggaaaaawtcaaaatgcaagcagatttcctcgaaagtgttctctggagcatcgtttataataagggatactaaaaacctaatgttaatctaataaataaagctattaa

SEQ ID NO: 376249 - DNA, 201 bp, Homo sapiens; identical to SEQ ID NO: 81165

SEQ ID NO: 376250 - DNA, 201 bp, Homo sapiens
  misc_feature (1)...(201): n = A,T,C or G
cttgatacagagatcgaagaggatataaaataagataaaaaataaaaaatggaaaatttgatagcttaagccactaaattgcccttaaggtggagtgcaantcagtaacatttcattttgcagcatgtataaaataatttctgttttaaggctgtctttaactgttgctcttcatttctctgcaggtcttttagataaccc

SEQ ID NO: 376251 - DNA, 201 bp, Homo sapiens
cagctctgtgtaaaccagtgtttttttttttttgttccctactgagagccagcttgcaccttggtctaccaagagttgctgctcagtacatagctgcttcrttatttgtgttgattgcattatttattaacacaaatagccatttagtttttttaatagaaaaaataattaagattttgcataatgtttgtaaaaaatgga

SEQ ID NO: 376252 - DNA, 201 bp, Homo sapiens
gctccagtttctgcttctgtggtcacactgccttttcttctctgtctctcctttgtacatctttcattatgaggacactgtcattggatttagagcccacstggatagaccagatgatttaatcttaagatccttactaacatagcgagaccccatctctaccaaaaaaaaaaaaaattttttttaaagatcctttttcca

SEQ ID NO: 376253 - DNA, 201 bp, Homo sapiens
agaatgagggaggtgacagcgatgtcatgcgggtatgtggctagcgcagctgtatagtaccattgactaaggtgaagaagatttgaaggtgcgggttggargatcagattatcagttctgttttggacatgtttggaatttgagatggagatattgattatagacagttggatatgttggcctggagctctagagaatggt

SEQ ID NO: 376254 - DNA, 201 bp, Homo sapiens
gacatggaatcaacctgaatgcccatcagtgataaactggataaagaaaatgtagtacatatgcagccataaaaaagaatgagatcacgtcctttgcaggsacatggatggagctggaggccattatcattagcaaactaacacagaaacagaaaaccaaatactgcatgttctcatttataagtgggagctaaatgatga

SEQ ID NO: 376255 - DNA, 201 bp, Homo sapiens
ctggtaaccaccttaggtttgtcaaggtggaagtcatgtggtcaaatcaaatggaaacacaagtgtgttaggtattagattcattttcctgtccccaaagyacccgtttggtaatgctggcagaagacatacatgcggccaacaatcataggaaaaaaagctccacatcactgatcattagagaaatgcaaatcaaaacca

SEQ ID NO: 376256 - DNA, 201 bp, Homo sapiens
taacttgattatagttgccaatcctacatggcaggtcagtttatcctgttacctaaggttacattttgtaaccagcttatcatcttgaaaggttcaccagkaggttacactgtttaaagtgccttataaatacttttctggaattgtttttaatggttgtggtaagctcctgctaatgtatcaacttttggaaaattctag

SEQ ID NO: 376257 - DNA, 201 bp, Homo sapiens
ctctagactcagagcagtgcctggcagctctacagtgcctggcagctctacctgtctgtaccacagacaggagagcttgagaaagcagacctagcactgcygagcgttggcaagatggacttcagcttgagagccagagcctctttgctcctttgagaatgcttgaggtggttagttatatagcaaacagttgactcacac

SEQ ID NO: 376258 - DNA, 201 bp, Homo sapiens; identical to SEQ ID NO: 47034

SEQ ID NO: 376259 - DNA, 201 bp, Homo sapiens
ggaattgtttttaatggttgtggtaagctcctgctaatgtatcaacttttggaaaattctagaataaaatctgtagtcagattctatggcgggtggcccaraacattgggtccttgatgatcctttacctatgaattggggggaacccagaacctttcaggaaaacttggcattgctccttattcttccctcatattttag

SEQ ID NO: 376260 - DNA, 201 bp, Homo sapiens
ggtggcacgcacctgtagtcccagctacttaggaggctgaggtgggaggattgcttgagcccaagaggcggaggttgccgtgagctgaagtcacgccactytactgcagcctgggtgacagagtgagaccctgtctcaaaaataaataaataaataaaaatttattcagcatgttaaaggtgacataactggatgtagatt

SEQ ID NO: 376261 - DNA, 201 bp, Homo sapiens; identical to SEQ ID NO: 240305

SEQ ID NO: 376262 - DNA, 201 bp, Homo sapiens
taagcaaaagcacctttaagcaccacagagttaaccactcttatgatgttaacctctatttatatatgtatgtaaatataaaaaaccagaatacaattttytgtagacttgtaacctactgtgttagtctactagggctaccataacaaaataccacagactgggtgacttaaacaacggaagcttattttctcacagttt

SEQ ID NO: 376263 - DNA, 201 bp, Homo sapiens; identical to SEQ ID NO: 240307

SEQ ID NO: 376264 - DNA, 201 bp, Homo sapiens
tcactgaaagatttttgatctgaatttgagtcttatacagtgaggtaaaaagaattttacatgtttacaaatgaatattatttgttcagttgctctagctktggtttctaaagggcttaacattttttttaaaaaaggagtttatttctttttggcctggcgtggtggctgacacctgtaatcccagcactttaggaggcc

SEQ ID NO: 376265 - DNA, 201 bp, Homo sapiens
tttacaatagagatacacaaagcagtaagtaaatgttagctgtcatttatgtattgtttttgagatggagtttcactcttgtcaccaaggttggagtgcartggcgtgatctctactcactgcgacttctgcctcctggattcaagcaattctcctgcctcagcctcccaagtagctgggatcacaggcgcccgccaccac

SEQ ID NO: 376266 - DNA, 201 bp, Homo sapiens
cacatacagttctttacatggctgattcagaaactttcattagtctggaagagtgtcgtggccataagagaggtaaatatcaaaagaaaagcttttgcttytgtttttttatcatgtgccttccgttcggagttcaatattatacttgtcctgagagttaactgactttctgaggctctgggactgccacctgtagtatgc

SEQ ID NO: 376267 - DNA, 201 bp, Homo sapiens
cttaaggagattttgggctgagatgactgggttttctaaatatacaatcatgtcatctgcaaacagagacaatttgaattcctctcttcctatttgaataygctttattctttctcttgcttgattggcctggccagaacctccaatactatgttgaataggaatggtgagagagggcatctttgtcttgtgccagttttc

SEQ ID NO: 376268 - DNA, 201 bp, Homo sapiens
tagtggtgcaaaagatcagatttataatttaaaagccaggaccaaaacaggtaaagtgtttgttttaatcaatgcttttagacctttatttagagcattckcgtgttaaatgacttaaatatttccagtatttgcttttttactttttcattctcagatttgactttaaatggatgatatttatcattttgctactgtatt

SEQ ID NO: 376269 - DNA, 201 bp, Homo sapiens
gtagttttttctcactctgtgaagaaagtcagtggtagcttgatggggatagcattgaatctctaaattactttgggcaatatgggcattttcacgatatygattcttcctatccttgagcatggaatgtttttccatttgtttgtgtcctctcttatttccttgagcagtggtatgtagtactccttgaagaggtccttc

SEQ ID NO: 376270 - DNA, 201 bp, Homo sapiens
tatgactagccagttttctgaacaccatttattaaatagtgaatcatattcccattgcttgtttttgtcagagttgtcaaagatcagatcgttgtagatgkgtggtgttatttctgagccctctgttctgttccattggtctgtatatctgttttggtaccagtaccatgctgttttggttactgtagccttgtagtatag

SEQ ID NO: 376271 - DNA, 201 bp, Homo sapiens
aaagtaaatgagaagtagattgactcagaatgccaacattgacctgaaagaaggtagggtaccagcagtttggatggggtgatactttttttttttttttwaatttctgcgatacatgtgcagaacatgcaggtttgttacataggtatacacgtgccatggtggtttgctgcacccatcaacccgtcatctacattaggt

SEQ ID NO: 376272 - DNA, 201 bp, Homo sapiens
tagtggatgttcactatattatgctttattacttttatcaatgttgtattttcttttgtaaggatatttcattttttaaaaaaaccaggcaaatataaacmaaaacaaagcatgagtttttaccatcaaattaagctgaactctagactcaaagcaataaacaagacaaaaaaataacataatcatattttctagtggact

SEQ ID NO: 376273 - DNA, 201 bp, Homo sapiens
agcctcctgagtagttgggactacaggcgcacgcagccatacccggttactttttgtatttttagtagagatggggtttcaccatgttggacaggctggtytcaccctggcctcaggcaatccacccaccgtggcctcccaaagtgctgatattacaggcgtgagccactgtgccttgcccgtaaatctctttttctgtct

SEQ ID NO: 376274 - DNA, 201 bp, Homo sapiens
tgcatcctagagtggtgacatggggacagactgttgcagatcagtatctataagaataatgtaagtcatcctagttatagtctctcttctggttatctctrtgagctagatctgggaaaatagctaaagttgaggtccctggactgccagggaggaggaagagaggaaggccaagtacgttgaatcccaggcaggatatca

SEQ ID NO: 376275 - DNA, 201 bp, Homo sapiens
ggattgcagtggcccgatcttggctcagtgcaacctccaccttcctagttcaagtgattgtcctgcctcagcctcctgagtagttgggactacaggcgcaygcagccatacccggttactttttgtatttttagtagagatggggtttcaccatgttggacaggctggtttcaccctggcctcaggcaatccacccaccgt

SEQ ID NO: 376276 - DNA, 201 bp, Homo sapiens
ctgtcattggatttagagcccacctggatagaccagatgatttaatcttaagatccttactaacatagcgagaccccatctctaccaaaaaaaaaaaaaawtttttttaaagatcctttttccaaataagcttacatgcataggttccagaggtttgatgtggatatacctttggcatgggcagggggcactgttcaccac

SEQ ID NO: 376277 - DNA, 201 bp, Homo sapiens
ggagtgtggtatttagaaatcaaggtctagactctctaagtgtactccttgccattgagggatttgctgctccaaagcccagtcattagagccaaggaatrtaagtatgtatatacatgcatgtgtatgtatatacattagtatatacatatacacacatttacaattatatttctatatatatgtggaggctcatgagtt

SEQ ID NO: 376278 - DNA, 201 bp, Homo sapiens
gttgatgcaaatagtagttatactgcaatatcagctgaacagaaaggtacaatagcaagtctaaaattcagctgttactgctaaatttgacatcactgggrcaaaagcaatatatgaacagaggggaaaggcagactagtggtgcaaaagatcagatttataatttaaaagccaggaccaaaacaggtaaagtgtttgttt

SEQ ID NO: 376279 - DNA, 201 bp, Homo sapiens
aaccagggagatggagtttgcttgagctgagattgcaccacttcactccagcctgggtgataaagagtgagactgtgtctcaaaaaaaaaaaatttttttraagtccaccaaaagctttataaaacagcttgccatttgtaacttctttgaacagtggaatgtggtgtcagctgtcttaactgtgctttgagaacatttca

SEQ ID NO: 376280 - DNA, 201 bp, Homo sapiens
cccgtcagtgaatcaggaggattttgcttctatacttaaaaattttaatgtttcatgagatattgccacttttctaaattttccaggaaccctctggataytgatgcctcgggtgtggttggactgtcatttagtggacaccgaatccagagtgccactgtgctcctcaacgaggacgtcagtgatgagaagactgctgag

SEQ ID NO: 376281 - DNA, 201 bp, Homo sapiens
ttgaaaacaacccagatatatataccaaagaatccatatataatgtattttattgtattacaattagatattatattataatgaaaggaagtacactaaawatacacatcagctaggtaaaatcaaactatatgttgtctagagattcatacctaagtttgaaacctataaagtagagaagataataatttgaaattagca

SEQ ID NO: 376282 - DNA, 201 bp, Homo sapiens
tgaacatctactttgtgtcatagtgctggagattgggatagaaacatgtacaaaagtcactttgccctcatacaggtaaatctaagaaagtagggactatragaaccctatgtatctatatccaccatagtattctagcactgactacagggcctaggaaaagggtaggcattcacatagggagtatttgctggataaaag

SEQ ID NO: 376283 - DNA, 201 bp, Homo sapiens
tgtcatagtgctggagattgggatagaaacatgtacaaaagtcactttgccctcatacaggtaaatctaagaaagtagggactatgagaaccctatgtatytatatccaccatagtattctagcactgactacagggcctaggaaaagggtaggcattcacatagggagtatttgctggataaaaggcaggttggaagatg

SEQ ID NO: 376284 - DNA, 201 bp, Homo sapiens
gaaaaaaaaaaaagatgaattccttctgcaaggtgagtgttggaagtatgttaaaaagcaaaacaggaaaagcctgctggactattataattacccagatragaaacactctctggctggcagtagcagaagtgtttaagaggcagtagatataaagaaagcctgaatataatgaattagatgttgtggttaagagaataa

SEQ ID NO: 376285 - DNA, 201 bp, Homo sapiens
ttcatgattatctatttatatttatttgttgttattgttgcttgaacactagttttcgagcagttttagagatgataccacttttacactgtttttctctstaattttagttccttatggttcctggtataaacatgtaaaatcttggtgggaaaagggaaagagtccacgtgtactatttcttttctacgaagacctgaa

SEQ ID NO: 376286 - DNA, 201 bp, Homo sapiens
tatatccaccatagtattctagcactgactacagggcctaggaaaagggtaggcattcacatagggagtatttgctggataaaaggcaggttggaagatgmaggaggggagtatgcagaaagaaaggaagaaagagaggaaggagagcgggaaggaaaaacactttctgagtttaattgaatttataagtcacaattttaa

SEQ ID NO: 376287 - DNA, 201 bp, Homo sapiens
agaatcagagaattaaatttgttgtttttttaaaccaattaggacaaatccatctttgtaagcccaaaaaagtatatcattaaaggtatacatttgattcytaaaattgagaattacaagtataatatttgattaggtgttaatgaaagtgatgaaattagcaaacctaatgattctttttggaagacttaatatttattg

SEQ ID NO: 376288 - DNA, 201 bp, Homo sapiens
aaagttgagattgtcctaagggctggggcaatttatgtgtgtagaagaacttatcaggcaggtttttgggcaaatgtgaacaggaggaagatctagaaagrctaatgtcaggaaagacaaaatgtgttgggaagctatgtcagaaacttgaaataagctaagtttggcagttgaaaaaacaagatactaaaggaatttgaa

SEQ ID NO: 376289 - DNA, 201 bp, Homo sapiens
ggcaaacacctttcaagggtaagtggcaaaaaatagaaattcaaatatagctctgtttagcaaaaaatatcaacatataaggagaaaaaaattctatttgrggggagacatagcctgatgagatatagccagttaacaaatttaaaggcatgtaagatattcagatattcagagcactgggacaccagtctatttatatat

SEQ ID NO: 376290 - DNA, 201 bp, Homo sapiens
tctttgatataaccattacagtgtaattaatttcatcttttcttttaaatacattcaccaagcatttggtttatttaaaaaaatgatacatattcaggaartcaaaaatctctgacttagatacccggcaataataatcaaatgtaatgatctttattgttatttgacatatacataattggataatttgctaaaataact

SEQ ID NO: 376291 - DNA, 201 bp, Homo sapiens
gacttcatgaatcaataacacacacacataggcacacacacacacacattcacacacaaggaatcaacatgggcaagcaattaactggtctgcaaatgtaragatgttgcaattgttagataggtcctataaaataaccatgcttaatatgtttaaataaataaaagatgaaattttaaaaattacaaagaaacaaaaact

SEQ ID NO: 376292 - DNA, 201 bp, Homo sapiens
ttatttgacatatacataattggataatttgctaaaataactgtaattctggacctctttgtctttttatatgccccagcaattttgaaagaaattgaagkttctgtggtttttatttatcacggaataaatataattgaatatatccacatttttatttagttttaagcattttacttcataatcacttgtgctttccta

SEQ ID NO: 376293 - DNA, 201 bp, Homo sapiens
tatgcctaattaaaaattctgttagtaaccttgaacatgaaatagattgtcatgggatcaggagatgaattaggaaatgataaccatcttgcttaaccttrtcatttttagccaagtcattcaatgggagtatccactaccttattgatcgaatggggaaaaaagtaattttaaaggtcacagaggaatcctttatactct

SEQ ID NO: 376294 - DNA, 201 bp, Homo sapiens
gtgaatcattgggaaactggtaactttgactcaagagagatgcagtgcaagtcatatcttcaggaaagagctagatttcccttgaggacaaaaaaatgagmatgtacagtaaaaagtttgggatattgaataagatctgccaaaataaagaatataaactaatagaagtttagggaaagagagatcactctttttttctat

SEQ ID NO: 376295 - DNA, 201 bp, Homo sapiens
aaaactctctatgtaccaaaactatttgatatgcaactttactatgtttttgccccatatgtgcaacaactaagaagtgctaggtatgtaggagggtcccsttatatacatagttgttaatggtgaaatattgttaagtacatacaaagtataaagcagaggttttttttcagtgtaccacaatgaattctgaacttgact

SEQ ID NO: 376296 - DNA, 201 bp, Homo sapiens
tcccaggctggagtgcagtggcgcgatctctgctcactgcaaactccgcctcctgggttcctgccattctccttcctcagcctcccgagtagctgggactrcaggcgcccgccactgcacctggctaatttttttgtattttttagtagagacgggttttcaccatgttagccaggatggtctcgatctcctgacctcgtg

SEQ ID NO: 376297 - DNA, 201 bp, Homo sapiens
ttgcttattgctttaatgtaaaattacagtaccattgctatcttaaaagtgctgaatgctggacgtgttctccattttaccaatgagaaaataaagcaagsagggtagaaggaggtagaatagagattgacttttagttttgtgttcctgtgataaggggtcttgcaaataggggcattactttcatgtaagaaacttcag

SEQ ID NO: 376298 - DNA, 201 bp, Homo sapiens
aaagattttattcctctctctttttgagttgaagaaataagtttagaatagtttgtcaacattttttaacaagtggcaaacacctttcaagggtaagtggmaaaaaatagaaattcaaatatagctctgtttagcaaaaaatatcaacatataaggagaaaaaaattctatttggggggagacatagcctgatgagatata

SEQ ID NO: 376299 - DNA, 201 bp, Homo sapiens
ttataaagtgcttcacctaattcctagcatattgtaaacaacaaatgttagctacttttgtatttgttgttattactaattgtattgaatatcctcccttygcaaaatactgtgcttggtgctgttaggcatgcaaatgaaccataaaaggataggtcagataactgtcatataataactatgtattgagtgcctattatg

SEQ ID NO: 376300 - DNA, 201 bp, Homo sapiens
tattgactcaagacaaataaggtatatgtgctttgtgtttgttgctacattttgggaaaatttttgctaaagcataatgagtaatacatatgtcttaagaytgtcaagacctccactgcagggcagagaaatataattttgcatcactgcaaagggagaaataagatcactataaatttcactgtagaacattttctgtaa

SEQ ID NO: 376301 - DNA, 201 bp, Homo sapiens
agtatcataggtcaagtaagagagagaattcaaactcagacactgggggtagggaaggcatccaggagcaacatctcagctgatatttgaatgatgtatcrgtgtgatgacaattcagagatgatctgagggggcatctaaaatcagttcagcttggctggaagattaagtgtacatattggctaaataagtaaaggcaga

SEQ ID NO: 376302 - DNA, 201 bp, Homo sapiens
taaatttcactgtagaacattttctgtaaggaaaaattccctaatggagtcaaagaacagaggaggcatacaatgacttcaggcaaagcagaaccttttgmctcacacaacattatattattttgtcagctttatattttatgaaacatttttactatgagtgaggcaagagaaagaaaaaggaagagacagcatttggtt

SEQ ID NO: 376303 - DNA, 201 bp, Homo sapiens
cataaaatattatagaaaatatttcctgagtctgtggctattcagacaccctttaaatagtattgcattggtaccttccaactttttccatccataaatgyagcactaatgtcatcaactctacagggtcagcaggagactcaggtttatttaatttttacaggtacaacctgggttagtgaaattgtgtatatgatctat

SEQ ID NO: 376304 - DNA, 201 bp, Homo sapiens; identical to SEQ ID NO: 81168

SEQ ID NO: 376305 - DNA, 201 bp, Homo sapiens
tgctatcttaaaagtgctgaatgctggacgtgttctccattttaccaatgagaaaataaagcaaggagggtagaaggaggtagaatagagattgacttttrgttttgtgttcctgtgataaggggtcttgcaaataggggcattactttcatgtaagaaacttcagataaatatgacagaaatccaaagtccttggtaaat

SEQ ID NO: 376306 - DNA, 201 bp, Homo sapiens
aaggtgttcatgtcgtacacactcattctctatattaagaacagatgcggtagttttgatatggacatagaaaaggtagctctattccatgaccacaattkttacctgtaacttgaatagtacattgagaaatggatgttgttgagcacagttagaaacttacataatatatactaatgaacctgtattcatcccataatg

SEQ ID NO: 376307 - DNA, 201 bp, Homo sapiens
aaaagtggttacaaaagtctgaagtaacatagaagtaatgatcaatgactacatgaacttagagaatcaagtagatcacacacaccaacaataaaattacrcagaatgataaaagaatttgaatggagagtgaaaccatgaggcaggtgttcaaatcttcagttaaagcaagggaatggccacaagcttagaaatagcatc

SEQ ID NO: 376308 - DNA, 201 bp, Homo sapiens
atcctttatgcaaatagatacaggatatttggaatgatggagcagaaactgtaagtgataaagagaagaaagtgacaaaaagtaacaggctagtagataayataaataactgaggccaacggatttgagccattggtttgattgtaggagaggtatgtggaataactgatggggaagaaggaagaagcgggattttttgga

SEQ ID NO: 376309 - DNA, 201 bp, Homo sapiens
tttgtcaaatattgggataatgtggaagcgttccaggcaagaccagatgatcttgtcattgccacctaccctaaatctggtaaatctctttgttgttcttytttcacctaaaaataacaaacacactgtaaatggtaaatattaaggtgttcatgtcgtacacactcattctctatattaagaacagatgcggtagttttg

SEQ ID NO: 376310 - DNA, 201 bp, Homo sapiens; identical to SEQ ID NO: 81170

SEQ ID NO: 376311 - DNA, 201 bp, Homo sapiens
catcctcttagataatctatctttgccggaatgcaaaggatgtggctgtttccttttattatttctttctaatggtggctggtcatccaaatcctggatcytttccagagtttgtggagaaattcatgcaaggacagggtaggaacagcttctttacactgaattttttttcaaggttttataagacaaatgccatctcca

SEQ ID NO: 376312 - DNA, 201 bp, Homo sapiens
atggtgaaggcaagattcagtatttggttacaaaagtggttacaaaagtctgaagtaacatagaagtaatgatcaatgactacatgaacttagagaatcargtagatcacacacaccaacaataaaattacacagaatgataaaagaatttgaatggagagtgaaaccatgaggcaggtgttcaaatcttcagttaaagca

SEQ ID NO: 376313 - DNA, 201 bp, Homo sapiens
aatttaccaagcctatgtgcctcagtgttacaacatgtatcatatagttcctttaagttctaaccagaaattccgcagaaagattttattcctctctcttyttgagttgaagaaataagtttagaatagtttgtcaacattttttaacaagtggcaaacacctttcaagggtaagtggcaaaaaatagaaattcaaatata

SEQ ID NO: 376314 - DNA, 201 bp, Homo sapiens
ttggtgctgttaggcatgcaaatgaaccataaaaggataggtcagataactgtcatataataactatgtattgagtgcctattatgtgttagggacataasagtaagacacatgcaagccttgtcttcatggacacctagtccatttcagaaaaaggacaggttaacagacaagacaaaaagtatcataggtcaagtaaga

SEQ ID NO: 376315 - DNA, 201 bp, Homo sapiens
tgttttcatatccacagatgataatattgactcaagacaaataaggtatatgtgctttgtgtttgttgctacattttgggaaaatttttgctaaagcatamtgagtaatacatatgtcttaagattgtcaagacctccactgcagggcagagaaatataattttgcatcactgcaaagggagaaataagatcactataaat

SEQ ID NO: 376316 - DNA, 201 bp, Homo sapiens
caagatgtcctctaatagttgaatggataaacaaagtgtggtatatccacataatacggtattgctcagcagttcaaaaaaaagagttatttagtcaccaraaaagatggagaagtcttgaatacatatagttaggccaaagaagctaatctgaaaatgttgcatactgtttgactccacctacgtgacattgtggaaaag

SEQ ID NO: 376317 - DNA, 201 bp, Homo sapiens
gatcaatttctttcacaggatcaactaaacaggttgtacttttttattattaatatcaatacttagattttagatatataaaatatagaatgaaaattatrtattacaaagctcttaaaaataaaatatacaaagaccaaagtcttgattgatactttagttaattaatgatgtgaagcatttaaaaccttttaaaataat

SEQ ID NO: 376318 - DNA, 201 bp, Homo sapiens
cccatatgtgcaacaactaagaagtgctaggtatgtaggagggtcccgttatatacatagttgttaatggtgaaatattgttaagtacatacaaagtatawagcagaggttttttttcagtgtaccacaatgaattctgaacttgactattatgaaaagtttgaagaagtccatgggattctaatgtataaagattttgtc

SEQ ID NO: 376319 - DNA, 201 bp, Homo sapiens; identical to SEQ ID NO: 81167

SEQ ID NO: 376320 - DNA, 201 bp, Homo sapiens
caagagggcaagtgaactcttgaatagtttaaaaaagaaggtgggctgggcgcggtggctcacacctgtaatcccagcactttgggaggccgagacgggcrgatcatgaggtcaggagatcgagaccatcctggctaacacagtgaaaccctgtctctactgaaaatacaaaaaattagccaggcatggtggcgggcgcct

SEQ ID NO: 376321 - DNA, 201 bp, Homo sapiens
gcaattaactggtctgcaaatgtagagatgttgcaattgttagataggtcctataaaataaccatgcttaatatgtttaaataaataaaagatgaaatttkaaaaattacaaagaaacaaaaactattaaaattgacagagcagatttgaaaaaaaatagccaaatacaatttctaaaaataactaaaaaaatatgaaaaa

SEQ ID NO: 376322 - DNA, 201 bp, Homo sapiens
gtaagatattcagatattcagagcactgggacaccagtctatttatatatgaggaagcagaaacaaacagaatagaatcaaatcttgctctttgaaccatwctgtcagtgagagtcagggaatttgtaaaataacaaacctgccactggggaaaaaaacaaaacagaacagggatccactgaaaagagattcagttctcaa

SEQ ID NO: 376323 - DNA, 201 bp, Homo sapiens
cacattttcttaatccagtctatcattgttggatatttgggttggttccaagtctttgctattgtgaatagtgccacaataaacatacgtgttcatgtgtstttatagtagcatgatttataatcctttgggtatatacccagtaatgggatggctgggtcaaatggtatttctagttctagatccctgagggatcgccat

SEQ ID NO: 376324 - DNA, 201 bp, Homo sapiens
tacaggcgtgagccaccgcgcccggccgcccttagttatcttgactctaaatctgcttctttattttcttccctattggaataaatggcagcacaataccwgtcatctgaagaggaaacccgtgagctattctagattcaatctctcttgcttattcatctggcatttgtaatcagtcaaaacgttttggtcatttagtct

SEQ ID NO: 376325 - DNA, 201 bp, Homo sapiens
attttaatggtaatgaggagtaatagacatattaagctgacggtttacactgtcagttttgctctttaaaaataatattatacatgacctcaaaatacagrgaaaacatgaagtctgagaccaccaattctgttcttcaagacctttctctcaccagtgctgttcttcaagatcttatagtattatttgcagtcatcacta

SEQ ID NO: 376326 - DNA, 201 bp, Homo sapiens
accagccctttaagtctatctacaaaactccatttttaagcatagttctggagttttacaactgtagacttttagaaattagactagtccgaattcatatktcttcatctggttgttccatttaccacttaaaaataaagccaaacacactaagtatgcccttagttatcttttttttttttttttttttttttttgagac

SEQ ID NO: 376327 - DNA, 201 bp, Homo sapiens
agagattcagttctcaaactatattttaattatgtactcttttgattatatgtttcctttttcaaaattctacatataaatgttacagaggacttaaaacrgttgtcttgcttgcaaacggtgacttgctgctgtaccctcagaacctatctgatttttttaggatacacatgttctgtcttctggtttttgggttatttc

SEQ ID NO: 376328 - DNA, 201 bp, Homo sapiens
cacctttcaagggtaagtggcaaaaaatagaaattcaaatatagctctgtttagcaaaaaatatcaacatataaggagaaaaaaattctatttggggggaracatagcctgatgagatatagccagttaacaaatttaaaggcatgtaagatattcagatattcagagcactgggacaccagtctatttatatatgaggaa

SEQ ID NO: 376329 - DNA, 201 bp, Homo sapiens
gaacaaagagaacaacactacaaaaaccactgtcacctcaggttattgaagatgtctttataaataattgtacatgtcttatgcattttgtaaaattaatrtgtattatgtttatatttgaaaatgtaaatcctttttaaaaaaatcttgatgagactgtttgaaaaaaatgttaagtggtttaatatacaatttcatcct

SEQ ID NO: 376330 - DNA, 201 bp, Homo sapiens
tatatgccccagcaattttgaaagaaattgaaggttctgtggtttttatttatcacggaataaatataattgaatatatccacatttttatttagttttamgcattttacttcataatcacttgtgctttcctattcttttatgtgttagacatctttctaataaggttaaaaactctctatgtaccaaaactatttgata

SEQ ID NO: 376331 - DNA, 201 bp, Homo sapiens
aaaataataatgtgttttcatatccacagatgataatattgactcaagacaaataaggtatatgtgctttgtgtttgttgctacattttgggaaaatttttgctaaagcataatgagtaatacatatgtcttaagattgtcaagacctccactgcagggcagagaaatataattttgcatcactgcaaagggagaaataag

SEQ ID NO: 376332 - DNA, 201 bp, Homo sapiens
acagcatataaatttaaatttaaatttaaatcttgacaggctttgcagtatagtatgtgtacagcatatgtctggaatagagtgaataaggacaattcttrtatgccttcagcagagtttagtaatatgtaaacatttatttctctgtgggctaaatgtgatgatattttaaatatggagaaaaatacccataaatttttc

SEQ ID NO: 376333 - DNA, 201 bp, Homo sapiens
ttttattaaacacttttactaaagtgtttagatttgaggaagaaagggtgcaggatagtctagtattctaaagaaggccattctgatcatgtagtaacaaytataaagaaaaataataatgtgttttcatatccacagatgataatattgactcaagacaaataaggtatatgtgctttgtgtttgttgctacattttggg

SEQ ID NO: 376334 - DNA, 201 bp, Homo sapiens
actcccgattttggtcaataatagccatgtttaggtttcctctatatttgaattaataaggctaagaatgtacaaattaatttttatttgtttctacaatrtatccagtagaaagaaatcaagacattatcactatatatatacacatatgtctgtatatataaaataagattttgtgtatatattatatatatatacaca

SEQ ID NO: 376335 - DNA, 201 bp, Homo sapiens
gaatttaacactagatcaaatttgaataagaaaagcagtcatgatctacagtttattatattatccaatactgtgttctgtaattagactattaatgacaktgaatttgaaatacacacaaacaaaattaaatagttactccaactctcttcctccatttcaaattgtccatgtctacttactcccgattttggtcaataa

SEQ ID NO: 376336 - DNA, 201 bp, Homo sapiens
tcacaatccctatcatccttcctgatttttccctatggcactcatcatcacctaataccgtatgtaagtatgtatatatgtacttactaatttattatctkatgtttcaagaatataagtttcataagcacagggactttattttatccactgctgtatctgaaaccctcatagcacatgcctgtagcacatgtagtagaa

SEQ ID NO: 376337 - DNA, 201 bp, Homo sapiens
agatggagacaaagggagaatctgaggtattctcgaggtagaagggatagggcttgatctgtaggttgagacccttataagtgagagatggtggtaatatrgcatgaattaaggtactgatagtagaaatggaggaaagagggtatatgcaagataaagtttggagagaaaatcactggtctttgctattgaattggatat

SEQ ID NO: 376338 - DNA, 201 bp, Homo sapiens
tctagtcttattgcctcaactgtaatatttctggccaggccatattaactttttttgaactaccagagtaaaacctatagctaaagtgtatatattttaakatttatcctattaggcattttttggtaaacaaagttaaccatgaatatagtaaatgcagtgtgttttatactgtgtacatgcagtctccagttgaaaaca

SEQ ID NO: 376339 - DNA, 201 bp, Homo sapiens
ttcaagaataatacggagtaatatggattatgcattgggtaaaaaagtatcttgacccctacctcatgccatgaacaaaaatagatcctagatggattacrgaattaattgtgcaaggtcaaacaataaactgttttcctgtgaaacttataaagtctctgcctttacttccatctgttttaatgctctccccctcatgtc

SEQ ID NO: 376340 - DNA, 201 bp, Homo sapiens
agaacttgaaataaaagacaaactacttaattatgctggtgaagtcccgagagaggaggaagatggattggttgcctggtttgctctaggtatagatcctrttgctgctgaagaattcaagcaaagacatgaaaattgttactttcttcatcctcctatgccagcccttctgcaattgaaagaaaaagaagctggtaagaa

SEQ ID NO: 376341 - DNA, 201 bp, Homo sapiens
aaggatatggccccctcgtctgtactgtcagagctctttattcattattttgtgtaactcccatgggcatataaattgcgttgcattttataattctaaamtgataacattttgaaattgaaatgtatgctgtttaaggattgcctgttgaatagtatgttgccttggaaaccattgctattattctattgctatttatca

SEQ ID NO: 376342 - DNA, 201 bp, Homo sapiens
tcttctattgattgttccctgactgtattggtttggtcacagagcaaggatgcatattttcagcaagttgaatgatgcctttggccctctcattatgcatrgattacatggtaattagtaattccatacaggaggagtatgtttcactaatgtgatctatattaacttattctatgagatttttctagtagagatgattct

SEQ ID NO: 376343 - DNA, 201 bp, Homo sapiens
tgttacctggttccccctcccaaggatatggccccctcgtctgtactgtcagagctctttattcattattttgtgtaactcccatgggcatataaattgcrttgcattttataattctaaactgataacattttgaaattgaaatgtatgctgtttaaggattgcctgttgaatagtatgttgccttggaaaccattgcta

SEQ ID NO: 376344 - DNA, 201 bp, Homo sapiens
agagttctatccctataggagatatacctttatattatcctatcagacagtgtttgtacaatgaatctaaattcgtttttcctgccattcatgtatctgattttttttttcaacagatccagtagtaatcatgcaagttattcatccagatgggaccaaatgccttttaggcaggcagaaaagatttcccccaggcatgtt

SEQ ID NO: 376345 - DNA, 201 bp, Homo sapiens
aaagtgtttgcatagtgtttaaccagtattaggtattggatatttttagatggtatcattatttttaaaatgtaactgacaaatttgtaccttaaaaaaaygaaaagtttattgttggcattttgatattctatatgtggtcatgtactttaaaaaaattgttttcttcaattacagtctagttttaggcttctgctttct

SEQ ID NO: 376346 - DNA, 201 bp, Homo sapiens
tttaaagttcttattacaaacagcactgcaattaatatttttatacttctccttgtgcacatttgcaagagttatctaggttatatacatagagtagtacsaccagctcatgtgttatgagcatcttaaccttttctgtatgttgccaagttgtctctgaagtgtttctgccaatttacacttcctccagcagaacatgaa

SEQ ID NO: 376347 - DNA, 201 bp, Homo sapiens
agacagcagctatcaaaaactatgggctataacctttctgtctttttagcttaaaaatcttattgcttagaatgatagaaatgttgttagaatcccaaatyttttcttaatagcatttcatagaaagaagaattataccttaaaaaaaaatactttgagaagttcacagacagttgaatcatgaaccattttcaccatccc

SEQ ID NO: 376348 - DNA, 201 bp, Homo sapiens
tgctgagttgtgtggcggagcctcgtagtggtttggtgggcgcaggcgcgggagccacggacgcatttgcaggggctcccgcgacagggcggaggtgcggyggtactgaggtcgtagagtttcctgcccaagctgagatggggaaaaggaagcgctacttagggtgtgatttcacctcgaaagaaggaatctcacagtagt

SEQ ID NO: 376349 - DNA, 201 bp, Homo sapiens; identical to SEQ ID NO: 81171

SEQ ID NO: 376350 - DNA, 201 bp, Homo sapiens
ttatactgtgtacatgcagtctccagttgaaaacaggttgtgttccacatggcttggaccatcaatggcatagtcaccaagagagtggtgatagcctcctrcagtttcctagtaatatttcctttagagtacaaatctcacttaagaactgactttgtggtatatttttattaaaatcactattgtaaaatcactgtttgt

SEQ ID NO: 376351 - DNA, 201 bp, Homo sapiens
gagaaagtgtttacttcctattttactttttctccccaattttttcttccatctataggtgtgacagatcaattgtcaataaatcaaggcagactgcactrgacattgctgtattttggggttataagcatatagctaatttactagctactgctaaaggtgggaagaagccttggttcctaacgaatgaagtggaagaat

SEQ ID NO: 376352 - DNA, 201 bp, Homo sapiens; identical to SEQ ID NO: 81172

SEQ ID NO: 376353 - DNA, 201 bp, Homo sapiens
ccaccccatcgtgaagtcccctctggtctaccctaaatacctcctccttatgtaatatgttacctggttccccctcccaaggatatggccccctcgtctgwactgtcagagctctttattcattattttgtgtaactcccatgggcatataaattgcgttgcattttataattctaaactgataacattttgaaattgaaa

SEQ ID NO: 376354 - DNA, 201 bp, Homo sapiens
cacaatccctatcatccttcctgatttttccctatggcactcatcatcacctaataccgtatgtaagtatgtatatatgtacttactaatttattatcttmtgtttcaagaatataagtttcataagcacagggactttattttatccactgctgtatctgaaaccctcatagcacatgcctgtagcacatgtagtagaaa

SEQ ID NO: 376355 - DNA, 201 bp, Homo sapiens
aaagtgtttacttcctattttactttttctccccaattttttcttccatctataggtgtgacagatcaattgtcaataaatcaaggcagactgcactggayattgctgtattttggggttataagcatatagctaatttactagctactgctaaaggtgggaagaagccttggttcctaacgaatgaagtggaagaatgtg

SEQ ID NO: 376356 - DNA, 201 bp, Homo sapiens
atctggtttttagacttgagttggagttgtatgtatttgcactttccaggggcactctttttccagtaagcagtgaaattagactgtcttcatcagaaacytcttaaagttctcaccctaggggactactctcctgggcagttagtagttctaatcagcccagactgatttcctgagaattaaccctggtgcatgatgatc

SEQ ID NO: 376357 - DNA, 201 bp, Homo sapiens
cagtaaacatatagtatcaggctgtgttttggaggaggatcatatcatatatataaaacagtatcaggctatgctttatatatattttttgtatgatcctyatacaaccttataaaatacactattacagtgattttgcaggtaggggcactaaggcatagggactaaataatttgctcaagatcaaacagctaataagtg

SEQ ID NO: 376358 - DNA, 201 bp, Homo sapiens
acagataatttttaaaaagttagccaggtgcacctatggtaccagctacttgggaggctgtggcaggaggatcgcctgagcccaggaagtcaaagctgcartgagccatgatcccaccactgcaactccagtctgggtggcagagtgcaagaccttgtttccaaaaaaaaaaaaactttgcatgtaaatatggatgttgtc

SEQ ID NO: 376359 - DNA, 201 bp, Homo sapiens
taggtgtgacagatcaattgtcaataaatcaaggcagactgcactggacattgctgtattttggggttataagcatatagctaatttactagctactgctraaggtgggaagaagccttggttcctaacgaatgaagtggaagaatgtgaaaattattttagcaaaacactactggaccggaaaagtgaaaagagaaataa

SEQ ID NO: 376360 - DNA, 201 bp, Homo sapiens
tatataataatgaaggaaaagattaagaatgactgctaggctagagactttaataatttggtatatagtgataccatttctcaataatataggatgatggktagagcaaggaaagcaggacagacttggattaaaaaaatcaagagtttacttttgggcatactaagttttagaaatggacattacaatcagatgtctgaa

SEQ ID NO: 376361 - DNA, 201 bp, Homo sapiens; identical to SEQ ID NO: 81176

SEQ ID NO: 376362 - DNA, 201 bp, Homo sapiens
tgcccaagtaagagattgcaatggcttgagttagaatggaggcagtggagatggagacaaagggagaatctgaggtattctcgaggtagaagggatagggyttgatctgtaggttgagacccttataagtgagagatggtggtaatatggcatgaattaaggtactgatagtagaaatggaggaaagagggtatatgcaag

SEQ ID NO: 376363 - DNA, 201 bp, Homo sapiens
actttttttgaactaccagagtaaaacctatagctaaagtgtatatattttaagatttatcctattaggcattttttggtaaacaaagttaaccatgaatrtagtaaatgcagtgtgttttatactgtgtacatgcagtctccagttgaaaacaggttgtgttccacatggcttggaccatcaatggcatagtcaccaaga

SEQ ID NO: 376364 - DNA, 201 bp, Homo sapiens
taagtgcttaaaattttcagaaagtttttattcattttaaaatgtacttaaggacaagaatgacataactgtataataaacatacacttaaaataactttytaaaatgtcattcctaaataatatattaaaagataaattactcatctgacctgaaattctttctgactttgcctgcataaaattaattttattctatgct

SEQ ID NO: 376365 - DNA, 201 bp, Homo sapiens
aaatatgtagcatatgctaatcttttgttagttatggttttgcaaataccttacactagtctataattatatttttactatatgtgttcttttgattattwtaagttaattttcatgtaggaaatttatcaatctatttgaaatagaaagctatatttaaaatatattttgctaaatacagcaatatttagcaaaatgttt

SEQ ID NO: 376366 - DNA, 201 bp, Homo sapiens; identical to SEQ ID NO: 81177

SEQ ID NO: 376367 - DNA, 201 bp, Homo sapiens
cggctcccaaacacttccacccccaatctccaccccttctcccttgcgcacaacctgtgggcttcaaactacatctcccataaaaccgcgggggccccccycccgccccccccccacccccggatctccaccggaagtcgggaagactgcatccggctccaggaaaagcgagtgggatatcccaatctttggactgcatcc

SEQ ID NO: 376368 - DNA, 201 bp, Homo sapiens
tgtagctcaagcaagatctgttcttgcctggcacagtcgatacaagttttgcccaacctgtggaaatgcaactaaaattgaagaaggtggctataagagaytatgtttaaaagaagactgtcctagtctcaatggcgtccataatacctcatacccaagagttggtaagccctttattttatatctcagccacctggatct

SEQ ID NO: 376369 - DNA, 201 bp, Homo sapiens
caataattgtttgacaacataataaaaaaaagtttcagaattttagtgtgaaagagctatttgtaaaaatcatgtaatttataactatttcgtggacaatrtatacatgagataagatataaagtgtttgcatagtgtttaaccagtattaggtattggatatttttagatggtatcattatttttaaaatgtaactgaca

SEQ ID NO: 376370 - DNA, 201 bp, Homo sapiens; identical to SEQ ID NO: 81180

SEQ ID NO: 376371 - DNA, 201 bp, Homo sapiens
  misc_feature (1)...(201): n = A,T,C or G
gaataagatattttggaaagagaaaatttgtgaggagctaaagagttttcctttttatggaaaacatgtctaaccattaagaatgtgttaaagtgttacanactttcatgatttttaagtaaaaaacatggtacatcaatagccatttcttaactttgggttactcactataatttgatatgttatgatacatgatttcaa

SEQ ID NO: 376372 - DNA, 201 bp, Homo sapiens
ttttcataagggaatgtgtctttctggaacattttagaaactgaatcacttactcagtgaagcaattaaaaatgctgtcctaaattttgcatgttgaggcrgggcgtggtggcttatacctgtaatcccagaactttggaaggccaaggcaggaagcttgattgagcccaggagtttgagactagcctgggcaacataggg

SEQ ID NO: 376373 - DNA, 201 bp, Homo sapiens
atttcacctcgaaagaaggaatctcacagtagtggcaagaaagtaaaatatcttaaggcattttaccattttcagagaccgtgcacgggtggcacttaatkggtcttgagtgcccagggagtggatgaaattcgttaattgatggtcagtgatttcagtgacagagcgatatttaaggtcctgtcctgtcccattcggtct

SEQ ID NO: 376374 - DNA, 201 bp, Homo sapiens; identical to SEQ ID NO: 81181

SEQ ID NO: 376375 - DNA, 201 bp, Homo sapiens; identical to SEQ ID NO: 81182

SEQ ID NO: 376376 - DNA, 201 bp, Homo sapiens
cccagatacattagttagcccccataccctgcattcacaatccctatcatccttcctgatttttccctatggcactcatcatcacctaataccgtatgtawgtatgtatatatgtacttactaatttattatcttatgtttcaagaatataagtttcataagcacagggactttattttatccactgctgtatctgaaacc

SEQ ID NO: 376377 - DNA, 201 bp, Homo sapiens
cttcattcccagtgtctgaaagcagactgcacaagtaactttgtctagtgtctggactcttggtaagcccttctcaaatgcctttaaccttgaggagctcscactctgatagaagtgctgctggtggcagtgcctgataacagagagctgagcaagccagttgacctcagacagtgatgtttattgctgttgattgagccc

SEQ ID NO: 376378 - DNA, 201 bp, Homo sapiens; identical to SEQ ID NO: 81196

SEQ ID NO: 376379 - DNA, 201 bp, Homo sapiens
gatggagtcttgctctgtcacccaggctggagtgcagtggtgcgatcttggctcacctcaacctctgcctcctgggttcaagtgattctcctgcctcagcrtcctgagtagctgggattacaggtgcatgccaccacgtccagctaatttttgtatttttagtagagatggagtttcaccatgttggccaggctgctcttg

SEQ ID NO: 376380 - DNA, 201 bp, Homo sapiens
tttgcctggggaaaggacctatggcttttaccatattctcaaaaggatcttaaaccccaatatggtgaagagatcatgcattagagtcttagtgagggtaktagaatttggcccagttcccaagtctttccctctttccccctctccctacagaggaaggcattactgggtaccggccaagaggctgtttggtggtcagat

SEQ ID NO: 376381 - DNA, 201 bp, Homo sapiens
cgcggtggctcacgcctgtaatcccagcactttggaggccaaggcgggcggatcacgaggtcaggagatcgggaccatcctagctaacacggtgaaacccygtctctactaaaaatataaaaaaattagccaggtgtggtggtgggtgcctgtagtcccagctactcgggaggctgaggcaggagaatggtgtgaacccgg

SEQ ID NO: 376382 - DNA, 201 bp, Homo sapiens
caggaattcaagaccagccagggcaataaatcgagaccttgtctctacaaaaaaataaataaaaggaaaataaaagcaaaacctatgctaaaaaacaaacaaaaaaaaccctcactgttttctttccttccctgttacccccagagcagatgccctcatgtgttctgcgtagatccccagctgagaagagtttgtggacct

SEQ ID NO: 376383 - DNA, 201 bp, Homo sapiens
gaggcaaggagaattgcttgaacccggtggctggaggtcgcagtgagctaaaactgcgccactgcactcccacctgggcgacagatcgagactccatctcaaaaaaacaaaacaaaaaagagatgtttcaattacatttttaaaataaaagatgttatgggggagggggagggttggtccttggccatttatcaaatcagt

SEQ ID NO: 376384 - DNA, 201 bp, Homo sapiens
tctccgcgtcttccgcggagcgggtgtgcagggcctgcagcattgaactagatgtcgtccccgcaggccccagaagatgggcagggctgtggcgaccgcgrcgatccccctggggacctccgtagcgtcttggtcacgaccgtgctcaacctcgagccgctggacgaggatctcttcaggtagccggcagctcctgcccag

SEQ ID NO: 376385 - DNA, 201 bp, Homo sapiens
gggtctggtttctcattacttattctgaggcctaagcatgtttttttctttcccagcatcgctgaagttcttgactgcagcaagggtttctttctttcttygaggcggagtcttgctctgttgcccaggctggagtgcagtggtgcgatctcggctcagtgcaacctccgcctcccgggttcaagcatttctcctgcctca

SEQ ID NO: 376386 - DNA, 201 bp, Homo sapiens; identical to SEQ ID NO: 81183

SEQ ID NO: 376387 - DNA, 201 bp, Homo sapiens
cctcagcctcctgattagctgggacatacaggcgcgccacagcccagctaattttttaacttcttttagtagagacggggtttcaccgtgttggccaggcwggtctcgaactcctgaccttgtaatctgcccacctctgccaaagtgctaggattacaggcatgagccaccgcgcccagccccctgcagcaaggcttctaa

SEQ ID NO: 376388 - DNA, 201 bp, Homo sapiens
agaagggtgggaccaggggtattttagtgggatgatctctacagcttcttacagctctggggtcagataatgtaacttaaaacctatgtgtgaggccgggygcggtggctcacgcctgtaatcccagcactttggaggccaaggcgggcggatcacgaggtcaggagatcgggaccatcctagctaacacggtgaaacccc

SEQ ID NO: 376389 - DNA, 201 bp, Homo sapiens
aagggtgggaccaggggtattttagtgggatgatctctacagcttcttacagctctggggtcagataatgtaacttaaaacctatgtgtgaggccgggcgyggtggctcacgcctgtaatcccagcactttggaggccaaggcgggcggatcacgaggtcaggagatcgggaccatcctagctaacacggtgaaaccccgt

SEQ ID NO: 376390 - DNA, 201 bp, Homo sapiens
ggacctgaagaggtttggaaccagctcccacagtgcccaaggaggcagagccaggatttgaacctggtttatgtgtctttgagtgccaaactctttcctgyttctttgcttcgctcttgggcaataattctaaacaatgagagagctgccagggtacccatcccaggttctggggaaaagatcctctttcttggaaagtct

SEQ ID NO: 376391 - DNA, 201 bp, Homo sapiens
aaaaaggaaaattagctgggcgtggtgaccttagcccgtgatcccagctactcgggaggctgaggctgaggctgaggcaaggagaattgcttgaacccggyggctggaggtcgcagtgagctaaaactgcgccactgcactcccacctgggcgacagatcgagactccatctcaaaaaaacaaaacaaaaaagagatgttt

SEQ ID NO: 376392 - DNA, 201 bp, Homo sapiens
tggaggtggaggttgcagtgagctgagatcgtgctactgtactccagcctgggtgacagagcaagactccatctaaaaaaaaaaaggaaaattagctgggygtggtgaccttagcccgtgatcccagctactcgggaggctgaggctgaggctgaggcaaggagaattgcttgaacccggtggctggaggtcgcagtgagc

SEQ ID NO: 376393 - DNA, 201 bp, Homo sapiens
cagtgagctaaaactgcgccactgcactcccacctgggcgacagatcgagactccatctcaaaaaaacaaaacaaaaaagagatgtttcaattacattttwaaaataaaagatgttatgggggagggggagggttggtccttggccatttatcaaatcagttctttttctaaaagcccaggaaagaatgtgaattagttgg

SEQ ID NO: 376394 - DNA, 201 bp, Homo sapiens
ctaatcatattcctacctcataaggctgctgtgaggattaaataagagagaaaaggcacttagcgtgctagtactaactagcacaatggcagtgaattgtrgttatatcactattaacagaaaaaacacagggcctggtgtgtggttgcagttcgacaaatgtttgctgaaatgaaaggaagacattgttaaaggaccttg

SEQ ID NO: 376395 - DNA, 201 bp, Homo sapiens
gtcgcttggacccagggggcagaggttgcagtaagcaagattgagtcactgcactcctgactgggcaacagagcgagattccgtcttaaaaaaaaaaaaamaaaaaaaaaccaaagtcagtagaatgaacaattctgttcctcagttgcattagccacatttcaggtgctccatagtcacatgtggctagtggctaccata

SEQ ID NO: 376396 - DNA, 201 bp, Homo sapiens
aaggcctttctgaggaaggcaaaaggcacctcgctggggttgttgtccagctttgctgctaactataaagtatctttgtgcaaattggaagaagacacccyttttggggcctagagtgggagacttgggtggtgaagactgaatttcagtccctgctcacccctgccctccccaagtcgccatctcacttctcccctatca

SEQ ID NO: 376397 - DNA, 201 bp, Homo sapiens
cccctaaccattagaccaccagggagcatgttagatattttgaatacctggtaaaatatatttatttggatcacacctaatcaagtttgaaaaatgctggyacaggggaaagagctctgggtccagacaaaggatagacacatggattctgtccagggctgtgcctctgtgaatgctcacctgctgtgggacagtgcccaa

SEQ ID NO: 376398 - DNA, 201 bp, Homo sapiens
gtaaaatatatttatttggatcacacctaatcaagtttgaaaaatgctggcacaggggaaagagctctgggtccagacaaaggatagacacatggattctrtccagggctgtgcctctgtgaatgctcacctgctgtgggacagtgcccaactccccagggccctagtttcttcttctaaaaaatgggaatgctcatttct

SEQ ID NO: 376399 - DNA, 201 bp, Homo sapiens
ctcaccattataaaatggtgctaatcatattcctacctcataaggctgctgtgaggattaaataagagagaaaaggcacttagcgtgctagtactaactarcacaatggcagtgaattgtagttatatcactattaacagaaaaaacacagggcctggtgtgtggttgcagttcgacaaatgtttgctgaaatgaaaggaa

SEQ ID NO: 376400 - DNA, 201 bp, Homo sapiens
ggttgcagttcgacaaatgtttgctgaaatgaaaggaagacattgttaaaggaccttgaatttagatctgtgctgttaataaggtagtctctagccactcrtggctatattacattaattaaaattaaataggtccgggcgcagtggttcatgcctgtaatcccagtactttgggaggccaaggcgggtggctcacccaag

SEQ ID NO: 376401 - DNA, 201 bp, Homo sapiens
tttaaccttgaggagctcgcactctgatagaagtgctgctggtggcagtgcctgataacagagagctgagcaagccagttgacctcagacagtgatgtttrttgctgttgattgagccctggtgcctggttgactccccatttggatcagagtgaaggaagcaacacttctctagacctgcttctttcatctgaaggttga

SEQ ID NO: 376402 - DNA, 201 bp, Homo sapiens
tggtctcactggaccattccatgtggttccacgcccccttccgagctgaccactggatgctctatgaatgcgagagcccctgggccggtgagtgtggggcygtgtgggacaagggcactgaccttgagtggcaggagcctgctttcttgggtgatgctgatttcccgacttcctgtgtggcgctgcacaggtcacttcctt

SEQ ID NO: 376403 - DNA, 201 bp, Homo sapiens
gggtctcaccccgaccctcttccctttactttcagggaccctaacctccaaaagaggtacccattggcgctcaaccgaattgctgctcaggaggtccccawtgagatcaagccagtaaacccatcccccctgagccagctgcagagaatggagcccaaacagatgttctgggtgcgagcccggggctatattggtaagagt

SEQ ID NO: 376404 - DNA, 201 bp, Homo sapiens; identical to SEQ ID NO: 81188

SEQ ID NO: 376405 - DNA, 201 bp, Homo sapiens
ccttttggggcctagagtgggagacttgggtggtgaagactgaatttcagtccctgctcacccctgccctccccaagtcgccatctcacttctcccctatmacacacacacactgtaggccaagcgctcttgtgcagcaaccagtctgcacacccatgcacgggagtcccttttccccctacctccgtgcaggtcctgagc

SEQ ID NO: 376406 - DNA, 201 bp, Homo sapiens
ctttggggatatcaggggtccctgtggaagaatgaggggagtcagaagaggcaatgcagatgtgactccctctcttcctgggtctcaccccgaccctcttscctttactttcagggaccctaacctccaaaagaggtacccattggcgctcaaccgaattgctgctcaggaggtccccattgagatcaagccagtaaaccc

SEQ ID NO: 376407 - DNA, 201 bp, Homo sapiens
tcagcgacatatccagtcacacacaggattcgcagattggcattcattttctccaattgctagagaaagagggccacagccaccagcggactgacaggagwcctgaccaatcataacctagattcctccttcccggggtctgcaggagacttccggttactagggcaatctgccggaagagtcaggttctgtgtatgtctc

SEQ ID NO: 376408 - DNA, 201 bp, Homo sapiens
ggtgcacttcatggtctcactggaccattccatgtggttccacgcccccttccgagctgaccactggatgctctatgaatgcgagagcccctgggccggtragtgtggggccgtgtgggacaagggcactgaccttgagtggcaggagcctgctttcttgggtgatgctgatttcccgacttcctgtgtggcgctgcacag

SEQ ID NO: 376409 - DNA, 201 bp, Homo sapiens; identical to SEQ ID NO: 81185

SEQ ID NO: 376410 - DNA, 201 bp, Homo sapiens
tttcaccatgttggccaggatggtcttgaactgctgacctcaagtgatctgcccaccttggcctcccaaagtgctgggattacaggcatcagccactgcasccggcgggaaatggattcttacccagggactccagaaagaaatacagccctgcagacatcttgatttagcctgctaagacctgtgcctgacttctaacct

SEQ ID NO: 376411 - DNA, 201 bp, Homo sapiens
ctaaataactctaagataataaatttgtgttgctttgcaccattaaacttgtggtaattcactagagtggcaaacagaaaaccaatacaccttctgacagytctccatctttgggggcccagctcaagcctccctttcactcttacgtctctagctcgcagtgatttttctcttctgagttcccgcagcacctatttccct

SEQ ID NO: 376412 - DNA, 201 bp, Homo sapiens
aggcaaggagaattgcttgaacccggtggctggaggtcgcagtgagctaaaactgcgccactgcactcccacctgggcgacagatcgagactccatctcaaaaaaacaaaacaaaaaagagatgtttcaattacatttttaaaataaaagatgttatgggggagggggagggttggtccttggccatttatcaaatcagtt

SEQ ID NO: 376413 - DNA, 201 bp, Homo sapiens; identical to SEQ ID NO: 81191

SEQ ID NO: 376414 - DNA, 201 bp, Homo sapiens
ggcaaggagaattgcttgaacccggtggctggaggtcgcagtgagctaaaactgcgccactgcactcccacctgggcgacagatcgagactccatctcaaaaaaacaaaacaaaaaagagatgtttcaattacatttttaaaataaaagatgttatgggggagggggagggttggtccttggccatttatcaaatcagttc

SEQ ID NO: 376415 - DNA, 201 bp, Homo sapiens
gcaaggagaattgcttgaacccggtggctggaggtcgcagtgagctaaaactgcgccactgcactcccacctgggcgacagatcgagactccatctcaaaaaaacaaaacaaaaaagagatgtttcaattacatttttaaaataaaagatgttatgggggagggggagggttggtccttggccatttatcaaatcagttct

SEQ ID NO: 376416 - DNA, 201 bp, Homo sapiens
taaagtaaaattcaaagttaaaactttcttacattgggttgtttcacctaatccctgaaggcatttgagttttcaactcctgtcttaacctctaagcctgrcttctcatctgtcaaatcttctcatctgtcaaatgcaaaaaaataacatttatctataattctgaaaaaaagccctgcagggtaaagcatgcatagagaa

SEQ ID NO: 376417 - DNA, 201 bp, Homo sapiens
ggagaattgcttgaacccggtggctggaggtcgcagtgagctaaaactgcgccactgcactcccacctgggcgacagatcgagactccatctcaaaaaaacaaaacaaaaaagagatgtttcaattacatttttaaaataaaagatgttatgggggagggggagggttggtccttggccatttatcaaatcagttcttttt

SEQ ID NO: 376418 - DNA, 201 bp, Homo sapiens
ccaggctggagtgcagtggtgcaatttcggctcactgcagcctccacctcccaggttcaagcagttctcctgccatagcctccacctcccagcttcaagcrattctcctgctgcagcctcccgagtagctaggattacaggtgtgtgccaccaggcctggctaattttttgtatttttagtagagacagggttttgccatg

SEQ ID NO: 376419 - DNA, 201 bp, Homo sapiens
gaagggcttggccgggtgcagtggcgcatacctataatcccagcactttgggaagccaaggcaggaggattgcttgagaccaggagttggatactagcctygccaacatagcaagactccatctctaatttaaaaataaggctggggctgggtgtgggggctcatacctataataacactttgggaagcccaagtgggagg

SEQ ID NO: 376420 - DNA, 201 bp, Homo sapiens
gcaggaggattgcttgagaccaggagttggatactagcctcgccaacatagcaagactccatctctaatttaaaaataaggctggggctgggtgtgggggstcatacctataataacactttgggaagcccaagtgggaggatcacctgagcccaggagttcaagaccagcctgggcaacatggtgaaaccctgtctctat

SEQ ID NO: 376421 - DNA, 201 bp, Homo sapiens
cttgggtggtgaagactgaatttcagtccctgctcacccctgccctccccaagtcgccatctcacttctcccctatcacacacacacactgtaggccaagygctcttgtgcagcaaccagtctgcacacccatgcacgggagtcccttttccccctacctccgtgcaggtcctgagctggaaagcccaggagcccagggct

SEQ ID NO: 376422 - DNA, 201 bp, Homo sapiens; identical to SEQ ID NO: 81190

SEQ ID NO: 376423 - DNA, 201 bp, Homo sapiens
agattcaatttatatttttcaacaacgtatctccagacaccagcatggagtaactttttagttaacaactgcaaaaaacaaacaaaaaaacaaacaaacaaacaaaaaaaaaaacaaggaaatcaatgaaagtcaaatcaaattgcccatacggtggcataatttccaagatatattggtaagtgagaagagccaggtaca

SEQ ID NO: 376424 - DNA, 201 bp, Homo sapiens
gaagcccaagtgggaggatcacctgagcccaggagttcaagaccagcctgggcaacatggtgaaaccctgtctctataaaaaatacaaaaattagccgggygtcggggcatgtgtctgtagtcccagctacttgggaggctgaggcggggggatcacttgagcctgggaggtggaggctgcagtgagccgagatcgtgtta

SEQ ID NO: 376425 - DNA, 201 bp, Homo sapiens; identical to SEQ ID NO: 81192

SEQ ID NO: 376426 - DNA, 201 bp, Homo sapiens
tggctaatttttgtatttttttagtagagaccaggtttcgctatgttgaccaggctggtcttgaactcctgacctcaagtgatcgacctgccttggtctcycaaagtgctgggattacaggcgtgagccaccgtgcccggccacatgttttatgtatataaaacatatgtacaaaaatacaaatatgtattttcccctaac

SEQ ID NO: 376427 - DNA, 201 bp, Homo sapiens
tcttttagtagagacggggtttcaccgtgttggccaggctggtctcgaactcctgaccttgtaatctgcccacctctgccaaagtgctaggattacaggcrtgagccaccgcgcccagccccctgcagcaaggcttctaacagctttgacctccaaggcttctcctggctttactggaagttatcttactttgagctccct

SEQ ID NO: 376428 - DNA, 201 bp, Homo sapiens; identical to SEQ ID NO: 81193

SEQ ID NO: 376429 - DNA, 201 bp, Homo sapiens; identical to SEQ ID NO: 81194

SEQ ID NO: 376430 - DNA, 201 bp, Homo sapiens
ctaaggaaactgggacctgaagaggtttggaaccagctcccacagtgcccaaggaggcagagccaggatttgaacctggtttatgtgtctttgagtgccaractctttcctgcttctttgcttcgctcttgggcaataattctaaacaatgagagagctgccagggtacccatcccaggttctggggaaaagatcctcttt

SEQ ID NO: 376431 - DNA, 201 bp, Homo sapiens
taaatatatattttttagtagagatggcataaccccatctatatctcatatatatacacatatatatgtgtgtgtgtatacatatatatgtgtgtgtgtgkatgtgggcatatatatatatatatatatataaaattaaggggaaagctcacccactgacctttgctatgcccaaaagtgtactccacattccaacaaatg

SEQ ID NO: 376432 - DNA, 201 bp, Homo sapiens
tctctctctctctctctctctatatatatatatgtaaatatatattttttagtagagatggcataaccccatctatatctcatatatatacacatatatatgtgtgtgtgtatacatatatatgtgtgtgtgtgtatgtgggcatatatatatatatatatatataaaattaaggggaaagctcacccactgacctttgct

SEQ ID NO: 376433 - DNA, 201 bp, Homo sapiens
gccgcccggggtccggtgggcaaaaggtgagtgatgcggcctaccactcgccgggcctgccatgccctaggcattggtacccagagcaaagatttctaggrccaccccccgccgccacctcctggagcgggagatctgcgggtgcaggagaacacaccaggagctcggggcctggcattcccctgggcatgggtgtcgagg

SEQ ID NO: 376434 - DNA, 201 bp, Homo sapiens
gaggggttcatcccacgtggacgttttcttggccctttaatggttagcgttttccaacggccaccaattcgctacggattcgttagttaatggcagcatcrtctaccaatcggttgtcagaagcgggattctgccgcccaatagcggtgcgccagtgggtaggtctagcagtggcgcagcaatagagcgctccggagcgtc

SEQ ID NO: 376435 - DNA, 201 bp, Homo sapiens
ggagtgtcggcagcaacccacttctgtttctgccccagtgctcctatttgctataaaatagcaattgttttatagcagaataaaaatgtttggcgataaayaattttgggaaattattggtgagaccaaggcaggaggatagcttgaggccaggaattcagtagagtgccttgcctgtgccctccagtctcactggaagca

SEQ ID NO: 376436 - DNA, 201 bp, Homo sapiens
cggggtttcaccttgttagccaggatggtctcgatctcctgacctcaagatccacccgcctcggcctcccaaagtgctgggattacaggcgtgagccaccrcgcccggccagcaactaatattctaattgaactaaagcacaggatgccaatttacaatccttagaccaaagagtcactgatgtctccaccagataagagg

SEQ ID NO: 376437 - DNA, 201 bp, Homo sapiens
cgagttcctgtctctctgccaacgccgcccggatggcttcccaaaaccgcgacccagccgccactagcgtcgccgccgcccgtaaaggagctgagccgagsgggggcgccgcccggggtccggtgggcaaaaggtgagtgatgcggcctaccactcgccgggcctgccatgccctaggcattggtacccagagcaaagatt

SEQ ID NO: 376438 - DNA, 201 bp, Homo sapiens
caggactcaggtctgagctctggtctccaggctctagcccaggtccccggtggagctccacctccaagggggcacagtcgcctcctgctgcatatcccccrgggagcccccagccccttgggctgcctctttcccctggcctgatgaaggctccagtctttgagcccctaggaggaaacacccctgctgaccagctgggtc

SEQ ID NO: 376439 - DNA, 201 bp, Homo sapiens
ctgagccgagcgggggcgccgcccggggtccggtgggcaaaaggtgagtgatgcggcctaccactcgccgggcctgccatgccctaggcattggtacccasagcaaagatttctaggaccaccccccgccgccacctcctggagcgggagatctgcgggtgcaggagaacacaccaggagctcggggcctggcattcccct

SEQ ID NO: 376440 - DNA, 201 bp, Homo sapiens
ctctctctctctctctctctctatatatatatatgtaaatatatattttttagtagagatggcataaccccatctatatctcatatatatacacatatatatgtgtgtgtgtatacatatatatgtgtgtgtgtgtatgtgggcatatatatatatatatatatataaaattaaggggaaagctcacccactgacctttgc

SEQ ID NO: 376441 - DNA, 201 bp, Homo sapiens
actgcactctagcctgggcgacagagtgtgtgtgtgtgtctgtctctgtctatctctctctctcaatctctctctctctctctctctctatatatatatawgtaaatatatattttttagtagagatggcataaccccatctatatctcatatatatacacatatatatgtgtgtgtgtatacatatatatgtgtgtgtgt

SEQ ID NO: 376442 - DNA, 201 bp, Homo sapiens
gccgagcgcaccactgcactctagcctgggcgacagagtgtgtgtgtgtgtctgtctctgtctatctctctctctcaatctctctctctctctctctctcyatatatatatatgtaaatatatattttttagtagagatggcataaccccatctatatctcatatatatacacatatatatgtgtgtgtgtatacatatat

SEQ ID NO: 376443 - DNA, 201 bp, Homo sapiens
tgagccgagcgcaccactgcactctagcctgggcgacagagtgtgtgtgtgtgtctgtctctgtctatctctctctctcaatctctctctctctctctctmtctatatatatatatgtaaatatatattttttagtagagatggcataaccccatctatatctcatatatatacacatatatatgtgtgtgtgtatacata

SEQ ID NO: 376444 - DNA, 201 bp, Homo sapiens
ataaccccatctatatctcatatatatacacatatatatgtgtgtgtgtatacatatatatgtgtgtgtgtgtatgtgggcatatatatatatatatatatataaaattaaggggaaagctcacccactgacctttgctatgcccaaaagtgtactccacattccaacaaatgtgttttctccccagatgtctggcgataa

SEQ ID NO: 376445 - DNA, 201 bp, Homo sapiens
catacaccccacctacaccatttcttccagcagtccctcctcccaattccatccccccacacgaagttatctcgaacacttccctgaagtcatacaagacyctccctatccagtgtgtccctacttcctagccccaaccaagctttacccacacccaactccccgcccttcttggtatttctagcctatgaatttggttgc

SEQ ID NO: 376446 - DNA, 201 bp, Homo sapiens
ggtgagccgagcgcaccactgcactctagcctgggcgacagagtgtgtgtgtgtgtctgtctctgtctatctctctctctcaatctctctctctctctctmtctctatatatatatatgtaaatatatattttttagtagagatggcataaccccatctatatctcatatatatacacatatatatgtgtgtgtgtataca

SEQ ID NO: 376447 - DNA, 201 bp, Homo sapiens
gcataaccccatctatatctcatatatatacacatatatatgtgtgtgtgtatacatatatatgtgtgtgtgtgtatgtgggcatatatatatatatatatatataaaattaaggggaaagctcacccactgacctttgctatgcccaaaagtgtactccacattccaacaaatgtgttttctccccagatgtctggcgat

SEQ ID NO: 376448 - DNA, 201 bp, Homo sapiens
tatattttttagtagagatggcataaccccatctatatctcatatatatacacatatatatgtgtgtgtgtatacatatatatgtgtgtgtgtgtatgtgrgcatatatatatatatatatatataaaattaaggggaaagctcacccactgacctttgctatgcccaaaagtgtactccacattccaacaaatgtgtttt

SEQ ID NO: 376449 - DNA, 201 bp, Homo sapiens
gtggtgcatgcctatagtcctagctacttgggaggctgaggcaggaggaatgcttcagcccaggaggttgaagctgcagtaagctatgattgtaccagtgyactccaacctggccaacagtgagaccctgtctctaaaaataatatataaaaggggaccaccttctgatacagtgatatttactctagtgcacaccaccta

SEQ ID NO: 376450 - DNA, 201 bp, Homo sapiens
ttaccttgtttacaaatggggaaactgaggtcagaaaggggatgtaacttgagcaaatcctcacacaagacttagtttccttgagactgactgaagtgggrattaaggaccttcctcttaacctggttttgagactaagagaactggtgtgtgcacttccccacccagcccacaaggtttttgcaaattgtagcaagatgt

SEQ ID NO: 376451 - DNA, 201 bp, Homo sapiens
aaggaagtgacctgtgcagcgccacacaggaagtcgggaaatcagcatcacccaagaaagcaggctcctgccactcaaggtcagtgcccttgtcccacacrgccccacactcaccggcccaggggctctcgcattcatagagcatccagtggtcagctcggaagggggcgtggaaccacatggaatggtccagtgagacca

SEQ ID NO: 376452 - DNA, 201 bp, Homo sapiens
actcttaccaatatagccccgggctcgcacccagaacatctgtttgggctccattctctgcagctggctcaggggggatgggtttactggcttgatctcawtggggacctcctgagcagcaattcggttgagcgccaatgggtacctcttttggaggttagggtccctgaaagtaaagggaagagggtcggggtgagaccc

SEQ ID NO: 376453 - DNA, 201 bp, Homo sapiens; identical to SEQ ID NO: 81201

SEQ ID NO: 376454 - DNA, 201 bp, Homo sapiens
ccaaaagggactgtaactcctgtctcaggaatggggatagatgggaggttcttgaagccccaggcgaagctggtacctctggctacagcttgctctctgaracctggggcttcactcggatcacgccctcctgggcacaggtcacagctaggactccatcctgacgccacagccgcccatggaccagcccccgagagccac

SEQ ID NO: 376455 - DNA, 201 bp, Homo sapiens
gggcgagcgggcggggcaggaggcggggcggcggcaggaagctgcccgagcggcgctctgagcggcctgagcccggcggagccctgcagaacccggccgayctccatgggctgcggggggctgcacccggacccctggggcgcggcgcgcccctgaatgcaccgtgggacgcaggaggtagaggcgcacgaggcggcgcaa

SEQ ID NO: 376456 - DNA, 201 bp, Homo sapiens
ctgtgcagcgccacacaggaagtcgggaaatcagcatcacccaagaaagcaggctcctgccactcaaggtcagtgcccttgtcccacacggccccacactyaccggcccaggggctctcgcattcatagagcatccagtggtcagctcggaagggggcgtggaaccacatggaatggtccagtgagaccatgaagtgcacc

SEQ ID NO: 376457 - DNA, 201 bp, Homo sapiens; identical to SEQ ID NO: 81211

SEQ ID NO: 376458 - DNA, 201 bp, Homo sapiens
agctgggagtgtgggggatggggaaggatggggagggaacgggcccgtggacaacttgcatttgccctgacacccaccctccctgcagctctacaccctcrccgtgatcggcccaggaccgccagattgccagccagcccagatctctcgccgttactcggactttgagcggctgcaccgaaacctgcagcggcaattccg

SEQ ID NO: 376459 - DNA, 201 bp, Homo sapiens; identical to SEQ ID NO: 81200

SEQ ID NO: 376460 - DNA, 201 bp, Homo sapiens
acaggtgcccaccaccatgcctggctaacttttgcattttcagtagagatggggtttcactgttggccaggctggtcttgaactcctgacctcaagtgatmtgccgcctcagcctcccaaagtgttgggattacaggtgtgagccactacgcccagccgaacctattttttttcttaaataagtttatcgagacggagtct

SEQ ID NO: 376461 - DNA, 201 bp, Homo sapiens
tgcctttaacatctaacactggttaactctccttttaaacctgttggcttggcattataggttaatccatattcaggttctcagacctgggaggcggggarcttcgtgatcatcttgttcagtgttttccaaacctcagtcattccaatacctccctgattcttgtcctatctaaaaatgccacttgtgtccttttcttct

SEQ ID NO: 376462 - DNA, 201 bp, Homo sapiens
gtgagagaaagatctggatttggtgttagggtgcctttaacatctaacactggttaactctccttttaaacctgttggcttggcattataggttaatccayattcaggttctcagacctgggaggcggggagcttcgtgatcatcttgttcagtgttttccaaacctcagtcattccaatacctccctgattcttgtccta

SEQ ID NO: 376463 - DNA, 201 bp, Homo sapiens
ccctccctgcagctctacaccctcgccgtgatcggcccaggaccgccagattgccagccagcccagatctctcgccgttactcggactttgagcggctgcmccgaaacctgcagcggcaattccggggcccaatggctgccatctccttcccccgtaagcggctgcgccggaattttactgcagagaccattgcccgccgt

SEQ ID NO: 376464 - DNA, 201 bp, Homo sapiens; identical to SEQ ID NO: 81204

SEQ ID NO: 376465 - DNA, 201 bp, Homo sapiens
aagggcccgggattctcgggcggctcgggcgagcgggcggggcaggaggcggggcggcggcaggaagctgcccgagcggcgctctgagcggcctgagcccrgcggagccctgcagaacccggccgacctccatgggctgcggggggctgcacccggacccctggggcgcggcgcgcccctgaatgcaccgtgggacgcagg

SEQ ID NO: 376466 - DNA, 201 bp, Homo sapiens
cctgacacccaccctccctgcagctctacaccctcgccgtgatcggcccaggaccgccagattgccagccagcccagatctctcgccgttactcggacttwgagcggctgcaccgaaacctgcagcggcaattccggggcccaatggctgccatctccttcccccgtaagcggctgcgccggaattttactgcagagacca

SEQ ID NO: 376467 - DNA, 201 bp, Homo sapiens; identical to SEQ ID NO: 81207

SEQ ID NO: 376468 - DNA, 201 bp, Homo sapiens
ctgggtctagtttggaaaagcctgaccagggatgtggaggccaggtgtccaaagtggaacaagctccaagctggtcctaaaggagccccaagagattggcyggggtttcagcttatgtctggttttccagagggggctgtcagaagaactaactgctctatgggaagggagtacaaaaaaaggggcagcagccccgggcac

SEQ ID NO: 376469 - DNA, 201 bp, Homo sapiens
taacacgatctcggctcactgcagcctccacctcccaggctcaagtgatccccccgcctcagcctcccaagtagctgggactacagacacatgccccgacrcccggctaatttttgtattttttatagagacagggtttcaccatgttgcccaggctggtcttgaactcctgggctcaggtgatcctcccacttgggcttc

SEQ ID NO: 376470 - DNA, 201 bp, Homo sapiens; identical to SEQ ID NO: 81208

SEQ ID NO: 376471 - DNA, 201 bp, Homo sapiens
agaaatgagcattcccattttttagaagaagaaactagggccctggggagttgggcactgtcccacagcaggtgagcattcacagaggcacagccctggayagaatccatgtgtctatcctttgtctggacccagagctctttcccctgtgccagcatttttcaaacttgattaggtgtgatccaaataaatatattttac

SEQ ID NO: 376472 - DNA, 201 bp, Homo sapiens
aagtggtaaaaggacagctggccccttcctagagctcagtgaagaaatctggtcatctggggagtaaaggggtgggcagaccaagtccagagggagcccarcctgagaatccacaaggtgcaggctgggcactggggagtaggcaaggcttgtagacagtggctacgtggacagaaagagcaccaagacaaccgatagcag

SEQ ID NO: 376473 - DNA, 201 bp, Homo sapiens
gaccagcccccgagagccacctgtgggtgaggtgaagggtgatgatggcctgcttcagaacagccaaatacactttttttttttttcctgaaacagagtcycactaagttgccaggctggtctcaagcgcctgggttcaagggatcctcccgcctcagcctcctgagcagctgggattacaggcgcacatcaccatgccca

SEQ ID NO: 376474 - DNA, 201 bp, Homo sapiens; identical to SEQ ID NO: 81217

SEQ ID NO: 376475 - DNA, 201 bp, Homo sapiens
tgaagaaatctggtcatctggggagtaaaggggtgggcagaccaagtccagagggagcccaacctgagaatccacaaggtgcaggctgggcactggggagyaggcaaggcttgtagacagtggctacgtggacagaaagagcaccaagacaaccgatagcaggctctggggccaggaaaggggggctggacaccaaggaat

SEQ ID NO: 376476 - DNA, 201 bp, Homo sapiens
ctcatactcaaagctctgcctccttctagcattttttaaagaatgtaatctatggaatgagctacttattttctaatatcacattgctgtttgttagctgygcaaccatagaaaagttacctagggtctttgttctttagtttccttgtctcttaagtgggaataaaaattagttctatactgcagggttgttgtaaagac

SEQ ID NO: 376477 - DNA, 201 bp, Homo sapiens
actctccagcctctttcatatgagcactaatcctacttaagaagactccaccctcatgatcttatcacaaaggccccacctcctaatactgtcatcttagrgttaggtttcaaaatatgaattttggattgacacgtacattcagaccatgcaggggacaataccctgtcattgtcaaacaagcattaatgccctgaaaat

SEQ ID NO: 376478 - DNA, 201 bp, Homo sapiens
tttcaaagtttggcagaagcaaagtttagtagcagtttggatggcaaaattataggataatttgatgaagcataaacatcgtacaaatgctttgttttacktggagcctcagagacataagtctaagcatctatggacgttaaaagtcatctggagctctgttcagttagttgtctcagttgtaactctgctaccatgttg

SEQ ID NO: 376479 - DNA, 201 bp, Homo sapiens; identical to SEQ ID NO: 81224

SEQ ID NO: 376480 - DNA, 201 bp, Homo sapiens
aggtccaatcagttgcttgctgtgaatgaggaggttgagaggcccaagtaggattttaaaattgacaggtaggccggggcaatggatctctaagaattgcycactatatgaagccaacagaattaaaaagatagagtaaatgagatatcagggaagaagtagatcacccatatcccttcctagtatggaacagaccaagtg

SEQ ID NO: 376481 - DNA, 201 bp, Homo sapiens
cactcaggctatctcttgaaatttcaaagtttggcagaagcaaagtttagtagcagtttggatggcaaaattataggataatttgatgaagcataaacatygtacaaatgctttgttttacgtggagcctcagagacataagtctaagcatctatggacgttaaaagtcatctggagctctgttcagttagttgtctcagt

SEQ ID NO: 376482 - DNA, 201 bp, Homo sapiens
acatgataaataataaaatcatcattggtatatataaatagatgatagatagaccagacagatcgatgacagattaagtgtgtgtgtatatgcacaccatygcactctgtgacttttaaaactatcttgtggatctccttagcacatctcttgtgctctgcttatattctggcccagatgtgcagagcagctagttcacaa

SEQ ID NO: 376483 - DNA, 201 bp, Homo sapiens
tgtttgaagatagaatatttctgcatgatccacaaatacaggagcttacataatatttatctctgcttcagtacagagagcaattgcagcatgctttcctycctttaagccccgagattattctaccttcatgtctttctattcaccttcctctctgaagttcaggggtgggactgtgggggcattgaatccttctgtgcc

SEQ ID NO: 376484 - DNA, 201 bp, Homo sapiens
tgtttctatgccttgaaagtctgtgatggttcctatccaaggcaggtggtgtaaatattcatctcaaatccaaatgaagcctggtgtaaagtttcagattmtcagggacaatccagcttccttgttttctccctttgctaatgggcaaattgtttttcccagtgcagcattcaactgaagatctgtttttccgctgttatg

SEQ ID NO: 376485 - DNA, 201 bp, Homo sapiens
gactcaaagaaaagggaagtaacaggcaagggtgagatccagagatccaaagacatgcagaaatagaagtcagatggcctattttggtcccagggtattakgaggctctctgaagttctgcaagaggctctctgaaagtctgcaatcatctacaaaataataaggggccaagcagtgatcggccttaccattagcaatgtc

SEQ ID NO: 376486 - DNA, 201 bp, Homo sapiens; identical to SEQ ID NO: 81225

SEQ ID NO: 376487 - DNA, 201 bp, Homo sapiens
agagtaaccagcattttatctgaaaacccaaattctattcttgatgaccattgagtctttctcaattggatgctgagaggcaaaagtataaattatgcagscttcgacttccacaaagccccagctcccttttagtctttgttgctcatttttagcttctgcctcttgtggtttgcttgggtaataaaaagtaaagaaatg

SEQ ID NO: 376488 - DNA, 201 bp, Homo sapiens
acttaagacaagaaaataattacttttcttgccacctttgctcatttgttatttagcattccaggcaagggttaattaaaagcttctgtgtgttggctctrtggctgatcacaggccaaaattaacagattgaagctgtactattacaagattacattatgtctctgttagagatagcaaccaataaaactggatagtgct

SEQ ID NO: 376489 - DNA, 201 bp, Homo sapiens
gtaaatccattaaaaacctgggggcctgccagaaagtgcctttatgcttggctctgtattagctttcgtgactttcctataatgaattgtagcttgcttgrgtcattaagaagattctgacagggaatcagctggaatctgctgttctttgaaggactcaatttatctatgattcagtgcttaagcagtcaaaaggcttga

SEQ ID NO: 376490 - DNA, 201 bp, Homo sapiens
aatctgaaaaccctaagttgcactgttaacccatcatcttgttagccctgcccaggatgtcaaagggggaaaggaaatcaacatttttctgcattaaatgstgacttaaagaaagctacctccatatttgaccctgtaaatccattaaaaacctgggggcctgccagaaagtgcctttatgcttggctctgtattagcttt

SEQ ID NO: 376491 - DNA, 201 bp, Homo sapiens
ttcaacctccacaagcagaaatttaaatccagtgaaagttttggttttttgtaataagaagaaatattttcttattgaaacgacgacatttgaagctaatraaagaatctcaccaataatgtatttttacactggattaaaccgctggcaaatagcctaatgtttaacaattctgtcataaattgtgcggaatgtctactt

SEQ ID NO: 376492 - DNA, 201 bp, Homo sapiens
gctccgtttcccttttttcaacctccacaagcagaaatttaaatccagtgaaagttttggttttttgtaataagaagaaatattttcttattgaaacgacracatttgaagctaatgaaagaatctcaccaataatgtatttttacactggattaaaccgctggcaaatagcctaatgtttaacaattctgtcataaattg

SEQ ID NO: 376493 - DNA, 201 bp, Homo sapiens
ggacacaaatagtgtccctggcaacaaagacttcagctcctcccagctcaggaggctttcccaggacatgtcatatagattcggctctgcacagctgttckagaaatctgaaaaccctaagttgcactgttaacccatcatcttgttagccctgcccaggatgtcaaagggggaaaggaaatcaacatttttctgcattaa

SEQ ID NO: 376494 - DNA, 201 bp, Homo sapiens
agttttgtgcatcacttaaagattgtaggcattattctcagtataaggtgaagccaatgaagaatattaaataggaacgaaactgtctgatgtacattttsaaagctcattctggccactgtgtagagaatggatattaggaagatgaaaaaggaagtagggaggccagttaggaggctactatagttgtccaagtaccag

SEQ ID NO: 376495 - DNA, 201 bp, Homo sapiens
aggcatcatagaacaggaaggacacaaatagtgtccctggcaacaaagacttcagctcctcccagctcaggaggctttcccaggacatgtcatatagattyggctctgcacagctgttcgagaaatctgaaaaccctaagttgcactgttaacccatcatcttgttagccctgcccaggatgtcaaagggggaaaggaaat

SEQ ID NO: 376496 - DNA, 201 bp, Homo sapiens
gataggtgcagggtatgacacattcattgctcaactgagaaattcatctttgcccaacagaaaaataattttctaaatttctttgtaaaaagagagtccaycactaaacacaaagacagtgactaagggaataaaggtgtgggtccggcagtcaactcactgggtccagaatgaatccagtcctggcaccatcatttgcaa

SEQ ID NO: 376497 - DNA, 201 bp, Homo sapiens; identical to SEQ ID NO: 81226

SEQ ID NO: 376498 - DNA, 201 bp, Homo sapiens
tgccttgaaagtctgtgatggttcctatccaaggcaggtggtgtaaatattcatctcaaatccaaatgaagcctggtgtaaagtttcagattctcagggasaatccagcttccttgttttctccctttgctaatgggcaaattgtttttcccagtgcagcattcaactgaagatctgtttttccgctgttatgtggaagac

SEQ ID NO: 376499 - DNA, 201 bp, Homo sapiens
aacctttctatctggctgtccttaacatttttcccttcatttcaactttggtgaatctgaaaattatgtgtcttggagttgctcttctcatggagtatctytgtggtgttctctgtatttcctgaatttgaatgttggctaggttggggacattctcctggataatatcctgaagtgtgttttccaacttggttccattct

SEQ ID NO: 376500 - DNA, 201 bp, Homo sapiens
aaattagagatcagcaaagacagcagacaaaaattttctctaggatgcctcgccaaacaaggagtttaaagataagaatctgagtccagaatctgacaggscttgatgctactgttccctaaaatttgccctttaggactcaaagaaaagggaagtaacaggcaagggtgagatccagagatccaaagacatgcagaaata

SEQ ID NO: 376501 - DNA, 201 bp, Homo sapiens
ctctttgttaggcatcatagaacaggaaggacacaaatagtgtccctggcaacaaagacttcagctcctcccagctcaggaggctttcccaggacatgtcmtatagattcggctctgcacagctgttcgagaaatctgaaaaccctaagttgcactgttaacccatcatcttgttagccctgcccaggatgtcaaaggggg

SEQ ID NO: 376502 - DNA, 201 bp, Homo sapiens
gctaccatgttggaatgatctaactatggctccttggagatgggcacttagaagtagtggagtttagatgtcctctacaattgcacaaatcccttttaatkgaatcacaattaacgggaggccttgcctactggtaataactagagttacagttagactctatggaaggcaaagaaattaagatcttatggcttcttcctt

SEQ ID NO: 376503 - DNA, 201 bp, Homo sapiens
ttttacgtggagcctcagagacataagtctaagcatctatggacgttaaaagtcatctggagctctgttcagttagttgtctcagttgtaactctgctacsatgttggaatgatctaactatggctccttggagatgggcacttagaagtagtggagtttagatgtcctctacaattgcacaaatcccttttaatggaatc

SEQ ID NO: 376504 - DNA, 201 bp, Homo sapiens
tgttcattgattaactcaacagatatctattgagtatccgtagatctgggagtatttcagacttggattacagggtgatgaatgaagtagacttggttccytccttgtggagcttaatttgggtagagaagaaagattataaacaaataagcaagtcaagtgtaaatacaaaatataatagctctcatttagggaacaggc

SEQ ID NO: 376505 - DNA, 201 bp, Homo sapiens
ggctgagaattaaatataggtaaacttgaggaaggctaccaagtggtcatgttcattgattaactcaacagatatctattgagtatccgtagatctgggastatttcagacttggattacagggtgatgaatgaagtagacttggttccttccttgtggagcttaatttgggtagagaagaaagattataaacaaataagc

SEQ ID NO: 376506 - DNA, 201 bp, Homo sapiens
ctgagtttaattttctcataactggaccccatatttgaagctcttctcatttcattggtttgctaacaaatgtcttctctttgtagaggaaattttaagtragcaacaaatacatcacaccaaaattggcattgcagtgacagttaagattcttgatgagagactgcattcagaaaaatttaatggcattccatgcttaat

SEQ ID NO: 376507 - DNA, 201 bp, Homo sapiens
atccatgaaaatattctgtttttcttacaatgttttacccaatggtttttagtatccattgatcatccttgcttaaatcaattattacactgaggactgamaatttgcttttctataattcattcttttttatttagctggcattcatgtgtaaggagaaaatctctatctctccctctcctgctttctaactcttcctcc

SEQ ID NO: 376508 - DNA, 201 bp, Homo sapiens
gactattgttgaagtggtgaatgtttatgctggtggcttatatttctaagcctgagtcctgtcactttgatgactttacatttaccatggcaaccacagcygcagctggctaagaactttggagtagaagtgatgagtgtgacttaaattttctgaatcagtagccaggtgattttgactgaatgtcatggatagtctacc

SEQ ID NO: 376509 - DNA, 201 bp, Homo sapiens
tgtggagcttaatttgggtagagaagaaagattataaacaaataagcaagtcaagtgtaaatacaaaatataatagctctcatttagggaacaggccacarttgatgactcctcagttagagtggctgagaaatcctctctgagaaggagactttgtaactcaggcctaaaacactaagtgtcagtcagccaagctctaaa

SEQ ID NO: 376510 - DNA, 201 bp, Homo sapiens
tgtaacataatgaaggtgaaatatggccaaaggacaatgaactgggcctttgaatacttttatttatcccactctccttataacaaagggaataacaaagwcaacaaagattagaggagaagaatggaaagcacaattctgctactagttcaaattctgctactagtttctttctaaaaagaaaacagctaaacagtgcct

SEQ ID NO: 376511 - DNA, 201 bp, Homo sapiens
atttcaaatgagttattttaaatagaaatcaccaagttcttctagttgcattgctatcatttgcttcagtcaatcaacaacaccgaaagtcaggcttaaargctagaactggtccccactggtcatcagtaatgcttataaggagaggatatgggcaacacaggaagcagcatgtctcctacaagtcctgcactttagagt

SEQ ID NO: 376512 - DNA, 201 bp, Homo sapiens
ctaaccaacttaccaagccatctaagtgcttctgagacttttcagtttgcacaatttctttctccttttcaacagttacccagcgcttctgccctactctyttgtaagctgacacagttgttgttggtacaatcttgttctatcaccagcatcaaatttgcttaatactgcttgttgacatcccctcagctgtcattcaca

SEQ ID NO: 376513 - DNA, 201 bp, Homo sapiens
ttgttgacatcccctcagctgtcattcacagcaaaccaccatgtgccatgatcacaatgtattattagcttcgccacactaatttggaaacattcttttaratattaaaacaccttacttctagtattagtttgggactgcagaggggcaaagataccatttacagtatataggagtccaatattcccaaccaaccttgat

SEQ ID NO: 376514 - DNA, 201 bp, Homo sapiens
tctttgcccaacagaaaaataattttctaaatttctttgtaaaaagagagtccatcactaaacacaaagacagtgactaagggaataaaggtgtgggtcckgcagtcaactcactgggtccagaatgaatccagtcctggcaccatcatttgcaaaagcgtgttaacgtctgcagattccttaacctttgggtaaatggta

SEQ ID NO: 376515 - DNA, 201 bp, Homo sapiens; identical to SEQ ID NO: 81223

SEQ ID NO: 376516 - DNA, 201 bp, Homo sapiens
ccttgaaagtattcgggaaatccaggaaagctatgaaagacaagaaactagtcttaaaaaaatggttctgttttttacaaaattcaactgataaataagtwtatgtgacctgtttttagataacgcactgtattataaaattgccatttttatgggtccaaatagaatggcagctactttaagtggctcaacctggtaact

SEQ ID NO: 376517 - DNA, 201 bp, Homo sapiens
ctatctcttgaaatttcaaagtttggcagaagcaaagtttagtagcagtttggatggcaaaattataggataatttgatgaagcataaacatcgtacaaaygctttgttttacgtggagcctcagagacataagtctaagcatctatggacgttaaaagtcatctggagctctgttcagttagttgtctcagttgtaactc

SEQ ID NO: 376518 - DNA, 201 bp, Homo sapiens
agatgttactggatcagggatacttttctgaaggtccagttgttccatttaccagaacattcctggtctactgtattcattctcaaagtcctctccatttktcccaattacattttaacagaatacggagtcataagccttggtgtaggagcttgggattggcgagaatagtctcagaattgccttcttaaattttctaca

SEQ ID NO: 376519 - DNA, 201 bp, Homo sapiens
gaagatgttactggatcagggatacttttctgaaggtccagttgttccatttaccagaacattcctggtctactgtattcattctcaaagtcctctccatwtgtcccaattacattttaacagaatacggagtcataagccttggtgtaggagcttgggattggcgagaatagtctcagaattgccttcttaaattttcta

SEQ ID NO: 376520 - DNA, 201 bp, Homo sapiens
aatgtttaacaattctgtcataaattgtgcggaatgtctacttcctaaattggaaaatgaaataatacaacatggataatttaaaattcatacactgcctwttttttttaaagattaaaatggtttacagtaaaaacatggatcaattatttttaaataaaaaggaaaattctgaaaacaactaataatgaaatgaagaat

SEQ ID NO: 376521 - DNA, 201 bp, Homo sapiens
aactaccatttcataaattcctgtgccaggaaccctgctaggctttgtatgtacattatcactaggctacaaaactctattgaataagaaccatttattayctcattctgcagatgaggaaactgaggcacagagaagttaaagaaggcattaatggttaaagacctgagaaatattggccatgagatttgaaatagagtc

SEQ ID NO: 376522 - DNA, 201 bp, Homo sapiens
caaaccagcagggagcgttattaacatttttaaaaaattaggacctttctccaggtaatttacaacaaattaagtagatcattattttagatagacaatcktggaaagttccaagaaaataaactccacaacttctttttgttacttgcttcgtttcccttctttcaacctccactacggaatttagatccagtgaaagtt

SEQ ID NO: 376523 - DNA, 201 bp, Homo sapiens
acagggtaaataatatgcccatactatcagaattacaaatgataataccaggacttgaatataaaatgtcagatcatagttcctatattcttaactgttgytaacaaaaatgtttgacaaagcccctgcctgtgtttgctgcctgaagtgacctctttattcatttcccccacagcttcaacaatttaattacacctggtt

SEQ ID NO: 376524 - DNA, 201 bp, Homo sapiens
tacaaggctgagaaaacatcaagaaagaggagaagctggggaaaagccatttcaaaccccttctaggagtgaagctgcatttgaagaggatggtaagacaygtgggtttagatatgattagtcaagccttcagctggggttcttagacagtcatgcttatttctaatcttttatttctaatttaatttgacttataactaa

SEQ ID NO: 376525 - DNA, 201 bp, Homo sapiens
tttaattgccgtttaaacacacatgctctcacataacacagaaggtgagagctgaatgaagttttctgggtaatggcatgaaatgttttccttatgagaartggtgttgagttacagcgtgcagacggagaacggggaggagagaaacggcagtctcaatctggcccccaccttttcttgggcttgtaggaaggtggacat

SEQ ID NO: 376526 - DNA, 201 bp, Homo sapiens
tgtaactaacatttattgaaggcttattgtgtgctaaacacttgacagtcattaccccaaccctctgagatagacacaatcgctatccaacttaaaaatarttagaaaaataagattagacagggtaaataatatgcccatactatcagaattacaaatgataataccaggacttgaatataaaatgtcagatcatagttc

SEQ ID NO: 376527 - DNA, 201 bp, Homo sapiens
taattgcactgaataatttttattattgtaactaacatttattgaaggcttattgtgtgctaaacacttgacagtcattaccccaaccctctgagatagayacaatcgctatccaacttaaaaatagttagaaaaataagattagacagggtaaataatatgcccatactatcagaattacaaatgataataccaggactt

SEQ ID NO: 376528 - DNA, 201 bp, Homo sapiens
ctgtggctgatcacaggccaaaattaacagattgaagctgtactattacaagattacattatgtctctgttagagatagcaaccaataaaactggatagtrctaagtaatgctaagctattaacttttaaccttattatagttttatattctgtattttctaaatgtgtctgaatgtcttgttttactttaaaatattttg

SEQ ID NO: 376529 - DNA, 201 bp, Homo sapiens
gcagttcatttcattgcacgtgatatttgctcattgcctatcaatcaggagcggtgcgccatgccaggcagttgaggcctttcatccttcaggcatattayttcatctgatccttgtggccatgccagattagcaaagtgttacctctctttattaacagatgaggggggaaaaaagagcaaatggtaaagtaatttgccc

SEQ ID NO: 376530 - DNA, 201 bp, Homo sapiens
accagggaggtgccagggtaaatgggagaaatggtcagcttcatcatagattgtgcacatggaacgtataggacttgccgtcagataagatgtgaagagartaagaatgacaccaatcagaaacaaaccctaggactggtatctgaacaacttggtgggtggtaggctcaaaactggaggagcaggtttggaattgcagtt

SEQ ID NO: 376531 - DNA, 201 bp, Homo sapiens
agagatttgagtgattcaacaagtcaaagactgccagcagaagctgaaagaggcaaggaacagaatgtcccctacaacatatggagggactgaggtcctaytgacatcttggttttagaattctggaccccagaaatgtgacagaatatgttaccaagtttgtggtaatttgtcatggcagtcagaagaaactaatataaa

SEQ ID NO: 376532 - DNA, 201 bp, Homo sapiens
tgctaaattctattaattgagaggtagtttgcagatttcagtgataatgatctgtcatctagataactatcctcatcttgttctctaagccttctcatacycaaagctctgcctccttctagcattttttaaagaatgtaatctatggaatgagctacttattttctaatatcacattgctgtttgttagctgcgcaacca

SEQ ID NO: 376533 - DNA, 201 bp, Homo sapiens
aggccccacctcctaatactgtcatcttagagttaggtttcaaaatatgaattttggattgacacgtacattcagaccatgcaggggacaataccctgtcrttgtcaaacaagcattaatgccctgaaaataggacccttccagcctggtcaggagatgaaactgctatctccaagaacagaagactacatggagcgggtt

SEQ ID NO: 376534 - DNA, 201 bp, Homo sapiens
taaaattctcattgtcaccttcctcagtcagaagttttgtgtgtttgtgaccatgggattatgtaaaagttcattcacagagatgcatggatatctttcgraagttgacaagtccttttttttttatttttcaaaatttatttcaaatgagttattttaaatagaaatcaccaagttcttctagttgcattgctatcattt

SEQ ID NO: 376535 - DNA, 201 bp, Homo sapiens
ctcatcaagaggcatataatataacataatatcaccagtattgttgatactaactttgttagttaagatgttgacagctaaacctttactttgggattaaraagtaatttgtggaatgacacattgatccatgaaaatattctgtttttcttacaatgttttacccaatggtttttagtatccattgatcatccttgctta

SEQ ID NO: 376536 - DNA, 201 bp, Homo sapiens
tactttggtcttcttagtctgaaaagtcaactcctcacacactttgtttaaataccagtgtgtgtgtgtgtgtgtgtgtgtgtgtgtgtgtgtgtgtgtgtattttaagttcatgccatttgtttggtaccagtgaccatgttctgaaatttttgatttcctcttgttacctgcaggataaatgtttttggagtgaaaata

SEQ ID NO: 376537 - DNA, 201 bp, Homo sapiens
atactttggtcttcttagtctgaaaagtcaactcctcacacactttgtttaaataccagtgtgtgtgtgtgtgtgtgtgtgtgtgtgtgtgtgtgtgtgtgtattttaagttcatgccatttgtttggtaccagtgaccatgttctgaaatttttgatttcctcttgttacctgcaggataaatgtttttggagtgaaaat

SEQ ID NO: 376538 - DNA, 201 bp, Homo sapiens
atgccataagtacatacacaagcagaatgggagaaaagaataaatcccatggcagttggcagacagccagttggaaaggcaatcataaaccacttgggaacattaaataagtcagaatgctatcttctagcatataatctagtaatgatagcaataactaccatttcataaattcctgtgccaggaaccctgctaggcttt

SEQ ID NO: 376539 - DNA, 201 bp, Homo sapiens
ttcaatcactgataccctttcttccacttgattaaatcggctattgaagcttgtgcatgcatcacgaagttctcttgccatggttttcagctccatcaggycatttcaggtcttctctacactgtttattctagttagccattcgtctagtgttttttcaaggtttttagcttccttttgatgggtttaaacatgctcctt

SEQ ID NO: 376540 - DNA, 201 bp, Homo sapiens
gtgggtaagccaacctttctatctggctgtccttaacatttttcccttcatttcaactttggtgaatctgaaaattatgtgtcttggagttgctcttctcmtggagtatctttgtggtgttctctgtatttcctgaatttgaatgttggctaggttggggacattctcctggataatatcctgaagtgtgttttccaactt

SEQ ID NO: 376541 - DNA, 201 bp, Homo sapiens
aacagcttacccttgagctgtgaccacagcaacatgggaagtttctttagcttcagagtttctgccataatcacactgagctcaagaagctgtgggatgayagagaaaaactggctgaaaaacataaaatgtggccttggaagcataaacaggaatagtacccaattagtaagtagataggagtccctttatgaggggcag

SEQ ID NO: 376542 - DNA, 201 bp, Homo sapiens
ttttttgaagggttttttgtgtctctatctccttcagttctgctctgatcttagttatttcttgccttctgctagcttttgaatgtgtaagctcttgcttstctagttcttttaatttgtgatgttagggtgtcaattttagatctttcctgctttcttttgtgggcatttagtgctataaatttccctctacacactgct

SEQ ID NO: 376543 - DNA, 201 bp, Homo sapiens
tttttattgcatctatttgattcttctctcttttcttattagtcttgttagcggtctatcaattttgttgatcttttcaaaaaactagctcctggattcaytgattttttgaagggttttttgtgtctctatctccttcagttctgctctgatcttagttatttcttgccttctgctagcttttgaatgtgtaagctcttg

SEQ ID NO: 376544 - DNA, 201 bp, Homo sapiens
taagcaatgcagtggtgccttttgaatagtgtgtatgtgttcatttgtgtgtgcacgtgcatgcatttgtgagcatttgtgtttgtgtgttagagcacagyactctttttcactcaaaagtcatgtaggagagcaggacataaaaaggaaaacttgttaaaagggttcagactaggctgtaacataatgaaggtgaaatat

SEQ ID NO: 376545 - DNA, 201 bp, Homo sapiens
tgattttaacaaattccttctattttcctttgttgtcttccttaaacaaatttcagtgaagatgtagtttgctcccttctgaagcaaaccagcagggagcsttattaacatttttaaaaaattaggacctttctccaggtaatttacaacaaattaagtagatcattattttagatagacaatcgtggaaagttccaagaa

SEQ ID NO: 376546 - DNA, 201 bp, Homo sapiens
atgcacaccatcgcactctgtgacttttaaaactatcttgtggatctccttagcacatctcttgtgctctgcttatattctggcccagatgtgcagagcasctagttcacaataacctcccaaccaccagtgtcatcatgtgctttgtggatgaagtgtggtccactctcctgagatctgttcacagtgtcatcaatcgct

SEQ ID NO: 376547 - DNA, 201 bp, Homo sapiens
aagtggaggcttcctattacttcttcagaatataagcctgcagcacaagcattaagccagccacaggaagagctgcagggggcttaaactttccctgttgwagtgaccacttaaacagacacaagtaagccagccccaacagaaagccaagcccagaccgtgcaccgaagcgtgttttccccaaacttacccctcaatcag

SEQ ID NO: 376548 - DNA, 201 bp, Homo sapiens
agggaacaagtctttcttgccaacctttgcaagtttccctgtagcctttaattttttccgcatattctgatccctgaagatgtcccttactttcttgttcrctaagctaagcatgtaaaattgaggaccaatgtactgagcccccttttatgaagtctggcaattctgtgagcatccagtctgcatcagtgcagcaccctg

SEQ ID NO: 376549 - DNA, 201 bp, Homo sapiens
acggagaccacctcatcgaccaagggctagatgttggcaacctcacccagcaaagggagctgcgaaagaaactgaagtgcaaaagtttcaaatggtacttrgagaatgtctttcctgacttaagggctcccattgtgagagctagtggtgtggtaagttcaagtggcaatttaaaatcttactccataaaaacaaaacaca

SEQ ID NO: 376550 - DNA, 201 bp, Homo sapiens
tctccctcagttcatataagatttggttggttaaaagtgtcagagacctcaccttactgtctcttgcttgctctgtcatgtaacatgcctgctcccacttygtcttctgccatgggtaaaagctccctgaggcctcaccaagagctgagcagatggcagagccatgcttcctgtacagcctgcagaaccgtgagccaatta

SEQ ID NO: 376551 - DNA, 201 bp, Homo sapiens; identical to SEQ ID NO: 81229

SEQ ID NO: 376552 - DNA, 201 bp, Homo sapiens
agaagactccaccctcatgatcttatcacaaaggccccacctcctaatactgtcatcttagagttaggtttcaaaatatgaattttggattgacacgtacrttcagaccatgcaggggacaataccctgtcattgtcaaacaagcattaatgccctgaaaataggacccttccagcctggtcaggagatgaaactgctatc

SEQ ID NO: 376553 - DNA, 201 bp, Homo sapiens
aggtatatgtacactcttctattaatatattagtatcttagaactgcgtggaaccaagcatggtggtatgtgcctatagtctcagctacttgggaggctgragcaggaggattgcttgagcctagaagttcaaggctgaggtgtgctgtgatcgcacctgtgaatagctactgcacttcaacctgggcagtatcatgagac

SEQ ID NO: 376554 - DNA, 201 bp, Homo sapiens
tgatactttaatctgtcattcataatgtgattggacttctctgcttctgccttttgatggttcttaacgtaaaatgcatctcgtgccttgtcaggtgtgcrtttgcgagtaacttgctgaaatctgttgtgtaatgaatcattttatattgtgttgtagatgctcaaaaccaaggaacagaaagttaatccaagagaaatt

SEQ ID NO: 376555 - DNA, 201 bp, Homo sapiens
caaaatatttggagacatcttgtatgatgatggtattacgtacattattgacatgtttccattcttttcctacagagtcttcaggcagaaaggaacaaacyaactaaaaatatgattaacattattagccgcctacaagaggtctttggtcatgcaattaaggctgcatatccagatttggaaaatcctcctctgctagtg

SEQ ID NO: 376556 - DNA, 201 bp, Homo sapiens
aacattaccaaacacctcccagacaatgaatgtattgaaaaagttgaaattgctggtcctggtatgacataatgttatccttcttaatagttgtattgaasatgagtcctttttgaagttaaaaaagaacacacattttaattacagggttaaactttgtatactgaacaagatggtgaaagcactgtggattgtgatata

SEQ ID NO: 376557 - DNA, 201 bp, Homo sapiens
actttgggttccagttttattctccagtttgaatcattatagcttttttaaagcctttgttaccaaagattctggaagtatatcctatggaatttggaaargaagcatagaaaccctattcttttccctgcattagacaacttaggactgaggtagttggtgcaaatagtgacaagttggtgttgtcctgtccttcaggac

SEQ ID NO: 376558 - DNA, 201 bp, Homo sapiens
gttagtttttttggaatatcacttagttggatttgtctgatattggctcctgttctgttaattctgtttccaggttatacagtcttataagtcttataagytgtactctgtttccaggttatacagtcttacaagaatagatgtagagttcttatcagttcatatcaggaggcacatgatattgataagcttcataattaa

SEQ ID NO: 376559 - DNA, 201 bp, Homo sapiens
aatttttcatcttttcttccagttttcttactgttttccttttaattttttgaacatgttaatcatagttttctttaaacattttaaaacggttttagacmtaaaaaagttgcaagatagtacaaagaattttgtatctttcatttagtatccccagatactaatatctttcatagctatatagtatgattatcaaaatca

SEQ ID NO: 376560 - DNA, 201 bp, Homo sapiens
acctgtccaaaggatgtaatccttcataggtttgaacactgtgtgtttttaccaaagtggccattggcactgtttgcttttttacaatcatgtggacacargcataagtaaagaaaatttgtcaaccaggcaaaatgtggttctttaacagctagaattctaaaaagaaaaaaatcacttccacaaatatgcttatatctt

SEQ ID NO: 376561 - DNA, 201 bp, Homo sapiens
gatggacatactggtgtctgagtgctccgcgcggctgctgcagcaggtttggacgcaggagaccggcgggaaggcctgaaagagatggagcaggctctgaytcctgcccaagcggcttcgggggcgggacagctaggcgaggaccatcctggtcctctcagtggagcggcacggtccctgtgggaacaggaagggttgaga

SEQ ID NO: 376562 - DNA, 201 bp, Homo sapiens
ggctatttttccatttttttgtagagacgaggtcttagctgtttcccaggatgagaatagatcttaaatgttcacagcacacacgcgcgcgcgcgcgcacrcacacacacacacacacacacacacacacgcaaatgataactgtatgagatgaaggttatgttaattattttggttgtggtaatcatttcagaatgtata

SEQ ID NO: 376563 - DNA, 201 bp, Homo sapiens
catccttttcccaaagctgattgatccatttactcaccttagactctatcttccccactcccatgacatctctcatattatctttttttttttttttttttgagacggagtctcactcttgttgctcaggctggattgcaatggcacaatctcagctcacaataacctccacctcccaggttcaagcaattctcctgcctc

SEQ ID NO: 376564 - DNA, 201 bp, Homo sapiens
attggaggttggaaaatggtagtgttctgtcattctttctccatttgttacttgggattctcttatgctgaactttgttactaattattttggttatcctyaggtacaattcatataaaacaggtagggtagtagaagtgcttgatttttttatcaattgcagaataataggtttgttccttagcatctcaaagtgagttg

SEQ ID NO: 376565 - DNA, 201 bp, Homo sapiens
tatttagaaaatatagttcttggcaattaaaaaagaccttggctttttcctcctttgttaatgtagcttagtatccgtgctgcttaacagcagttcccaawgatgggagaatattgcagactgaaggggtttgattcgtcagctcacatcagagtctacatgtgccatgctccttcttgggagcatttgtagagtggtcat

SEQ ID NO: 376566 - DNA, 201 bp, Homo sapiens
tattttcttgtttggaaaattctatagaacatggaatatctcactcaagaaagaacattcgactaaatcagtggttcatcagcttagttcttctttacaaycacccagtaagcttttaaaatatgtcctgagcctttcctctgaaccttttttactattttatttttttagactcttagtggaaccaaggacaaaactcct

SEQ ID NO: 376567 - DNA, 201 bp, Homo sapiens
acacaatgtgtttgtgggtcccaggaggaatctttgggtgtttttgataatggaaacttcttggaaaacacttgttatcttttcttaccttaggctgtctkccctctgtcatattacatagttaatgaagtagccagaattaatgtattataaggcaagtaggcatttgttaaagtcatgcctgaggactgaaactttatt

SEQ ID NO: 376568 - DNA, 201 bp, Homo sapiens
  misc_feature (1)...(201): n = A,T,C or G
attgcacagtaagtttattttgtgaattgctgagcatttatttagaaaatatagttcttggcaattaaaaaagaccttggctttttcctcctttgttaatntagcttagtatccgtgctgcttaacagcagttcccaaagatgggagaatattgcagactgaaggggtttgattcgtcagctcacatcagagtctacatgt

SEQ ID NO: 376569 - DNA, 201 bp, Homo sapiens
gcttatattgctctgactttattgcacagtaagtttattttgtgaattgctgagcatttatttagaaaatatagttcttggcaattaaaaaagaccttggmtttttcctcctttgttaatgtagcttagtatccgtgctgcttaacagcagttcccaaagatgggagaatattgcagactgaaggggtttgattcgtcagc

SEQ ID NO: 376570 - DNA, 201 bp, Homo sapiens
tgccaatcccagttgcaaaggaaggtagaaacctagagtgaatgtccaagctaagaagaggattgctgtgatttccctagaccagtcacaattcatccccygggcagggcatattgtctcatttcatgaaattggaatctttgtagcagcacagaatatggagattggcagtggcagcgagaggttttggggtacagctcc

SEQ ID NO: 376571 - DNA, 201 bp, Homo sapiens
tagattcttgcttgggcaagctctggaaataaaactttaacagaaagtagcacattcattttggtactctttgtgttagaaaagcatgcttcattgttatrtttgagggattttttaaacaccccccccccccaccaaaaaaaggaaaatgatattatatccttggtgttatgtaaacttttttgtttaatacataaaatt

SEQ ID NO: 376572 - DNA, 201 bp, Homo sapiens
gaagaggttttataatagcacttgtctcacaagatttatgagcgatttgaattttacagatctattcctaagcaaaagagccttaagtcttttttttttttctttaaagaagactagcaagtaactttccgtttctgttgtagtctgtgcacttccagacaatatttgctgctgctcaaatgattggttggtatgacccta

SEQ ID NO: 376573 - DNA, 201 bp, Homo sapiens
tgaagatggtaatgatatacttgatcccaagaggctacttttcatttgataccatattagaattaagaaagtccacagtttcctttagtccacataagctrtaatggtgtaaacccagctgagtgattttgtatctatatcatcactgccagggaatgtagccttttaggtagatagtatgtacaaagtttagtgaaaacc

SEQ ID NO: 376574 - DNA, 201 bp, Homo sapiens
tgagaaggaatggaaactaggccggtgcattttacggttccctgagattctgcaaaagattttagatgacttatttctccacactctctgtgattatatawatgagctggcaactgctttcacagagttctatgatagctgctactgtgtggagaaagatagacagactggtgagtgtctttttttttttttttttttttt

SEQ ID NO: 376575 - DNA, 201 bp, Homo sapiens
  misc_feature (1)...(201): n = A,T,C or G
tgacctgtgctctgatagcaccctgagtatccaggcaaccttgatggttaacattttccaaggtttctaatagatcatggtgaggaaaaaattatgtgctntctttagctctctaataaatatatttcaaaatattcttagaataactaaatatttacatagtagaatgagtaagcattcattttccttcagggttctttt

SEQ ID NO: 376576 - DNA, 201 bp, Homo sapiens
catgagaaggaatggaaactaggccggtgcattttacggttccctgagattctgcaaaagattttagatgacttatttctccacactctctgtgattatawatatgagctggcaactgctttcacagagttctatgatagctgctactgtgtggagaaagatagacagactggtgagtgtctttttttttttttttttttt

SEQ ID NO: 376577 - DNA, 201 bp, Homo sapiens
  misc_feature (1)...(201): n = A,T,C or G
aacatctgacctgtgctctgatagcaccctgagtatccaggcaaccttgatggttaacattttccaaggtttctaatagatcatggtgaggaaaaaattangtgctttctttagctctctaataaatatatttcaaaatattcttagaataactaaatatttacatagtagaatgagtaagcattcattttccttcagggt

SEQ ID NO: 376578 - DNA, 201 bp, Homo sapiens
cttgggctggagtacggtggtgaaatcataggtcactgaagcctcaaacttctggcctcaagtgattctcccacttgagcctcccgaatggctggacttayacacgtgtgagccactgcacccagctccaagtgtctcatttagtagccatattagggatggggtgccattaaagcatttgaattgtgtgggagtggtttt

SEQ ID NO: 376579 - DNA, 201 bp, Homo sapiens
tgtttcaaaatctgattgggggttttacattttttaggaaaaagtttaaaacacgttcgggtgaaacagtgcgcctcatggatcttctgggagaaggactwaaacgatccatggacaagttgaaggaaaaagaaagagacaaggtaattcaaagccttataggcataatgtgtatcaagcattgtgatttttcatttttgt

SEQ ID NO: 376580 - DNA, 201 bp, Homo sapiens
ggttattgtgagacctaaaatgtaattgaagtttttgcatgtgaccctgcccttaattcagttgctttaaaaacgtttgaacatagtagaaaatgtaacartgttgctcttagtgtttctcatatatagggaataaaagaagaggttttataatagcacttgtctcacaagatttatgagcgatttgaattttacagatct

SEQ ID NO: 376581 - DNA, 201 bp, Homo sapiens
aagaggtctttggtcatgcaattaaggctgcatatccagatttggaaaatcctcctctgctagtgacaccaagtcagcaggccaagtttggggactatcartgtaatagtgctatgggtatttctcaggtgatgtattgtcatgactcttggctgtttgatttttttaagtattattatcatcattgccatttacagaaat

SEQ ID NO: 376582 - DNA, 201 bp, Homo sapiens
cagggtaaaaacccagatattacaaaagcttggaagcttatctgtgatgtctcccgccaaggtgagtttctgggctttgttccttcgtccagcaaatactrtgtatatcatttcctggagtcttcattttgatttgactttgagtgatattttaaccttctaaggacaggcaaatagattttttcttaaatgtatttctga

SEQ ID NO: 376583 - DNA, 201 bp, Homo sapiens
acagcctcaaccttcaggctcaagcagtcatcccaccacagcctcctgagtggctgggactacaggcgtgtgccaccacatccagctaattttttttttttaatagagatggggtcttgctgtgttggccaggctggcctcggaattcctggcttcaagcaaccctccctgtcttggcctcccaaagtgttggaattacaa

SEQ ID NO: 376584 - DNA, 201 bp, Homo sapiens
ttctcgtgtttgtactttctcactgtgtttgtgtgtgtagaaatgtgtaagttctttttctagaaatacaggattagatctttttacacaccttacttttwaaaatatatatatatacaggaatctaagaagaggtttgatactgaggaggaatttaagaagcgagcatatcagtgtgtagttctgctccagggtaaaaac

SEQ ID NO: 376585 - DNA, 201 bp, Homo sapiens
ctctcaaaccttcattttcaaagatttctaagttgaaaagtctgtttcaaaatctgattgggggttttacattttttaggaaaaagtttaaaacacgttcrggtgaaacagtgcgcctcatggatcttctgggagaaggactaaaacgatccatggacaagttgaaggaaaaagaaagagacaaggtaattcaaagcctta

SEQ ID NO: 376586 - DNA, 201 bp, Homo sapiens
accttgccaggcgattctggtatgaatcaaggcttggttaccactgaacaagaggaattagtatacagagaaattcaagtgagattttgtcaaagaatttrctgactttctcaacaattctagaaacatatattttgattagtaatttttctaaaaaggtgaaacatctaagccaaacttagtattccaagaaagcaaaca

SEQ ID NO: 376587 - DNA, 201 bp, Homo sapiens
agcagaggagttccccattttaaatagaggcattgtctgatgtgtttatggttaactgcatctggcttgggtctttctgttttcctttctttgctgaattrgaaggggttactctgaagagtccaggtcttacagtgtggtttatttctcaagtgtgaatattgcacaccttcatggcttgaaaattagaaatgtaaatat

SEQ ID NO: 376588 - DNA, 201 bp, Homo sapiens
aaattagccagggatggtggcatgggcctgtaatcccagctacttgggaggctgaggcatgagaatcacttaaacccaggaggcagaggttgcagtgagcsaaaatcgtgccactgcactccagcctgggcaacagagcaagacccggtcccaaaaaaataaatacataaaaataaacaaaaaattgacatttattatagc

SEQ ID NO: 376589 - DNA, 201 bp, Homo sapiens
aaaattagccagggatggtggcatgggcctgtaatcccagctacttgggaggctgaggcatgagaatcacttaaacccaggaggcagaggttgcagtgagycaaaatcgtgccactgcactccagcctgggcaacagagcaagacccggtcccaaaaaaataaatacataaaaataaacaaaaaattgacatttattatag

SEQ ID NO: 376590 - DNA, 201 bp, Homo sapiens
tcaggctcaagcagtcatcccaccacagcctcctgagtggctgggactacaggcgtgtgccaccacatccagctaattttttttttttaatagagatgggrtcttgctgtgttggccaggctggcctcggaattcctggcttcaagcaaccctccctgtcttggcctcccaaagtgttggaattacaagtataacctactg

SEQ ID NO: 376591 - DNA, 201 bp, Homo sapiens
catttctgagccatttatttatcggtatgtatttatctttgcctcacttggttgtgataatcatgaaggtaatttctgaaaagtgtttttagctcagctcytggaacataatgtatgctcatttttggcaatttggttttggctgtagctatctcccagtaagtattctgaaatttcaggtgaggaactccccctgagttt

SEQ ID NO: 376592 - DNA, 201 bp, Homo sapiens
tgagactccgtccccctacaaaaaaaaaaagtgaaagcggaacagttccattaccttttatgcccaggtggggagggatggtaggaagatagttcacagtmctctgtcctgttacggctgtatacttaatcagcagtcacaaagtacaagttagtcaagtaaattggcaagctctttacatttctgagccatttatttatc

SEQ ID NO: 376593 - DNA, 201 bp, Homo sapiens
agcataggatgctttgagttgagggctagagatgaaagacacttgaaagcacagtgtttcatgtagtactctccttgcttgatgactggcataaggcattrttaccattggcatcaaccctctcttaatagttctcaggggcaatatgtaccttagagatttaaaacatatgttgcagttttgtggtcaggtctctcaaac

SEQ ID NO: 376594 - DNA, 201 bp, Homo sapiens
tacagtacctgctcagatttcagacactattcaacaatatagcttatgcatttgataaatgtttttgttttttccttcaaagttgaacataggcaaaaggyataagttattgagattccaattaagttttaagattcactggttttgttatgttctctccaaaaatattgtttattgagaactatgtattttaatattcat

SEQ ID NO: 376595 - DNA, 201 bp, Homo sapiens
ttagaactttgtatctcacgtgtttcttatgctctaattcatttttttctttttgctttattttgaatattttctacttcagagaatattttggtattctrtgtttaaggtatttcttgaaatttttcatcttttcttccagttttcttactgttttccttttaattttttgaacatgttaatcatagttttctttaaaca

SEQ ID NO: 376596 - DNA, 201 bp, Homo sapiens
gtatagcatagaagaaagaagagggtttggacccagccaaactggacacttcctagttttccagcttgcctccacaaactggaacctctgaacttcagcarttgttcctatcagtagggttattgtgagacctaaaatgtaattgaagtttttgcatgtgaccctgcccttaattcagttgctttaaaaacgtttgaacat

SEQ ID NO: 376597 - DNA, 201 bp, Homo sapiens
attgctttctggtatacaatattccaggcccattttgtacatttcctgcctcagacctgaaatcaaccatatctctatggaagcctgtttccttgaatggragtagtattttaatcacagtctagggcctagggaccatactttttaagatgataaaattttggctgggtgcagtggctcatgcttgtaatcacagcactt

SEQ ID NO: 376598 - DNA, 201 bp, Homo sapiens
  misc_feature (1)...(201): n = A,T,C or G
atgtaggccacctgaggtcaactatcataggagagagtataagccgcctctttgaatttgcagggtatgacgtgctcaggtatgtgctcttgccttgcgtnctattctctttccttattttcttgtttggaaaattctatagaacatggaatatctcactcaagaaagaacattcgactaaatcagtggttcatcagctta

SEQ ID NO: 376599 - DNA, 201 bp, Homo sapiens
ctgcaagctccgcctcccatgttcacgccattctcctgcctcagcctcctgagtagctgggactacaggcacccaccatcacgccctgctaattttttgtwttttttttttttttttttagtagagacgggatttcaccatgttagccaggatggtctcaatctcgtgacctcgtgatctgccctgccaccgtgcccggcc

SEQ ID NO: 376600 - DNA, 201 bp, Homo sapiens
tttagtatttttcttaggctttatttttagtactttgactaagaaatgcctaagtgtggtttggggagtcatttttgtttttaccctttgggggctgccaracttcctaaatctgtgggttgagttctttcatcaggttaggagaattcttggccctatctcttcaaatgctactacttttccgcattctgttatttttgg

SEQ ID NO: 376601 - DNA, 201 bp, Homo sapiens
ccacaaggcatttgaggtagccaattgatacacagatatcactgaaatagaatggataatttgtatacatgaatttgattctttttcagttaaaaatatayaagcagatccatcataaaatcaaacatggttgaattacggcccaaattaatgtttaagtctgagtttgttattaaatgtgttattaatgaatgcattgga

SEQ ID NO: 376602 - DNA, 201 bp, Homo sapiens
tattttgaacattgttgttcaagcccttttagaggtacatgtgctttttctttcggatatatatctaggaatggcattgctgggttgtagggctgacttaygcttaactttattaaaaattgccaaggagaaagtggtgaccgttgtatactcccactactaacatatgagagtttcattgcaccatatgtttacccacat

SEQ ID NO: 376603 - DNA, 201 bp, Homo sapiens
aaagctattttgaacattgttgttcaagcccttttagaggtacatgtgctttttctttcggatatatatctaggaatggcattgctgggttgtagggctgrcttacgcttaactttattaaaaattgccaaggagaaagtggtgaccgttgtatactcccactactaacatatgagagtttcattgcaccatatgtttacc

SEQ ID NO: 376604 - DNA, 201 bp, Homo sapiens
  misc_feature (1)...(201): n = A,T,C or G
tctttttttttttttttttttttttttttttttttttttttttttttttttttttttagtgagagacacggatcttgctctgtcccttgggctggagtacngtggtgaaatcataggtcactgaagcctcaaacttctggcctcaagtgattctcccacttgagcctcccgaatggctggacttacacacgtgtgagccac

SEQ ID NO: 376605 - DNA, 201 bp, Homo sapiens
atcatgagaaggaatggaaactaggccggtgcattttacggttccctgagattctgcaaaagattttagatgacttatttctccacactctctgtgattawatatatgagctggcaactgctttcacagagttctatgatagctgctactgtgtggagaaagatagacagactggtgagtgtctttttttttttttttttt

SEQ ID NO: 376606 - DNA, 201 bp, Homo sapiens; identical to SEQ ID NO: 81231

SEQ ID NO: 376607 - DNA, 201 bp, Homo sapiens
aaaattttggctgggtgcagtggctcatgcttgtaatcacagcacttggagaggctgaggcaggaggaccacttgaggccaggagtttgagatcagtctgsgcaacatagcaggaccctttctctgccaaaaaattaacaaaattaacaaaagaagtagttgggcatggtgatgcatgcctgtagttctagctatgcttga

SEQ ID NO: 376608 - DNA, 201 bp, Homo sapiens
acgtacattattgacatgtttccattcttttcctacagagtcttcaggcagaaaggaacaaaccaactaaaaatatgattaacattattagccgcctacargaggtctttggtcatgcaattaaggctgcatatccagatttggaaaatcctcctctgctagtgacaccaagtcagcaggccaagtttggggactatcagt

SEQ ID NO: 376609 - DNA, 201 bp, Homo sapiens
tgccctgtttgtttccgggaccttgaaacagtgtcaactacttttcagcacgctgttagagatcactataagaattgcagctttctccaagaggaaggttmtggctccagcttgaaagcaaagcagattttcatgttctggtcctaccgagctgatgggttccaactaaagagtttgggaggccaggcatggtggctcaca

SEQ ID NO: 376610 - DNA, 201 bp, Homo sapiens
  misc_feature (1)...(201): n = A,T,C or G
ctcagggcatttcccatggatgtcttagatgccgtgggatggacttgtcctgctgcatgtcttagcaaatcccagattgagggcatcacaccataagtacnttttcccttttggttcttaagatatttggaggtttatactcaaaatatttggagacatcttgtatgatgatggtattacgtacattattgacatgtttcc

SEQ ID NO: 376611 - DNA, 201 bp, Homo sapiens
tgccttcactagaatcaggtaattgtgggtaggcattgttttattgtgaatcaaatgaaagcatatttagttactcaaaaatattttctttttttttttttgaaatgagacggggtcttgggctcaaatgatcctcccacctcagcctcctgagtagctgggattactgacataccaccattacacctgacttctaaagtg

SEQ ID NO: 376612 - DNA, 201 bp, Homo sapiens
tatgttaaaaatcaaattctaggtcaggtgcggtggctcgtgtccgtaatcccagcacttggagaggctgaggcaagccgattgcttgagttcaggagttkgagaccagcctgagcaacaaagtgagatcccatctctacaaaaaatacaaaaataactagccaggcatggtggttcacacttgtagttacagctacctgg

SEQ ID NO: 376613 - DNA, 201 bp, Homo sapiens
ggcgctactgcactccagcctgggtgacagagcgagactccatctcaaaacaataattaaaaaaaaaaaaaaggattaaaaaaagaacacctgtatagggrctttccatcaatggaacttgcaaaactggaaatttctctgagtgaatcagtgggtgagtggtgagtgaatgtgaaggcctaggatattactgtccattac

SEQ ID NO: 376614 - DNA, 201 bp, Homo sapiens
gtggaaccaagcatggtggtatgtgcctatagtctcagctacttgggaggctgaagcaggaggattgcttgagcctagaagttcaaggctgaggtgtgctrtgatcgcacctgtgaatagctactgcacttcaacctgggcagtatcatgagacttcatctctaaaaaagaaaaagaaaaacgaactgcatggaaagtgct

SEQ ID NO: 376615 - DNA, 201 bp, Homo sapiens
tttgtactttctcactgtgtttgtgtgtgtagaaatgtgtaagttctttttctagaaatacaggattagatctttttacacaccttactttttaaaatatrtatatatacaggaatctaagaagaggtttgatactgaggaggaatttaagaagcgagcatatcagtgtgtagttctgctccagggtaaaaacccagatat

SEQ ID NO: 376616 - DNA, 201 bp, Homo sapiens
ctgagtgattttgtatctatatcatcactgccagggaatgtagccttttaggtagatagtatgtacaaagtttagtgaaaaccagactgtagacctaatakattatatataaggggtttcctctcccacaaatctaaattataaaatctattacagtacctgctcagatttcagacactattcaacaatatagcttatgca

SEQ ID NO: 376617 - DNA, 201 bp, Homo sapiens
atatcctgggaataaaacctgtccaaaggatgtaatccttcataggtttgaacactgtgtgtttttaccaaagtggccattggcactgtttgcttttttamaatcatgtggacacaagcataagtaaagaaaatttgtcaaccaggcaaaatgtggttctttaacagctagaattctaaaaagaaaaaaatcacttccaca

SEQ ID NO: 376618 - DNA, 201 bp, Homo sapiens
cgtgtatgtagaaccgctactagataccctacatttggttgtatgcatagaaacagccatcccccacctgttaatatgtcatctttgctttgtttattggygtatgttaaaaatcaaattctaggtcaggtgcggtggctcgtgtccgtaatcccagcacttggagaggctgaggcaagccgattgcttgagttcaggagt

SEQ ID NO: 376619 - DNA, 201 bp, Homo sapiens
attaatcaatgcattataggacttaaaattttttgatgcttaattttatgtattttgatatgattaaatgtatgtaaaaacaattttaaagacaaattttmacatcatccataattttaaaatgcctattgtgatcaactttctttgaatccttgacttaatctgtatatcaacatgtattaatcatttatgattttaata

SEQ ID NO: 376620 - DNA, 201 bp, Homo sapiens
atccttgacttaatctgtatatcaacatgtattaatcatttatgattttaatatagtttttgtattatatttaatattgcaaacttttgtgttactttatractgcacattttgttggatcagtgtaccaatgtttacattaatcctttattaggatttttttctattttagaggtgttgttattcagtaaatagctttgt

SEQ ID NO: 376621 - DNA, 201 bp, Homo sapiens
gtgcttgtctttgagtcttctagaatcacaaaattccttttccatagaatcttcccaaaagaatctcacctttctcgttatgtcattcattctacacttawatatgtttaattctctgttatatttattttaattcaaaagtattattaaatgtctaatatgtgctagagactataagggaaaagatacaaaaggaagtac

SEQ ID NO: 376622 - DNA, 201 bp, Homo sapiens
  misc_feature (1)...(201): n = A,T,C or G
tgggttggactatgcacttctaactaaaatttgcaagtaacatagattctttaataatgattttcaaaaaggaaaacaagttaattaacaacttttttctntcttttcaggaaaaatattgaaggtgaacatgtggcgtatgctgctatgtgaagcagtagctgctgtcatggccaaggggtttgatatcctgggaataaa

SEQ ID NO: 376623 - DNA, 201 bp, Homo sapiens
atctctataaaaattaaaaaattaaccaggtatggtggctcgcacctatagaattagctacttgggagggtaaggtagaagtattacttaagcccaggagwtcaaggttacagtgagctgtggtcatactacttcactccagcctgggtgacagagcaagaccctgtctctaaaaataaataaatgagtgaatgaagcaag

SEQ ID NO: 376624 - DNA, 201 bp, Homo sapiens
  misc_feature (1)...(201): n = A,T,C or G
acctatgatacatctgacctggctgctattaaacaaagactatttgaggaaaaagcagatatgattatctatgttgtggacaatggacaagtgagtttgtnaatttgtatgtgttttacattgactgattagaggtaagacagtatggtgaggttggtgacatctgacactggatgactgtaaattttccccaaagactaa

SEQ ID NO: 376625 - DNA, 201 bp, Homo sapiens
gtatttgtcccagggtgttccataccattaaccatagtaaaatcagatggaggttatacctatgatacatctgacctggctgctattaaacaaagactatwtgaggaaaaagcagatatgattatctatgttgtggacaatggacaagtgagtttgtaaatttgtatgtgttttacattgactgattagaggtaagacagt

SEQ ID NO: 376626 - DNA, 201 bp, Homo sapiens
ccggctatttttccatttttttgtagagacgaggtcttagctgtttcccaggatgagaatagatcttaaatgttcacagcacacacgcgcgcgcgcgcgcacacacacacacacacacacacacacacacacgcaaatgataactgtatgagatgaaggttatgttaattattttggttgtggtaatcatttcagaatgta

SEQ ID NO: 376627 - DNA, 201 bp, Homo sapiens
ttgtatttgtcccagggtgttccataccattaaccatagtaaaatcagatggaggttatacctatgatacatctgacctggctgctattaaacaaagactrtttgaggaaaaagcagatatgattatctatgttgtggacaatggacaagtgagtttgtaaatttgtatgtgttttacattgactgattagaggtaagaca

SEQ ID NO: 376628 - DNA, 201 bp, Homo sapiens
cccggctatttttccatttttttgtagagacgaggtcttagctgtttcccaggatgagaatagatcttaaatgttcacagcacacacgcgcgcgcgcgcgcacacacacacacacacacacacacacacacacgcaaatgataactgtatgagatgaaggttatgttaattattttggttgtggtaatcatttcagaatgt

SEQ ID NO: 376629 - DNA, 201 bp, Homo sapiens
ttgtttttattgagagaactgaggagaagtgtgaggagtcagtcccacctaggacaaggcttatattgctctgactttattgcacagtaagtttattttgtgaattgctgagcatttatttagaaaatatagttcttggcaattaaaaaagaccttggctttttcctcctttgttaatgtagcttagtatccgtgctgctt

SEQ ID NO: 376630 - DNA, 201 bp, Homo sapiens
gagtaagcattcattttccttcagggttcttttaactttattaatgaagtgttttttaccccctaggatttgtgcaggtggatgatggcagaaagattgtrtttgtcccagggtgttccataccattaaccatagtaaaatcagatggaggttatacctatgatacatctgacctggctgctattaaacaaagactatttg

SEQ ID NO: 376631 - DNA, 201 bp, Homo sapiens
cagtgtctactggatcccgccaggaggcagcagaggcgccagcacccagtccgacgggacagcggaccggagggggtttccgcttccgggagaggctgacmgtttccgcttccgtccacttggcgagtgagacgctgatgggaggatggacatactggtgtctgagtgctccgcgcggctgctgcagcaggtttggacgca

SEQ ID NO: 376632 - DNA, 201 bp, Homo sapiens
gcatgtaggccacctgaggtcaactatcataggagagagtataagccgcctctttgaatttgcagggtatgacgtgctcaggtatgtgctcttgccttgcrtactattctctttccttattttcttgtttggaaaattctatagaacatggaatatctcactcaagaaagaacattcgactaaatcagtggttcatcagct

SEQ ID NO: 376633 - DNA, 201 bp, Homo sapiens
acatggtgaaaccccatctctactaaaagtggaaaaattagccgggcgtggtggcacacgcctgtagtcccagctacttgggaggctgaggcaggagaatsgcttgaacccgggaggcggaggttgcagtgagctgagatcacgccactgtactccagcctggctgacagagcgagactccatctcaaaaaataataataa

SEQ ID NO: 376634 - DNA, 201 bp, Homo sapiens
ccagggcagaagcagcagtcagtaagctatgaaatactgttttgtttttcccaaaggtcttaactgcagaggaattgaatgctgctcagacatccgttgcrtatggctgcatcaaatatgctgacctttcccataaccggttgaatgactacatcttctcctttgacaaaatgctagatgacagaggaaatacagctgctt

SEQ ID NO: 376635 - DNA, 201 bp, Homo sapiens
acagtttgaaaaacttgagaaaggagttgggggggtatatgttttaacttttttaggcacaatttttaaggtttggttaaattttatatgtattctcaatrtttaagggcaatcattggtactcttttgtttaggtatttccctcctgctgtgtccaggattgctgtgtggtggtgatgagtgctgggaggtgaaaaatta

SEQ ID NO: 376636 - DNA, 201 bp, Homo sapiens
taagatgataaaattttggctgggtgcagtggctcatgcttgtaatcacagcacttggagaggctgaggcaggaggaccacttgaggccaggagtttgagrtcagtctgcgcaacatagcaggaccctttctctgccaaaaaattaacaaaattaacaaaagaagtagttgggcatggtgatgcatgcctgtagttctagc

SEQ ID NO: 376637 - DNA, 201 bp, Homo sapiens
ctcagcctaaagtgttcttttcagacttatttttctgcctacaagcatctttggaaatacgtcctcttttagtattgcaagttatcccagaatccctaaayctggccttaactgcacttgccgatactcttctagatgctctatgtttaaatacctagaaagtgtcacctgatcccctaaaagaattatatttccattttt

SEQ ID NO: 376638 - DNA, 201 bp, Homo sapiens
taaatgcaattttttaaatgtttattttatgagaaaataggcacagagaagttagtatcttcccagggtcacatagctaataagcgatacgtctgagattmaaacctagccagtctggcttcaaagcttatgtttttaactgcttattttatactgcctttacattaccaagcctcaattttctaaactgtaagaaagcat

SEQ ID NO: 376639 - DNA, 201 bp, Homo sapiens
ggcgcgatctcggctcactgcaacctccacctcccgggttcaggtgattctcctgcctcagcctccccagtaggagggattacaggcactcaccaccatgyccagctaaattttgtatttttagtggagacggggtttcaccatgttggccaggcaggtctggaactctggacctcaagtgattcacccgcctcggcctcc

SEQ ID NO: 376640 - DNA, 201 bp, Homo sapiens
gcttcaaagcttatgtttttaactgcttattttatactgcctttacattaccaagcctcaattttctaaactgtaagaaagcatagagttatttactgcayagggttattttgaaggttaaatttaaggacttagcatagtacttggcacatagtagcactcttatatagctgctactgttatcatgttcttcctgtacct

SEQ ID NO: 376641 - DNA, 201 bp, Homo sapiens
ttctcacctcagcaagaccacttctttctgcttgggttctgtcccctttgtccactatgtagtgatttgaaaaatgcccttggggaaaaagccaagtgatkatggactccttcccaatgttttcattcttctaagaactatagtcccttcaactttgcttgtgttgatgctctctagtgacttcaaccagttgtttcatat

SEQ ID NO: 376642 - DNA, 201 bp, Homo sapiens
attgagggcatcacaccataagtacgttttcccttttggttcttaagatatttggaggtttatactcaaaatatttggagacatcttgtatgatgatggtwttacgtacattattgacatgtttccattcttttcctacagagtcttcaggcagaaaggaacaaaccaactaaaaatatgattaacattattagccgccta

SEQ ID NO: 376643 - DNA, 201 bp, Homo sapiens
taacagtattctcaactattgagggagagcacttgttctcgtgtttgtactttctcactgtgtttgtgtgtgtagaaatgtgtaagttctttttctagaawtacaggattagatctttttacacaccttactttttaaaatatatatatatacaggaatctaagaagaggtttgatactgaggaggaatttaagaagcgag

SEQ ID NO: 376644 - DNA, 201 bp, Homo sapiens
ttattgagaactatgtattttaatattcatactttcagcttttctattttctaatttttttatattctcaatatttataaaataaaaaggtaaatacaacygtgtttccatacagtattcctcaattcaaaggcacagcatttttcatgttgtaacctcctgtattcactggtgtcttaggatcacttaccaaaaatctgt

SEQ ID NO: 376645 - DNA, 201 bp, Homo sapiens
atttgttgttgggtgctcggcattatgaagagaaaattataaagattatggctgaggttatttccctccagagaccgttatgttttcttctagcccacagrtagcataccagctgattatcttgaccctgtttgtattggccttatgcttctttagggctgaactatttaaattttacctgtatgactagggtgaggtcct

SEQ ID NO: 376646 - DNA, 201 bp, Homo sapiens
tgatgaatataaatttgtgatgaacataaaattgtgatgaacatgttgatgaacataaaattgacaaacataaaggtgtataggcagcatgtttatcttcyattaaaagcatatgtgtcattcaccttttttttttttttttttttgctaaactgctgtatggcaagtacagtgctagatgccagggacagggaagagagc

SEQ ID NO: 376647 - DNA, 201 bp, Homo sapiens
ggtaaggtgatagtatcagttttctcccctgtaaagttagtattttccccctttgtcattaataagtattttttaagtagcttcatcttaaacaatttcarattttaaagttgctattatcttttttcttttgtttctgttgtcttgattctctcctagccctttctttgtagtccccctccttagtatttagttatttca

SEQ ID NO: 376648 - DNA, 201 bp, Homo sapiens
gataatagtaacaagctcgattttattatgtagatggaataagataatgcatataaataaagcatttggttcaaatctttgcatactcaagtattaacttytgttattgtcattattttatactgttgacattttgatgaatataaatttgtgatgaacataaaattgtgatgaacatgttgatgaacataaaattgacaa

SEQ ID NO: 376649 - DNA, 201 bp, Homo sapiens
tggagcttgtgaaaatacacatgcaagccccactgtgggagttactgacttattaggtctaaagggggtattaggcatctgttttttttttaaagctctcrgtattcagatacgcatccctcattgtagagccactagtcagaatagaccaacacaaaaacaaaaattcatggcaggcgcaggtagggagtaactgaaagg

SEQ ID NO: 376650 - DNA, 201 bp, Homo sapiens
gagggctgatgaggggagcataaaacttggactgtccattccaatagacctgagtttgaatctggccttttccacttattctgtcttgtctttgacaagtkacttatctgtagcccacatagaaatagtgataatagtaacaagctcgattttattatgtagatggaataagataatgcatataaataaagcatttggttc

SEQ ID NO: 376651 - DNA, 201 bp, Homo sapiens
ctcaagtaatcctcccacctcagcctcccaagtagctgggatggaagtacagcatattttactacacatttttctgtaatgcagattagctcttatatagmtaggagaatgctctcactgtattgtgggaggcatattggttctttgacaaatactttgccctactgaatgagcagctgaacacaaggtacacagcagaac

SEQ ID NO: 376652 - DNA, 201 bp, Homo sapiens
ttttccccatgaagcttgtgctatgtttatttaatggtctcatgatttaacagtgttttaccaattttgttttaaaaaaatgaacttgctgcagttttttkgcctgcctttcgtatttggtgatgacatatcccagagtgttgacctcattcccataattattctcctgtgtgtatatattactgtcagacaaactctgca

SEQ ID NO: 376653 - DNA, 201 bp, Homo sapiens
aaatttaaaattaaagtatcgactgaatattcttcgaaaggtgagtactttgggttccagttttattctccagtttgaatcattatagcttttttaaagcstttgttaccaaagattctggaagtatatcctatggaatttggaaaagaagcatagaaaccctattcttttccctgcattagacaacttaggactgaggta

SEQ ID NO: 376654 - DNA, 201 bp, Homo sapiens
ttctgttttctgttaagaggcgaacagattgtttgctgaaagtgaaagggccctgagttaagtaggaaggtttcaggagagtggtgaaggcttgaagtagrcggtgagacaggagcttacaagacagcttaagtcaaggccacaactggtattggaatccggaagaattttgccagagccaggtcagtgtctggagcaaat

SEQ ID NO: 376655 - DNA, 201 bp, Homo sapiens
agagcagagcagtttcctgtggagcttgtgaaaatacacatgcaagccccactgtgggagttactgacttattaggtctaaagggggtattaggcatctgktttttttttaaagctctcggtattcagatacgcatccctcattgtagagccactagtcagaatagaccaacacaaaaacaaaaattcatggcaggcgcag

SEQ ID NO: 376656 - DNA, 201 bp, Homo sapiens
cgacgggacagcggaccggagggggtttccgcttccgggagaggctgaccgtttccgcttccgtccacttggcgagtgagacgctgatgggaggatggacrtactggtgtctgagtgctccgcgcggctgctgcagcaggtttggacgcaggagaccggcgggaaggcctgaaagagatggagcaggctctgattcctgcc

SEQ ID NO: 376657 - DNA, 201 bp, Homo sapiens
tggagtgcaatggtatgatctcggctcattgcaacctctgcctcccaggttcaagtgattctcctgcctcagcctcccgagtagctaggcttacaggcgtstgccaccacgcctggctaatttttgtatttttagtagagacggggtttcaccatcttggccaggctggtctcgaactcctggccttgtgatctaccttcc

SEQ ID NO: 376658 - DNA, 201 bp, Homo sapiens
gctggagtgcaatggcgggatcttggctcactgcaacctctgccacctgggttccagtggttctcctgcctcagcctcccaagtagctggagttacaggcrcatgccaccacatccagataattttgtatttttagtagtgacggggtttctccatgttggtcagacttggtcttgaactcctgacctcagaggatccacc

SEQ ID NO: 376659 - DNA, 201 bp, Homo sapiens
aaagaagtatttcttacgtcaaaaaagtcccaagaatcacaaaatctgcagaagcttggttaatcaaatactgcagtactgatttaatcagtataaaatcraaagagctttagatctgtaataaaaatccaaatttggggaagggcaaactttaaaacagcagccaagtagagaagggttggggaagggagaggtgagtga

SEQ ID NO: 376660 - DNA, 201 bp, Homo sapiens
tacatttttgtagtcctaaatataagtacattttatactcctaaatataaatacaaaaatacaagtttacaaatgaaaatggcatttttatttcttcatcygtttaaccaagaaagggagaacgggccacttgtttgggtagatcatgatgttggattctaaataagcaatatttgggttgagtgaaagtgcttttgcaaa

SEQ ID NO: 376661 - DNA, 201 bp, Homo sapiens
acagaatgataatttattgttctggttcatgccagctcaatgggatctactagtaggactttcagtttatcttttctttctaaactcccaaaccatatacktttgtcatgtgcttacatatgagtcaaaactttggtttctaattacattcagtgtttaaatattagagtgcttatgcaactcatttaaataaaagttgat

SEQ ID NO: 376662 - DNA, 201 bp, Homo sapiens
gcgcctgtagtcccagctacccgggaggctgaggcaggagaatcgcttgaacctgggaggcagaggttgcagtagacaaaggttacaatgagctgagatcrcgccactgcactccagcctggcgacaaagtgagactctgtctaaaaaaaaaaaaaagtcaaataaataacattttacatattaaggattttttaaacctg

SEQ ID NO: 376663 - DNA, 201 bp, Homo sapiens
tacaaaattagctgggcgtggtggcgcgcgcctgtagtcccagctacccgggaggctgaggcaggagaatcgcttgaacctgggaggcagaggttgcagtrgacaaaggttacaatgagctgagatcacgccactgcactccagcctggcgacaaagtgagactctgtctaaaaaaaaaaaaaagtcaaataaataacatt

SEQ ID NO: 376664 - DNA, 201 bp, Homo sapiens
agtcaaatatattggctgggcgcggtggctcacgcctgtaatcccagcactttgggaggccaaggcaggcagatcacgaggtcaagagatcgagaacatcstggccaacttggtgaaaccctgtctctgctaaaaatacaaaattagctgggcgtggtggcgcgcgcctgtagtcccagctacccgggaggctgaggcagg

SEQ ID NO: 376665 - DNA, 201 bp, Homo sapiens
atttgggaggagaaaagagaacccaatactgtcatccagactatccatactatcattttgttgaggatcttatatccatctgctcttagtgccaaagaatmctttacttcatctaaaggcagcagtgaaagaaaagaaaagaaacaagaagaaaaaaaccattggttcaccaaaaaggattcagagtcctttgaataacaa

SEQ ID NO: 376666 - DNA, 201 bp, Homo sapiens
actattttatttttattctgtaacattagcaattattagaaaattccaaaaattcaaaagtacattactatctctagaaagtcaaatatattggctgggcrcggtggctcacgcctgtaatcccagcactttgggaggccaaggcaggcagatcacgaggtcaagagatcgagaacatcctggccaacttggtgaaaccct

SEQ ID NO: 376667 - DNA, 201 bp, Homo sapiens
gcagtcactcaggaccttgtttcctcatttgtgaaagaaggctaatatctgcctgctgtggttatgtgagaaataaaaatcatttgtccatacaacctggygcagtgcctagcatgttgtagaggtgtaatatataagaagctactgttactattttatttttattctgtaacattagcaattattagaaaattccaaaaa

SEQ ID NO: 376668 - DNA, 201 bp, Homo sapiens
aaacgtctaactctcaaaatcatggtacgaaagcctggggctcctgtagaaactgcaaaatttggaggccatggaatttgtgataacattgccaggtaagstcacctcagaaatgatattggtaattatatttcagtacaggttgttgtaagtaatagaaaatgaagaaaaccaaggaggagtttgaataaagacctgtaa

SEQ ID NO: 376669 - DNA, 201 bp, Homo sapiens
gtttataataatagcagttttcatattgagtgacctctacatgccagactaatttcattgtaacagctttgtttatggagaaagaggagaaagcctaaagragttaaacaacttctccaaagtcacacaactcaggagtgtgaaagctaagattaaactcagatcggtcttattccatagtttatgtgatcttgcctttta

SEQ ID NO: 376670 - DNA, 201 bp, Homo sapiens
cggggtttcatcatgttggccaggctggtctcgaactcctgaccttgtgatccgcctgccttggcctcccacagtgttaggattataggtgtgagccgccatacctggcctgttttgattttttattttctgtttattctttgctagtacatcaaggacattcttgaaggagtatatactgaagggtgggcaacaagagaa

SEQ ID NO: 376671 - DNA, 201 bp, Homo sapiens
gtttcagcaaacccctccttatgcaagcttttggaaagctgcagcacagatggctgagtagtttccattttccttcagattatggatttggatatgttttkttttttttttttttttttttgagatggagtctcactttgttgcccagggtggagtctcactttgttgcccagggtggagtgcagtggcgcagtctcggct

SEQ ID NO: 376672 - DNA, 201 bp, Homo sapiens; identical to SEQ ID NO: 81256

SEQ ID NO: 376673 - DNA, 201 bp, Homo sapiens; identical to SEQ ID NO: 81257

SEQ ID NO: 376674 - DNA, 201 bp, Homo sapiens
ggaatcagtgagaaggtagattgtacatgaataggtaacgatacacagatatcctagaatcacagatctttaaagtcatataatttctaaaccccattttyttgtgcttttgtaaggacccactacctttcttactttatggatgtattttagtatgtagaatggacagtgacagtggtttgatggcaatttttttccccc

SEQ ID NO: 376675 - DNA, 201 bp, Homo sapiens
gtccaagcaatatagccaaacagctcaacaacagggtgtaagtttgtctagttggggattactgcaaagctggttggttttttttttttttttttttttttgagatggagttttgctcttgttgccgaggctggagtgcaatggtatgatctcggctcattgcaacctctgcctcccaggttcaagtgattctcctgcctc

SEQ ID NO: 376676 - DNA, 201 bp, Homo sapiens; identical to SEQ ID NO: 81261

SEQ ID NO: 376677 - DNA, 201 bp, Homo sapiens
ctttctatttcttttataaaattgtaactaatatattgcctcctgattgacagggtgaaaaataatgtcttaaacaacactaccgtttaagctcatgttgwtaatactatagcctaggatttggcatcctaataaaagtagcatgttaatgtgtttgccaggaattaggggtgatgactcaggaaagtgtcaggaagcagt

SEQ ID NO: 376678 - DNA, 201 bp, Homo sapiens
ctcctgagctcaacggatcttcctgcctcagcctcctgagtagctgggactagaggtgtgtgccaccacacgtaatttttggggttttttttttttttttktttttttttttttttttttttgagctggagtttcactcttgttgcccaggctggagtgcaatggcgggatcttggctcactgcaacctctgccacctggg

SEQ ID NO: 376679 - DNA, 201 bp, Homo sapiens
ccccaaactcctgagctcaacggatcttcctgcctcagcctcctgagtagctgggactagaggtgtgtgccaccacacgtaatttttggggtttttttttkttttttttttttttttttttttttttttgagctggagtttcactcttgttgcccaggctggagtgcaatggcgggatcttggctcactgcaacctctgcc

SEQ ID NO: 376680 - DNA, 201 bp, Homo sapiens
gaaagcttgtaacttttctgtgtaggaaggtatcctgacaaattcaagctctgtggacttcctgagatgctctatgaaaaattaaaacgttaatgaaaacdggcattgcttcttacattagccagtcatggaagtctccagttcaagagagcacccttattcacataggaggaagaaaaagagattctttgtgtgagggaa

SEQ ID NO: 376681 - DNA, 201 bp, Homo sapiens
gagtcttgctctgtcacccaggctggagtgcagtggcgccatctcacctcactgcaacctccacctcctgggttcaggcaattctcctgcctcagcctccygagtagctgggattacaggcacttggcactgcacccggctaatttttgtatttttagtagagacggggtttcaccatgttggccaagctggtctcaaact

SEQ ID NO: 376682 - DNA, 201 bp, Homo sapiens
gctctaaccattttgaagatttaatcagctttgatattggggaactgttaagaattcgtacagatcagaaaagtgagatttgaaaacaaagtctgttttgkgaaaaagagaaaccagctaccatctacaattagctcaggtttgactttgacctcgtcttttccactaggtggaccctgaggtatttgctgcccttcctgc

SEQ ID NO: 376683 - DNA, 201 bp, Homo sapiens
aatgccttagcagagaattgacagctaagtaagataaagaggcactgaaaacagagaggtgttgagtagagatatggcagggcaccaaaggcaaattgtgtttcaaccttgcctagataaggggtggccacaggctgctttctttgcatttgtgtcatattcatgaattatgttatgctactataatgtgcacattcattc

SEQ ID NO: 376684 - DNA, 201 bp, Homo sapiens
aaagaaagaaccagtaaatggctgtaatacaggaattttgccacaaccagttgggacagtcttgttgcaaataccagaacctcaagaatcgaacagtgacrcaggaataaatttaatagcccttccagcattttcacaggtaagttaaatatgggaaccctctgctgtagtttcaatattctcacccccctgctccaactt

SEQ ID NO: 376685 - DNA, 201 bp, Homo sapiens
tgcactttcttgccaccttttcctgcacatctgccgaccagtcctgatactaacaaggctgagtcttcagggaaatggaatggtctacatactcctgtcaktgtgcagtcgagacttaacctgagtatagaggtcccgtcaccttcccaggtacatttttgtagtcctaaatataagtacattttatactcctaaatataa

SEQ ID NO: 376686 - DNA, 201 bp, Homo sapiens
ccactttcctagtgggtcatactctgtccgtgatgtcttccaagttcagaaagctaagaaatccaccgaagaggagcacaaagaaggttggtggtcatcartgtggttcttttttaggtgctgcttatgtccttggaaagacggcagttggttttaaaattgacacagctttatgtgattttaaaaatttatattcttcat

SEQ ID NO: 376687 - DNA, 201 bp, Homo sapiens
ctaatacagtagctacgtagccaagtgaagctagtacaatatgagttaaattaaagttaaataaaactaccagttcagttcctcactgccctggccacatkgcaagtgctcagtggtcacatggagcaaggttctcctgtattggatagcagacgagaacatttccatcactgcagaaagttcagttgaacagcactcctg

SEQ ID NO: 376688 - DNA, 201 bp, Homo sapiens
ccggccattcagttccgcgccattcattcacgcgcgcgttcgggcgttcgttccacaagcgtttgtagaatgtcgacccggtcgagccgccgctcccaccmgcactccagccacagcgtttttccgcaccccgccttcgacgtccccggtgcatcccagaaccggtcggaatgtccgaaggcggttgttgctcccttgttt

SEQ ID NO: 376689 - DNA, 201 bp, Homo sapiens
ttgaagtgaatggctgtaaatatttgtgtcagtctgttacatattcccctgtccccttctcagctggctgatacctgctatctttcaggtctccatgcctygctttcccttgatagtttgactgtcttcatactgatttaggtgacttcttgtgctcttctggagctatggctccctgaatgaatctgcatcttagaattc

SEQ ID NO: 376690 - DNA, 201 bp, Homo sapiens
tgtaagatctgattatttgcttatattacttctagtctgtggttctggttttcttcccatggagccagatagatgaaggatggaattttttaacctggttwttctcttttatttcattttaattatagttttgttcaaaattagaactgatgggttgataacaagtggagacactttaaaacctttatcttcttaaaatca

SEQ ID NO: 376691 - DNA, 201 bp, Homo sapiens
ttgctacttttgcaaagaatgatcttttgtcaaatcagaatataaagtttgtggtttaagtttcagggtttttttttttcattgtcaatattcaatataaraattttctgtttttaaagggggaaataccaaactgtgtaccactaagaaaatgatgaaatgaaaaaattgttttaacctaaaagtcagatattattaact

SEQ ID NO: 376692 - DNA, 201 bp, Homo sapiens
atacgtagctttagctttcttttcttacccacattaataaaagtagaaaatagatatgttttttcaaaatcttctttgtgacactttaggaagaaattacyttttagattttacttcttaatacatttatgccattgcctaaaaaatgtatctctacccgtgatatttccagtacagctactttgcaaatgtccatttgtc

SEQ ID NO: 376693 - DNA, 201 bp, Homo sapiens
cttaattcccacagaagtcctttgagacactattattatccccagtttacatgtgaggaaactgaggttctgagaagttaaataacttgcctgaaatccamgtaactagcaaatgatggagccaggatttgaccttagtcattcctgctttggagtctgtcctcttaatacattatatggcgtctctaatttgtgagtgag

SEQ ID NO: 376694 - DNA, 201 bp, Homo sapiens
gccaccatgcccagctaatttttgtatttttagtagagacggggtttcaccatgttggccaggatggtctcgatctcttgatctcgtgatccctccccctyggcctcccagagtgctgggattacaggtgtgagccactgcacctggccacataatttttactatatgcaagttacttttctcagtaatttataattttta

SEQ ID NO: 376695 - DNA, 201 bp, Homo sapiens; identical to SEQ ID NO: 81252

SEQ ID NO: 376696 - DNA, 201 bp, Homo sapiens
gtaggatgactgtaataatacctacctcacaggattatggtgagtaataattgagttaatgtatgtaaagtgcttagaacagggtaattttttttttttttgagatggagtctcgctctgtcgcccacactggagtgcagtggcaccatcttggctcactgcaagctccacctcctgggttcacgccattctcctgcctca

SEQ ID NO: 376697 - DNA, 201 bp, Homo sapiens; identical to SEQ ID NO: 81253

SEQ ID NO: 376698 - DNA, 201 bp, Homo sapiens
atgcagaaggatgggacttcatctacaatttttagtggagttgccatctatgttaatggatacacaggttgagtactttttacttaaccctattttggcaygtatttttattaggattgagaatgatttgttttaaaattctatttttactcatttattatagacaaatgattgtaagatgagaagaaataaatcatctgc

SEQ ID NO: 376699 - DNA, 201 bp, Homo sapiens
tttcgatcagatgctgctatgcagaaggatgggacttcatctacaatttttagtggagttgccatctatgttaatggatacacaggttgagtactttttayttaaccctattttggcatgtatttttattaggattgagaatgatttgttttaaaattctatttttactcatttattatagacaaatgattgtaagatgag

SEQ ID NO: 376700 - DNA, 201 bp, Homo sapiens
agaaaggtctcagctttaatcctgtatgcagacctgaggatcctctgccaggtccaagcaatatagccaaacagctcaacaacagggtgtaagtttgtctrgttggggattactgcaaagctggttggttttttttttttttttttttttttgagatggagttttgctcttgttgccgaggctggagtgcaatggtatgat

SEQ ID NO: 376701 - DNA, 201 bp, Homo sapiens
aagtatggaactctaaattggtgttgctttttgtttcagcatcaaagctggacgactcctctcctacattccatatcagctgtacaccaagcagtccagtrtgcagaaaggtctcagctttaatcctgtatgcagacctgaggatcctctgccaggtccaagcaatatagccaaacagctcaacaacagggtgtaagtttg

SEQ ID NO: 376702 - DNA, 201 bp, Homo sapiens
ccccaaaaagtcattgcaaaatccagtgtcatgaagcttttatgttttctcccaagagtttgatagttttagctcttatatttatgtcttttgtacactttaagtttttttttaacatggtgtaaaggtccaacttcttttgcatgtgatatccagttttcctatcaccatttgttgaaaagattgtcctttcctcattga

SEQ ID NO: 376703 - DNA, 201 bp, Homo sapiens
gcaaaataaataggacttggctgactcactctatggatgagttgtaaagataaatggtagatgtaaaggggtcttggaaaactaaggatacttcagaagtkaaaggtattactagtaatgtgaaatgtaaataaattaaatttgaatgttaaaaattaaaggaacactaaaaggaaggaaatataaagtgtcagttaatag

SEQ ID NO: 376704 - DNA, 201 bp, Homo sapiens
cttaaatcacagtgcaaaactatctggagtggctcaaagcccccaggtaaacaaaagcacttaacagggtggacattattattattattattattattattgacagattcttgctctgtcacccagcctggagtgcaatggcgcaatctgggctcactgcaacctccgcctcccgggttcaagcaattctcctgcctcagc

SEQ ID NO: 376705 - DNA, 201 bp, Homo sapiens
ttaattctttttattgagtatctctgaggatatctgatttgagacttgcagtatttaaattggctgtctaattttgtagcagtctccatggactgacttakgtaagcctaagaattctgtgggtggccacatggctcttgttaggagctggataaggcctgacacccttgtatatgatcagtgctgaccatagagagtacc

SEQ ID NO: 376706 - DNA, 201 bp, Homo sapiens
ccttaaatcacagtgcaaaactatctggagtggctcaaagcccccaggtaaacaaaagcacttaacagggtggacattattattattattattattattattgacagattcttgctctgtcacccagcctggagtgcaatggcgcaatctgggctcactgcaacctccgcctcccgggttcaagcaattctcctgcctcag

SEQ ID NO: 376707 - DNA, 201 bp, Homo sapiens
aggtcatggagtttgctttatttgccatcctatacccagcacctcgctaagtcctcgacacatcaagaattgttttctttacaactctgtcattttccttyctcttaggtatttcttatctactagggacttagcactgagaccatttataatattactatttttataaacataaaaatgcatgtgattttgcatctactg

SEQ ID NO: 376708 - DNA, 201 bp, Homo sapiens
aacatgcattattaaaccaaaatacaattacctgtagcgggggataatgtgacatgtgtacaaaagaaaaagcttgaatttaggatgaaacctcttcatgktttgtgacctactaaattattgtttgatcagatagatggtaggaatttcatgtttgttgtacccgttagttagctttaagttttacagatagttctttta

SEQ ID NO: 376709 - DNA, 201 bp, Homo sapiens; identical to SEQ ID NO: 81289

SEQ ID NO: 376710 - DNA, 201 bp, Homo sapiens; identical to SEQ ID NO: 81265

SEQ ID NO: 376711 - DNA, 201 bp, Homo sapiens
accttaaatcacagtgcaaaactatctggagtggctcaaagcccccaggtaaacaaaagcacttaacagggtggacattattattattattattattattattgacagattcttgctctgtcacccagcctggagtgcaatggcgcaatctgggctcactgcaacctccgcctcccgggttcaagcaattctcctgcctca

SEQ ID NO: 376712 - DNA, 201 bp, Homo sapiens
tgagtaacttggaggactctttcttcttggctctcatggtctggatgttgggagggtgccagaggcctatgagtaattggcaactgtttgtatatacgttkcttaaaacaaggcacgtctccatgctgtgtagtaaatatttattgaacatatatatagaataaccattatcctattatataatatgtaatttggtgaaac

SEQ ID NO: 376713 - DNA, 201 bp, Homo sapiens
ggccctgactttgaagaggcaagggaatcctttcatgaggagcctgtgtacattaaagtgtgaaattattttactaaaacctttgttttgtaaatctcacrcttgtacatagtgtattaaaagtaatggtttaaaaaatttttgtcacagtctttgtcttgagacaattttaccttgaaatttgaaatgtggaatagatga

SEQ ID NO: 376714 - DNA, 201 bp, Homo sapiens
taaggtttactcaggtactgatcattgaacagattttgccatctgttgctctttatatttttacatagtcctacctctacaactaaaccattagaccctcratgcttgaaattaagtcttaaaactgttgtatccccagagccttaagaaggccttttaaggcactgtgtggtaaggtgtagccccagataagactgagac

SEQ ID NO: 376715 - DNA, 201 bp, Homo sapiens
ggtgggtattttgtgttaataaacttgttattagtagcttattctgcatacttaactatattccctttcctaggagttggacattcaatggaatctaagtkggcatctttgggaattaaaacttgtggagacttgcagtatatgaccatggcaaaactccaaaaagaatttggtcccaaaacaggtcagatgctttatagg

SEQ ID NO: 376716 - DNA, 201 bp, Homo sapiens
aagaatgctggaaaaatcactgtgggaagaatatgcataaataaagaagtatttcttacgtcaaaaaagtcccaagaatcacaaaatctgcagaagcttgkttaatcaaatactgcagtactgatttaatcagtataaaatcgaaagagctttagatctgtaataaaaatccaaatttggggaagggcaaactttaaaaca

SEQ ID NO: 376717 - DNA, 201 bp, Homo sapiens
agtacaaacctctgtttttagtagtttcatgctgtttgtttttggtatttgagagactagatgtaaatgtttccaaggaaagtttactgccagatacagargtgaaaggacagaagtcatgtccttatccatggctgtccctccaaaggtcagtggttggcactttcataggccttttgagatagcagtaatgaaatgaat

SEQ ID NO: 376718 - DNA, 201 bp, Homo sapiens
tttgtgcataaatggtgggtattttgtgttaataaacttgttattagtagcttattctgcatacttaactatattccctttcctaggagttggacattcartggaatctaagttggcatctttgggaattaaaacttgtggagacttgcagtatatgaccatggcaaaactccaaaaagaatttggtcccaaaacaggtca

SEQ ID NO: 376719 - DNA, 201 bp, Homo sapiens
attgagttaatgtatgtaaagtgcttagaacagggtaattttttttttttttgagatggagtctcgctctgtcgcccacactggagtgcagtggcaccatyttggctcactgcaagctccacctcctgggttcacgccattctcctgcctcagcctcccgagtagctgggactgcaggcacctgccaccacgcccggctaa

SEQ ID NO: 376720 - DNA, 201 bp, Homo sapiens
gcctcccgagtagctgggactgcaggcacctgccaccacgcccggctaattttttgtatttttagtagagacggggtttcaccgtgttatccaggatggtstcggtctcctgacctcgtgatccgcccgcctcagcctcccaaagtgctgggattacaggcgtgagccactggtcccagcccagaacagggaaattttaaa

SEQ ID NO: 376721 - DNA, 201 bp, Homo sapiens
ctgtctcacttccctttctcctctgtatctgacaccacatccactggggaggggaggggaggggaggggagagtgggcttgtctccatctcctgcatctgmaggatgtagacacagagcagcctcccgctgaagcagcagggaagagacgggggagggcatgctaagacagaaacacactgatctggggcaaacacatcaa

SEQ ID NO: 376722 - DNA, 201 bp, Homo sapiens
gacctgtctcacttccctttctcctctgtatctgacaccacatccactggggaggggaggggaggggaggggagagtgggcttgtctccatctcctgcatytgcaggatgtagacacagagcagcctcccgctgaagcagcagggaagagacgggggagggcatgctaagacagaaacacactgatctggggcaaacacat

SEQ ID NO: 376723 - DNA, 201 bp, Homo sapiens
tttggttattaattggaacttaaagtaacccagctgtgctctgtatctttctgttcttttcataatgatttatttttctttagcagatacagaaataagakaagaaagaattgatggagacagtgactttgtaataatagatattttcagctaatacaacttgaattattctcataaactaagattctgcctgtggtaatt

SEQ ID NO: 376724 - DNA, 201 bp, Homo sapiens
tagcttgatcctgcttatggacatgctgactttgagatgtgtagaacatcctagtggagatgcttaataaatgcaattgggccatgtggtttggaacacargaaagcaggaaaattgaggggaaggtgtttggaaagtgggtgatttggccgcactctggaaaactagagaaggcagttctctttggtactttctattttt

SEQ ID NO: 376725 - DNA, 201 bp, Homo sapiens
acgtatttagttaaaactagcagccctcttcaaggttttggtcctggctccaagtttaattttcccacccccactcaataggagttggaggtacaccacaygccctgcctccctcccccacctccggttcaggccatttcattccatcagatgagcctgcatggagaagaactgtgcttctttcatagagggatgtccact

SEQ ID NO: 376726 - DNA, 201 bp, Homo sapiens
caagatagtatctcatctggtacagaaattgttttattgcagcagaaaaaattagcaacaggaaaatgtttcagtatgctgaaggtgtaaaaaaaacacayaaagtggcaaaaatgggttttattaggttaggaataaagcctgatctaaatatcttagacttgtatatttttaaaagatatcttaaatacatgaaagaca

SEQ ID NO: 376727 - DNA, 201 bp, Homo sapiens
gtgactcacacctgtaatcccagcactgtgggaggccgaggcagatggatcatttgaggccaggagttcaagaccagcctggccaacatggtgaaaccctstctctactagaactacaaaaaaaattagctgggggtaggtggcacatgcctgtagtcccagctactcaggaggctgaggcacaagaatcgcttgagcccg

SEQ ID NO: 376728 - DNA, 201 bp, Homo sapiens
aaggacagaataagagcacattggagcagactgttaccaaactttttttagggcatgcgtgctagcactttatgtacttagtcactcataaaggcaatacytggttcttgtaaattctacaaatggcctcccactactgccaattcaaagtaaaaaacaaacaaaacacccaggtactgctgtacagatttcttgaagtag

SEQ ID NO: 376729 - DNA, 201 bp, Homo sapiens
cacctaaggggcaggatgttcagttatttcatatttttgtgtagttacctatttattataaagtgcctctgtcagctttgtaaagtcttccatcttcatttatagtgaaagttttaaaattcatttgttaaaagtagatttagtggcatttttagatgcctatttttaagcctaataaaagtatgtccgaactaacttaga

SEQ ID NO: 376730 - DNA, 201 bp, Homo sapiens
aatgataatttcataaatgtaagtaagtttttacagtcatactggtttctcaccttaaactagtggatcttaattgttaataagttttttcatggattttyatgaaagtaattatttcctcacaagtaatttgctgtattgctttctcaaaaatggaactaactgcaccagctatatttttgttgtgttccatgcatagaa

SEQ ID NO: 376731 - DNA, 201 bp, Homo sapiens
agaggcaggatttcaccgtgttagccaggatggctaactgacctcgtgatccatccgcctcagcctcccaaagtgctgggattacaggcgtgagccactgygcctggcctagttacatctttttagtcttgattcagagttgtggctattcaggcatctaatctgaagaaaaaatatttgagctcagcatcgtctaatcat

SEQ ID NO: 376732 - DNA, 201 bp, Homo sapiens
aaccacgaccaaccaccattcacttgtggagcgagttgtagttacttacgggcacttctgatgttttcagaaattccagtagagcttccaaagaacccagygtagatgcctggacatagactcctttttcttctaatttgatagcatttagtgtctgctttaactcatggatcaattcatccttgaaaagaaatcagattt

SEQ ID NO: 376733 - DNA, 201 bp, Homo sapiens
ttcatgccattctcctgcctcagcctcccgagtagctgggactacaggtgctcgccaccacacccggctaatttttttgtatttttttagtagaggcaggrtttcaccgtgttagccaggatggctaactgacctcgtgatccatccgcctcagcctcccaaagtgctgggattacaggcgtgagccactgtgcctggcct

SEQ ID NO: 376734 - DNA, 201 bp, Homo sapiens
tgcagatccctgccccttctcagggcttggtgcccttttcctccactgcttctgtggcccctgcccacacctacaccgtgaacctcactgcctgtctctgygttttgaggactcttctaccctcagttcccactgctgctttgggctttctggtttccccagtccagtcgcgcactttttattgtcatttccctacctcct

SEQ ID NO: 376735 - DNA, 201 bp, Homo sapiens
atggcgacaaaaagaaagaaccagtaaatggctgtaatacaggaattttgccacaaccagttgggacagtcttgttgcaaataccagaacctcaagaatcraacagtgacgcaggaataaatttaatagcccttccagcattttcacaggtaagttaaatatgggaaccctctgctgtagtttcaatattctcacccccct

SEQ ID NO: 376736 - DNA, 201 bp, Homo sapiens
  misc_feature (1)...(201): n = A,T,C or G
ggtggctttcctagcttgatggtctgtaccttacattgattatccacagtattcaaattgaaatttaaagtggcgtgttaactcccaaacacctcatctcngagcatgctttaacttcctactcatatgtttggcattttatagctggatcagtctgttttagaagcacttccacctgatctccgggaacaagtagagcaa

SEQ ID NO: 376737 - DNA, 201 bp, Homo sapiens
aaagaaaagaaaagaaacaagaagaaaaaaaccattggttcaccaaaaaggattcagagtcctttgaataacaagctgcttaacagtcctgcaaaaactcygccaggggcctgtggcagtccccagaagttaattgatgggtttctaaaacatgaaggacctcctgcagagaaacccctggtaattccttaactttgacct

SEQ ID NO: 376738 - DNA, 201 bp, Homo sapiens
gaaaatatgtatttatttgtgcatatgttagctaaaatctacctttttctaaatttctcaacttatttttagttgacctaagtgtccattacggtttttamcttaaagttctagtgttccataatttttctttcccccttggttgccagtgtaactaatttggtatttctggcttccttgaagggagactatggcattcac

SEQ ID NO: 376739 - DNA, 201 bp, Homo sapiens
ctgaactttctctgcatgtgacaaattaggttttctttttttcttcttttaatcatatctactttgtctttttccccatcactggcatgatcatctgtgarcatggcatctactcacagttgcctgtcacattccatatgatgtttagccagagcctgagctaacccagaaatgggtgatcatccagcttgtgggactttt

SEQ ID NO: 376740 - DNA, 201 bp, Homo sapiens; identical to SEQ ID NO: 81260

SEQ ID NO: 376741 - DNA, 201 bp, Homo sapiens
aatttcacctgtggcttactactctgtagggcagcccttcatctggagcctgcgctgtaattgaattaatgctatggacatttggacattcctaagtagartgaattactgctttgtaattcaggtttttgtttttgttacttagatgattctcgtgaatgcatttctaaacaaacgtctagaggagccaggatgtgactt

SEQ ID NO: 376742 - DNA, 201 bp, Homo sapiens
caaagtgctgggattacaggcatgagccacaccgcacctggccaggacttttttttttttttgccaaagtcaatttttatatataaaaaggaataattagycttaaggacctttcctaattcctaatgacatttcttctctccccacctttaggctgatgcagcaatcggtggaatcggtttggaatatggcatttgactt

SEQ ID NO: 376743 - DNA, 201 bp, Homo sapiens
tcacatagatctgttgggagttgagacagaatgataatttattgttctggttcatgccagctcaatgggatctactagtaggactttcagtttatcttttytttctaaactcccaaaccatatacgtttgtcatgtgcttacatatgagtcaaaactttggtttctaattacattcagtgtttaaatattagagtgcttat

SEQ ID NO: 376744 - DNA, 201 bp, Homo sapiens
agtagttcctcagctctgaaaggagtttttagaatgttaaataattgattttcatagagtagctttttaatgcattgttgattttatttcttggtcctcaraataatgcattaagtaaatatatatttatccctgctattgctttacaaatttatagtaatcttgtaacttaacatgcatacaaaaggaaatgatacagga

SEQ ID NO: 376745 - DNA, 201 bp, Homo sapiens
ttttcatagagtagctttttaatgcattgttgattttatttcttggtcctcagaataatgcattaagtaaatatatatttatccctgctattgctttacaratttatagtaatcttgtaacttaacatgcatacaaaaggaaatgatacaggaaagtaagtttatactaaagcaaaaattgaggggctgtatgctcatgtt

SEQ ID NO: 376746 - DNA, 201 bp, Homo sapiens
aaatgccttagcagagaattgacagctaagtaagataaagaggcactgaaaacagagaggtgttgagtagagatatggcagggcaccaaaggcaaattgtgtttcaaccttgcctagataaggggtggccacaggctgctttctttgcatttgtgtcatattcatgaattatgttatgctactataatgtgcacattcatt

SEQ ID NO: 376747 - DNA, 201 bp, Homo sapiens
ctggtattctgtagaagcaggcatcagcccaaggcattcagcttaggttaatgcacttggtttcagcgaggcccacacacaggaggttggtttgacggcaytgctgaccttggcagcctttgcttggcatctttgggctgttaactttactgcatggacagaaagaaagggcaaggctgcagaccaaagggactgctatag

SEQ ID NO: 376748 - DNA, 201 bp, Homo sapiens
aagtgagtttgatatacataataccacagaacaaagatttatagttaggcaattgagaccaactattaaaggaagaaaagggctgggcgcggtggctcacrcctgtaatcccagcactttgggaggcagaggcgggtggatcacgaggtcaggagatcgagaccatcctggctaacacggtgaaaccccgtctctactaaa

SEQ ID NO: 376749 - DNA, 201 bp, Homo sapiens
tactgccaattcaaagtaaaaaacaaacaaaacacccaggtactgctgtacagatttcttgaagtagcctttttcccagctttgcaccccacctgaagatyctgtccactgcagcttgcaggtgcctatacagtgtttccagcttcagaactacttttttaaaaaactcttttcttcttaattgtggtacgatacatataa

SEQ ID NO: 376750 - DNA, 201 bp, Homo sapiens
aaaattgacacagctttatgtgattttaaaaatttatattcttcattatgatgaatcagtaataaagtttttttatttgtaatggacagaggattaaaggycctgcccgatgatctgaagaggctattttatatattttctttttgtagtatttcgggctgctgtggatctggaaatatcatctgcttctagaacttgcac

SEQ ID NO: 376751 - DNA, 201 bp, Homo sapiens
gccggggcaaatatttaggctaaattgtgggagctaagaacataaagtacattgatttctttattacggctagcagatgtttaagaatgttagcacaggtstttgaataaattttgcttctaagagaagttactatttattcctaattacacggggaggagagtctgaagaggaacctctactttgctttttacaaatgta

SEQ ID NO: 376752 - DNA, 201 bp, Homo sapiens
agcttaattatatcaaagttcaggaaaagtatagttgaatccctagatctgtcaagatgtttagcaaaaaaaattattttttaatatttattgtgaggtgratgttatctaatgaaagttaatattactatcaaatagattgattagatccagaatttagccactggagcattcattgtattctttcccatgtgtagggag

SEQ ID NO: 376753 - DNA, 201 bp, Homo sapiens
gtgctagataactttaaacaaacagcttactagttccctgatgagaaccaataggtcatgtagtaggaaccaaaagaaattggggatcatcgtttttactrtcttttgaagagtgaaataaaagaattagatttttttttaatggaagaggactttaatatttattccctctaatcttttgtttttattgctaagaaaaaa

SEQ ID NO: 376754 - DNA, 201 bp, Homo sapiens
cctagagaagaatcttttactctcttgtctgtagaagagtgtaaactgccagcatttgggtcgccaagcagggaaggaaaggacctgaattctcacagttyaggaagtaaaatttcacttagtctctctattcattttctcattcctacctcctccccaccagctgtgcctattgtcattgagtccggtatctggaagggg

SEQ ID NO: 376755 - DNA, 201 bp, Homo sapiens
caaatgattgtaagatgagaagaaataaatcatctgcttagatacttctttttcctttccatgttgcttttacctgccattgtctttaacttttatcaaartacatagtttcaaaaagtcacgtgaggtttaaaatgaaaaacgggaaattaccacacatgggtagtaggacttgtaaactgtgagcttcactgtaggtcc

SEQ ID NO: 376756 - DNA, 201 bp, Homo sapiens
ggatttggtgttttatgtaagtgaatgttaggattggtgctcaggaatgcataaagatatttttctattgaattttaaatataagagttacaatttaaacrtgtgtaggagggtgttttatagacaaatttcacttgtaaagctggagaatggagaacttcagaaaaagtttacttaatattgtatactttcatcagttgg

SEQ ID NO: 376757 - DNA, 201 bp, Homo sapiens
tacccgttagttagctttaagttttacagatagttcttttaggaaacagcaaagaatattcagagaaatttatatttttcgttaacttttccccactaccragagctgtacagtccttttaaggttataagagggagttcatctccctgatcacttctcatccatgtccacctccagggactgtgtgttataggatatttt

SEQ ID NO: 376758 - DNA, 201 bp, Homo sapiens
ctcctccccaccagctgtgcctattgtcattgagtccggtatctggaaggggtagtgtagtctttattcttggtgaaaggaaagaaatgtgcaaatgcttstttgcctgttgcacagtttcaaggatgaatttatccacacatccacttttgaaggtgcctgtgtgtttatttcatgactttctctttgttttactggtaa

SEQ ID NO: 376759 - DNA, 201 bp, Homo sapiens
ttcaggtttttgtttttgttacttagatgattctcgtgaatgcatttctaaacaaacgtctagaggagccaggatgtgactttagcataacatttgtcatrggttctgcatttataaagctgtcatcaggaaacttggtccagattgccttgtaccaccctggcatctaaatatgcatttcttagaaatgaagtgcaattt

SEQ ID NO: 376760 - DNA, 201 bp, Homo sapiens
tctctctcttttttttttttttcttgagacagggtctcactttgtcacccaggctggagtacagtggtatgatctcagcttaccgcaccctctgcctccctggctcaagcgattcttgtacctcagctacccgagtagctgggattacaggcacatgccatgatgcccagctcattttttgtgtgtttttagtagagatgg

SEQ ID NO: 376761 - DNA, 201 bp, Homo sapiens
gttgctataatgcatgtaaagggtctgaatgtttttgacacaaaactagatgtaagactttctgacgtacatcacttttgttgttttctggggtttttttkgggggtatattcagtacattttgtacatttctttgaaatgctcatctgtgacttcttgctcccttgcattctgtttatctcaagaggctgaactttctct

SEQ ID NO: 376762 - DNA, 201 bp, Homo sapiens
tggctcaagcgattcttgtacctcagctacccgagtagctgggattacaggcacatgccatgatgcccagctcattttttgtgtgtttttagtagagatgrggtttcgccatgttggccaggctggtctcgaactcctgacctcaggtgatttgcctgcctcggcctcccagagtgctgggattacaggtgtgagccagtg

SEQ ID NO: 376763 - DNA, 201 bp, Homo sapiens
atttatcagtctttttctaaataactgagggatgattccttggtatatattttaggtttaaaatccagaggttgttttgaaatattttctaatattaaagkagcttgttttgaaatttggatgatagcataagtatattgattggttatttttaaatttgaagtgaaatgataattttaaaggtagagtagccatatataa

SEQ ID NO: 376764 - DNA, 201 bp, Homo sapiens
gtttaaatattagagtgcttatgcaactcatttaaataaaagttgattgcaattttatctctcatgagttttttttgccattccttgtgttttttttttttgttcctaaacgcagaggctgtaggacaaagcaagagtaagacttcccaaaatagatgaatatttcacttgctatgactatgttttgattcgttgtataga

SEQ ID NO: 376765 - DNA, 201 bp, Homo sapiens
aagagttgctttgagattcttgaatatcagttaattttatggagtttttctttttattagcttcctctcacttgtaaaaccgtttttagcattgcttacarttgtgtgacacacgagataagtgctggaaatataagtaaatggttgataatcttcgcaataaataagttagaatatttcttacttattcttaaaaaattg

SEQ ID NO: 376766 - DNA, 201 bp, Homo sapiens
gggtgtaagcatgttttaaatataatttctaaaattaactagacctgatgttttaaatagtaaaaattagcttggggtttgaatgctgtctttttccttcyaggagatatgtcagtattgaattctcccagacatcagagctgtataatgcatgttgatatggattgcttctttgtatcagtgggtatacgaaatagacca

SEQ ID NO: 376767 - DNA, 201 bp, Homo sapiens; identical to SEQ ID NO: 81285

SEQ ID NO: 376768 - DNA, 201 bp, Homo sapiens
gaggatcttatatccatctgctcttagtgccaaagaatcctttacttcatctaaaggcagcagtgaaagaaaagaaaagaaacaagaagaaaaaaaccatyggttcaccaaaaaggattcagagtcctttgaataacaagctgcttaacagtcctgcaaaaactctgccaggggcctgtggcagtccccagaagttaattg

SEQ ID NO: 376769 - DNA, 201 bp, Homo sapiens
ccagactatccatactatcattttgttgaggatcttatatccatctgctcttagtgccaaagaatcctttacttcatctaaaggcagcagtgaaagaaaaraaaagaaacaagaagaaaaaaaccattggttcaccaaaaaggattcagagtcctttgaataacaagctgcttaacagtcctgcaaaaactctgccagggg

SEQ ID NO: 376770 - DNA, 201 bp, Homo sapiens
ccatactatcattttgttgaggatcttatatccatctgctcttagtgccaaagaatcctttacttcatctaaaggcagcagtgaaagaaaagaaaagaaasaagaagaaaaaaaccattggttcaccaaaaaggattcagagtcctttgaataacaagctgcttaacagtcctgcaaaaactctgccaggggcctgtggca

SEQ ID NO: 376771 - DNA, 201 bp, Homo sapiens
ggtgtatacatttaattggtaaaaagatgaatgaatcactgtaatgtctgaaaactggtaaaagcatttaaaaacgctgttttttttggggggggggggggttgtttgttttgagacagagtctggctctgtcacccaggcctgagggcagtggtgcgatctcggctcattgcaacttctacctcctgggttcaagcaatc

SEQ ID NO: 376772 - DNA, 201 bp, Homo sapiens
tgtaagtatgtggggtgttgctttaatttcagttccctgatgtctgtatgtcagtagatctgagttaatgtaggcatggttatagggccctgactttgaaraggcaagggaatcctttcatgaggagcctgtgtacattaaagtgtgaaattattttactaaaacctttgttttgtaaatctcacacttgtacatagtgta

SEQ ID NO: 376773 - DNA, 201 bp, Homo sapiens
cgtttctttttaatagatgctgagcgtgatagtgagtaaccaacatgtttaatattcaaagttaaaatacttgagaacaattattaggtatataggaaagyggaatggtagtttctccacgtttgtctttccatagccaaaagaggcagaagcttttcttctgagtctttcagaagaaattcaaagaagactagaagccac

SEQ ID NO: 376774 - DNA, 201 bp, Homo sapiens
tgtctcactagtgttttgccacctgtatgtagcccgtggacagcagactcttctgcagctcttacccttctcacagaggttgtggtgaattgatttaaatrtttaaaggttctaagagacttgccaacagaagagcataataaagagaacaagaaaatctcgaaagccatattttataattatatgaaaaccatcattcac

SEQ ID NO: 376775 - DNA, 201 bp, Homo sapiens
atatctctgctgaagaggacaggacatcctcaagggatcccatggacaccctgtgttggggagtggggaggaagaagtgaccagaaggggcagggagcagyggacagtccaccccggttcctcacatgctggggaaccctgtcactgtacctcgcccccggtaggtcacgttctttctaaatgagagcatgatttctctcc

SEQ ID NO: 376776 - DNA, 201 bp, Homo sapiens
gtgagctgcatactccatcgctagatcgaaagccaaatagttttgttgcggtgagtgtcaccacccctcctcaggcattctggacgaagcatgcacagacrgagatcattgaggtgggtgctggtggtctctctctgaggggctgtgggacatgctctagtggtgtctcttgtcctgatgttcagttacttgtgcatctgt

SEQ ID NO: 376777 - DNA, 201 bp, Homo sapiens
tgtagggcagaggttccatccttggagaatcaagccaagaagagcaaaggctactgctcccatccagcaccctgttcataaagtggaagtgtcactccgasagaagtgggacacagtctgtgcgcccagctctagaacagtgactccaacattttcccaagtaggagaggtaggctataataacagaaagctctgaagctc

SEQ ID NO: 376778 - DNA, 201 bp, Homo sapiens
tgagtacatgcactgtgtgtgtgtgtgtgtgtgtgtgtgtgtgtgtgtgtgtgtgtgtgtgtaaatggtgtagtttgttggctgtcagccttactaggagkctggtttggagcctgttgccttagctctgtggggtgatgatgggaatagtgaaaaagagggtgacaaaagcagagagtctcaaagaggggacagaactca

SEQ ID NO: 376779 - DNA, 201 bp, Homo sapiens
tactcctctcatggcctcagcctggagggagctgatgtgggaggaatctgtgggccctgacctggaatgctgcacagtggcctctgccagtgacaggggcrggcaaggctgagtctagaagcaaatgccagcccacaaatgtgcagtgattggcgcctacagaggccagggatagctaagtactgtggagatataaaatgt

SEQ ID NO: 376780 - DNA, 201 bp, Homo sapiens
gtactcctctcatggcctcagcctggagggagctgatgtgggaggaatctgtgggccctgacctggaatgctgcacagtggcctctgccagtgacaggggygggcaaggctgagtctagaagcaaatgccagcccacaaatgtgcagtgattggcgcctacagaggccagggatagctaagtactgtggagatataaaatg

SEQ ID NO: 376781 - DNA, 201 bp, Homo sapiens
tcagttgcccacagggcctgaggtctggggtgaggaacacctggtccagatcaaagagcttttagggtgtggggctggatttttgcatacaggttacatcrggagtccaggagtaaaattaattcttagaaggccagattacataaaaggcaaggcagagagggttctgcaaacactaaccgcctcttgggtgtctgatgg

SEQ ID NO: 376782 - DNA, 201 bp, Homo sapiens
gatgaggcttcacttttccacaccttcctgaccctccctgtccccaaagcagcgatgcatctgaaatggcctaaaaaggcgtggaaacccaggggttcctrttctggcagaagttcctcagttgcccacagggcctgaggtctggggtgaggaacacctggtccagatcaaagagcttttagggtgtggggctggattttt

SEQ ID NO: 376783 - DNA, 201 bp, Homo sapiens
aggaagcttgggagacagaggagggccaggagatccatcctgggtgcaacttcatgctgcattctgtgtgtgccgagagccacagaggggatttaagccasggagttattagcccattagatttacaaattaagagagacctctaaaaccccatgggcggtgtttcaagttctgaggtcatctttctttctcagctattta

SEQ ID NO: 376784 - DNA, 201 bp, Homo sapiens
atgaagtgattcaacacactgggaggtgaatgactttgtggcttgggcagcatatttattgtagagttcatggtggatattcatcttaagacttctgttaygatgtatttaggccactgtttctgctgaatgttctggagtcatctgaatctcacagttttcttgtgcatttccttatacattatcagatggttcttcctg

SEQ ID NO: 376785 - DNA, 201 bp, Homo sapiens
tcctgcagtggctcagctttgttaaagatgaagagttaaagatgacttaggcccttctcctaaggagctacaggagacaagggtgtacactgtatcagaakttttttttctttgtggcaacagaaagggccatgtcacaataagcagagggtatttatttctgtctggaagtgggtgaaactttacagggaaattgctgtt

SEQ ID NO: 376786 - DNA, 201 bp, Homo sapiens
cgctgcagcctcaaactctagggctcaagcagttctcccacctcagcctcccaattagcaaggactacaggcatatgccactgtgcccagctaattaaacaaaaatttttttttttttttttttttgtttaaatgaggtcttgttatgttgcccaggctggtctggaactcctggcctcaaatgatcctcctgccttaacc

SEQ ID NO: 376787 - DNA, 201 bp, Homo sapiens
gtttggaggggacaaacattgtcctcttgtgcctgtgccacacttgcccctccgtccccctcatctgctgatgattcatcacactgttaacttggtctctmcatctgtttaaacgctttctcctttcccctattatgttgctgttaagactgtgaagctgtcagcaatgttagcgacaccgtccacatgtggggacaacag

SEQ ID NO: 376788 - DNA, 201 bp, Homo sapiens
ttttcaaagtgctgggattactggtgtgatccaccatgtccagccaacacacagacattttattttttatttatttttaatttttaattttttaaaatttytattcaagacagaatcgtgctctgttgcaatcttggctcactgcaacctccacctcccgggttcaagccattctcctgcctcagcctcccaagtggctgg

SEQ ID NO: 376789 - DNA, 201 bp, Homo sapiens; identical to SEQ ID NO: 81290

SEQ ID NO: 376790 - DNA, 201 bp, Homo sapiens
actgagctctaaccacattagcactaattattgcggaaggaagggcacctgaggaggaaacatgctagagaagggtccacacagcatgtttcaaaatgcartggttcatgaaatcaatttgaggttgtaactggcattaaaaagctttttgaaatagcaaatatccaagtacgtttcctatgggaaggataagcatttttt

SEQ ID NO: 376791 - DNA, 201 bp, Homo sapiens; identical to SEQ ID NO: 81293

SEQ ID NO: 376792 - DNA, 201 bp, Homo sapiens
cagtaccagaccatcatcctcacataccaggagaacctgaccgacctccatcagtacagaggtgggtgcacccccatgctgtcaccacacacgcgtgcgcrcacacacacacacacactctcactctcactcagtcactccctctgctttcccagccagggatctggaacacagggtcacttacacattcccactgacaga

SEQ ID NO: 376793 - DNA, 201 bp, Homo sapiens
gaacatgtgcccaaggtggtcaggctacaacttagttttatatgttttaaggagacataagatatcaatcagtacatgtaagatgtatattagtttggtcygggacaacttgaaatgatgggacttcagcttataggtggattcagagattttctgattgacggttgaaagtgttaagttattacctgaagacctggaatc

SEQ ID NO: 376794 - DNA, 201 bp, Homo sapiens
tgtcacggtgatgtctttatgcacaggcactcactctgaagtcactcaccctctcaccagctcatggtggagatgcagtaaaaagatcttgaataaatgayttctgctagttcctctctgagtcctgtagtggctctaggtcaaaagcagtaaaacctaaccagaggaaaaaaccagaggggaaaatattttggacacacg

SEQ ID NO: 376795 - DNA, 201 bp, Homo sapiens
catcccctggggataaggggttgtggggcagcagtgccagccactcaggtactgagtccttccatccccagtttgagcagagctgctctccttttcaggcwcttatttctttttgtttgtgtgtatgaataaagggtccctggctgaatagctggaatatctttagtcaggtctaagcctatatctcatggatggggagac

SEQ ID NO: 376796 - DNA, 201 bp, Homo sapiens
gcagagaccatgagaacaggagcttgtcttacttgatagtgcaaacagtcttacaaatagtgttcaaccatcgattgcccaaaacacgtgttttgtgactrttattgtaggtgcctttgaactgtatggtgtgttaaataactccattggagggaggaagatctttgtgttttgagttgattatttaattattctttaatt

SEQ ID NO: 376797 - DNA, 201 bp, Homo sapiens
cgtcagaactgttaagaaggtgtcctcatgctctttagcagggaccggagttcaaacagcagatttgtcacatgctcgccacaagctgggccccctactayccactttatgtggattctctaatctgatccccacagcagccctgggaaatgggcaccggtttcacacccacttggcaggtgaggaaactgaggcatggag

SEQ ID NO: 376798 - DNA, 201 bp, Homo sapiens
gacaaaaatttagaacctgattaagtgagaccttgtaaatagaaagcctgaagttccagggtgtccccaggttccctggatgaatcagatgagcccaggcyaccatcagccacccttcgggatgtcagggtaaagctgactgaggctggggtagcatcagctgtgtcatatcaggattcaagggcttcaggaagccctggc

SEQ ID NO: 376799 - DNA, 201 bp, Homo sapiens
cactggatggttgagaacaacagagaagaaggcaccaaagtgaatgcccgggcttttagcctgcttggaaagggagtcagaggtggccttagccaagggcrggtggagggagagatgagttggttgaggccccagcagcccacccaggtggagctgtccagtcagcttgaccacctggatctggatctccagagagaaaaa

SEQ ID NO: 376800 - DNA, 201 bp, Homo sapiens
taaagcactgtgttaaggactgaattgtgtctctccttcagattcatatgttgaagtactaacccccaatgtgaccgtatttggagatggcgtctgtaaasagataattaaggttaaattaggacataaaagtagaaccctaatctcatagaactggtgtccttataagaagagacctcatgaaagagatgacagagaaaa

SEQ ID NO: 376801 - DNA, 201 bp, Homo sapiens
gtcaccatccctgagggccgggggaggagaacccatgaggcaggtctgcagccagttcatttgcagcctgtctcccttgtcatcccacctcagtgttcggyggtgccatctgccgcatgtaccggtttccaaccactgatggtaaccatttgcggatcctggagcagatggcagagagcgtgctctccctgcacgtgcccc

SEQ ID NO: 376802 - DNA, 201 bp, Homo sapiens
cctaacttaacgtttaaacaaggcttgagcctgggcaaaatagtgaaacttcatctttactaaaaattaaaaaattagctgggcatggtggtgcacacacwtctgtagtcccagctgctcaggaggctgaggcaggaggatagcttcagcccaggagttcaaagttgcagtgagctatgattgtaccgctgcactccagtc

SEQ ID NO: 376803 - DNA, 201 bp, Homo sapiens
cagcctcaaactctagggctcaagcagttctcccacctcagcctcccaattagcaaggactacaggcatatgccactgtgcccagctaattaaacaaaaawttttttttttttttttttttgtttaaatgaggtcttgttatgttgcccaggctggtctggaactcctggcctcaaatgatcctcctgccttaacctccga

SEQ ID NO: 376804 - DNA, 201 bp, Homo sapiens
gtgtttgggtggaagaagaaaagggaagagaaatcaccatctttggcaatgaataaggcacacccagcctgctttggggtttagagcctcctgcactcccrcctccaccatagaggagccagactgggttcatgctccacagtcttccagctgcgtctcctggaatgaacctttgagtaacaactctgagtgagtgatgat

SEQ ID NO: 376805 - DNA, 201 bp, Homo sapiens
acctaaaaccagaggagactttcagtggtgagggccagtgggagtggagctgggggcgtgaggagcaggcacaaagtcctgagcctggtcctgctctggcrtattgttcgtggtagtaagccatctgagccaaatcctcctgatgaggagtcctctgcacagccacactgacagacaggagagacagtggcaggcagtgtg

SEQ ID NO: 376806 - DNA, 201 bp, Homo sapiens
aagactgaagtccttttgtgtctctgctaagtgttcaccccaacactgaatgtttcaaacaggattccattttcacagctaaaataaacaggttatacacyactttgccagagatctacatgtagtaaagttgctgaatgtgtgaccactttgtgtttccatgggacctagaggaccaagatgtctctccctgatttcagt

SEQ ID NO: 376807 - DNA, 201 bp, Homo sapiens
aatgtaagaatcagatatatgctggtgatgctgtgtgaagcagcagagctgctgtgaactctctggggtcccaaaagtctaggaagtttggaaaatcctcytccttgtctaggcctgtgcttccctgtcctctctgtttgctttgcttcctctgtctttctcctttccttgctcttggttatcttctgaaagatgaggctt

SEQ ID NO: 376808 - DNA, 201 bp, Homo sapiens
gtttttaaggaaaataccatcatgaagctaatcccagggaatttacctatatttctattcatatgcacatgttattctctaattttttttttttagtattwtgatatagtttcagacttacagaaaagttgcaagaataagccaaaggtttctcagattctccaaatgtggacattctgttacactgctttatcattctct

SEQ ID NO: 376809 - DNA, 201 bp, Homo sapiens
gaaatgatgggacttcagcttataggtggattcagagattttctgattgacggttgaaagtgttaagttattacctgaagacctggaatcatagaagggawtgtttgggttaagataaggggttgtggagaccagggttttatcatgcagatgcagcttccaggtagtaggctttagagctcttatacgacctaaaatcgt

SEQ ID NO: 376810 - DNA, 201 bp, Homo sapiens
tgcttttctcacctggggtgggggctttgggaggaggggagcagtactacccatagtgggcagggatgggcctctggggcggggggagcctgtgtgtccaycttgcctgccactaattttaaataacagtgtggaatgctgttataatggtttttattttaaatttttttccacaaatgcactatcttctcatttttttat

SEQ ID NO: 376811 - DNA, 201 bp, Homo sapiens
cagtttagtattccagaaaagttgccacaacatcatcaactactcatggtgtcaggaggctttgactttcactgagaaaaaaatagcacaaatctgcagcraaaaaggcttgattatgttggtgcttctgtagaacttgattaatgagctggtcttgagagagccttcgaaacggctttttttttcagtgtcctaaaacag

SEQ ID NO: 376812 - DNA, 201 bp, Homo sapiens
cttgatggcctgccgcctcttgtcggaggggtcacatgagtgcgcagagtgaggaatgggagctgctcacttcatgggttattgcttcttttttcttgacyccaagaaaaaattccagccccctagacagctcccacacattctgtctcctcttctgcttaagtgcagtttttcctcctaatgaactctggtcttcaaatg

SEQ ID NO: 376813 - DNA, 201 bp, Homo sapiens
ccaactagattcagaaccaagggcagatattatagtgcctccctgttttcaaaactggatattttgtagtattgctgttaaactgaatattagcgtttttwaaaaaaaaatcactttaaggaaggatgaaataaaataatacacgagagctatttgtaaactgtagagcactagaaaaatgggatgtgtatgacagagaac

SEQ ID NO: 376814 - DNA, 201 bp, Homo sapiens
taggatgtatagtgcacaaagcactttttataacttttactcacataaggaattgaaaatccttgtaggaaaattaggaaatacagataagcccctacacwagttcctcagaaccctcccacaaagaatcccccagtttcctaatgtgaacaggtagcgctgcggacatttggatacatactgtctagataagagacatgc

SEQ ID NO: 376815 - DNA, 201 bp, Homo sapiens
ttcttggtctcctcctctcttgaccctcttctgtggattggaaacattgtgagaaactacgtcccttgcttgcattggcagcagacactgttgaagtcctsggagaacacgatgctgtgaacagaccgaggggaggaatggtggctgctcctcacaagaggaaggggtcctgggcacatttggactttgcctcctggagtg

SEQ ID NO: 376816 - DNA, 201 bp, Homo sapiens
aggagaccagtgacaaagtggccccctggagagccacagtgcgatggcaggcctgtcactgagcccagacccgcaagggccccatccgcctgcccctagcmcacttgggttgtgtgctcaggacagccgttacagttacagctgttaggatgtatagtgcacaaagcactttttataacttttactcacataaggaattga

SEQ ID NO: 376817 - DNA, 201 bp, Homo sapiens
ccctgtggtccatgcctcaaaacacctcatcattagtattacttctgagccctgcctaaacatagcagcgtggaccagctctcagtcctttctcttcctgkccctaccccaccttcctgttggctactctgctcccatggatggttgagagggagaccctcttctgtgtggctagccaaggttgcacattggctgcaccca

SEQ ID NO: 376818 - DNA, 201 bp, Homo sapiens
tccttccatccccagtttgagcagagctgctctccttttcaggctcttatttctttttgtttgtgtgtatgaataaagggtccctggctgaatagctggartatctttagtcaggtctaagcctatatctcatggatggggagacccagcagtgcaccacaagtggctggtgtccctctgggatggaagcctggcactgca

SEQ ID NO: 376819 - DNA, 201 bp, Homo sapiens
ttgtttagagaacttgattcaggaaaaaggaaccatctttggtaaaatgagagggatcatgtaagggaaagggctttgagaaaaatatttagttacgtcaygtgtcagagttaactctagttgggttagagttaaatgtacaaaatagacatcattctttttaaaggagctaaaggcggctgatgattgaacagatagagc

SEQ ID NO: 376820 - DNA, 201 bp, Homo sapiens
ctaatcagtggacaggatcagagccctgcagcagcccttagtttgtttagagaacttgattcaggaaaaaggaaccatctttggtaaaatgagagggatcwtgtaagggaaagggctttgagaaaaatatttagttacgtcatgtgtcagagttaactctagttgggttagagttaaatgtacaaaatagacatcattctt

SEQ ID NO: 376821 - DNA, 201 bp, Homo sapiens
gggtggatggcttgagcccaggagtttgaggctacaataagcctgatgtcattgcactccagcctaggagacagaacaagaccctgtctctaaaagctggaaaaaaaaaaaagtacaaaaccccaaaactccaaaggactgagttctgggagcttttggatagctgagcatgcagaggttcccggagagtggcacataggg

SEQ ID NO: 376822 - DNA, 201 bp, Homo sapiens
cggggtttcaggtgagggagtttgacacttcactggttcatatgtgacatactccagaggtatttgcgacctggtttagtcctgacccctttattgttctmgtggagatactttccttcctctcttcttctgtttgaaactaggactccacatcttgccctagaattgccacccacctgtgtgacgcctgggcctccgagt

SEQ ID NO: 376823 - DNA, 201 bp, Homo sapiens
cctggcttgaacctgtccctgtcccttgatgttgggaagcagagattccctgtcatgtcagatgactcagaggggccctaggatgctgaggcaccaagtgrgggctgtcatttacacaccgtctgtcgataacattggtaccaagcagtatagggtcttttatcctggagattctgaacctctgtgatggacccctgaggt

SEQ ID NO: 376824 - DNA, 201 bp, Homo sapiens
agggatatgccaacacccagccctggcttgaacctgtccctgtcccttgatgttgggaagcagagattccctgtcatgtcagatgactcagaggggccctrggatgctgaggcaccaagtgagggctgtcatttacacaccgtctgtcgataacattggtaccaagcagtatagggtcttttatcctggagattctgaacc

SEQ ID NO: 376825 - DNA, 201 bp, Homo sapiens
ggctgctatttaatctttcaatttatggtataaaatcctttatagtacaggtaatgctgcagtgagcatccttgtctgagatcccaccgagagtagtggcytcagtcttccaatcagtggcttttctctcacttggctggcctcttgaagcgaacagagtgtgtgtgtgtcctggtagctgagtaaactccagctccgcac

SEQ ID NO: 376826 - DNA, 201 bp, Homo sapiens
gtggccaaagggcagtgcaacttctgagctgctcccgtctgttcaggtgaaagaggagagtagagatagtaggtctgttccctaccttccagggagacctrgagacctggcccaggactgtgggcatcctgagagtggctctggcttccccagtgggtcatatttgccgccctctttccctgagggatcagcagtgaaggg

SEQ ID NO: 376827 - DNA, 201 bp, Homo sapiens
acaacctaaggatggtacagttccccagttattaaaattttgcatacttactataaagggtttagtaaaacatagtctagaggaagaaaaccagaaaagcrtgatgtgtccatctcccagtgcttaacatttttatacgtgttcttttcctctctcccactccgcgtgagtgcttctatgtctttatattggtagatctta

SEQ ID NO: 376828 - DNA, 201 bp, Homo sapiens
ccagtttggtggcaggggcaccaccagggtagtgtgggaatgtccaagtgttttgctggcccatgcccaggccatggtaaaagccctccctgttgtggatrtgtagatctgaggaggagcaggggtttggttgtggggtcagggacttcttagcaatctcaaaaacaaaatatttttaaaataaagaaattgtcttgcatg

SEQ ID NO: 376829 - DNA, 201 bp, Homo sapiens
taaagaaatggatgtggacaaattcaaagagaaagaaacattgtgtttctactgagctccttatagaattagtctgcttacctggccaccttactcatcawgtagctacttttttcatttagattattctgtctcagggtgtttaatctgcttgggtaagtcttgtttcccaactagattcagaaccaagggcagatatta

SEQ ID NO: 376830 - DNA, 201 bp, Homo sapiens
gtgctgcctttctgtggagcctcgcctctaagcacggcccatgtttctgttggcagatctgccgccgccttaatggggtccggttcaccagctgcaagagygctaaggaccgtacagccatgtcggtgacactggagcagtgcctgatcctgcaacacgagcatggcatggccccgcaggtcttcacccaggccctggagt

SEQ ID NO: 376831 - DNA, 201 bp, Homo sapiens
atgaagaggaagacaagtgggttttcctcccgtgttggaggtctctccttcccctgcctcctgtgccttctatggccttgggatgcttgagaccagtcagwgctctgtttgctgttagattttccagggctatgtgtatttggggacgtgggagctctggtgctggggcaagtagatatggattttggagctgccgccctg

SEQ ID NO: 376832 - DNA, 201 bp, Homo sapiens
aaaactaagctagaaatagtactggggaaggaaggtgggggtggggaaggaagtgagtgcaaggtggggccgttctgagggctgaaaacttgggagctgtrgggaatagtcctcctccaggtgtgcaggggtaagaattgaacacagttgcacacaaggcttggcaagggcagaggagtctctgacttgactttataccca

SEQ ID NO: 376833 - DNA, 201 bp, Homo sapiens
ttcatatttcatctccatgtgaccttgaaaaaaatcactctgagcatccgtgacctcatccgtgcaactccttttaaaaattattcttagaagaaccccartgaataagcaaaagtggagctctgatgtgttaatcctcacccctcaactccagctccggggagcctgagaggttcctgaggtggagggacctgcagtact

SEQ ID NO: 376834 - DNA, 201 bp, Homo sapiens
aaatggcattacattaagctaaaaagcttctgcacagcaaaggaaacaacaaagtgaaaagacaaactgcaggattgaagaaaatatttgcaaactatacrttagacaaggggttaacatcagaaacatacaaggaactcaaacaactcaattgcaggaaacaatccaatttaaaaatgggcaaaagacctgaatagacat

SEQ ID NO: 376835 - DNA, 201 bp, Homo sapiens
ctgttcttcatgtgtcctctgtcctctggaagatgacttcctgagggagaggccacagcacatatgtctgtgtcccctcccctagccccagcccagggctyactgagggtctgtggtgggtcttcaaatctgtgcatcctcagtaggaagcatctgcagaaaggaggagtgaggtttgagaacctgatattctcctcttac

SEQ ID NO: 376836 - DNA, 201 bp, Homo sapiens
attcagaaccaagggcagatattatagtgcctccctgttttcaaaactggatattttgtagtattgctgttaaactgaatattagcgttttttaaaaaaawatcactttaaggaaggatgaaataaaataatacacgagagctatttgtaaactgtagagcactagaaaaatgggatgtgtatgacagagaactatcagcc

SEQ ID NO: 376837 - DNA, 201 bp, Homo sapiens
gaaagaggaaagtgtttacccgctgccagctccggtcctgggatcctcctagagcgctttccctgagacacctggtagttttcctgacctccggttgctgyagcgcccctctttttgcacctcactaggtggtattctgatgtctcctgaaaaccccctgcccctttcctgcccctcccatagccctcacgcaggtggtgt

SEQ ID NO: 376838 - DNA, 201 bp, Homo sapiens
ggcacacaagcccttttgtccaggtggctggaacctaggtctgcttccacttctgggtgagaaggtgccacacctttgggtttggtcatcgtgtgtgtgtggtgtgtgtgtgtgtgtgtgtatgtttaaaattaaaagtaaaaattttccccatatacatgtacacatatatgcaagtgtggtattataggtgcaagggtg

SEQ ID NO: 376839 - DNA, 201 bp, Homo sapiens
tgcccaaggctgtggaagcccacctcttgcatcagcatgacctggatatgagacatggagtcaaaggagatcattttggagccttaaggtttgactgcccygttggatttcagacttgcctgggaccggtagcccctttattttggccaatttctcccatttggaatggctgtgtttacccaatacctgcacccccattgt

SEQ ID NO: 376840 - DNA, 201 bp, Homo sapiens
agatcattttggagccttaaggtttgactgccctgttggatttcagacttgcctgggaccggtagcccctttattttggccaatttctcccatttggaatrgctgtgtttacccaatacctgcacccccattgtatctagaaagtaactaacttgcttttgattttacaggctcataggcagaagggacgtgccttgtctc

SEQ ID NO: 376841 - DNA, 201 bp, Homo sapiens
tctaattccagagatctcacattatattatttaaaatgtgtagttttcaacaagaagttatgagatgttgcaaaaaagaaagtatggctcatacacagatrgaaaaaacccatacagtcagtagaaaccatccctaggaggcacaaatgtttaacttagtagacaaagatttttaaatcagctattttaagtatgttcaaa

SEQ ID NO: 376842 - DNA, 201 bp, Homo sapiens
caaaaaaaattagctgggcgtggtggcaggcgcctgtagtcccagctactcgggaggctgaggcaggagaattggcgtgaacccgggaggcggagcttgcwgtgagccgagatcgcaccactgcactccagcctgggcaacagagcgagactgtctcaaaaaaaaaaaaaaaaaaatttctattcatcaaaaatatctttc

SEQ ID NO: 376843 - DNA, 201 bp, Homo sapiens
ggacactcgccatcttggcagacaaggtaggaggggtgccctgctacatatgggctggggagtttccttgggtttctggaagccaccaggcagcccaggtktacctaagatggtccacaaagagcgtgacattgggatgactttgaaggtctaccttaggtccatttcgcacaaaggcccagggaggttttgtgatttgtc

SEQ ID NO: 376844 - DNA, 201 bp, Homo sapiens
ataggacaataaagaatctgagagcagaggctcacttattcccttgagggcttacagtggttcccaagagaaaggccaagagaaaggattagatggattaracactaagtgtctaaagacacttagtgctttagacagtgtctcagtgagaagtggcagggattgctttctagggtccgttaggggaaggatacttgttga

SEQ ID NO: 376845 - DNA, 201 bp, Homo sapiens
tcacctctcccactttgccttccagttcctctccccagaggcaagcagtttgcccagcatttttgtgagcccttcgggggcagtctgccatatacagacayggacgttttcataccctctttcttctggagtgtgcattcgtttgagcagcttgtttggaaagctgtatatgcaggttgtgaagtcacttttggttttgat

SEQ ID NO: 376846 - DNA, 201 bp, Homo sapiens
atgtgtgactgagctgggtgggtgatgagggcactggatcaatggtcctgtcctgcaaaatgaggagcagattgtgatccacctcagaagtggtgctccaggcaaccgccctatgtagactctgctggcttggcatcctttagagtccctggccagtcagttgagcaccataggcatcgagcctggagcatgttgtttcct

SEQ ID NO: 376847 - DNA, 201 bp, Homo sapiens
tacattgatatttttcatcacatttactcatctgggtggcatttatattgccatatcctttacagttattgattaactgttggcagcttgtttttgaacartgatcctgtaagcttcattgccttgtaagaggtaagacctaattccttcttgtcacctccaattggctgctactttgcaagagtggtgctcattaatcaa

SEQ ID NO: 376848 - DNA, 201 bp, Homo sapiens
gacatccaacttgtttcagtttttaaaaattcctcctgttgagtgtgaaacccatgaaatgagtcctcaggcacagcttgtgtaatgggctgatttattgyatgtggatctgtaatggtctatgtcagacttcttttttctcttttaaaaagcagagtttttttgtttgtttgttttatgtatttatttaagccgccttta

SEQ ID NO: 376849 - DNA, 201 bp, Homo sapiens
ggcttaacatctcaagagttcagtgaggcagagtggagggggaggctttccaccaagactgtttcatcctgttttcgtttttaaatgaaaagctccttttyagtttagtattccagaaaagttgccacaacatcatcaactactcatggtgtcaggaggctttgactttcactgagaaaaaaatagcacaaatctgcagcg

SEQ ID NO: 376850 - DNA, 201 bp, Homo sapiens
gtgcctcagatgggaggagaccagggactctgagccaaatggctgtgaggggggatcctgtgctgcacaggatctgtaccacatcatgttctggtcatctytcaggcacgcctgtaacagtgatacatgattcctgccaatggaatgcatttaaactgatcagcaacactgtagaaatgcctttatgctcggaagagggag

SEQ ID NO: 376851 - DNA, 201 bp, Homo sapiens
agacgcggccgccccagcagggagccgggtgccgagcgggcgcgtggccgcgggacgcagacgcggtgcctgcccgatgcggctccagggctgggtctacsggctcctgaagctggaggccttgccgtgtttggggtggaaacataaccgggtgaaagtaaacatgcatctccgtgtgggaaatctggtctccatcctcga

SEQ ID NO: 376852 - DNA, 201 bp, Homo sapiens
cactgtgttgcccaggctggtctcagactcctactctcgccatcctcctgcgttggccgaccacagtgctgagtttacaggcgtgagccactgtgcccgamtaatgctgcagccttcttaatgtatcccatcaggaggcatatgctgtgattatcccattctctggccctgctaactttgatcacttgaattaaggtggtg

SEQ ID NO: 376853 - DNA, 201 bp, Homo sapiens
atggagctggtggttggcacctgactgtgctgccatggctgggagtcaggacgtgatctgagaaaactgaaagaggtgaaaggtcagatcagtggctgagkgggtcagggaggcagctaggggcgtcactgatcatgggcaaggctgagcagggaacggaagagcgtaccctgtgagaagtcaccattcagatacgtgcac

SEQ ID NO: 376854 - DNA, 201 bp, Homo sapiens
aactgacactatgaaactgctgaagaaaacataggtgaggcgcttcaggacattggtacgggcaaggctttttgaataagatctcaaaagcacaggcaacmaaagcaaaaatagaaaaatggcattacattaagctaaaaagcttctgcacagcaaaggaaacaacaaagtgaaaagacaaactgcaggattgaagaaaat

SEQ ID NO: 376855 - DNA, 201 bp, Homo sapiens
ctgatgtgttaatcctcacccctcaactccagctccggggagcctgagaggttcctgaggtggagggacctgcagtactcccgctaggcctctggcaaacstttcccaggactgctgctgaaggccttgccacctcactagtcctgtgtgaatcctaacacccctcccgtcctgccagtgccctctccaccacccctttcc

SEQ ID NO: 376856 - DNA, 201 bp, Homo sapiens
ccagttaatcaaaaacaaattgtatttccaaaaagggggcggaggaggagctttgtgcacttccttaggattttcacatcgtgggtagtaacatagtcagrtggcagatttttctgtttggattaaagtttctattttcagcaaccacttccctgaaagcatgctgctccctgacccgagggtctcatgagcagccatcct

SEQ ID NO: 376857 - DNA, 201 bp, Homo sapiens
ctcatggggccctccagcccgttctcttcctggcctgtgacgatagcgggttaagtttgtacttttaacagtaattaaccttcttcaaggccttgtttgcygttataagtgttccctgttctctgggtactcacagccccttccttgctgtccttgatccagcggcatggcctgagtgcctccatccccctgtttctggat

SEQ ID NO: 376858 - DNA, 201 bp, Homo sapiens
cttgtttggaaagctgtatatgcaggttgtgaagtcacttttggttttgatttcagcctcccattctttccctttctgcatttgtggtatctaatatcacyttgacagcctcaagagcggcctgtgtgtgtgggttttggtgtccatggtgcagtgggcgagggccacccgcagccttcccagtgcttggtgaggcccaag

SEQ ID NO: 376859 - DNA, 201 bp, Homo sapiens
gctccaacaaggcctctttttgatctcccatgtgactccattttctcgttctctcctgtggctgggcctgtttctgcctgccgtggagcagaagtatggtycacatgggtggagacctacaggggccaaggagggctgggccttgaaagtgatgagcttgagtccctgttggggtccggggttgggggaagggcacaaggt

SEQ ID NO: 376860 - DNA, 201 bp, Homo sapiens
aagcttctcagcccatttgctgccacagtgacagcaataggctgtggtggggtaggacgggggtggggtaggacgggatccggtgggtggggcagggagargggcccccattgcacttgggctttttctttgggttgataacgatagttcatatttcatctccatgtgaccttgaaaaaaatcactctgagcatccgtgac

SEQ ID NO: 376861 - DNA, 201 bp, Homo sapiens
ggtatctcatcatatgtggaatatttctgttagaccatctgagaattttaagctctggtggatggaagtaaggttgcttttgaacagaagtctgccatgcygctgcttctcacaggctgcagcctcaggttgagcgctcaggaaccaaggtcaacgctcagtgtgtgtttgccaagtagactgtgtagatttgaagtgctt

SEQ ID NO: 376862 - DNA, 201 bp, Homo sapiens
aggtggtgtcagctgctgttatggaagctgtctattattaattcaccctagcatattgaacgcccttctttccctctctcatgttgcttgcatctctaaakggtgtattctcaaaccaattaatttgaattttcaagaaggatgacctaagtgtataaactctggaaatgtgaaggaagtatttaggcagatggttgtttc

SEQ ID NO: 376863 - DNA, 201 bp, Homo sapiens
ctggccccagaggtctctgaggtcccatcaccttctgatgactctgtctgcagggatgagtctgttgttactgagccgctagccttcagcttcctctcccrtggtcattcccgaggctgcccactccccctagttgcccacaagccttatgaactcccatctccgttcctcctgtgtggcctgttctggttccctctcctc

SEQ ID NO: 376864 - DNA, 201 bp, Homo sapiens
cgatgtgatcgtctcatctctttgaatgtcatttactctttgtgctttctttgaatgtgtttggaacagaaaactaatcagagtctggttttaaaggattsatttctttcccgtgttgattctgtagcttgcagtgagctgcatactccatcgctagatcgaaagccaaatagttttgttgcggtgagtgtcaccacccct

SEQ ID NO: 376865 - DNA, 201 bp, Homo sapiens
gggagataactgaatcatggggggtggattctcccatactgttctcatgatagtaagtctcatgagatctgatggtttgatgaagggaaactcatttcacytggctctcattctctcttgctttctgcgatgtaagatgtgccttttgccttctgctatgattgtgaggcctccccaaccacatggaactgagtccattaa

SEQ ID NO: 376866 - DNA, 201 bp, Homo sapiens
cccttgagattttttacctacagagacctctagacaaggtgtttcctcccatggagaccagatgaggcaggtgagcgggcagaaggcaccttggcctgagwagttcttggtctcctcctctcttgaccctcttctgtggattggaaacattgtgagaaactacgtcccttgcttgcattggcagcagacactgttgaagtc

SEQ ID NO: 376867 - DNA, 201 bp, Homo sapiens
cactgtgccccatggtttccttgtctgtctcgcctgagaggagccctgtgtgcacagtgaatgctgactgactggtcagtcagctcggccctgctgccccyaggaccctgatgacccagtacggctagggctttgtatttcagcagaaaagaagcacagttgcagcaccactcattaaagcatgttgtgcatcacaggtct

SEQ ID NO: 376868 - DNA, 201 bp, Homo sapiens
agtagccagagagggtttgtggtccttgtacagctttctgatgcttcttttctcagtttaaaataaaatcaaaatatgaccgcaaaaacacccagccatcwgatctgcttttgcgtggcaggaggatctgccttatggagcctgtgctgctctgtttatgtgtgactgagctgggtgggtgatgagggcactggatcaatg

SEQ ID NO: 376869 - DNA, 201 bp, Homo sapiens
gtactaaatttgataactagttgatttcactgctagtcttagaacagcataaaaccatcaagttatactgtgctgtgggaagtcatttatgtttaaaatcrcttttgctggttagttttatgtctacacctgaacatttcccagagaactccccggacgcgctcactgagtaggtgaggccccctggctgctcatcctccc

SEQ ID NO: 376870 - DNA, 201 bp, Homo sapiens
agtttaaaatatgatagacaaaatttaaaaaattctatgaagtttggaagttagtcaaggaattcttccagaaagtaagattttaaaaacaaagtagaaartgggtaagaaatagaaatggaaattttgagagtaaatccagaaggtccgatatttagaagaaaaaacagaagagaatgttaagggaggaaatgcaaagaa

SEQ ID NO: 376871 - DNA, 201 bp, Homo sapiens
acttattcccttgagggcttacagtggttcccaagagaaaggccaagagaaaggattagatggattagacactaagtgtctaaagacacttagtgctttaracagtgtctcagtgagaagtggcagggattgctttctagggtccgttaggggaaggatacttgttgaaacccctctcactttgatctagaatccaaaagg

SEQ ID NO: 376872 - DNA, 201 bp, Homo sapiens
ttagtgctttagacagtgtctcagtgagaagtggcagggattgctttctagggtccgttaggggaaggatacttgttgaaacccctctcactttgatctaraatccaaaaggctaaatctaaacctctagagtaaaggaaccagaagcaggtgttcatagggactacaggttcattaagtttctgaaagtaaatgaaaata

SEQ ID NO: 376873 - DNA, 201 bp, Homo sapiens
attagcactaattattgcggaaggaagggcacctgaggaggaaacatgctagagaagggtccacacagcatgtttcaaaatgcagtggttcatgaaatcartttgaggttgtaactggcattaaaaagctttttgaaatagcaaatatccaagtacgtttcctatgggaaggataagcattttttggtaaaacatctagtt

SEQ ID NO: 376874 - DNA, 201 bp, Homo sapiens
tatattagtttggtccgggacaacttgaaatgatgggacttcagcttataggtggattcagagattttctgattgacggttgaaagtgttaagttattacytgaagacctggaatcatagaagggattgtttgggttaagataaggggttgtggagaccagggttttatcatgcagatgcagcttccaggtagtaggcttt

SEQ ID NO: 376875 - DNA, 201 bp, Homo sapiens
ctctcgaacaagttcaacggaaacaattcattctgaccacctctgaacacaaagacctcaggagaccagtgacaaagtggccccctggagagccacagtgygatggcaggcctgtcactgagcccagacccgcaagggccccatccgcctgcccctagcacacttgggttgtgtgctcaggacagccgttacagttacagc

SEQ ID NO: 376876 - DNA, 201 bp, Homo sapiens
tgacaggaagttcggcaggtttctcaggcctcatttttgaggtatcctcttggttttggggcctcatctggcattgcttgctcaggccaggcccagcaagyggggtgtagggcagggcacacactggctacgggggtctctgcagcaggacagagggggctccctacttttatttttcctggggggttgctaaacccccct

SEQ ID NO: 376877 - DNA, 201 bp, Homo sapiens
ccaggcactgtggatgatacagagcccaccagggcacagtccctgccctgaggaattgaccagctggtgggtggggaggcagaaatgaatatggctacccstgtgcacagcagagtatgggaagtattggagtaggaaggtaaggagagcaccaggaggctgggatcctatctggctgtgagagtcagagcaggcttccta

SEQ ID NO: 376878 - DNA, 201 bp, Homo sapiens
ttgagggcttacagtggttcccaagagaaaggccaagagaaaggattagatggattagacactaagtgtctaaagacacttagtgctttagacagtgtctyagtgagaagtggcagggattgctttctagggtccgttaggggaaggatacttgttgaaacccctctcactttgatctagaatccaaaaggctaaatctaa

SEQ ID NO: 376879 - DNA, 201 bp, Homo sapiens
acaaatacgcctttctgcctaagctcacccccctgcacagcgtcctggctgctctatatagtgtcttagccaggctagcaggagttcccatgactgtcctyaccatgatggcatcgtcactgcatcccctgggttgagggggtgggtggtgagggcatggggtgaatgcaaaacactgtacggcaaggcaaaggacattgc

SEQ ID NO: 376880 - DNA, 201 bp, Homo sapiens
agctctgacagcagaccgccatgtacagtgttcctgttgtctttgtctgtggtattgtgaaattgatgtggtaatcaaatgacgaatgaggcctggtgcgygggagtgagaggggtcatgtatgggaacactgggttgattcacctcaagaaaaagccccagaatccctggctgcagaacccaggggtgccgctgcctgga

SEQ ID NO: 376881 - DNA, 201 bp, Homo sapiens
ccactccccctagttgcccacaagccttatgaactcccatctccgttcctcctgtgtggcctgttctggttccctctcctccctgtcaggctcactgtatstttgtttcccatgatcctgcagtcagggaagaccaagccccagttactttcctgatgagctcaaagtccagaatgcagtcacgtgactggggtgggaagc

SEQ ID NO: 376882 - DNA, 201 bp, Homo sapiens
gtgcccagagcagaagagtctgtgctgtgagcacacccacggcagcgtgcacagactcgagtcccccagcagattctcttggctgccctggatggagatasggtgaaactctgctggggagagcacagtccagtggagaagccaatctgatgtggacagatgagctctgtggcaagtgtccaaggaaccaggctggtggtg

SEQ ID NO: 376883 - DNA, 201 bp, Homo sapiens
gagcacctacggtgaggcgcccgggccaggatcgggagccccacttgcgtgtgtggtttccatcctttcttgctaggcacttttctcactataccagtaatgcgtgcttattgaaataaatccaaaatatataacagcagaccagatggcagacctggcagttacacacgcacacgccttggtttgttgttgttgctggtt

SEQ ID NO: 376884 - DNA, 201 bp, Homo sapiens
cccacaaggagttttgtgttccattgtccagctgcatgctggcctgctgccaggctgtgctgcagattcttcaaccagtgctctctggatgcctgttagcytctttccagcctgtgcttcacactaatacgttagttttgtgaaggaagctgcaccccccttgctctgaggtctgggcctaggctctggctggattgagca

SEQ ID NO: 376885 - DNA, 201 bp, Homo sapiens
tcatcccacactggagggtgtcagacttttttaagactctttcattctttttgtttgtgtcattactttaagtgacagaagcagttccatagtcattttcrtggtttggggagaccctttcttggatcatagtaattcttacaataatgcctgtgctctaaccaccagttttaggggattgtgggccgcgacttggcctcc

SEQ ID NO: 376886 - DNA, 201 bp, Homo sapiens
gtgccactgaagcccctttgagcagtggcagcagaggaagggggcggtggggggctgggcatgatctgactgccatttggtgagcaggcacctgaccctgwacctcttcaccccacgctcccacagctgaccgccctcatctgcggcttcatcattaagctgaggaactgcctgcatgacgacggcttcctgcgccagctc

SEQ ID NO: 376887 - DNA, 201 bp, Homo sapiens
tgacttgtcaaaatgcagttccacttgtattaatattgaccctgttcatcgtcaccaggactgcatcttgcaccactgtgccgtcttctaggcacacacgrcccgttatctcccttggaaaaattcctctcactggaaatgtacaattaaaggatgattgaaatgtttaactcttggagtttttagtattaccaaactcct

SEQ ID NO: 376888 - DNA, 201 bp, Homo sapiens
caaattagttacaacaaccaggtggatacttttctaaactatcggagcttagcttttgaataaaaaatactgtcttaccaaaagtattttacatgttcttsataatgagactgtcattttcactttaaaaggcttgagcaattgccactgatgttttttttttttaaatgcgtgacataatggtcttcatacaatttgaat

SEQ ID NO: 376889 - DNA, 201 bp, Homo sapiens
tgaacacaaagacctcaggagaccagtgacaaagtggccccctggagagccacagtgcgatggcaggcctgtcactgagcccagacccgcaagggccccayccgcctgcccctagcacacttgggttgtgtgctcaggacagccgttacagttacagctgttaggatgtatagtgcacaaagcactttttataacttttac

SEQ ID NO: 376890 - DNA, 201 bp, Homo sapiens
gatggcgaatgaggggtggaccctaccttggagggaaagctggtcccagagtgccggcctctctgtgcaggcgctgccacagccactagggggcgccacgygtcagaaggtatcatcccctctgtgttacactagtgtcctctgatgggggtttccaaagagggaacccacatcggctgggctttgcattgggcaggcttc

SEQ ID NO: 376891 - DNA, 201 bp, Homo sapiens
gaggcgcctatgtcagggagaggcgcagcctcactggagccccagcagggaggtggcccaggggagggaaaatgatggtgcctgcatccagtagctgcggrtcccacagacttgcaggagcagtttctagagagggctgagccagagccaggtgcattgaatagaggggagggtggaggatgcaacactgaggacagagag

SEQ ID NO: 376892 - DNA, 201 bp, Homo sapiens
aggcctctttttgatctcccatgtgactccattttctcgttctctcctgtggctgggcctgtttctgcctgccgtggagcagaagtatggtccacatgggkggagacctacaggggccaaggagggctgggccttgaaagtgatgagcttgagtccctgttggggtccggggttgggggaagggcacaaggtacacagctg

SEQ ID NO: 376893 - DNA, 201 bp, Homo sapiens
tccatttctgtgcagattgcagtccccctcctgaagagtccagcccaggtacgtggtttccgttcaaggctcctgctgatgcccttttaattgatactcargtagtgttttgtagctaaattacaaaagattgccttatgatcccagagttgggaaagtattccaggacctccttcgttgtgaggcataaaacacttttcg

SEQ ID NO: 376894 - DNA, 201 bp, Homo sapiens
cagcaagaaaggtaacccggacagccacgcctactggatcagaccagaagaccccttctgtgatgtcccctcctcaccatgcccctccaccatgccctccrctgcatgccatcctcatctgaccacacgtgcgtatgcatccatgcttcccatatgctgcctccatttcaccttgtgctgcttccatttgtctgtgtctct

SEQ ID NO: 376895 - DNA, 201 bp, Homo sapiens
gatacttcccctgcaaatgctgttgtcctgggtagacctcctgggcctctctggggaaaccagttagcccacagcctgatgcatctgtgtcttgctttcakagtgtgtgagctggaggagctgggagagctgtccccttgctgggagagcctccggcgccaaattgtcacccagtaccagaccatcatcctcacataccag

SEQ ID NO: 376896 - DNA, 201 bp, Homo sapiens
ggggtgcagtgctgggctttaagcccattctccatttctgagataaggcaggggcctccccagcccctggcctgggctcagcagccttggtttgtgtgcayctgcagacacggcagctggtcacggtctgcgactgcaagctcctggccaactccatccatgggctgaacgctgcacggcctgactacattgcctccaagg

SEQ ID NO: 376897 - DNA, 201 bp, Homo sapiens
tctcttatgcagcagaggcatgttgccttgggacttggtaacacagagaatgggaccctgttcctgggcttctggtggtctgagtcaggtggtttggcagracccttcagggtaggacactggcatgaagcagcatgcttcagaacagtctcctgtctgcagagacacagcataccaggacactgtcctgcagatggcctt

SEQ ID NO: 376898 - DNA, 201 bp, Homo sapiens
aattagaaggcaggctttcctagtgcttagaaaaataaacagagcctgcctgactccacttgtctgaagcacgttattattaactttcaacttattatcasttctgctcttaacgtggcgctgtagaaggaaatgatgtgtgtggtgttaatcttcagtgcctcttcaggcccacgtgccatcctgctgaaggtgcaggac

SEQ ID NO: 376899 - DNA, 201 bp, Homo sapiens
aaaaagatcttgaataaatgagttctgctagttcctctctgagtcctgtagtggctctaggtcaaaagcagtaaaacctaaccagaggaaaaaaccagagyggaaaatattttggacacacgagaagctatgtagacaggaagcaagtgggagctccttggagaggggagttgcttgagactgaagttcagggaaaggacc

SEQ ID NO: 376900 - DNA, 201 bp, Homo sapiens
ctttgcgttctgggccttgatgacttaaattgcagattctaattaaatgtccccaaataactatgaagtgcttctaaggtctttttgacctaaaagtttcygtgacctgtgaactctctcaagtgtaaaattagtctgtagatgtacccctttaagcatttctatctccagaaacctcatgatgcctaggatataaaccac

SEQ ID NO: 376901 - DNA, 201 bp, Homo sapiens; identical to SEQ ID NO: 81299

SEQ ID NO: 376902 - DNA, 201 bp, Homo sapiens
cgggctctcgaacaagttcaacggaaacaattcattctgaccacctctgaacacaaagacctcaggagaccagtgacaaagtggccccctggagagccacmgtgcgatggcaggcctgtcactgagcccagacccgcaagggccccatccgcctgcccctagcacacttgggttgtgtgctcaggacagccgttacagtta

SEQ ID NO: 376903 - DNA, 201 bp, Homo sapiens
ggagtggaggtgactggcagagatgcagttggagccagagagcctggaaaaatacagatgcctgggccccaccccagagtgtggtgggcaggacctgggcwttagggtttcagaaactccccaggtggtccctgtgtgccacagccagggtggtaaacatagcatgaagtcaaggtcctgcgaggacttggcagctgaagg

SEQ ID NO: 376904 - DNA, 201 bp, Homo sapiens
ggtgcaaatcttcagtgacacaagagtatggctgttagagaaggaggaagacagttccccatgatcacacccccagcatggctgtcatcttgatgcagccrcctgctggctgtcccctctgtacagtacctctttaaatggctgcaaacagagcaaaggtgggctatttctttaaaaacacatgatgcagaactcacgtaa

SEQ ID NO: 376905 - DNA, 201 bp, Homo sapiens
cccttcttctgtaaatggcctctatgtctccacttaagtactgcttataagttaatagatgaggttgtgaggtggaagattacgatcatttgggtgattaygggatatgattgttcaatacctgttcatacatttacatacacaagtaaaaatacagatacatgcaaatacagataaaagactgagtcatagtttaatatt

SEQ ID NO: 376906 - DNA, 201 bp, Homo sapiens
ggctgggatgtgggccgcccactttgcattctgtcctgagaagccatgagcagctgcagccacacctctcctgaaagggaagaaggagagaagcagagctygggttagaggctgttctagtggctggggcaagtcagggtccagcttccaggtggccagctctgggcaagggaagcaggagcaggcaccaggccaggcctg

SEQ ID NO: 376907 - DNA, 201 bp, Homo sapiens
ctgtggacttgctaaatttaagcctgctttttccattacagatacaaatcctgtccacaaacagttagcgtgcctgcatgtacaattaggccacctccaamttttgagctgctacatatacttaaacatttgcattaaccaaacactgagtgtagggaattcttttatatgtttcagtatttctttaggttggtttctcag

SEQ ID NO: 376908 - DNA, 201 bp, Homo sapiens
caatgggccagctcagccatgttcctgctgaggtgtttagctcagcccagactcctgagacaaatacgcctttctgcctaagctcacccccctgcacagcrtcctggctgctctatatagtgtcttagccaggctagcaggagttcccatgactgtccttaccatgatggcatcgtcactgcatcccctgggttgaggggg

SEQ ID NO: 376909 - DNA, 201 bp, Homo sapiens
ctttgctgtcgattctctactagcctatgtgacatggctccttcccatgctgtcgtagtcactgacacaagatgtgtttggtggcatgcattgtgcacctsctggtaggacttgggggaatcacagaggcaggacccaccctcggccaggtgagcggcccactcacttccctttgtggtgcttagagaggaagatgcgggg

SEQ ID NO: 376910 - DNA, 201 bp, Homo sapiens
ataaagacattttcaaaccttaaaagctgaaagaatgtcagcaccacacttacagtataaacagtgctaagagatgttcctaagtagaaggctgatgattycagatggacgttcaccaatagagaaagcattgaaaattcaaagacataagatttggggtaaacatctgggttatagctgcatgaatagcaactatagaaa

SEQ ID NO: 376911 - DNA, 201 bp, Homo sapiens
attctagaattaaaagaaaaatttcaagaagcaaatttacaaaatgaagccagagcaataaaaataatggaaaaaaaaatcagaggagagtaaaaacagcrtagtgagaggtctaatgttacatttattttgtatctttaagaaggaacacagaaaagggtcagaagcaatatttatagttgagcatttctcccaaagtaa

SEQ ID NO: 376912 - DNA, 201 bp, Homo sapiens
ttatggctcacacctgtaatcccaccactttgggaggtcaaggtgggaggattgcttgaagtcaggagtttgagaccagcctgggcaacatagtgagaccycatctctaattttaaaaaattagtaattatccagatgtggtggcacacacgtgtggtcccagctactcaggaggctgagatgggtggatggcttgagccc

SEQ ID NO: 376913 - DNA, 201 bp, Homo sapiens
gacagagaggaaatcgggctaaactcccgatttatcgggaatccactcccctcactcctacagaaacagcattaatccattcatgaggacagagtcctcgygtcctaatcacctcttaagtgccccgcctcccactactgttagaatgacaattaagttttcaacacaggaactttggagaacacgttcaaactgtatcaa

SEQ ID NO: 376914 - DNA, 201 bp, Homo sapiens; identical to SEQ ID NO: 81298

SEQ ID NO: 376915 - DNA, 201 bp, Homo sapiens
tatcttaacttgtaaaggttggttctttctagagacagcaggagttgtagcatatagggttggaaaaacctgaaacaccttctcgctgcttaatctagttytgagagcagagtgtgagctctggagctctgagccatgtgaagcgtgtgactcagcctgtggcagtgttttacccagagccctccctttccatagcacagc

SEQ ID NO: 376916 - DNA, 201 bp, Homo sapiens
ttctgagatatagcgggcagagcactggcatcagatagactggactgcaaacacagcctctccccctgcagctctgtggccttggcttgcctaagcctcaktttgctcattgggatcatggattcctgtgcaaggatttcataagacagtgtatttgaacccagatgtgtgccccacactcagaacctcctcttttctctt

SEQ ID NO: 376917 - DNA, 201 bp, Homo sapiens
tgtgcggttggattggaagaggggaggcaagccgctgatggccagagtgaggctgtgacacttcagatgagatgttgtttcactctgactccagcctggtwgtgacagtgagcgtggagagagggatgaggcgttaggggggtttgggctgaggatgcactcctcagcggccacgtgcagctggcgctggggaggtgaggg

SEQ ID NO: 376918 - DNA, 201 bp, Homo sapiens
ccgcacccagatcatttccagagccccggaagccctctcaccctccccagtcagtacccaccccttcaggataccactctccatactctggatgccacagmttcgtttggcctgtgcttgaacttcgtatgaatggatttgcctagaatggtcttaacttttccccttgacgttgtttctgagactcatcccattgtttca

SEQ ID NO: 376919 - DNA, 201 bp, Homo sapiens
acccagccctggcttgaacctgtccctgtcccttgatgttgggaagcagagattccctgtcatgtcagatgactcagaggggccctaggatgctgaggcaycaagtgagggctgtcatttacacaccgtctgtcgataacattggtaccaagcagtatagggtcttttatcctggagattctgaacctctgtgatggaccc

SEQ ID NO: 376920 - DNA, 201 bp, Homo sapiens
ggagttcaggggcgggtgactgggtaacttggaaatacaggactgggccttaggagtgtcattagggccaggccaagaggggttttggcatcatctcctgsatggccttagtggataaaactgacaaggctgcagagtggagggatatgccaacacccagccctggcttgaacctgtccctgtcccttgatgttgggaagc

SEQ ID NO: 376921 - DNA, 201 bp, Homo sapiens
taacctgcagcccacagtttctgtgacacagaaagtgtggtcaggtgctgggaaatcattgtctcatagataaaacatctgacacgcaccagcttttctgwaacaactaatggttgcaaatggaattcggggtacacaggatagcaacagatttcttcctgtccttgaagaaaactgtctcctttgtccctgtttgaccaa

SEQ ID NO: 376922 - DNA, 201 bp, Homo sapiens
gccccccattcgccagcttgtccacccatataagtttctcagcccccttgcctcaagcttctccagctcctccaagcatggcctgtactctccctgtacarctcggtgctaaaggaagcaacctcagtaacactccagctccaggtccctctctggcctagcagggatggagtctacctggctggtgctgaagagtcccaa

SEQ ID NO: 376923 - DNA, 201 bp, Homo sapiens
tgtcttaatccattttctgctactccaacaacataccacagcctgggtagtttgtaaagaaaagcaacttatttcttacagtctggaggctgggaagtccwggagcatggtgcccgcatctggtgagggtcttcccatggtggaagagtggaaggtggaagccagcatgagagacagagaggaaatcgggctaaactcccg

SEQ ID NO: 376924 - DNA, 201 bp, Homo sapiens
tgtgggggccagcctcaggggaggttaggaaaagccaaggtgagaacctcacatgccaaggtgacaacctcacatggctgacagcccatgtactgagctcyatgcggatgttttctgtgtttcttcacatatgtgcttgctcctcagtgtgtcctggtgagaccagtgttatttccgttatacagaaactgaggctgagag

SEQ ID NO: 376925 - DNA, 201 bp, Homo sapiens; identical to SEQ ID NO: 81294

SEQ ID NO: 376926 - DNA, 201 bp, Homo sapiens
aatttttttttttttgagatggagtctcgctttgttgcccaggctggagtgcagtagtgcgatctgggctcactgcaacctccacctcccgggttaaagcrattcttctgcctcagcctcccaagtagctgggactacaggcacgtgccaccacgcccagctaattttttgtatttttagtagaaaggggtttcaccacgt

SEQ ID NO: 376927 - DNA, 201 bp, Homo sapiens
atttgtgtctgcaggtgagaagggatacgcattgccagcatgttacttctcttcctgtgcttgattcaatttttttttttttgagatggagtctcgctttrttgcccaggctggagtgcagtagtgcgatctgggctcactgcaacctccacctcccgggttaaagcgattcttctgcctcagcctcccaagtagctggga

SEQ ID NO: 376928 - DNA, 201 bp, Homo sapiens
tgatgcaaaggccacaccagataaaagtctaaacagcaaagaggccagggcaggagcaggatgaagacactgctaggaggttcacaggccccgtcattgcwgttggacacagactgtgaggactgtgggagggacgctggtcaaattcccagggtatgggagttggggtactaagggagttgaagtcgtacttgtggggaa

SEQ ID NO: 376929 - DNA, 201 bp, Homo sapiens
catgggtagtgttgaagcccccatgctacaacgtgacccccacccccagcctggggggcctggctcaagctggagagaactgggagagcacccatgcaggyggcctctggtggctggagctggagagtttcaagttgggggctgtctcagctcccaccatgtggactggctcatttgcagagtgggaggatgatggacatg

SEQ ID NO: 376930 - DNA, 201 bp, Homo sapiens
gttgtgtctcatgagtgggctgaccttggtggaggcttgcgtttcccatgtggggcctgactttttatgtgtccagccagagtgatgagctcgttcactttccctgcagtgcttccttgttgaacctgaaagagaggacgtgggagcttttgtaggagagagaggacacatgctttattcttgaactgtgaggtgtatgtc

SEQ ID NO: 376931 - DNA, 201 bp, Homo sapiens
ggttgctcactgacctggcataaactagaacacaaagcttcccatttagaaaaggttcaggcagcctcctgctgggatctgcccaacccctctaggaggtkgcatggatgcccacctcttcttccaagggtgcactttgcctttaggtttggggaaaagtactgggcgagcctttgggactgttgtgtctcatgagtgggc

SEQ ID NO: 376932 - DNA, 201 bp, Homo sapiens
tttctgctccctcttgttgaatcacatttcgctgcttttctctgtgggtacttggtccctgagtaccccacatctgcccatttccctgtgtgctctgggcrgctcggaggagagatttgtcacaaggaccttcaaaaggtttctgataacagcccacaccccttccttttgtctctcctcactctagcttccctttgtatt

SEQ ID NO: 376933 - DNA, 201 bp, Homo sapiens
cagaatcttcctgggagaggacacagatgttgggcttaacaaagactttaaaactgctattatatttgttccactggtctacgtgtctatttttataccaktaccttactggtgcccagaaataaatttatacatttgtagccaacttatttttgacaaaggtgccaagaacaggcaatggggaaaggacagtgttgtcag

SEQ ID NO: 376934 - DNA, 201 bp, Homo sapiens; identical to SEQ ID NO: 81342

SEQ ID NO: 376935 - DNA, 201 bp, Homo sapiens; identical to SEQ ID NO: 81343

SEQ ID NO: 376936 - DNA, 201 bp, Homo sapiens
tgggcatgttgttagttctcaataaatatttcttgaataaaggactgaatatggcaaggatgtaaagtagacattaacctgtagagactgaagttaagcasaccaattaaggagctcctgctggaatcaaaataagaggtgtgtatagccattatagaaaacagtatggagattcctcaaaaaattaaaaagagaactacc

SEQ ID NO: 376937 - DNA, 201 bp, Homo sapiens
caaactctaccggccgggcgcggtggctcactcctgtaatcccagcacttttttgggaggccgaggcaggtggatcatgaggtcaagagatcgagaccatyctggccaacatggtgaaaccccgtctctactgaaaatacaaaaattagccgggcatggtggcacgcacctgtagtcccagccacttgggaggctgaggca

SEQ ID NO: 376938 - DNA, 201 bp, Homo sapiens
aaagtagacattaacctgtagagactgaagttaagcagaccaattaaggagctcctgctggaatcaaaataagaggtgtgtatagccattatagaaaacastatggagattcctcaaaaaattaaaaagagaactaccatatgatccattgatcccactactgggtatatatccaaaggaaatgaaatcattatgttgaag

SEQ ID NO: 376939 - DNA, 201 bp, Homo sapiens
cccagcactccctgtcctccttcattattttatttaatagcacttacctcaatctaatatacatgttttgccaatttatttttattgttctcttcctactygaacaatagaagagaattttgtctgttttacgaactgctgtatccacagcacttagaacagtgctgggcatgttgttagttctcaataaatatttcttga

SEQ ID NO: 376940 - DNA, 201 bp, Homo sapiens
atgttgttagttctcaataaatatttcttgaataaaggactgaatatggcaaggatgtaaagtagacattaacctgtagagactgaagttaagcagaccamttaaggagctcctgctggaatcaaaataagaggtgtgtatagccattatagaaaacagtatggagattcctcaaaaaattaaaaagagaactaccatatg

SEQ ID NO: 376941 - DNA, 201 bp, Homo sapiens
ggggctttggaggaaaaataatttcagaagtcagaaattcatctaagagtcttcaaattcctgtgctgtcttacgaaataagtagtttggttgagcatgtrtctgaagaggaagagtgagaagtaaagtttaaaggtagataggggcttggatcacattgtggatggccttgactaccaggagattttaacttattccaca

SEQ ID NO: 376942 - DNA, 201 bp, Homo sapiens
acacctgtaatcccagcactttgggaggctgaggtcggcggatcacttgaggccaagagtttgagaccagcctggccaacacagtgaaaccctgtctctaytaaaaatagaaaaaattagctgggcatggtgacaaaaccctgtagtcccactactcgggaggctgaggcatgaggatcacttgaactcaggaggtaaagg

SEQ ID NO: 376943 - DNA, 201 bp, Homo sapiens
gtatggagattcctcaaaaaattaaaaagagaactaccatatgatccattgatcccactactgggtatatatccaaaggaaatgaaatcattatgttgaaragatatttgtactcccaagcttactgcagcactattcataatagctaagatagggaatcaacccaagtgtctatcagcagatgaataaagaaaatatggc

SEQ ID NO: 376944 - DNA, 201 bp, Homo sapiens; identical to SEQ ID NO: 81344

SEQ ID NO: 376945 - DNA, 201 bp, Homo sapiens
actgaagttaagcagaccaattaaggagctcctgctggaatcaaaataagaggtgtgtatagccattatagaaaacagtatggagattcctcaaaaaattraaaagagaactaccatatgatccattgatcccactactgggtatatatccaaaggaaatgaaatcattatgttgaagagatatttgtactcccaagctta

SEQ ID NO: 376946 - DNA, 201 bp, Homo sapiens
acgattatttttaattttctgtttaaacatttgcatttaaagcaagccaaagtaaaattatgtagcggtagaagaagaaaagtttttcttaaacggatgargttcggtgtgagaaatgcgcagggttgtggaggagacaagtgagacttttcgtattattcaatgttgagaaatacccaaatattccttaacacccagcac

SEQ ID NO: 376947 - DNA, 201 bp, Homo sapiens
tcatatggaaattcagggtctcaggaaaacacttgaacaagtgttggcctgatccgaagttcctttctgcagagtatctttgcttatcttgcccagtaccmgatgccacgtggaaatggagtggctcttaattaaggtaagaacatgtgttaggcctctttaccttcatgttaaaataacaattctgatttctaaagcata

SEQ ID NO: 376948 - DNA, 201 bp, Homo sapiens
agtataaattgttggaatcaaaacatctcattctgatgacgtggtttaattttttaatttttttttttaataggggtgggagggagggtactttgccccaraagggagggtgtctgcactaaggatttagaaacactttggaagctcataacctcatcagaaactgcctttagccacactcctgaccttctagatgagtaa

SEQ ID NO: 376949 - DNA, 201 bp, Homo sapiens
gcttgaaccccgggaggtggaggttgcagtaagccgagatcatgccactgcactctagcctgggtgacatagcaagactccatctcagaaaaaaaaaaaaaggctttagtacagtagtagtcttggaattggtagcaaaaagttaccaatgttagagtatgcattatgtaggacctagttttaagtaaaataagtggtctt

SEQ ID NO: 376950 - DNA, 201 bp, Homo sapiens
tggtggccctggaggagggggcacacagacacagcaacagatgaaccagctgaaaaacaccaacacaatcaataatggcactcagcagcaagcacagagtrtgaccaccactattaagtaagtgttagagtaaattattaataaacacttgtggggaaccaagatttgtgttactttggtgttgactattaatacttatgc

SEQ ID NO: 376951 - DNA, 201 bp, Homo sapiens
cattattattcactattttgttgaattcaacggtatgtcaaactgacatcagaaacttcgatgatacaggcttagatgaaaggctttagtaggccgggtgmggtggctcacgcctgtaatcccagcactttgggaggccaaggcaggaggatcacgaggtcaggagtttgagaccagctgaatccccgtctctactaaaaa

SEQ ID NO: 376952 - DNA, 201 bp, Homo sapiens
aatgctttaattggtatagaaatgaatactacttcagttgtagtttgtcttggcagaatgtaagtaggttagcaaaatttagactatttttaatttttttwataactttttttttttttttttgagacagggtctcactttgttgcctaggctggagtatggtggcacgatcatggctcactgcagcctcaacttcccagg

SEQ ID NO: 376953 - DNA, 201 bp, Homo sapiens
gtggagcccaggggttccaggccagcctgggcaacatagacctctctaaagtagtaaaatttatatgggaaggcaaattatgctgtaacaattctgtaatrggaagaaattggaggagtcactacctgatttggactcaatataaagatgcagtaacgtattagcaaaaggatagacatgtattgatggaacagaatagcc

SEQ ID NO: 376954 - DNA, 201 bp, Homo sapiens
tgctttaattggtatagaaatgaatactacttcagttgtagtttgtcttggcagaatgtaagtaggttagcaaaatttagactatttttaattttttttawaactttttttttttttttttgagacagggtctcactttgttgcctaggctggagtatggtggcacgatcatggctcactgcagcctcaacttcccaggct

SEQ ID NO: 376955 - DNA, 201 bp, Homo sapiens
tagccacactcctgaccttctagatgagtaacaaaaaaatgaaataagttcttggaaattaagccatttattttaatttgctatttttttcaatgttctargtatctttaaatttgttattgtggaatcattttcctgccagatacctttatcaaaattattggcctcatgagagctgaagtaagtcagctttttggtgaa

SEQ ID NO: 376956 - DNA, 201 bp, Homo sapiens
ctggtctcgaactcctgacctcatgtgatccacccacctcggcctcccaaagtactgggattacagggatgagctactgcacccggcctagttgtttctamtaaaagatagtcatgtgctgcataacaatgttgtggtcagtgacggactgcacgtatgtcggtgttcccataagattataatggagctatacaatggagt

SEQ ID NO: 376957 - DNA, 201 bp, Homo sapiens
gtatacaatattgcttaagaggatggatgccttaatcccttctgttcttgatttttttatcctcctgagattctctataagaacactttttctaaagttgyttaattatcttgttagatatattaaatggaatatattaaacttactgtgcttttttaacacttaattataattgagatgaatcatctttgttaggatgct

SEQ ID NO: 376958 - DNA, 201 bp, Homo sapiens
gttgctctggctagagtgcagtggtgtgatctcggctcactgcaacgtctgcctcctgggttcaagcgattctcctacctcagcctcctgagtagctgggmttacaggctcccaccaccacacccagctaatttttgtatttttagtagagacagggtttcaccgtgttggccaggctggtctcgaactcctgacctcatg

SEQ ID NO: 376959 - DNA, 201 bp, Homo sapiens
tgtgccactgtgcctggccttttttgacagttttgtaggggggatttttgttgtttttgttttttgagagtcttgctctgttgcccaggctggagtacagyggcacaatcacggcccactgcaacctctgcctcccaggttcaagcgattctggtgcacctcagcctcccaagtagctggaattacaggcatgctccacca

SEQ ID NO: 376960 - DNA, 201 bp, Homo sapiens
tagatatattaaatggaatatattaaacttactgtgcttttttaacacttaattataattgagatgaatcatctttgttaggatgctatgaattttgatayttcaagtttactgtattctctctagacctggtgatgactggaaaaagactttaaaactccctccaaaggatctaagaatcaaaacttcggtaagttggtt

SEQ ID NO: 376961 - DNA, 201 bp, Homo sapiens
ttaatttgagacacagtcttactctgttgctctggctagagtgcagtggtgtgatctcggctcactgcaacgtctgcctcctgggttcaagcgattctccyacctcagcctcctgagtagctgggattacaggctcccaccaccacacccagctaatttttgtatttttagtagagacagggtttcaccgtgttggccagg

SEQ ID NO: 376962 - DNA, 201 bp, Homo sapiens
tactgtattctctctagacctggtgatgactggaaaaagactttaaaactccctccaaaggatctaagaatcaaaacttcggtaagttggttgtaaaataygagtagaataatggtggggaactagaagtgaggtatagctgtccctcggtatctggagggaattggtttcaggaccataacaccactgccaccctcctcc

SEQ ID NO: 376963 - DNA, 201 bp, Homo sapiens
tgaacaagggtccttttcacagtctgccatgtttttcaagtttttgttgctgatttcacagttttaattggcccctacacatggtgctgaagtgctgcccmatgctggtggcattggttgtgagtatattaaagaaggtattcttggctgggcacagtagctcatacctgtaatcccagcactttgggaagccgaagtggg

SEQ ID NO: 376964 - DNA, 201 bp, Homo sapiens
cttttttttttttttttaatttgagacacagtcttactctgttgctctggctagagtgcagtggtgtgatctcggctcactgcaacgtctgcctcctgggytcaagcgattctcctacctcagcctcctgagtagctgggattacaggctcccaccaccacacccagctaatttttgtatttttagtagagacagggtttc

SEQ ID NO: 376965 - DNA, 201 bp, Homo sapiens
atatactttatgctaattatttcaagcctttggctctttcttcagttgatcaattaaagatttgttttacgtaaattaactgactttttaagaaggttgtratagtaacttaattaaattcctcatctttcacttagtttttggtgtcatgatgacatagccattggtgctagctgaattgattccggtattattctatat

SEQ ID NO: 376966 - DNA, 201 bp, Homo sapiens
ggagtatattttaaaattataaatgtatatataatgtgtgtgtgtgtgtgtatattttttttttttttggagatggagtcttgctctgttgcccaggctgsagtgcagaggcgcaatcttgactcactgcaatctccgcctcccaggttcaggccattctcctgtctcagtctcctgaatagctgggattacaggctcccg

SEQ ID NO: 376967 - DNA, 201 bp, Homo sapiens
cttcatatctgtgaatatactttatgctaattatttcaagcctttggctctttcttcagttgatcaattaaagatttgttttacgtaaattaactgacttyttaagaaggttgtaatagtaacttaattaaattcctcatctttcacttagtttttggtgtcatgatgacatagccattggtgctagctgaattgattccg

SEQ ID NO: 376968 - DNA, 201 bp, Homo sapiens
cactgggtaccagcactaagtgctttacatggtttgttttttttttttttttccatttaatttttacaagaaacctataaggtaggtatcctgtcaagtarttactatagtatgtagacatccaacttctaatttgcttataaaatacgttttatacttcagatgcaatagataggcattcataggaattcagctttttgt

SEQ ID NO: 376969 - DNA, 201 bp, Homo sapiens
aaaaattagctgggtgtggtgacatgtgcctgtagtcccagctactcaaggaggctgaggcaggagaattgcttgaacctgggaggtggaggttgcagtcrgccaagatcatgtcactgcactccagcctgggtaacagagcgagactctgtctcaaaacgaagaagcagcagcagcagaaggccaggtgcagtgactcac

SEQ ID NO: 376970 - DNA, 201 bp, Homo sapiens
ccagttccactgagaagtgaacagtgggaactcaaaatttcagaaacattgggggaagggaaaattggctttctcttaattggcagatgttccagtggggsgggggggctctgtttttgttgggatgtgttatgttgtatgtacgcatatatggaccggagtctgctgagtttataaggttccaaaaatatggtaaaatct

SEQ ID NO: 376971 - DNA, 201 bp, Homo sapiens
cctagccacaagggaccagttccactgagaagtgaacagtgggaactcaaaatttcagaaacattgggggaagggaaaattggctttctcttaattggcaratgttccagtggggcgggggggctctgtttttgttgggatgtgttatgttgtatgtacgcatatatggaccggagtctgctgagtttataaggttccaaa

SEQ ID NO: 376972 - DNA, 201 bp, Homo sapiens
attccaatgtccctagccacaagggaccagttccactgagaagtgaacagtgggaactcaaaatttcagaaacattgggggaagggaaaattggctttctyttaattggcagatgttccagtggggcgggggggctctgtttttgttgggatgtgttatgttgtatgtacgcatatatggaccggagtctgctgagtttat

SEQ ID NO: 376973 - DNA, 201 bp, Homo sapiens
acgtggtttaattttttaatttttttttttaataggggtgggagggagggtactttgccccaaaagggagggtgtctgcactaaggatttagaaacacttkggaagctcataacctcatcagaaactgcctttagccacactcctgaccttctagatgagtaacaaaaaaatgaaataagttcttggaaattaagccattt

SEQ ID NO: 376974 - DNA, 201 bp, Homo sapiens
tgagtataaaactagaacttgcacaaatttaataagaaatctctttctttattttgttttaatgttcttttaaatgtcctgagtttaagaataaactgttscttagtagccaaaggacctttcattttgacctccctcaggttcaattttctagcaataaaatagggataatagtacatattcataacttacaaggttgtt

SEQ ID NO: 376975 - DNA, 201 bp, Homo sapiens
attgtgtttttgagatagttcaaagttgtgtctatcctagcttggctcgtgatttggtctaagtgtagctgtattattaattctttaatataaaagatgakaattcttttaaaggggttcttttaaaagggaaacaaagtttttctgttgtgtttgctaatttaattttgtttgtttgtttcagattgacgtgagtgaatt

SEQ ID NO: 376976 - DNA, 201 bp, Homo sapiens; identical to SEQ ID NO: 81363

SEQ ID NO: 376977 - DNA, 201 bp, Homo sapiens
gcccgggggccagttttcaaaacatatccttagtcatgtaataaagagatgttcctctggtctcaactcccgatttttactttggaggggcgaaggcaggsctacccttgccagccaccatttctcaatcacgtcgcggctgtggaaaagcagccgtcctgtcccttcagaaaggaactcgtatttccccctcgaactttt

SEQ ID NO: 376978 - DNA, 201 bp, Homo sapiens
attttgccaggcactgtgctgagtgcattatatcaattgtttgatgtaactgttaacctattttgttttatttatttatttgggacggagtcttgctctgkcgcaggatcttggctcccgggttcaagcaattctcctgcctcagcctcttgagtagctgggattacaggcacatgccaccatgcctggctaatttttgta

SEQ ID NO: 376979 - DNA, 201 bp, Homo sapiens
gctaatactgtgctattattttgccaggcactgtgctgagtgcattatatcaattgtttgatgtaactgttaacctattttgttttatttatttatttggracggagtcttgctctgtcgcaggatcttggctcccgggttcaagcaattctcctgcctcagcctcttgagtagctgggattacaggcacatgccaccatg

SEQ ID NO: 376980 - DNA, 201 bp, Homo sapiens
gatcatggctcactgcagcctcaacttcccaggctcaagtgatcctcctgcctcagccctacaaatagtggggactactggcatgcaccagtagcgacggsgttttgtcatgttgcccaggctggtctggaactcctgagctcaagtgatctgcccacctcgacctctcacagtgctgggattacacatgtgagccactgc

SEQ ID NO: 376981 - DNA, 201 bp, Homo sapiens
cgtgagccaccgtgcccggccataaatgtatatttttaagaatctttcctgaagaaaaaagttgggtaaatgcagggctgtaggtacaaagttgtttgctrtggggtggtttgtcgtgccgaaaaattggaccaacttagaaggagattggctaactaaatacgttaaggtataatctgaataggattctacatagtcatt

SEQ ID NO: 376982 - DNA, 201 bp, Homo sapiens
gacggagtctggctctgtcgctgaggctggagtgcagtggcacaatcttggctcactgcaacctccgcctcctgggttcaagcagttctctgcctcagccycccaagtagctggaattacaggcgctcgccaccacgcctggctaatttttgtatttttagtagagacagggtttcaccatcttggccaggctgatcctga

SEQ ID NO: 376983 - DNA, 201 bp, Homo sapiens
agccttgagtataaattgttggaatcaaaacatctcattctgatgacgtggtttaattttttaatttttttttttaataggggtgggagggagggtacttkgccccaaaagggagggtgtctgcactaaggatttagaaacactttggaagctcataacctcatcagaaactgcctttagccacactcctgaccttctaga

SEQ ID NO: 376984 - DNA, 201 bp, Homo sapiens
ctaatgaggagtggcacttaaactatctgggacaccactactggacacggtcttgtagaggcagctgtccagttttggtgcttgactcttgaataggaatwgttaaatggaaagatgctctgaggactaggtcaaagcctggtctttttttttttttttttttttttttctttcttttttgggccctcataataagcattg

SEQ ID NO: 376985 - DNA, 201 bp, Homo sapiens; identical to SEQ ID NO: 81356

SEQ ID NO: 376986 - DNA, 201 bp, Homo sapiens; identical to SEQ ID NO: 81357

SEQ ID NO: 376987 - DNA, 201 bp, Homo sapiens; identical to SEQ ID NO: 81358

SEQ ID NO: 376988 - DNA, 201 bp, Homo sapiens; identical to SEQ ID NO: 81359

SEQ ID NO: 376989 - DNA, 201 bp, Homo sapiens; identical to SEQ ID NO: 81360

SEQ ID NO: 376990 - DNA, 201 bp, Homo sapiens
taatcccagcactttgggaggctgaggcaggtagatcacgaggtcaaaagtttgaggccagcctgaccaacatggtgaaaccctgtctttactaaaaatasaaaaatcagctgggtgtgatggcatgcgcctgtaatcccagctactcaggaggctgaggcgggagaatcacttgaacccgagaggtggaggttgcagaga

SEQ ID NO: 376991 - DNA, 201 bp, Homo sapiens; identical to SEQ ID NO: 81361

SEQ ID NO: 376992 - DNA, 201 bp, Homo sapiens
aagcacattgggaggccaaggtgggcggatcacctgaggtccggagttcgagaccagcctgacaaacatggagaaaccttgtctctactaaaaataaaccycgtctctactaaaagtacaaaattagctgggcgtggtggcacatgcccataatgctacttgggaggctgaggcaggagaatcacttaaacccgggaggcg

SEQ ID NO: 376993 - DNA, 201 bp, Homo sapiens; identical to SEQ ID NO: 81362

SEQ ID NO: 376994 - DNA, 201 bp, Homo sapiens
gcagagtattcagtttgtgtaaggttaatttttttcccccggatttgttacgagtgagggctgcctgctatcagaacattcacattcattcaggcccccartctatctcagggttgcctaccagaaattatttaatcctataaccagtagattctatagtaggcacagggttagtagaaactactagaaaagagcatttgg

SEQ ID NO: 376995 - DNA, 201 bp, Homo sapiens; identical to SEQ ID NO: 81345

SEQ ID NO: 376996 - DNA, 201 bp, Homo sapiens
tggccaacatggcaaaaccccgtctctactaaaaatagaaaaaatttagctgcgcgtggtggcaggcgcctgtaatcccagctactcgggaggctgagacrggggaatcgcttgaacccaggaggcggcggttgcagtgagccaagattgtgccactgcactccaacctgggcggcagagcgagactccgcctcaaaaaaa

SEQ ID NO: 376997 - DNA, 201 bp, Homo sapiens
ctgtaatccctgtactttggggaggccaatgtgggaggatcacttgagtccaggagtttgagaccagcctaggcaacataatgagactctgtctctacccmaaaaaaaaatttttaatttttttcctccttttacatataaaaagggaactaagaattttgaactcacagaacacagttctgaacagtctcagaaaccttt

SEQ ID NO: 376998 - DNA, 201 bp, Homo sapiens
tacaggaaagtagctgttaaccatatctgcttaagaggtcagagtctgaagtaaacagctttgtgtatgtgataatcaggatttgcttgtgagcaacttgktcattttttttttaaggaaggcataatcaaggagcattttcttcataaatgttgagatctgttgactttaaaattttgagtttcacatgccttggtgtat

SEQ ID NO: 376999 - DNA, 201 bp, Homo sapiens
ctgtgctattattttgccaggcactgtgctgagtgcattatatcaattgtttgatgtaactgttaacctattttgttttatttatttatttgggacggagycttgctctgtcgcaggatcttggctcccgggttcaagcaattctcctgcctcagcctcttgagtagctgggattacaggcacatgccaccatgcctggct

SEQ ID NO: 377000 - DNA, 201 bp, Homo sapiens
atagttcaaagttgtgtctatcctagcttggctcgtgatttggtctaagtgtagctgtattattaattctttaatataaaagatgataattcttttaaagsggttcttttaaaagggaaacaaagtttttctgttgtgtttgctaatttaattttgtttgtttgtttcagattgacgtgagtgaattcagatataactcaa

SEQ ID NO: 377001 - DNA, 201 bp, Homo sapiens; identical to SEQ ID NO: 81355

SEQ ID NO: 377002 - DNA, 201 bp, Homo sapiens
ttgcgcagataagattgcagagccccaaccttttgtgtttatggtcagaagtgtgtgtgtttggggcgtggggcggggtgcggggggacaagaaatttccyttcagttacggggttccagtcattagtcaatgactctttcccgtatctctctcctttctcttcctcagcccccatttcccttcagaataaaacccagtca

SEQ ID NO: 377003 - DNA, 201 bp, Homo sapiens
gtatttatggagcccccgactcttggaggaaaggagggggatttctggtttagggggtccatttggggcctccttgggggagtccctattgtttgctactratggagcggttgctggctcatattgcgcagataagattgcagagccccaaccttttgtgtttatggtcagaagtgtgtgtgtttggggcgtggggcgggg

SEQ ID NO: 377004 - DNA, 201 bp, Homo sapiens
acagaagtgtatttaaattctccagtagacaatgctgggtaagggagggggtagggctgggttattaagatacaggctgctgtattttacattggttgtgkgggaaggggagcctggagaaaacaaagtcactattcccttttttgaaacaggaaaaaaaattattttttgttcagtaaaaatggtagagaattccaatgt

SEQ ID NO: 377005 - DNA, 201 bp, Homo sapiens; identical to SEQ ID NO: 81364

SEQ ID NO: 377006 - DNA, 201 bp, Homo sapiens
cccgtgtccactaaagatacagaaaattagccaggcatggtggcgggcgcctgtaatcccagctagtcaggaggctgaggcaggagaatctcttgaacctrggaggcagaggttgcagtgagccgaggtcatgccattgcactcgagcctgggcgataagagtgaaactctgcctcatatataaataacccactctgattt

SEQ ID NO: 377007 - DNA, 201 bp, Homo sapiens
ccccgtgtccactaaagatacagaaaattagccaggcatggtggcgggcgcctgtaatcccagctagtcaggaggctgaggcaggagaatctcttgaaccygggaggcagaggttgcagtgagccgaggtcatgccattgcactcgagcctgggcgataagagtgaaactctgcctcatatataaataacccactctgatt

SEQ ID NO: 377008 - DNA, 201 bp, Homo sapiens
gacctcaagtgatccgcccaccttggcctcccaaagtgctgggattactgatgtgagccaccacgcctggcctgttaacctattttaaaaatgagaatagmcggccatggtggctcacacctataatcctatcactttgggaggccgaggcaggtggatttcttgagcccaggagttatataagatatataaaatcttaca

SEQ ID NO: 377009 - DNA, 201 bp, Homo sapiens; identical to SEQ ID NO: 81346

SEQ ID NO: 377010 - DNA, 201 bp, Homo sapiens
tctgggccgggtgcggtggctcacacctgtaatcccagtactttgggaggccgaggtgggcggatcacgaggtcaagagatcgagaccatcctggccaacrtggtgaaaccctgtctctactaaaaatacaaaaattagccgggcatggtgacacgcacctgtagtcccagctactcgggaggctgaggcaggcgaatcac

SEQ ID NO: 377011 - DNA, 201 bp, Homo sapiens
atggcactgaacatcattatcaatcctgtgtggttttgccactgcttgacttgcacaattcacattgattttcatattttattcattaaaatttttaaacrcatgttttttaggtcgctttggtcatcttggcttagccatcaacttgatcacatatgatgatcgcttcaacctgaaaagtattgaggagcagctgggaac

SEQ ID NO: 377012 - DNA, 201 bp, Homo sapiens
gcgtctccgggtcgctagttccgcgccttcctgcatggaggcgcgccccgagaggctcggacgcggccccttaggcccggcatcagcctccccggccagcwggagaagtcaggtcagcttcctgtccccgagcagctgcccgggggccagttttcaaaacatatccttagtcatgtaataaagagatgttcctctggtctc

SEQ ID NO: 377013 - DNA, 201 bp, Homo sapiens
acggagtcttgctctgtcgcaggatcttggctcccgggttcaagcaattctcctgcctcagcctcttgagtagctgggattacaggcacatgccaccatgsctggctaatttttgtatttttggtagagagtgggtttcaccgtattggccaggctactctcgaactcctgacctcaggtgatccgcttgccttggcctcc

SEQ ID NO: 377014 - DNA, 201 bp, Homo sapiens; identical to SEQ ID NO: 81348

SEQ ID NO: 377015 - DNA, 201 bp, Homo sapiens; identical to SEQ ID NO: 81349

SEQ ID NO: 377016 - DNA, 201 bp, Homo sapiens; identical to SEQ ID NO: 81350

SEQ ID NO: 377017 - DNA, 201 bp, Homo sapiens; identical to SEQ ID NO: 81351

SEQ ID NO: 377018 - DNA, 201 bp, Homo sapiens; identical to SEQ ID NO: 81352

SEQ ID NO: 377019 - DNA, 201 bp, Homo sapiens
gggattgtgggcgcctgctaccgcttagcccggctaatttttgtatttttggtagagacagggatttcaccatgttggccaggctggtctcgaactcctgrcctcaggtgatcttcctgctttggtctcccaaagtgctgggattacaggcttgagtgcacccagcctcttttagacacattttttaaaacttgcttacaa

SEQ ID NO: 377020 - DNA, 201 bp, Homo sapiens; identical to SEQ ID NO: 81354

SEQ ID NO: 377021 - DNA, 201 bp, Homo sapiens
aagttgaaaatgaactcttgtcagctcctgatactgggttccatatctgaaactttagaagacttactctggcactcatacctcatctctgtctttttttkggggggggggagggggatggaatctttgtcacccaggctggagtgcagtggtgcgatcttggctctctgaaacctccacctcctgggttcaagtgattct

SEQ ID NO: 377022 - DNA, 201 bp, Homo sapiens
ggaaaattaagataaatgtttaaatgagtactttggaagctgtcaggcatgatacaaatgtaaaattttattcttcccttcctttccatgtttaattctctgtttaatacagtaaatagccacatgtggcaatttaaatcagttaaaattaaaataaaaagtcagtttctcaatcacagccacatttcaagtgctcagtta

SEQ ID NO: 377023 - DNA, 201 bp, Homo sapiens
gtggacttctgtgagattgtagttgtactttgtatctctaaatctaaagatagttttttaaaactcccaaagaaaatctgctctcctttctgatctaaaamctcatctttggggtaaagagttaagtgtccaaaggttgtcacagttcatgaggtcagagggagctagcctggcacctggactctgcccatccacagctga

SEQ ID NO: 377024 - DNA, 201 bp, Homo sapiens
aggaaaattaagataaatgtttaaatgagtactttggaagctgtcaggcatgatacaaatgtaaaattttattcttcccttcctttccatgtttaattctctgtttaatacagtaaatagccacatgtggcaatttaaatcagttaaaattaaaataaaaagtcagtttctcaatcacagccacatttcaagtgctcagtt

SEQ ID NO: 377025 - DNA, 201 bp, Homo sapiens
gggcatggtggcgtgtgcccataatcccagctacttgggaggccgaggcaggagaattgcttgaacccaggaggcggaggctgcagtgagctgagattgcrccattgcactccagctctgggcgacagagcaagactccgtcttgggaagaaaaaaaaaaagattaaaaaataattcatagtgtttcctaaaaggcaggtt

SEQ ID NO: 377026 - DNA, 201 bp, Homo sapiens
ccagctaatttttgtatttttagtagagatggggtttcaccatgttggtcaggctggtctcaaactcttgacctcgtgattctcccgcctcggcctcccaragtgctgggattacaggcgtgagccaccgcgcccggccagaacccgtacttttaaacactacaccatactacctctttaatgagaatcatcacattaaaa

SEQ ID NO: 377027 - DNA, 201 bp, Homo sapiens
gcaacattgataagagcctgtatgtggcagaataccacagcgagcctgtagaagatgagaaaccttaacaagcatgtacgtccctgacagaacagctaagmggaacctttaaatgagggaaatcaaaatcttctttcctgggggaaatttgatgtcacaccatatataatagcaataaagggtaaaatacccactagcata

SEQ ID NO: 377028 - DNA, 201 bp, Homo sapiens
attgagaattatcctaagacaagaaagtatgcctactgttgaaagcagcaggtgatttaggaagctgtaccccacccaatgtagaggtgaaacaaatattwtttaagcatcctgtggtgaaatggaagtctttatcctaaaacacatctttgtgcctttttgtgttatttccacctctataacacaatgtgtttcttctct

SEQ ID NO: 377029 - DNA, 201 bp, Homo sapiens
  misc_feature (1)...(201): n = A,T,C or G
actgtattctctctagacctggtgatgactggaaaaagactttaaaactccctccaaaggatctaagaatcaaaacttcggtaagttggttgtaaaatacnagtagaataatggtggggaactagaagtgaggtatagctgtccctcggtatctggagggaattggtttcaggaccataacaccactgccaccctcctcct

SEQ ID NO: 377030 - DNA, 201 bp, Homo sapiens
cagctctgggcgacagagcaagactccgtcttgggaagaaaaaaaaaaagattaaaaaataattcatagtgtttcctaaaaggcaggtttagttgttgacytaaagttgatactaaatgattaaccaagtcacagatacacttttgaatagtttctgaaatactttgaccttaactagggttaatcctcattattcacata

SEQ ID NO: 377031 - DNA, 201 bp, Homo sapiens
tggtgagtataaatctgtacttggaatcagtgccatcctgtgacctttgagtatgcttttatttgtaattacatcttcatatctgtgaatatactttatgmtaattatttcaagcctttggctctttcttcagttgatcaattaaagatttgttttacgtaaattaactgactttttaagaaggttgtaatagtaacttaa

SEQ ID NO: 377032 - DNA, 201 bp, Homo sapiens
cctcaatgccaaatttattctaagtctctttctgctctgtgattaatttttaaaagcatataatatatattgtctcttctcattttgtgcatactactttktactgtttggtttttaatctctgttacatgtattatctcaccatgttataaatgccttttaaaaacttattaaaatctgtagtcctgggatctagccatg

SEQ ID NO: 377033 - DNA, 201 bp, Homo sapiens
gcctaaagtgacacagctggctgagccaggattcacactcgaatctgctgaccccaaactttgaataacactctctccattgagttttaagatacctttcmaagttctccctcattcttatgtccaacattattgaaaagattaagcctttggagcccactacttctcagtgggattaactgcagagtaaactaaaaggtt

SEQ ID NO: 377034 - DNA, 201 bp, Homo sapiens
tgtgactgtttttcttgaatgcctgaaactttttggaattatgtgattttatttttcacagtaagacctatacccaccggcgcctgaagttcctctcctcsaagttccaggtccatcagatgcttaacgagatggacgagttaaaggagctgaaaaacaacccccaccgagatttttataactgcaggaaggtaaacattt

SEQ ID NO: 377035 - DNA, 201 bp, Homo sapiens
ggttggttaggagtatagattctggacccagagtggtgatacttgaatcctggcaatacttaaatcaaggtaacacaaccatttagctgtgttaccttggrttaagttatatcaccccattgtgccttagtttcatcatctctaaaacaaggttaaaaacaatacctaacttattgagttgttatgaggattacattagct

SEQ ID NO: 377036 - DNA, 201 bp, Homo sapiens
aatacatctctgctcttttttcctgattcagggacgccagaccttccagcgttttgataagttcaatgacaaatataatcctgtaggagcaagtgagctaygggacctctacttgaagacagacaattacattaatggggaatattttgccactatcatcaaggtgaggcggaaccaatcacatctatggtatctggcatg

SEQ ID NO: 377037 - DNA, 201 bp, Homo sapiens
acggaagactgttaatttgtccattccactaagtgaaacatcttccaccaaactgtcccacattgatgaatacatttcctcatctccaacctaccagaccrtgcctgattttcagagagtgcagattactggtgactatgcctctggggtgagttggtccttgccactcagacttagcaaccaggaagccattcagcttga

SEQ ID NO: 377038 - DNA, 201 bp, Homo sapiens
  misc_feature (1)...(201): n = A,T,C or G
cctcattcttatgtccaacattattgaaaagattaagcctttggagcccactacttctcagtgggattaactgcagagtaaactaaaaggtttgttccaanaattatttcctatgaatgataaaggtcctgatagttttgaaattgtgactgtttttcttgaatgcctgaaactttttggaattatgtgattttatttttc

SEQ ID NO: 377039 - DNA, 201 bp, Homo sapiens
  misc_feature (1)...(201): n = A,T,C or G
gcaggaaggtaaacattttagttgctcaggggtaattcctgggcaaaaacaattcaattatttattgagaagcacaagaaaagagtgtgtttctgattaanctaagatttctacaggttcagtggattttagtaaaaacagataatagattatgtccaatgggttagggttaagtgccatttctatcgttttccccataga

SEQ ID NO: 377040 - DNA, 201 bp, Homo sapiens
catcttggcttaccacgctgcctgaaagcaccacagacaattttgaagtttgctcattgtcacctgtcccaaattccattcttggagcccaatgccctccmccactaccagaccccagttctgcttgactatttcctagctctctctgtccagacagctctggtaataatacatctctgctcttttttcctgattcaggga

SEQ ID NO: 377041 - DNA, 201 bp, Homo sapiens
tcagaataaaattgtatagagaaacatctatctatcacaatgaaacgcctgatgaagacaaaattaactcttacttttaaatttcgaacccagaaaaaagygtttccaaggacggaagactgttaatttgtccattccactaagtgaaacatcttccaccaaactgtcccacattgatgaatacatttcctcatctccaac

SEQ ID NO: 377042 - DNA, 201 bp, Homo sapiens
tgtcttcctcaagcatgtaagcatgacccttcaggccttcatactgctgctcatgaaccagccttcctacctggtcatgactaattcttggtgcttatcthtttatgtttggtctgtgcctttggacctgaaagtttgtgtgaggactgggaccctgaagttggactgaacccattgcatggctcacttttcctaacagat

SEQ ID NO: 377043 - DNA, 201 bp, Homo sapiens
agtgtttagtgagacctaaacaacaacaactagtactacaagacctaaacaacaactagtactacttctactgatagtgagactaagtatttactaaatgmttactatgttcaaacactgtattaagcccttcatgcacattgttccttttattgcttacacttttcactgtgaggtggttattttcataattccagtttt

SEQ ID NO: 377044 - DNA, 201 bp, Homo sapiens
ctcctgagtagctgggactacatgcgtatgccaccatgcttggctaatttttgaaaaaaaaaaaaattttgtggaggtgaggttctcactatgttgcccaaggctccaaagtcttgaactcctggcctcaagcaatcctcccacctcagcctctcaaagtgctgggattacaggtgtgagtcaccatgccaggcccactcc

SEQ ID NO: 377045 - DNA, 201 bp, Homo sapiens
gtggtttcaccatgttggccaggctggtctcaaacttctgacctcaggtgatccgcccacctcagcctcccaaagttctgggattagaggcatgagaaatygcacccagcctatctacttatcttttgaaatataagtttcactctttcctttctataatcaccaccattccctgaaatttgttttgtttgtttgtttgta

SEQ ID NO: 377046 - DNA, 201 bp, Homo sapiens
ggtctcgaactcctgacctcaagtgatccacccacctcagcctcccaaagtgctatgattacaggcgtgagccaccgtgcccagccttaaaaacctatttkagataaaactataactttggttgtatattcccctcaatctcaaattagacttgtccttttgctgactgatagtaggtctgcctctgaattcctttgggag

SEQ ID NO: 377047 - DNA, 201 bp, Homo sapiens
cagaggaacttgtgggaatccctggcttggacttctctcttggctttgcaggaggtaggtgcggacctggtggaggccaagtaccagcatgctgagccccrcctgtccatctatggccgcagtcctgatgagtggagcaaactctcctcctggttcgtctgcaatcgcatccactgccccaacatgacatggatgatccag

SEQ ID NO: 377048 - DNA, 201 bp, Homo sapiens
ctggactgttgtttcccgtccagaatttgaaagtcaaataaaggtatttcattattttttcaggcaggatgcatattatttattaattcactcctcttttwtcctcatttaatataactgcaggagcccctaatggaagaatatgctattgctgcacaagtcttcaagctgagcacctgtgatatgtgcgaagtggcaagg

SEQ ID NO: 377049 - DNA, 201 bp, Homo sapiens
aaaagaaaacctcatgcagtgcttttacttacttatttatttatttatttatttatttatttatttatttatttattttgagatggatggtcacccaggakggagtgcagaggtgtgagctctgctcatcgcaacctttgcctcccggattcaactaattatcttgcctcagcctcccgagtagctgagatgacaggtgca

SEQ ID NO: 377050 - DNA, 201 bp, Homo sapiens
tacagtacttgtttttcttagcccaaattcccatcgccatgtcaccactaagtaacaatagcctatttctagagtatgccaaaaatccttttttggatttycttcagaaagggctaatgatctcactgtctacagatgacccaatgcaattccactttaccaaggtatagtatggacttgggcaatacaagcatattttgc

SEQ ID NO: 377051 - DNA, 201 bp, Homo sapiens
gacctgactgttgattctctggatgttcatgctgtaggttgaaacggcaatgtcagtttcactctaatactcagaaccccacatgtctttctcctacaagycctcccttctcagaggtctcttaaccatcttggcttaccacgctgcctgaaagcaccacagacaattttgaagtttgctcattgtcacctgtcccaaatt

SEQ ID NO: 377052 - DNA, 201 bp, Homo sapiens
atgcttggatcctgtttctgatacccaaccacattttaatttttactttttgtcctcagaataaaattgtatagagaaacatctatctatcacaatgaaaygcctgatgaagacaaaattaactcttacttttaaatttcgaacccagaaaaaagcgtttccaaggacggaagactgttaatttgtccattccactaagtg

SEQ ID NO: 377053 - DNA, 201 bp, Homo sapiens
tacaaattgctacattaaacactgtattctcagacttcaaagggcattaactaccattatgtatatctccatcttacccatgagagggcagtagaatacawacatgtgaattcatttattaatctataaatttggtttcatacgtgatacttggaattcaacctgccttattttgccaaataatcttcctgaatgcagggg

SEQ ID NO: 377054 - DNA, 201 bp, Homo sapiens
tagctgtgttaccttgggttaagttatatcaccccattgtgccttagtttcatcatctctaaaacaaggttaaaaacaatacctaacttattgagttgttwtgaggattacattagctaatatttctggtcacttagaagagtgcttggaatatattaaatgctatatcagagtttgttaaattgcagatcagaggtattc

SEQ ID NO: 377055 - DNA, 201 bp, Homo sapiens
agctaatgagatgttgtagtatttcacattttggttatttttatgtggtcgttcatcctatgtgctaatatattactctgtgtttgattgaaaaagtcttyactcctcctgtgaagaagggagaggaccccttccgaacagacaaccttcctgaaaacctgggctatcacctcaaaatgaaggacggtgtagtttacgtct

SEQ ID NO: 377056 - DNA, 201 bp, Homo sapiens
cctgtggggaatgtttctgtcttctactgttgctccaaatagctagctatttgccattgtcattattgctaccagctcttttctggaaataccaggaaaartattagaggtaataattattcagacagaaaacactgaggatctggagaacacagtggaacttaacagaaaggcagatacttgatggccatcaccatccta

SEQ ID NO: 377057 - DNA, 201 bp, Homo sapiens
ataatgcaaaaataaaggttagcttaattccagataattacaacttaagtaccggattccaagctaatgagatgttgtagtatttcacattttggttattwttatgtggtcgttcatcctatgtgctaatatattactctgtgtttgattgaaaaagtctttactcctcctgtgaagaagggagaggaccccttccgaaca

SEQ ID NO: 377058 - DNA, 201 bp, Homo sapiens
ttatctaacttgggtgtttatatgttttctggctacctgtctttgtgttctgtgtgacctactgcaatgcaagagtttcatcctgtctctttaaccaaaamaagtaattttttgactgggataatacttcctaataggcagagaggcagtaggttggttaggagtatagattctggacccagagtggtgatacttgaatcc

SEQ ID NO: 377059 - DNA, 201 bp, Homo sapiens
ctagtttgtattcctttttcaacatctttaaatatttttttacttttctttttcagagtcccgtgctacagtacttgtttttcttagcccaaattcccatygccatgtcaccactaagtaacaatagcctatttctagagtatgccaaaaatccttttttggatttccttcagaaagggctaatgatctcactgtctacag

SEQ ID NO: 377060 - DNA, 201 bp, Homo sapiens
ggttctgataatgaacattcagtgatttcaagttataactacttgggcatgcctggcccaaccaggagttgggaatgggggcaggggaaatttccagcagstctaataaagctttcctctagaatctctcaagttttacccagaaataaaattctctttaaaatcatctaaacgactaacttctcacagaatgatgttgtg

SEQ ID NO: 377061 - DNA, 201 bp, Homo sapiens
ccatgtcaccactaagtaacaatagcctatttctagagtatgccaaaaatccttttttggatttccttcagaaagggctaatgatctcactgtctacagaygacccaatgcaattccactttaccaaggtatagtatggacttgggcaatacaagcatattttgctggactgttgtttcccgtccagaatttgaaagtcaa

SEQ ID NO: 377062 - DNA, 201 bp, Homo sapiens
aaagctttcctctagaatctctcaagttttacccagaaataaaattctctttaaaatcatctaaacgactaacttctcacagaatgatgttgtgatccatygtagctgaagaaagccgtgcatgggtttgagagatttgtgaccccttattcatcccaaaatatttccctcactgaccgagtggtttgaattctcacaatt

SEQ ID NO: 377063 - DNA, 201 bp, Homo sapiens
gatgcaatgcgcaactttgctgaaaaagtgtttgcctctgaagtcaaagatgaaggaggtcgtcaggagatttccccctttgatgtggatgagatctgtcygatttctcatcatgagatgcaagcacacatattccatctggagactctgtccacctccacagaagccaggaggtaagtggtgtaaggggagtgcttagta

SEQ ID NO: 377064 - DNA, 201 bp, Homo sapiens
gacccaagcagacctaggatagtgagaagggttgcagatagcataaaccaaccaaagaaaacagatccagagaaagagagagggaagagaaaaaagaaggmaccagagaaaagaaggaagatgagagagaggttagaaaatcctaacgaggctattgtttttttgacgacctgaactctccaatttcattacagatggtta

SEQ ID NO: 377065 - DNA, 201 bp, Homo sapiens
attccttttaatattaaaatcatattaaacatgtctccagtttggtaacacataacagtggttttcccatcctctataatatagacatttagtttgtcttrtctttatttctcctaagttacgcttcaataataattatatcattaatagtgagttattaatccttaagtataaggatttcaaaattaatatttgatagta

SEQ ID NO: 377066 - DNA, 201 bp, Homo sapiens
cagaataaaattgtatagagaaacatctatctatcacaatgaaacgcctgatgaagacaaaattaactcttacttttaaatttcgaacccagaaaaaagcrtttccaaggacggaagactgttaatttgtccattccactaagtgaaacatcttccaccaaactgtcccacattgatgaatacatttcctcatctccaacc

SEQ ID NO: 377067 - DNA, 201 bp, Homo sapiens
taacactctctccattgagttttaagatacctttccaagttctccctcattcttatgtccaacattattgaaaagattaagcctttggagcccactacttytcagtgggattaactgcagagtaaactaaaaggtttgttccaataattatttcctatgaatgataaaggtcctgatagttttgaaattgtgactgttttt

SEQ ID NO: 377068 - DNA, 201 bp, Homo sapiens
atggcttttctggattctagtgtgtgtataaacatatatatatatataattatatataattttttaaaagaaaacctcatgcagtgcttttacttacttayttatttatttatttatttatttatttatttatttatttattttgagatggatggtcacccaggatggagtgcagaggtgtgagctctgctcatcgcaacc

SEQ ID NO: 377069 - DNA, 201 bp, Homo sapiens
gcttaacgagatggacgagttaaaggagctgaaaaacaacccccaccgagatttttataactgcaggaaggtaaacattttagttgctcaggggtaattcstgggcaaaaacaattcaattatttattgagaagcacaagaaaagagtgtgtttctgattaatctaagatttctacaggttcagtggattttagtaaaaac

SEQ ID NO: 377070 - DNA, 201 bp, Homo sapiens
gtttcaccatattggtcaggctggtctcaaactcctgacctcaggtgatctgcctgccttggcctcccaaagtgctgggattacaggcacgagccactgcrcctggccaatatattatttttatagctattttatactattatgtcacctttaaaaaataatgcaaaaataaaggttagcttaattccagataattacaac

SEQ ID NO: 377071 - DNA, 201 bp, Homo sapiens
catggcttttctggattctagtgtgtgtataaacatatatatatatataattatatataattttttaaaagaaaacctcatgcagtgcttttacttacttatttatttatttatttatttatttatttatttatttatttattttgagatggatggtcacccaggatggagtgcagaggtgtgagctctgctcatcgcaac

SEQ ID NO: 377072 - DNA, 201 bp, Homo sapiens
acggagcggacccgagtgatacccgggagactagcttggccacaggagacaacgttgaggtacagacaggtaagagtcggggtgattcggcgcggggtttyaagccgcaggggcttcggactctcggggctgtcggcatcacccttctgggcgtcgggtgcggggctgtggcgccgcggcgtagtcctcggacggtgcgag

SEQ ID NO: 377073 - DNA, 201 bp, Homo sapiens
tttcacagtaagacctatacccaccggcgcctgaagttcctctcctccaagttccaggtccatcagatgcttaacgagatggacgagttaaaggagctgawaaacaacccccaccgagatttttataactgcaggaaggtaaacattttagttgctcaggggtaattcctgggcaaaaacaattcaattatttattgagaa

SEQ ID NO: 377074 - DNA, 201 bp, Homo sapiens
tcatggcttttctggattctagtgtgtgtataaacatatatatatatataattatatataattttttaaaagaaaacctcatgcagtgcttttacttacttatttatttatttatttatttatttatttatttatttatttattttgagatggatggtcacccaggatggagtgcagaggtgtgagctctgctcatcgcaa

SEQ ID NO: 377075 - DNA, 201 bp, Homo sapiens
ttgctgtaacaaaccaggttttaaaaactggctgacctgactgttattgttggggaagttatgaatcaattcctgtcatctccaatgtacatttcatcatrtactaagtcatatcatgtattatctcattcatagtccaaagctaaccccacacaccaaatgtctgtttgaccaatgctacacattacatcattcaattta

SEQ ID NO: 377076 - DNA, 201 bp, Homo sapiens
ctcatggcttttctggattctagtgtgtgtataaacatatatatatatataattatatataattttttaaaagaaaacctcatgcagtgcttttacttacttatttatttatttatttatttatttatttatttatttatttattttgagatggatggtcacccaggatggagtgcagaggtgtgagctctgctcatcgca

SEQ ID NO: 377077 - DNA, 201 bp, Homo sapiens
ttaatcagtcttattgagcatctattctgtgctaggcattgtgtgctgagaacatgaaggtgaataagacccagctctcattcttgaggacctgatagackagtggcctattaggtggcaatgagctacgcatgccattggaagcagggaagcagacccccagacctagcatctgtgccagacgcttttggccaaggacag

SEQ ID NO: 377078 - DNA, 201 bp, Homo sapiens
tttttttttggcaggttacagttgaagattttgaaattgtttgcaaaggtctgtatcgggcactatgcatacgtgagaaatacatgcagaagtcgtttcakaggttccctaaaaccccttccaaatacttgcggaacattgatggtgaggcttgggtagcaaatgagagcttctatccaggtaacaattctcttacataat

SEQ ID NO: 377079 - DNA, 201 bp, Homo sapiens
gctcatggcttttctggattctagtgtgtgtataaacatatatatatatataattatatataattttttaaaagaaaacctcatgcagtgcttttacttacttatttatttatttatttatttatttatttatttatttatttattttgagatggatggtcacccaggatggagtgcagaggtgtgagctctgctcatcgc

SEQ ID NO: 377080 - DNA, 201 bp, Homo sapiens
actgcaggaaggtaaacattttagttgctcaggggtaattcctgggcaaaaacaattcaattatttattgagaagcacaagaaaagagtgtgtttctgatkaatctaagatttctacaggttcagtggattttagtaaaaacagataatagattatgtccaatgggttagggttaagtgccatttctatcgttttccccat

SEQ ID NO: 377081 - DNA, 201 bp, Homo sapiens
cccgctcacctggacaagtcaaccctcgcgtgcattggtctcatccagcccctaggttccattttcccaactgctgaacttcaagctcgttgggtgacaasagttttcaaaggtaagtgtgtaggcaggtgagtggctaagcgtttcagatctggtgaagtttatcaataatgataagaaggttgcctgagataaaaaggt

SEQ ID NO: 377082 - DNA, 201 bp, Homo sapiens
atctaacttgtgaataacagattatgtataccagaaggttttgtaactttgtgcacttaactatcaatctacttaacaaatatattgcctttttatgatawataacttctattccattcttttaaagatcatgttagagtcgcaaggaagtcatttctcttggttattgtgttactgctacttttgtttcttggagagtga

SEQ ID NO: 377083 - DNA, 201 bp, Homo sapiens
gtttcagctggaagaatgctggaggaatacggaactcctcccatttctcacagccacctccaactcttaaaaacgcttccaactgcctcccagcacacaamcaagggagaaaactattctgtcaaagagacggtgccaaaaggcaaaaacaaaggtaaggatgatcgctggggaaagaagctgaaaaggaaaagctcagaa

SEQ ID NO: 377084 - DNA, 201 bp, Homo sapiens
caggattatactcattcatctgcactaatctcttcaatatttattagagtaacaacataaatctataactatgataaaacctcttacacagagtaatatastctcaagccttctgtgaaaagactaaccagagactttacaggagctatacatgctaggaacggaactaggcgcatctgcaaaacttgaaattacaacctg

SEQ ID NO: 377085 - DNA, 201 bp, Homo sapiens
gtatggagaggttcaaaggccaatatttccatagccgccaatacaagcatccagatggatttgagggaaaacgcatcctggtgattggaatgggaaactcrggctcagatattgctgttgagctgagtaagaatgctgctcaggtgtgatgctctctgcttaccatgtacctggaggggaggaagtggggatgccatactg

SEQ ID NO: 377086 - DNA, 201 bp, Homo sapiens
tcaaatcttagatggcaagaaccagttccttgtatgggtcttgccctacaggaagacttatggtgtgagattcaatattaagaaactaccttggctctatwtgcatgccttacagcttcttaaacaatcttttgcacagagtgcaaaagactttgtttccatctccctctatcagtgtaaatgccactagatgcccccttt

SEQ ID NO: 377087 - DNA, 201 bp, Homo sapiens
atcgcggctccaatcctcattaactagttggttggtagcgcattgtggcatcatagaaaatctggaagtcaagaaaccactttacctcctagctctgtcamtaaccagccatgaatcctagagtgattcatttcacttctctgggagatggctccctcatttttaaaatgggaacttttgaccagatgattttccatataa

SEQ ID NO: 377088 - DNA, 201 bp, Homo sapiens
tcctgagtagctgggactacaggcacatgccacaccacactcagctaattttcatatatttgtagagatgagggtcttgccatgttgcccagggtagtctmaaactcctgaactcaagcaatctgcccgcctcagcctcccaaagtgctgggattacaggcatgcacaaccacacccagccaagaggccttgtttctacct

SEQ ID NO: 377089 - DNA, 201 bp, Homo sapiens
gatatttaggtgcttcctgaggccttctaaccactgtcttctttgcacctgctcaggaatgacaccagctgagctgccaaagagtcaaacattcattacaygatgatgctgctgatagtggtggtcaggaatagcaaaaactaaactccttctgcaaggacagacccaggcaaagaagggaaaatcactaaacatcctttc

SEQ ID NO: 377090 - DNA, 201 bp, Homo sapiens
cctgaggccttctaaccactgtcttctttgcacctgctcaggaatgacaccagctgagctgccaaagagtcaaacattcattacacgatgatgctgctgayagtggtggtcaggaatagcaaaaactaaactccttctgcaaggacagacccaggcaaagaagggaaaatcactaaacatcctttcccaaagtattccctc

SEQ ID NO: 377091 - DNA, 201 bp, Homo sapiens
gcatggcacctgggtcatgagccgtatctctgaagatggctatccttgggactcagtgttccacacccggtttcgttctatgctccgcaatgtactgccaygaacagctgtaaaatggatgatagaacaacagatgaatcggtggttcaaccatgaaaattatggccttgagcctcaaaacaagtagagttattttgcttt

SEQ ID NO: 377092 - DNA, 201 bp, Homo sapiens
agctgagctgccaaagagtcaaacattcattacacgatgatgctgctgatagtggtggtcaggaatagcaaaaactaaactccttctgcaaggacagaccyaggcaaagaagggaaaatcactaaacatcctttcccaaagtattccctctcaagaaggcctgaaccagatgcccaatcactcttaccctagctctttcag

SEQ ID NO: 377093 - DNA, 201 bp, Homo sapiens
gaagatggccgagcaagtatctatcaatctgtcgttaccaacaccagcaaagaaatgtcctgtttcagtgactttccaatgcctgaagattttccaaactycctgcataattctaaacttctggaatatttcaggatttttgctaaaaaatttgatctgctaaaatatattcagttccaggtattgtatttttggggaaat

SEQ ID NO: 377094 - DNA, 201 bp, Homo sapiens
tcattacctaaacattgtcgtcacactgcagcaaccaaagacaatcgcattacccaggggttagatgtaggaagagtaaaaaacaaaaaatttttgaatgygtaattatcactaattattttatttgatccttcaggagaatgtggaagatggccgagcaagtatctatcaatctgtcgttaccaacaccagcaaagaaat

SEQ ID NO: 377095 - DNA, 201 bp, Homo sapiens
acctcagtgtgaagaacaagtgaggaggcaggaactgtgacagcctggagaagagcagagctggaaaatgagagtaccagctctaggctctttcatgctasgaatacccgcaaagccttaggaacagtgtgtaatggggcagtatgtgaggagctaatatagcagtcagccaagtgaagatccatcctagactacttcacg

SEQ ID NO: 377096 - DNA, 201 bp, Homo sapiens
ctgggattacttaacatatttggtggtgacaagttaacaataaataagtaaatttaagaatccttgtcctatacccaacccagacaatagagttcttccagactctccagcaccccctagtggcacatatggaccatgggacgggtaggtaattagcatatatttttcgttctgtttccagcaacgggaagcacttggcaa

SEQ ID NO: 377097 - DNA, 201 bp, Homo sapiens
aatccaaaagcaccactcaagatcatatgggatggtgctgcatcattgtattagtccattctcaacgctgctatgtagacatacccgagactgggtaattyataaagaaaagaggtttaattgacttacagtttggcatggctggggaagcctcaggaaactaacaatcatgacggaatgcacctctttacgaggctgcag

SEQ ID NO: 377098 - DNA, 201 bp, Homo sapiens
aaagaatgagagcgactggggaaccccttataaaaccatcagatctcgtgagaacttactccctattaggagaacagcatggcagaaacctcccccatgaytgaattatctccacctggtcctgcccttgacacgtggggattattataatttaaggtgagatgtgggtagggacacacagccaaaccatattagtcattt

SEQ ID NO: 377099 - DNA, 201 bp, Homo sapiens
ctaagcgattcttatacatactaggttaagaaccaaatacttaaagataagaattgtaccaaatcagagcacttctccttggcttaatttcatttcagttktatatgatgcctatgtcagattccataacttctcaagccacctacactctgtggttagagagggaataggatgagacagtggtggtgatagtagcttgaa

SEQ ID NO: 377100 - DNA, 201 bp, Homo sapiens
aagaaggtagctgtgattggagctggggtcagtggcctaatttctctgaagtgctgtgtggatgagggacttgagcccacttgctttgagagaactgaagrtattggaggagtgtggaggttcaaagtaagtgagattttcttgggtcttgaacaggttgtgttgttatttcagggtgaatcacagttactgatgggtcat

SEQ ID NO: 377101 - DNA, 201 bp, Homo sapiens
ctcttccctgggaaactttgccttttcactactctaccatccagaagcaattttttaaatgggttatttattaatttttgtatttacacaactcctactgrgattacttaacatatttggtggtgacaagttaacaataaataagtaaatttaagaatccttgtcctatacccaacccagacaatagagttcttccagact

SEQ ID NO: 377102 - DNA, 201 bp, Homo sapiens
aacggaactaggcgcatctgcaaaacttgaaattacaacctgaactcaccaaaattctgagtgtgcactgctctgttaaaagaaattcaccttcataaggwtacagcaccctctaccacaatccaaaagcaccactcaagatcatatgggatggtgctgcatcattgtattagtccattctcaacgctgctatgtagacat

SEQ ID NO: 377103 - DNA, 201 bp, Homo sapiens
cattttcccaactgctgaacttcaagctcgttgggtgacaagagttttcaaaggtaagtgtgtaggcaggtgagtggctaagcgtttcagatctggtgaartttatcaataatgataagaaggttgcctgagataaaaaggttgccaagaaaaagtttgacaaccttggctgctctcacaagactaacattctaaaaagtt

SEQ ID NO: 377104 - DNA, 201 bp, Homo sapiens
accaattcctggtagatctaacttgtgaataacagattatgtataccagaaggttttgtaactttgtgcacttaactatcaatctacttaacaaatatatygcctttttatgatatataacttctattccattcttttaaagatcatgttagagtcgcaaggaagtcatttctcttggttattgtgttactgctacttttg

SEQ ID NO: 377105 - DNA, 201 bp, Homo sapiens
tcaccaattcctggtagatctaacttgtgaataacagattatgtataccagaaggttttgtaactttgtgcacttaactatcaatctacttaacaaatatmttgcctttttatgatatataacttctattccattcttttaaagatcatgttagagtcgcaaggaagtcatttctcttggttattgtgttactgctacttt

SEQ ID NO: 377106 - DNA, 201 bp, Homo sapiens
tctttttaatatttttctgagacagggtcctactctgtcacccaggctaccatgcccagccatggagagtttcttaaagatactgattcctttggttaaasctgccaccaaaaaaaaaaaaaaaaaaaaaaaaaaatactgatttgtgggcactccatcccaaatctatggaatcaaaatcttctgggggtttttaataaa

SEQ ID NO: 377107 - DNA, 201 bp, Homo sapiens
cccaacccaggtagctgacccaggcatgtaaaagatctcttcttttggattcagcaattgtcttacagcccatacttctgtcattctttaatacgctaatrttagagaacattttacaaaaatagaagtaacagggattcttctcaagatatcacttctgtttcaattattaaaccaaatgcttctttagagaccatgctc

SEQ ID NO: 377108 - DNA, 201 bp, Homo sapiens
tgtaaactattgtctccactcaacgaagtcaaagagtccaaagagtctccctgcagagtgaaacataaaataagcaaaatttcataggctgcctgcactasggctatgtgagggttttggttaccaggtgactgggagtttccaagaaggatgctgggagccccatgctcttccctgggaaactttgccttttcactactc

SEQ ID NO: 377109 - DNA, 201 bp, Homo sapiens
ttaaactatctgtatgtttaagagtatatgttgctactatgtaagagtatatgctgttactgtaaagacattgcattactactgttgacctcagagcacgmgcctcttgcctaattctaggactcctaactaagtctttggagtttcagctggaagaatgctggaggaatacggaactcctcccatttctcacagccacct

SEQ ID NO: 377110 - DNA, 201 bp, Homo sapiens
aaaatgcaaatttctgggctatagcccagatgattgaatcagaaactccgtgtgtgaggctaaaaagttgcatttttatcttcttcctaagcgattcttayacatactaggttaagaaccaaatacttaaagataagaattgtaccaaatcagagcacttctccttggcttaatttcatttcagttgtatatgatgcctat

SEQ ID NO: 377111 - DNA, 201 bp, Homo sapiens
atattgctgttgagctgagtaagaatgctgctcaggtgtgatgctctctgcttaccatgtacctggaggggaggaagtggggatgccatactggagaaccycagccatataatcgcggctccaatcctcattaactagttggttggtagcgcattgtggcatcatagaaaatctggaagtcaagaaaccactttacctcct

SEQ ID NO: 377112 - DNA, 201 bp, Homo sapiens
ggtcttgaacaggttgtgttgttatttcagggtgaatcacagttactgatgggtcatattgagaaatttattaaacaactctgatcagattttatttctayttattgatgtggccataatggaactgaagtcataggctggcatctctcccccagtcaatactaacccaacccaggtagctgacccaggcatgtaaaagat

SEQ ID NO: 377113 - DNA, 201 bp, Homo sapiens
agcccacttgctttgagagaactgaagatattggaggagtgtggaggttcaaagtaagtgagattttcttgggtcttgaacaggttgtgttgttatttcarggtgaatcacagttactgatgggtcatattgagaaatttattaaacaactctgatcagattttatttctatttattgatgtggccataatggaactgaag

SEQ ID NO: 377114 - DNA, 201 bp, Homo sapiens
gcacttctccttggcttaatttcatttcagttgtatatgatgcctatgtcagattccataacttctcaagccacctacactctgtggttagagagggaatrggatgagacagtggtggtgatagtagcttgaatagctgtgaaaagttagagaatccccatcagaataaattaggaaggggttggtgtgaaggttcaagga

SEQ ID NO: 377115 - DNA, 201 bp, Homo sapiens
aatctaacaatatgagtatcttataggtcctggagtttagcttctaaatttgttctgtatgcctttaaaaaatacttaagaagatgaagcagaagtgttayaagctgctccagaaagcaaaactaggggagaactttctaatacccagagttatctaacattggagaaaactgtttcaagagattacgacctgcctttcag

SEQ ID NO: 377116 - DNA, 201 bp, Homo sapiens
tccattctcatgctgctatgaagaaatactgagactgggtgatttataaaggaaagaggtttaattgactcccagttccacaatgctggggaggactcagraaatttacaatcatggcagtgggaaagagaggtgctgagcaaagggggaaaagccccttataaaaccatcagatctcattagaacgcactcactatcatg

SEQ ID NO: 377117 - DNA, 201 bp, Homo sapiens; identical to SEQ ID NO: 81405

SEQ ID NO: 377118 - DNA, 201 bp, Homo sapiens; identical to SEQ ID NO: 81407

SEQ ID NO: 377119 - DNA, 201 bp, Homo sapiens; identical to SEQ ID NO: 81409

SEQ ID NO: 377120 - DNA, 201 bp, Homo sapiens
atattggaggagtgtggaggttcaaagtaagtgagattttcttgggtcttgaacaggttgtgttgttatttcagggtgaatcacagttactgatgggtcayattgagaaatttattaaacaactctgatcagattttatttctatttattgatgtggccataatggaactgaagtcataggctggcatctctcccccagtc

SEQ ID NO: 377121 - DNA, 201 bp, Homo sapiens
tggaaagttgatttggggcttacatcaggtgtaaagagttttctcatgttcaaattcaaatttacctaagattgattgagtatctactatacgccatccakactgccaggtactttagtaatttaacaagcaaatattaagcatctcctttgagcaagacaccaagctatgctttcatatgcattatctcatgaattcctg

SEQ ID NO: 377122 - DNA, 201 bp, Homo sapiens
tattgatagaggaaaacatgatcttctttcagccgctaaccttctctgtttcctttattgttcctaataccttgtattcacgtgggagttaccatgtacattttttttcctgtgggttttcttttaatatttggatttggatctcctccttttccagatgtatatgtttagttattttaattttcatgtaatactctctag

SEQ ID NO: 377123 - DNA, 201 bp, Homo sapiens
ttttcccttatttattgacaagagatatttgtgacatgagaattaagtcagaaaataaggatttgcacagacaaccagttaagttagagttttacagatawttgaaaagcccttttattttcagagccgtaccccaaaaatatcaagagggttcaagattcctcagcaaatgatccttcagaatgtttttcttctgtatgt

SEQ ID NO: 377124 - DNA, 201 bp, Homo sapiens; identical to SEQ ID NO: 81399

SEQ ID NO: 377125 - DNA, 201 bp, Homo sapiens
tttgtgatgaggtaaaatgaggttcaacagtgatcgagtacccttggaaagttgatttggggcttacatcaggtgtaaagagttttctcatgttcaaattyaaatttacctaagattgattgagtatctactatacgccatccagactgccaggtactttagtaatttaacaagcaaatattaagcatctcctttgagcaa

SEQ ID NO: 377126 - DNA, 201 bp, Homo sapiens
ttatctttatttacatattaagaagaaacagttttcagataaagaatttgctcaggggaacataggtggcgggagaaaaaaaacgagggtttacaatttcrgagctgtcacacttaataaccttgctgaagtattgatagaggaaaacatgatcttctttcagccgctaaccttctctgtttcctttattgttcctaatac

SEQ ID NO: 377127 - DNA, 201 bp, Homo sapiens
ttatttacatattaagaagaaacagttttcagataaagaatttgctcaggggaacataggtggcgggagaaaaaaaacgagggtttacaatttcggagctstcacacttaataaccttgctgaagtattgatagaggaaaacatgatcttctttcagccgctaaccttctctgtttcctttattgttcctaataccttgta

SEQ ID NO: 377128 - DNA, 201 bp, Homo sapiens
aggtggcgggagaaaaaaaacgagggtttacaatttcggagctgtcacacttaataaccttgctgaagtattgatagaggaaaacatgatcttctttcagycgctaaccttctctgtttcctttattgttcctaataccttgtattcacgtgggagttaccatgtacattttttttcctgtgggttttcttttaatatttg

SEQ ID NO: 377129 - DNA, 201 bp, Homo sapiens
tcactcagagcaacggcaaggagcagagtgctgtctttgacgcagttatggtttgcagtggccaccacattctacctcatatcccactgaagtcatttccmggtgagacccgctgggattcccagctttttggagtaggtttccaggtactttatatgtagtttggattgacaagcaggattcattgctgcaactgggcag

SEQ ID NO: 377130 - DNA, 201 bp, Homo sapiens
gatagaggaaaacatgatcttctttcagccgctaaccttctctgtttcctttattgttcctaataccttgtattcacgtgggagttaccatgtacattttytttcctgtgggttttcttttaatatttggatttggatctcctccttttccagatgtatatgtttagttattttaattttcatgtaatactctctagacat

SEQ ID NO: 377131 - DNA, 201 bp, Homo sapiens
atatgtttagttattttaattttcatgtaatactctctagacatatctcaatcttggttttcttcctctaagttcaatctgaaatatcactttctctcttaaatttggctcccccaagatccaacattccaaacatattgccaatgagtgtataccttttagcttgaaagcagcagaaaaaaagtggtaaatacctgagcc

SEQ ID NO: 377132 - DNA, 201 bp, Homo sapiens
caatactctaatagagatgtggttcacaaagttcattgtgcagaagcagctagggagagcttctaaaatacagaaatctgagcccgtcttttttcttttctttttttttttttttttttgagatggagtctcgctctgttgcccaggctggagggcagtagcgcaatctcagctcactgcaacctccatcccccgggttca

SEQ ID NO: 377133 - DNA, 201 bp, Homo sapiens
tgactccagaaccctcctatttactctatactactcataaaattatttggtcttggggctgggcgcagtggctcatacctgtaatcccagcactttagggkgttgaggtgggtggattgcttgagctcaggagttttagacctgcctgggcaacatggtaagacctcatctctacaaaaaaaaaaaaaaaaaaaatacaaa

SEQ ID NO: 377134 - DNA, 201 bp, Homo sapiens
aatactctaatagagatgtggttcacaaagttcattgtgcagaagcagctagggagagcttctaaaatacagaaatctgagcccgtcttttttcttttctttttttttttttttttttgagatggagtctcgctctgttgcccaggctggagggcagtagcgcaatctcagctcactgcaacctccatcccccgggttcaa

SEQ ID NO: 377135 - DNA, 201 bp, Homo sapiens
atgcctaatattctagaaaacttagaacattctgtgaacattccctttttactttcttcactaaggtttggagaaagccagagccagacgttgcagaccamttatgttgactacttggacgagctcgccttagagataggtgcgaagccagatttctgctctctcttgttcaaagatcctaaactggctgtgagactctat

SEQ ID NO: 377136 - DNA, 201 bp, Homo sapiens
agacctcatctctacaaaaaaaaaaaaaaaaaaaatacaaaaaattagccggtgtagtggcacgcgcctgtagtcccagctacttggaaggttgaggtgggaagatcacctgagcccaggaggttgatgctgccgtgagccataatcatgtcactgcattccagcttgggccacagagtgagaccctgtctcaaaaataat

SEQ ID NO: 377137 - DNA, 201 bp, Homo sapiens; identical to SEQ ID NO: 81412

SEQ ID NO: 377138 - DNA, 201 bp, Homo sapiens
gacctcatctctacaaaaaaaaaaaaaaaaaaaatacaaaaaattagccggtgtagtggcacgcgcctgtagtcccagctacttggaaggttgaggtgggaagatcacctgagcccaggaggttgatgctgccgtgagccataatcatgtcactgcattccagcttgggccacagagtgagaccctgtctcaaaaataata

SEQ ID NO: 377139 - DNA, 201 bp, Homo sapiens
atgcattatctcatgaattcctgcagccgccctggctagcatgtacttgcctggagatttgccaccgcttaaaaaatgccaaacaatggttaccaatcttrtcacatttctagagcatccatgaattcatggctctttatttgagggcgtattctcaatctgagatatgagcctcctggtatgataaactcaaactttcca

SEQ ID NO: 377140 - DNA, 201 bp, Homo sapiens
acctcatctctacaaaaaaaaaaaaaaaaaaaatacaaaaaattagccggtgtagtggcacgcgcctgtagtcccagctacttggaaggttgaggtgggaagatcacctgagcccaggaggttgatgctgccgtgagccataatcatgtcactgcattccagcttgggccacagagtgagaccctgtctcaaaaataataa

SEQ ID NO: 377141 - DNA, 201 bp, Homo sapiens
tgctaaaatatgatgcatcctgggccagggcagagatacaaagtggaaaggaagccataaatgtgagaaatcattaagggaaaaatcagcatgacattatrattggttcaatgtgggaaagtcagagaaatagagaggaatctaggaggacttacagatctctggcattggaaaccaggtggacagtagtgctgtgaatac

SEQ ID NO: 377142 - DNA, 201 bp, Homo sapiens
aacctgcctaggcctcccaaagggctgggattacaggccccacctggtctggtacctaaactttcttatgtgctttactcctatagagaagaggcaaaacaaattattaactccagaaaggaaaagctggcaatgcagttttattgaaattagcttgacatagttgctctggagctcacagacttctctcttcttccccct

SEQ ID NO: 377143 - DNA, 201 bp, Homo sapiens
tcccaaaggccagttttgccctggccctaagattactgtagggcctcagacatcaaatcagttcttctcatcactcaaaattcccttaaaattgacctgayagagaagccaaccacatttttaagccaaattgttgggtcttttaaaaactagcattttggctgtagtataacagtcttagtttaactgattcaaaactat

SEQ ID NO: 377144 - DNA, 201 bp, Homo sapiens
cttttcccttccttgaagattcactcgttaaagtagagaataatatggtctcactgtataaatacatattccccgctcacctggacaagtcaaccctcgcrtgcattggtctcatccagcccctaggttccattttcccaactgctgaacttcaagctcgttgggtgacaagagttttcaaaggtaagtgtgtaggcaggt

SEQ ID NO: 377145 - DNA, 201 bp, Homo sapiens
ctttaatgtggacatgaatcacctggatatcttgttaaaaatgtaggttctaatttaataggtatggggtaagttctgaaattctgcatttctgacaagcytccaagtgatactgaagatcctgatcctcaaatcacattttgaatagcaaggatctacagcacttagttaatatactactttgaactaccatctgaaatc

SEQ ID NO: 377146 - DNA, 201 bp, Homo sapiens
tctaggactcctaactaagtctttggagtttcagctggaagaatgctggaggaatacggaactcctcccatttctcacagccacctccaactcttaaaaaygcttccaactgcctcccagcacacaaccaagggagaaaactattctgtcaaagagacggtgccaaaaggcaaaaacaaaggtaaggatgatcgctgggga

SEQ ID NO: 377147 - DNA, 201 bp, Homo sapiens
gggcaacatggtaagacctcatctctacaaaaaaaaaaaaaaaaaaaatacaaaaaattagccggtgtagtggcacgcgcctgtagtcccagctacttggraggttgaggtgggaagatcacctgagcccaggaggttgatgctgccgtgagccataatcatgtcactgcattccagcttgggccacagagtgagaccctg

SEQ ID NO: 377148 - DNA, 201 bp, Homo sapiens
tacagtgaaaatctgtctctacaaaaaatttttaaaagattatccaggcatgttgatacccacctgtggtcccagctattctagactgagaagggaggatygcttgagcctgggaggtcaaagctgcaataagtggtgattgtgccactgcactccagcctgggcaacagtgtgagaccctgtctcaaagtaaataactaa

SEQ ID NO: 377149 - DNA, 201 bp, Homo sapiens
atttgtcgggtttcttaacattagtgactccatctagattctgacagttttcatgagaacttgcttttcttttctctctcaagtccttattcagtattcarcacccttaacagattagtcccactgctgagtcaggcctcttgcatgaagcagcaatgagaaagacacacttggccaatgttatcctggagtaattctcaa

SEQ ID NO: 377150 - DNA, 201 bp, Homo sapiens
agcctccacaattgtgtgccagaagaaataacttccttcccctataaaatattcggtttcagatattttgttaaaaacaatagaagacaaattaagacagyagctctggcatgaggctgagaatttgcatttctaacaccaggcaatgctgatattgctggccatgtgaccacactttgagaaccaataatctaaagattc

SEQ ID NO: 377151 - DNA, 201 bp, Homo sapiens
gagaatttgcatttctaacaccaggcaatgctgatattgctggccatgtgaccacactttgagaaccaataatctaaagattctttcaagcaaccccaccrtcaatggcaaatactttataaagtcatgtgtttccgtgaagtgtaaaagtagtaactaggaaaggacacagaagaagcttgtctgtgattaaccaccagc

SEQ ID NO: 377152 - DNA, 201 bp, Homo sapiens
cccccgggttcaagcgatttagctgggattacagccttgtgccaccacacatctggacccatcttctaatgcaactggtccactgactggcatttgggaaytgcaattttgcctctaattgtaggacaaggaagtaagaagagttttaatcatattcaattcaagtaatggagcagatagatgtaaggtccatccgaaaga

SEQ ID NO: 377153 - DNA, 201 bp, Homo sapiens
agtgcacgaccacccctggctaatttttgtatttttagtagagagagcttcatcatgttggccaggctggtttcaaattcctgacctcagttgatccgccygccttggcctcccaaagtgctgggattacaggtgtgagccaccacaccttgcctaatatgtgatattaaagggtcaaatgtcattatatagtccaaaata

SEQ ID NO: 377154 - DNA, 201 bp, Homo sapiens
cattgtgcagaagcagctagggagagcttctaaaatacagaaatctgagcccgtcttttttcttttctttttttttttttttttttgagatggagtctcgytctgttgcccaggctggagggcagtagcgcaatctcagctcactgcaacctccatcccccgggttcaagcgatttagctgggattacagccttgtgccac

SEQ ID NO: 377155 - DNA, 201 bp, Homo sapiens
cagctaatttttgtattttttgtagatacagggtttcactatgctgctcaggctggtctcaaactcctgggctcaatcaacctgcctaggcctcccaaagsgctgggattacaggccccacctggtctggtacctaaactttcttatgtgctttactcctatagagaagaggcaaaacaaattattaactccagaaaggaa

SEQ ID NO: 377156 - DNA, 201 bp, Homo sapiens
ggtatggagaggttcaaaggccaatatttccatagccgccaatacaagcatccagatggatttgagggaaaacgcatcctggtgattggaatgggaaactyaggctcagatattgctgttgagctgagtaagaatgctgctcaggtgtgatgctctctgcttaccatgtacctggaggggaggaagtggggatgccatact

SEQ ID NO: 377157 - DNA, 201 bp, Homo sapiens
atattgactcaaacttactattcaaaccaaccttttattccttaggcttgtgtagcctgccctcagagagaactatgatgatggacattatcaaaaggaakgaaaaaagaattgacctgtaagaattttttttaattctttacatgaagcagtgtttctcaaagtacagtgatctaactacttacaagaaccacctagctg

SEQ ID NO: 377158 - DNA, 201 bp, Homo sapiens
gcatttctcaggggcagaaaaggggattgcctgaacaaaagcatagagtcaatgatgcatatggaagggcacatgctatttgacattgctagagcatgacrtatgaggcagagagagatgagccattactcttggagaagaaggagacaggacacaggaattttgtaagacatgctatggagcttagattataaattatag

SEQ ID NO: 377159 - DNA, 201 bp, Homo sapiens
tcccattatctcaggagtgtgttggttataaaagcaagtttggctccctcttttcctcacacactctttttcccttctgccttcacctttgccgtgggtgracacagcaagaaggccctcatcagatgctggccccttggtcttgaatttcctagcctctacaactaagccaaataaatttctgtttattataaataaccc

SEQ ID NO: 377160 - DNA, 201 bp, Homo sapiens; identical to SEQ ID NO: 81415

SEQ ID NO: 377161 - DNA, 201 bp, Homo sapiens
aagggcacatgctatttgacattgctagagcatgacgtatgaggcagagagagatgagccattactcttggagaagaaggagacaggacacaggaattttktaagacatgctatggagcttagattataaattatagatcagttcttcccaaatatggctacatatgaaaatcatctgatggatccttagggaccctgatt

SEQ ID NO: 377162 - DNA, 201 bp, Homo sapiens
gctctggagctcacagacttctctcttcttccccctgaaggtatggagaggttcaaaggccaatatttccatagccgccaatacaagcatccagatggatytgagggaaaacgcatcctggtgattggaatgggaaactcaggctcagatattgctgttgagctgagtaagaatgctgctcaggtgtgatgctctctgctt

SEQ ID NO: 377163 - DNA, 201 bp, Homo sapiens
gactgcttcctctctcaacccctaaatctaattggttttgcaatcctatgtgttctaccttaccgccatctcacaaatctcacccttctgggttccagctrtcattgcctctgctcatgccctcattagcaatcaagtggatttgtgtattaggctcctggctagcgcccccttccttccttcccagctccctctaattca

SEQ ID NO: 377164 - DNA, 201 bp, Homo sapiens
catgctgttctcctgatagtgaataagtctcatgagatctgatggttttataaggcggagcttccctgcacaagctctctctctgcttgctgccatgcacrtaagatgtgatttgctcttctttatcttccaccatgattgtgaggcttccccagccacaaggaactgtgagttctccattaaacctctttcctttgtaaa

SEQ ID NO: 377165 - DNA, 201 bp, Homo sapiens
tctattggagaatggcttggcagctgggaaattatatctgtgcttctttcacaagggttggtggccttgaggaaggttagaaatgtctgctgaacaggggrccatgaggagccactgaaattgtaaaagaaacaggacatgggtgagctagggtggaagtcagaacagacttgtacactttatctagagccaaggggaaga

SEQ ID NO: 377166 - DNA, 201 bp, Homo sapiens; identical to SEQ ID NO: 81421

SEQ ID NO: 377167 - DNA, 201 bp, Homo sapiens
aaaaggaagaagaaaaacaaaattttgtagcatgtgaaaaaatcatatgaaatggaaaccatactggccataaataaaattttattagaacacagccatgkttattcatttacatattgtcaatggctgtttttgtgttacagtaccaaagttgtttagcagttgagatagaaactgtaatgtggctctcaaagcctgaac

SEQ ID NO: 377168 - DNA, 201 bp, Homo sapiens
catcactggtgacctgtgaaagggacacaccaacagcacagctggggccctggcattgtgccaggggcaggatcacacagggcagtgccgcggtagcaccygtggtgccacaggtgtggtggctcctggtcccaactccaccccaccagctgctgtgtggtgttgtgtcaggtcaccacaccaatcggagcttcagttttg

SEQ ID NO: 377169 - DNA, 201 bp, Homo sapiens
ggttattcatttacatattgtcaatggctgtttttgtgttacagtaccaaagttgtttagcagttgagatagaaactgtaatgtggctctcaaagcctgarcatttactgtctggcctttttcagaataaagtttattgagcacttctctatgggaaaggttttcacttatgctgtgctctgtggctaccactcaaggcta

SEQ ID NO: 377170 - DNA, 201 bp, Homo sapiens
actggtgaccatcactggtgacctgtgaaagggacacaccaacagcacagctggggccctggcattgtgccaggggcaggatcacacagggcagtgccgcrgtagcacccgtggtgccacaggtgtggtggctcctggtcccaactccaccccaccagctgctgtgtggtgttgtgtcaggtcaccacaccaatcggagct

SEQ ID NO: 377171 - DNA, 201 bp, Homo sapiens; identical to SEQ ID NO: 81425

SEQ ID NO: 377172 - DNA, 201 bp, Homo sapiens; identical to SEQ ID NO: 81426

SEQ ID NO: 377173 - DNA, 201 bp, Homo sapiens
gtctgacaaggtgaccttttcctagtctgctgatctatgcagttctagggccacagaatggagactagaggcagcagctcagtctgaagtgcaagactttrtccagtaaaaggtccaattccagcagctctgccagaagctacagccttgacaactgtacgaacatttggcactggtgctgcatgaggggcgggaacatac

SEQ ID NO: 377174 - DNA, 201 bp, Homo sapiens
tgaaagattttaaactaactgaaaatttacttttagaaaagacagttgcactacaaatgtagaaacacaataagcacttcaaatagtataaatcaaatagygaacccattaagagggacttaagaagcctatattctttaaaaactttaaaaaagaaagaaagatagcaagccacttggtgagtgaataatttatcctttt

SEQ ID NO: 377175 - DNA, 201 bp, Homo sapiens
attaagagggacttaagaagcctatattctttaaaaactttaaaaaagaaagaaagatagcaagccacttggtgagtgaataatttatccttttaaatttsacttgtctgagatttattgtacatatatttcctgaaccaaagcctggtaatcatggacatgtatgtactcactaagagcaaaaaatagattctttgaaat

SEQ ID NO: 377176 - DNA, 201 bp, Homo sapiens
aaactctgtagacaactctgatactgccattccctgttcttactgcctacaatgatagtgagcacaccaagtagcaatcacctgttcattgttttcttacrtagactttaggtccctatggtttactaaaggctggcagataataagtattcaataatatgtcttaaggcattttaatactctagatgctctgaatcctaa

SEQ ID NO: 377177 - DNA, 201 bp, Homo sapiens
ctgttcatgtttttgtttaggactcagctgaaagagtttgtgctaaatgatgagctcccaggacgcatcatcactgggaaagtgttcatcaggccaagcayaaaagaggtaaaggaaaactctgtcatatttaacaatacttcaaaggaagagcctattgacatcattgtctttgccactggatacacatttgctttcccc

SEQ ID NO: 377178 - DNA, 201 bp, Homo sapiens; identical to SEQ ID NO: 81422

SEQ ID NO: 377179 - DNA, 201 bp, Homo sapiens
gagtctgtagtgaaagttgaagatggccaggcctcactgtacaagtatatcttccctgcacatctgcaaaagccaaccctggccattattggcctcatcaracccttgggctccatgatacctacaggagaaacacaagctcggtgggctgttcgagtcctgaaaggtaagtataagaaatagcagggcatgtgtttttgg

SEQ ID NO: 377180 - DNA, 201 bp, Homo sapiens
tggctcactgcaacctccacttcccaggttcaagcaattcccctgcctcagcctcccaagtagctgggattacaggtgcacaccaccatgcccagctaacktttttgtatttttggtagagacagggtttcaccatgttggccagctggtttcgaacttctgaccttaagtgatctgcccatctcgtcctcccaaagtgct

SEQ ID NO: 377181 - DNA, 201 bp, Homo sapiens
cagtccatatttagataaatgggaaaagacatctatagccagcattttcatagtcttcactgagactaatgtcaacaaaaaatttaatatggcagtcctgyattttaagctcacgcttttggggatacattctcaggtcttctttaatgtgggaactgcaaaatataactgccattacatggtaatgggagttaaagaata

SEQ ID NO: 377182 - DNA, 201 bp, Homo sapiens
cccttgggctccatgatacctacaggagaaacacaagctcggtgggctgttcgagtcctgaaaggtaagtataagaaatagcagggcatgtgtttttggtktgccatgtgattctggatactggaaatgttgagactattattcctcctgcttctatttaaaataacagaatctttaaaagcaggatgcattctattgttt

SEQ ID NO: 377183 - DNA, 201 bp, Homo sapiens
cgtgaaaggagagccatagtaaagcatctttatccataagtcaacagctagacctaaacttaagttgcatttgaggtttttattttaatcctacaggtgtraataagttaccaccaccaagtgtcatgatagaggaaattaatgcaaggaaagaaaacaagcccagttggtaagttaactacttaatgcaccctttttaaa

SEQ ID NO: 377184 - DNA, 201 bp, Homo sapiens
aaggttagtggctattgaaaacaccaccaggagagggctatctaaagacacattcggtagtgtgttaactttataaaaaaagacactgtacagtttaaaarcaaatcctacacagacttacatttccatttttttctttaaaaggagtgacttgtgaacagtagggttaaatgctttatagacgagaaaaaaaaccgctag

SEQ ID NO: 377185 - DNA, 201 bp, Homo sapiens
tagaaaaaattttaaaaaatgataccatgtaataccttttgtattaattacaaaccccttaggcagactcaagatagaattctaagtgatatgatagatawgatagtttctaacgtacagttgcaggctttgtcacaaatgtttatcaagctataaagatgtttaaagaaattctaaaaaagaaaaacataaaagtggcta

SEQ ID NO: 377186 - DNA, 201 bp, Homo sapiens
ctgtgaaagcagccaggagggaagctgtaccctgcaaagccacaggagcagagctgcccaagaccatgggaacccacctcttgcaacagtgtgacctggaygtgagacatggagtcaaaggagttcattttggagctttaagatttgactgccctgctggatttcggacttgcatggggcctgtagcccctttgttttgac

SEQ ID NO: 377187 - DNA, 201 bp, Homo sapiens
gggcatgtcagaggtgttcaccacagcccttcccatcacaggcctggaggcctaggaagaaaaagtggtttcatgggccaggcccagagcccccatgctgygtgcagccaagggacttggtgccctgcatcccagctgctccagctgtggctaaaaggggccaacatagagctcaggcagtggctttagagggtgcaaacc

SEQ ID NO: 377188 - DNA, 201 bp, Homo sapiens
tctgtaactaactttaagttttctcgtgggagccattctgatgcttgattggtctgggaatgaattcctatggctgttccattaaatagttaaagttgggmggtaggaggaggctttttttgttttgttttgtttttttctagccagcattttctggccagtttttggctttcatttgttccaaacaatctgtgaatacat

SEQ ID NO: 377189 - DNA, 201 bp, Homo sapiens
agagagagagacagagggagtagggaaggaggagaagatggggaatgcataaatagagggctggatacaaatctgacagtgccaatggcttcctagtaaawgcataggtgagtcacactggaaacagttaaacattggctaattgatacaatgctagcctcaaatatagtataatatgcattttcttgacatcaacaaata

SEQ ID NO: 377190 - DNA, 201 bp, Homo sapiens
caagtctctatcagctctattgtttttattcggagtgtggcttttgctcttcatttataattggctggaaaaaaggaagaagaaaaacaaaattttgtagyatgtgaaaaaatcatatgaaatggaaaccatactggccataaataaaattttattagaacacagccatggttattcatttacatattgtcaatggctgtt

SEQ ID NO: 377191 - DNA, 201 bp, Homo sapiens
attggtctgggaatgaattcctatggctgttccattaaatagttaaagttgggaggtaggaggaggctttttttgttttgttttgtttttttctagccagmattttctggccagtttttggctttcatttgttccaaacaatctgtgaatacataagagcaaaatggataactttataagtatttttatgctttaccaaga

SEQ ID NO: 377192 - DNA, 201 bp, Homo sapiens
tcctaagccaggaggatcgcttgagccaaggagttcaaggttgcagtgagctatgatcatgccactgcactccagcctaggtgacagagcaagaccttgtaaaaaaaaaaaaaagaaaaaagaaaaaaagaaaaggaaaagaaaaattaattaattaattaaagcctaataccagcatttcagggaattttaccctataga

SEQ ID NO: 377193 - DNA, 201 bp, Homo sapiens
tctggccagtttttggctttcatttgttccaaacaatctgtgaatacataagagcaaaatggataactttataagtatttttatgctttaccaagattcartgtccctcaagtgactggtagcactcagaaagtcttctgagacatgggatgcttacacaagtcattaacttcagcagcaggtacacattgccaaagttga

SEQ ID NO: 377194 - DNA, 201 bp, Homo sapiens
caattgtgacttggttgatggagcgaaagataaacaactggctcaatcatgcaaattacggcttaataccagaagacaggtaaatataatgtgactgccamgggcttttaggaagaaggagcctctgcctgtccagcagcctatacaagccaggcagtaccacagcaacatggctgaatgtgtgggaacacttgatacaaa

SEQ ID NO: 377195 - DNA, 201 bp, Homo sapiens
aatcattgaattggaaagaaccaagttcagtcttcttcccaatgcaggaaattatttttcagcaattctgagagaggctccatagcctcttcttgaacccrttcaacaatggaatctcatcatcacagaagacaacccaattttttgtcattcttgcctgcagagcaaggctctgagcagccatccactccaaaattccag

SEQ ID NO: 377196 - DNA, 201 bp, Homo sapiens
atggtaactattttataactcagtaaattatagataactaatagcagtgcaaaataattcttgtctatagacacgtagataatgtccagcagaagtctaaytggcgtcccttccccactgtgcgaaaaactagttttgcctccatttgcacattcatttcaacattcctgatttatacatgcgtattttatctttaaattt

SEQ ID NO: 377197 - DNA, 201 bp, Homo sapiens
ctttatccagtcatcaaaacaagccactgaagtaggtactgttagtatccttgactgcacatgaggaaaccaaggcttagagaagttaaagaacctgcctraaatcttaccactagcatgtggcagagccagttctcaaacccaagtctctttgactcaaagcctacgttcctaactatcctcttctacctcctaccttca

SEQ ID NO: 377198 - DNA, 201 bp, Homo sapiens
aactgtagcattttccagttcctgtctttagttcccctttgctcacgctacccctctctcttcttcagagcccctttctcttctattacaatctacctttwccttcccagatatctcactccaacacgaagtgatctctccctattcagaatgtaagtaatattgtaatttgcacccctcagttttcacttttaaattctt

SEQ ID NO: 377199 - DNA, 201 bp, Homo sapiens
gagggggatgggtgatcagccgaatctttgactcgggctacccatgggacatggtgttcatgacacgctttcagaacatgttgagaaattccctcccaacyccaattgtgacttggttgatggagcgaaagataaacaactggctcaatcatgcaaattacggcttaataccagaagacaggtaaatataatgtgactgcc

SEQ ID NO: 377200 - DNA, 201 bp, Homo sapiens
tatttaaaataacagaatctttaaaagcaggatgcattctattgtttgctgaattatactgtcataatgatttgttccattactgcataaatggtatatcrgggtcaaaaatatatatatttttttgatataccaaaaatataacagttgacataggctgtatctatgtcaactgtgatattttttcttttttatttttaa

SEQ ID NO: 377201 - DNA, 201 bp, Homo sapiens
tcttagatatctctccaagcttagactacctccatctagggaatcatgattagtccggtaacctgattaggtttctagggttatacttattaattatgttyattctgtgttctagaacttttaaaatatcaatggtacatcaactggcaagtgcttaatggaacattgacaactgctaatcatatctgtgattcttttttc

SEQ ID NO: 377202 - DNA, 201 bp, Homo sapiens
agggttaatctgtccaagattacactgtcgtaactgatagagccgcgctttatctcaggcagcctggatccagagcctggttgcttaatcaatgcactctrttgcctctcggtgttcttacacatgtgtgttattaacacatggcctggtgccagaagattctctggcccatcccagtggtgactgtgccatgtgccctgg

SEQ ID NO: 377203 - DNA, 201 bp, Homo sapiens
gtttttggtgtgccatgtgattctggatactggaaatgttgagactattattcctcctgcttctatttaaaataacagaatctttaaaagcaggatgcatyctattgtttgctgaattatactgtcataatgatttgttccattactgcataaatggtatatcagggtcaaaaatatatatatttttttgatataccaaaa

SEQ ID NO: 377204 - DNA, 201 bp, Homo sapiens
aaagaaaacaagcccagttggtaagttaactacttaatgcaccctttttaaattataactgaaattggtaaaaaaaaaaaaaaaaaaaaaaaaaaaaaaarggaaatgaaaaagaaaaaaaaacaatagcagagagatgaaagttacattggagaaaaaaagaagcatctgagacttacaagaaaaatactaggagagcct

SEQ ID NO: 377205 - DNA, 201 bp, Homo sapiens; identical to SEQ ID NO: 81423

SEQ ID NO: 377206 - DNA, 201 bp, Homo sapiens
ttcagtaatagatatggttgaaggcaacctgatctttacctttagttaaacaaattaaagtagtaacaaaggaaggcagagtagtttacctacctagtttktttactcatgtgatcttaaaactaacctttgatgtacggcaggtgcttaagtgctttttacttgggaagtccataatatcaattaccctctaacggtgtt

SEQ ID NO: 377207 - DNA, 201 bp, Homo sapiens
gaagcaagagtcagccatctttgatgctgtcatggtctgcactggctttcttactaatccttatttgccactggattcctttccaggtacagcattttctstaactaactttaagttttctcgtgggagccattctgatgcttgattggtctgggaatgaattcctatggctgttccattaaatagttaaagttgggaggt

SEQ ID NO: 377208 - DNA, 201 bp, Homo sapiens
taccctctaacggtgttgactcaagcttctgttaattaatcttaccgaataaatgtgagtctgactagctgatcagggccaagtcgcaactgtttacaggrctcagcagggagcctgtaaggggcttggaccctcagctggactggcagagcagaatatctgtgtgtcagtgtactttattcattcatcgcgtggtcaggg

SEQ ID NO: 377209 - DNA, 201 bp, Homo sapiens
attctgattctgtcactttctgtgagaatttgagcaaatcacttaaaatttttggatgccaccacttgtcttagatatctctccaagcttagactacctcyatctagggaatcatgattagtccggtaacctgattaggtttctagggttatacttattaattatgtttattctgtgttctagaacttttaaaatatcaat

SEQ ID NO: 377210 - DNA, 201 bp, Homo sapiens
cgatgccagatcctccgatcccaccccaggccctgcccctgccctcccatgaatggttaatatatatataaatatccattttagcagtgacattcccagasagccccagagctgtcaagctcccttctgccagggtgggggttcagactgtcctgtcacctctggggtgcctattggcatcctctccccctgtgcttacta

SEQ ID NO: 377211 - DNA, 201 bp, Homo sapiens
cctgttcatgtttttgtttaggactcagctgaaagagtttgtgctaaatgatgagctcccaggacgcatcatcactgggaaagtgttcatcaggccaagcrtaaaagaggtaaaggaaaactctgtcatatttaacaatacttcaaaggaagagcctattgacatcattgtctttgccactggatacacatttgctttccc

SEQ ID NO: 377212 - DNA, 201 bp, Homo sapiens
gggcctgtggcagctgccaccacagccacaggtgcactgtgctcaccacacatctggtgcagccttttctggcagaggctcttgtgttttctcattttccrttcctctcactgtggctaacaggtgggggtgaggggacagaagagggagggctgcctaccacggtctggggcttcaggaatatgagtttgtttatttaaa

SEQ ID NO: 377213 - DNA, 201 bp, Homo sapiens
tcactgtggctaacaggtgggggtgaggggacagaagagggagggctgcctaccacggtctggggcttcaggaatatgagtttgtttatttaaatgaatckcagtctttcaaataaaaaataaaaaatcagtttgatttcatataattgtcaatacttgaaggagtggttggaagcatgaattttgatctgagagtgaagc

SEQ ID NO: 377214 - DNA, 201 bp, Homo sapiens
aagtcatcacttcagcccatggttttctagtatcacatagagtttggattccaaatcaagtactacataattaaccctaatctaccaggtacattattccrtatcttatccataatcaacaggcaagcagttgtacctatttactctgacactagaagtgtctgctcattcattcactgaacaagtctctatcagctctat

SEQ ID NO: 377215 - DNA, 201 bp, Homo sapiens
tgccttcagctctaatatgcgatgagtctcctgagtctttctagagacattcctttccctccttccccaacacacacaggacacacacacacacacacacmcacaaaaggttagagatgtctttgcactcaaggtaggtggcccatttaaaacctgtaaaatcaaaaaccctgccctggcaatggctgtgcttgctagaaa

SEQ ID NO: 377216 - DNA, 201 bp, Homo sapiens
ggaaatgaaaaagaaaaaaaaacaatagcagagagatgaaagttacattggagaaaaaaagaagcatctgagacttacaagaaaaatactaggagagcctrtttaagaagagagaagggaaaggggaatttagaatttttaatgtccccaaagtcatcacttcagcccatggttttctagtatcacatagagtttggattc

SEQ ID NO: 377217 - DNA, 201 bp, Homo sapiens
ttcagctctaatatgcgatgagtctcctgagtctttctagagacattcctttccctccttccccaacacacacaggacacacacacacacacacacacacmaaaggttagagatgtctttgcactcaaggtaggtggcccatttaaaacctgtaaaatcaaaaaccctgccctggcaatggctgtgcttgctagaaagtgt

SEQ ID NO: 377218 - DNA, 201 bp, Homo sapiens
tcagctctaatatgcgatgagtctcctgagtctttctagagacattcctttccctccttccccaacacacacaggacacacacacacacacacacacacamaaggttagagatgtctttgcactcaaggtaggtggcccatttaaaacctgtaaaatcaaaaaccctgccctggcaatggctgtgcttgctagaaagtgtt

SEQ ID NO: 377219 - DNA, 201 bp, Homo sapiens
cactatctcgtccagactagtgtgcagtggctatttataggcatgatcatagattactgcagcctcaaactcctggtctcaagcaatcctcctacctcagyctcctgagtagtggagactacagacatgcacactgcacacagctacctgttattttgactaaaacaaaatgacagttaacatttctgtcagttgactgaa

SEQ ID NO: 377220 - DNA, 201 bp, Homo sapiens
ctttaaaagcaggatgcattctattgtttgctgaattatactgtcataatgatttgttccattactgcataaatggtatatcagggtcaaaaatatatatatttttttgatataccaaaaatataacagttgacataggctgtatctatgtcaactgtgatattttttcttttttatttttaagacacagggtctcactat

SEQ ID NO: 377221 - DNA, 201 bp, Homo sapiens
taaacctaaagatcaaaagcagtacttagcctcttgcagcaccagacataaatgctccttgtataggtcacaggcacctaatcatcaacactaaaaatcaytgatctaagaatcaagagaaatgagtctggatccagctgggcccatttccagctgtgtgatgcaggtaggtcaaacaccagtgcacaaagcacaaaaccc

SEQ ID NO: 377222 - DNA, 201 bp, Homo sapiens
gcaatcctcctacctcagtctcctgagtagtggagactacagacatgcacactgcacacagctacctgttattttgactaaaacaaaatgacagttaacakttctgtcagttgactgaatcaactggctcaattaaaatttttaaactcaagcaaatgagtgacaacattcagccaaactagttgtgagattctgctatat

SEQ ID NO: 377223 - DNA, 201 bp, Homo sapiens
gcccctactctcagtgctccctaactctagagcccactttcttcccttctctgcccactgaagtctattcatccttcaaaatctggagcaaatagtaatcstctgtgttgttttcctaccaacccattgtcagaattggcacctctttctttgtgctcttattgcaatttgtacataagacatacttctgtcttagcatct

SEQ ID NO: 377224 - DNA, 201 bp, Homo sapiens
tcgcgtttgttttgtttgcatgataggaagacccaaagatttttgtaggcaaatagaaactatctggatgaccagaaataactgagcacataaatccaaaytgagacacaatcctggcaggaaaagggaggagtggaattgtaggtaccagtggaagggttagccctggcaaggtggggagacaagagatacaccctcccc

SEQ ID NO: 377225 - DNA, 201 bp, Homo sapiens
ttgcttaacagcagtcaaagtagagaaaggaggctcacagaggtatgttgattgaaatgaggaagagatttttaaaccagtctcagcaagttcagtgtatwttttttaactgctatccaaaatgaagctgatagtgctacatttttttaatgtatcttcagtcttttatccgtagccagttcaaataacttatactgtaag

SEQ ID NO: 377226 - DNA, 201 bp, Homo sapiens
aactcaagcaaatgagtgacaacattcagccaaactagttgtgagattctgctatatcaaataattagtgagatgaccagatgcttatcttttcagctgayggcattattaccaggagcatacaaccagtcagctcaggctgctaacatttttgccagaaggatcaatgagtagctggtactagacgtgaaaggagagcca

SEQ ID NO: 377227 - DNA, 201 bp, Homo sapiens
gcattgttccattagtaccattagcatgatacgattgcttcattgttccattagcatgatagctatcactccaatttctcctaggggctatgtaatattgyggttccagcatatagatatggaaactgagagaagttaagaaaattcccagatcagccagctaaaaatgtagagcttgagtatgaacctaggcagtctgac

SEQ ID NO: 377228 - DNA, 201 bp, Homo sapiens
caactcttatcagtcaatgagataaataacattaatttaaaccacagagatatgtttataattttgttatctgtgattgctgtgtatttcagacagatacrggaatctatatatgatatcaattcacatcctttgcagaaacagagaaagccctctccatatgtgagatttatgttcatgtttctacttgttcacataaat

SEQ ID NO: 377229 - DNA, 201 bp, Homo sapiens
atgcatggagactgccaaagaggacaaggtaaaagagcatgcctcttctcaggaatcaaaccacatatgttccaacaggatggcagaaacctgacacctargccaaaaatctccccactcccatgtccatcgaagacattattatcaaacatgatgcctttcccctagggagcctcagaatccttcttaacattattccaa

SEQ ID NO: 377230 - DNA, 201 bp, Homo sapiens; identical to SEQ ID NO: 81462

SEQ ID NO: 377231 - DNA, 201 bp, Homo sapiens
aacgtgctggggttataggcatgagccactatgaccagcctaaaatggggtcattttaagtgtttacatctaaccaactaatagctttaacacaaacatgmacacacacacacacacacacacacgtacaatgtggagggtatacatacaatataatataaattatattatttatacagcaaaagcagatgaagagagaca

SEQ ID NO: 377232 - DNA, 201 bp, Homo sapiens; identical to SEQ ID NO: 30656

SEQ ID NO: 377233 - DNA, 201 bp, Homo sapiens; identical to SEQ ID NO: 30658

SEQ ID NO: 377234 - DNA, 201 bp, Homo sapiens; identical to SEQ ID NO: 30660

SEQ ID NO: 377235 - DNA, 201 bp, Homo sapiens
cacacaactgtacagtactaaaggaatataaaaacacctcttatgacattttctataggaaaatgtgctgtaagtgccaaactattgacatggatgctttyggaatttattctcttcaagtttgggattgtttaccctttattccacactaaattcagttccacatagactatcctttttttttttttttttttttttttt

SEQ ID NO: 377236 - DNA, 201 bp, Homo sapiens
gtgagtttttgaagtatcttcaaggaattaaaagaacttttaaggaaggaaaaccttgaagaataaaacatgcaaacgttggcaaaatgaaggaaaatacwtcttataaatgtaatcacaaattgacaaaatatcctactcaaaaaggaatgaagtgaaaattcaatacataattttgcaaggaaacaatattataaatgg

SEQ ID NO: 377237 - DNA, 201 bp, Homo sapiens
tgcaggtgtctggtgagtgtggcgcaggctgacagctgggccatagaggcatctctcctcacaattctggcagtagagtaccctggttaagtgaactgggyggggaattttacctccagaaaattattttctgtgctgcatttccattctgagctttgactatcatgtgctctgaagttagagcagtgggaggctagaaat

SEQ ID NO: 377238 - DNA, 201 bp, Homo sapiens
gagtgagaggcagtctagtcctcaaaactgctgggcttctctttcagattctttgtcaatgcttcatctcatctgtgattctggccatcactggcctcatmacaattgtttcctctgtcacctcccacaatttccattgttgctgctgctgctgtaaacaccctgtttccactattcttaccattcttagtttatgtgaat

SEQ ID NO: 377239 - DNA, 201 bp, Homo sapiens
cttgagcatcagacagtggggatggaagtggttaaataccacctgcctctggtcaggattggtgctggttactggaagtagcagggtatccagtagggackgagggatctgccccagtagtgaagtataaggaggtatcagaaggtttatgcctgtaatcccagcactttgggaggctgaggtgggaggatcacttgaggc

SEQ ID NO: 377240 - DNA, 201 bp, Homo sapiens
gatgaaattttgactttttttaagagagaaaaaaagaattttgtccatgaagcccattggggaaaaaaaatctagatgtctgaaccacagaaattacaatraggcaaaactaattttcctaaatttcccaaaacattgggcattgtaactcatctctttctcaccaggaataaaacgtgattgtttcttccttccactgaa

SEQ ID NO: 377241 - DNA, 201 bp, Homo sapiens
gaaaaaaaatctagatgtctgaaccacagaaattacaataaggcaaaactaattttcctaaatttcccaaaacattgggcattgtaactcatctctttctyaccaggaataaaacgtgattgtttcttccttccactgaaagattcaaatgtcttgagttaaagtctatattgccacctttgtgagtttgcataagttact

SEQ ID NO: 377242 - DNA, 201 bp, Homo sapiens
agagctgtctttgatgctgttatggtttgcactggacatttcctgaatccccatttacctttggaagcctttcctggtgagtcatttctacctgagaccaygcctatgcttctgggttcttctagaagtaaacttattgatttgcagttggaaataccgccccatgattatagatggctttatattcattctcaaaaataa

SEQ ID NO: 377243 - DNA, 201 bp, Homo sapiens
agggaggttatatgctttttctacttcctgccacaagcagcataagcaaaggactgccatagttgtgggacttccctttttccacagaccctatccctgcrtagtgagaaattataactttagacatttcagactttctgatccttcactcctctcaggaattcataagtttaaaggtcagatcctgcatagtcaagagta

SEQ ID NO: 377244 - DNA, 201 bp, Homo sapiens
cctaacatacaaaaacattcccaaatatggtttgatttcccccaaaaaatgtaacaaaatggtgggaggatgggtgggtctgataacttgagaaatgcagrgcaggtgtgattaatgaaaggtcctccctcttttttcctctcaggggagtgtttaaagacaccagcaaagacaaatttgactacattgcctacatggatg

SEQ ID NO: 377245 - DNA, 201 bp, Homo sapiens; identical to SEQ ID NO: 30661

SEQ ID NO: 377246 - DNA, 201 bp, Homo sapiens
tgccacaattcctgtcaatttccaactcctagccacttcaacctcaaccattttagactgtcaaagtgagtgtgaggctaagtcagaatcacaaaactggyctcacacacacagtttctgcaaattcagcatagttggtttagcacctcacttggactgcgggaactattgtttactgtccagctttgggggcctcagtag

SEQ ID NO: 377247 - DNA, 201 bp, Homo sapiens
ggctaagtcagaatcacaaaactggcctcacacacacagtttctgcaaattcagcatagttggtttagcacctcacttggactgcgggaactattgtttastgtccagctttgggggcctcagtaggcaaagaatcctgttaaaacattttgttatacaatctacttcttgcccaggatgttcagcgtagtgtataagatg

SEQ ID NO: 377248 - DNA, 201 bp, Homo sapiens
tttaattgactcccagttccacatggctcaggaggcctcacaatcttggcagaagcgaaggaagagcaaagtcacgtcttacagggtggcaggcaagagasagagcatgcccaggggaactcccattcctaaaaccatcatatctcgtgagacttattcactatcaggagaacagcatgggaaagacctgcccccatgatt

SEQ ID NO: 377249 - DNA, 201 bp, Homo sapiens; identical to SEQ ID NO: 30657

SEQ ID NO: 377250 - DNA, 201 bp, Homo sapiens
gtgattggtcttgggaacactggaggagacattgctgtggaactcagtcgaacggcagctcaggtacatcatctctgaattaatgcccctaatcccatcaycagttatgatggctggaaagagatattcaaaactatgaagtacattggccaattgctaaattatgcagacacacagtaagtgggaaaaaaaaaaaacatt

SEQ ID NO: 377251 - DNA, 201 bp, Homo sapiens
ctgaattaatgcccctaatcccatcatcagttatgatggctggaaagagatattcaaaactatgaagtacattggccaattgctaaattatgcagacacasagtaagtgggaaaaaaaaaaaacattgaaaatctttaaagccactcacggttctttctgaactatttaaaaagccatgctttacagaactgaactatctc

SEQ ID NO: 377252 - DNA, 201 bp, Homo sapiens; identical to SEQ ID NO: 30659

SEQ ID NO: 377253 - DNA, 201 bp, Homo sapiens
gaagttgaataagagatttaatcatgaggattatggattaagtattaccaaagggtacttacattttttatttagtagaaaaaatattaaatcaatatttmtcattacattttattcagaattcaaaatgttcaataattgtaatattgcctttgtttattctactctaaatccatttccctaaaacactgttcatcaggt

SEQ ID NO: 377254 - DNA, 201 bp, Homo sapiens
acaaaacggctttttcccccaatgggaagatagagcacagggagccactcagtttgctcccaacacccctttccagccactcaccggagccaccttggcamgtactctaggagtatgggaaaatgaaaacaacaaactcacacacctttttaacgtacacaaccagttctgtctacccagccaagacgtattcttcttaca

SEQ ID NO: 377255 - DNA, 201 bp, Homo sapiens
atttgatatgtaaattttacaaagaaaatatgtttgatgtgattaggtagaatgatggtcacactgaaaatatgtatcagtataaattttttttaatggartctcactctgttgcccaagctggagtgcagtgggtgtgatcttggctcactgccacctctgccctccccgggctcaagtgattctcctgcctcagcctcc

SEQ ID NO: 377256 - DNA, 201 bp, Homo sapiens
ccatgttgcccagtctggtttcaaactcctgggctcaagggatccacctgctttggccttccaaatactgagattacagaactatgactttttaagattcygtttctgcttttaactaaccaccacaatatctttcacgaatagctgtaggacccctgttgaaatgaatgttttacttgggaacatgaactcttctctgca

SEQ ID NO: 377257 - DNA, 201 bp, Homo sapiens
tcggccttatcggccttaaaggatccatcttatcaggcacagagctccaagcacgatgggtcacaagagtattcaaaggtaccatgactctactgaaagtyctctctttggatcgtaaaattggtgccctgccatttagctaaaatcaaacagatgtgaactaaagtaacaaaatatttttaacattagtgtacaattaat

SEQ ID NO: 377258 - DNA, 201 bp, Homo sapiens
tatccaaaatacttgggaccaggccgggcacggtggcttacgtctgtaatcccagcactttgggaggctgaggccagcagatcacttgaggtcaggagttygagaccagcctggccaacatggtgaaaccccatgtctactaaaaaatacaaaaattagctgggcgtggtgacaggcacctgtaatcccagctacttggga

SEQ ID NO: 377259 - DNA, 201 bp, Homo sapiens
gggaggcagagtttgcagtgagtcaaaatcgcaccactgcactctagcctgggtgatagagtgagactccatctaaatcaatcaatcaataaaagtaaatraaattacaaatggaacattaattgctataacccgccctcagtgaggctagcatgagccaccatgatctctgttctcttcctcctatctccattatcccaa

SEQ ID NO: 377260 - DNA, 201 bp, Homo sapiens; identical to SEQ ID NO: 81467

SEQ ID NO: 377261 - DNA, 201 bp, Homo sapiens
ttactgtgtcacccaggctagagtgcagtggtgcactgactgctcactgcagccttgacctctcgggctcaagctgggactataggcatgcaccaccatgyccagctaattttttcattttttgtagaaacaaagttttaccatatttcccaggctggtctcaaactcctgacgtcaagtcatctacccatttcggcctcc

SEQ ID NO: 377262 - DNA, 201 bp, Homo sapiens
tcaaaggaaaaaagcaaaattcattgtgaatgatgagctgccaaactgtatcctctgtggggcaatcactatgaaaaccagcgtgattgaatttacagaawcctctgctgtctttgaagatgggacagtggaagaaaacattgatgttgtgatcttcactacaggatatacattttcttttccattttttgaagaacctct

SEQ ID NO: 377263 - DNA, 201 bp, Homo sapiens
tttccctgaattggctaagtaaatcatttgctgaagtttctcataaaaataactacagtgaataattttctcctgtgtgtcaaaggaaaaaagcaaaattyattgtgaatgatgagctgccaaactgtatcctctgtggggcaatcactatgaaaaccagcgtgattgaatttacagaaacctctgctgtctttgaagatg

SEQ ID NO: 377264 - DNA, 201 bp, Homo sapiens; identical to SEQ ID NO: 30662

SEQ ID NO: 377265 - DNA, 201 bp, Homo sapiens
taaagaagttctgcttgactttcctctaacagagcataccatggccaagaaagttgcagtgattggagctggtgtgagtggcctctcctccatcaaatgcygtgtggatgaggacctggagcccacctgctttgagagaagtgatgacattgggggattatggaagtttactgtacgtggttcatctctatcagtcatgat

SEQ ID NO: 377266 - DNA, 201 bp, Homo sapiens
tagtcaaaatgtgcaactgtatgtaatgtaaaagcttctccctccaccgtctggcacctgctatgagctgacagcagtgtcaagaagagacagtgtgcttsacttccttcttcctctgccatcctctccctccgaaccctaaacctaccagctgcagtttctgacctttgcagaattggagttggggaaaggtcaagaggg

SEQ ID NO: 377267 - DNA, 201 bp, Homo sapiens; identical to SEQ ID NO: 81457

SEQ ID NO: 377268 - DNA, 201 bp, Homo sapiens
agtaagggagtggcttactgcaacggcacaaacaagtgcataatgcagtgttaaacattaggcaggatgcagtctgattggtgaggaatcttgagaatgcrcagactcgggtcagggacagttggaagagagaggaaaaaagagttaactctgataaataagcatagtattggacatttatgatgatttctggaccatgga

SEQ ID NO: 377269 - DNA, 201 bp, Homo sapiens
gtctttgatgctgttatggtttgcactggacatttcctgaatccccatttacctttggaagcctttcctggtgagtcatttctacctgagaccatgcctaygcttctgggttcttctagaagtaaacttattgatttgcagttggaaataccgccccatgattatagatggctttatattcattctcaaaaataatatgtg

SEQ ID NO: 377270 - DNA, 201 bp, Homo sapiens
agacgaatggcttttgttttaaactgagggcacttttacaaaagtcatctttccatttatttttctttcagaaaaaagaatttgggttttgagcttttttaaaaaaaaaagacaaacactttccttgactttgagaaataatttaagtcaaagaatctgctctatgctaaccaaggtaagtgtcctggattttttttttaa

SEQ ID NO: 377271 - DNA, 201 bp, Homo sapiens
ttctcccacctcagcctcctgagtagctggaactataagcccatgccaccacacctggctaaatttttattttttgtagaaagaatatcttgctatgttgycaggctggtcttgaactcttggacttaagctgtcctcctaccttgccctcccaacgtgctggggttataggcatgagccactatgaccagcctaaaatgg

SEQ ID NO: 377272 - DNA, 201 bp, Homo sapiens
acatatggaagcatcctttatttttcccaaatattttccatccttggttgattgaatccatggatctagaacctacagatacagagggccagctgtactattttttttttcaaaaatgttatcataatattaattttcactcattcaacaagtacttatcatgtccttctgccaggacacaatgataaacaaggtagacag

SEQ ID NO: 377273 - DNA, 201 bp, Homo sapiens
atttttcccacaggactctgtaagatacctccatcccaaaaattgatgatggaggctactgaaaaggaacagctcattaaaaggtatgaaatgtagcttgytctagggcaaacttacagtatattctgttacaaaaaaaggattcagagtataaaagccattcctagagaagcagtatggcaggttggaaataactctgca

SEQ ID NO: 377274 - DNA, 201 bp, Homo sapiens
gggcttgtccttccgttgcccctggatgaaatctcaggcagttttctgcttattctcagataatgaaatgtcctctgatcattataagtcacccaaaaacaaaaaaaaatctcattttcataactaaaatgtcctgttcaggcaatagtcaaaatgtgcaactgtatgtaatgtaaaagcttctccctccaccgtctggca

SEQ ID NO: 377275 - DNA, 201 bp, Homo sapiens
tactctaaatccatttccctaaaacactgttcatcaggtaccacagcagtttttaaaatatatgtattctctttctggtggcaaaagtagtgattcatgargctggaagaaaataaaagatgaaaacttccatttcctgctgttacaaatatcacatatttttgttgttgttgttgttgttgttggggtttttttgtgttg

SEQ ID NO: 377276 - DNA, 201 bp, Homo sapiens
aaatgctgaatgctccactttggaagggggagaatttagagggcaaaggggaatcgcacagggtcttaaagtgcaacagccacagtccttcctttttgggraaaaaaaaaaaaagtcccggccgggcatggtggttcacgcctgtaatcccagcactttggggaggccaaggcgagcggatcacgaggtcaagagatcgag

SEQ ID NO: 377277 - DNA, 201 bp, Homo sapiens
ctcggtaaacccgggctccgctttccaaatagcctccacgtgttcaaaatagccgccgctgtcccccatgggccgccatgctaaagggccagccaatgggracgcgtctcggggcccatggcgccaatccgcgcgccgcaggccctcctggctcggtgcgctgtccaatcagaggggagagggggcgggacccagagggag

SEQ ID NO: 377278 - DNA, 201 bp, Homo sapiens
atagccgccgctgtcccccatgggccgccatgctaaagggccagccaatgggaacgcgtctcggggcccatggcgccaatccgcgcgccgcaggccctccwggctcggtgcgctgtccaatcagaggggagagggggcgggacccagagggaggttttttgccgcgaaaagaccacgtggggacgcggtggggcgggtctg

SEQ ID NO: 377279 - DNA, 201 bp, Homo sapiens
caaaacaaaaaaaaaaccgtggcttctcactgttgaactatgaaagcagagcaaccctctttaaatagggccacgtcctacctctcagccttacctccacstcccactctcccactccagagttggacagtgtggcaaacccctccccacttctgtctcttaaaaatcaagtagatgcctctgtggcacctccttgaattg

SEQ ID NO: 377280 - DNA, 201 bp, Homo sapiens
acgaagtttctccttttctcatccatgcttcactaaacttcctcctctgcactccctagcagcaaaaagcaccatcatctgcccagttgtccagccagatmtattactgacacctgcctacctctctttctcccctcttctgtcctttttttccaccttcccagtcagtcagtcattcatatctgtgttctttcttccccc

SEQ ID NO: 377281 - DNA, 201 bp, Homo sapiens
tgaatgaaacctggcttgagctttaaaaagccgagaggagtggcactgtcaggacccagcccagagaaagaggcaaggaattgacctgattgaaccacttrggtgggggggcaggcactgtttttgtttgttgttttttaaaagaatttggacataacatgacaaagaactaatgatgttccaaataacttgcactagaag

SEQ ID NO: 377282 - DNA, 201 bp, Homo sapiens
aaagaggcaaggaattgacctgattgaaccacttaggtgggggggcaggcactgtttttgtttgttgttttttaaaagaatttggacataacatgacaaakaactaatgatgttccaaataacttgcactagaagctttcttattgaattcttatggtttccaatgagaatctgattttaagtctagtttatctttaaatc

SEQ ID NO: 377283 - DNA, 201 bp, Homo sapiens
gttagcactttcaagctcttgacttctggcctgaacagttttgtggttctgttatcagatccctttgctttagtttgtcttatataacagttgctggttgkcggctctcatccatcttgtgttcagaagttcgtggggctgggcacggtggctcatgcctgtaatcccagcactttcggaggccaaagtgggaggatcatt

SEQ ID NO: 377284 - DNA, 201 bp, Homo sapiens
attaaatcctattaagatcaatactaatttgcttcttgtttgaatgccctattctgaataccagtaatcagtataaacagggaatattaaaaggaatattktgagggaatgctcaaaaaccagtttcaaacctatgaggatcagatgggccagcagggcttcttgacagaccagcattgggagagttgtttcacaagagaa

SEQ ID NO: 377285 - DNA, 201 bp, Homo sapiens
aggtgggggggcaggcactgtttttgtttgttgttttttaaaagaatttggacataacatgacaaagaactaatgatgttccaaataacttgcactagaasctttcttattgaattcttatggtttccaatgagaatctgattttaagtctagtttatctttaaatcagctaatgggatttgttgcagaagaaagaaagca

SEQ ID NO: 377286 - DNA, 201 bp, Homo sapiens
tgttgatggtagtggctgctgccattatgccggctgcagcagggaagcacagcttgctacactggatcccatcaagcattggtttcatcatggatttagcycctgttgctgggtattgggctgatttgcctgagcctacatttaacctgtttctctcatgtgtataggtgttctccttctcaacgctgtcctcacggttcg

SEQ ID NO: 377287 - DNA, 201 bp, Homo sapiens
actgcaacctccaccccctgggttcaagcgattctcctgcctcagcctcccgagtagctgggactacaggtgtgcgccaccacacccagctaatttttgtwtttttagtagagatggggtttcaccatgttggccagatggtttcgatatcttgacctcgtgatctgcctacctcggcctcccaaagtgctgggattacag

SEQ ID NO: 377288 - DNA, 201 bp, Homo sapiens
ggaatgcaatggcatgatcatagctcactgcagccttgaactcctgggttagagcgatcctcccgtctcagcctctggagtagctgggactacaggcacawcccaccccaccctaaataatttttttattatttttagtagagatagggccttgctatgttgcccaggctggtctcaagctcctgggctcaagtgatcctc

SEQ ID NO: 377289 - DNA, 201 bp, Homo sapiens
ccaccacacccagctaatttttgtatttttagtagagatggggtttcaccatgttggccagatggtttcgatatcttgacctcgtgatctgcctacctcgscctcccaaagtgctgggattacaggcgtgagccaccatgccaggccctaaattgctttaattcatcgaaaagtaactgggggctaggcacagtggctcat

SEQ ID NO: 377290 - DNA, 201 bp, Homo sapiens
tcttttgaaacagggtctagctctgtcacccaggctggaatgcactggcttgatctcaactcactgcggcctcaacctcccaggctcaagcaatcctcccmccttagtcacctgagtagcagggaccacaggcgtgcgccaccacacctggctaatttttgtatttttttttgtggagacagggtttcaccacgttgccca

SEQ ID NO: 377291 - DNA, 201 bp, Homo sapiens
gcttccaagaaatttgggaacatatagaaaacacaaagaattccactcaatcacaaatttaacttgcccatgaaaatactatcagtgatcattattgtttkgtttctgggttttttgttttttgatggagtctcgctctgttgcccaggctgtagtgcagtggtatgattttggctcactgcaacctccgcctgctgggtt

SEQ ID NO: 377292 - DNA, 201 bp, Homo sapiens
actaaacacttcattgtaaaagaagctttgttttgcccagctgtaggctaatgtaggtgttctgagcatgtttaaggtagggtaggttaagctatgatgtkcagcaggttatatgtcataaatatatcttcaacttaggatattttctacttaggatgggttttccaagatgttaaccccatccattgtgttaataagttg

SEQ ID NO: 377293 - DNA, 201 bp, Homo sapiens
gctgaggcaggagaatcgcttgaacccgggaggcggaggttgcagtgagtcgagatcacgccactgcagcaagactctgtctcaaaaaaaaaaaaaaaaawtttaaaaagtcccaaatctgccaccatttattcttgatctttttcagaagcggcaccatgtactacagacggctcatccctcccctttgtcagtgtatag

SEQ ID NO: 377294 - DNA, 201 bp, Homo sapiens
aattttggaggtcatctcatcagtatatttatctttcgcatgtttttctaggagttatgtggttttacattgtaagaactttagaaaaatacatttagccrgttctgtaacactgaattgtatactaggttttagctgacataagcagtgtgtcagtccctttatatgtacctatttgtgtaggtacaactggtccctggc

SEQ ID NO: 377295 - DNA, 201 bp, Homo sapiens
aggtggcagtgagccgagatcctgctactgcactctagcctgggtgacacagcaagactggaaaaaaaaaaaaaagaaccactgcttttggaggatttggkgtatgatatacataaatatgctaaggacagaaaactgtccctgagcaacagtgggggtctgggttgtaactgctgggttgatttacttaggttttccaga

SEQ ID NO: 377296 - DNA, 201 bp, Homo sapiens
tgccgcgaaaagaccacgtggggacgcggtggggcgggtctggcgggggcggggcacctctgtgcagggttcccagtcaccgcgacgctcctcgggaagcyatagggcgcctcccagcccgtctccccgctccagtttagaacctaattcccaattcccggaccgggcccagccctgggctcttactgtccgcttttgctg

SEQ ID NO: 377297 - DNA, 201 bp, Homo sapiens
gcactctagcctgggtgacacagcaagactggaaaaaaaaaaaaaagaaccactgcttttggaggatttggtgtatgatatacataaatatgctaaggacrgaaaactgtccctgagcaacagtgggggtctgggttgtaactgctgggttgatttacttaggttttccagagtgctgttaaatccaagtacagactaaag

SEQ ID NO: 377298 - DNA, 201 bp, Homo sapiens
ggggcaggcactgtttttgtttgttgttttttaaaagaatttggacataacatgacaaagaactaatgatgttccaaataacttgcactagaagctttctwattgaattcttatggtttccaatgagaatctgattttaagtctagtttatctttaaatcagctaatgggatttgttgcagaagaaagaaagcattacact

SEQ ID NO: 377299 - DNA, 201 bp, Homo sapiens
ctctggaggctcaggtgggaggaccacttgagcccaggagggcgaggctgccatgagctgtgatggcaccactgcacatcagcctgagcaacacagcaaamccgtgtctcaaaaaattaaaaaagcagctaggtacatatctttacaagtttaaaatacgcttagcctttgaccagcaactctgctattagcaatctatgc

SEQ ID NO: 377300 - DNA, 201 bp, Homo sapiens
tgagcaacacagcaaaaccgtgtctcaaaaaattaaaaaagcagctaggtacatatctttacaagtttaaaatacgcttagcctttgaccagcaactctgytattagcaatctatgccatagaagtgttttatttgttttgtttatgtttgtttgaggcagggtctgtgctgcttacattacagtattgtttaattcctga

SEQ ID NO: 377301 - DNA, 201 bp, Homo sapiens
gccttcattcaggccctcacctgatcttgcctggagggttctgatgctttctccctggaaggccttgccttaggctgaagatctgatttcaggggggtagrggggtggcccccaatcggcctcccagacttaactctatccctctttgcactccgatccctaggctgacccattcccctttactttttcacggtgccccac

SEQ ID NO: 377302 - DNA, 201 bp, Homo sapiens; identical to SEQ ID NO: 81468

SEQ ID NO: 377303 - DNA, 201 bp, Homo sapiens
actgcagcaagactctgtctcaaaaaaaaaaaaaaaaaatttaaaaagtcccaaatctgccaccatttattcttgatctttttcagaagcggcaccatgtrctacagacggctcatccctcccctttgtcagtgtatagagggttctttggatgtagacacttttcaaagaccaatgagctgctgcagaagtctggcaaga

SEQ ID NO: 377304 - DNA, 201 bp, Homo sapiens
aaccccatccattgtgttaataagttgaggagtttatctgtgtgtgtatgcatcatggtgtcctttagcaaatacagtcttagcagtggaaattgctggcrgtatgatagggacacttgaaaattgcatagataattgccaacttgaaggcagagggtggtgctctttgcatctcagagcctagcaaaggtaggtagttgc

SEQ ID NO: 377305 - DNA, 201 bp, Homo sapiens
gaaaatactatcagtgatcattattgttttgtttctgggttttttgttttttgatggagtctcgctctgttgcccaggctgtagtgcagtggtatgatttkggctcactgcaacctccgcctgctgggtttaagtgattctgcctcagcctcccgagtagctgggactacaggcgcccgccaccacacccggctgattttt

SEQ ID NO: 377306 - DNA, 201 bp, Homo sapiens
atatgtacctatttgtgtaggtacaactggtccctggcttatgaagtttgacctgatttttttcgactttacaatggtgtataaccatactttgagcactyacacgttgtttttttttctttctttaagagacagggtctcttggctgggagcagtggctcacgcctgtaatcccaacactttgagaggccagggtggcgg

SEQ ID NO: 377307 - DNA, 201 bp, Homo sapiens
tgtaggcatgaacttggtgtctacaagatacaagtccctgggtaccattcacttaacaagtgatggatgaggcatgtttctggcttccaagaaatttgggracatatagaaaacacaaagaattccactcaatcacaaatttaacttgcccatgaaaatactatcagtgatcattattgttttgtttctgggttttttgtt

SEQ ID NO: 377308 - DNA, 201 bp, Homo sapiens
caccttccataagggtaaatgtggaggctgccggcccttttgtcttgttagtgtagccggccaagttcatgtttccgtaggcttaggttgtacccccttcmacctcctttactcacaaagggggtaaaagaaagccatgatgtttcactctgcagctttatattggttaaagttgttaacgacccgcgagatgatatcatg

SEQ ID NO: 377309 - DNA, 201 bp, Homo sapiens
tgacactggacttttaggtttcttacccgttttcctcccccgttttgtaaactggggcaagaatcttgtgatttaatgaatatctgtgaaatgacatagargtgaaataggtgaataaatcatcttgataaggcagccacacctaatacttagaaaatctcgtaagcttaattttagagtaagaatttagaatctagctct

SEQ ID NO: 377310 - DNA, 201 bp, Homo sapiens
atatgtgccagtgtcccttccaagggctggctgtaacttctaaccttttcacatatgtcttagacgttactgagctttcaaaattatgcttaagattctgttttttgtttttcttgtggcttgctttcagtttggagaacatttataaagagttgtctacagacatagaggattttgttcatcctggccatggagatttat

SEQ ID NO: 377311 - DNA, 201 bp, Homo sapiens
cagaaaggctttgaggtaggcatacacttgtatgagtgacctaagatctgactggtatgaactgctaagatgtgatcatctaggtatgtaagaagtgtgcstgagagtaattgctaatctctatcccttagggaggtttacggccagtgttgctcttccgcagtatattggtaatctttaatcatggtttggtctgaaagt

SEQ ID NO: 377312 - DNA, 201 bp, Homo sapiens
cttgctgctagaacctcctatcctccctcaagccttttgctacctatcactctacacagtcttctagaatttgaatcctcaggaatccacagagcttcagmcatttacactgtttccagagatgtgctggcaaatgtttaacaacaatcagctctcactggttgatataagccagttccagcatactgctgaccatttttt

SEQ ID NO: 377313 - DNA, 201 bp, Homo sapiens
tctgctgacatgagttgttggagcttgaagggaattaataatgtactgcagtgactcctatcccaggaaaacttgttaaaaatacaaagcctcggctgggygtgatggctcacgcctgtaatcccagtactttgggaggtcgaggcgtgtggatcacaaggtcagaagatcaagatcatcctggctaacacggtgaaaccc

SEQ ID NO: 377314 - DNA, 201 bp, Homo sapiens
agaaaaggaaaagacatttaaaaagcctgtgtcttaatcagactcatcattttacatgtttgcgttttcaccttcacccctgccattaaaaattttttcaktctggtttcagctgctttaagcagtggaaatataaagtgtgttttactacacatggcagtatgattctgctgctcggtaatttcgagccaacatttgtat

SEQ ID NO: 377315 - DNA, 201 bp, Homo sapiens
caggaatcctgggcttcggtgccagctctgccaatcactagctttattacctgtttctttatctattaaatgaggccaaggacccaagacctgcccacctyaccagggtatcagatgaagccctgatgagaagtcctttgcaaccgtgaaggaaactccaaatagcaccaagaggactcagaacacatggtttgacaacct

SEQ ID NO: 377316 - DNA, 201 bp, Homo sapiens; identical to SEQ ID NO: 81479

SEQ ID NO: 377317 - DNA, 201 bp, Homo sapiens
tggtgggaacttgcaaaacttacagtttctgcattgtagaagatgtcctggaatgaggggagacactggaagcagaaagaccgtggaagaggctgatacarttgttcagaagagcaacgtagaggcctgggctagggctatgactatggggccaactggagagacatgtcctagatagtgagagggtagtggaagggagga

SEQ ID NO: 377318 - DNA, 201 bp, Homo sapiens
cttggcaagttagttcttctctgagcttcagtttcctcatttgtaaaataggagtaataataatacctaaaggggtgttagtgagaattaaatgagatcayggatctgaaaaatgtttttaaaaatctgtgtggatcattatgtggtactttcaataataataataggccgggtgcagtggctcacacctctaatcccagc

SEQ ID NO: 377319 - DNA, 201 bp, Homo sapiens; identical to SEQ ID NO: 81481

SEQ ID NO: 377320 - DNA, 201 bp, Homo sapiens; identical to SEQ ID NO: 81480

SEQ ID NO: 377321 - DNA, 201 bp, Homo sapiens
tgcagtgagccaagatcgagccactgaactccagcctaggcgactgagtgagactccatatcaaaaaaaaaaaaatacaaagcctcaacccctccttcccmtcaggcctcttgcatcagagtctctgggatggggcccaggaatctgtattctttcccagctccccagaatgttcagccaggtttggaaactgatctatcc

SEQ ID NO: 377322 - DNA, 201 bp, Homo sapiens
catttctataggcaggaaaagacactcgtgatgaacaagcacgtggggcatctacttcgaaccaaagccatcgagcatgcagatggtggtgtggcagcggkagtggcagtcctggacaacccataccctgtgtgagggcacaaccaggccacgggaccttctatcctctgtatttgtcattcctctcctagccctcctgag

SEQ ID NO: 377323 - DNA, 201 bp, Homo sapiens
  misc_feature (1)...(201): n = A,T,C or G
cagttagggaatctgtagctctgggaagggaaggaacttgccccagtcacatctgatattagtgcttctttctccaatgaagagcctttaggctgggagtncagagacatgggttcaagtccaggctataccagtcatcacctcgggcaagtcatttcacctctccaagcctctgcttccttactgtgagaataatgccat

SEQ ID NO: 377324 - DNA, 201 bp, Homo sapiens
cattgccacccagctggctgggactaagaaggtgcagcaggagctaagcaggccgggcatgctggagatgttgctccctggccagcctgaggctgtggccygcctccgcgccacctttgctggcctctactcactggatgtggtacgtgggcagcctgtttctcctaccacaggcctcctaggtggcagagacctacagcc

SEQ ID NO: 377325 - DNA, 201 bp, Homo sapiens
ttactgaacagccatctctcttccaacagacatgttctcagtgtcctgagtaagaccaaagaagctggcaagatcctctctaataatcccagcaagggacyggccctgggaattgccaaagcctgggagctctacggctcacccaagtaagggtgtgaaaaggtagcaggaggatcctgctttagtttcagcattcatggg

SEQ ID NO: 377326 - DNA, 201 bp, Homo sapiens
tctccatcttttgcaggtgttgggatggccaccaactgggggagcctcttgcaggataaacagcagctagaggagctggcacggcaggccgtggaccgggmcctggctgagggagtattgctgaggacctcacaggagcccacttcctcggaggtaagcccctagctcctccccacagcattcaccatggcccactgtctg

SEQ ID NO: 377327 - DNA, 201 bp, Homo sapiens
gttctttcagggaagcggtgttcttattcttattccaggaggtggggcggtatgggggttgaggggagaaacaaaagaagaacaagttctatagtagcctygggccacctgtgctctttccccagtgctctggtgctactgattgctcaagagaaggaaagaaacatatttgaccagcgtgccatagagaatgagctactg

SEQ ID NO: 377328 - DNA, 201 bp, Homo sapiens; identical to SEQ ID NO: 81488

SEQ ID NO: 377329 - DNA, 201 bp, Homo sapiens
ttctcccacctcagcctcccaagtagctgggactacaggcatgtgccactacgcctggctaattttttttttttttttggtagggacagggtttcaccatrttgtccaggctggtctcaaactcctgacttcaagtgatccactggcctctgccccccaaaattgctgggattacaggtgtgaaccaccgtgcccagcctc

SEQ ID NO: 377330 - DNA, 201 bp, Homo sapiens
gtctacaggttggtattttctgtgagaccattctttgcctcctgggacccacaagagctccacagagacccaattcaggcttataacaacctgggttttcygagtcctcacttcacttctttctcagggagcttgctgctagaacctcctatcctccctcaagccttttgctacctatcactctacacagtcttctagaat

SEQ ID NO: 377331 - DNA, 201 bp, Homo sapiens
cagaagtaataagttctgcttggacaagttgagtttgtttgggggccagtcatatgatgtctaagcagggagcctgcattaaatatttggaagttaacaattttttttttttttttgagacggattctcgctctgtcaccaggctggagtgcagtggcatgatcttggctcactgcaaccactgcctcccaggttcaagcg

SEQ ID NO: 377332 - DNA, 201 bp, Homo sapiens
aggttggggtggggacagaggctctcaggtctcctccaggcatatacaccaggggccaaggttagggcagcccagcatattccaacctgaagtggatcttmcaggaatgtgatgggaggatgctttttagtgctcagctgattctcagagtcatgttgctgtatatatgaggtcatgggcagaggggtcttccaggtccat

SEQ ID NO: 377333 - DNA, 201 bp, Homo sapiens
gaagcacgtctactgctggagaggtcacatgctgccaagtgcccagacattgccacccagctggctgggactaagaaggtgcagcaggagctaagcaggcygggcatgctggagatgttgctccctggccagcctgaggctgtggcccgcctccgcgccacctttgctggcctctactcactggatgtggtacgtgggcag

SEQ ID NO: 377334 - DNA, 201 bp, Homo sapiens
tttctccaggttcaatacgtaaaagtagaactgctgagtccaaaccacacctttttaaaacctcatccttagggaagaaaaaaaaataaaaaaataaaatmttttttaatttggtgactaggtaagacattttcatggttcaaattcaaatggtacaagagtttaccctaatgcagcttgtgttttggtttcttgttgatc

SEQ ID NO: 377335 - DNA, 201 bp, Homo sapiens
cctttcagatggcttattcataacaagtaactaataacaagtaaatatattccttggggcctcgctctgttgcccaggctggagtgtagtggcacaatctyggctcactgcaacctccgcctcctgggttcaagcaattctcccacctcagcctcccaagtagctgggactacaggcatgtgccactacgcctggctaatt

SEQ ID NO: 377336 - DNA, 201 bp, Homo sapiens
tcataacaagtaactaataacaagtaaatatattccttggggcctcgctctgttgcccaggctggagtgtagtggcacaatctcggctcactgcaacctcygcctcctgggttcaagcaattctcccacctcagcctcccaagtagctgggactacaggcatgtgccactacgcctggctaattttttttttttttttggt

SEQ ID NO: 377337 - DNA, 201 bp, Homo sapiens
ccggctaattttgtatttttagtagagatggggtttctccatgttggtgaggctggtctcgaactcccgacctcgggtgatccgcctgcctcggcctcacmaagtgctgggattacacgagtgagccaccacacctggcccatggtgattatctttatgtcttatcctcctccatatccccagtacctagtcaagggagtg

SEQ ID NO: 377338 - DNA, 201 bp, Homo sapiens
tgtgcagatggacttcaacctgctagtggatgctgtcagccagaacgctgccttcctggagcaaactctttccaggtaggggacagtgaagcattgggggrccaggagctgccagagccaaggaactggaagattgcagagccgtgaggtgttactgtgtcagctgacttggtgggatagaggaaaggtacctccaaagaa

SEQ ID NO: 377339 - DNA, 201 bp, Homo sapiens
tgattagatgattgagatggggggtggtatttgaactagaccttaaaagacaaatagggaaaaggaacagcatagcaaggacccaaaagtaggaaaaggcaaaaaaaaaaaaaaaatgttcaagagaatgcagctgaaatgcagggcgcataagtggatatagtgggaaagaaggcaggccagcgtcagacagccgcgggg

SEQ ID NO: 377340 - DNA, 201 bp, Homo sapiens
tccctctggctcttgcccatttttcccaggaacatccatgtgatccgacgaacatttgaagatatctctgaaaaggggtctctggaccaagaccgaaggckgtttgtgtaagcattcccaagaatccagtggaaggctggtttatgaaactcatcctgccaccctcttccccaaaatgattctttcttctgggagatgtga

SEQ ID NO: 377341 - DNA, 201 bp, Homo sapiens
gattgcttgagcccaggaatttgaggctatagtgcactatgatggcacctatgaatagccactgtattccagtctgggcaacatagtaagaccccactccaaaaaaaaaaaaaaaagatgctgagaagggtaatttagaaattatctaccaaaatttaaaatagatttacctgaattacttgatatttttacttttagaaa

SEQ ID NO: 377342 - DNA, 201 bp, Homo sapiens
ctatgctgtgcagatggacttcaacctgctagtggatgctgtcagccagaacgctgccttcctggagcaaactctttccaggtaggggacagtgaagcatkggggggccaggagctgccagagccaaggaactggaagattgcagagccgtgaggtgttactgtgtcagctgacttggtgggatagaggaaaggtacctcc

SEQ ID NO: 377343 - DNA, 201 bp, Homo sapiens
gatacctggcacctaatggatggatgttcagtaaacgtcagctgaagtaaaataaagtcgaattccttttgtcttcttccctctgcagaattgggaagcaygtctactgctggagaggtcacatgctgccaagtgcccagacattgccacccagctggctgggactaagaaggtgcagcaggagctaagcaggccgggcat

SEQ ID NO: 377344 - DNA, 201 bp, Homo sapiens
tgccaagtgcccagacattgccacccagctggctgggactaagaaggtgcagcaggagctaagcaggccgggcatgctggagatgttgctccctggccagyctgaggctgtggcccgcctccgcgccacctttgctggcctctactcactggatgtggtacgtgggcagcctgtttctcctaccacaggcctcctaggtgg

SEQ ID NO: 377345 - DNA, 201 bp, Homo sapiens
ggaaaagccgaaaggaagggggtttcaggttgagggaaaagcagtgcaggccctgaggagggaaagagctttgtgatttgaggaatgacaggcctgtgtgrgtagaatggcagagactaggagtcagggatggtacaaggttgaaaaagtagacaggagccagctcctgaaggatcttgaaggccatggtagggagtatgg

SEQ ID NO: 377346 - DNA, 201 bp, Homo sapiens
gtaggtggattgcatgagctcaggagttcaagaccagcctgggcaacatggcaaaaccccatctctacaaataatacaaaaattagctgggtgtgttggcrtgcacctgtagtcccagctacttgggaggctgaggagggaggatcacttgagcccaggaggtagaagttgcagtgagccaagattgcgctgttgcactcc

SEQ ID NO: 377347 - DNA, 201 bp, Homo sapiens
cctaggtaggtggattgcatgagctcaggagttcaagaccagcctgggcaacatggcaaaaccccatctctacaaataatacaaaaattagctgggtgtgktggcgtgcacctgtagtcccagctacttgggaggctgaggagggaggatcacttgagcccaggaggtagaagttgcagtgagccaagattgcgctgttgc

SEQ ID NO: 377348 - DNA, 201 bp, Homo sapiens
attttgctatcctaccatgtagtttcattagtttccacatccattatttcatttaaccctcacaaccactcggtgaggcatataattatccccattatacrgatggagaaactaacgtttagagagatggagaggcttctctaaggccctacaggaagttcccaggttttctgactttcaggccgatggtattcccattct

SEQ ID NO: 377349 - DNA, 201 bp, Homo sapiens
gggcttcagttgcctcatttgtgaaatgggatcactggacttgataactttcgagatagttatggctctgaaattatttaattctgagttttacttaaagwtttgtttgatgggctattgccatctactggtagtaataagaataacaactcattattttaagttgaagagaatcttttcaagtgtgaggtaaaaattaaa

SEQ ID NO: 377350 - DNA, 201 bp, Homo sapiens
aaagtgctagaattacaggtgtgagccactacgccttggccaacagctaatgccctttctgattggtgtgagatggtatctcattgtggttttgatttgcrtttctctgatgattagtgatgtggagcatttttttcatgtttgttggctgcttgtatggctttttttgagaagtgtctgttcatgtcctttgcctatttt

SEQ ID NO: 377351 - DNA, 201 bp, Homo sapiens
atttatcttacagattcaaacaaataaactttttctagtccctttgatttgtaagtatacaatgtggactgaaatgagatgtcaaatacgcagaaaactaytaaacaacatctctcagcagtagtattctatgtagcactggaaaagcaatcgccctattgatttttttttttttttttttggagacagagtttcactctg

SEQ ID NO: 377352 - DNA, 201 bp, Homo sapiens
ttttttgtttttcaagttcttctaggttaattttagattgttaatttgagatctttctaactcctcaatataggcggtcagtgctctaaacttcatcttarcactacttttgctgcatcccagagattttggtatctgtgtctctgcttttatttatttcaaagaattttttgatttctgccatatggtggagccacttta

SEQ ID NO: 377353 - DNA, 201 bp, Homo sapiens
ccaaaatttcccactgtttttgttttacagtgggcagaattcactttgctctaacttgactccaagatgacacaatttcccagttttttttttaacggctrggggatgggggtatgcggaacagaacacagtggtctagctaaccgatttccgctagacgtccagctatctttcaaaatattttgtttctgcacggcaact

SEQ ID NO: 377354 - DNA, 201 bp, Homo sapiens
atgttggccaggctggtcttgaacttctgacctcaggtaatccgcccgccttggcctcccaaagtgttggaattacaggcgtgagtcaccatgctcggccwtgatttgctttttagaagctcactacaaccctggtctagtcttttatggacacattcatgtttttcagagagctgtgtgatgactttttttgtttttttt

SEQ ID NO: 377355 - DNA, 201 bp, Homo sapiens
aggggtgctgataatagtctctaggatctttgtatctttatgggattggttgtaatgccatctttgtcatttctaattattcttatttggatcatctcttkttttttctttgttaatctagctagtggtctatccattttgtttattctttcagaaaagcaacttttggttttgttgatcctttgtatagatttttgggtc

SEQ ID NO: 377356 - DNA, 201 bp, Homo sapiens
tgatttgctttttagaagctcactacaaccctggtctagtcttttatggacacattcatgtttttcagagagctgtgtgatgactttttttgttttttttkttttttttttttttgagacagggccttgagctgttgcccaggttagagtgcaatggtgtaatcacggctcactgcagccctgaacttctgggatcgggtg

SEQ ID NO: 377357 - DNA, 201 bp, Homo sapiens
accaattattttaaattatgttttgaaattactaaaaatactaaaggactgtttttttttccagctcagaagataaaataacagtccactttataaaccgwgatggtgaaacattaacaaccaaaggaaaagttggtgattctctgctagatgttgtggttgaaaataatctagatattgatggctttggtgagtatgaaa

SEQ ID NO: 377358 - DNA, 201 bp, Homo sapiens
gtggttgaaaataatctagatattgatggctttggtgagtatgaaacatttcttaaaatgcataagtgaaactgttaggtttcaaatttttattttgtggtttttttttttgaagaagtttaacctatagcatgctatgtaaaatattaacattcaggatgtgttagtgttatattcttgtttataaagaataatagagtg

SEQ ID NO: 377359 - DNA, 201 bp, Homo sapiens
tttcctcctaaataccctttttggttaggtgtctccaatattctctaaaattctttaatttttaataaaccgtataggttaaatctcaaaacaaactctaraaaactactcatctgtcttcttatggatttttgaaagattgaaagtttctttttacttttctattttttaaatttttctttgagccctgaccatggcaag

SEQ ID NO: 377360 - DNA, 201 bp, Homo sapiens
ctccatttgcaagttggatataataacagtgtagacctcctatggttaattgaagaatcaatgagttaatacagcgatacaggtagtcttgtgcctagcamgtaatgagggctcagtagatgccacttggtagcagcagcagcagcagcagcagcagcagcagcagcttcttaggttcacaatgttaagagagttttgtat

SEQ ID NO: 377361 - DNA, 201 bp, Homo sapiens
ttagattatcttccctccccaccacatcatttaacatgccgtctgttgttttttgacttaataatatcctttttttttttttttttttgagacgtagtttygctctttttgcccaggctggaatgcaatggcacgatctcggctcattgcaacctctgcctccctggttcaagtgattctcctgccttagcctcctgagta

SEQ ID NO: 377362 - DNA, 201 bp, Homo sapiens
ttcatcaaaattaaaaacttttgttcttccaaagacactgttaagggactgaaaagccaaactacagactgggagaaaatacttgtaaatcacatatccartgaaaggacttgtatcccggctatgtaaaaagctctccaaacttaacagtaagaaaacaacacaattaaaaaaatgggcaaaagatatgaacagacactt

SEQ ID NO: 377363 - DNA, 201 bp, Homo sapiens
gcagtgtacctcagtctgcaatggctgatgtttatgggtgctgaaaattcatctttacccctgccctgccccgctaccttttttttttctgtaggaaaatrtctcaagttttaaattatgtaaagctttcagcactagcatcttttgtataaaaaaagatgattggatttagattatcttccctccccaccacatcattta

SEQ ID NO: 377364 - DNA, 201 bp, Homo sapiens
gttttctaggttgtgtgcataggggtgctgataatagtctctaggatctttgtatctttatgggattggttgtaatgccatctttgtcatttctaattatkcttatttggatcatctcttgttttttctttgttaatctagctagtggtctatccattttgtttattctttcagaaaagcaacttttggttttgttgatcc

SEQ ID NO: 377365 - DNA, 201 bp, Homo sapiens
ttcttctaggacttttgtagctttagatcttacatttaagtctttaatctattttgagttaaattttgtatacagtgataggtaggggtctagtttcattyttctgcatataatagccatcaatcccagcactgtttactgaatagggagttctttcctcattgcttatttttgttgactttgtgaaagatcagattttct

SEQ ID NO: 377366 - DNA, 201 bp, Homo sapiens
gccctctgcccactttttaatgaggttatttgttttttgcttgttgatctgtttaagttccctatagattctggatattagacctttgttggatgcatagwttgtgaatattttttctcattttctagggtgtttactttgttgatagtttctttaatgtgtcgaagctctttaatcaggtcccatttgtcaatttttgtt

SEQ ID NO: 377367 - DNA, 201 bp, Homo sapiens
gaggtcaccaactgcttgcggaattaatagttgatggaaagggagattcaggaattacctgtgagtttacattggatgattgtaattgctccctgccaccrgtttgcatgggtaatctacacagaggcctcagattccttatatgtaaggtgaggataataatagtacctacctcacagtattgctgtgtggagttaatga

SEQ ID NO: 377368 - DNA, 201 bp, Homo sapiens
aaattttatatttttagttttgccgcattgaccaggctggtcttgaattcctgacctcaagtgatctgcctacttcggcctcccaaagtgctgggattacrggcgtgagccaccatgcctgacttctgcccgctttttaatgaagttatttgttttttgcttgttgatctgtttaagttccctattgattctggatattag

SEQ ID NO: 377369 - DNA, 201 bp, Homo sapiens
agcacctcctttcttccccttaacacagaaactaaatccaatgactgtattagtttggttctgagaattgtgtctcttaataagagagttaaatcatagcyaactgcttgctcttttatacagttacaatttgtagatgcctgtaatagataatattctaattgaaaagaaagggaaaagggagagctacagttagataca

SEQ ID NO: 377370 - DNA, 201 bp, Homo sapiens
agttttatatttttataattttatgattattttcaaattttatatttttagttttgccgcattgaccaggctggtcttgaattcctgacctcaagtgatcygcctacttcggcctcccaaagtgctgggattacaggcgtgagccaccatgcctgacttctgcccgctttttaatgaagttatttgttttttgcttgttga

SEQ ID NO: 377371 - DNA, 201 bp, Homo sapiens
gcccagctaatttttgtatttttagtagagatagggtttcaccatgttggccaggctggtctggaactcctgatctcaaatgatctgcccaccttggcctsccaagtactgggattacaggtgtcagccaccatgcctgctctgcccacttccccccaaccccgagacggagcctcactctgttgtccaggttggagtgca

SEQ ID NO: 377372 - DNA, 201 bp, Homo sapiens
caacagcaaaagggaattaaaagttttaggctgaggaagctgctctgtaccctcagtgtggtggtggttacacaagtctatacatacattaaaactcataraactggccaggtgcggtggctcacgcctgtaacctcagcactttgggaggctgaggcaggcagatcacctgaggtcaggagtttgagaccagcctggaca

SEQ ID NO: 377373 - DNA, 201 bp, Homo sapiens
gctctcatggagaacttctgctagggcagtgcagaagggaaatgtggggttggagcccccacacagagtccctattggggcaccgcctagtggagctgtgmgaagagggccactgccctccaaacctcagaatggtagatccactgacagcttgcatgatatgcctggaaaagccacagacactcaatgccagcccatgaa

SEQ ID NO: 377374 - DNA, 201 bp, Homo sapiens
tgtcacccaggctggagtgcagtggcgcagtctgggctcactgcaaccttcgcctcccaagttcaagcgattctcctgcctcagtctcctgagtagctggrattataaaggtgtgccaccacggctagcaaatttttatatttttagtagttttatatttttataattttatgattattttcaaattttatatttttagtt

SEQ ID NO: 377375 - DNA, 201 bp, Homo sapiens
ccaccctgggtgactgagcaagactgtctcaaaaaaaaaagaaaatatatgtgtgtgtgtgtgtgtgtatatatatatatacgtatatatatatatatatacacgtatatatatatatatacgtatatatatatatatacgtatatatatatatatatatacacgtatatatatatatatatatttgcagaacaacctctg

SEQ ID NO: 377376 - DNA, 201 bp, Homo sapiens
ttgacacaaagtctcactgtcacccaggctggagtgcagtggcgcagtctgggctcactgcaaccttcgcctcccaagttcaagcgattctcctgcctcaktctcctgagtagctggaattataaaggtgtgccaccacggctagcaaatttttatatttttagtagttttatatttttataattttatgattattttcaa

SEQ ID NO: 377377 - DNA, 201 bp, Homo sapiens
cctagtggaaggacctggggatgctcagctgggagaaggaagaatgatctcaaataaatgaaaagctatcctttagaaggattaaactccatgggatagcrttggaccagtaggtgctagttacagagtggcagactttagcttggtagaagccagccgaatgcaaaattggctgacttatgtggtgtcggtttctttgtc

SEQ ID NO: 377378 - DNA, 201 bp, Homo sapiens
caccctgggtgactgagcaagactgtctcaaaaaaaaaagaaaatatatgtgtgtgtgtgtgtgtgtatatatatatatacgtatatatatatatatatacacgtatatatatatatatacgtatatatatatatatacgtatatatatatatatatatacacgtatatatatatatatatatttgcagaacaacctctga

SEQ ID NO: 377379 - DNA, 201 bp, Homo sapiens
tactgggattgcttggttgaatggtagttccatttttagttctttgagaaatctccaaactgctttccacagcagcttaactaatttacattcccaccagsactgtcttaagtgtttccttttctccgcagccttgccaacatctgtaattttttgactttttaatgatattctttatgactggtgcaagatggtatctca

SEQ ID NO: 377380 - DNA, 201 bp, Homo sapiens
cctgttttcttcatgtgtctgttttgagggaaattatacaaattggaagatcctgattgtgtttgtataagtttatttgtattcccctcatgcttgagtcyctattgatataatgtatttctgactatgctagatcaatctttaatctagaaaattagattttatatttacacataatttccatttctaatatataatatt

SEQ ID NO: 377381 - DNA, 201 bp, Homo sapiens
gtactccaaacatggctgaccgaagtacttagtttctttacagtttctccctgggtgatctcatccgttctgtgaccttaaatcctttctagatattgatraactcttaaatttacatccttagctcagacctctcctctgagccctgatttacagatctaacttcttgctttacatcacttcttggaaatctaacatatt

SEQ ID NO: 377382 - DNA, 201 bp, Homo sapiens
cagggagtacatgtgcaggtttgttaaatggatgtatcatgtgatgctgaagtctggagtatgagtgatcctgtcacctaggcagtaggcttagaaaccartaggtagttttcctccttgcccctctcccttccccctctggtagtgcccagtatctactgttcccaactttatgtccatgggacccagtatttagcttgc

SEQ ID NO: 377383 - DNA, 201 bp, Homo sapiens
actaaaaatacaaaaaaaaaaaaaaaaaaaaaaaaaaaaacccagctgggcatggtggtgcatgcctgtaatcccagctacttgggaggctgaggcaggaraattcctcgaaccagggagtcggaggttgcagtgagccgagattgcaccactgtactccagtctggcagcaaagtgagactccttcaaacaaacaaacaa

SEQ ID NO: 377384 - DNA, 201 bp, Homo sapiens
tgtctgtgtcttcttttgagaggtgtctgttcatgtctttttattttccaacttttatttagattcagggagtacatgtgcaggtttgttaaatggatgtwtcatgtgatgctgaagtctggagtatgagtgatcctgtcacctaggcagtaggcttagaaaccaataggtagttttcctccttgcccctctcccttcccc

SEQ ID NO: 377385 - DNA, 201 bp, Homo sapiens
tagttgttgtttgttacttttatatcctttattcttttatagttttataggttatcttccactgtttattttgtagggttctctgtgtatatgaaaagccaaaaaaaaaaaagctccccattttgtgaatagcttttgtttccataatctattttcaggtcagctgcttgttatttggaatttgttttcccataaaaaata

SEQ ID NO: 377386 - DNA, 201 bp, Homo sapiens
ttttttttcctcctaaataccctttttggttaggtgtctccaatattctctaaaattctttaatttttaataaaccgtataggttaaatctcaaaacaaactctagaaaactactcatctgtcttcttatggatttttgaaagattgaaagtttctttttacttttctattttttaaatttttctttgagccctgaccatg

SEQ ID NO: 377387 - DNA, 201 bp, Homo sapiens
tttttttcctcctaaataccctttttggttaggtgtctccaatattctctaaaattctttaatttttaataaaccgtataggttaaatctcaaaacaaactctagaaaactactcatctgtcttcttatggatttttgaaagattgaaagtttctttttacttttctattttttaaatttttctttgagccctgaccatgg

SEQ ID NO: 377388 - DNA, 201 bp, Homo sapiens
ggcagtgtacctcagtctgcaatggctgatgtttatgggtgctgaaaattcatctttacccctgccctgccccgctaccttttttttttctgtaggaaaatgtctcaagttttaaattatgtaaagctttcagcactagcatcttttgtataaaaaaagatgattggatttagattatcttccctccccaccacatcattt

SEQ ID NO: 377389 - DNA, 201 bp, Homo sapiens
caggcagtagttttttgcagggcagggctctcatggagaacttctgctagggcagtgcagaagggaaatgtggggttggagcccccacacagagtccctaytggggcaccgcctagtggagctgtgcgaagagggccactgccctccaaacctcagaatggtagatccactgacagcttgcatgatatgcctggaaaagcc

SEQ ID NO: 377390 - DNA, 201 bp, Homo sapiens
ggccaatgtagagctagggccgtggcttcagagtgtgcaaacctcaagccttggcagcttccatgtggtattgagcctgctagtgtacagaagtcaagaaytggggcttgggaacctccgcctagatttcagaggatgtatggaaatgcctagatgttccaggcagtagttttttgcagggcagggctctcatggagaact

SEQ ID NO: 377391 - DNA, 201 bp, Homo sapiens
ctccaagatttagaactggaaatacaatttgacccagcaatctcattactgggtatatacccaaaggaatataaatcattctgttataaaaatacgtgcaygtatatgttcattgtagcactattcacaatagcaaagacatagaatcaacccaaatgccaatcaatgataggctggataaagaaaatgtacatatacacc

SEQ ID NO: 377392 - DNA, 201 bp, Homo sapiens
aaagctttcagcactagcatcttttgtataaaaaaagatgattggatttagattatcttccctccccaccacatcatttaacatgccgtctgttgtttttkgacttaataatatcctttttttttttttttttttgagacgtagttttgctctttttgcccaggctggaatgcaatggcacgatctcggctcattgcaacc

SEQ ID NO: 377393 - DNA, 201 bp, Homo sapiens
ataaacaatattactggaaaccatccttcacagtggcacaaaaagcttactcttgatgtgctatttgtcccaaatataatccaggaaaacccctccatggrgcccagggtcattttccccttccggccagaccttttgaggtgtggcagcatgattttatccagctgccatcatctgaaggttatcagtgttttagtaatg

SEQ ID NO: 377394 - DNA, 201 bp, Homo sapiens
tttgcacataggataaaatctgtattcccagccgtaaaaggctctgcattatctggccccatctgccactcttcctcttttttgtttttttctcattgttytttgtctcactttggtgatactggccttttctcaagagcttgaactcacccaaaattcctacctttgagactttgtatatactttaccctctccctgaga

SEQ ID NO: 377395 - DNA, 201 bp, Homo sapiens
ggtgattagtgatgttgaacatttttccgtatgtttgttggccgcttttatgtctgtgtcttcttttgagaggtgtctgttcatgtctttttattttccarcttttatttagattcagggagtacatgtgcaggtttgttaaatggatgtatcatgtgatgctgaagtctggagtatgagtgatcctgtcacctaggcagt

SEQ ID NO: 377396 - DNA, 201 bp, Homo sapiens
gagaccatcctggccaacataatgaaaccccgtctctactaaaaatacaaaaaaaaaaaaaaaaaaaaaaaaaaaaacccagctgggcatggtggtgcatkcctgtaatcccagctacttgggaggctgaggcaggagaattcctcgaaccagggagtcggaggttgcagtgagccgagattgcaccactgtactccagtc

SEQ ID NO: 377397 - DNA, 201 bp, Homo sapiens
tgaactcctgggctcaagagatcttcctgccttggcctcccaaagtgctggcattacaggcgtgagccaccatgcccagccttgaatactgaatctaagtwttttttgctagttttaaaataattataacaactagaatttgagtgtatactatattctagcatatgttaaatgaagtagattttttttttaactctccat

SEQ ID NO: 377398 - DNA, 201 bp, Homo sapiens
gagattgcaccattgcactccagcctgggttacagactaagactccatcttggaaaaaaaaaaaaaaaaccgagatgggcggatcacgaggtcaagagatygagaccatcctggccaacataatgaaaccccgtctctactaaaaatacaaaaaaaaaaaaaaaaaaaaaaaaaaaaacccagctgggcatggtggtgcat

SEQ ID NO: 377399 - DNA, 201 bp, Homo sapiens
tgccttaactacacgtgcaaagcctgtgttcctgcaactgcccttttacacttcctcaggcgtaccctgtatatgacctgtcagttttgttcaagcaatgyatgtttagattagcagttctcagagggtttccttgaccgttagcattagtgtcacctgggaaatgcagattctcagacactcctcccccacccaccgccc

SEQ ID NO: 377400 - DNA, 201 bp, Homo sapiens; identical to SEQ ID NO: 81503

SEQ ID NO: 377401 - DNA, 201 bp, Homo sapiens
gaataatagagtgacaccattgttctgttctttgtacatttaaataagtcatggccagaaatctgctgtggcctcattaccttactgtttatatgtgtgayacaaagccgacggtagggagtagagttaaaagataccaggttagagagaataaatgtcatagcacagaggggtacttaaatatcttgaatgtcagctcac

SEQ ID NO: 377402 - DNA, 201 bp, Homo sapiens; identical to SEQ ID NO: 81504

SEQ ID NO: 377403 - DNA, 201 bp, Homo sapiens; identical to SEQ ID NO: 81505

SEQ ID NO: 377404 - DNA, 201 bp, Homo sapiens; identical to SEQ ID NO: 81506

SEQ ID NO: 377405 - DNA, 201 bp, Homo sapiens
tggtgattctctgctagatgttgtggttgaaaataatctagatattgatggctttggtgagtatgaaacatttcttaaaatgcataagtgaaactgttagktttcaaatttttattttgtggtttttttttttgaagaagtttaacctatagcatgctatgtaaaatattaacattcaggatgtgttagtgttatattctt

SEQ ID NO: 377406 - DNA, 201 bp, Homo sapiens; identical to SEQ ID NO: 81507

SEQ ID NO: 377407 - DNA, 201 bp, Homo sapiens
tgggtagatatatatgcctttgatttccaaataagctttggaaagaaaagaaaataccttcggctaggcatggtggctcaggcctgtaatctcagagtttyaggaggccaagttgagaagatggcttgaggccaggaatttgagaccagcttgagcaacatggtggcaccccgtcactacaaaaaataaaaataaaaaaaa

SEQ ID NO: 377408 - DNA, 201 bp, Homo sapiens
aacttactgtaatgcctaggcacttaagtattatttctaaccttcagggttaggcagtactatcaccatgttgtaggtggggaaacaaggtttagttatcrcggatttgcttaaggctgcacagctagtgggtaacacccctgatttaaatccagctgtgttgggccccaaagcctttagtcttttactatttcaagctgc

SEQ ID NO: 377409 - DNA, 201 bp, Homo sapiens
ttcaggaattacctgtgagtttacattggatgattgtaattgctccctgccaccagtttgcatgggtaatctacacagaggcctcagattccttatatgtraggtgaggataataatagtacctacctcacagtattgctgtgtggagttaatgaggaaatatatgtgaagctctcagaacagtgcttggtggagaaagca

SEQ ID NO: 377410 - DNA, 201 bp, Homo sapiens
tttttgttttacagtgggcagaattcactttgctctaacttgactccaagatgacacaatttcccagttttttttttaacggctaggggatgggggtatgyggaacagaacacagtggtctagctaaccgatttccgctagacgtccagctatctttcaaaatattttgtttctgcacggcaacttcagccgctaaaaaag

SEQ ID NO: 377411 - DNA, 201 bp, Homo sapiens
agatcttcatggcagcccctcccatcacaggcctggaagcctaggaggaaaaagtggttttgtgggctgggcccagggcccccttgctgtgtacagcctarggacttggtgctctgtgtcccagctgtcccagctgtggctgaaaggggccaatgtagagctagggccgtggcttcagagtgtgcaaacctcaagccttgg

SEQ ID NO: 377412 - DNA, 201 bp, Homo sapiens
gaaaatgtctccagggcatgtcagagatcttcatggcagcccctcccatcacaggcctggaagcctaggaggaaaaagtggttttgtgggctgggcccagsgcccccttgctgtgtacagcctagggacttggtgctctgtgtcccagctgtcccagctgtggctgaaaggggccaatgtagagctagggccgtggcttca

SEQ ID NO: 377413 - DNA, 201 bp, Homo sapiens
ttcaagaggtgacttgggtgctgttaaaggcattcagttttaaaaggaaacagcataaaaaagtttggaaaatttgcagcctgacaatgtgatagaaaagraaaccccattttctggggaaaaattcaagctggctgcagaaatttgggtaaggaatgaggagctgaaagttaatccctgagatactggggaaaatgtctc

SEQ ID NO: 377414 - DNA, 201 bp, Homo sapiens
attatgtaaagctttcagcactagcatcttttgtataaaaaaagatgattggatttagattatcttccctccccaccacatcatttaacatgccgtctgtkgttttttgacttaataatatcctttttttttttttttttttgagacgtagttttgctctttttgcccaggctggaatgcaatggcacgatctcggctcat

SEQ ID NO: 377415 - DNA, 201 bp, Homo sapiens
ccctgccccgctaccttttttttttctgtaggaaaatgtctcaagttttaaattatgtaaagctttcagcactagcatcttttgtataaaaaaagatgatkggatttagattatcttccctccccaccacatcatttaacatgccgtctgttgttttttgacttaataatatcctttttttttttttttttttgagacgta

SEQ ID NO: 377416 - DNA, 201 bp, Homo sapiens
aattcatctttacccctgccctgccccgctaccttttttttttctgtaggaaaatgtctcaagttttaaattatgtaaagctttcagcactagcatctttkgtataaaaaaagatgattggatttagattatcttccctccccaccacatcatttaacatgccgtctgttgttttttgacttaataatatccttttttttt

SEQ ID NO: 377417 - DNA, 201 bp, Homo sapiens
ccgcttctgctgtcctcggcggcccggccggccggtggctgcaccacgctgggtcccgcgctggatccagcggcctgctgaggaaccgggggccgggcggkagcgcggaggcgagccggtcgctgagcgtgtcggcgcgggcccggagcaggtagggcgccgtgcgggcgcgatcgccggcgcgggccggggtccccggtg

SEQ ID NO: 377418 - DNA, 201 bp, Homo sapiens
tagacctcctatggttaattgaagaatcaatgagttaatacagcgatacaggtagtcttgtgcctagcacgtaatgagggctcagtagatgccacttggtagcagcagcagcagcagcagcagcagcagcagcagcttcttaggttcacaatgttaagagagttttgtattaaatattgaaagaaatgtgacaatttatcc

SEQ ID NO: 377419 - DNA, 201 bp, Homo sapiens
ggaattctttctaatgtgcttcctgtagctttagctaccaggcattcgttgatgtcaaatctctagacttctctgctgggctcagacccatacccatattkccatctggtgtttggacattctcatctggctttttcattattaaattcagcaggtctaagcttcaacttatttctgtcttccccaaagttcctttggttc

SEQ ID NO: 377420 - DNA, 201 bp, Homo sapiens
agacctcctatggttaattgaagaatcaatgagttaatacagcgatacaggtagtcttgtgcctagcacgtaatgagggctcagtagatgccacttggtagcagcagcagcagcagcagcagcagcagcagcagcttcttaggttcacaatgttaagagagttttgtattaaatattgaaagaaatgtgacaatttatccc

SEQ ID NO: 377421 - DNA, 201 bp, Homo sapiens
caaaagggcttggtctttaaataacagttattaatcagtgtgtgttgaattctactatgtgttacgtattttgcatacattgtcagaactataagattaaygttgtccaattttatagaagaggaggctgatgtaagagatttcgaattcctttgctgtaagcttagctctagagtgcttcagaagaacagcaacgctgaa

SEQ ID NO: 377422 - DNA, 201 bp, Homo sapiens
gacctcctatggttaattgaagaatcaatgagttaatacagcgatacaggtagtcttgtgcctagcacgtaatgagggctcagtagatgccacttggtagcagcagcagcagcagcagcagcagcagcagcagcttcttaggttcacaatgttaagagagttttgtattaaatattgaaagaaatgtgacaatttatccca

SEQ ID NO: 377423 - DNA, 201 bp, Homo sapiens
caattctatgaggtagggagggtagataaatgggaataaaaatttcatattaagtagctggcaaaactaggactagaactcaagaagtttttgcggatttwaaaaaaattttaaatttctatttatttttaaaatttcagtagttttgggggcacaggtggtgtttggttaatgggttagttctttagtggtgattttgga

SEQ ID NO: 377424 - DNA, 201 bp, Homo sapiens
cttaagacaattctatgaggtagggagggtagataaatgggaataaaaatttcatattaagtagctggcaaaactaggactagaactcaagaagtttttgyggattttaaaaaaattttaaatttctatttatttttaaaatttcagtagttttgggggcacaggtggtgtttggttaatgggttagttctttagtggtga

SEQ ID NO: 377425 - DNA, 201 bp, Homo sapiens
tattggcacaatttctattcatggtcttatcattcctcttacagactttggagctacaactggattttccagttcttactgtgttaatgagacttgtgctrtaactaccgtaactactaatcacatgtggctattgaagtttaacataattaaaggtaaataaaattaaagattcaatctcgtagttacactagccacatt

SEQ ID NO: 377426 - DNA, 201 bp, Homo sapiens
tttatttgttcctgtttcctctgcacttccccccctgtctttgaccagtgtgggtaccttgctttctgttatacaatggatgagttttggacaactgaatmaattgggacagatattgaacatgcttgtgtaactggtataagggaacatgaatgtttttgtagtaattgggagttatctttctcagatttgttttttgga

SEQ ID NO: 377427 - DNA, 201 bp, Homo sapiens
ggctgcagggtgagcagcgtgggctgcagtgtgtcagtcccaggagtgagggagtggcaagcaccacagattaccacgtatgtgtggaagacattcgtacycttatctttactataaataaattcataaaagttaacaaaggggtacacagtatggtctttggaaatataataaaacatcaactaacttggactaattgtg

SEQ ID NO: 377428 - DNA, 201 bp, Homo sapiens
atttgcaagttggatataataacagtgtagacctcctatggttaattgaagaatcaatgagttaatacagcgatacaggtagtcttgtgcctagcacgtartgagggctcagtagatgccacttggtagcagcagcagcagcagcagcagcagcagcagcagcttcttaggttcacaatgttaagagagttttgtattaaa

SEQ ID NO: 377429 - DNA, 201 bp, Homo sapiens
aacggctaggggatgggggtatgcggaacagaacacagtggtctagctaaccgatttccgctagacgtccagctatctttcaaaatattttgtttctgcayggcaacttcagccgctaaaaaagcatccagcttacaacggaacctggagggttggtaaaggccccctgcgctggccccgccccatgggaccgggcggcgt

SEQ ID NO: 377430 - DNA, 201 bp, Homo sapiens; identical to SEQ ID NO: 81511

SEQ ID NO: 377431 - DNA, 201 bp, Homo sapiens
tgaagctaagtattgaagacattatatggcctatagaggccttaatgaattacaccaaaaaggccctaaatgatagccagatgagtatcccgttgctaaayaatgaggtcatgcttttgaggaaagctgtgttgcaaaaccatatggcctcagatatactcacagcagcacagcggggggcctgcaccatcataaaagctg

SEQ ID NO: 377432 - DNA, 201 bp, Homo sapiens; identical to SEQ ID NO: 81512

SEQ ID NO: 377433 - DNA, 201 bp, Homo sapiens; identical to SEQ ID NO: 81513

SEQ ID NO: 377434 - DNA, 201 bp, Homo sapiens
atccagctgccatcatctgaaggttatcagtgttttagtaatggtctgcatgttttcctattgggttgaagcttttccctgcaggcaagcaacagccacgkcagttggaaaaatcctactaaaaaaaatgactccactatggggagtcccctgtgaacttcgcagtgataggggaactcactttactggccagatttttca

SEQ ID NO: 377435 - DNA, 201 bp, Homo sapiens
tgttaactatctgaatgtgtctcatctcatccctttgattgaaagtttactcattaatgctggcattagcaaccaatcctcacagcagtcctgtgaggaaktctcctgctcatcttgaagattaggttaggaaactaccatttggtgaggttaagcaagttgcctgtgaacatggtatattaagtgctggattctgcactg

SEQ ID NO: 377436 - DNA, 201 bp, Homo sapiens
tctccatttgcaagttggatataataacagtgtagacctcctatggttaattgaagaatcaatgagttaatacagcgatacaggtagtcttgtgcctagcmcgtaatgagggctcagtagatgccacttggtagcagcagcagcagcagcagcagcagcagcagcagcttcttaggttcacaatgttaagagagttttgta

SEQ ID NO: 377437 - DNA, 201 bp, Homo sapiens
tgggttgaagcttttccctgcaggcaagcaacagccacgtcagttggaaaaatcctactaaaaaaaatgactccactatggggagtcccctgtgaacttcrcagtgataggggaactcactttactggccagatttttcaaaatatttgtacagtttggccatatttcaacattttcagggtgcctaccatccccagtcct

SEQ ID NO: 377438 - DNA, 201 bp, Homo sapiens
aagcagcaaatcattcaagaggtgacttgggtgctgttaaaggcattcagttttaaaaggaaacagcataaaaaagtttggaaaatttgcagcctgacaaygtgatagaaaagaaaaccccattttctggggaaaaattcaagctggctgcagaaatttgggtaaggaatgaggagctgaaagttaatccctgagatactg

SEQ ID NO: 377439 - DNA, 201 bp, Homo sapiens
attggaacagtttggagggctcaggagaagataggaaaatatgggaaagtttggaactccctagagacttgtggaatggctttggccaaaatgctgataaygatatggacaatgaaattcaggctgaggtggtctcagatggagacgaggaacttgttgggaattggagtaaaggtgactcttgctatgttttagcaaaga

SEQ ID NO: 377440 - DNA, 201 bp, Homo sapiens
agggataatattaatatctacctcataaagttgctgtaaagatcaaatgagtaaatccaagcaagtcctaaataaatattagctaatattgttaacatagrtattaatacagattcattgttcattatagcaaattttaaaaatacatttaaaaagaatttaacacttcatatcatcacacagagataagcactgaaataa

SEQ ID NO: 377441 - DNA, 201 bp, Homo sapiens
aaatgtttatttagctattttacaagtatatatgtactgggtcatgatgtaaaatgaaattcgtactgtgagtcacagttaaataaagttttttctgaaartcattggttggaatggaagaatgtcctgcctgggcttctttcccagctgtatccctttttcagctttgtgaccttgggttgggtatctaacctactcata

SEQ ID NO: 377442 - DNA, 201 bp, Homo sapiens
ctcccatccccaaaatttagcttttcatctatcaaatctcaatttatgtacttccttagcgaggctttgcccagccacccagtccaaagtagtggttctcytgttaccctgaacccattattctctttctcagcatcttgttcacttgttttatagtatttgtcacagtttagtaattatgtatttcttgtgtatctttcc

SEQ ID NO: 377443 - DNA, 201 bp, Homo sapiens
aacccattattctctttctcagcatcttgttcacttgttttatagtatttgtcacagtttagtaattatgtatttcttgtgtatctttcccaatagactgygatgagggataaagtcattcctgtttaattcctcattgtatacgaaatgaagtaataagtgaacacatgaataaaaagggacagtcataaattttggaaa

SEQ ID NO: 377444 - DNA, 201 bp, Homo sapiens
atgctgttttgataacctccaaagtggcctccctgcctctagggtattttcattctcagccattgtactttgaaaaaaatggcagttattcatgttgaaarttatgaataatatgtgggaatactagttttaaagcatgttttggctgtgaaaagaagttggagagcgcaggcccttttgaggaacattctggtacacaca

SEQ ID NO: 377445 - DNA, 201 bp, Homo sapiens
ttgaaaattatgaataatatgtgggaatactagttttaaagcatgttttggctgtgaaaagaagttggagagcgcaggcccttttgaggaacattctggtacacacacacacacccttttgatgagttttaatgaatagaatcctgttttttttcccagtgttataatattagggagggcattatcccagtggggcttcag

SEQ ID NO: 377446 - DNA, 201 bp, Homo sapiens
tgaaaattatgaataatatgtgggaatactagttttaaagcatgttttggctgtgaaaagaagttggagagcgcaggcccttttgaggaacattctggtacacacacacacacccttttgatgagttttaatgaatagaatcctgttttttttcccagtgttataatattagggagggcattatcccagtggggcttcagt

SEQ ID NO: 377447 - DNA, 201 bp, Homo sapiens
cctgttttttttcccagtgttataatattagggagggcattatcccagtggggcttcagttgcctcatttgtgaaatgggatcactggacttgataacttycgagatagttatggctctgaaattatttaattctgagttttacttaaagatttgtttgatgggctattgccatctactggtagtaataagaataacaact

SEQ ID NO: 377448 - DNA, 201 bp, Homo sapiens
tttgccaatccaatgtctagaagagtatttccttgattgtcttttttatagtttgaggtcttaaatttaaatctttgatccattttgggttaatttttgtrtatggtgaaaggtagggagtccaagttcagacttctgcctatggctagccaggcatcccagcaccattattgaatacggagtctcttaaaaagagtaagt

SEQ ID NO: 377449 - DNA, 201 bp, Homo sapiens
tgtagctgtgacatgaccattacctgacagtgtagcagtgattgtaagattccattgattttaagatgcttcttgatttccagagatggtaaaaatttgaraaaaaatatgctcttataattgatgacttaagtctatgtatttattccagatttcttcttttaaaggctttaaaaagtgtagctttcttttatagtctgt

SEQ ID NO: 377450 - DNA, 201 bp, Homo sapiens
cccagcctgaaagccccaaattctctcctcctctacactttctggtcatctggccctgaccagcagcccttgccaacctgactggactgcactctgtatgkggtgggggtgaggagataatgaagatggagtttagaggtttatgggcgtcaaatgtcagggctgcggatcaaaacttattttccaaagggagtggaatca

SEQ ID NO: 377451 - DNA, 201 bp, Homo sapiens
gaggcagaggttgcagtgagcgaagatcgcgccattgcactccagcctgggcaacagagtgagactctgtctcaaaaaaacaaacaaacaacaacaacaamaaaaaccctcatctctatttatttattgggcactcaataattgttgaatgaataaatgcatgagagagaagatctcaggatgaaagaatggtaggagaga

SEQ ID NO: 377452 - DNA, 201 bp, Homo sapiens
ccaccatgtcacagtggtgggaggtcattccctcattctcttccctccaggctcagcacgcagggggtgtcataaccgaagaggacttcagcaattacagygcccttgtggagaagcctgtgtgtggcgtgtacagaggtgacctctcccccggctcccagggtcccccctcaggagaagcctcccagtccatggccacat

SEQ ID NO: 377453 - DNA, 201 bp, Homo sapiens
ccactatacaaagaattggtgcagagctttgtaggtcaggggagcaagtacaaagaactcagggcaggagtgggtttggtgagtttgaggactaaaaaggwgaccaaggtaagcaaggatgaaattagatcagagaggcaggcaggcgccggatcgtggaccttagggtgaggagacggactttcctctaagaaaagggct

SEQ ID NO: 377454 - DNA, 201 bp, Homo sapiens
tggggtgacagagccacaccctgtctcaaacaacaacaataacacacagaacagatggtttcacattcttgcttaaaactctctagtagtgggctgggtgyggtggctcacacctgtaatcccagcactttgggaggctgaggcaggtagatcacctggggtcaggagttcgagaccagcctggccaatatgctgaaaccc

SEQ ID NO: 377455 - DNA, 201 bp, Homo sapiens
aaattagccgggcgtggtggcgcgtgcctgtagtcccagctagtcaggaggctgaggcaggagaatcacttgaacccgggaagcagaggttgcagtgagcygagatcatgccactgcactccagcctgggtgacagagtgagactttgtctccaaaaacaaacaaacaaacagtctccaagcaaatactgaaggtggtggt

SEQ ID NO: 377456 - DNA, 201 bp, Homo sapiens
gtctctacaaaaaatgctttgaaattagccaggcacagtagcatgcaccaaggatcgcttgacttgagcccaggagttggaggccacagtgagctatgacyatgccactgtactccagcctgggtaacaggaaaaaaaaaaaaaaaaaaaaaaaaaggcaggggttggtgaaatccaatgtagacaggtgtctttctacac

SEQ ID NO: 377457 - DNA, 201 bp, Homo sapiens
gaggcaggaggatcatctgagcctgggaaggttgaggctacagtgagccatgatcgtgccactgcattccagcctgggcgacagaatgagaccctgcctcaaaaaaaaaaaaaaaaaaaatcaatgtgtaattctctgaagatagataactcaagggtttcaagtactataaggtacaaaaaaggaaaggattcagagtgg

SEQ ID NO: 377458 - DNA, 201 bp, Homo sapiens
ccaggcctcaatctccaacctgattcctctgccagaggcagtggaatatgaagcaatggaaagagcctatcagctgggtgcagtggctcaggcctataacyccagcacattgggaggctgaggcaggaggatcacttgagcccaggagttcatgaccagcctgggcaacatagtgagacaccgtctctataaaaaatttaa

SEQ ID NO: 377459 - DNA, 201 bp, Homo sapiens
agaatcacttgaacctgggaggcagaggttgcagtgagctgagacagcgtcactgcactccagcctgtgtgacagagaaaaactctatctcattaggaagaaaaaaaaaatcctcatatacaaaatcctcccccaactaaactcttaataaaactttagactacaaacattagtttaaatgaatccagtttgttaattcaa

SEQ ID NO: 377460 - DNA, 201 bp, Homo sapiens; identical to SEQ ID NO: 81515

SEQ ID NO: 377461 - DNA, 201 bp, Homo sapiens
aatcctaagtcaatttcagctcaaccccaactcacaacgtgacactgggtgcctctccctgcacctcacctttcctatcagcacaatgagttggcttactkcatgtggctcttaaatttttttgaggctagcatagcacctatataagcccatctgctcctccttttgagtaggaaaagaaagctcaataccaaacaaaag

SEQ ID NO: 377462 - DNA, 201 bp, Homo sapiens
tttttagcctaaatgtattttattatttttttgagatagagtctcactctgtcgcccaggctggagtgcagtggtgcgatctcagctcacttcaacctccrcctcctgggttcaagtgattctcgtgcctcagcctcccgagtagctgagaatacaggtgcacatgccaccacacccagctaatttttgcatttttgtaga

SEQ ID NO: 377463 - DNA, 201 bp, Homo sapiens
ttcagccgggagccaagctgtggcctagactgcagatgcctgtcatatctgtggcttgtttccattcctcatgcggcaaacatgggctgaggctgttttgygccaggcgcatcctgggcaatgtggacatgggctgcgctgagtttcttagtgaaaatggagccctgatgctccctgtctttcccggttgcaggggaaatg

SEQ ID NO: 377464 - DNA, 201 bp, Homo sapiens
ggagaggatgctagggactgcagtagaagggattgggcttaccttctgggaagaaccaactaacgatgaaggaatgttgaaggggagatcctaaggaaccrctgtgatcacccagaagagggctttctctagccacagaggacaggataggagaaaccaagtcagagactgcagcaagagggatccaatctgtgccttaag

SEQ ID NO: 377465 - DNA, 201 bp, Homo sapiens
gggagaccccgacaccggtgaggcccgctgaccccgtccctgccctgccttgggaagtccccggtcttccttcttctgtgtcaagcatccacctccagctscatctccttaattcatccccatcttcttggatctctcccttcttctcccttgtctctgttaattatttggtgaggaagggggtgcatttctgccttggag

SEQ ID NO: 377466 - DNA, 201 bp, Homo sapiens
ccagggaagcggccactctctttcctgctgcccacagtggtccgacccgcggaggggctctgtggaacctacctcgctctgggggccaatggagctgcgcrgggcctcagcggcctgacacaggtgaggtttacgccatggttggcctttttcagccgggagccaagctgtggcctagactgcagatgcctgtcatatctg

SEQ ID NO: 377467 - DNA, 201 bp, Homo sapiens
agcagactgggagatcccgtctatgattctaccatcactgagagcatggatgacatgctcaggtgggtcttgggcaggacctgggggctacagaggcagcrgtgggtgtggggaaagggtcaggagaaaagcagctggtatagcaataaaggcctgaaatcctaagtcaatttcagctcaaccccaactcacaacgtgaca

SEQ ID NO: 377468 - DNA, 201 bp, Homo sapiens
cccctcccggctgtcgcgaagatcaggccccgccctccgccctcccactcccccgccgcagccacttccggcaggcgctgcgctgctggggggcgcgggcraggatggcggcggagaacgaggccagccaggagagcgccctgggcgcctactcgccagtggactacatgagcatcaccagcttcccgcggctgcccgagg

SEQ ID NO: 377469 - DNA, 201 bp, Homo sapiens
tctgctgatagcctgcagtgtgactctgggcaagccacagccctcttgagccttagttttctcaaatggcagaggaaactgaagaccagtgttctgagttsaagtcctggccctgcccttgacttgccatgtgaacttgaatgagtctctttgcctctcaatgtttcagtttccccatctggtgagggagttcagcgcagt

SEQ ID NO: 377470 - DNA, 201 bp, Homo sapiens
gatgtgtcatgatggatatcagcctgaagctaggccttttattcagtagtcaggagtgagacttctggtcctaatacagccctgactcaccaagcgacaayaggcacacctaccctgtcctgggccttagtttcctcttccagctcaacagagaatgcctgtctctcttgacctagagattggaactgcctgacatgtttt

SEQ ID NO: 377471 - DNA, 201 bp, Homo sapiens
tctctccttgggtggccttctcctacttccctggattcttcctttcccaactccccctcctaatatccccttcccttgccaggactctccttcccaggaayccccctccccccggacccctcctcattcccccaggacctcctccaccccctgctctccggcccccccaggctgccatggtcccaagtcctggcctttgca

SEQ ID NO: 377472 - DNA, 201 bp, Homo sapiens
taacctctagtgacagaaatcagatcagtggttggtggggctgggaggagctgactgggatatgacatgaaaaacctcctgggatgatggaagtgttgtcttttttttttttttatgagacggagtcctgctgtgtcaccctggctggagtgcagtggtgcgatcttggctcactgcaacctccgcctcccaggttcaagt

SEQ ID NO: 377473 - DNA, 201 bp, Homo sapiens
ccatctaaaccaatatgtacataacatgtctctctaaatgaacttcctttttagcctaaatgtattttattatttttttgagatagagtctcactctgtcrcccaggctggagtgcagtggtgcgatctcagctcacttcaacctccgcctcctgggttcaagtgattctcgtgcctcagcctcccgagtagctgagaata

SEQ ID NO: 377474 - DNA, 201 bp, Homo sapiens
gggaggatggcttgagcctgggaggcagaggttgcagggaggcagaggtttcagtgagctgagatggtgccactgcactccagctggggtgacagagccasaccctgtctcaaacaacaacaataacacacagaacagatggtttcacattcttgcttaaaactctctagtagtgggctgggtgcggtggctcacacctgt

SEQ ID NO: 377475 - DNA, 201 bp, Homo sapiens
gcggtttcaccatgttggccaggctggtctcaaactcctgacctttgatctgtccaccttggccttccaaagtgctgggattacaggcgtgagccaccgcrcctggccaattctcaagaatcccctactaattccttgtaccatcttgtaataaagaagcagatccttggaccctgtgattctaattcagtatgtttgagc

SEQ ID NO: 377476 - DNA, 201 bp, Homo sapiens
gtagtgtgatctcagctcactgcaacctctgcctcctgggttcaagggattctcgtgcctcagcctccccagtagctgggattacaggcacacaccaccamacccagctaatttttgtatttttagtagagacgcggtttcaccatgttggccaggctggtctcaaactcctgacctttgatctgtccaccttggccttcc

SEQ ID NO: 377477 - DNA, 201 bp, Homo sapiens
tgattccactccctttggaaaataagttttgatccgcagccctgacatttgacgcccataaacctctaaactccatcttcattatctcctcacccccaccmcatacagagtgcagtccagtcaggttggcaagggctgctggtcagggccagatgaccagaaagtgtagaggaggagagaatttggggctttcaggctggg

SEQ ID NO: 377478 - DNA, 201 bp, Homo sapiens
cttcaaccccaccccatttcactttcccaagagcaagttagtaacagggacagggcttacatccaggccttctgactcagcctagaattccatccattccrtcgatctgctgccaaagaatgttactgattgggcaataattatttacttggtgtgtgggcaccactgttttttaaatgagtgttttcatttgtatcaaac

SEQ ID NO: 377479 - DNA, 201 bp, Homo sapiens
tccaatcagctcattggtatttggggctactcagcatagagggtagagactgcctgccttttctctcctggtcccacctcagctgaccctctgtcagctcraatcagctggaagagccagagttaagaggcctactcaggaagggccctatggacattgtgcccactaggcagcatggggcttactaaggcctggaatgtc

SEQ ID NO: 377480 - DNA, 201 bp, Homo sapiens
cctttacctcagagcagcttaccctgagctatacccacatctcaaggatttgggggcgtctagatctcatctaagggagacacaacttttctggtcctcaratggaaagctgggggaaggtaccagtatttacccttccataaaaactttggaggtctttaggaggatacccctcaggagggctaggagaggaatgacaaa

SEQ ID NO: 377481 - DNA, 201 bp, Homo sapiens
ggcgtgagccaccgcgcccagccccacactcttaagtttaactcccagtagtcactgaactaacctctgtctctcctgacattcatcagtcttcctcatcycaccccaacctctacccttggggcaatccaaggcttgatgtttactagataatacttttctcttttggtgtttaccacatcctgtgagtctgttaaggca

SEQ ID NO: 377482 - DNA, 201 bp, Homo sapiens
aatgcacacatcagccaggcacggtggctcacgcctgtaatcccagtactttgggaggccagggcaggtggatcacctgacgtcaggagttcaagaccaayctgaccaacatggtgaaaccccatctctactaaaatgcaaaaattagccaggtgtggtggtgcacgcctgtaatcccagctactcaggagtctgaggcag

SEQ ID NO: 377483 - DNA, 201 bp, Homo sapiens
taacctctgtctctcctgacattcatcagtcttcctcatcccaccccaacctctacccttggggcaatccaaggcttgatgtttactagataatacttttytcttttggtgtttaccacatcctgtgagtctgttaaggcaagaatgactgtcctcatttgtaaaaggagagacttaaggtaaagtgatttgcccaaggtc

SEQ ID NO: 377484 - DNA, 201 bp, Homo sapiens
gggggacatccttctactgggagaagtccaccttggtccttcttcaccaacttgaagcaaagcttcctgctgaatggaacctgtcccctcaagcaaaagtstctatgggaaaccctattggtaccagtggtgtaaaggcaggagcagagctagggtaggaaacccgcagatgtggattgggtctggacatgtaggcaaaag

SEQ ID NO: 377485 - DNA, 201 bp, Homo sapiens
ttcctgctgaatggaacctgtcccctcaagcaaaagtgtctatgggaaaccctattggtaccagtggtgtaaaggcaggagcagagctagggtaggaaacmcgcagatgtggattgggtctggacatgtaggcaaaagtgcttggaccaagatctgttgacttattttactactaacagggtcaggtgcccacctcacctg

SEQ ID NO: 377486 - DNA, 201 bp, Homo sapiens
aaggagtaaatgtgttttgttcctagggccagaggagcttgtcttccttgtcctctgttcccaccctcccctgaacagaacccagcccataagagacattytcagatgaaactctgttttcttgccccagtcaggctcaagccctgtggttgtaggaataaagcctgtgatctcaagaagtggtgacttgttttcttaggt

SEQ ID NO: 377487 - DNA, 201 bp, Homo sapiens
ctagctgggggatggacaagattatcctgggtgactacctcccaaggctgcttggtctagagggagggggacttatacaatcatctgttttctggagaaasagaagtcctgagggggttgcgtatcctgactaggatggtatcttggcttgtctggccagggagtgaagatatggttggtcagaaagggcaaaatactgaa

SEQ ID NO: 377488 - DNA, 201 bp, Homo sapiens
aatccttcttcaggaactggagcttttgagaataaggcaactttaggattgaccctaggacagaagctctgctctcaggatccttgtatgctcctgaataygaattccatagtatgatatttggagctccccagatccttgtaggcatatgtgtgtgtgtgtatttgaggccaaaaaaaaaaaaaaaaagtccctacctcc

SEQ ID NO: 377489 - DNA, 201 bp, Homo sapiens
ttcaatccttcttcaggaactggagcttttgagaataaggcaactttaggattgaccctaggacagaagctctgctctcaggatccttgtatgctcctgawtatgaattccatagtatgatatttggagctccccagatccttgtaggcatatgtgtgtgtgtgtatttgaggccaaaaaaaaaaaaaaaaagtccctacc

SEQ ID NO: 377490 - DNA, 201 bp, Homo sapiens
  misc_feature (1)...(201): n = A,T,C or G
ctggtcttgggctaggcagggatggtgtcttggggcacttggcctagttagatagtggagaactggactgacatgtgtgaagaatttggggttctggggcnccttgggagttgagtcagagttgcctcattcctcttcttgggttctgtctcccgtttgcttctagactttcccattctttggtgtagctcctgcaatcct

SEQ ID NO: 377491 - DNA, 201 bp, Homo sapiens
ctgggactataggtgcatgacaccacactcagctaaaattttttttttttttttttgagacagagtttcattcttgttgcccaggctggagtacagtggcrcaatcttggcccactgcaacttccgcctcccagattcaagtgattctcctgcctcagcctcccgagtagctggcattacaagcatgcactaccacaccca

SEQ ID NO: 377492 - DNA, 201 bp, Homo sapiens
acaggcatgagccaagagatcttcccatctcatctttctgagtggctgggactataggtgcatgacaccacactcagctaaaattttttttttttttttttgagacagagtttcattcttgttgcccaggctggagtacagtggcacaatcttggcccactgcaacttccgcctcccagattcaagtgattctcctgcctc

SEQ ID NO: 377493 - DNA, 201 bp, Homo sapiens
ggctgtgaggactgccagcacgctgtcacctctcaacgttatcacatttttttctttctttctttctttccttctttctttctttctttctttctctttcyttccttccttccttccttccttccttccttccttccttcctttctctttcttttctttcttttttgtttttttttgagatggagtcttgctcttgtcgcc

SEQ ID NO: 377494 - DNA, 201 bp, Homo sapiens
ccacctaggaggcctgtggtaggagaaacaggctgcccacgtaccacatccagtgagtagaggccagcaaaggtggcgcggaggcgggccacagcctcagrctggccagggagcaacatctccagcatgcccggcctgcttagctcctgctgcaccttcttagtcccagccagctgggtggcaatgtctgggcacttggca

SEQ ID NO: 377495 - DNA, 201 bp, Homo sapiens
gaggttctccacttccccaccagactcaggagcccagctggcttcacccagtggatcccgcactggggctgcaggtggagctgcctgccagtcctgcgccrtgtgcctgcactcctcagcccttgggtggccgatgggactgggtgccgtgagcagggggcggtgctcgtcgggggggctcgggccgcacaggagcccacg

SEQ ID NO: 377496 - DNA, 201 bp, Homo sapiens
gacccaaagagtgagcagcagcaagatttattgcaaagagcaaaagaacaaagcttccacagtgtggaaggggacctgagcgggttaccactgctggctgrggcagcctgcttttattctcttatctggccccacccacatcctgctgattggtagagccaagtggtctgttttgacagggtgccgattggtgcgtttaca

SEQ ID NO: 377497 - DNA, 201 bp, Homo sapiens
ggagtgcaacagcgcaatcttggctcactgcaacttctacctcctgggctcaagtgatcctccctcctcagcctcccaagtagctgggactacaggtgcaygccaacacacccagctaatttttgtattatttgtagagatggggttttgccatgttgcccaggctggtcttgaactcctgagctcatgcaatccacctac

SEQ ID NO: 377498 - DNA, 201 bp, Homo sapiens
ggacccaaagagtgagcagcagcaagatttattgcaaagagcaaaagaacaaagcttccacagtgtggaaggggacctgagcgggttaccactgctggctsgggcagcctgcttttattctcttatctggccccacccacatcctgctgattggtagagccaagtggtctgttttgacagggtgccgattggtgcgtttac

SEQ ID NO: 377499 - DNA, 201 bp, Homo sapiens
gcaacagcgcaatcttggctcactgcaacttctacctcctgggctcaagtgatcctccctcctcagcctcccaagtagctgggactacaggtgcacgccamcacacccagctaatttttgtattatttgtagagatggggttttgccatgttgcccaggctggtcttgaactcctgagctcatgcaatccacctacctagg

SEQ ID NO: 377500 - DNA, 201 bp, Homo sapiens
tgatcaataataatagcagggttgggggtagcaatctatcagatactgttcaggtaaaggctttccaagaaggtgacatttcagctcagaattgaaggatrggaagggaccagccaagggttcctcctcagcctgaggccaggtgagaggagttctggggtagagatgggggtaggatggcagggtggttggagtactcag

SEQ ID NO: 377501 - DNA, 201 bp, Homo sapiens
ttcggatgtgttcggagtttcttccttctggtgggtttgtggtctcgctggctcaggagtgaacctgcagaccttcacagtgagtgttacagctcataaargcagtgtggacccaaagagtgagcagcagcaagatttattgcaaagagcaaaagaacaaagcttccacagtgtggaaggggacctgagcgggttaccact

SEQ ID NO: 377502 - DNA, 201 bp, Homo sapiens
taaaaagatatcctgtctgccattaaggaactcataatccagtgagggaaacagatgtctacataggactctagtgctagaaaaaaataagtgcccaagtkttgtctttagaaataaacaggctgggcgtggtggctcacgcctgcaatcctagcactttgggaggccaaggcgggcggatcacttgaggtcaagagcctg

SEQ ID NO: 377503 - DNA, 201 bp, Homo sapiens
gctagttgaaggaacactggaggactgtcggggatttgggggattaagtaaaaggtttataaggagagggtggaaagagtggttgatggctgatattctgrtcatttatactagctactcagtctctactttttctagaagtccccagtaaccaaagcccaacacatttggtatcgttgattccttccattgtttgctttg

SEQ ID NO: 377504 - DNA, 201 bp, Homo sapiens
aattgtgtaacctgaaacaaatgacttagcttctatgaattttatttcttatgaaatgaaatgagggggtgataatctgtaaggttacttccattgttacrgttctaattgcttctctttcctccaaattttttttttttttttttttttttttgagatagagtcttgttctgttgcctaggctggagtacagtggtgcaa

SEQ ID NO: 377505 - DNA, 201 bp, Homo sapiens
  misc_feature (1)...(201): n = A,T,C or G
acccatcaaccctgaggcctggctatggtaccaccgggtggtaggtgcccagcgctgccccatcgtggacaccttctggcaaacagagacagtgagtgaanggtacagaaggctggggcccagggacaatgtgggaagattgactcaaatttctcatctctgacttccccagggtggccacatgttgactccccttcctgg

SEQ ID NO: 377506 - DNA, 201 bp, Homo sapiens
gtgaacctaggaagcacagcttgcagtgagccgagactgcggcactgcactccagcctgggtaacagagcaagactccgtctcaaaaaaaaaaaaaaaaaagagttctgatatcctagagggcttgggattttgcagtaggccaataccctgcccctcacctttcccaaccagccaggggccccagcctggtgtgtatgtc

SEQ ID NO: 377507 - DNA, 201 bp, Homo sapiens
ctcatgctgtcttccccctggtgtggcagataaatatgttagtgggggtgcatgtgtatatgtatgggaaaatgatcagtgacaaggtattgggatagtcmttcagggagagagagtcagtgagggtgttagaggtagctgaaggagtggaagggagttagctagttgaaggaacactggaggactgtcggggatttgggg

SEQ ID NO: 377508 - DNA, 201 bp, Homo sapiens
aatactgaacctgagggaatggtagggggatgaatagaaggactattaggaaagactgggaatgaccagccttcatgggtcagtttgaggggattcccacrtatccggacgtgaaccgcctgtggagcattgtggacaaatacaaggtgaccaagttctacacagcacccacagccatccgtctgctcatgaagtttggag

SEQ ID NO: 377509 - DNA, 201 bp, Homo sapiens
ctttaggaggatacccctcaggagggctaggagaggaatgacaaatacagaggatagaaggtcccgtggcctggttgtgccctcacacagggtatgggttktccaggactgccactcccgctgccacaccaccatctgcatgctcgatggctttggttcgaagtagatgccccacgtgcttgttcatcacgagtgtctttt

SEQ ID NO: 377510 - DNA, 201 bp, Homo sapiens
ggggcaggcgggggggtggggctctggagaagtaggttgggcctagatgatggagggtcttaaataacaaactaaggagcttagaaggtttgtgtcatagrtccatattagttattcagtttcttctaggaccctggcttagagatcctgaaagttccatgagcaacccctttcttcattcactcaatccctggggctttc

SEQ ID NO: 377511 - DNA, 201 bp, Homo sapiens
cttaaggcacagattggatccctcttgctgcagtctctgacttggtttctcctatcctgtcctctgtggctagagaaagccctcttctgggtgatcacagyggttccttaggatctccccttcaacattccttcatcgttagttggttcttcccagaaggtaagcccaatcccttctactgcagtccctagcatcctctcc

SEQ ID NO: 377512 - DNA, 201 bp, Homo sapiens
ggccaatggtgccaccagtgttttggtgagaagggagccacctggcctagctgggggatggacaagattatcctgggtgactacctcccaaggctgcttgktctagagggagggggacttatacaatcatctgttttctggagaaagagaagtcctgagggggttgcgtatcctgactaggatggtatcttggcttgtctg

SEQ ID NO: 377513 - DNA, 201 bp, Homo sapiens
ctgcccacgtaccacatccagtgagtagaggccagcaaaggtggcgcggaggcgggccacagcctcaggctggccagggagcaacatctccagcatgcccrgcctgcttagctcctgctgcaccttcttagtcccagccagctgggtggcaatgtctgggcacttggcagcatgtgacctctccagcagtagacgtgcttc

SEQ ID NO: 377514 - DNA, 201 bp, Homo sapiens
taatggaaattacgcggtataagactgaacgagttactacgatgtcaagttgttttatttatttttttaacttgggctgggattgtattagtaatagttcmgaagttctgatagatggttccatgtctgttaaaatgtatgaggaaaatcggccaggagcagtggctcacgcctgtaatcccagcactttgggaggccgag

SEQ ID NO: 377515 - DNA, 201 bp, Homo sapiens
atgcccggcctgcttagctcctgctgcaccttcttagtcccagccagctgggtggcaatgtctgggcacttggcagcatgtgacctctccagcagtagacrtgcttcccaattctgcagagggaagaagacaaaaggaattcgactttattttacttcagctgacgtttactgaacatccatccattaggtgccaggtatc

SEQ ID NO: 377516 - DNA, 201 bp, Homo sapiens
gttgggatttgaaccaagacagtttgactgcagaatccatatcctaatagcaatgctattcctcttccatgaccccacagaatgcatttcaccaaattccrtcaaatacagaatttctaccagggaagcagcctcctaatttgtcctctcttgcctagtttcgccaacttgagtctttccagtagatttatcaagacacca

SEQ ID NO: 377517 - DNA, 201 bp, Homo sapiens
atggcacttcctttcccttgacaaggacacctgctgagtacagcagaggtggagtcagcacttgtggaacatgaggctgttgcagaggcagctgtggtggsccaccctcatcctgtgaagggtgaatgcctctactgctttgtcaccttgtgtgatggccacaccttcagccccaagctcaccgaggagctcaagaagcag

SEQ ID NO: 377518 - DNA, 201 bp, Homo sapiens
tatgcctactattatcacttgaaaatatttttgagtatttgtactctcgttattagctgcgtggtccttggcagagtttcctgtgcttcctgagcttcagytttctcatctataaaattaggataattaatgtatactttgtaagaccataatgtcataaagattaaatgagattagtccagtccctgatacatgaatggc

SEQ ID NO: 377519 - DNA, 201 bp, Homo sapiens
gcgcctgtagttccagctactggtgggggagggggtacagctgagatggggggatcacttgagccagggagatggaggttacagtgagctgagatcatgcyactgcactccagcctgggtgacaaagagcgagacaccgagctaaaaaaataataataatagaaattaaaaaaaaaaagttttatggctcttgtcatgcat

SEQ ID NO: 377520 - DNA, 201 bp, Homo sapiens
ggttgcagtgagccaagatcacaccactgccctccagcctgggtgacagagcaagactctgtctcaaaaaacaataaaagtaataataataattgcttacygtttttctttttgtactatttaagcctttatcatatatttaatattttccaatctcactatcatatgaaatcctccttttcctcccaaagttctccctct

SEQ ID NO: 377521 - DNA, 201 bp, Homo sapiens
aagctaagtgatttgcctaagggtcatacacctgtttgaagacagaactgagactaatctccagatactctcactcctagtcaactattttttttcactcrtgacactacctcattattctagtagtccagcacttggctgtgacagataaaaagagaaattagccacattagccaaactgatttaaattaactttaaaat

SEQ ID NO: 377522 - DNA, 201 bp, Homo sapiens; identical to SEQ ID NO: 81541

SEQ ID NO: 377523 - DNA, 201 bp, Homo sapiens
ttatgagtgtgctatgagtgctcatgtgtgagtgatgtgggtggctctgaaataccatctgagggtgctggtatgaatgatggcctgatagacatatgtgkcatcaggagtgtgataaaggagatgagatgggagcatggagaaaaggagatggaagggagatggatgctgtgaaaagggtgctggcagggctggaatccc

SEQ ID NO: 377524 - DNA, 201 bp, Homo sapiens
ggaggttatagtccagcttgaggagacagacaataaacatagaaaccagtaagtatatgacaggtagtgatgagtactatagaaaaatatagagcagagtsaggggaaagggaagtgacagtgcagagtgggagctgataaggaaagaaccttttgataaatatgacatttgagcagagatctgaaggaaagtatggagtg

SEQ ID NO: 377525 - DNA, 201 bp, Homo sapiens
ctcaggagggctaggagaggaatgacaaatacagaggatagaaggtcccgtggcctggttgtgccctcacacagggtatgggttgtccaggactgccactmccgctgccacaccaccatctgcatgctcgatggctttggttcgaagtagatgccccacgtgcttgttcatcacgagtgtcttttcctgcctatagaaatg

SEQ ID NO: 377526 - DNA, 201 bp, Homo sapiens
ggctgtaggtctctgccacctaggaggcctgtggtaggagaaacaggctgcccacgtaccacatccagtgagtagaggccagcaaaggtggcgcggaggcrggccacagcctcaggctggccagggagcaacatctccagcatgcccggcctgcttagctcctgctgcaccttcttagtcccagccagctgggtggcaatg

SEQ ID NO: 377527 - DNA, 201 bp, Homo sapiens
tctgcctcccaggttcaagagattctcatgtgcagcctcccaagtagctgcgactacaggtgcgtgccaccatgcccggctaaatttttttttttttttttagtagagatggggtttggccatgttggccaggctggtgtcgaacttctgacctcaggtgatcctcccaccttggcctcccaaaatgttgggattacaggc

SEQ ID NO: 377528 - DNA, 201 bp, Homo sapiens
cagccgggagggggcgcctctcccagccctcggccgtgtcccggtctgactcgcccccgtctgctcagcgctatcagcctgcagctggcacacaggtgcgygtagatggacagccaggaaggcagcgcagggtcgaggggagagcgcggggcaagcgagacttcagtggctctgcactttacgcagctcagggaccaaacc

SEQ ID NO: 377529 - DNA, 201 bp, Homo sapiens
cgtggaggagccgcggggtgaggcccggcccgggcgggcctggggtgtcagtgaggagaagagtgggggctccctgggggagtcgggggctcccttgggargctgaggggtgggtgaggagatggaggttctgtgaaggaagaattgcggttctttgaaaatggaaaagggattccgggaggagacgagggttccatggga

SEQ ID NO: 377530 - DNA, 201 bp, Homo sapiens
cctcgggcagccgcgggaagctggtgatgctcatgtagtccactggcgagtaggcgcccagggcgctctcctggctggcctcgttctccgccgccatcctygcccgcgccccccagcagcgcagcgcctgccggaagtggctgcggcgggggagtgggagggcggagggcggggcctgatcttcgcgacagccgggagggg

SEQ ID NO: 377531 - DNA, 201 bp, Homo sapiens
cagaattctggggagacattgccaaggaattttactggaagactccatgccctggcccattccttcggtacaactttgatgtgactaaagggaaaatcttyattgagtggatgaaaggagcaactaccaacatctgctacaatgtactggatcgaaatgtccatgagaaaaagcttggagataaagttgctttttactggt

SEQ ID NO: 377532 - DNA, 201 bp, Homo sapiens
gaagggaccagccaagggttcctcctcagcctgaggccaggtgagaggagttctggggtagagatgggggtaggatggcagggtggttggagtactcagtwagcttgggttctgctcctgttctttctgttccattccatccttgaagggccttctctcccttcctgtactcctacctgcctgtcccacctcattccctcc

SEQ ID NO: 377533 - DNA, 201 bp, Homo sapiens
gaaggtttggaatgaaggggctgaggaaggagtctgttcctcttgcctgagggttgtttgtggctggtagcataaatactcaaagctaatgggagatacawgggaaatacctgttgttgggaacagtctttctccacttgaatcaggtgagcagattgtggaggtgagctggaggatttcatgtttaaggtggatttctaa

SEQ ID NO: 377534 - DNA, 201 bp, Homo sapiens
tgcctgagggttgtttgtggctggtagcataaatactcaaagctaatgggagatacaagggaaatacctgttgttgggaacagtctttctccacttgaatsaggtgagcagattgtggaggtgagctggaggatttcatgtttaaggtggatttctaacctgcttctctcatttctccctgagttttatgacccttgacac

SEQ ID NO: 377535 - DNA, 201 bp, Homo sapiens
agtattccagctatggtctgacttgaacagggtactattaccattctttcactttacatatctaagattatattagcctcattgacagccacactctccastcagtttataatctctcataatacttaagattttccttttctttctctctttctctctccttttcctttttcctctttctcctttcatttccttcccttt

SEQ ID NO: 377536 - DNA, 201 bp, Homo sapiens
cctcctgggttcaagcaattctcctgcttcagcctcctgagtagctgggattacaggcacacaccaccatgcccagctaatttttttttttttttttttgkatttttagtggagacgtggttttgccatgttggccaggctggtctcaacttcctgacctcaggtgagcttcctgcctcagcctcccaaagtgctgggatc

SEQ ID NO: 377537 - DNA, 201 bp, Homo sapiens
gggttcgaatcctagctctgcctcttctgtgacctcagataagttatttaacacctctgaatctacattttctaatttgtaaaatagggttaaagtggtgyctctggccgggcacggtggctcacacctgtaatcctagcactttgggaggctgaggtgggcggatcacctgaggccaggagtgcaagaccagcctggcca

SEQ ID NO: 377538 - DNA, 201 bp, Homo sapiens
ttctgagctgcttttgaggatggttacttgaggtgtcctccaaactgccacatatagtgagttagagaatctgccaggcacagtggctcatgcctgtaatyccagaactttgggagactgaggagggaggatcactgaactcaggagtttgagatcagcctgggcaacacaggtagaccccatctctataaaaaattttaa

SEQ ID NO: 377539 - DNA, 201 bp, Homo sapiens
ctgcaaatttagctcatataatttatagaagacatctaccatacaacctgttttgcatagccagttatcacccaacataatcagccaaatcagatctactktgttagaaattgcctaacttctttcttaagataaatatgttaatatatgactctgtgataactgtttcacttctgagttgtaattctaagagatataagg

SEQ ID NO: 377540 - DNA, 201 bp, Homo sapiens
tgcaaaggtgtacaactttcaattttagaaaattttcatcacccccaaaagaagtgcaatactcattagcagtcatttttcattttcccccaacttcttcycctccagctctaggcaaccactaatctactttctgtctctaaggctctgccttattctggatgtttcatataaatggaatcatataacacgtggcccttt

SEQ ID NO: 377541 - DNA, 201 bp, Homo sapiens
gtgtgaagtgggatctgattgttattttgatttgtatctccttgaccatgcctgaccttttttttttttttttttttttgagactgagtctcgctctgtcrcccaggctggagtgcagtggcacaattttggctgattacgacctctgcctcccaggttcaagagattctcatgtgcagcctcccaagtagctgcgactac

SEQ ID NO: 377542 - DNA, 201 bp, Homo sapiens
tttccttatgctaattctgaatttggaaacaataccccccttttggaggccatgtcatttaggaggagaaggccctgaactagacatttagactcaagaaytgtgctatccaacatggaagccactagctacatgtaactattgatatttatagtaattaaaattaagtaaaataaataatccagttcttccgccacattt

SEQ ID NO: 377543 - DNA, 201 bp, Homo sapiens
gaggctgaggtgggagaatcatttgagcccgagagtttaagaccagcctgggcaacatagtgagacattgtctcaaaaaaaaaaaaaaaaaaaaaagttgkggggtagcaccagtcttccctgtcattagtcaattaccagtctttcaattattcaaccatgaccctcgaatacctattgtgccaattgtgcttggaggag

SEQ ID NO: 377544 - DNA, 201 bp, Homo sapiens
aagtaggttgggcctagatgatggagggtcttaaataacaaactaaggagcttagaaggtttgtgtcataggtccatattagttattcagtttcttctagraccctggcttagagatcctgaaagttccatgagcaacccctttcttcattcactcaatccctggggctttcttctctccctcagactttcttcccttccc

SEQ ID NO: 377545 - DNA, 201 bp, Homo sapiens
gaacccaggagacagaggttgcagtgagccgagatcaagccaatgtactccagcctgggcaacagagcaagactccatcaaaaaaaaaaaaaaaaaaaaaagcctgaaaagaattatgggccaaactgcaaagagctacttacacaaatagttcacagaaaggaaaaagccttatagggaggcaggataatataaagatta

SEQ ID NO: 377546 - DNA, 201 bp, Homo sapiens
ctctggaggctgaggtgggagaatcatttgagcccgagagtttaagaccagcctgggcaacatagtgagacattgtctcaaaaaaaaaaaaaaaaaaaaaagttggggggtagcaccagtcttccctgtcattagtcaattaccagtctttcaattattcaaccatgaccctcgaatacctattgtgccaattgtgcttgg

SEQ ID NO: 377547 - DNA, 201 bp, Homo sapiens
ctgttttttaaatgagtgttttcatttgtatcaaactggacctgctttcctcaaggattgcccaaaaggagacacaaatttactaaacacttatcaataayagaacaccgtgctaggcaatttccatatactattaatttaatcctcacaataactttggaagacagaaagtattttctctgatttacagatgaggatcct

SEQ ID NO: 377548 - DNA, 201 bp, Homo sapiens
cagaggcagctgtggtgggccaccctcatcctgtgaagggtgaatgcctctactgctttgtcaccttgtgtgatggccacaccttcagccccaagctcacygaggagctcaagaagcagagtaaggagcctccctgggcagggactatagggtctgtcttggaggcccagttatcactgcaagttgttggggaggggctag

SEQ ID NO: 377549 - DNA, 201 bp, Homo sapiens
ctccaaggcagaaatgcacccccttcctcaccaaataattaacagagacaagggagaagaagggagagatccaagaagatggggatgaattaaggagatgsagctggaggtggatgcttgacacagaagaaggaagaccggggacttcccaaggcagggcagggacggggtcagcgggcctcaccggtgtcggggtctccc

SEQ ID NO: 377550 - DNA, 201 bp, Homo sapiens
gatagagataaatgctgttaagaaaaataaacagggtagcatgatagtgtgtgcagggatggctactgtacacaggatcgtcggagaagacttctctgaaktgacatttgagcagaggcctgaagggtgagaaggaaacaggcatgggaaaatctagagtaagagtgttttgtgcagagggacacagcttgagatgtctga

SEQ ID NO: 377551 - DNA, 201 bp, Homo sapiens
tgtgcagagggacacagcttgagatgtctgaagaatggactgaagcctgtgtggctggagcgtagcaagcaaagggaagaatattacatgacgttggagaygtacataatacagggagggtcttgtgggccatggtgaggagtttgaattttattcaaaggacagtgggaaaccttttttttgttgttgttgttgttgttt

SEQ ID NO: 377552 - DNA, 201 bp, Homo sapiens
cgtagcaagcaaagggaagaatattacatgacgttggagatgtacataatacagggagggtcttgtgggccatggtgaggagtttgaattttattcaaagkacagtgggaaaccttttttttgttgttgttgttgttgtttgtttttttttgagacagaatctcactctgtcacccaggctggagtgcggtggcacgacct

SEQ ID NO: 377553 - DNA, 201 bp, Homo sapiens
acagggagggtcttgtgggccatggtgaggagtttgaattttattcaaaggacagtgggaaaccttttttttgttgttgttgttgttgtttgtttttttttgagacagaatctcactctgtcacccaggctggagtgcggtggcacgacctcagctcactgcaacctccacctcccgggttcaagcaattctcctgcctca

SEQ ID NO: 377554 - DNA, 201 bp, Homo sapiens
tattacatgacgttggagatgtacataatacagggagggtcttgtgggccatggtgaggagtttgaattttattcaaaggacagtgggaaacctttttttkgttgttgttgttgttgtttgtttttttttgagacagaatctcactctgtcacccaggctggagtgcggtggcacgacctcagctcactgcaacctccacc

SEQ ID NO: 377555 - DNA, 201 bp, Homo sapiens
tgccgaggacccactcttcatcctgtacaccagtggctccacaggcaaacccaaggcaagtgtgtgtgtgtgtgtgtgtgtgtgtgtgtgtgtgtgtgtgkattatgtaggggtaagaagtaagtttctgaggaaacaagtaatgaaattatttttttcctacaaccctgagttttggaaatgtagcattgtcttttctaa

SEQ ID NO: 377556 - DNA, 201 bp, Homo sapiens
agatgtgaagagaggtagtctaattctaaatggattttgaatcaataatgggttaaagtaaatttcgagagtgtgagaatgaagtagttggagaagactcyttggaggaggttccctaggggaagaagatgagaaggactagtgactgtgtaccatgggttgtcacaccaaccatatggcctccaggtgaaggaaaagtag

SEQ ID NO: 377557 - DNA, 201 bp, Homo sapiens
atgccgaggacccactcttcatcctgtacaccagtggctccacaggcaaacccaaggcaagtgtgtgtgtgtgtgtgtgtgtgtgtgtgtgtgtgtgtgtgtattatgtaggggtaagaagtaagtttctgaggaaacaagtaatgaaattatttttttcctacaaccctgagttttggaaatgtagcattgtcttttcta

SEQ ID NO: 377558 - DNA, 201 bp, Homo sapiens
gccaagcatagctaatagcctctttggatctcagagttaagagactaaattggatgttcttttaagagttctgatatcctggccgggcgcggtggctcacrcctgtaatcccagcactttgggaggccgaggcgggtggatcacaaggtcaagagattgagaccatcctggctaacacggtgaaaccccgtctctactaaa

SEQ ID NO: 377559 - DNA, 201 bp, Homo sapiens
tctccaggggtttcccagtaagatgctgcattgtggtcaagcacctggggcgggcagagctcggcatgggtgactccaccagccagtcccccccaattaaraggtcatgcccagatgtgcaggtgagtctggcactgctatgcctttctccaggctcaaattccttcacttttcctgcctagaaaattcttgatgtccttc

SEQ ID NO: 377560 - DNA, 201 bp, Homo sapiens
tcttattgttaccttcatgctaaagatgatgaaactgagactcatggaagttaaatcacttgcccaaggccacactgctagaaaggtggcatttaaactcyagcaggctcattctacagcctgagttccataagataaaatgagagagtaaagagacaagtgtgttgagagcaagagaagcagtgaacctgaggctgtctc

SEQ ID NO: 377561 - DNA, 201 bp, Homo sapiens
aattcaaacttcttactattgcctacaaggctctacgtgatttggctgctgcctacctctcattcttacccaacttcttgctcactgaaatctagccataytgtctttctttctttctttgaaaaggtctcagtgccttttcacttgatgctccttttccccagaatactcttcccaagaattagtatgattgcctacctc

SEQ ID NO: 377562 - DNA, 201 bp, Homo sapiens; identical to SEQ ID NO: 81575

SEQ ID NO: 377563 - DNA, 201 bp, Homo sapiens
ctctaccaaaaatacaaaaactagctgggcgtggtggcgggcgccttcattcccagctactcgggaggctgaggcaggaggactgtttgagccggggagayggaggttgcagtgagccgagattgcaccaccacgctccaacctgggcaacagagcaagaccctgtctcaaaaaaaaaaaacaaacaaaaaaagacactat

SEQ ID NO: 377564 - DNA, 201 bp, Homo sapiens; identical to SEQ ID NO: 81576

SEQ ID NO: 377565 - DNA, 201 bp, Homo sapiens; identical to SEQ ID NO: 81577

SEQ ID NO: 377566 - DNA, 201 bp, Homo sapiens
cacgactggggtccacaacctctacaagatgatggccaatgggatcctcaaggtgcctgccatcaatgtcaatgactccgtcaccaaggtgagccgagggkcagtgacagctcccgctacagtggctgcagctcaggacgaggcctctgaagaagagtgcccaggaaggctgagattagggacatgaagccctcatttgag

SEQ ID NO: 377567 - DNA, 201 bp, Homo sapiens; identical to SEQ ID NO: 81579

SEQ ID NO: 377568 - DNA, 201 bp, Homo sapiens
ctgagatcttgcacacttgggtgacaggcatggtgcaagcatcttttagagttgttgttttttttttttttctagacagtctcgctctgttgcccaggcarcagagtgcagtggtgctatctcagctcactgcaagctccacctcccaggttcatgccattcttctgcctcagcctcccgagtagctgggactacaggcac

SEQ ID NO: 377569 - DNA, 201 bp, Homo sapiens
tcctgggaaccccacacctgtgccctagtcatgccacatgggaggagtgtgggctggtggtcagtagcccttagttctggtgtctattctggaatttcatktagagtggcccaagtgcgtcttagctcctctctgggcatctgtaagtgatgataatggtcatggctgcctcacagggtttctatgaggaagaatgagatg

SEQ ID NO: 377570 - DNA, 201 bp, Homo sapiens; identical to SEQ ID NO: 81580

SEQ ID NO: 377571 - DNA, 201 bp, Homo sapiens
ctcgtagtcattttttggccagactttgcctgagattcccccacacagaggctgctagtgctccagtcctttcagtgcagagcaaaccctggatcctgccrtgtggatcctgctgagggggaggtgttgtggggtatcaagccctggtcactcagggttgatgcctcagtccttggcgcccaggcagaaggggatgggaaa

SEQ ID NO: 377572 - DNA, 201 bp, Homo sapiens
tttgcctgagattcccccacacagaggctgctagtgctccagtcctttcagtgcagagcaaaccctggatcctgccatgtggatcctgctgagggggaggygttgtggggtatcaagccctggtcactcagggttgatgcctcagtccttggcgcccaggcagaaggggatgggaaaggaaagaatgatttcctgatatct

SEQ ID NO: 377573 - DNA, 201 bp, Homo sapiens
taactgtgggcgagcctggctgatgtcaggccctctacaagaggtggaggagcagagtcttttctaaactcccctggggaaagggagacaccccccccccycccgccgccgccacttcccagtctgctaagtagcgggtgttgttccttgacaccttttgctaccgctggaccacgatccgcctggtaacgggcgtcttcc

SEQ ID NO: 377574 - DNA, 201 bp, Homo sapiens
aattgaggaagacgcaggaagaggcctggggcatctgcctccagggccagccaacaactaatctccctggagcaatgtcttgctggaccaaacattttacycataaggacctcaaggcataccttgttctgtgcagctggttgtggggttgaaagattctcacttgatccccatctaatcccagttgggagaaatatggct

SEQ ID NO: 377575 - DNA, 201 bp, Homo sapiens
cattttataaaaggaggatggcagtggattagaatccttttggtcacaagtgatagaaacactattcaaaccagtgtatcagttatcttgctgcataacamtctaacccccagacttactggcttcaaataataaatatttattatttcagtttctgtgggtcaagaatttgagatcagcttagctggctgcttctgactc

SEQ ID NO: 377576 - DNA, 201 bp, Homo sapiens
cagtgagcaaagggagccttcactgcgggtatggtgtgaacttcgtgaagaccagatgtgtcagggcctaataggccaatagaaaagtgtttgacctgatwtgcagagcaaggggaaataactggagggcgttgagaagatttctctgagaagatacatgttagaaatggctgctgcatggaggatgggttgtggtaggga

SEQ ID NO: 377577 - DNA, 201 bp, Homo sapiens
tgcagaggagtgctggctgccagggaggagagctgaggagatggtggcaacctgtgcagggggatggggagaagagggcctagcatcagagccagccagaygtggcaaccttatcctgtgggcagccggcatccctgaaggtatcaggcaggtgagctgtatgtggtgaggctgtagttttagaaagatcactctagctac

SEQ ID NO: 377578 - DNA, 201 bp, Homo sapiens
ttttaatcaaaaaaagcaaccagtttaatccaaaaaagaactttattctcgaatctgccaggcacggtggctcacgcctgtaatcccagcactttgggagrctgaggcaggcagatcacctgaggtcaggagttcgacacctgaggtcaggagttcaagaacagccttaccaacatggtgaaaccccatctctactaaaaa

SEQ ID NO: 377579 - DNA, 201 bp, Homo sapiens
ctaacccccagacttactggcttcaaataataaatatttattatttcagtttctgtgggtcaagaatttgagatcagcttagctggctgcttctgactcargctctttcatgaggttgcggtcaagatttctgccagggctgcaatcatctgaaggtttgactgggtctggaagatcctcttcacatcgctgttgacagga

SEQ ID NO: 377580 - DNA, 201 bp, Homo sapiens
caggctgtattgacatcatccttggccggtaggtgccagatggggggtcccggggagtgagggaggagggcagagttgggacagctttctgtccctgacartctcccacggtcttgggctgcctgacaggcactttgagcagatgaaggatgatgccattgtgtgtaacattggacactttgacgtggagatcgatgtcaa

SEQ ID NO: 377581 - DNA, 201 bp, Homo sapiens
tcccaccgattgaagtgtaatacagggatagttaacgtttacttagtgtttcctgtgggatcggcactgccttctagctttattctagtctcatggctctrtagggaaactgttctcattttatgatgagaatcctgaggcagaggtaacttgccctcagtcttacagctggtggtgatggagcaagattggaacgcaggc

SEQ ID NO: 377582 - DNA, 201 bp, Homo sapiens
gtctctctccttgcaggtctccctggatctcttgctccgcagatccacacagcagccaatggggtcttttcaaaagacaaatctggtctctgaatgctggyccctgaaaactgtaggttccccacttcactgggactgaagtcccaactcatcttatgcctctatttgagtcaccctggtgcactcttggttcctctagca

SEQ ID NO: 377583 - DNA, 201 bp, Homo sapiens
aaaagacactattaagtctggagaatgccatccacatttatggaaacacttgctgtatatctggtgatttacgtgtgtttacacaataatcttcatagagrtggacgtaatcccgttatatagagcatgaaactgaggcccttgggaggtgacttgcaaagattctgttgaagtagttcatcaagttgctaccagagtaga

SEQ ID NO: 377584 - DNA, 201 bp, Homo sapiens
tccctctcacccaggttggagtgcagtggtgctattttagctcactgccacctccgcctcccaggttcaagcaattctcctgcctcagcctcctgagtagstgggattataagtgcccaccaccacgcccaactaatttttgtatttttagtagagatgggatttcaccatgttggccaggctgctctcgaacttctgacc

SEQ ID NO: 377585 - DNA, 201 bp, Homo sapiens
cccaactaatttttgtatttttagtagagatgggatttcaccatgttggccaggctgctctcgaacttctgacctcgggtgatccgcccaccttggcctcycaaagtgctgggattacaggctgtgagccactgcgcccagcctgagaagtgacagtttagatgaaggtggtgagatgcagttggattgcttatatatttc

SEQ ID NO: 377586 - DNA, 201 bp, Homo sapiens
ggatttcaccatgttggccaggctgctctcgaacttctgacctcgggtgatccgcccaccttggcctctcaaagtgctgggattacaggctgtgagccacygcgcccagcctgagaagtgacagtttagatgaaggtggtgagatgcagttggattgcttatatatttcacttgttgagccaaaaacgtgctgattgaggt

SEQ ID NO: 377587 - DNA, 201 bp, Homo sapiens
taaggtcatgtgggtcacgtgtccactggacagggggcccttccctgcctggcagccgaggcagggagggagaggagacagagagaaagacagcttacgcmattatttctgcatatcagggactattagtatttttactaatttactactgctatctagaaggcatagccaggtgtacaggatggaacatgaaggcagact

SEQ ID NO: 377588 - DNA, 201 bp, Homo sapiens; identical to SEQ ID NO: 81584

SEQ ID NO: 377589 - DNA, 201 bp, Homo sapiens
ggtggtggggagagaggcttttagaggaggctcgtagaatccctgcaggggatgatggcagcctcagcttagggagtgctggggtggatggacggcatgtrgggtcaggatggaggcagagtaacaaaggacacagctttggccgggcatggtggctcacacctgtaatcccagcactttggaaggccgagatgggcggat

SEQ ID NO: 377590 - DNA, 201 bp, Homo sapiens
cctgtttcctcccgtagccgacatcggcctggctgcctggggacgcaaggccctggacattgctgagaacgagatgccgggcctgatgcgtatgcgggagyggtactcggcctccaagccactgaagggcgcccgcatcgctggctgcctgcacatgaccgtggagacggccgtcctcattgagaccctcgtcaccctggg

SEQ ID NO: 377591 - DNA, 201 bp, Homo sapiens
cgagactagcctggccaacatggttgaaaccccgtctctactaaaaatacaaaaaaattagctgggccgggtgcggtagctcatgcctgtaatcccagcastttgggaggtcgaggcgggcggatcacatgaggtcaggggttcgagaccagcctgaccaatatgatgaaaccccatctctactaaaaatagaaaaattag

SEQ ID NO: 377592 - DNA, 201 bp, Homo sapiens
ggcttcataaatacttgttgcatgagtgagagaatgcggtgacagagtgctaagccctagtgtgttgagtccacacgtggatcggggtccatgcagtgacygcccctcttggttggtgggatgaggggactcacggaactcccacctgtttcctcccgtagccgacatcggcctggctgcctggggacgcaaggccctgga

SEQ ID NO: 377593 - DNA, 201 bp, Homo sapiens
ctgggtgacagtgcgagactctgtctcaaaaacaaacaaacaaaaaaatcagctgggcatggtggtgggtgcctgtaatcccagctactcgggaggctgargcatgagaatcgcttaaacgtggtaggcagaggttgcagtgagccgagattgcgccattgcactccagcctgggcaacagagcgagactccatctcaaaa

SEQ ID NO: 377594 - DNA, 201 bp, Homo sapiens
caggccctgatgtgccactcaccctccagtgtatgcctggaagggcgaaacggacgaggagtacctgtggtgcattgagcagaccctgtacttcaaggacrggcccctcaacatgattctggacgacgggggcgacctcaccaacctcatccacaccaagtacccgcagcttctgccaggtgagcagggcggggcaggtgg

SEQ ID NO: 377595 - DNA, 201 bp, Homo sapiens
aaaggaaggatgtggatctctttccaaagaactggggagggctacggggcagaaaaagaggttcactgcctagggtatggcggtctaaaggactgaggaargaccaagtctaacgagaatggagttttcacaggctgggcacatgtctgcttggacttggggaggggagtggttagatctgacccagtgattaggacattc

SEQ ID NO: 377596 - DNA, 201 bp, Homo sapiens
ttggccagcgtcctttgctcacaagaggctcctgggaaccccacacctgtgccctagtcatgccacatgggaggagtgtgggctggtggtcagtagccctyagttctggtgtctattctggaatttcatgtagagtggcccaagtgcgtcttagctcctctctgggcatctgtaagtgatgataatggtcatggctgcctc

SEQ ID NO: 377597 - DNA, 201 bp, Homo sapiens; identical to SEQ ID NO: 81581

SEQ ID NO: 377598 - DNA, 201 bp, Homo sapiens
cactgcctagggtatggcggtctaaaggactgaggaaggaccaagtctaacgagaatggagttttcacaggctgggcacatgtctgcttggacttggggaggggagtggttagatctgacccagtgattaggacattcaagattgcttctaaccaaccacaggtggacaggagggggtggcacagcactccttcacagact

SEQ ID NO: 377599 - DNA, 201 bp, Homo sapiens
cagagaagtgacagctaggggttgagaggggccagaaaaacatgaatgcaggcagatttcgtgaaatctgccaccactttataaccagatggttcctttcwcaaccctgggtcaaaaagagaataatttggcctataatgttaaaagaaagcaggaaggtgggtaaataaaaatcttggtgcctggaagaattttgagcct

SEQ ID NO: 377600 - DNA, 201 bp, Homo sapiens
atttgggaggctgaggcaggagagaattgcttgaagctgggaggcggaggttgcagtgagccgagatcgcaccctcgcactcctgcctggttaataagagygagactccatctcaaaaaaaaaaaaaaaaaaaaggccaggtacagtggctcatgcctgtaatcccagcactttgggaggcctaggtgggcagatcacgag

SEQ ID NO: 377601 - DNA, 201 bp, Homo sapiens
cgccttggcctcccaaagtgctgggattacaggcatgagccaccgcgtctggcctgggtatcctcattttttaaagcttctgaggtgattccaatgtgagygccacggcattcagcttttgctaagctgcattcaaaactatttcatggttattgagaacatgggatctgtcctcagaccgtccagactcaaattgcagcc

SEQ ID NO: 377602 - DNA, 201 bp, Homo sapiens
cggactcctcatgggcactgttggaggcagagaggcctgccagatcagagggtgggctgtgggagcggggccctgcctgccttcactgttgccctgcctgygtgtaggtggaccggtatcggttgaagaatgggcgccgcatcatcctgctggccgagggtcggctggtcaacctgggttgtgccatgggccaccccagct

SEQ ID NO: 377603 - DNA, 201 bp, Homo sapiens; identical to SEQ ID NO: 81574

SEQ ID NO: 377604 - DNA, 201 bp, Homo sapiens
aaaaaaggccaggtacagtggctcatgcctgtaatcccagcactttgggaggcctaggtgggcagatcacgaggtcaggagtttgagaccagtctggccarcatagtgaaaccccgtctctactaaaaatacaagaagttagccgggtgtggtgatgtgcacctgcaatcccagctacttgggaggctgaggcaggagaat

SEQ ID NO: 377605 - DNA, 201 bp, Homo sapiens
agcggcagtgagaatagagaagctgggagttgttcggaggcagagtcactaggcctggtggtggcttccctgtaggagggcgttggggactcctccctcaygcgggtctgggtgattggggggcctgtgggatcagtcacagagatgggaacccagaaagaggaatggctttagggggtaaagatgaggaatttgcatgag

SEQ ID NO: 377606 - DNA, 201 bp, Homo sapiens
aatgcgcggagaccggtagtggccccgaatgttgggctgcgctgttatttattgcatataaggcagaaggggcagggtaaagaatgtgagtcacctccaasgataggtaaggtcatgtgggtcacgtgtccactggacagggggcccttccctgcctggcagccgaggcagggagggagaggagacagagagaaagacagc

SEQ ID NO: 377607 - DNA, 201 bp, Homo sapiens
tggtgggtgcctgtaatcccagctactcgggaggctgaggcatgagaatcgcttaaacgtggtaggcagaggttgcagtgagccgagattgcgccattgcwctccagcctgggcaacagagcgagactccatctcaaaaacaaaactaaaaacaaaaaacaaaaagggacacagcttgaatcactgtgtgaggagcaggcc

SEQ ID NO: 377608 - DNA, 201 bp, Homo sapiens
ctacttctgctcatctgtccagacagctgcatttgtctggaacagaacacatgcccttctccttgttcatcttctcagcccagctcaagagacccccttcyggccaggcacggtggcacacacctgtaattccagcactttgggaggccgaggcaggcggatcacttgaggtcaggagtttgagaccagcctggccaacat

SEQ ID NO: 377609 - DNA, 201 bp, Homo sapiens
gagtctctgggaatgaggccaaggtatcttttttttttttttttttttttttgagacggagtttcgctcttgttgcccaggctggagtgcaatggcgcgaycttggctcaccacaacctccgcttcccaggttcaagcgattcgcctggctcagccttcctgagtagctgggattacaggcatgtgctaccatgcctggct

SEQ ID NO: 377610 - DNA, 201 bp, Homo sapiens
ttggccaagataatctcgatctcctgacctcatgatccgcctgcctcggccttccaaagtgctgggattacaggcgtgagccaccgtgccccggccagctyaacatttcttaataaatattggctgttatttttgtgctaagccatgtgctggaggttgttttggagcagttcggactcctcatgggcactgttggaggca

SEQ ID NO: 377611 - DNA, 201 bp, Homo sapiens
tctgtgcagctggttgtggggttgaaagattctcacttgatccccatctaatcccagttgggagaaatatggctatgagtttggtgagaaattggtcaggctttgaaatgagggcagggttggaagtgaaagaggcaaagctcccgcctcagcacctgaccctgtccttaccacttttcttcatcattgctaacatgtggc

SEQ ID NO: 377612 - DNA, 201 bp, Homo sapiens
tatcttgctgcataacactctaacccccagacttactggcttcaaataataaatatttattatttcagtttctgtgggtcaagaatttgagatcagcttakctggctgcttctgactcaggctctttcatgaggttgcggtcaagatttctgccagggctgcaatcatctgaaggtttgactgggtctggaagatcctctt

SEQ ID NO: 377613 - DNA, 201 bp, Homo sapiens
tggacgtggtggtgcacgcctgtaatcccagctcctcgggaggctgaggcaggagaatcacttgaacctgggatgtagaagttgcagtgagccgagatcgygccactgcactccagcgtgggcgtccgaatgagactctgtcacaaaaaaaagaactttattctcggatccaaacactggaaacctaggattccgtgtcat

SEQ ID NO: 377614 - DNA, 201 bp, Homo sapiens
tcaccgagattgaccccatcaacgcactgcaggctgccatggagggtaggatagggcaagggttggttgtcagccactggggccagagggaggggcaaggscaccgtagatgacccacagccactgtctctgcacaggctatgaggtgaccaccatggatgaggcctgtcaggagggcaacatctttgtcaccaccacagg

SEQ ID NO: 377615 - DNA, 201 bp, Homo sapiens; identical to SEQ ID NO: 81583

SEQ ID NO: 377616 - DNA, 201 bp, Homo sapiens
acaataaagcaagtcactcagattttttggtttcccagtgcatataaaagttatgtttactgtagtctgttaagtgtgtagtagtgttgtgtctgaaaacmatgtacataccttaatttaaaaatacttcattggtaaaaaaatgctgatgatcatctgaaccttcagtgaatctgaatcttttctgcttggtgaagggtc

SEQ ID NO: 377617 - DNA, 201 bp, Homo sapiens
tttcttttaggtgtgatatgttactcttgattcattttgtattactgtattgtgaatttatcaagggaatggtagcttttttagttaagtccagaagatgycattgctgtacaaaagtaagttgaggaattacaaacatgtggaagctttttcattaagtattcttttttggacagaatggcaaagaagtacaatatgaaa

SEQ ID NO: 377618 - DNA, 201 bp, Homo sapiens
acaagtaataccaatttttttcctattctagtgttggttcatgaagttttaccatcaattcaagtaatcataaatggcaaattctgcaaaagcagaagaayatgaaaagatgtctcttgaacaggcaaaagcgtcagtgaattctgaaacagagtcttcattcaatattaatgaaaacacaacagcttctgggactgggct

SEQ ID NO: 377619 - DNA, 201 bp, Homo sapiens
gaatttatcaagggaatggtagcttttttagttaagtccagaagatgtcattgctgtacaaaagtaagttgaggaattacaaacatgtggaagctttttcrttaagtattcttttttggacagaatggcaaagaagtacaatatgaaactagtctacaaaaaaacatttctggaattctacgaagaaaagattaagaacaa

SEQ ID NO: 377620 - DNA, 201 bp, Homo sapiens
gactaggtcttgaagacaaattcttctaatatttacttttggttgactgtgtaagattttaatgagtgtttaattattatgttaatcaggttttcagaagrcaatattttttttaatgcacagaattaaggttacctagtactattaagtaatgattctattttactctaatagttttggagcaactgcatattgttggtt

SEQ ID NO: 377621 - DNA, 201 bp, Homo sapiens
aaactagaatacatgcatgatttctgtgtgtcctttattgtacaagggaaagattgtgagggaaaggaagaaccttacattctagaagttaatttactaaraagtttttaatctttgttgtagttacctcacaatcttaactcattttaatttgtttcaggaacttctgattgacaaatttcgtgacccacaaatgtgttt

SEQ ID NO: 377622 - DNA, 201 bp, Homo sapiens
attatttgtaattgctatttatgcttttcatggctattaaattgccatcattttaatatttagctctttttatgacatctttaagctttgtatttatatayaaagcctttggctaacagtagagaaggtgcaagtgtttgctgctaaatggttcttggtggtgattaaattatgtagcttctttcagctgtgaatatccta

SEQ ID NO: 377623 - DNA, 201 bp, Homo sapiens; identical to SEQ ID NO: 81599

SEQ ID NO: 377624 - DNA, 201 bp, Homo sapiens
ttcacttttgactggaaattctattatgataaattcccttgaatgactcactgaatacttgtaattttttgcttttaataatttgaattgaaattagctgytgcttttcggtatggacatcatttattttccagtattttgaaatagaactgaacttatactatgttttgttcaccttgtaatttattagtttcccaacat

SEQ ID NO: 377625 - DNA, 201 bp, Homo sapiens; identical to SEQ ID NO: 81603

SEQ ID NO: 377626 - DNA, 201 bp, Homo sapiens; identical to SEQ ID NO: 81607

SEQ ID NO: 377627 - DNA, 201 bp, Homo sapiens
aaacattctcattgcctatttgttactaagtagccatctccatttgaagtgtttacctcagatttctagtggaatttttggcttatagaatacttgcatgycttttttttatttggccactctgatgtgacagtgaaggcataataatactagaacattcaatgaaacatccatgagcaggatgtgttagaggtgtgcatg

SEQ ID NO: 377628 - DNA, 201 bp, Homo sapiens
acgccactgccctccagtctgggcgacagagcaaggctctgtctcaaaaaaagaaaaaaaaaataatacaagatagatgcattttccagttacacacacasacacacacacacacacacacacacacacacacacaatgccctcttcacacacattcaccctttggatgagaatttgagaatttggcaggaggataaaagt

SEQ ID NO: 377629 - DNA, 201 bp, Homo sapiens
ttgatgggtgcagcaaaccaacatggcacatgtatacctatgtaataaacctgaacgatttgcacatgtaccctggaataatataccctagtataatattwaaaaaaaattggtttaagagaggattcttccttttttttaatttttttctgtatttcaaaagtatgtatagtttgtattcctgaagtagtacttacggat

SEQ ID NO: 377630 - DNA, 201 bp, Homo sapiens
aatggcatgaacccgggaggcggagcttgcagtgagtcgagatcgcgccactgcgctccagcctgggcgacagagcgaaactccgtctcaaaaaaaaaaawaaataaataaataaataaataaataaataaatcaaagatcctccttttgacagagatgagtattaaaagttgtttgcatttcactataactttgaaattg

SEQ ID NO: 377631 - DNA, 201 bp, Homo sapiens
aattaaggttacctagtactattaagtaatgattctattttactctaatagttttggagcaactgcatattgttggttaaacattcaggtttcattaagtyaagaaataggcagtgtcttgatttgtttaggccttcaattagttgataaagatcatgtgtattacattgaggatagataaaaacattcaacttttttgag

SEQ ID NO: 377632 - DNA, 201 bp, Homo sapiens
tgagcccaggagttggtggctgtagtgagctatgatcacaccaccacactccagcctgaatgacagattaagaccttgtcactttaaaaaaaaaaaaaaaaggtagcccagatctaattaaaaggctaatcaagtgtgcatcatgtagtttttcacatgcataatctgatcaaaataagtctacactaatcacaattttaa

SEQ ID NO: 377633 - DNA, 201 bp, Homo sapiens
cggggtttcactatgttggccaggctggtctagaactcctgacctcaagtgatctgcccacctccacctcccaaagtgctgggattacaggtgtgagccaycgtgacggcctcagcatccattttttaaaaatctttttgataaaagccgttttaaccgagatgagatggtatctcattgtggttttgacttgcatttccc

SEQ ID NO: 377634 - DNA, 201 bp, Homo sapiens
gtgtttaatatcactgccaatcagaaaagtattgggaagaagtccagcccacagtgatcaatacgagtttttcagggttgtaattcttatttgaaagtcarttttatttttggcaacaaatacactgtcccttgtctccctttaaattagcgatccctaacctttttggcaccaggggccggtttcatggaagactgtttt

SEQ ID NO: 377635 - DNA, 201 bp, Homo sapiens
tgtaagtacttctaaatatattgtggtttataaaatattcagtattaagtagcaaatgtttatcagaggtagattttattaaaatacgctattttaatcttataagtgttgaacactttcataagatatttgagtagacattcaaaatttaaattcaatagacaaatttacaggtgaacttttaacagttcatctttgtgt

SEQ ID NO: 377636 - DNA, 201 bp, Homo sapiens
tttggctgtgctggtgagtgtgacggctggaactccggcccttcctttctttgtgtttgtccctcggccgccgtggaggggtggaactggcactcccaccmctgacatgggctcacttcgcattagccctgtgcttcactacccaacgcgtgggtctattgccttgtgtcctcagtcccaaggaaaatgggaactccttgg

SEQ ID NO: 377637 - DNA, 201 bp, Homo sapiens
atgtaagtacttctaaatatattgtggtttataaaatattcagtattaagtagcaaatgtttatcagaggtagattttattaaaatacgctattttaatcttataagtgttgaacactttcataagatatttgagtagacattcaaaatttaaattcaatagacaaatttacaggtgaacttttaacagttcatctttgtg

SEQ ID NO: 377638 - DNA, 201 bp, Homo sapiens; identical to SEQ ID NO: 81600

SEQ ID NO: 377639 - DNA, 201 bp, Homo sapiens
tgtattatttctataatcagaaaagaggtatttttttttaaaggactgaagtcagagttggcaaaattgtctcttggcatatacagggtattctttccttyttcagctgttctagcagctctcttgatgtgtgctttgcacctgtgtttaacatcctaatacaatcagtgtgatctgtgccaagctttctctctggctgtt

SEQ ID NO: 377640 - DNA, 201 bp, Homo sapiens
tatttcagttaacataatgacatccggtttcatccatgttgttgcaaatgacaggatttcattctttttaatgactaatattccattgtgtatatatgctrcattatctttattcatctgttgatgaacgcttaggttgattccatatcttgactattgtgaataaacttgagactgcagatatttcttagatatactgat

SEQ ID NO: 377641 - DNA, 201 bp, Homo sapiens
agctcaaaactcagaacagtcatatcagtactgttcttgaagatgaccatcatactttgttaggtagcagaaatgttttgttacttcccatttcatcacasaacattttaaaaagtgtgtattcaaaagcccaggtttaataaaattaattttcactattttataaagggtattcttaaatgaaactgtttttctccccct

SEQ ID NO: 377642 - DNA, 201 bp, Homo sapiens
cgtggtggcaggtgcctgtaatcccagctactggggaggctgaggcaggagaatcacttgaaccccagaggcggagcttgcagtgagccgagatcatgccmttgcactccagcctgggcgacaagagtgaaactccgtctcaaaaaaaaaaaaaaattgttttaaagtcttagtgtttacaagtaataccaatttttttcc

SEQ ID NO: 377643 - DNA, 201 bp, Homo sapiens
ccagcagtgggaaagctaggctagtccaagatgttgaaagaaggcccatcctgatttatatcgggggctgtcccaaaatgaggcagcattcctttacagaygaatgtcttcgagaccatgttctgtatcctaagtgcactggagcccagtggagggtgttaagggggtagtgacatgactcaggtccgcatttctgaaagc

SEQ ID NO: 377644 - DNA, 201 bp, Homo sapiens; identical to SEQ ID NO: 81601

SEQ ID NO: 377645 - DNA, 201 bp, Homo sapiens
tcatttagctgtctttgagtcaaagcaggaaaccttatttcagggagagagctcttggggctaatacatgtagaaatagaaataatatctctgaagtattrattgtcgtagagcttttggcttactttcttcacaaggccctacaacacaataattggataattgggtgaattgttaacatgtcatgttatgtatgttcct

SEQ ID NO: 377646 - DNA, 201 bp, Homo sapiens
gaaattagctgttgcttttcggtatggacatcatttattttccagtattttgaaatagaactgaacttatactatgttttgttcaccttgtaatttattartttcccaacatatcagagcctgtttggttttttcctaccttccacctgtttctgaatttcttaaaaagaactgcttcaagggtgaaagtctcaccatgaa

SEQ ID NO: 377647 - DNA, 201 bp, Homo sapiens
gtgacataagtaaaattcatgcttaaatctcaatattaattttaggtaataaatatagctaaagataagtcacatttctttatttgaatttaaagccaatwtccattaggaaatcaatggcagaggaggagaaataggaatttgataagttggtatccagtttttctagataatcattttaagtatttgttctgaaaatca

SEQ ID NO: 377648 - DNA, 201 bp, Homo sapiens
aggagatcgagaccatcctggctgacacggtgaaaccccgtctctactaaaaatacaaaaattagctgggcatggtggcgcgcgcctgtagtcccagctaytcgggaggctgaggcaggagaatggcatgaacccgggaggcggagcttgcagtgagtcgagatcgcgccactgcgctccagcctgggcgacagagcgaaa

SEQ ID NO: 377649 - DNA, 201 bp, Homo sapiens
gtattatagtaagtagataattgttttaaagtaagcaagtaccatcccatgtctgcctaaaaatgattcaaataatagaggaactcttagaattaacgggkattttcctcttcagaagctgcttgagagcctaagaattttcaccaaattatgaacaagacagattgttttatttattgtaatcatatgagaaactgaact

SEQ ID NO: 377650 - DNA, 201 bp, Homo sapiens
aggagaaataggaatttgataagttggtatccagtttttctagataatcattttaagtatttgttctgaaaatcacttttctgatttgttgttgttgttcyctgattcagttctatttggtacttcttggtattttgttacctcaaatggtgggtcatgaaaactaataaccattgaaacccttacccattcatagtgagt

SEQ ID NO: 377651 - DNA, 201 bp, Homo sapiens; identical to SEQ ID NO: 81605

SEQ ID NO: 377652 - DNA, 201 bp, Homo sapiens; identical to SEQ ID NO: 81604

SEQ ID NO: 377653 - DNA, 201 bp, Homo sapiens; identical to SEQ ID NO: 81598

SEQ ID NO: 377654 - DNA, 201 bp, Homo sapiens
aatgacggagggggtgaacttggctggagaagtcccttctcgcctctgtgcgtcctctcgggccccgtggtagagggtcaagcgggcgggtcgggacttasagcttatcccgcttgggctttatcccggcggccctggcggcctgctcgctcgtaccctgaggagctgaaatgacgcagagacatagcttgcttcggaggt

SEQ ID NO: 377655 - DNA, 201 bp, Homo sapiens
gtagaaaagagtttcctacactttttccgcatctcacagctccggagactctcatttacttcctgacctttatgttatactaatagagccctctgaaaccsctgagatttagaatgcatgtttcttttaggtgtgatatgttactcttgattcattttgtattactgtattgtgaatttatcaagggaatggtagcttttt

SEQ ID NO: 377656 - DNA, 201 bp, Homo sapiens
atttattcataatagaatatgtaagtttgaaatgtggaacacccgtggattcatactggtttttacataatagcttaagaatgttctatttttaatagatrtggtcttaagacaaagtaggcttttaactcttatgatttctgttaaggtgaaacatctcctgctaatgagatagattttttagtttttgtttgtttttat

SEQ ID NO: 377657 - DNA, 201 bp, Homo sapiens
tcataatagaatatgtaagtttgaaatgtggaacacccgtggattcatactggtttttacataatagcttaagaatgttctatttttaatagatgtggtcytaagacaaagtaggcttttaactcttatgatttctgttaaggtgaaacatctcctgctaatgagatagattttttagtttttgtttgtttttattttcta

SEQ ID NO: 377658 - DNA, 201 bp, Homo sapiens
tttgaataagcatttaaaaatcatgatagaacttttatagcgtctgtacctattgagacgcttttagttcctcttgaaaactgatagggtatttgcgtcgkaacaaagcccttttcttttcttttaaaggaaataaaaccttttcactggtactaaggctgacttttatgccagagtttgtcagttgagatcaatgtctag

SEQ ID NO: 377659 - DNA, 201 bp, Homo sapiens
tactgatagtgttaggttttataattcagattggaataaaactttctcctttttactttgaataagcatttaaaaatcatgatagaacttttatagcgtcygtacctattgagacgcttttagttcctcttgaaaactgatagggtatttgcgtcggaacaaagcccttttcttttcttttaaaggaaataaaaccttttc

SEQ ID NO: 377660 - DNA, 201 bp, Homo sapiens; identical to SEQ ID NO: 81597

SEQ ID NO: 377661 - DNA, 201 bp, Homo sapiens
cctatcgctgtgctactagccacatttcatttcaactaaaagaaattggaaaccggtaaataaggtgaccaaagtagtattttggaaaaactgctatggtrttcctgtacaagttgggttggaagagcaagaagctggagtcttgggaggccatcaggcagttagctgtgttcatctaccctcccttcaaaagaagtcatc

SEQ ID NO: 377662 - DNA, 201 bp, Homo sapiens
cacacctggctactttttgtattttacgtagagacaggatgttgaaatgttgcccaggctagtctcgaacccctgagctcaagtgatctgccttcctcggyctcccaaagtgctggggttacagcatgagctaccgagccaggcctgatttacatgtattaaaaggcaaaatgcagatactataaagggatatcacttaaa

SEQ ID NO: 377663 - DNA, 201 bp, Homo sapiens
ctgatttatatcgggggctgtcccaaaatgaggcagcattcctttacagacgaatgtcttcgagaccatgttctgtatcctaagtgcactggagcccagtrgagggtgttaagggggtagtgacatgactcaggtccgcatttctgaaagcttaatctggctgcgattggaaaattcattgagggagagtaagaatggaag

SEQ ID NO: 377664 - DNA, 201 bp, Homo sapiens
ttatttacttttttttttaagcacaaacacttccttcatgaaaaagctttttttttttaagtggggtctcactttgttgtctaggctggagtacagtggcmcaatcatggctcactgcagcctggacctcctgggctcaggtgatcctcctacttcagcctgctgagtaactgggactaaggcatgtgccaccatgcccag

SEQ ID NO: 377665 - DNA, 201 bp, Homo sapiens
cagggttccagtcttttagactgtgttgttgctgagacctctcctgtcctaatgcagcagtgaaggtatctatataagcttcaattacacagccattgatkgtttttcctttttctccttaccagacaatgtttggttggacagacctaaaatattcagtgagcatttttattattgatcagtagaatcatattcatcaaa

SEQ ID NO: 377666 - DNA, 201 bp, Homo sapiens
gtgtaatgtatgtcaaaatctacttaggtatggtagggtatgggataacaagaattttatggcatgttatttcagtgaataatgcagtccatgatgggaaytgcagtattgaagcattccaagtgcagtgagtatataaagggccttttgggaaggaagaagattggtagaggacaggcagagaaaccagagtgcacagga

SEQ ID NO: 377667 - DNA, 201 bp, Homo sapiens
agtaagtagataattgttttaaagtaagcaagtaccatcccatgtctgcctaaaaatgattcaaataatagaggaactcttagaattaacgggtattttcytcttcagaagctgcttgagagcctaagaattttcaccaaattatgaacaagacagattgttttatttattgtaatcatatgagaaactgaactcttattt

SEQ ID NO: 377668 - DNA, 201 bp, Homo sapiens
aatttttaaaaattagccagcatagtggcttgtgcgtgtagtcccagctacccaggaggttgaggtggaggatcacttgagctcgggaggccaaggttgcrgtgaatggagatcctgccactgcaatacagcctgggagacagagcaagactctgtctcaaaaaaaaaagatgctagtttacatctgatctttgacaaacc

SEQ ID NO: 377669 - DNA, 201 bp, Homo sapiens
ctgagtattatagtaagtagataattgttttaaagtaagcaagtaccatcccatgtctgcctaaaaatgattcaaataatagaggaactcttagaattaaygggtattttcctcttcagaagctgcttgagagcctaagaattttcaccaaattatgaacaagacagattgttttatttattgtaatcatatgagaaactg

SEQ ID NO: 377670 - DNA, 201 bp, Homo sapiens
ggttgcagagcctcattgttactgtaggaatccccttacatggttgttggtgatgttgaggcacaagtggtcattaaggacaatccatttgataaacattwttgatttacgtgaagttctgtgaaaggtaaagtaaaataaagatgttaaatctctaccttctagaagtctacactgtaatggaaggaacaggcacaaata

SEQ ID NO: 377671 - DNA, 201 bp, Homo sapiens
gagcatgtgcataaactatggattttattactttttccctgcagtggagactggttgcctgtcttagacatcctgctggtcccaaagtagagtgtaaattytgatcacgagtcatcatgatggcggtactggctgtggcttagaactgtatttttatattattaagtgtggactttagtcatcatgtacaaatgaaaaatt

SEQ ID NO: 377672 - DNA, 201 bp, Homo sapiens; identical to SEQ ID NO: 81602

SEQ ID NO: 377673 - DNA, 201 bp, Homo sapiens
agtttgatcatgagattgcagcaattcagtcacatctgcaggctccacttctaattctggttctcttgttgttgccatcccgtctgcagctacttcctccmctgatgtgttgaaccccttgaagtcatgcatgagggttggaatccagttcttctaaacttgcgttcatgttgatattttgacctcatcccatgaagcatg

SEQ ID NO: 377674 - DNA, 201 bp, Homo sapiens; identical to SEQ ID NO: 81606

SEQ ID NO: 377675 - DNA, 201 bp, Homo sapiens
tcttgatatttgtcccaaaaagtcttttcctgaagcatccagcttttatctgggttcagcactagaaccagtacaacttttctgctttcctggagcgttgkaacagagagaagaaagaatgaaaagatgtaggccatggaactgtaggtcctgacacctgttttctttttttcaccagcaaacatattctagggacagttc

SEQ ID NO: 377676 - DNA, 201 bp, Homo sapiens
ccctctgaaacccctgagatttagaatgcatgtttcttttaggtgtgatatgttactcttgattcattttgtattactgtattgtgaatttatcaagggartggtagcttttttagttaagtccagaagatgtcattgctgtacaaaagtaagttgaggaattacaaacatgtggaagctttttcattaagtattcttttt

SEQ ID NO: 377677 - DNA, 201 bp, Homo sapiens
aggtgttcacaaaaaatcagagaatctctttcgaggtgctggccgccttcaacgctctgagtaagcattgctgggtgtcaggagagaaaagccaaagaagsgggtgccagacagctctgtgcaacctctaggccatgagtgggatagataccactgctgctttaaaaaatgggagaccatagaccctcaggagagaagaat

SEQ ID NO: 377678 - DNA, 201 bp, Homo sapiens
cccctgggcagcacatgtggatgctggtggcaggtggggcgagcctgtcttcaggttccctaatggtgtgtgcaggtgctggccgcaggtgggacagtttkacccccattcccccagatgcgcacaggcaccagcaacaatggcaggtgaggcgatcctatcctcaggccctgggacagtaagcacaggtgctggtggcag

SEQ ID NO: 377679 - DNA, 201 bp, Homo sapiens
aaccccagcatcttttagggagacacagttcaacccatcacacaccatcagggcaatgactgtgaagtgcaaaatggaacaaagagaaaggggggtacccraagatgcgagatctcaattaatttttgcaagagagaaagctggtgagcaggtggagacatgaaacggagcattgctcagagaagggggtggcagtcaggc

SEQ ID NO: 377680 - DNA, 201 bp, Homo sapiens
gctgcacattccaaattattataagctcctttttctgcaaggaaacacagggtcactttctgagaaaagcaacctacaggggaattggtaacttgcttttygttttgttttgttttttaaactaaatattagcctaactaatctggcctatttttacaccaggtccaggctggctgtctccaattctgcatctctttccac

SEQ ID NO: 377681 - DNA, 201 bp, Homo sapiens
cgccctctactgggttcaccccatcatgcaaggatggtgtgagaatgagaaataaactcttccccacatgtgctacccagaagctgccactagatggtggkaaagctgcacattccaaattattataagctcctttttctgcaaggaaacacagggtcactttctgagaaaagcaacctacaggggaattggtaacttgct

SEQ ID NO: 377682 - DNA, 201 bp, Homo sapiens
  misc_feature (1)...(201): n = A,T,C or G
tttcacagtcctgcagcgaaacttcattcgctcccggcccaccaaactaaaggatttaattcgcctggtgaagcactggtacaaagaggtaaggacagtcnttgttctgaccatggggttattatttttaccagtaagccatgaacattaagccctgttgcccacaatctcccatgctgagggctgagccactttggagaa

SEQ ID NO: 377683 - DNA, 201 bp, Homo sapiens
ttttaccagtaagccatgaacattaagccctgttgcccacaatctcccatgctgagggctgagccactttggagaatctgcccactggatatctttacgaygttcccatcactaaccctattcatttgggtcaggcgttgatggcttctgcccatcaaagctgctacatgtggtttactttgccctcacactggccaaaga

SEQ ID NO: 377684 - DNA, 201 bp, Homo sapiens
gtgggaggattgcttaagaccaggagtttgagaccagcctggggaacctagtgagactcccatctctacaaaaaaaaaaaaaaaaaaaaaaatagctaggygtggtggcacaaacctgtagtcccagctactcaggagactgaggctggaggatcccttgagcccaggaattggagactgcagtgagctataatggcacca

SEQ ID NO: 377685 - DNA, 201 bp, Homo sapiens
aacccgaacagttccccctggtgcagggagtggccatagtgagtccagggctgaggttgggtctctgggaggcaggagattccacggcggcagcaaggccragctactgggtgctgggtgcctattatgtgcgaggcccacacttgggtgggatgtggtgtaggagtctcaggctctggagcaggcgcttgctccagagct

SEQ ID NO: 377686 - DNA, 201 bp, Homo sapiens; identical to SEQ ID NO: 81666

SEQ ID NO: 377687 - DNA, 201 bp, Homo sapiens
tgggcagctcatgtttaagagccgaactccccgatggcttacaggtaagggttttaaaggtgaggggacagaggttacaggcaaagccataaatcaacacrtggaggctgtacattggtttgacctaaaaaggtgggacgtctccaagcaggagggaggaggaggatgggtggcgctggtcacaggattcaaagactttcc

SEQ ID NO: 377688 - DNA, 201 bp, Homo sapiens
gagcagacaattcacaaatctagaagcctcctgagccagagtaggttcagagagtcttgaacacagccacgtggtggaagaagatttatggacaggaaaargaaaatgatgtactgaaaatgaaagtgaggtacagaaacagccagactggttatagctcagcattggccttatttgaacgagatttgaacagttggccac

SEQ ID NO: 377689 - DNA, 201 bp, Homo sapiens
aacccctattctaacatctattaccaccgcagattagttttgcttgattttaaacaaacaatgtaagtgggattatatggtacatacttcatgtctgcctyctttggctcaacgggatgtctgagagactcattcatatggttgcagggtcttgctctgctgcccaggctggagtgcagtggtgggatcttggctcactgc

SEQ ID NO: 377690 - DNA, 201 bp, Homo sapiens
gtaaagaggacgggttaatctcctggcccctgggcagcacatgtggatgctggtggcaggtggggcgagcctgtcttcaggttccctaatggtgtgtgcargtgctggccgcaggtgggacagtttgacccccattcccccagatgcgcacaggcaccagcaacaatggcaggtgaggcgatcctatcctcaggccctggg

SEQ ID NO: 377691 - DNA, 201 bp, Homo sapiens
acacgcctgtggtcccaggtactcagaaggctgagccaggaggatcacttgagccttgaaatatatttgagggtacagtgagctatgattgtgccattgcrgtccagcctgagcgacagagaagactctgtctctaaaagtaagaataatgatgaaacaaactcagtagtcctatagaccattttttgtttgtttttgttt

SEQ ID NO: 377692 - DNA, 201 bp, Homo sapiens
tgggcacagttagtggagcctccacatgatttcattagcatcagtgttgtctgtgagctcctcagtggctgacagtgtagttgttaatggagtctgtggaraggctgtgctgggaacagggacatcaggcaggttggtcttcaagcaccagtggtgacagcagtatgccaggcatgctggtcctcaggcccccaggcagtg

SEQ ID NO: 377693 - DNA, 201 bp, Homo sapiens
tttgcatttccctagtgattagtgatgtcaagcattttttcatatacccattggccattttgtatgtcttcttttgagaaatgtctatttaggccctttgsctgctttttaatgggatgggttgttttctttgctgttgagttgttcacgttccttgtatattctggatattaaacccttgttggaaaaatagtttccaaa

SEQ ID NO: 377694 - DNA, 201 bp, Homo sapiens
cctagtgtgaaaggaaactgaagccaaaggggtctttgcccccaaagtatgccttggagctgctcaccatctatgcctgggagcaggggagtggagtgccrgattttgacactgcagaaggtttccggacagtcctggagctggtcacacaatatcagcagctctgcatcttctggaaggtcaattacaactttgaagatg

SEQ ID NO: 377695 - DNA, 201 bp, Homo sapiens
attggccattttgtatgtcttcttttgagaaatgtctatttaggccctttgcctgctttttaatgggatgggttgttttctttgctgttgagttgttcacrttccttgtatattctggatattaaacccttgttggaaaaatagtttccaaatattttctcccattctacagcttgtcttttcactcttgattgttccctt

SEQ ID NO: 377696 - DNA, 201 bp, Homo sapiens; identical to SEQ ID NO: 81660

SEQ ID NO: 377697 - DNA, 201 bp, Homo sapiens
ttgcatgacgggggaaagtgctagccaacagaacctgtcacagtctccagggataaaacctagcaggggcaggagaaaatgctgttcagaaaaaatagagmaggaaggttcaagataccacgtccctgagctgctttcatctaagaggtgttagagttggaagtgtgtccctaagaattaacgctatcattcacgggccga

SEQ ID NO: 377698 - DNA, 201 bp, Homo sapiens
taattttgtatttttagtagagacggggtttcaccatgttggtcaggctggtctcaaactcctgacctcaggtgatccacccgcctcagcctcccaaagtrctggaatttcaggtgtgagccactatgcctggcttttcttgcttttctaattccttaagatgaaccgttaggttgtttatttgaaattgttctacttttt

SEQ ID NO: 377699 - DNA, 201 bp, Homo sapiens
tgcctgtgctgctggtggtaaagaggacgggttaatctcctggcccctgggcagcacatgtggatgctggtggcaggtggggcgagcctgtcttcaggttycctaatggtgtgtgcaggtgctggccgcaggtgggacagtttgacccccattcccccagatgcgcacaggcaccagcaacaatggcaggtgaggcgatcc

SEQ ID NO: 377700 - DNA, 201 bp, Homo sapiens
attcagatgactgggggggcttagaattttgtttttggtttatatacctaagccaggattgtatctccagctcccccacctcctcactcacagcccatcamtaagtcctgccagttctgcctaacttgctcctaaatctgcatcatttctctcccttcccactgctacttccctagtcaacgtcaccaccagggatggggc

SEQ ID NO: 377701 - DNA, 201 bp, Homo sapiens
aagtggggagagggcttccagatcataggtagataagagaccaatggttgcattcctctgagtttctgattaacctcttccaaaggaggcaatcaaatacrcatttatctcagcagagggatgactttgaatagaatgggaggcaggtttgtcctgagaagttcccagcttgacttttccctttaaccgagtgattttggg

SEQ ID NO: 377702 - DNA, 201 bp, Homo sapiens
atgatggataaatggatggaaggtaaatggatggaaaaatgaatgtagatggatggatggatagatagatattaaatatatgtatatatttatggatgaggtagatagatggatagtctcaagcacaaagtctcaagtacaggtgcacatataatcacaaacttaaataattccaggctgggcacagtggttcttgcctat

SEQ ID NO: 377703 - DNA, 201 bp, Homo sapiens
tgatggataaatggatggaaggtaaatggatggaaaaatgaatgtagatggatggatggatagatagatattaaatatatgtatatatttatggatgaggtagatagatggatagtctcaagcacaaagtctcaagtacaggtgcacatataatcacaaacttaaataattccaggctgggcacagtggttcttgcctata

SEQ ID NO: 377704 - DNA, 201 bp, Homo sapiens
agacatcatccctttgcttccagatgtaacactctcttaagcattttctgtagaactagtctagtggtgatgaattccctctgtttttgcttgtctgggaragactttgtttctccttcatttttgaaggatagctttgctgggtatcgtattcttgtctgaaaggggttttttttagcactttgagcatatcatcctatt

SEQ ID NO: 377705 - DNA, 201 bp, Homo sapiens
tttcattccctttaatgaatgtgagtgcaaatggccacattgctggtggctgctctgttagtttaagtctagataatactttaataataccagctgcaccygtgtagaccacataatttttacatatctcattattctggagatgctccctgtgtcttagacatcagtcttttaaatatgctaatactattcacagtaatt

SEQ ID NO: 377706 - DNA, 201 bp, Homo sapiens
tgatgaattccctctgtttttgcttgtctgggaaagactttgtttctccttcatttttgaaggatagctttgctgggtatcgtattcttgtctgaaagggkttttttttagcactttgagcatatcatcctattctcttctgacctgtaagttttctgctcagaaatctgctattagtctgaggagaattcccttatatgt

SEQ ID NO: 377707 - DNA, 201 bp, Homo sapiens
catttggactataatgcagactaagtccagtattctttgctgaataaataatctgcaaatattcattaggtccatttggactataatgcagactaagtccrgtatttctttgctgattttctgtctacgtgatctgcccaataccaaaagtgagatgaagttcccagctattactgtattggcagtctctcggtctctgtt

SEQ ID NO: 377708 - DNA, 201 bp, Homo sapiens
ctgaagagttgggggctagggtttttaagggtttgggagtgggccaaagtgtggagatcgttgattggttgaagagtgcagcgtgaagtcatgggacaggragaggaagaaactgtgttctcatagtactgccgactcagtgcctctgttggggtcttcaaactggttgccatcagctgttctgctggaactcaggatcag

SEQ ID NO: 377709 - DNA, 201 bp, Homo sapiens
tttgctgattttctgtctacgtgatctgcccaataccaaaagtgagatgaagttcccagctattactgtattggcagtctctcggtctctgtttagctctmatatttgctttacatatctcagtgctctaccgttgggtggtcatacatatgtgtataaatatacatatacatatatatgtctatatacatatatacacat

SEQ ID NO: 377710 - DNA, 201 bp, Homo sapiens
gaagacactaacaaagaatggcgcattcctccttctcctttctgaggatgccctaccctgtaacaaagtcgtttctaataaatttgcttctttcaccatamtctgtacctgccttgaattctttcctgcatgagatccaagaaccctctcttgggatctgaatcaggaccctcttttccagcaacgctatcacctgtaaac

SEQ ID NO: 377711 - DNA, 201 bp, Homo sapiens
tcacaccacctaactctaactccaacaccaccacactccaactctaaccctcctgcctccatcttataagtacccttgtccttataagcacagtggctcaygcctgtaattacagcactttgagaggctgaggtgggaggattgcttaagaccaggagtttgagaccagcctggggaacctagtgagactcccatctctac

SEQ ID NO: 377712 - DNA, 201 bp, Homo sapiens
agttcaagaccagcctgggcaacaggcttttttttttctccaaaaaaaaagccaaacatggtggcacacgcctgtggtcccaggtactcagaaggctgagscaggaggatcacttgagccttgaaatatatttgagggtacagtgagctatgattgtgccattgcggtccagcctgagcgacagagaagactctgtctcta

SEQ ID NO: 377713 - DNA, 201 bp, Homo sapiens
ctgtaaccccagaatctagtgtctcatatctgcttctttgtcactggcagggtggctcctatggacggaaaacagtcttaagaggcaactccgatggtacscttgtcctcttcttcagtgacttaaaacaattccaggatcagaagagaagccaacgtgacatcctcgataaaactggggataagctgaagttctgtctgt

SEQ ID NO: 377714 - DNA, 201 bp, Homo sapiens
ctaaaaccaggttacataaataacaacgttccaatttctgtttcacatcaggcttaaatgataatcccagcccctggatctatcgagagctcaaaagatcyttggataagacaaatgccagtcctggtgagtttgcagtctgcttcactgaactccagcagaagttttttgacaaccgtcctggaaaactaaaggatttga

SEQ ID NO: 377715 - DNA, 201 bp, Homo sapiens
gatggataaatggatggaaggtaaatggatggaaaaatgaatgtagatggatggatggatagatagatattaaatatatgtatatatttatggatgaggtagatagatggatagtctcaagcacaaagtctcaagtacaggtgcacatataatcacaaacttaaataattccaggctgggcacagtggttcttgcctataa

SEQ ID NO: 377716 - DNA, 201 bp, Homo sapiens
catgtccagctcctccttcccatcatggcctgaactggtttttcaggtcaactttggaatgcctttgctgagaggagaggtccattcagatgactgggggkgcttagaattttgtttttggtttatatacctaagccaggattgtatctccagctcccccacctcctcactcacagcccatcactaagtcctgccagttct

SEQ ID NO: 377717 - DNA, 201 bp, Homo sapiens
ggcaggaggatcacttgagcacaggagttcaaggttgcagtgagctattattacaccactatactccagcctggacaacggagcaagatcttgtcaaaagaaaaaaaaaaaagaaagaaagaaaagaaaaggggaggggaggggaagagaggggaggggaagggaaaattcccaagctgaaacttaagccatcattaaaca

SEQ ID NO: 377718 - DNA, 201 bp, Homo sapiens
cgcattcctccttctcctttctgaggatgccctaccctgtaacaaagtcgtttctaataaatttgcttctttcaccatactctgtacctgccttgaattcyttcctgcatgagatccaagaaccctctcttgggatctgaatcaggaccctcttttccagcaacgctatcacctgtaaaccaaaagtatctgagacaggtc

SEQ ID NO: 377719 - DNA, 201 bp, Homo sapiens
ggaggatcacttgagcacaggagttcaaggttgcagtgagctattattacaccactatactccagcctggacaacggagcaagatcttgtcaaaagaaaaraaaaaaagaaagaaagaaaagaaaaggggaggggaggggaagagaggggaggggaagggaaaattcccaagctgaaacttaagccatcattaaacaaatg

SEQ ID NO: 377720 - DNA, 201 bp, Homo sapiens
gtttcctggctctgggcagcagcaagaattcctctgcctcccatcctaccattcactgtcttgccggcagccagctgagagcaatgggaaatggggagtcycagctgtcctcggtgcctgctcagaagctgggttggtttatccaggaatacctgaagccctacgaagaatgtcagacactgatcgacgagatggtgaaca

SEQ ID NO: 377721 - DNA, 201 bp, Homo sapiens
agccacagaaatttattctcttaccattctggctattacaagttcaaaatcagggtgttggcagagccaagctctctgcaggccctagggaagaattattycaggcttcctgcagcttctggtggttgccagcagtccttggcttgtggctgcatcactccagcctctgtccctgaggtcacatgcccttctccctacatg

SEQ ID NO: 377722 - DNA, 201 bp, Homo sapiens
tttaatctttttttaagagatggggctataactcgctacattggccaggctggtctcaaactcctgggctcaagtgatcctcccacctggcctcccaaagytctgggattacaagcgtgagccacctcacctggcccattgttatagttgttgtttatactgagccctttgagagtagactgccagacatctctttaccct

SEQ ID NO: 377723 - DNA, 201 bp, Homo sapiens
tacagaaactaaatggaggagaaagaggaggaagaggaggagggagggaagggagaagccttaatggcagagacataaatagcccacaaagcctaaaatasctactatctggcccttttgcagaaagtttaccaaccctgtacctcaattatggatattcacccaatgatcgccagacctgcaggagaaaacacacatcaa

SEQ ID NO: 377724 - DNA, 201 bp, Homo sapiens
agtgagctataatggcaccactgccccccagcttgggtgacagagcgagacactatttctgaaaaaacatgggttagaatcatgggttggaaggctacctrttgggttctatgctcactacctaggtgatgggatcattcatacaccaagcctcagcgacatgcaatttacccatgtaaaaccccacacatgtacctcctt

SEQ ID NO: 377725 - DNA, 201 bp, Homo sapiens
actcatgggtccctggccccagcaagtggcattagtcatggcagtaatacttcacacttgtagacaattttggtcccatttctcttttccaagcatggggstgcgtgcctataatcccagtaatcagggagactgaggcaggagaattgcttgaacccgggaggtggaggttgcagtgcgagatcgtgccactgcactcca

SEQ ID NO: 377726 - DNA, 201 bp, Homo sapiens
catgggtccctggccccagcaagtggcattagtcatggcagtaatacttcacacttgtagacaattttggtcccatttctcttttccaagcatgggggtgygtgcctataatcccagtaatcagggagactgaggcaggagaattgcttgaacccgggaggtggaggttgcagtgcgagatcgtgccactgcactccagcc

SEQ ID NO: 377727 - DNA, 201 bp, Homo sapiens
cgcaccagatttagcccagggggcggtagttcacaaagtccagatcagtgtcgtcccagagatctttctgtgatcatgaaaatgttctatgtctgggttckacaactactgagagcttgacatgtggctacagcaactgaggaactaaatttttaattttcattccctttaatgaatgtgagtgcaaatggccacattgct

SEQ ID NO: 377728 - DNA, 201 bp, Homo sapiens
accttgttaaaatgcagatcctgactcaggaggtctgagttagagcccaggatttcatatttctagccagctccatgatgagctgctggtccgcagatcaygcttgcaggttttgaccagagtcagtgttggttagagtaagaggatgaggcagacatctgggaaaagtccagctggggcaagcatttgaagtctgccttc

SEQ ID NO: 377729 - DNA, 201 bp, Homo sapiens
tggcaatgaatattccttcaataggcaccgtcctcagcaactataaggccaacttacaacatctgagaacaaccaaggttggccttcaactttcaagctgwgtgcccttccccacctccaggtgagctagcccatcttgtctgtgttgccagcaaaagtacaatatttgtatagaacagtaattacttgcctcttactgct

SEQ ID NO: 377730 - DNA, 201 bp, Homo sapiens
ggagtaattccctcctcttcaatttttttggaatagtttgagaagaattggtgttaattcttctttataagtttggtagagttcagcagtaaagccatctrgtcctgggctattctttgttgaggagttttttattactgattcaatctactcactcactattggtctgttcaggttttctgtttcttcctggatcaatct

SEQ ID NO: 377731 - DNA, 201 bp, Homo sapiens
gcccaggatttcatatttctagccagctccatgatgagctgctggtccgcagatcacgcttgcaggttttgaccagagtcagtgttggttagagtaagagratgaggcagacatctgggaaaagtccagctggggcaagcatttgaagtctgccttcctaccaggtcaaaatcaaggcaacgaccttccatagataactat

SEQ ID NO: 377732 - DNA, 201 bp, Homo sapiens
acacaaacatgcacacacacactcacacacatgcacacacatgtactcacaccatgcacacacgcacacacgcacacacatacatgcatacacacatgcayacatgcactcacacacatgcacacacgtactcacaccatgcacacacatgcactcacacacatgcacacatgcactcatgcacacacatgcatgcacacc

SEQ ID NO: 377733 - DNA, 201 bp, Homo sapiens
gtctttggtctagttttggtatcagggtaatgctgacttcatagaagtggttaggagtaattccctcctcttcaatttttttggaatagtttgagaagaaytggtgttaattcttctttataagtttggtagagttcagcagtaaagccatctggtcctgggctattctttgttgaggagttttttattactgattcaatc

SEQ ID NO: 377734 - DNA, 201 bp, Homo sapiens
ttagccacaaaatacttgcatagaccaatatcatgaagcattactcttctgctttattctattaattttatcatttcaggccttatgtttaactctttaayccatttttagttaattttttataagatgacagacgggggcctagtttcattcttctacatatggatatccagttttcccaacaccatttattgaagagag

SEQ ID NO: 377735 - DNA, 201 bp, Homo sapiens
ttgtggctgcatcactccagcctctgtccctgaggtcacatgcccttctccctacatgtcttcacatcaccttccctctgtgcatgtctgtcttatcatcycctcttcttctaagaacaacagtcatactgaattagggcccaacataatgacctaatcttcactagatcccatttgaaaagacactatttccaagtaaca

SEQ ID NO: 377736 - DNA, 201 bp, Homo sapiens; identical to SEQ ID NO: 81644

SEQ ID NO: 377737 - DNA, 201 bp, Homo sapiens
tctgcatgttggccaggatgttctcgaactcctggccctcaagtgatcctcccacttcagcctcccaaagtgctgggattacaggcatgagccactgcacrcggcctctagaaagttactttgaaccctactagtaaatttgagttgctgacatctaagctgtaagaacacattgtcttattgctgaaagtattataggat

SEQ ID NO: 377738 - DNA, 201 bp, Homo sapiens
ttcaagaatagtaagaaatcatatccatctgcttagggccaccagcaagggacaaaaacaatggaaaccagaggaaaggaaagagagaaaataaaggagcrttgaaaaagaatagaggagaagtaagagagaaggagacccccggtgggttgcctaccctgggttcttggcaacattgtatttgattaaattatgtatcat

SEQ ID NO: 377739 - DNA, 201 bp, Homo sapiens
ctgcatcttctggaaggtcaattacaactttgaagatgagaccgtgaggaagtttctactgagccagttgcagaaaaccaggtgccttcaccctagccccrtacttttcttaacctgattcccttgaacactgtctcagcaacctggattttcctctgctggggtcacgattcattccttgcatgacgggggaaagtgcta

SEQ ID NO: 377740 - DNA, 201 bp, Homo sapiens
catgctctctctcagaaggcaggttgaagctgtaggtggaaccggggctgcattttctatacacccagctcacaggagcttgaacaactggtcagcccctragcccctactacaagtgatcctcaggcaggtaaccccagattcatgcactgtagggtgctgagcagcatccctagtctctacccagtttcccctcacttg

SEQ ID NO: 377741 - DNA, 201 bp, Homo sapiens
ctgcacccgtgtagaccacataatttttacatatctcattattctggagatgctccctgtgtcttagacatcagtcttttaaatatgctaatactattcasagtaatttccaagaattaaatcatatttgtcaaaaatgttttggaatctgttacttactatgtgtattaaagcaggatgtcaatctctccctcatgccag

SEQ ID NO: 377742 - DNA, 201 bp, Homo sapiens
tggataaatggatggaaggtaaatggatggaaaaatgaatgtagatggatggatggatagatagatattaaatatatgtatatatttatggatgaggtagatagatggatagtctcaagcacaaagtctcaagtacaggtgcacatataatcacaaacttaaataattccaggctgggcacagtggttcttgcctataatc

SEQ ID NO: 377743 - DNA, 201 bp, Homo sapiens
tagatagatattaaatatatgtatatatttatggatgaggtagatagatggatagtctcaagcacaaagtctcaagtacaggtgcacatataatcacaaacttaaataattccaggctgggcacagtggttcttgcctataatcccagcgctttgggaggctgaggcaagaggattacttgaggccaggagtttaagacca

SEQ ID NO: 377744 - DNA, 201 bp, Homo sapiens
ccttttatttttggataactccaactcatcctttaagtcctctggctctctatgtctgggttagatccactttccacatgctccagtagcaatttgtgctktctgaatcatgggatttatcactttgcaaaccccaactatctgagacaggtctcagttagtttagaaagtttattttgccaaggttgaggatgcgcaccc

SEQ ID NO: 377745 - DNA, 201 bp, Homo sapiens
ccagaagctgccactagatggtggtaaagctgcacattccaaattattataagctcctttttctgcaaggaaacacagggtcactttctgagaaaagcaacctacaggggaattggtaacttgctttttgttttgttttgttttttaaactaaatattagcctaactaatctggcctatttttacaccaggtccaggctgg

SEQ ID NO: 377746 - DNA, 201 bp, Homo sapiens
ttgaagtctgccttcctaccaggtcaaaatcaaggcaacgaccttccatagataactatcaaagcttgagggggtgccttgaacccaactcctaaatcccyaagacctgcccacctcttgtgtctcctgtctcagcaaacattcccacactcttgcatattgttaaagtaacctctgcttaccaggcttctggtttaataa

SEQ ID NO: 377747 - DNA, 201 bp, Homo sapiens
ggttgccatcagctgttctgctggaactcaggatcagaagaacatcttaagcaattcttaaacagaagccttatgtttttttttgtttgtttgtttgtttktttttttgaggcaggggtctagctgtgtcacccaggctggagtgcagcagtgtgatctcggctcactgcaaactccatctcccaggctcaactgatcctc

SEQ ID NO: 377748 - DNA, 201 bp, Homo sapiens; identical to SEQ ID NO: 81647

SEQ ID NO: 377749 - DNA, 201 bp, Homo sapiens; identical to SEQ ID NO: 81651

SEQ ID NO: 377750 - DNA, 201 bp, Homo sapiens
  misc_feature (1)...(201): n = A,T,C or G
agtccactgaactgtaggcattctagcaaaggacaatgacttcctgtagacctctggtttcttgatttcagatccctgacatggtaagaactagatccccnaatgagctgctaccctttccttatcccacagtgccagaaaaaaatcaaggatttaccctcgctgtctccgtatgccctggagctgcttacggtgtatgcc

SEQ ID NO: 377751 - DNA, 201 bp, Homo sapiens
ttatcgagttgctcattgacttttcaaggctagtaaggtgcctggaatttccctcgaaagaactccagattttcctttattttcatgcttgtgggatgggrgcagtgggtggcctgcagacacctaagagaggtccctgctccatcccagttgttccacatctttgtcaagacttggtattgtcagtccactgaactgtag

SEQ ID NO: 377752 - DNA, 201 bp, Homo sapiens
cagattgacagtgctgttaacatcatccgtacattccttaaagaaaactgcttccgacaatcaacagccaagatccagattgtccgggtgagcactggccyttctcatgtcttgttggaatgatgtaatattgggcattcctggaagggaggtaagtgggcattgtagctctccaggatccatctaccttcagaaacttga

SEQ ID NO: 377753 - DNA, 201 bp, Homo sapiens
gtaaaagaaaaccctttgctttggactcagccctcactgaaccctaacgcagaacttggccttggaaacagtgtcagttagcccaactggtgccagcccaygggggcacgggactcctcggttaaggaaattctggatctcaaccttcctttcttccttagggaggatcaaccgccaaaggcacagctctgaagactggct

SEQ ID NO: 377754 - DNA, 201 bp, Homo sapiens
ttcaaactggttgccatcagctgttctgctggaactcaggatcagaagaacatcttaagcaattcttaaacagaagccttatgtttttttttgtttgtttktttgtttgtttttttgaggcaggggtctagctgtgtcacccaggctggagtgcagcagtgtgatctcggctcactgcaaactccatctcccaggctcaac

SEQ ID NO: 377755 - DNA, 201 bp, Homo sapiens
aactggttgccatcagctgttctgctggaactcaggatcagaagaacatcttaagcaattcttaaacagaagccttatgtttttttttgtttgtttgtttktttgtttttttgaggcaggggtctagctgtgtcacccaggctggagtgcagcagtgtgatctcggctcactgcaaactccatctcccaggctcaactgat

SEQ ID NO: 377756 - DNA, 201 bp, Homo sapiens
ttgctatgttacagtttgtgtgtgcacacgttattattgttgttgttatagttgtttttaatctttttttaagagatggggctataactcgctacattggccaggctggtctcaaactcctgggctcaagtgatcctcccacctggcctcccaaagttctgggattacaagcgtgagccacctcacctggcccattgttat

SEQ ID NO: 377757 - DNA, 201 bp, Homo sapiens
tcagtaaactcctatgatcccctcacatagatgcagtacccatgtgcaacatttgctatgttacagtttgtgtgtgcacacgttattattgttgttgttayagttgtttttaatctttttttaagagatggggctataactcgctacattggccaggctggtctcaaactcctgggctcaagtgatcctcccacctggcct

SEQ ID NO: 377758 - DNA, 201 bp, Homo sapiens
aggttactatgggtatttccctacatgtctttttgtgaatgtaagcattcatttctcttggataaatatgtagcagtagaattgctgggctatccagtgcmcatatatgaatgttgtgtacatatatgcgtgtaaatatataaaatatatatgtagtttgtttttttgtttaaccatagcaaatcttgccgaatcatttcc

SEQ ID NO: 377759 - DNA, 201 bp, Homo sapiens; identical to SEQ ID NO: 81650

SEQ ID NO: 377760 - DNA, 201 bp, Homo sapiens
gcctgtaattacagcactttgagaggctgaggtgggaggattgcttaagaccaggagtttgagaccagcctggggaacctagtgagactcccatctctacaaaaaaaaaaaaaaaaaaaaaaatagctaggcgtggtggcacaaacctgtagtcccagctactcaggagactgaggctggaggatcccttgagcccaggaa

SEQ ID NO: 377761 - DNA, 201 bp, Homo sapiens
cacttgctccctactaatttggataattccctttctcgtttataattccatctcttgtccctccattaggttctgctgatcttgtcttgggttaacaccayactgttttcattacagtcagtttagactacactttattatctaatgggccaagtcacccttccctactatgttttatgtaaaggtacctgtcctctgacc

SEQ ID NO: 377762 - DNA, 201 bp, Homo sapiens
gtttattttatttttatttttattttgagacaaagtctcactctgtcacccaggctggagtgcagtggtgcaattatggcccagtgcaacatccacctctyggggtcaaggagttcgcatgccttagcctcctgagtagctgggattacaggcacctgccaccacgcccagctaatttttgtatttttagtacagacgggg

SEQ ID NO: 377763 - DNA, 201 bp, Homo sapiens
actgggagagaataaacttctgttgttttaagccacctagttgtggtcacttgttatggcagcctttggaaaccaacacacccgcacatggcgtgtttaaygcaggctgatacaaccttaagaaaggaatggatgtggtcatcagcaatctccaatacctacagcaaatgggaagacagggaaggaccagaggtgtaggta

SEQ ID NO: 377764 - DNA, 201 bp, Homo sapiens; identical to SEQ ID NO: 81641

SEQ ID NO: 377765 - DNA, 201 bp, Homo sapiens; identical to SEQ ID NO: 81643

SEQ ID NO: 377766 - DNA, 201 bp, Homo sapiens; identical to SEQ ID NO: 81656

SEQ ID NO: 377767 - DNA, 201 bp, Homo sapiens; identical to SEQ ID NO: 81659

SEQ ID NO: 377768 - DNA, 201 bp, Homo sapiens; identical to SEQ ID NO: 81661

SEQ ID NO: 377769 - DNA, 201 bp, Homo sapiens; identical to SEQ ID NO: 81664

SEQ ID NO: 377770 - DNA, 201 bp, Homo sapiens
atgctcagtgcttattagagaaaagccatccaagaagaaccttcccaggttagaccactgagccctctcagctttcctgggaaccgcactggagacaactrtattaattgaggccaaagaggccaatcaaattccacagttcacagacagattaatttatattcaagttatgggaggcggaatctataccccgtttgcaca

SEQ ID NO: 377771 - DNA, 201 bp, Homo sapiens
gcctccatcttataagtacccttgtccttataagcacagtggctcacgcctgtaattacagcactttgagaggctgaggtgggaggattgcttaagaccargagtttgagaccagcctggggaacctagtgagactcccatctctacaaaaaaaaaaaaaaaaaaaaaaatagctaggcgtggtggcacaaacctgtagtc

SEQ ID NO: 377772 - DNA, 201 bp, Homo sapiens
aggctgaggtgggaggattgcttaagaccaggagtttgagaccagcctggggaacctagtgagactcccatctctacaaaaaaaaaaaaaaaaaaaaaaawagctaggcgtggtggcacaaacctgtagtcccagctactcaggagactgaggctggaggatcccttgagcccaggaattggagactgcagtgagctataa

SEQ ID NO: 377773 - DNA, 201 bp, Homo sapiens
taggccatgagtgggatagataccactgctgctttaaaaaatgggagaccatagaccctcaggagagaagaatcccttctaccctggactcgctctcttckctggaactaacttctcccccataccctgattgtctttggagaaaatgttctggattctagaatctaaggcagagccttttaagccatactgtacacataa

SEQ ID NO: 377774 - DNA, 201 bp, Homo sapiens
gaggcagaagaattgcttgaacctgggaggcaaaggttgcagtgagccaagattgcaccactgcactccagcctgggggacagagtgagacttcgtttccaaaaaaaaaaaaaaaaaaatgtaaaaaatggtgagtagaaagacaagaatgaacatttgaggactgagtttggctttttgttttgactcatgtcttaaaag

SEQ ID NO: 377775 - DNA, 201 bp, Homo sapiens
actacagaatgaattcctagaagtgaaattgcaggagcagtgattatgtgcatttaaagattaccaaaccctctcccttgaagaaattaccagacccttgyccggtgcagtggctcacacctttaatcccagctctcagggaggcagaggcgcgaggataccttgagcccaggagtttgagacctgcctgggcagtatagc

SEQ ID NO: 377776 - DNA, 201 bp, Homo sapiens
ggcctcccaaagtgctgagattacaggtgtgagccaccgcgcccggcagcattattttttaaagatctgtgatagtgcatgttgtgctagttctttaatayagactatattgtattccatgtcagtttttaaagtttatttccctattgatggcatttaattccaacttttagataaaaggatgtactggacatttttata

SEQ ID NO: 377777 - DNA, 201 bp, Homo sapiens
ctacaagatttctttgtaaaggtacattttatgctctttgcaattagcaagtaaaggatggattacttctttggcatcctggaaataatcttatttccaamatccttttaccaggtgcactcacacacacccccactctcactcatgctggtacagtttaaccatgccagttaatctagcatgtttatctttggaatttgg

SEQ ID NO: 377778 - DNA, 201 bp, Homo sapiens
ctcgaactaagctcaagcaatccacctgcctcgacctcccaaagtgctgagattacatgcatgagccatgagccattgtacccagccctgctgtcttctctttttttttttttttttttttccttcagactgagtctcgccctgttgcccgggctggagtgcagtggcacgatctctgctcactgcaagctctgcctccca

SEQ ID NO: 377779 - DNA, 201 bp, Homo sapiens
atgttgcccaggttggtcttgaactcctgggctcaagcagtctgtccaccttggccttccaaagtgttgggattacaggcatgtaccaccacacttggcctttttttttaaaatagtattgtaaatatttgggtttttaaaataaaacatttattctcagagttgtggaggctagaagttggaaatcaaggtgtcagcagg

SEQ ID NO: 377780 - DNA, 201 bp, Homo sapiens
tccccttcctcctgcctttccttttttccttttttcttttttttcttttgagacagagtctcgctctgtcccccaggtggggagtgcagttgtgcgatctyggctcactgcaagctccgcctcctgggttcacgccattctcctgcctcagcctccggagtagctgggactataggcgcccgccaccacgcccggctagta

SEQ ID NO: 377781 - DNA, 201 bp, Homo sapiens
ttgaaacatggtgtctgtctgtctatctatcatccaggctggggtgccgtgttgtgatcacagctcacgccgcagtcttaacctgttgggcttaagtgatsctcccaccacagcctcccaagtagctggcattacaggcatttgccaccatgcctggctgattttttttactttttgtggagacagggttttgccatgttg

SEQ ID NO: 377782 - DNA, 201 bp, Homo sapiens
ccatgcgccttagccgcccagagtgctgggattacaggcatgagccgctgcgcccagcccagatagactatttgtattaaacgtttcctggcaacttgcartagcttaagccggtaatcccagcgttttggacggctgaagcaggaggattgcttgagcccaggagtttgagaccgatctgggcaacatagtgagaccctg

SEQ ID NO: 377783 - DNA, 201 bp, Homo sapiens
ctggcatctatttagtatatatgacatcatctgtggttcaattctttagtgtaactttacattttttatttattcacatatttactgaatgctacctatgytaataaaatggacatgatccttgctgttatggaataaattatggctcagtaaggcagtgagaaattgaacagctaataagtgtgtttgttgactttaagt

SEQ ID NO: 377784 - DNA, 201 bp, Homo sapiens
ttccctgaataaagtctaaactccatggcttggcacttgaaacctagaacctgaccccagtcttgtttcccactctaatcttctaccacttccacccacartgtgggtctcattttccatcttagattgtttatttgtaggtgatgcttattcttccacagctttctatcagtttcacttaaatctttgtccctattattt

SEQ ID NO: 377785 - DNA, 201 bp, Homo sapiens
agaaattgaacagctaataagtgtgtttgttgactttaagtaaggggacctatggaagttgggtattctagcctcagggaaagagtttcttgggaataacyggtaactgatacttacaggataaattagaatgaccatgatcaactctgtatacgtatagatagttaataatcattttacaatgaataatggaaaaacatt

SEQ ID NO: 377786 - DNA, 201 bp, Homo sapiens
gtgccaccacgccctgctaattttcatatttttttttgtagagatggggtttcaccgtgttgcccaggctggtcttgaactcctgggctcaagcaatctayctgcctcggcctcccacagtgctgggattataggcatgagacaccatacccagtcaacttttaactttttatcaataaaattttgaagagaaaagtcgaa

SEQ ID NO: 377787 - DNA, 201 bp, Homo sapiens
acaatttatatagtggcaacacaaatatagttccaactcatgtattattttggatatgtatctttctctagcttttatgctcctgagtcatataggtcttwtacacctatatattatcagtaattcccaatagtatagtgtcccttgggcatatgatagcagtcactcagaatgttctagaatttgttcattcaacctatt

SEQ ID NO: 377788 - DNA, 201 bp, Homo sapiens
ttttttgtagagatggggtttcaccgtgttgcccaggctggtcttgaactcctgggctcaagcaatctacctgcctcggcctcccacagtgctgggattayaggcatgagacaccatacccagtcaacttttaactttttatcaataaaattttgaagagaaaagtcgaaaggacagtacacttgtatccccactagctaa

SEQ ID NO: 377789 - DNA, 201 bp, Homo sapiens
tgaactcctgggcttaaacaatcctcctgcctcagtctcccaaagtgctgggattacaggtgtgagccaccactcctcctggcctccactttcggtagttrtgaacatgtggctagttttgtctgtcagattcccactcccttctagattattttgctgtttgtttgtttgttgtttgagatggagtctcactgtctccca

SEQ ID NO: 377790 - DNA, 201 bp, Homo sapiens
ctcaaaaaaaacaaaaacaaaaaaaagcaagaaacacacttcacatatcttcaggtcttaaaactggaagttacagatggaaatatgaactcacatctacmatgaagtgggagctgaagtgttaaactaaagagtgaatgaaatttacagtgcatcctgtaggaagagataagaaccgttgatgctatgccaatattgata

SEQ ID NO: 377791 - DNA, 201 bp, Homo sapiens
aagaaacctgagtacccggagaaaacccacaaagacgtggggagaacatggcaagctccacataagacagcagcccgtgtgggatttttttttcctcatamatgttataaggaaatgatgttatccaaggacctgctgtattctctttttctctcttttttttttttttgagatggagtctccctctgtcacctaagctgg

SEQ ID NO: 377792 - DNA, 201 bp, Homo sapiens
cactgcacgtggcctgtctgctcttaaagagattaataaattagagggaaaactcagaatgtctttgtaatttaaatttttgttaagggaaaataataacrtttaaaataattgtttctctgtgttaataatgggtactgtacaattaatttccttttttaaaaaatatattttttgagacagagtttctctcttgttgcg

SEQ ID NO: 377793 - DNA, 201 bp, Homo sapiens
taattatttagcacatgattttatagatggaaaaactaagaccaaaggtatgaaaagtaattggagtgggagaaaaccataaaactagaaaaaatcaattmagtgagtgtctattatgacctttccttctgattttactcttttacaagagaaggtataacagaacaaaatagaacagcagttggtaagaagacttggagc

SEQ ID NO: 377794 - DNA, 201 bp, Homo sapiens
aatttttattattcttcatgaccctgaataatctggcttttgactgcttctcctgcctcatttcatcattttcattctttgtattgtagtcacattggcgrcatttcaattcctaaacctgtcaagtcctcgtttgcctccattttgcacagcgtgtacgctctgccttaagtgctggcttttcctaaagttaagtctttt

SEQ ID NO: 377795 - DNA, 201 bp, Homo sapiens
accacacttttccaaacggattacctctagcctgcatgattgcattagtctgcctccctgcttctggcttttacctactcaggctattcccagcacccagmatgacaactttgaaaacaaagcttgccgccacgtgcagtggctcatgcctgtaattccaacgctttagaaggcggaagtgggcagatcgcttgaggtcag

SEQ ID NO: 377796 - DNA, 201 bp, Homo sapiens
catgtataaaagaatatttatggcagatttattaatagccccaacgggaaataacttagatgtctcatcaacaagaaaattgatacattgtgatcacacaytggagcactacataaacagtaaaaaagagcctatcattgacacaaacaacatggatgagactcagtcatgttgagtgacaaaagccagacacaaaagaat

SEQ ID NO: 377797 - DNA, 201 bp, Homo sapiens
cattagaaatgccttgaagcccccagggaacatcaggaaaaaaaaaaaaaaaaaaaaaccaaccagaggtcccgctatgtgtttagctgagttgggagaaraaagtttaaaaaagcaatctttgacctatccttatgaaaaatttacagtgataacacaattcttcagaatttcacccaaaagctacagctgccttggttg

SEQ ID NO: 377798 - DNA, 201 bp, Homo sapiens
actgtcttatttggtggcaggggtaagggaattttcacctgagttagcaagttaattccaaataagataattatctcttttccacttaacccccaaattcstaggcctcatctttattgacatctcaatcttttgagtgggcaaaggcaaggtgtttggtgtattaaagacatgtaaatatttttagttaggaaacaaata

SEQ ID NO: 377799 - DNA, 201 bp, Homo sapiens
ttaggcacatgaattggaactatggaacaaagagattattgatacaattattcaagaagcacatttgcatatttagaacagaaaggttgcacagctcttayatactcaaacatagttttagagttagatcatgatcttaactttcttcatggttaccttttggggaggaaaaccaccctttttcatattaaagtaaaatgt

SEQ ID NO: 377800 - DNA, 201 bp, Homo sapiens
acaggttttttgttgtttttgttgtttgtttgttttgttttgttttgtttagaacagtacctgtataaatatggaaggaaacttctgggaaaataagttgsaaagaacatttaggaaagggtcacatcatttaatcttggaataaatataaccaataaatagcttattttcaccagtattttttgatattttagtagcccc

SEQ ID NO: 377801 - DNA, 201 bp, Homo sapiens
cttagtatgagaacttgaacttgccaaggaggtagagattttttaactcctgaagcataatttagttaagttagcttagtaattaagagcgtgggctttaraattagatttgctttgagtcctggcttttcttcttaaaacctgaagtactggctctgtatctcgatttttttaatctgtaaaaatgtgggaagattagga

SEQ ID NO: 377802 - DNA, 201 bp, Homo sapiens
tacagaatgaattcctagaagtgaaattgcaggagcagtgattatgtgcatttaaagattaccaaaccctctcccttgaagaaattaccagacccttgccyggtgcagtggctcacacctttaatcccagctctcagggaggcagaggcgcgaggataccttgagcccaggagtttgagacctgcctgggcagtatagcga

SEQ ID NO: 377803 - DNA, 201 bp, Homo sapiens
ttttttttttgagacggagttttgcttttgttgcccaggctggagtgcaatggcgcgatcttggctcaccccaacctccgcctcctggattcaagcaattytcctgcctcggcctcctgagtagctgggattataggcatgcaccaccatggctggctaattttgtattttaagtagaggcgaggtttctccatgttggtc

SEQ ID NO: 377804 - DNA, 201 bp, Homo sapiens
tttttaatcccctattttccccacccccgcggggccggaagcgccccccacacacgggcagagccagggcagcatgtaggcgcagggcgggagggtgtatrgggcgcgctcgcgctggcggggccggctccacgtgggcgtaaaggggtaggggcgggagcggctcgtgcggtgtgttccaggcctcgcgcgcgcggcgac

SEQ ID NO: 377805 - DNA, 201 bp, Homo sapiens
tggaagcgcaggacttcaccccagaggccattgtggcgggggtgggcaaccctggcccggttccgcgcgctgtttttttttaatcccctattttccccacycccgcggggccggaagcgccccccacacacgggcagagccagggcagcatgtaggcgcagggcgggagggtgtatggggcgcgctcgcgctggcggggcc

SEQ ID NO: 377806 - DNA, 201 bp, Homo sapiens
taaccttcgcctcccaggttcgagcgattcctgcctcagcccctcaagtaactgggattacaagcatgtgccaccacatctggctaatttttgtatttttrgcagacagtgtttcgccatgttgcccaggctggtctcaaactcctggcctcaagtgatctgcctgcctcggccttcctaaatgctgggattacaggcgtc

SEQ ID NO: 377807 - DNA, 201 bp, Homo sapiens
tatgagaatcacctgagccaaagaggtcaaggctacagtgagccttgattgtaccactgcactttagcctaggcagcgtgagaccctatctcaaaaaaagaaaaaaagaagaatgatctaatttacatggtaaaaatgggcattctctttacatgtaacatttttaatatgtccacatatttatacatacctctattaatt

SEQ ID NO: 377808 - DNA, 201 bp, Homo sapiens
atgagaatcacctgagccaaagaggtcaaggctacagtgagccttgattgtaccactgcactttagcctaggcagcgtgagaccctatctcaaaaaaagaaaaaaagaagaatgatctaatttacatggtaaaaatgggcattctctttacatgtaacatttttaatatgtccacatatttatacatacctctattaattg

SEQ ID NO: 377809 - DNA, 201 bp, Homo sapiens
attaaaaaacaggattaatttggagtgatgtgaactttgaaaaatatgggttttaagtcatgtattgtttatgaactaaacgttctgtactaaaaaatatktaacatagaaaaagagtaaaaattgtggttttttttttgggttggaggaggaagccaaagacagtcattcttacactgtttcatctagtaatcaagttta

SEQ ID NO: 377810 - DNA, 201 bp, Homo sapiens
gtgaactttgaaaaatatgggttttaagtcatgtattgtttatgaactaaacgttctgtactaaaaaatatttaacatagaaaaagagtaaaaattgtggktttttttttgggttggaggaggaagccaaagacagtcattcttacactgtttcatctagtaatcaagtttaagaaagtcagtctaaaagcaaaaaacata

SEQ ID NO: 377811 - DNA, 201 bp, Homo sapiens
ctgaattttctgtttaagcagaacccatgtatcgtgggggtatagtgcagaatataatatcttagtgttcatctgtggatgattagatttatcgctttggrcctgatatacatggaattggcaaacataaaatagcttttatactatttttccctaataacattcctagaaagtcaagaagccattgtattgttgttcata

SEQ ID NO: 377812 - DNA, 201 bp, Homo sapiens
cctcatctcctctttgggttaagttaaatttaaagattgttaatttttaatattaaaagctattcttcaagaagttaatgttttaaagtaaaaactattayaatatgaataatatagttatcataaagattccttagttgtattaccctgatcaaataatgctatgattaatgctaagtggtcatatattgaaagttgtca

SEQ ID NO: 377813 - DNA, 201 bp, Homo sapiens
gaggtaggagaattgctggaactgggaggtgaaggttgcagtcagccgagatcgcaccattgcactccagtctgggcaacagagtgagaatccgcctcaartaaaaagtagccagaagagaggccaggcgcaatggcttatgcctgtaatcccagcactttgggaggctgaggcaggcggatcacctgaggccagaagttc

SEQ ID NO: 377814 - DNA, 201 bp, Homo sapiens
tgtggtggtgtgtgcctatagtcacagctacttttaagatggatcacctgagtctgggaagttgaggttgcagtgagccacagcagtgagaccttctctgsgggggaaaaaagggagaaatgtttgttgtgcataagccctatattactgtcttacttagcttgcattgtatttgatatttagccttataataacattttt

SEQ ID NO: 377815 - DNA, 201 bp, Homo sapiens
cttttaagatggatcacctgagtctgggaagttgaggttgcagtgagccacagcagtgagaccttctctgcgggggaaaaaagggagaaatgtttgttgtrcataagccctatattactgtcttacttagcttgcattgtatttgatatttagccttataataacatttttgccgtaatattaagtgcacattcattccat

SEQ ID NO: 377816 - DNA, 201 bp, Homo sapiens
gtcctaccacctcagcctcccaagtagctgggaatacaggcgcataccaccacacctggctaatgtttgtattttttttagagacagggttcctgttgccyaggctggaagctttgtgtagtctgacaatgataaagatgatagttaattatttagcacatgattttatagatggaaaaactaagaccaaaggtatgaaaa

SEQ ID NO: 377817 - DNA, 201 bp, Homo sapiens
caggaggtcgaggctgcagtgagcgatagtcatgccactgcactccagccttggtgatagagcaagaccctgtctcaaaaaaaaaaaaaaaaaaaaaaaarggaaaataagagaaaatctagttttggtaaacatattttctgttttcaaagtcagtgatttttttatttttactaattactgtcattgattttagaagct

SEQ ID NO: 377818 - DNA, 201 bp, Homo sapiens
cccgggttcaagcgattctcctgcctcagtctcccgagaagctgggattacaggcatgcaccaccacgctcagctaattttgtatttttagtagagaccgrgtttctccatggtggtcagtcaggctggtctcgaactccgggactcaggtgatctgccagccttggcctcccgaagtgctgggattgcaggcgtgagcca

SEQ ID NO: 377819 - DNA, 201 bp, Homo sapiens
aggccattgtggcgggggtgggcaaccctggcccggttccgcgcgctgtttttttttaatcccctattttccccacccccgcggggccggaagcgcccccyacacacgggcagagccagggcagcatgtaggcgcagggcgggagggtgtatggggcgcgctcgcgctggcggggccggctccacgtgggcgtaaaggggt

SEQ ID NO: 377820 - DNA, 201 bp, Homo sapiens
caataatcttttccccttaccactccctcaccccaggcatatattataagcaggagcatgtcctcctgccaaattccctccctgttcccacccaccccccmacccttcttatctcgagaaatgtcagaaccttcccctgggcaggcttagccaggaataaaacatttttgtcttccctcgttctataggacccttttccct

SEQ ID NO: 377821 - DNA, 201 bp, Homo sapiens
atcacctgagccaaagaggtcaaggctacagtgagccttgattgtaccactgcactttagcctaggcagcgtgagaccctatctcaaaaaaagaaaaaaagaagaatgatctaatttacatggtaaaaatgggcattctctttacatgtaacatttttaatatgtccacatatttatacatacctctattaattgataaag

SEQ ID NO: 377822 - DNA, 201 bp, Homo sapiens
atgattattctacatagtaaggcctgagtccttatgaatgaatatatgaatatttacatagccacattaactatgtcttactgatttgagacttgagcaaratttatttaccggacatagatttatgaggtactgatttattcatattatcttctaaattataaagattgacacattttgaaatttcatattcctgtttgc

SEQ ID NO: 377823 - DNA, 201 bp, Homo sapiens
tatttaccggacatagatttatgaggtactgatttattcatattatcttctaaattataaagattgacacattttgaaatttcatattcctgtttgcctgytaggatttgttataatagatttaagttgattgtatatactgatcctaaagatatcagtacaatatagatttgatcactactttgtaaatagaagaagaaa

SEQ ID NO: 377824 - DNA, 201 bp, Homo sapiens
gaacaaaagcatgttttcagttatatactttttcacattactgaatttagattagagcagtccaaaattgcacacatttctttatattatcgaagatacartttctatagtattcattttttttttttaaagttttaggccggttgctggccggatgtggtggctgatgcctataatcccagcagtttgggaggccgaggt

SEQ ID NO: 377825 - DNA, 201 bp, Homo sapiens
gagtggaagcaacagagagcagggaagttgccacatacttttaaaacactttgtttgagacagtctcacactgttgagcaggctggtgtgcaatggcacartcttggctcactgcagcctccgcctgctgggttcaagcgattctcctgcctcatcctcctgagtagctgggactacaggtgcgtgctatcacgcctggct

SEQ ID NO: 377826 - DNA, 201 bp, Homo sapiens
gcgtgctatcacgcctggctagtttttgtatttttagtgagatggtgtttcactatgttggccaggctggtctcgaactcctgacctcatgatctgccctyggcctcctaaagtgttgggattacaggcgtgagccacgcacccggccaaaaaacactttttttttttttttttttttttttttggagactgtcgcccaag

SEQ ID NO: 377827 - DNA, 201 bp, Homo sapiens
aggctggtctggaattcctgggctcaagtgatccacccgccttggcctcccaaattgctggggttaaaggcatgagccactgcatccagccttaaaacacttttttttttttctttgagacagagtttcgctcttgttacccgggctggagtgcaatgtcacgatgttggctcactgcaacctccacctcccgggtgcaag

SEQ ID NO: 377828 - DNA, 201 bp, Homo sapiens
catggtttttctctgtcgcctaggctggagtgcagtgacaacgatcacagctcactgcagccttgaccttccaggccccaagcattcttcccacctcagcytatcacaggtgcacaccaccatgcctggctaattttttaaaattactttttgtagagatgggtcttgccatgttgcccatgctggctggtactcaagcaa

SEQ ID NO: 377829 - DNA, 201 bp, Homo sapiens
agctcactgcagccttgaccttccaggccccaagcattcttcccacctcagcctatcacaggtgcacaccaccatgcctggctaattttttaaaattactytttgtagagatgggtcttgccatgttgcccatgctggctggtactcaagcaatacccctgttttgacttcccaaagtgctaggattataggcatgagcca

SEQ ID NO: 377830 - DNA, 201 bp, Homo sapiens
gagtgcagtggcgcgatctcggctgactgtaagctccgcctcctggcctcagccattctcctacctcagcctcctgagcagctgtgactacaggcacctgycaccactccaggctaattttttgtatttttagtagagatagggtttcactgtgttagccaggatggtctcaatctcctgacctcgtgatccgcccgcctt

SEQ ID NO: 377831 - DNA, 201 bp, Homo sapiens
tgagtaaatcctgtccctcagtagatcatctcttgggatctggtttcttgatctgtatttcaatatattctatattccatatagatcaagactttctaacrtaaagcagtgtggaatagacttactttttatcttctctgttactcttttgatttgtgacttttaccaatttattgaacttcttaagtgtcagtgttttta

SEQ ID NO: 377832 - DNA, 201 bp, Homo sapiens
tactttgatattaataaaggcattctcggacccaggtcactggttggcctgacctcctgctctggaggcactgtgccggaggacccgtttttttttatttgtttatttttttaaagacattcttctgtatttggtttttaaaagttaattcattttcttaacttctgtactcaggtttctctctctaccatgtcatactga

SEQ ID NO: 377833 - DNA, 201 bp, Homo sapiens
gcctcagggataagtcttggatttctgctcctttctagctgcactcacttccttggtaagctcatctgatttcatcataacttcacctttacatactgcaractcacaaattatcttccctgaacttgagactcctatcctgctgcctgcttatcatctttacttgactatataacgaacatatcaaacataaactgaact

SEQ ID NO: 377834 - DNA, 201 bp, Homo sapiens
gccaacagtactattacttgtaattatcttcctatatagctagttgaaagattatggtgtgtatatatagagagagaagttgaatttttataccaaaacaytttctcctaatatgatgtgcaggaacaaaacattttttacatcaactattcccttttcctaaggcaggtgaataatcttgttttttatctgtacaattga

SEQ ID NO: 377835 - DNA, 201 bp, Homo sapiens
tacgagccatttctagatatttaattttttatgctgtttatcgagtgcttcctatctgcttggcttggtctggcagttttcatggatgctgtttcatttartcctttttgcaatcattaaatgtagaggagacctttagttatctttaaaaaatcagatgcttgtcctaatagcagatgtttttatataataatatactag

SEQ ID NO: 377836 - DNA, 201 bp, Homo sapiens
tctgcctcggcctcctagagtactggaattacaggggtgaaacatcctgcctggcctagctgctatagcttttatatatctctgttccttttgtgcattaraaatgccttgaagcccccagggaacatcaggaaaaaaaaaaaaaaaaaaaaaccaaccagaggtcccgctatgtgtttagctgagttgggagaagaaagt

SEQ ID NO: 377837 - DNA, 201 bp, Homo sapiens
atagagcaagaccctgtctcaaaaaaaaaaaaaaaaaaaaaaaaaggaaaataagagaaaatctagttttggtaaacatattttctgttttcaaagtcagkgatttttttatttttactaattactgtcattgattttagaagctttccatgcactgcaaatgtaaatcaacttacagaaaagaaacaaggtgttaattcc

SEQ ID NO: 377838 - DNA, 201 bp, Homo sapiens
tgacatggcacagtttccgatgaccttgtaatttgttgaacagaataaatatttttcatttcgctttctagctacagtggctgagtttattagttacaacrgagactggacctaagttattagtatctgacctgttaagaaacagtttgctggccaggtgtgttggctcatgcatgtaatcccagcactctgggaggctga

SEQ ID NO: 377839 - DNA, 201 bp, Homo sapiens
  misc_feature (1)...(201): n = A,T,C or G
agccagatgatccacaggatgctgtagtagcaaatcaggtaagatggccgcttttgaaagactttcttatattatgtatgagtctctagccacttcagtgntttgcacattaacacatgagcatactctattgaaactaaattttgaaatggttttctttcttgtggtaggattattttgtcaggtgtaatagtgaaaata

SEQ ID NO: 377840 - DNA, 201 bp, Homo sapiens
ttttaaaaatctaatattcttgaatattttcttgtttttaatccagattttttaagaccctagaatgtctttagcatattataccaattctgtttattcattttttttttttttttttttgggagacagagtcttgctctgtctctcacgctggagtgcagtggtacgatcttggctcactgcaacctccgcctcccgggt

SEQ ID NO: 377841 - DNA, 201 bp, Homo sapiens
tgaggcaggagaatggcgtgaacccgggaggcggagcttgcagtgaaccgagactataccactgcactccagcctgggcgacagagccagactccgtctcrggggaaaaaaagaaaaaagaaataggcaaattgtaaagtaaggaagaaaatatatgataggcagatacataattataaatgtctatgacttaactatata

SEQ ID NO: 377842 - DNA, 201 bp, Homo sapiens
gttagaaacaagtttggtcattttttttcttttctttttcccgataccgagaatgggaccaaaagtttggtcatttaaaagtgcttatatctgcctgggcrgggtggctgatgcctgtaatcccagcactttgggaggctgaagcaggtggatcacgaggtcaggagttcaagaccagcctgaccaacgtggtgaaactcc

SEQ ID NO: 377843 - DNA, 201 bp, Homo sapiens
agtcatccatccattcataacaatggaggagtgaggagatacatttgagagagtctagaatatactgaagaaagtctcttgtttgactttttgaagagctragtgtatagaattttgaagataatgttcctagcacacagttttttattttactttttattacagggaatttcagatatataaaaaagaagaataggccag

SEQ ID NO: 377844 - DNA, 201 bp, Homo sapiens
agccattctcctacctcagcctcctgagcagctgtgactacaggcacctgccaccactccaggctaattttttgtatttttagtagagatagggtttcacygtgttagccaggatggtctcaatctcctgacctcgtgatccgcccgccttggcctcccaaagcgctaggattataggcgtgagccactgtgtctggccta

SEQ ID NO: 377845 - DNA, 201 bp, Homo sapiens
cactttgggaggccgaggcggatggatcacctgaagtcaggatatatatatacatacatacatacatacatacatacatacatacacacacacacatacayatacacatacacaaaagccaaacattttgttgatccattcatccatccatggaaaccttaagttgcttctaccttctggctattgtgaataatattgtta

SEQ ID NO: 377846 - DNA, 201 bp, Homo sapiens
cagttcttttggatgtatacccataagtggaatcactggattatatagtaactctgtgttttttgtgtgtgtttttgtctgtgtgtgtttttgttttttgtttttttttgagggactgccatactgtttcccatagagttttcaccattttacattcccacaagtagtgcacaagagttccatttctccacaacctggcta

SEQ ID NO: 377847 - DNA, 201 bp, Homo sapiens
tgtgcgagggtttcctttcctttacatcatcaccaacacttgttcattgtttttatagtagccgttctaacgagtgctaggtgatatctcattttggtttrttttttatttatctatttttgatggagtatcactctgtcacccaggctagagtgcagtggcatgatctcagctcactgcaacctcagcctcccaaatagc

SEQ ID NO: 377848 - DNA, 201 bp, Homo sapiens
ttttggtttgttttttatttatctatttttgatggagtatcactctgtcacccaggctagagtgcagtggcatgatctcagctcactgcaacctcagcctyccaaatagctgggattagaggtgtgcactatcacggccagaaaatttttgtgtatttagtagagatggggtttcgccatgttgcccaggtaggtctcgag

SEQ ID NO: 377849 - DNA, 201 bp, Homo sapiens
catacttgcagtctcatttcgccagcatgcaagaactgtctcccccttccttttctgggactcaataatcttttccccttaccactccctcaccccaggcmtatattataagcaggagcatgtcctcctgccaaattccctccctgttcccacccaccccccaacccttcttatctcgagaaatgtcagaaccttcccctg

SEQ ID NO: 377850 - DNA, 201 bp, Homo sapiens
  misc_feature (1)...(201): n = A,T,C or G
cgaccccgatatccccggtagtccctgggtggtcctccttgcggccgcccttctgcctgtgaggaagcagcagtgttcccctcctccttccgccgccttcncctcccctcccagagcgctaggatggacggtctcgcgggcgggtggtctggggtggaacatggtttggggaggtgatggacagggggcaactcctcggag

SEQ ID NO: 377851 - DNA, 201 bp, Homo sapiens
ccgggtcaacgtcgtgcgcatgcgccgacccggcgccattttggtggccgggcgcggaggtgattccacactgaggcgagcgcggcggccggggtggtagyggcagtgttcgtgtgctcaggtctgaatcgccgagggaggaggcggtggaggaagaggtggcggcggtggcggtggtcgtagcggtggcggaggaggcgg

SEQ ID NO: 377852 - DNA, 201 bp, Homo sapiens
ttgtttttgttgtttgtttgttttgttttgttttgtttagaacagtacctgtataaatatggaaggaaacttctgggaaaataagttggaaagaacatttmggaaagggtcacatcatttaatcttggaataaatataaccaataaatagcttattttcaccagtattttttgatattttagtagccccagttctataagt

SEQ ID NO: 377853 - DNA, 201 bp, Homo sapiens
ttactattagttattgctgctgttaataactagctgccatttgtagaatggctagttgttcttagtatcatttgtttttacgttattgctaattcttaagmacagttctttagatgtcctatttcctagatgagaaaatagagatttagagaagttaaattatttgtctgcaatcacagagcctgggatttggatctaggt

SEQ ID NO: 377854 - DNA, 201 bp, Homo sapiens
atcatttaaatagatttttgtgtctattttcctttaaaattttaatgtacttgatctagcttgatctagattattctgtaatagaagtagttgtaaatctytaaaagtaagtcttttgatttctgtagaccatggattttttaaccttggcactactgacattttgggcagatagttctttgttgagtggctctcctgtgc

SEQ ID NO: 377855 - DNA, 201 bp, Homo sapiens
cggccgggtcaacgtcgtgcgcatgcgccgacccggcgccattttggtggccgggcgcggaggtgattccacactgaggcgagcgcggcggccggggtggkagtggcagtgttcgtgtgctcaggtctgaatcgccgagggaggaggcggtggaggaagaggtggcggcggtggcggtggtcgtagcggtggcggaggagg

SEQ ID NO: 377856 - DNA, 201 bp, Homo sapiens
tttattagtttgttttaaatattcttaaaactggataattaagtcctagaaaagccgagacttattttactagagcagataatcaagcttatgaaagaggrggtttcaagattttttataggtaatactttaggcgtttttcttgctgacataactaacatttattttctgtttatttttaagacgagcaaaaatcaaatt

SEQ ID NO: 377857 - DNA, 201 bp, Homo sapiens
atgatcctcctacctcagccttccaagtagcagggactaaaggcgtctgccaccatgcccagctaatttatgtaattttttgtagagacggggtttcaccrtgttgcccaggctggtctcgaactcctggactgaagtgatcctccggccttggccacctgaagtgctgggattacagacgtgagccaccatgcttggcct

SEQ ID NO: 377858 - DNA, 201 bp, Homo sapiens
ctactcgggaggccgaggctggaggatgcttgagcccatgaggtcaaggctgcagtgaattgtgatcatgtgaccgcactttagcctgggcatcagcgagrccctgtctcataaatgaaaaaagaaaatgattcctggctatttattaactatataagaagaacacagccaggcgtggtggctcacgcctgtaatcccagc

SEQ ID NO: 377859 - DNA, 201 bp, Homo sapiens
ttttttttttcctcttagtatgagaacttgaacttgccaaggaggtagagattttttaactcctgaagcataatttagttaagttagcttagtaattaagrgcgtgggctttagaattagatttgctttgagtcctggcttttcttcttaaaacctgaagtactggctctgtatctcgatttttttaatctgtaaaaatgt

SEQ ID NO: 377860 - DNA, 201 bp, Homo sapiens
tgtaaatatgcctcaagaaaagctcaagatgagggttaaggtacttctaatagtgtttctttgtcacctgtgtgccaataatccatggggctagtggccargtagtccacccttatctgcagtttgattttctgcagtttcagttacccattgtcaaccatcgtccaaaaataagtgagtatagtacaataaggtattttg

SEQ ID NO: 377861 - DNA, 201 bp, Homo sapiens
ctctgttctccagatgtgatttatttaatctttctttaggagacagttataaatcgttcaaagtttgtgttaaaatgttgccttcctgaatgaaaaagttyatttgggaaactctcaaatgatatagagataatgggattattttgaatttcttgacatggctctgggtttcctgaaactagaccaaagaatctagattct

SEQ ID NO: 377862 - DNA, 201 bp, Homo sapiens
gtttcaccatgttggttaggctggtctcaaactcttgacctcaggtgatctacccacctcagcctcccaaagtgttaggattaccagcgtgagccaatgtrcctgtccccttctagattattttgaaacaaatcttctgagttattttgcagcaaaccccagaattctgtcattgtacagtgaataattcattgtggatct

SEQ ID NO: 377863 - DNA, 201 bp, Homo sapiens
tttctttaaatttcattattgttatatgttctgtgattcaggcatttagttcaactcatgcatgaatcactatgggattctattaaaaagaactagccacsaggcataacggctcatgcctgtaatcccattactttgggaggctgaggcgggtagattatttgaggtcaggagtttgagaccagcttagccagcatgctg

SEQ ID NO: 377864 - DNA, 201 bp, Homo sapiens
tttgactttttgaagagctgagtgtatagaattttgaagataatgttcctagcacacagttttttattttactttttattacagggaatttcagatatatraaaaagaagaataggccaggcgcagtggctcatgcctgtaatcccagctctttgggaggccgaggcgggtggatcacaaggtcaggagattgagaccatc

SEQ ID NO: 377865 - DNA, 201 bp, Homo sapiens
tgtaatcccagctctttgggaggccgaggcgggtggatcacaaggtcaggagattgagaccatcctggctaacacggtgaaaccctgtctctactaaaaayacaaaaaaattagtcgggcgtggtgacgggcgcctgtagtcccagctaatcgggaggctgaggcaggagaatggcgtgaacccgggaggcggagcttgca

SEQ ID NO: 377866 - DNA, 201 bp, Homo sapiens
tttgggaggccgaggcgggtggatcacaaggtcaggagattgagaccatcctggctaacacggtgaaaccctgtctctactaaaaatacaaaaaaattagycgggcgtggtgacgggcgcctgtagtcccagctaatcgggaggctgaggcaggagaatggcgtgaacccgggaggcggagcttgcagtgagccgagatcc

SEQ ID NO: 377867 - DNA, 201 bp, Homo sapiens
tcttattatgtccaacaaaagaaacactaatttttgaatatgtaatgacacagtacatgctcaggtttccttgacttctgacttacctttttacagttacrttattcttcttaatggttgtaatcatttagtttactttctagtccttttatgtcacaagcagtcttagagtacaaatgttatatcacatacagaggattg

SEQ ID NO: 377868 - DNA, 201 bp, Homo sapiens
tgggaggccgaggcgggtggatcacaaggtcaggagattgagaccatcctggctaacacggtgaaaccctgtctctactaaaaatacaaaaaaattagtcrggcgtggtgacgggcgcctgtagtcccagctaatcgggaggctgaggcaggagaatggcgtgaacccgggaggcggagcttgcagtgagccgagatcccg

SEQ ID NO: 377869 - DNA, 201 bp, Homo sapiens
ggcgggtggatcacaaggtcaggagattgagaccatcctggctaacacggtgaaaccctgtctctactaaaaatacaaaaaaattagtcgggcgtggtgaygggcgcctgtagtcccagctaatcgggaggctgaggcaggagaatggcgtgaacccgggaggcggagcttgcagtgagccgagatcccgccactgcactc

SEQ ID NO: 377870 - DNA, 201 bp, Homo sapiens
tgttttttttatctcattcaaattagcttcaacgttatgtgctattttgcatgcttcatgtatatcttaataaaatagttgatttgaaaattgctaacttytatagcttcttccctcttttttttttttttttttttggtgacagagtcttgcttcgtagcccaggctggagtgcagtggtgtgatcttggttcactgcaa

SEQ ID NO: 377871 - DNA, 201 bp, Homo sapiens
tttttttatctcattcaaattagcttcaacgttatgtgctattttgcatgcttcatgtatatcttaataaaatagttgatttgaaaattgctaacttctayagcttcttccctcttttttttttttttttttttggtgacagagtcttgcttcgtagcccaggctggagtgcagtggtgtgatcttggttcactgcaacct

SEQ ID NO: 377872 - DNA, 201 bp, Homo sapiens
ggactgaagtgatcctccggccttggccacctgaagtgctgggattacagacgtgagccaccatgcttggcctgtcaccccttcttaaagactatacacctttttttttttttttttttttagacggagtctccctctgtcgcccaggctggagtgcaatgcgccatctcggctcaccgcaacctccgcctcccgggttca

SEQ ID NO: 377873 - DNA, 201 bp, Homo sapiens
tgcctcaaatgattcatctgcctcggcctcctagagtactggaattacaggggtgaaacatcctgcctggcctagctgctatagcttttatatatctctgktccttttgtgcattagaaatgccttgaagcccccagggaacatcaggaaaaaaaaaaaaaaaaaaaaaccaaccagaggtcccgctatgtgtttagctga

SEQ ID NO: 377874 - DNA, 201 bp, Homo sapiens
cccagctaatttttttttttgagacggagtctcgctttgtcacccaggctggagtgcagtggcgcgatctcagctcactgcaacctccgcctcccaggttsaaccaatacctcagcctctggaatggctgggatcccgggattacaggcatgcgccaccatgcccagctaattttcttttttgagacggagtctcgctctg

SEQ ID NO: 377875 - DNA, 201 bp, Homo sapiens
tgattcatctgcctcggcctcctagagtactggaattacaggggtgaaacatcctgcctggcctagctgctatagcttttatatatctctgttccttttgkgcattagaaatgccttgaagcccccagggaacatcaggaaaaaaaaaaaaaaaaaaaaaccaaccagaggtcccgctatgtgtttagctgagttgggaga

SEQ ID NO: 377876 - DNA, 201 bp, Homo sapiens
cagctaattttcttttttgagacggagtctcgctctgtcacctaggctggagtgcagtggcgctatctcagctcactgcaagctccgcctctcaggttcaygccattctcctgcctcagcctcctgagtagctgggactacaggcgtccacgaccactcccagctaattttttgtattttttttttagtagagacggggtt

SEQ ID NO: 377877 - DNA, 201 bp, Homo sapiens
ttctagcaggccttccacctcagcctcccgagtagctgggactacaggtgtgtgccaccacacctggctaatttttattttttgtagagatggggtctcaytgtgttgcccaggttggtcttgaactcctggcttcaagcagtcctcctgcctcagcctcccaaagtgctgggattataggcatgagccacctcacccagc

SEQ ID NO: 377878 - DNA, 201 bp, Homo sapiens
ttctccatggtggtcagtcaggctggtctcgaactccgggactcaggtgatctgccagccttggcctcccgaagtgctgggattgcaggcgtgagccaccrcgcctggccgagattcttaagtaaatgaacttttctttaggcacatgaattggaactatggaacaaagagattattgatacaattattcaagaagcacat

SEQ ID NO: 377879 - DNA, 201 bp, Homo sapiens
tagcctcaaacagtcttcccaccttggcctcccaaattgttgagattacgtgcttgattcactgtgctgggccacggagataatcttgaagattaaattctttttttttttttttacaaaatttttattttattttattttttgagacagggtcttgctgtgttgcccaggctggagtacagtggcatgatcatggctcac

SEQ ID NO: 377880 - DNA, 201 bp, Homo sapiens
tgttcccctcctccttccgccgccttcccctcccctcccagagcgctaggatggacggtctcgcgggcgggtggtctggggtggaacatggtttggggagrtgatggacagggggcaactcctcggagggatggaagctcacaagagaacccgaggcggtggccgcagctggaaatgtggctgtggggtggggagggagca

SEQ ID NO: 377881 - DNA, 201 bp, Homo sapiens
gatcctccaaaagttcatgagtaagagctgatgaactctttaatttcatggtgttcccctagagttttagcattttcacttgttggtttgttattcttccrtaatgagacaaataatgagatgattggactcagaatctggaatcagattgtgggagtttacattgtgctctgtttagctatttaattagatttcttaaac

SEQ ID NO: 377882 - DNA, 201 bp, Homo sapiens
gagtagctgggattacagatgcatgctgccacacccggctaatttttgtgttttaagtacagacagggtttcaccacgttgatcaggctggtcttgaactsctgaccttgtgatccgcccacctcagcctcccaaagtgctgggattacaggcgtgagccaccacgcccagcctctcccagcttttctagtcaaccctaat

SEQ ID NO: 377883 - DNA, 201 bp, Homo sapiens
agcctgggcgacagagcaagacaccatctcaaaaaaaaaaataagtaaaagaaaagctctgtcttgactcttgaatcagttttaaaacctggcttcactgrttattagctttgtgactttgttgcctcagcttccttattggtaagcacgtaagtttgttttaagattgagttattacatgtacatcagttaaaatattgc

SEQ ID NO: 377884 - DNA, 201 bp, Homo sapiens
ggtttccataaatcactgtacactaatgcagctgtaagaaaacagaagaatctagttgtattctagcctgggctgtgggtaatacaaaagctggttacatygtaaaaaattattctaatgtccacatatttttataagctagtaatctgtgttcagttgtataatgtttgctgctttccagtgtttggaacatctcttaat

SEQ ID NO: 377885 - DNA, 201 bp, Homo sapiens
tgtgtccatctttttatccttcctttcagtgatgatccctccctgctaataattttaatcacctcctatcatgggacttatgtgacatggcacagtttccratgaccttgtaatttgttgaacagaataaatatttttcatttcgctttctagctacagtggctgagtttattagttacaacagagactggacctaagtta

SEQ ID NO: 377886 - DNA, 201 bp, Homo sapiens
gtaaatattcatggaattgataaattcagacttgaattactcttcattgtagattgagtaaagtttgacagaagtccagaacttaacttttttttttaagrgatggagtctcactctgtcacacaggctggtgtggagtggcacagtcatagcttactgcacccttgacctcttgggctcaagtgattctcccacttcaac

SEQ ID NO: 377887 - DNA, 201 bp, Homo sapiens
attactcttcattgtagattgagtaaagtttgacagaagtccagaacttaacttttttttttaagagatggagtctcactctgtcacacaggctggtgtgkagtggcacagtcatagcttactgcacccttgacctcttgggctcaagtgattctcccacttcaacttcctgaatagctgggattacagacacacgttttt

SEQ ID NO: 377888 - DNA, 201 bp, Homo sapiens
gcctggctgcctaatcttctaaagattatatattatttttggtactagaatttttaagctatgtttttttgggtgtttttttttttgttttttgttttttkttttttgtttttttttgagacagagtttcactcttgtcacccaggctggagtgcagtggcacgatcttggctcactgcaacctctgcctaccgggttcaa

SEQ ID NO: 377889 - DNA, 201 bp, Homo sapiens; identical to SEQ ID NO: 81667

SEQ ID NO: 377890 - DNA, 201 bp, Homo sapiens
aaaaattacataagattttgtttcaggtgacaccatggattttaaaattagattgcttagaaagtccattggaaaattaaatagtgcacttaagtgttgtrtatttcattggttatattttgtctttgtgttccttatgttatttttggtggtttaagtcagctttatgctgataacatctaggtagcttttgatatgtat

SEQ ID NO: 377891 - DNA, 201 bp, Homo sapiens
tgaccttgtgattcacccacctcggcctcccaaagtgttgggattacaggcatgagccactgcgcccggcccaggattatcagttttcaagaaaagtgttyattgccttgttgagatatatgttagactacctatgtgatagtatgaaggacttgcaagatttagatgcttttattttacatgcctttatgtttttctttc

SEQ ID NO: 377892 - DNA, 201 bp, Homo sapiens
agtagctgggattacagacatgtgctaccatgcccagttaatttttgtatttgtagtagagacagggttttgccatatgggccaggctggtctcaagtttyttgcctcaaatgattcatctgcctcggcctcctagagtactggaattacaggggtgaaacatcctgcctggcctagctgctatagcttttatatatctct

SEQ ID NO: 377893 - DNA, 201 bp, Homo sapiens
tctctgttccttttgtgcattagaaatgccttgaagcccccagggaacatcaggaaaaaaaaaaaaaaaaaaaaaccaaccagaggtcccgctatgtgttwagctgagttgggagaagaaagtttaaaaaagcaatctttgacctatccttatgaaaaatttacagtgataacacaattcttcagaatttcacccaaaagc

SEQ ID NO: 377894 - DNA, 201 bp, Homo sapiens
tctgttccttttgtgcattagaaatgccttgaagcccccagggaacatcaggaaaaaaaaaaaaaaaaaaaaaccaaccagaggtcccgctatgtgtttasctgagttgggagaagaaagtttaaaaaagcaatctttgacctatccttatgaaaaatttacagtgataacacaattcttcagaatttcacccaaaagcta

SEQ ID NO: 377895 - DNA, 201 bp, Homo sapiens
gtgcattagaaatgccttgaagcccccagggaacatcaggaaaaaaaaaaaaaaaaaaaaaccaaccagaggtcccgctatgtgtttagctgagttgggaraagaaagtttaaaaaagcaatctttgacctatccttatgaaaaatttacagtgataacacaattcttcagaatttcacccaaaagctacagctgccttgg

SEQ ID NO: 377896 - DNA, 201 bp, Homo sapiens
aggggtgaaacatcctgcctggcctagctgctatagcttttatatatctctgttccttttgtgcattagaaatgccttgaagcccccagggaacatcaggraaaaaaaaaaaaaaaaaaaaccaaccagaggtcccgctatgtgtttagctgagttgggagaagaaagtttaaaaaagcaatctttgacctatccttatga

SEQ ID NO: 377897 - DNA, 201 bp, Homo sapiens
tttatatagtggcaacacaaatatagttccaactcatgtattattttggatatgtatctttctctagcttttatgctcctgagtcatataggtcttttacrcctatatattatcagtaattcccaatagtatagtgtcccttgggcatatgatagcagtcactcagaatgttctagaatttgttcattcaacctattggtt

SEQ ID NO: 377898 - DNA, 201 bp, Homo sapiens
ggggtgaaacatcctgcctggcctagctgctatagcttttatatatctctgttccttttgtgcattagaaatgccttgaagcccccagggaacatcaggaaaaaaaaaaaaaaaaaaaaaccaaccagaggtcccgctatgtgtttagctgagttgggagaagaaagtttaaaaaagcaatctttgacctatccttatgaa

SEQ ID NO: 377899 - DNA, 201 bp, Homo sapiens
gaataacacattattttattatttatttttagatactacatttttttcttagactgtggaaacaggactgtgaaattaattttgtaaaatcgggctttaatttttttttttttttttttgagacagaatctcggtctatcacccaggctgcatgtagtggtgcaatctcggctcactgcaacctccacctcccaagttcaa

SEQ ID NO: 377900 - DNA, 201 bp, Homo sapiens
agagggagactctgtctcaaaaaaaaatagtcactattttttgtaagactatctcaggaaaaaaagaggaagggaaaaaaaaaacgtagttacttgaaacygcccccccttttttttttggagatggagtctcactctgttgcccaggctggagtgcaatagcaccgacaacctttttttttttttttttttttttgagac

SEQ ID NO: 377901 - DNA, 201 bp, Homo sapiens
ttttttcttagactgtggaaacaggactgtgaaattaattttgtaaaatcgggctttaatttttttttttttttttttgagacagaatctcggtctatcayccaggctgcatgtagtggtgcaatctcggctcactgcaacctccacctcccaagttcaagccattcttctgcctcagtctcccgagtagctgggactaca

SEQ ID NO: 377902 - DNA, 201 bp, Homo sapiens
tctgcctcctgggttcaagcgattgtcctgcctcagcctgccaagtagttgggattacaggcatgccccgctaagcctggctaatttcgtatttttagtaragacgggttttgccatactggtcacactggtctctaactcctgacctcaggtgatccgcctgcctcagcttcccaaagtgctgggattacaggcgtgagc

SEQ ID NO: 377903 - DNA, 201 bp, Homo sapiens
cagaggttgcagtgagctgggcaacacagcaagactccatctcaaaaaaataaaaaaaaaatttaactgcctagaaggtagaaatcgagtgtatttcttargcctttgaataataggggaaagataagtcatttatattaaattatgagaaaataatggcaactgttaagcttttaaagtattatttccaactaaattagg

SEQ ID NO: 377904 - DNA, 201 bp, Homo sapiens
tgcccagccagatttgtaggaattctttatgttatttatatgatattgtctatcttacattatgtggcttgatttttaattttggcttatctttttatgctttttttttaagttgtagtaaaatacacataacataaaatttatcattctaaccattttaaatgttcagtggcattaaggacattgtgtagctatcaccac

SEQ ID NO: 377905 - DNA, 201 bp, Homo sapiens
gccaaggcaggaggccaaaggtggtggatcacttgagcccaggagttcaagaccagcctgagaaacatggcaaaaccccctctctactaaaaatttaaaamtttagccaggcatagtggtgcacacctctcgtcccagcgactggttaggccgaggtgggagaatcacctgagcttgggaagttgaggtgcagtgagctga

SEQ ID NO: 377906 - DNA, 201 bp, Homo sapiens
tcctactttgatattaataaaggcattctcggacccaggtcactggttggcctgacctcctgctctggaggcactgtgccggaggacccgtttttttttatttgtttatttttttaaagacattcttctgtatttggtttttaaaagttaattcattttcttaacttctgtactcaggtttctctctctaccatgtcatac

SEQ ID NO: 377907 - DNA, 201 bp, Homo sapiens
cctactttgatattaataaaggcattctcggacccaggtcactggttggcctgacctcctgctctggaggcactgtgccggaggacccgtttttttttatttgtttatttttttaaagacattcttctgtatttggtttttaaaagttaattcattttcttaacttctgtactcaggtttctctctctaccatgtcatact

SEQ ID NO: 377908 - DNA, 201 bp, Homo sapiens
ccaaaggtggtggatcacttgagcccaggagttcaagaccagcctgagaaacatggcaaaaccccctctctactaaaaatttaaaaatttagccaggcatrgtggtgcacacctctcgtcccagcgactggttaggccgaggtgggagaatcacctgagcttgggaagttgaggtgcagtgagctgagatcgcactgctgc

SEQ ID NO: 377909 - DNA, 201 bp, Homo sapiens
ctactttgatattaataaaggcattctcggacccaggtcactggttggcctgacctcctgctctggaggcactgtgccggaggacccgtttttttttatttgtttatttttttaaagacattcttctgtatttggtttttaaaagttaattcattttcttaacttctgtactcaggtttctctctctaccatgtcatactg

SEQ ID NO: 377910 - DNA, 201 bp, Homo sapiens
gcctcacgtctataatcccagcactttgggaggccaaggcgggcgtatcgcgaggtcaggagttcgagacaagcctggccaacgtggcgaaaccccgtctygactaaaaataacaaaaattagctgagcatggtagtgggtgcctgtaatcccagctactcaggaggctgaagcaggagagtcacttgaacccaggaggtg

SEQ ID NO: 377911 - DNA, 201 bp, Homo sapiens
tcgctggctcaggagtgaagctgcagaccttcgcggtgagtgttacagctcttaaggcggcgcgtctggagttgttcgttcctcccggtgggttcgtggtytcgctggcttcaggagtgaagctgcagacctttgcggtgagtgttacagctcataaaggcagtgtggacccaaagagtgagcagtagcaagatttattgc

SEQ ID NO: 377912 - DNA, 201 bp, Homo sapiens
tttttttttttttttgggagacagagtcttgctctgtctctcacgctggagtgcagtggtacgatcttggctcactgcaacctccgcctcccgggttcaarcaattctcctgcctcagcctcccgagtagctggtactacaggcgcccgccaccatgcccggctaatttttgtatttttagtagaggcggggtttcaccat

SEQ ID NO: 377913 - DNA, 201 bp, Homo sapiens
cggtgagtgttacagctcttaaggcggcgcgtctggagttgttcgttcctcccggtgggttcgtggtttcgctggcttcaggagtgaagctgcagaccttygcggtgagtgttacagctcataaaggcagtgtggacccaaagagtgagcagtagcaagatttattgcaaagagcaaaagaacaaagcttccacagtgtgg

SEQ ID NO: 377914 - DNA, 201 bp, Homo sapiens
agtcttgctctgtctctcacgctggagtgcagtggtacgatcttggctcactgcaacctccgcctcccgggttcaagcaattctcctgcctcagcctcccragtagctggtactacaggcgcccgccaccatgcccggctaatttttgtatttttagtagaggcggggtttcaccatattggccaggcttgtcttgaactc

SEQ ID NO: 377915 - DNA, 201 bp, Homo sapiens
gccgattggtgcattcacaatcccttagctagacataaaggttctccaagtccccactagactcaggagcccagctggcctcacccagtggatctcgcacyggggccacaggtggagctgcccgccagtcctgcgccatgcgcctgcactcctcagcccttgggcagtcgatggaactgggtgccgtggagcaggggacaa

SEQ ID NO: 377916 - DNA, 201 bp, Homo sapiens
gggaactacaagatttctttgtaaaggtacattttatgctctttgcaattagcaagtaaaggatggattacttctttggcatcctggaaataatcttattyccaacatccttttaccaggtgcactcacacacacccccactctcactcatgctggtacagtttaaccatgccagttaatctagcatgtttatctttggaa

SEQ ID NO: 377917 - DNA, 201 bp, Homo sapiens
gggcgcctgtagtctcagctacttgggaggctgaggcaggagaatggcgtgaacccgggaggtggagcttgaagtgagccgagatcacgccactgcactcyggcctgggcaacagagcgagactctgtctcaaaaaaaaaaaaaataaataaaataaaataaataaataaataaataaatgaaggaatagtttgtctttat

SEQ ID NO: 377918 - DNA, 201 bp, Homo sapiens
ccccaaagtacttaagttccttcctgagaggtaaccactgttatcagtttcttccacatttttccagtgatattttatggttcacaaacattacatatacrggcatattcctttctctccttacaaatatggtggcatactatatacatatgggctgtgacataccctttaataagtaaactttttcttttggaataattt

SEQ ID NO: 377919 - DNA, 201 bp, Homo sapiens
aatcccagcacctagggaggcagggggcaggcagatggcttgagctcagaagttcatgaccaaatggcaaaaacctgtctctactaaaaatgccaaaaacwaaacaaaaaatactagtctggtatggtggcatgcgcctgtagtctcagctactcaggaggctaaggcacaagaattgcttgaacctggcaggcagaggtt

SEQ ID NO: 377920 - DNA, 201 bp, Homo sapiens
cagagcgagactctgtctcaaaaaaaaaaaaaataaataaaataaaataaataaataaataaataaatgaaggaatagtttgtctttatgtctatctctcttgttgaattttgcttaaaaaataaaaaatatatttaaagttttttatattaaaatagagacaaggacttgctatattgagcaggctctactcaaactcct

SEQ ID NO: 377921 - DNA, 201 bp, Homo sapiens
agagcgagactctgtctcaaaaaaaaaaaaaataaataaaataaaataaataaataaataaataaatgaaggaatagtttgtctttatgtctatctctcttgttgaattttgcttaaaaaataaaaaatatatttaaagttttttatattaaaatagagacaaggacttgctatattgagcaggctctactcaaactcctg

SEQ ID NO: 377922 - DNA, 201 bp, Homo sapiens
ctgactaatttttttgtattttgtagagatggggtttcaccttgttgcccaggctgctctcgaactcctgggtccaagtgatttcacccacctcagcctcytgaagtattgggattacaggtatgagccaccacgcctggcccctgaagattaaattctttattggatcatctgcaaattcaaaattcttttttcttttct

SEQ ID NO: 377923 - DNA, 201 bp, Homo sapiens
gcctcaagtgatccttccaccttggcctcctgaagtgctaagattacagacttgaccccctactcctggtctatagtatttagggttagaaaaataggtgwggtaggctgtttttgcattgccataaaggaatacctgaaactgagtaatttataaggaaaagaggttccatttggcttctgattcttcaggctgtatagg

SEQ ID NO: 377924 - DNA, 201 bp, Homo sapiens
tttgtattttgtagagatggggtttcaccttgttgcccaggctgctctcgaactcctgggtccaagtgatttcacccacctcagcctcctgaagtattggkattacaggtatgagccaccacgcctggcccctgaagattaaattctttattggatcatctgcaaattcaaaattcttttttcttttcttcttgttttttt

SEQ ID NO: 377925 - DNA, 201 bp, Homo sapiens
acagaggttgcagtgaaccgagatcgcaccaccgcactccagcccaggcaaccaagtgagactctgtctcaataaaagtaaaaaaataagattaaaacaaraggcaaaatacacttcacatatcttcagctcacttgactgaaccgtaatccttctgacatcttcaatagtgttttaaaattatattttctaatcttgttg

SEQ ID NO: 377926 - DNA, 201 bp, Homo sapiens
aatgccttgaagcccccagggaacatcaggaaaaaaaaaaaaaaaaaaaaaccaaccagaggtcccgctatgtgtttagctgagttgggagaagaaagttwaaaaaagcaatctttgacctatccttatgaaaaatttacagtgataacacaattcttcagaatttcacccaaaagctacagctgccttggttgttgcagt

SEQ ID NO: 377927 - DNA, 201 bp, Homo sapiens
ctcccgacctcaggtgatccacccgcctcgacttcccaaattgctgggattacaggagtgagctactgcacctggccaacattttctagtctcatagggcrtgtttaaatctatggcataaacaaattggtttcgtgaaaattactatatagtacattaagttttccctcatcatttaaatagatttttgtgtctattttc

SEQ ID NO: 377928 - DNA, 201 bp, Homo sapiens
gtaaatctctaaaagtaagtcttttgatttctgtagaccatggattttttaaccttggcactactgacattttgggcagatagttctttgttgagtggctytcctgtgcattgtgggatgtttagcaacatccctgacctctaccagtatatgcaggtagcactgcagagccccagcgcatgtccccactatctcttcttg

SEQ ID NO: 377929 - DNA, 201 bp, Homo sapiens
gtttatgaactaaacgttctgtactaaaaaatatttaacatagaaaaagagtaaaaattgtggttttttttttgggttggaggaggaagccaaagacagtmattcttacactgtttcatctagtaatcaagtttaagaaagtcagtctaaaagcaaaaaacataagagtagatatgttgtgtcaatcaggtaacaatatgg

SEQ ID NO: 377930 - DNA, 201 bp, Homo sapiens
ttttgagacagttcttgctctggagtaaggctggagtcttgttctggagtcagggtttcgctttgttagccaggctggtctcttcctgacctcaggcaatytgcccatctcggcatcccaaagtgctgggattacaagcgtgagccactgtgcccagccagatttgtaggaattctttatgttatttatatgatattgtct

SEQ ID NO: 377931 - DNA, 201 bp, Homo sapiens
aggctggtctcttcctgacctcaggcaatctgcccatctcggcatcccaaagtgctgggattacaagcgtgagccactgtgcccagccagatttgtaggarttctttatgttatttatatgatattgtctatcttacattatgtggcttgatttttaattttggcttatctttttatgctttttttttaagttgtagtaaa

SEQ ID NO: 377932 - DNA, 201 bp, Homo sapiens
ttctttagggattttggtttaaaaaatcgagaggatttactgtatttttaacataggtttgagaatataagtggagagcccatttgctggcaggcacttaygaatgttaatgtgagtcccactggatggttttctgaatcatttaaggttatcatggctctgagaatggactgtcataaggttaagagactcagtaatgct

SEQ ID NO: 377933 - DNA, 201 bp, Homo sapiens
gtctatcttacattatgtggcttgatttttaattttggcttatctttttatgctttttttttaagttgtagtaaaatacacataacataaaatttatcatyctaaccattttaaatgttcagtggcattaaggacattgtgtagctatcaccaccatccatctccagaacttttcatcttgcaaaattgaaactctgtacc

SEQ ID NO: 377934 - DNA, 201 bp, Homo sapiens
aatttaaagattgttaatttttaatattaaaagctattcttcaagaagttaatgttttaaagtaaaaactattataatatgaataatatagttatcataargattccttagttgtattaccctgatcaaataatgctatgattaatgctaagtggtcatatattgaaagttgtcagagcgtgtaacataagggatagaaat

SEQ ID NO: 377935 - DNA, 201 bp, Homo sapiens
tttatttatttgaaacatggtgtctgtctgtctatctatcatccaggctggggtgccgtgttgtgatcacagctcacgccgcagtcttaacctgttgggcwtaagtgatcctcccaccacagcctcccaagtagctggcattacaggcatttgccaccatgcctggctgattttttttactttttgtggagacagggtttt

SEQ ID NO: 377936 - DNA, 201 bp, Homo sapiens
  misc_feature (1)...(201): n = A,T,C or G
gtaagcctatttttgtgcatgaagttacaaaatattttatatttctgacctcattttattaatatatattttagggcttattaaagtcacagctttatganttgcttactgtgtaaacttgatgtggacaggattttagataatggcaggtggctggcttctgaaattagaatgaaaagcaaactcacccaaaggcagcca

SEQ ID NO: 377937 - DNA, 201 bp, Homo sapiens
acccctggcctaaaacaatcctcttgccttggtgtcccaaagtcttgggattctaggcatgagccattgtgcccaaccttgtaccaattcttaagtgatawaattttattttttgttttatagttcatacgagccatttctagatatttaattttttatgctgtttatcgagtgcttcctatctgcttggcttggtctggc

SEQ ID NO: 377938 - DNA, 201 bp, Homo sapiens
attatttgagtactttgtgccaagaactatagcagtaactaagacttatactgttcctgctttcatagagctcacattatagtggggaaaaaaaactgagyatggaattgcaactgtgataaatgttgaaagggagtatggaataccctaagatcatgtataacagggggacccaacctaaacttatttttggattgaacc

SEQ ID NO: 377939 - DNA, 201 bp, Homo sapiens
caggctggtcttaaactcgcggcctcagatgatctgcctgcctgggcctcccaaagtgcttggcttaaatggtgagccaccatgcctggcatgcctggactttttttttttttttttcccagatggaatctcactgtgtcaccctggctggagtccagtagcatgatccaagctcactgcagccaccacctcccaggtcaa

SEQ ID NO: 377940 - DNA, 201 bp, Homo sapiens
aaggccgggcagcagatctgaagtatattgaagcttgtgctagacgcattgtgcaaaactcaaatgggtacaaaattgtgactgagaaaagcacagttccrgtgcgggcagcagaaagtatccgtcgcatatttgatgcaaacacaaaacccaacttgaatttacaggtataaaaaatgaagcattagaatctggttattc

SEQ ID NO: 377941 - DNA, 201 bp, Homo sapiens
tctaaagacagtggtggcacataattgactactttgagggagtcaggtgtggggaatggcaggagtgagaaagtctagatatgaatattacgatggagtayagattaattctaggaacaaaaaatagggaagaaaccaaagatctctcatagcaactcagacaacttgagaatccttttctaagaaaaaaatctagattcc

SEQ ID NO: 377942 - DNA, 201 bp, Homo sapiens
tcagcatcctcctgacgggaggcgcctctttcccagaagcggtgggtcaggaggaatctgactaaaccctgggttgccggcccggagggcgcggttgaccycggggcctcgaggttgtgggcgaggagtaatccgcccgccgagaccgacccgcagatccaggagaccgaaacccgagggcggcgctccagggtgctgagg

SEQ ID NO: 377943 - DNA, 201 bp, Homo sapiens
ggcttacatttcatttcagattgtgaagtcctttaggataaccgtctcattcatttatgtatcttcagggcttagctggaatctgcctgccctagttatcyggcatatagatagtagcttcctaacaaaaatttattgaatgagttctctagatgcttcaagctatttcttctgattattatatttataaaatgtattatt

SEQ ID NO: 377944 - DNA, 201 bp, Homo sapiens
ctgatttagtataaagaaatttgtcacatgattgagttttctcgttcttacatgaaaatattgttcatttttttctttctgcagggtttggtgggagctgyttccaaaaggatgttctgaatttggtttatctctgtgaggctctgaatttgccagaagtagctcgttattggcagcaggtattaatctctataggtaata

SEQ ID NO: 377945 - DNA, 201 bp, Homo sapiens
tatgtacaattccttttcttttttctttttagccaggactaaaagaagtggtagaatcctgtcgaggaaaaaatctttttttttctaccaatattgatgaygccatcaaagaagctgatcttgtatttatttctgtaagtattttcctttgttgtgtgaattttaatgtattcttgtctatataaaagtttcatcatactt

SEQ ID NO: 377946 - DNA, 201 bp, Homo sapiens
gtctgggcgggatgtggagggagcggggctggggtgtgcgcgctgctcccggtcgctcgctgcgctgggtcccgggcttcccgtctcacgaccttcgtctytttggggcttagggcgggaaccgcattttggaactgctgtcctggggatgtggtcgtctgggcttcttattcaagactcgtgagtcttccagccccttct

SEQ ID NO: 377947 - DNA, 201 bp, Homo sapiens
tttctaccaatattgatgatgccatcaaagaagctgatcttgtatttatttctgtaagtattttcctttgttgtgtgaattttaatgtattcttgtctatrtaaaagtttcatcatactttaatagtaaatccattggtattaagcctcaacattgcttagtatagagttgtccggtgaattttggttgtcactttgtctg

SEQ ID NO: 377948 - DNA, 201 bp, Homo sapiens
ctgaaactgaatttttgtgaatagtggggcacaagcaaatgaaggaatactttggggtttcattgcttgtagcttgtttccacagaatttggagacacggrctaaggatagtatggtttcctatgtgccttatttaggttggtctcatagctgaacctcaaatgcgcttagaattaaaacttggttgtgcgctccactttt

SEQ ID NO: 377949 - DNA, 201 bp, Homo sapiens
catagacacattttctctcattcctgttttactcatctaagggaaaagatatgtagagaaatacatattttaaatgattttaagttattgtaaaagttaaytttcctagtgagaaattaaaaaaaaacaggaatggaatcactaaataaggagaatttgtaagtcactgagacaactggttaatataaagcagaagccctt

SEQ ID NO: 377950 - DNA, 201 bp, Homo sapiens
tttccaacactttgggctaattgcttaagctctcagggtttgattgagatggtccctgaaagcttaaagccttaaaaaagtttcttttgctttgcccaccyggttaccaacctaaatttaacagattaagtgatcagagactcttataacatttagttagttaaaaaaccttgtcaaatagttgtggtgttatggttcatc

SEQ ID NO: 377951 - DNA, 201 bp, Homo sapiens
taacttgtctacaaaggtaatttgagcacaacctagacctttaaattacaatattaccatgccctttaacaaatgtaattctatactattaggttatctcrtatcactggcaagctatatgtacaattccttttcttttttctttttagccaggactaaaagaagtggtagaatcctgtcgaggaaaaaatcttttttttt

SEQ ID NO: 377952 - DNA, 201 bp, Homo sapiens
agtttctaaaagccagtgttggtaaattcaaatttttctctagtagaaagagctagtgtttatttactgaaggcatattatttgctggtaccagcgctttrtatatctcattgaatccttataacctgttaggtagatgctgttattttcttttttagagatgattcagactcagggaaatttgtgcaacttgctcaaagt

SEQ ID NO: 377953 - DNA, 201 bp, Homo sapiens
accactcccagctaatttttgtatttttagtagagacgaggtttcgccatgttggccagggtggtcttgaactcctgacctcaggggatcacccctcctcrgcctcccaaagtgctgggattacaggtgtgagccaccatgcccggctgaagcttatttctttatgactattatcaaccatagactttagttgccttagac

SEQ ID NO: 377954 - DNA, 201 bp, Homo sapiens
ggtgcccaccaccactcccagctaatttttgtatttttagtagagacgaggtttcgccatgttggccagggtggtcttgaactcctgacctcaggggatcrcccctcctcagcctcccaaagtgctgggattacaggtgtgagccaccatgcccggctgaagcttatttctttatgactattatcaaccatagactttagt

SEQ ID NO: 377955 - DNA, 201 bp, Homo sapiens
caggcccgggactcagagtgtaacgcgtggcagcctgagggaggggcgtgcgccgagagggagctcagatcgagcggggcgcgggtggagaagctgcggcrgcgcggcccgtaggaaggtgctgtccgaacgatcgggataggagcggtccctgcgcttgctgctgggaagtgggtaagcgccgctcccaggctggccccg

SEQ ID NO: 377956 - DNA, 201 bp, Homo sapiens
gtaaacatattaaacatctctttgtttttatgcttttttcttactgtctttattatatcatttatatgcactattaatataaaaatctataacagcaactrgtaagaaattaaatgaaaaaaatctggatacaaaacacatggacattaaaacacattacttcgggtaatgtgggtaggaaaaatgaccagaaagaagtct

SEQ ID NO: 377957 - DNA, 201 bp, Homo sapiens
aggagctgatgtagaagaggtagcaacagcgattggaatggaccagagaattggaaacaagtttctaaaagccagtgttggtaaattcaaatttttctctrgtagaaagagctagtgtttatttactgaaggcatattatttgctggtaccagcgctttatatatctcattgaatccttataacctgttaggtagatgctg

SEQ ID NO: 377958 - DNA, 201 bp, Homo sapiens
gcagcctgagggaggggcgtgcgccgagagggagctcagatcgagcggggcgcgggtggagaagctgcggcagcgcggcccgtaggaaggtgctgtccgawcgatcgggataggagcggtccctgcgcttgctgctgggaagtgggtaagcgccgctcccaggctggccccgccgcccgggcgggatgctcccaggtctgg

SEQ ID NO: 377959 - DNA, 201 bp, Homo sapiens
gaatttttgtgaatagtggggcacaagcaaatgaaggaatactttggggtttcattgcttgtagcttgtttccacagaatttggagacacggactaaggakagtatggtttcctatgtgccttatttaggttggtctcatagctgaacctcaaatgcgcttagaattaaaacttggttgtgcgctccacttttggcatcca

SEQ ID NO: 377960 - DNA, 201 bp, Homo sapiens; identical to SEQ ID NO: 81682

SEQ ID NO: 377961 - DNA, 201 bp, Homo sapiens
agagcagtagctgtctatcgacagacctcaaagacacagtgagcctttgagtttcttcaaatcccttaagaaatggagaacagtagtctttcttcaggggsgttctggaaatgaaagagctgactgtctgctctgagatgtgcttattagtggccaggatccagtttaaggtaaggggtagacaaccctgattgaaaagat

SEQ ID NO: 377962 - DNA, 201 bp, Homo sapiens
gtttcagacatctactgggggtcttggaatgtatccctgcagataaggggggaactactgtaatgtcatataactcctttcttatttctgtttttttgttrttgctattgttacagtgtcccggctcgtgaccatttccaaggatccatatgaagcatgtgatggtgcccatgctgttgttatttgcactgagtgggacat

SEQ ID NO: 377963 - DNA, 201 bp, Homo sapiens
ttttttgtttttttgtttttttttttgagatggagtctcgctctgtcgccctggctggagtgcagtggcgcaatctcggctcactgcaagctctgcctccygggttcacgccattctcctgcctcagcttcctgagtagctgggactacaagctcctgccaccacgcccaactaattttttgtatttttagtagagacggg

SEQ ID NO: 377964 - DNA, 201 bp, Homo sapiens
ctcttgattttccaacactttgggctaattgcttaagctctcagggtttgattgagatggtccctgaaagcttaaagccttaaaaaagtttcttttgcttygcccacctggttaccaacctaaatttaacagattaagtgatcagagactcttataacatttagttagttaaaaaaccttgtcaaatagttgtggtgttat

SEQ ID NO: 377965 - DNA, 201 bp, Homo sapiens
cgcttgaacctgcgaggcagaggttgcagtgagccaagatcgtgccactgcactgcagcccaggcaacagggcaagactccatctcaaaaaaaaaaaaagmattatgctgttaccattcgggcacagtggctcacgccggtaatcccagcactctgggaggccgaggcaggcagatcacttgaggtcaggagttcgagacc

SEQ ID NO: 377966 - DNA, 201 bp, Homo sapiens; identical to SEQ ID NO: 81683

SEQ ID NO: 377967 - DNA, 201 bp, Homo sapiens
ataatttataagcccattatttatccatctgaattttattattaaaaaatcttagtataagctttctgatttagtataaagaaatttgtcacatgattgarttttctcgttcttacatgaaaatattgttcatttttttctttctgcagggtttggtgggagctgtttccaaaaggatgttctgaatttggtttatctctg

SEQ ID NO: 377968 - DNA, 201 bp, Homo sapiens
tggtgtgctttggactttgctgaactttagtcccgtaagtccatttgctttgtgattcttggactttttaaactttggaatttcaaagttttaattttagytgaggacccttggactacttgtagttatttagtggttcaaagagtaataagttcatataataatcaagacctgctgtttaccacattgcacacagtttat

SEQ ID NO: 377969 - DNA, 201 bp, Homo sapiens
gaagttgggagtggaaaaggaggaaaaaaatatgaaggaaaaatttcttaattctgtctgagggtatgcacatacctggtctcatccgaaccctgcggatrtatttttcacccaagaaatttcggatttcaacaagagacccattctcctggataacaacgttgatggggaagtgagcatacacagacctcatcttgtaac

SEQ ID NO: 377970 - DNA, 201 bp, Homo sapiens
aaggagggaaaaaattacactagagcaattgctttggttgtaattctaaagaaaagacttcaaaaatatatttggctggatgctgtggctcacgcctgtawtctcagcactttgggaggcagaggcaggcagattacctgaggttgggagttcgagaccagcctgaccaacatggagaaaccccgtctctactaaaaatac

SEQ ID NO: 377971 - DNA, 201 bp, Homo sapiens
gcctacaggtgtgttttaaccactgtgtacatagtatttaacggtctgcttttttttttttaataatggttcatgtatgaacatctgtatgttcatacttytcttgacaaagttctaaaggttactgtgttgaagcatactgaacgattactgataatttctattttgaggaacaggtatgtcagttctttctctctgttt

SEQ ID NO: 377972 - DNA, 201 bp, Homo sapiens
gtaaccagtaaacacgtagtcagggaggagggagaggacaaaagcctgggggtgggggcaagataaattacgcagtgaagagcattctgcatacataggtrtagactttctgcagaatcaaagtggaattctaaaatctgatcagaagtaattatttaaatctaggttgaagaatatattactcctgaaaaattcaaatac

SEQ ID NO: 377973 - DNA, 201 bp, Homo sapiens
aacctacttaaattaggtttaaaagtctactatatataatttgaaattttattcagtttgcctacaggtgtgttttaaccactgtgtacatagtatttaayggtctgcttttttttttttaataatggttcatgtatgaacatctgtatgttcatacttttcttgacaaagttctaaaggttactgtgttgaagcatactg

SEQ ID NO: 377974 - DNA, 201 bp, Homo sapiens
tggcacttgcctgtatacccaacttctgaggaggctgaggtgggaggatcacttgagcccaacaggttgaggctgcagtaagacatgatcatgccactgcrtcccagcctagactacagagcaagaccctgtttcaaaaaaaaaaaaaaaaagtatcttataaactgtgtaagttataaagaataacacaacagacaccct

SEQ ID NO: 377975 - DNA, 201 bp, Homo sapiens
aataaattaaaaaaaaaaaatagctggatgtggtagcatgtgcccatagtcctacctgcttgggaggctgaggcagaaggattgcgtgagcccaggagttyaaagttacagtgagctatgatgcactgggcaacagagcaagaccctgtttttatttaaaaaaaaaaaattataggatatgttctttgaatatctcttata

SEQ ID NO: 377976 - DNA, 201 bp, Homo sapiens
atctggtgatcttgcagacaggagcacctgggatgaatataaaggaaacctaaaacgccagaaaggagaaaggtaattgaaaatttgagataattttaacrtcccgttcctttattgtgcattattttcagatataaccaagccctagaatctgtttttaatatcagacttgttaaatttagctaaaaatcattagaaaga

SEQ ID NO: 377977 - DNA, 201 bp, Homo sapiens
tggctttccttaggttaagactacctccatggctaaagacagagattcccatggggaaaaattacaataaactgaaaaatactttgcggaatttaaatctmcatacagtaagttgtcaaagtgtaaactatccctcttcaccaaaagccatgtttctacgtttatataacttaaaaattattaataaatatataaataata

SEQ ID NO: 377978 - DNA, 201 bp, Homo sapiens
gtggcacaatcttggctcactgcaagctccgcctcctgggttcaagggattcttctgcctaagcctcccaagtagctgggactacaggcgcctgccaccamgcccggctaatttttgtatttttagtagagacagggcttcaccatattggccaaactagtctcgaactcctgaccttgtgatccgcccacctcggcctcc

SEQ ID NO: 377979 - DNA, 201 bp, Homo sapiens
tgaggcaggagaatggcgtgaacccgggaggcggagcttgcggtgagccaagattgcgccactgcactccagcctgggcaacagagcaagactccgtctcaaaaaaaaaaaaaaaaaaacagatttccaaatctattctaaactcagtagtaaacagtcaactcttactctcttttaggtttggttccttcagtcatcttt

SEQ ID NO: 377980 - DNA, 201 bp, Homo sapiens
agacctttagcccatagaatccctccctcatattagagcattagtctaaactttgaataattttctttaaaaagtataaacctggtcttcttagtaatgatttttttttttttttgagatggagtctcgctcttttgcccaggctagagtgcatggcaccatctcactgcaacctctgcctcccagttcaagcatttatcc

SEQ ID NO: 377981 - DNA, 201 bp, Homo sapiens
ccagtgtgtcccagcctggaaggagcagccccaaagcgagaattacgaggcccagcagtcgaactcccactcagcccaaccctggaagtcctatgcgggcrgtgccatcccggcaagactgaggggcgggaataggccaaaaagcccacaacaggattcgcatctggcgccgccaggctcatatggcgcttgccgagctgg

SEQ ID NO: 377982 - DNA, 201 bp, Homo sapiens
gacctttagcccatagaatccctccctcatattagagcattagtctaaactttgaataattttctttaaaaagtataaacctggtcttcttagtaatgatttttttttttttttgagatggagtctcgctcttttgcccaggctagagtgcatggcaccatctcactgcaacctctgcctcccagttcaagcatttatcct

SEQ ID NO: 377983 - DNA, 201 bp, Homo sapiens
cagcataaatatcacccataatagtatttccacccagcaatatcagttactaacaccttagtgtttatattataaacactatatttatactacatatttgkatttttatatttataatatacttaatttttatattacaaacattaagatgttagtaactcatattactaagttactgtgtgtgttttaatacccacaaat

SEQ ID NO: 377984 - DNA, 201 bp, Homo sapiens
atgtttcaaatttcttataaacagaaccaaactgtatgcattctttgcaacttgctttattctctcaacattatgtccttaagggtcatctgtctatttcrtttaaattgtaacatttctattctagttgatgggtgacacatgtacaagaggttgcagattttgttctgttaagactgcaagaaatcctcctccactgga

SEQ ID NO: 377985 - DNA, 201 bp, Homo sapiens
catgtacaagaggttgcagattttgttctgttaagactgcaagaaatcctcctccactggatgccagtgagccctacaatactgcaaaggcaattgcagartggggtctggattatgttgtcctgacatctgtggatcgagatggttagtgtgtcatcatggcctctaccagaaactggctctaaatgatgacatcatcct

SEQ ID NO: 377986 - DNA, 201 bp, Homo sapiens
aagattatggactgtcataaagttcacaccgtttttaaatattccttaggaaaattatgcttagatctacaattaaagtatttgctaatgtaatttgtgcwtttcttcctacagcacttcgtgaggcagatgtagactgcttgactttaggacaatatatgcagccaacaaggcgtcaccttaaggtacatgtatcttgat

SEQ ID NO: 377987 - DNA, 201 bp, Homo sapiens
agatggagttttgctcttgtcgcctgagctggagtgtagtggcacaatctcggctcactgtaatctctgcttcctgggttcaggtgattctcctgcctcaycctcctgagcagctgggactacaggcgggtgccactacatccggctaaaatatacatatatataatttttttttttttttttttttttttttgagacgga

SEQ ID NO: 377988 - DNA, 201 bp, Homo sapiens
gaggtgatctcaaagcaatagaaaaagttgctctgtcaggattagatgtgtatgcacataatgtagaaacagtcccggaattacagaggtgaatacgtgtwcaaagtaatgttgggaagttaggcgggtcaaaatatgccatatattcttgccttttccagggctgaactttgccattgacttttacaaagtaaactctat

SEQ ID NO: 377989 - DNA, 201 bp, Homo sapiens
gctcacacctataatcccaacattttgggaggccagggcgggtggatcacttgaacccaggagttcgagaccagcctgggcaacatgatgagaccttatcyctacaaaaaattagccagacgtggtggcacgcacccgtagtcccagctactcaggctgaggtgagaggatcacttgaacctggaaagcagaggttgcaat

SEQ ID NO: 377990 - DNA, 201 bp, Homo sapiens
gcagccccaaagcgagaattacgaggcccagcagtcgaactcccactcagcccaaccctggaagtcctatgcgggcggtgccatcccggcaagactgaggrgcgggaataggccaaaaagcccacaacaggattcgcatctggcgccgccaggctcatatggcgcttgccgagctgggggacaaacaggacaaggttccga

SEQ ID NO: 377991 - DNA, 201 bp, Homo sapiens
atcctttgatgaaagtgtgaggatatgggttgtgaaaacagggaagtgccacaagactgctagctcactccgatccagtctcggccattcattttaatcgygatggattcttgatagtttcaagtagctatgatggtctctgtcacatctgggacaccgcctcaggccagtgcctgaaaacgctcactgatgatgacaacc

SEQ ID NO: 377992 - DNA, 201 bp, Homo sapiens
ccggcaagactgaggggcgggaataggccaaaaagcccacaacaggattcgcatctggcgccgccaggctcatatggcgcttgccgagctgggggacaaamaggacaaggttccgagagtgggagccgcgccgcagcctttcccagagcagatggtttcagattcccagtacccccacgagcacagaaacatccttacctc

SEQ ID NO: 377993 - DNA, 201 bp, Homo sapiens; identical to SEQ ID NO: 81692

SEQ ID NO: 377994 - DNA, 201 bp, Homo sapiens; identical to SEQ ID NO: 81693

SEQ ID NO: 377995 - DNA, 201 bp, Homo sapiens
tacttgagcctaggagttcaaggatgcagtgagctatgatcgtgtcactacagctccagcctgggtgacagagcaagacactgtgtctcaaaaataaaatwaaaaaaagaaacagctaggccaggtgtggtggtgtgtgcctatagtcccaacttcttgggagaccgaggcaggaggatcgcatgggcccaggagttcaaa

SEQ ID NO: 377996 - DNA, 201 bp, Homo sapiens
ggagtgcagtggcacaatcttggctcactgcaagctccgcctcctgggttcaagggattcttctgcctaagcctcccaagtagctgggactacaggcgccygccaccacgcccggctaatttttgtatttttagtagagacagggcttcaccatattggccaaactagtctcgaactcctgaccttgtgatccgcccacct

SEQ ID NO: 377997 - DNA, 201 bp, Homo sapiens
gtgacctatggataccttgccttaatttaaaagaatgatggaattttatgtagaaggtagattgagttgaaagataacttaatcctgctccttctatatcrcaagtggatggaagtcatggagaaccaaggatacacagtctccagtccaaattttagatcttttttccattgagtaaccactataaaatctagaatgtag

SEQ ID NO: 377998 - DNA, 201 bp, Homo sapiens
catctccccattttctacccagcatccaacttcttcagagtaaagattactgctttgctactagtctgttagatctgggttagtagctgttgatgatctarcttgtgcttctcctagtcaatttacatgtgacctatggataccttgccttaatttaaaagaatgatggaattttatgtagaaggtagattgagttgaaag

SEQ ID NO: 377999 - DNA, 201 bp, Homo sapiens
aaatttgagaaaaccgtctggtcacagcctggtcgtcagattctaacctttttgtttccgcctcagatgacaaaaccttgaagatacgggacgtgagctcrggaaagtgtctgaaaaccctgaagggacacagtaattatgtcttttgctgtaacttcaatccccagtccagccttactgtctcaggatcctttgatgaaa

SEQ ID NO: 378000 - DNA, 201 bp, Homo sapiens
cgggtgcggtggcttacgcctgtaatcccagcactttgggaggccgaggcaggtggatcacctgaggtcaggagatcgagaccatcctggctaacatggtraaaccctgtctctactaaaaatacaaaaaaattagccgggcgtggtggcgggcgcctgtagtcccagctactcaggaggctgaggcaggagaatggcgtg

SEQ ID NO: 378001 - DNA, 201 bp, Homo sapiens
aactcagctactatagtaaaagcagaaacaattagtttattaattttttctatgtgtagatttcagtagtaggttattcagaaatgacagagcatgtcaarcatctaatagggttttctgagaaatacatatttatttggaaatgatgccagctgcatctccagactcagtttcaatcagtttaagcactgaaaagtatct

SEQ ID NO: 378002 - DNA, 201 bp, Homo sapiens
acctgggcgacagagcgagactccatctcaaaaaaaaaaaaaagaaaaagaaagtaaaaacgttaggcttggttttaaccttccagttgtctgaaactaaytgggcattattaacctacgtttcaacaattattcaaagctcgagagatttattgcacacttcactttaaacgcccctgattcaagtcaggaccagaacag

SEQ ID NO: 378003 - DNA, 201 bp, Homo sapiens
ggaaatgaacttggatttcattatactgcaagtggccctttggtgcgttcttcatataaagcaggtaagttagattgtggggcatggtttcatttaggccrttaactttccacattaagttctaccaccagtcactaaaactcttgacaaattctaatacctttggtggtcttggtagagggcgtagtttttcttctggaa

SEQ ID NO: 378004 - DNA, 201 bp, Homo sapiens
  misc_feature (1)...(201): n = A,T,C or G
cgatccctcaacccctgcactgcgctagtcctaaagaggaaatgtctctacgctgcggggatgcagcccgcaccctggggccccgggtgagcggcggggcnaacgggtttgggcgtggggtggggggatcctatcccttcagagcgcccatgcccaataataaaggccagtgcatttactgaacatttactactagccaac

SEQ ID NO: 378005 - DNA, 201 bp, Homo sapiens
ttaggagctttgctccatggggatcatattaagaaaagtttctcttaatcttttgtttcttaaacaaattcagccccctgctttgtaactcagctactatmgtaaaagcagaaacaattagtttattaattttttctatgtgtagatttcagtagtaggttattcagaaatgacagagcatgtcaagcatctaatagggtt

SEQ ID NO: 378006 - DNA, 201 bp, Homo sapiens
ttttgcatacaggtatgtgaggaagctcgatgtcccaatattggagagtgttggggaggtggagaatatgccaccgccacagccacgatcatggtagggcmagcctcaacctctatggctttagtctagaaactgaaagggactattttgtgtcttcctcctaaaaatgtgcattatgaatctctggtcagatttttcatt

SEQ ID NO: 378007 - DNA, 201 bp, Homo sapiens
atattggagagtgttggggaggtggagaatatgccaccgccacagccacgatcatggtagggccagcctcaacctctatggctttagtctagaaactgaamgggactattttgtgtcttcctcctaaaaatgtgcattatgaatctctggtcagatttttcattacatttgcatttatgaaaaatattaagaaaaaacctg

SEQ ID NO: 378008 - DNA, 201 bp, Homo sapiens
cagccacgatcatggtagggccagcctcaacctctatggctttagtctagaaactgaaagggactattttgtgtcttcctcctaaaaatgtgcattatgamtctctggtcagatttttcattacatttgcatttatgaaaaatattaagaaaaaacctgatggaataatccaacctgttgtaatctcacccttctctgaat

SEQ ID NO: 378009 - DNA, 201 bp, Homo sapiens
  misc_feature (1)...(201): n = A,T,C or G
cccatgcccaataataaaggccagtgcatttactgaacatttactactagccaacggcagttttaaacgtttttcgtgtaatctcatgtaattatcccgcnagccccatgatatagagtctctggcatcagtttgtttgcaagtctctctgggccagcaccgaggacttattttctgcttagagtggtttgtaccctatat

SEQ ID NO: 378010 - DNA, 201 bp, Homo sapiens
gcagtagcaatcgtgcaacaccctaacaggcactctttgagttgtcgaaggttcttttgagatacatgtgcagactcgtggattttgtagtgttttggctrtctcatacacgtttgtgttcagatgtaaaagccgaataccatgatttcttatgttcttgactgccacgttcaaacacagaaacaatgtaacctagaaagt

SEQ ID NO: 378011 - DNA, 201 bp, Homo sapiens
agattcccagtacccccacgagcacagaaacatccttacctcgcagtagacgcagcaaagaaagaacgtctgtcgtcattacgtacttgtatcgcgtaagrggcctgcgtattgcgtcatgagtgcgcgacgcacgtaaggctaaagcagccaatcgtggagcagcttggctgcttgtcataaatggagcgacgtaatttc

SEQ ID NO: 378012 - DNA, 201 bp, Homo sapiens; identical to SEQ ID NO: 81699

SEQ ID NO: 378013 - DNA, 201 bp, Homo sapiens
tgaggattcctgatggtgaagcagggaaattattgatgttatgtggacttcaccatttaacttaatttacaattgaggccattagttgacctgagagattraaatatgaaggagataatattctgggtgtcagtcgctttgtagataaagaactggaaagtcattcaagaccaagaaggaaggatttcatttccatggagc

SEQ ID NO: 378014 - DNA, 201 bp, Homo sapiens
tcaccgcaacctccgcctcccaggttcaagtgactcttctgccttagcctcccaagtagctgggattacaggcatgcgccaccacgcccagctaatttttrtatttttagtagagacgggatttcttcatgttggtcaggctggtctcaaactcccaacctcagatggtctgcccgcctcggcctcccaaagtgctgggat

SEQ ID NO: 378015 - DNA, 201 bp, Homo sapiens
gctgggattactggcatgagccaccgtgcctggccgagacggagtttctttcttgttgcccaggatggagtgcagtggcacaatctcggctcactgcaacytccacctcccaggttcaagtgattctcgtgcctcagcctcctgtgtagctggggttacaggcgtgcaccaccatgcccagcaaatttttgtatttttagt

SEQ ID NO: 378016 - DNA, 201 bp, Homo sapiens
cctcatcctcttggctagccggatctataggcacacaccaccacacctggctaatttttttttctttttctttttttcttaaagacaggggtgttgcctakgctgttctttaactcctggccacaagcagtcctcccacctcagcctcccaaagtgctgggattacaagcgtgaaccacagctccctgccttggtgtcact

SEQ ID NO: 378017 - DNA, 201 bp, Homo sapiens
tttggaatactataaaagaagtcttacttggtatcgaagatgcaattaagtcttgtctaagattttaagattctaattagacattaaaaccatgtttattrtaagtgtcctgaaaatgaagccactcagaaagctagttaaaccatgtttttgcccctttatctaaatctcgtattgtattttgtattttggcttcattgg

SEQ ID NO: 378018 - DNA, 201 bp, Homo sapiens
cccgcagtgccctcttgcctgtcagtagcaggaggcagcagtgaaatctgacagaattgtgtgtgacgttgtgcttgcgggggatgtgacacacaggagcrctctgcattctgagcctagggtgttcctcctcataactgggcaaatggacatgcagttgtagcccagcagtggtcagctgtagaaattagtgaggtgatt

SEQ ID NO: 378019 - DNA, 201 bp, Homo sapiens; identical to SEQ ID NO: 81697

SEQ ID NO: 378020 - DNA, 201 bp, Homo sapiens
cgcagtgccctcttgcctgtcagtagcaggaggcagcagtgaaatctgacagaattgtgtgtgacgttgtgcttgcgggggatgtgacacacaggagcgcyctgcattctgagcctagggtgttcctcctcataactgggcaaatggacatgcagttgtagcccagcagtggtcagctgtagaaattagtgaggtgatttg

SEQ ID NO: 378021 - DNA, 201 bp, Homo sapiens
tcaaaatatgtggtaagtttggggcacacaggttatcttttgttacatgattgattaactgagtcaaggatatgttgatgaccttgtattagctagcagartgattatcctgtttgcgaatagcttggaactacttaaaagtaagttaaatagtagctttagaataaatacctctaatggacttagtttacttagatgtac

SEQ ID NO: 378022 - DNA, 201 bp, Homo sapiens
tttcactgtgttagccaggatggtctcgatctcctgacctcatgatccgcccgcctctgcttcccaaagtgctgggattacaggcgtgagccaccgtgccyggcctgctcttgagttaaaggattccttttacatagctgttagcccagcaaatacttttcatgtttgcactgatgaattcaaatccagttgacctcattt

SEQ ID NO: 378023 - DNA, 201 bp, Homo sapiens; identical to SEQ ID NO: 81696

SEQ ID NO: 378024 - DNA, 201 bp, Homo sapiens
atttatattgaaaaaattttctcttcaaggtggttgaagatggatatgaattttttgcaaagaggcagttggtcactctgttttctgcgcccaattattgyggagagtttgacaatgcaggtgccatgatgagtgtggatgaaacactaatgtgttcttttcaggtagagcatgctttcaacatgatttccttttaatatg

SEQ ID NO: 378025 - DNA, 201 bp, Homo sapiens
cttggacataataaccctttccacagaataaattcttaatagttgaattttatgtgaggttctggacatacacatatacttaaaatttttgttaagctcarttgaactaaatatgatataagattggaaattacttagtgttggctgcccagttaaactctcattactagaggtcaatgccattgtacaatgaatatttaa

SEQ ID NO: 378026 - DNA, 201 bp, Homo sapiens
cacacctgtagtcgcggacactcaggagattgaggcaggaaaatcactggaacctgggagaccatggttgcagtgagccaagattgcgtcgcttcattccmcctaggtgatgcagtgagaccccacctcaaaaaaagtatccagaagtgaagctgaccttggggaaagaggaagtcactgtcactggggagctaagacagc

SEQ ID NO: 378027 - DNA, 201 bp, Homo sapiens
tggattaaggatactcatcctgtggtggtagtagtagtagtattgctgttggaaatgggagttggtggtttttggagattgcccttcagcctttcgtaagraggagtttgcttttttttgagacggagtttcactcttgttgcccatgctggagtgcaatggtgcgatcttggcttactgcaacctctgcctcccaggttc

SEQ ID NO: 378028 - DNA, 201 bp, Homo sapiens
actcttgttgcccatgctggagtgcaatggtgcgatcttggcttactgcaacctctgcctcccaggttcaagcaattttccttcctcagcctggcgggagragtttgttaaactttccgaaccccctagtgaaggacctctaaagaaatatgcaacagggtgaaccatagtcagtgttagacccagtcattgagaaaccag

SEQ ID NO: 378029 - DNA, 201 bp, Homo sapiens
gtgttggaaacaaatgccctgtagtgcctgtgagaggcagccactgccgtgtgatcattgtgcctcctgctagagtactgagggctggggatcctctggtrtcagtaggttattgaggggcatatatgggggatgggtgctaactctcaggtttcctcagaaggaaggtcataacgccacatgtgtaagttcgtaattgaa

SEQ ID NO: 378030 - DNA, 201 bp, Homo sapiens; identical to SEQ ID NO: 81745

SEQ ID NO: 378031 - DNA, 201 bp, Homo sapiens
tctgtagccctggggagtcggcagtgctggtctaggccccttaggagagggggcaggggggcagcagtagaaatgtggcggggtccgacttggtgtttccrgccgtctttgtgtctgtgttgtgtatgtggagtgtcattcggtctttatgtccctcacggcttcagtctctccatgtgtgtttctgccccaggctctgcc

SEQ ID NO: 378032 - DNA, 201 bp, Homo sapiens
tccctgcagttctcccagtgcccgcccgactaccaccacatccacaccgagatctcccgggaaggagcccgcgtcctggcgctggggtacaaggagctgggacacctcactcaccagcaggtacgggcccaggctccccctgccttcaccatgtgcctggcccgtcagctcctccctgagtcacctcctgtgtcccacagt

SEQ ID NO: 378033 - DNA, 201 bp, Homo sapiens
gagtggtcgctcagggggccctggcccgacccagtttcaagcggctcaggtagagaagggcactatcaaggcttccgggctacgggggcgtggtctgatgygggggcgtggcctccgctgggcagggcgacgcggaaccgaggcggcggcggcggctgcggcggcaggaaatcggggctcggccccgccggcgcgcgaccc

SEQ ID NO: 378034 - DNA, 201 bp, Homo sapiens
ccggggccagggaggcagccctgggctcaggggtgagaggcaggcagggatccagggactggtgctgacccatggaatcccccaggatttggtggtggctstacacaaggtctcccgggaggcaggggatgttactgcctgctgtgtgggcagggtggccccaagtgagccagatcctgactcccccacccgccttgctgc

SEQ ID NO: 378035 - DNA, 201 bp, Homo sapiens
gccctgcaggccgctccccacaggagaacctggtgccatgtgacgtgcttctgctgcgaggccgctgcatcgtagacgaggccatgctcacgggggagtcygtgccacagatgaaggtacttggtggaggatggggatcctcaagctgttcaggaggaaacaggccaggaggtggaggcccagggggtggcggggatcccc

SEQ ID NO: 378036 - DNA, 201 bp, Homo sapiens
tgtagctgggatggctcaggaaatgctggcagggcaggtgtggactgaggctcccagacccctccaggtggtacagcttggcgtccacacctgtccacagrtaggggtcccaggggtgggccccacagagccccacaagcaaggaacaatcatcaagagggtaaaaaaacaactaagtgggtcataggctacacaggacag

SEQ ID NO: 378037 - DNA, 201 bp, Homo sapiens
  misc_feature (1)...(201): n = A,T,C or G
ctgtgaagcaggtgcaggtctcataaagacccagttggcgcccaagccaccccagtgacaagcacggaatgaatggccttgggggtccttctgctggtggngatgcagcttcgccctacccgcctgcactctgtaaccagctgttccccgaccttgcagagacgggaaggaggtgaccccagtgtccagcatccctgtaga

SEQ ID NO: 378038 - DNA, 201 bp, Homo sapiens
tgtactgcacagagcccttccggatcccctttgctggcaaggtcgaggtgtgctgctttgacaagacggggacgttgaccagtgacagcctggtggtgcgyggtgtggccgggctgaggtaagcatcaggggccctgcagcaaaggtcacccagatggggtttctgggaagtcgagagacaggtggcccatccaccccaag

SEQ ID NO: 378039 - DNA, 201 bp, Homo sapiens
  misc_feature (1)...(201): n = A,T,C or G
acgggcctgaagcgtaggtgcctcatgggcgtctgggggtatctgggcttccaccccctttgcccgtctgcttgatcatgagggagtcaggacgaggaganaggcatgacggtgactctgcttctctccccagcggttgacagcgggtgcgtggcctacgtcctgcggaccggattcaacacatcccaggtgcggggccag

SEQ ID NO: 378040 - DNA, 201 bp, Homo sapiens
gccctgggatgtcagaccaaggtgggctgggagcagtccagaggggtgagtcccagacgaggccaagtgcaggccccagagagcaggcactgtgagtgcartggggagaagacaggacggggtgagggtgaggatctgggagctgggtgggatgtattggtcgggtggggatccccctggctcattccagcctcaaggtcc

SEQ ID NO: 378041 - DNA, 201 bp, Homo sapiens
gggggagtccgtgccacagatgaaggtacttggtggaggatggggatcctcaagctgttcaggaggaaacaggccaggaggtggaggcccagggggtggcrgggatccccctcaggcacaggcggaggaggcagtgtgggcacagatgagctctgtggactggggagccgggtggtgggggcgaggaaggaggtgagagag

SEQ ID NO: 378042 - DNA, 201 bp, Homo sapiens
tgacctgggtgggggtgggttgtggcccttggaagcccattcagcatctcggttagaggcccaggatctcccactgtggcctaccttagaaggagacttgrcagccttgtctctggcctagagcttggccccagggtgccatgctgagcctctgcccctctttacccaaggtggtcatgatcacgggagacaacccgctca

SEQ ID NO: 378043 - DNA, 201 bp, Homo sapiens
tccaccccctttgcccgtctgcttgatcatgagggagtcaggacgaggagacaggcatgacggtgactctgcttctctccccagcggttgacagcgggtgygtggcctacgtcctgcggaccggattcaacacatcccaggtgcggggccaggtctggggagggcgggccccagggcagttggacagccaaggtatcagcc

SEQ ID NO: 378044 - DNA, 201 bp, Homo sapiens
cattgtgaaactgggggatgccagcatcgcagcacccttcacctccaagctctcatccatccagtgcagtgagttgcctgcccccgctccccctcccttcrttccccccttggcacccctacccacacccacacctgcctccccaccaccctgcagtctgccacgtgatcaagcagggccgctgcacgctggtgaccacgc

SEQ ID NO: 378045 - DNA, 201 bp, Homo sapiens
tggcatcctgacacacctttatcccccaggacccttgagatgctggctggagaccctctactctcagaagacccagaacctgacaagacccctacagccaytgttgtgagtggggagtaggggaacagggaggaagacctcaagcagagggggccttaggaaggccaggcccctgccctgtttgcttctgaatactgtctc

SEQ ID NO: 378046 - DNA, 201 bp, Homo sapiens
aacattcacaggtctgggccagagcagcttccggaacctccaggccacctctcagaggactcggtccctgccctccctctgttctattggtcgcaggcctycccctgtcccagccccagctaccggggtcttccagggcctggggattgtgggcaggtggcatggagcggatgagcagaactgttgattgacaagcgaagc

SEQ ID NO: 378047 - DNA, 201 bp, Homo sapiens
actggacgctgaccaaaggtgaggggctggggcctcaggcccagcaagggggagccactggctctcacagccctaggcaggtgggctgcacccctcagagsatcttggggacaggcaggcctacagctctgatgctccccgaggtgggtggccagaggctcactttagacccaggataggccacgtccttgggtgtccctc

SEQ ID NO: 378048 - DNA, 201 bp, Homo sapiens
atagaggcgaggagatgacaattacagcttcgtggtaggggtgggcacccaagtctcacaggctgcatgttttagctgagcaagatcatagctcaggtgcwaacattgccactggcccaaggacactctgggacccgcctgtgctggctcctctctcctccacagaccactcccttcactccccgcatcatgggaagatgg

SEQ ID NO: 378049 - DNA, 201 bp, Homo sapiens
agccccgagaagtaagtgctgccttggaggaggtgatgtccctgcagctgagaatagcaggaggatgactccacagacttcagcaggagaggctgggggtygtccagggtgtccagggaggggcactaggccaggcagagccctagctctgtgccagggcagcaggaagccacacagtgtgtgtgagccggagcaggagag

SEQ ID NO: 378050 - DNA, 201 bp, Homo sapiens
ccgagtggagggagggtgcttctgagcccggtcagccaagcccccagccctaaccctaggtgctgcccgcaggccggcagtgcgagtggcgctccattgayggcagcatcgtgctgcccctggcccggggctccccaaaggcactggccctggagtacgcactgtgcctcacaggcgacggcttggcccacctgcaggcca

SEQ ID NO: 378051 - DNA, 201 bp, Homo sapiens
gcttagctcttaacttcctctccagggatggagaagtgggaggagctgaacagccatcagccaggagaggtggatctgggtttgattcagatctcagaaasggccgcttctgctctctgagtttcagtttcccccttctgtaaactgagaaccgtaactaacaactactgggtgccatcttgagaagcggagatgatatct

SEQ ID NO: 378052 - DNA, 201 bp, Homo sapiens
acccatagagctgctgcacccaaaacctcccgggggggtcttggaactgtaggttgagaagagctaagccacaatgctttctttgtctctgtcaggagtaygaccccagcaaagcgacctttgtgaaggtggtgccaacccccaacaatggctccacggagctcgtggccctgcaccgcaatgaggtagggactgcctgct

SEQ ID NO: 378053 - DNA, 201 bp, Homo sapiens
agcaacagctttattttaaattcttttaaaatgtttatttgtgtagagatggggtctcgccgtgttgcccaggcttgtctcaaactcctggcctcaagcartcctcctaaatcaacatcccaaagtgctgggattacaggcatgagtcactgcacccaacctaaacatttcagtcctcactgtttcgagtctacgcatctc

SEQ ID NO: 378054 - DNA, 201 bp, Homo sapiens
accccagtgacaagcacggaatgaatggccttgggggtccttctgctggtggggatgcagcttcgccctacccgcctgcactctgtaaccagctgttcccygaccttgcagagacgggaaggaggtgaccccagtgtccagcatccctgtagaaacacaccgggccctggcctcgtgccactcgctcatgcagctggacga

SEQ ID NO: 378055 - DNA, 201 bp, Homo sapiens
caccacagaggaggaagctggctgggtcagctctcggggccctgctttgtagagaagggacagaggctcagaagtgaacccacttgcccaggtcacttccmatccatggctaaggattggaatccagacagcctgattccagagctcaaggctccaacctctccccagtgacctctttgagcaatgccctggattcagatt

SEQ ID NO: 378056 - DNA, 201 bp, Homo sapiens
gttactgcgttggtccctccaccccatcctgcaccacacggggtggcttgccttccccacaccacagaggaggaagctggctgggtcagctctcggggccctgctttgtagagaagggacagaggctcagaagtgaacccacttgcccaggtcacttccaatccatggctaaggattggaatccagacagcctgattccag

SEQ ID NO: 378057 - DNA, 201 bp, Homo sapiens
accccccagtcactgccagatcccacccctcaagcgtgcctggtaccctcctggcatttctcccctcccaaccctcgcatgtgcccactacgggaacaggrccttccattgtccccttggctcccagcgcatggtcagagctcaggaaatgcagagtgtgggcagagggagggacagatggtgagggtgcccctgtctgtc

SEQ ID NO: 378058 - DNA, 201 bp, Homo sapiens
  misc_feature (1)...(201): n = A,T,C or G
cccccttctgtaaactgagaaccgtaactaacaactactgggtgccatcttgagaagcggagatgatatctgcagagtgcccgccctggggccatcacagngtatagcctcttgtacctttcttccgtgacgtcacgtttgtagttatgtgattgttgttatttgctgcctgctttggaggcccatgaaccacccgtgcgg

SEQ ID NO: 378059 - DNA, 201 bp, Homo sapiens
tgtggactgaggctcccagacccctccaggtggtacagcttggcgtccacacctgtccacaggtaggggtcccaggggtgggccccacagagccccacaarcaaggaacaatcatcaagagggtaaaaaaacaactaagtgggtcataggctacacaggacaggctggtggacagctggggaggcctgtgcgacaccgaca

SEQ ID NO: 378060 - DNA, 201 bp, Homo sapiens
ggcaccaaggtggtgcagcacatccccccacagaaagccaccacgggcctgaagcgtaggtgcctcatgggcgtctgggggtatctgggcttccacccccwttgcccgtctgcttgatcatgagggagtcaggacgaggagacaggcatgacggtgactctgcttctctccccagcggttgacagcgggtgcgtggcctac

SEQ ID NO: 378061 - DNA, 201 bp, Homo sapiens
gctcaccatccctccctgccccgacagttcaagctggtcattgcccaggtcctgctcctggacttctgcctggcgctcctggccgaccgcgtcctgcagtwcttcctggggaccccgaagctgaaagtgccttcctgagatggcagtgctggtacccactgcccaccctggctgccgctgggcgggaaccccaacagggcc

SEQ ID NO: 378062 - DNA, 201 bp, Homo sapiens
tgtccccttggctcccagcgcatggtcagagctcaggaaatgcagagtgtgggcagagggagggacagatggtgagggtgcccctgtctgtccgcaggccmgggaggtcaagcgggaggccctggagtgcagcctcaagttcgtcggcttcattgtggtctcctgcccgctcaaggctgactccaaggccgtgatccggga

SEQ ID NO: 378063 - DNA, 201 bp, Homo sapiens
tgtaaccagctgttccccgaccttgcagagacgggaaggaggtgaccccagtgtccagcatccctgtagaaacacaccgggccctggcctcgtgccactcrctcatgcagctggacgacggcaccctcgtgggtgaccctctagagaaggccatgctgacggccgtggactggacgctgaccaaaggtgaggggctggggc

SEQ ID NO: 378064 - DNA, 201 bp, Homo sapiens
cagctgcggccttcctgtcggtcaccatcgcgacctgggccactcatctgcctggcctggattcccaggggcaccctctacactttggcgcaggcttaatyatgaccccactgctgacttgctgtgcatgcctggtgcgggttatttcctttttctgaagtcctccctgttatggtcatttagattcagtgatgtaatact

SEQ ID NO: 378065 - DNA, 201 bp, Homo sapiens
ggaggtgctgcaccccatcctggccagggctgacagcctgctgtctaccctgcaggaccgcctgagccaggtgctgcgagacctcgaggacgagagtacgmccattgtgaaactgggggatgccagcatcgcagcacccttcacctccaagctctcatccatccagtgcagtgagttgcctgcccccgctccccctccctt

SEQ ID NO: 378066 - DNA, 201 bp, Homo sapiens; identical to SEQ ID NO: 81788

SEQ ID NO: 378067 - DNA, 201 bp, Homo sapiens
gacttcaacagccagtttggcctcgtggacatccctgtggaggtcagtggccctgtggaggtgaccctggggctcagcttgatgggtccctcctatggcartgaccctgagctgggctgcaggtctccagctcaccatccctccctgccccgacagttcaagctggtcattgcccaggtcctgctcctggacttctgcctg

SEQ ID NO: 378068 - DNA, 201 bp, Homo sapiens
atgatgcgcctgtgttggcctcccaaagtgctgggattacaggtgtgagccacctcacctggcctttttttcttttttctttttttttttttgcaagaacwcaggtgttaaattgaattttaaagatcaatcttacgttggtttttttgcttttccaatatttatctgcttttatctactaaagcatttattgagtgttgt

SEQ ID NO: 378069 - DNA, 201 bp, Homo sapiens
cgggagacaacccgctcactgcatgccacgtggcccaggagctgcacttcattgaaaaggcccacacgctgatcctgcagcctccctccgagaaaggtgasgccctagcctggcccacagtggggaagggggaccctgagtccaagaacagctcccatcgcaacagcccacctgtgtaccaggcctcagcagcacagtgtc

SEQ ID NO: 378070 - DNA, 201 bp, Homo sapiens
tccacctcaggggcaggttgttcatttgtattgcaaatccaagctaagggtgtcttcagaaggacgcacatacacgtgtcatttgtgtaaaatgacctggrtgggggtgggttgtggcccttggaagcccattcagcatctcggttagaggcccaggatctcccactgtggcctaccttagaaggagacttggcagccttg

SEQ ID NO: 378071 - DNA, 201 bp, Homo sapiens
ctcactcaccagcaggtacgggcccaggctccccctgccttcaccatgtgcctggcccgtcagctcctccctgagtcacctcctgtgtcccacagtgccasgttgaatggttgtgattttgtcctccttgccccgcctccagcttctacctttggagactccaaatggcactcagtctgtccactgctgtggggacccacc

SEQ ID NO: 378072 - DNA, 201 bp, Homo sapiens
tgacttcagatgatgcgcctgtgttggcctcccaaagtgctgggattacaggtgtgagccacctcacctggcctttttttcttttttctttttttttttttgcaagaactcaggtgttaaattgaattttaaagatcaatcttacgttggtttttttgcttttccaatatttatctgcttttatctactaaagcatttatt

SEQ ID NO: 378073 - DNA, 201 bp, Homo sapiens
cccccaaccccccacagcaaggctgtacagtctcgcccttggaagactgagctgggacccccacagccatccgctggcttggccagcagaaccagccccargccagcacctttggtaaataaagcagcatctgagattttaaaaagccctgcctccacctcgtctgtgccacacggtgtttgctgggggctcggggacaga

SEQ ID NO: 378074 - DNA, 201 bp, Homo sapiens
ggtctccaactcctgacttcagatgatgcgcctgtgttggcctcccaaagtgctgggattacaggtgtgagccacctcacctggcctttttttcttttttytttttttttttttgcaagaactcaggtgttaaattgaattttaaagatcaatcttacgttggtttttttgcttttccaatatttatctgcttttatctac

SEQ ID NO: 378075 - DNA, 201 bp, Homo sapiens
ggaggcccagggggtggcggggatccccctcaggcacaggcggaggaggcagtgtgggcacagatgagctctgtggactggggagccgggtggtgggggcraggaaggaggtgagagagccaagggcatccagggtacattggtgccctgggatgtcagaccaaggtgggctgggagcagtccagaggggtgagtcccaga

SEQ ID NO: 378076 - DNA, 201 bp, Homo sapiens
accatgttggccaggatggtctccaattcctgacctcaagtgatccacccgccttggcctcccaaagtgctaggattacaggtgtgaaccactgcatcccrccgaaccctgccttttttttttttttttttttttgagacagtttctctcttgttgcccaggctggagtgcaatagcacggtctcagctcactgcaacctc

SEQ ID NO: 378077 - DNA, 201 bp, Homo sapiens
ggcattaggtgctgtctgtgcacccagcttcccagctttttttgttgttgtttttgtttttgttttgttttttggggtttttttgtttgtttgtttgtttktttttgagatggagtctggctctgttgcccaggctggagtgcagtggcacaatctcggctcactgcaacctccgcctcccaggttcaagtgattgttctg

SEQ ID NO: 378078 - DNA, 201 bp, Homo sapiens
gcctgggaaccctggccatggagacagtggcccagcagaaaagagactactaccaggtgaggggggcagggtggaatgttacagaggtcaccctgctatcstgctgtccttcaggcctgatcccctcgtttcccagcaagctgggaggaaggcaccactaccaacgtcgccatttcattgatgaggaagctgaggcccggg

SEQ ID NO: 378079 - DNA, 201 bp, Homo sapiens
taagccacaatgctttctttgtctctgtcaggagtacgaccccagcaaagcgacctttgtgaaggtggtgccaacccccaacaatggctccacggagctcktggccctgcaccgcaatgaggtagggactgcctgctgggctcctggaggaggggcttgagtaggattcccaggcgctgacaccccaaggtcaggggcctc

SEQ ID NO: 378080 - DNA, 201 bp, Homo sapiens
cttctgctgcgaggccgctgcatcgtagacgaggccatgctcacgggggagtccgtgccacagatgaaggtacttggtggaggatggggatcctcaagctkttcaggaggaaacaggccaggaggtggaggcccagggggtggcggggatccccctcaggcacaggcggaggaggcagtgtgggcacagatgagctctgtg

SEQ ID NO: 378081 - DNA, 201 bp, Homo sapiens
agcgtggggagggcagccccatcctacagacagggacactgaggcgtggcggtctatctgtccatccccagggtgagcaccgtggagcagctggaccagcrctacctgctggtgcctgagaaggtcaaggacgcctacctggtccacctgatccagcgcttccaggatgagcacgaggactggtccattatcatcttcacc

SEQ ID NO: 378082 - DNA, 201 bp, Homo sapiens
cgaggtggtaggaagctgtgggcatctcgggtcaaatggatatgggttccagtccagcctgccactcactggcagtgtgtcctgggcaaggtctctgaaasccagctgtccacacatggagggtgttgatgctgctttgtccccaacccaggtcgagactgcttgggctgtgctaagacaggcagtgggaagacagcagcg

SEQ ID NO: 378083 - DNA, 201 bp, Homo sapiens
gaagccccagcatgggaccctagcagctttggaccacctgcccagccctgcctctcatgctctgtcccccagacatggtggcccaggcgctggagctctcycggaaaccacacgtggtcatcgccacgccggggcgcctggcagatcacctgcgcagctccaacacttttagtataaagaagatccgcttcctggtgagtt

SEQ ID NO: 378084 - DNA, 201 bp, Homo sapiens
  misc_feature (1)...(201): n = A,T,C or G
cacacccacagggagctggcctaccagatcgcagagcagttccgggtcctggggaagcctctagggctgaaagactgcatcatcgtcggtggcatgggtangggagctgggaggcgggggaagccccagcatgggaccctagcagctttggaccacctgcccagccctgcctctcatgctctgtcccccagacatggtggc

SEQ ID NO: 378085 - DNA, 201 bp, Homo sapiens
cgggagctgcagggtctggccaccaaccagcccttcttctgggaagcacaggccccgtgagtccacagcccagacagcgtggggagggcagccccatcctrcagacagggacactgaggcgtggcggtctatctgtccatccccagggtgagcaccgtggagcagctggaccagcgctacctgctggtgcctgagaaggtc

SEQ ID NO: 378086 - DNA, 201 bp, Homo sapiens; identical to SEQ ID NO: 81797

SEQ ID NO: 378087 - DNA, 201 bp, Homo sapiens
ccgaaaccactggctggtcccttccctgagccctggccaagattcaggctgcaggggaagaaagaacatgaccgggaggttgtgaccccaacccaaggtcmccccccaggggtgccgcatacaggaggtgcttaataaacgggtcttttgacttcctcagtctgactttcgaagagcagggggacaggagaggtggggtgc

SEQ ID NO: 378088 - DNA, 201 bp, Homo sapiens
tgaggctgtcaaaattgctggtagatccaggactccttggtcctgtgattgctcctctaggagaaggtcttctctctgctcctctagcccaacccagtttsgccattaaagagaggcccacaggaagcctaagatgtgataagtcagggattaaataaacaaatgaaggggtcaacagggagcacaagatgcatatgaggg

SEQ ID NO: 378089 - DNA, 201 bp, Homo sapiens
tacaccatcatgcccggctaatttttgtgtttttagtacagatggggttttgccatgttgggcaggctggtcttgaactcctggcctcaagtgatccaccygcctcagtctcccaaagtgctgggattacaggcatgagccaccgtgcctggcctgctgcctctcctttctaagctgcatgaggccactgtgctaggtgtc

SEQ ID NO: 378090 - DNA, 201 bp, Homo sapiens
tcaatggacggctggggactgtcccggcctccaccctgtcccgaggcctcacacagaaaaccctgccttcatgcattcccaattttcttcccaaccctgtkcagaaagaacgctttgccgccctagccaagttcaagtccagcatctaccggatcctgatcgcaacagacgtggcctcccggtgagcagcccccagtctcc

SEQ ID NO: 378091 - DNA, 201 bp, Homo sapiens
catcccaggccggaatcgttcatagaaaaccagccccggctcagggcgcagcctcagccaggcgggccaggccctcacgcagctcactcagctcaaacagsctgacgtccagcagctgcgctgcccggcccacctcagcccgcgcccgctcccgctctgcccgtgcctcctccaggctgcgctccatcgcccgcagctggt

SEQ ID NO: 378092 - DNA, 201 bp, Homo sapiens
ttctcgtgacgtcgtcggcgcgcgccggaagcgcggatcacacgggcccctacaaggggcccctacaagcggccacaaggatggcaggcttcgcggagctygggctgtcatcgtggctcgtggaacaatgtcggcagctgggtttgaagcagcccacgcccgtgcagctcggctgcatccccgccatcctggagggtgagt

SEQ ID NO: 378093 - DNA, 201 bp, Homo sapiens
gagcaaaactctgtctcaaaaaaaaaaaaaagaaagaaagaaagaggcaggcagcagaaagggtactgggacctgggcatattggagccagtttgagaaargccttgaatgccaggcggagggttagaattgattctgggggtgtgtgagcaggaaaggtcatgagccagggagaggccaggacagagttggttgggggca

SEQ ID NO: 378094 - DNA, 201 bp, Homo sapiens
  misc_feature (1)...(201): n = A,T,C or G
gcatcatcgtcggtggcatgggtacgggagctgggaggcgggggaagccccagcatgggaccctagcagctttggaccacctgcccagccctgcctctcangctctgtcccccagacatggtggcccaggcgctggagctctctcggaaaccacacgtggtcatcgccacgccggggcgcctggcagatcacctgcgcagc

SEQ ID NO: 378095 - DNA, 201 bp, Homo sapiens
aaggtgggtggatcacttgagcccaggagtttgagatcagcctgggcaatgtggagaaaccctgcctctccaaaaaatatagaaactagcagcacacgccygtagttccaactactcaagaggctgaggttggaagattgcttgagcggaggctacagtgacctgattgagccaccacgctccagcatgggcgacagagta

SEQ ID NO: 378096 - DNA, 201 bp, Homo sapiens
caggaggcagatccaataaacaggaagatttttctcgtgacgtcgtcggcgcgcgccggaagcgcggatcacacgggcccctacaaggggcccctacaagyggccacaaggatggcaggcttcgcggagctcgggctgtcatcgtggctcgtggaacaatgtcggcagctgggtttgaagcagcccacgcccgtgcagctc

SEQ ID NO: 378097 - DNA, 201 bp, Homo sapiens
ttcttggccttcttggtaacagtgaccacccctagcaagtcagtttccagccttccagccctgcagtcccagggccaactcttgtcagttccagctccagrgagggatcagcagagaggacatcaggcaggcaagccgtctgtcaaccctcatcctgcctcttttttttttttttttttttgagagtctcacgctgtcccc

SEQ ID NO: 378098 - DNA, 201 bp, Homo sapiens
gtgccaggaccctgacctggaggccaagcgcaaggctgagctggccaagatcaagcagaagaaccggcgcttcaaggagaaggtggaggagacgctgaagygacagaaggctggcagggctggccacaaggggcgtccacccaggacaccgtctgggtcccactcaggcccagtcccctcccagggcctggtctgagcccc

SEQ ID NO: 378099 - DNA, 201 bp, Homo sapiens
  misc_feature (1)...(201): n = A,T,C or G
gcctcaagtgatccacccgcctcagtctcccaaagtgctgggattacaggcatgagccaccgtgcctggcctgctgcctctcctttctaagctgcatgagnccactgtgctaggtgtctcaggggcgggtgggggcaggaacaccttcccagaacctgagagctggaggggttgacaggcacatccttcccgccaggacct

SEQ ID NO: 378100 - DNA, 201 bp, Homo sapiens
  misc_feature (1)...(201): n = A,T,C or G
agaggccctccctgaccgcatctcttttagccgtcattcatttgtcccggtctgacttctcatggccaccttcctcaatggacggctggggactgtcccgncctccaccctgtcccgaggcctcacacagaaaaccctgccttcatgcattcccaattttcttcccaaccctgtgcagaaagaacgctttgccgccctagc

SEQ ID NO: 378101 - DNA, 201 bp, Homo sapiens
  misc_feature (1)...(201): n = A,T,C or G
gaggccctccctgaccgcatctcttttagccgtcattcatttgtcccggtctgacttctcatggccaccttcctcaatggacggctggggactgtcccggnctccaccctgtcccgaggcctcacacagaaaaccctgccttcatgcattcccaattttcttcccaaccctgtgcagaaagaacgctttgccgccctagcc

SEQ ID NO: 378102 - DNA, 201 bp, Homo sapiens
gcaccttcacccgctgcgcctcgtttatgcactgctggtagctgccgatgtagaaggcgttctttacgtcgaacagctcgtctacctccccggagccgccrgaggccgggccgggggccggaggcgccatttcgctgtcttctcaccagctcctcttcctgaaagacacgtcagccggaagcaagacacgggcacgctagg

SEQ ID NO: 378103 - DNA, 201 bp, Homo sapiens
gcgcggccgcaccttcacccgctgcgcctcgtttatgcactgctggtagctgccgatgtagaaggcgttctttacgtcgaacagctcgtctacctccccgsagccgccggaggccgggccgggggccggaggcgccatttcgctgtcttctcaccagctcctcttcctgaaagacacgtcagccggaagcaagacacgggc

SEQ ID NO: 378104 - DNA, 201 bp, Homo sapiens
  misc_feature (1)...(201): n = A,T,C or G
caccaaccagcccttcttctgggaagcacaggccccgtgagtccacagcccagacagcgtggggagggcagccccatcctacagacagggacactgaggcntggcggtctatctgtccatccccagggtgagcaccgtggagcagctggaccagcgctacctgctggtgcctgagaaggtcaaggacgcctacctggtcca

SEQ ID NO: 378105 - DNA, 201 bp, Homo sapiens
gtcccgaggcctcacacagaaaaccctgccttcatgcattcccaattttcttcccaaccctgtgcagaaagaacgctttgccgccctagccaagttcaagkccagcatctaccggatcctgatcgcaacagacgtggcctcccggtgagcagcccccagtctcctgccaagggcactccctcttttactacaaggccccac

SEQ ID NO: 378106 - DNA, 201 bp, Homo sapiens
gcactccatgatgaagcaggtgaggccaccctggggcccgccagcctcaccctgggatacctccccgcctcagacattggccccgatccttccttctgccrggcgccttcttcctgccacctggtctcttctggtcccagaatatcgcagctcaagaggccctccctgaccgcatctcttttagccgtcattcatttgtcc

SEQ ID NO: 378107 - DNA, 201 bp, Homo sapiens
gtgagcagtaccgtaaactgttactgctctgggttctgtcacgggacagtgactactcctcactgaactgtggaagaggtggcccaaaaaacgcgagaagwaaagagaaagtttttagacgcagaacgcggctcgcggccaccagaaagcgtcctccgcctccgcccccagcgtccccgcgcccctgcgcggccgcacctt

SEQ ID NO: 378108 - DNA, 201 bp, Homo sapiens
agtgagcagtaccgtaaactgttactgctctgggttctgtcacgggacagtgactactcctcactgaactgtggaagaggtggcccaaaaaacgcgagaakaaaagagaaagtttttagacgcagaacgcggctcgcggccaccagaaagcgtcctccgcctccgcccccagcgtccccgcgcccctgcgcggccgcacct

SEQ ID NO: 378109 - DNA, 201 bp, Homo sapiens
gcagcgtttgtccttcccatcttgcagaagctgtctgaggatccctatggcatcttctgcctcgtcctgacacccaccaggtaagcccccagcaggcctcytgggtatgggttaaccagctgtgctctcttgggcaagcacctttccctctctgagcgcccttttcccacgtgtgagatgagcatgaaaatcttgctaccc

SEQ ID NO: 378110 - DNA, 201 bp, Homo sapiens
gagcacaagatgcatatgagggaagggaattctggattccccaaattcacgtgctcctggacggagttagaacgaggtggtaggaagctgtgggcatctcrggtcaaatggatatgggttccagtccagcctgccactcactggcagtgtgtcctgggcaaggtctctgaaacccagctgtccacacatggagggtgttga

SEQ ID NO: 378111 - DNA, 201 bp, Homo sapiens
tgggtgaggggcaggcctcccttggaaggagggtactccagggcctagggtccatgtccatgcctctcaaagaggcctgcttcaggggtggccaagacccrgggccatggacggcaccctcacccctgcccccattggcacggcaggtgatggatgaggcagaccggctgctggaacagggctgcactgacttcaccgtgg

SEQ ID NO: 378112 - DNA, 201 bp, Homo sapiens; identical to SEQ ID NO: 81802

SEQ ID NO: 378113 - DNA, 201 bp, Homo sapiens
cgtggaacaatgtcggcagctgggtttgaagcagcccacgcccgtgcagctcggctgcatccccgccatcctggagggtgagtatggcccagggccttccscaagaggcctctccgctcctctcgactcctttcccttctcgcaacctttgcttattccggtcccacgaggcgaggggcaacctcgggcgttacaggagat

SEQ ID NO: 378114 - DNA, 201 bp, Homo sapiens
cgcatctcttttagccgtcattcatttgtcccggtctgacttctcatggccaccttcctcaatggacggctggggactgtcccggcctccaccctgtcccsaggcctcacacagaaaaccctgccttcatgcattcccaattttcttcccaaccctgtgcagaaagaacgctttgccgccctagccaagttcaagtccagc

SEQ ID NO: 378115 - DNA, 201 bp, Homo sapiens; identical to SEQ ID NO: 81804

SEQ ID NO: 378116 - DNA, 201 bp, Homo sapiens
ccctgccttcatgcattcccaattttcttcccaaccctgtgcagaaagaacgctttgccgccctagccaagttcaagtccagcatctaccggatcctgatygcaacagacgtggcctcccggtgagcagcccccagtctcctgccaagggcactccctcttttactacaaggccccacagatgagaaggctggcctcaggc

SEQ ID NO: 378117 - DNA, 201 bp, Homo sapiens
gaattgtagtgtgtttctgcaagccaatgggatccggggaaacatgataaggatgcggtcgaggctgggaataggctgagggagctggagagggtgggacyacgcaggaggcagatccaataaacaggaagatttttctcgtgacgtcgtcggcgcgcgccggaagcgcggatcacacgggcccctacaaggggcccctac

SEQ ID NO: 378118 - DNA, 201 bp, Homo sapiens
ggccaccttcctcaatggacggctggggactgtcccggcctccaccctgtcccgaggcctcacacagaaaaccctgccttcatgcattcccaattttcttyccaaccctgtgcagaaagaacgctttgccgccctagccaagttcaagtccagcatctaccggatcctgatcgcaacagacgtggcctcccggtgagcagc

SEQ ID NO: 378119 - DNA, 201 bp, Homo sapiens
gaaacatctggacttggccaggcacagtggctcacacttgtaatcctagcactttgagaggccgaggtgggcggatcacttgagcccaggagttcaagacsaacctgggcaacatggtgaaaccccgtctctactaaaaatacaaaaattagccaggtgtggtggcgcacgcctgtaattgcagctacttgggagggtgag

SEQ ID NO: 378120 - DNA, 201 bp, Homo sapiens
gggttggggtgggtggtagagaaggaggggtggggtgggcagaggtgggcacctcggggtgagacccattttcccgtcagacaccagccggcctgctcccrtgagcagatttaggctggggcttccttccctaggcacccccaaaagaagttcttttgcccatttattgaaacaaactccccatagttgtcgccagcagct

SEQ ID NO: 378121 - DNA, 201 bp, Homo sapiens; identical to SEQ ID NO: 81796

SEQ ID NO: 378122 - DNA, 201 bp, Homo sapiens
tgtccacacatggagggtgttgatgctgctttgtccccaacccaggtcgagactgcttgggctgtgctaagacaggcagtgggaagacagcagcgtttgtycttcccatcttgcagaagctgtctgaggatccctatggcatcttctgcctcgtcctgacacccaccaggtaagcccccagcaggcctcctgggtatgggt

SEQ ID NO: 378123 - DNA, 201 bp, Homo sapiens
ttggggtcaagcccagacactctgggctgatccctcccaagcccaagcccttgttcagcatctccaggacccctgagctgtgtagctgtcaggatctaccyttattcgccccatgtcctgacgcccagcacatagcagataaccggcacatccccacagggcggcagggtcaggccatcacgctggtgacacagtacgaca

SEQ ID NO: 378124 - DNA, 201 bp, Homo sapiens; identical to SEQ ID NO: 81817

SEQ ID NO: 378125 - DNA, 201 bp, Homo sapiens
ttcgtcagacacaaggtgactgggctggcctgagggaagcttagggcctggggttctgggagatttcaccaggggtgggctgaggtggggagggagcctcytctctggcagaggccctatccctgtctctgtcctctggctggccaagccatggggctgaaggctgcggcctgccttcatcatcttcctgtagatcccagt

SEQ ID NO: 378126 - DNA, 201 bp, Homo sapiens
ccatcaggacgccttcacacccacctgctcttggtcctcttaggggcctttgggactctgggagttggtgcaggatttgcacttggggccaagctgtgccrgccagatgctgaggtgaggcactggagttgggagacttgctgctctctaggtcctgatccaccctaaccatcctgggtcccctcccgactaggtctggtg

SEQ ID NO: 378127 - DNA, 201 bp, Homo sapiens
aaagggcgtggtctggcagggttgggggcgtggccgcacagaaactggcggcaagggtcgtggccctggatcctgctgcgagaaggggcgcgatttcttcyggagaggttccctgtcgcgcccaagtctgggaagtgccctttctctcttaggtaccacctcatggagacccccgcggccgccgcccccgctgggagctta

SEQ ID NO: 378128 - DNA, 201 bp, Homo sapiens
gaacccaaccagacgcataataggtgtatcagatagctactgccctgtaacaaccatccccaaactcaatggctaaaaatgcatttctgatttctcaagayccacctataaggtaggtggtagctgtggttttggctgggctcattcatgagtctgcacttgggttaggcaggaaggcagctgtgctgatccaggctgggc

SEQ ID NO: 378129 - DNA, 201 bp, Homo sapiens
tgcggttcatcttcacgctggtcggtgggcacatttccccgctgctggtggcctgtgagaaactgggcatccgtgtggtggacacacgccatgaggtcacrgccgtctttgctgctgatgctatggcccgcctgtccggtgagggcattgcagagagggctggggactggttggactgtgggctagagtgtctgtgagggt

SEQ ID NO: 378130 - DNA, 201 bp, Homo sapiens
ggagcttttggctacagcctcatcgaatttgatacattcgtcagacacaaggtgactgggctggcctgagggaagcttagggcctggggttctgggagatktcaccaggggtgggctgaggtggggagggagcctcctctctggcagaggccctatccctgtctctgtcctctggctggccaagccatggggctgaaggct

SEQ ID NO: 378131 - DNA, 201 bp, Homo sapiens
agaaggcagcgatgcctgtggcccagcacctgaacccagtgcaggtgctgcagctggtggaggaaacgctacctgacaactcaattctggtggtggatggyggggacttcgtgggcactgctgcccatctggtacagccccgcggccccctgcgctggctcgatcctggtaaggaagggcccccgcctggggcagtgggca

SEQ ID NO: 378132 - DNA, 201 bp, Homo sapiens; identical to SEQ ID NO: 81816

SEQ ID NO: 378133 - DNA, 201 bp, Homo sapiens
cgtggagttggggtggaccccagaggctaccgagggcaaacaggcagttgaagacctggccactagggttcgtctgtccctgaggtgtcactcatccaccstgtccccatgccactttgctcctggcttttctcccggcccctttccttgctcagatcctggaatccttgtagttagttaattctggcaacttggtttctt

SEQ ID NO: 378134 - DNA, 201 bp, Homo sapiens
tcccccaggaaccccctcaccctgttacccagcttcacacgaaggaggaggaaggtctagtgggcacctattgtacttgatacacattttcacataaagcrctttgaacccaaccagacgcataataggtgtatcagatagctactgccctgtaacaaccatccccaaactcaatggctaaaaatgcatttctgatttctc

SEQ ID NO: 378135 - DNA, 201 bp, Homo sapiens
taacgttcgctgtgcgcttccacgtgcctggatttgagagatgtgcttggtggatgtagctcttttcattgagtgtttcccaggcagaaggaggtggaggkaggggacgaggccagcttgggtttgtcacctgccttgtgctccttaacccttgtttcttgggccttgtcttcccttttcacctgggctgccctcccctgg

SEQ ID NO: 378136 - DNA, 201 bp, Homo sapiens
ttcacttcagtaacgttcgctgtgcgcttccacgtgcctggatttgagagatgtgcttggtggatgtagctcttttcattgagtgtttcccaggcagaagraggtggagggaggggacgaggccagcttgggtttgtcacctgccttgtgctccttaacccttgtttcttgggccttgtcttcccttttcacctgggctgc

SEQ ID NO: 378137 - DNA, 201 bp, Homo sapiens
ctgaagaaggcggatgtcattgtcctagcaggtgggcctgagcctcttcctttccctccttcccccaggaaccccctcaccctgttacccagcttcacacraaggaggaggaaggtctagtgggcacctattgtacttgatacacattttcacataaagcgctttgaacccaaccagacgcataataggtgtatcagatag

SEQ ID NO: 378138 - DNA, 201 bp, Homo sapiens
cctgaagaaggcggatgtcattgtcctagcaggtgggcctgagcctcttcctttccctccttcccccaggaaccccctcaccctgttacccagcttcacaygaaggaggaggaaggtctagtgggcacctattgtacttgatacacattttcacataaagcgctttgaacccaaccagacgcataataggtgtatcagata

SEQ ID NO: 378139 - DNA, 201 bp, Homo sapiens
gcggatcacttgaggccaggagttcaagactagcctggccaacatggtgaaaccctgtctctactgaaaatacaaaagttagccaggcatggtggcacgcrcctgtaatcccagctactctggaggctgaggcgggagaatcgtttgaacctgggaggtggaggctgcagtgagctgagatcatgccattacactctatcc

SEQ ID NO: 378140 - DNA, 201 bp, Homo sapiens
ggtggctagtttgggtgggagtggtggtgatgtaaaggactggggctagccccgcgaggggcgtgaccttgtcacggagaggcatggcttcaccccgagcytaggcgcacaaagggcgtggtctggcagggttgggggcgtggccgcacagaaactggcggcaagggtcgtggccctggatcctgctgcgagaaggggcgc

SEQ ID NO: 378141 - DNA, 201 bp, Homo sapiens
  misc_feature (1)...(201): n = A,T,C or G
ctccctgaggggagagggccccctgaccctctccctgagtcagtactggggccttaatcttgggtgctcatggcgactcaagggcggccctttggctggangcggtggctcacagcagcaatcccaacacttagggaggccgaggcaggcggatcacttgaggccaggagttcaagactagcctggccaacatggtgaaac

SEQ ID NO: 378142 - DNA, 201 bp, Homo sapiens
ctccccttgttctccttgcccctctctcttgggctgcctctcacaaggctatctcttatcttgccttttttgttttgttttgttttgagacagggcctcastctatcacccaggctggagtgcagtggtatgatcatagctcaccacagccttgaactcctggcctcgagcaatcctcctgcctcagcctcccttgccttt

SEQ ID NO: 378143 - DNA, 201 bp, Homo sapiens
attcacatgtggactgggaggagacagctggggggagagcattccaggtagaaggaacagcatgtgcaaaggtcctgaggcaggaatgaactgggtgggtrgggaaagcaaggcggccctcgtggaggcagcaaaggggagaggctcaggacagccctcctcctcctccttttccctttcttctcctcctccatcatctct

SEQ ID NO: 378144 - DNA, 201 bp, Homo sapiens
tgagcagtgctggggccgaggggctggggacatgttatggactcagcgtcctccctgtccctgcaggtccggtgtttgtggagctgcccgttgacgtgctktacccctacttcatggtccagaaggagatggtgccagccaagccacccaagggcctcgtgggccgagtggtctcctggtgaatagccccacccctgccat

SEQ ID NO: 378145 - DNA, 201 bp, Homo sapiens
gatggctgccgcccagtcgggcaccccaggtaggtggaggatggtgatgctgagcagtgctggggccgaggggctggggacatgttatggactcagcgtcytccctgtccctgcaggtccggtgtttgtggagctgcccgttgacgtgctgtacccctacttcatggtccagaaggagatggtgccagccaagccacccaa

SEQ ID NO: 378146 - DNA, 201 bp, Homo sapiens
ggttatataaccctctcctctctccctgattgccctgccatcctggagacaggcagtgtaacagtggggcacttaagagcgtgggttctattgaactttcmgtcttacttgggcaagccttgatgtcctcagctgtaagagggatgtaatgacaagaggatctgataagatgttatgccttggtttgagcctggcatgtag

SEQ ID NO: 378147 - DNA, 201 bp, Homo sapiens; identical to SEQ ID NO: 81844

SEQ ID NO: 378148 - DNA, 201 bp, Homo sapiens
tggatgtagggtgggagatattatggccatctgggaaaatataacctgcctctgccctatcctgttggccaaagcatgtcatgaggccagtcccgattcarggggtgtggggagctgcaaggtcactgtaggtggcacaggtgcagggagactcggtgaggaacagggactcatttgcatccagtccaccacagtggatca

SEQ ID NO: 378149 - DNA, 201 bp, Homo sapiens
  misc_feature (1)...(201): n = A,T,C or G
gtgttccctgcttccttggagggatggcacgggggctgttaggccgcaaccaccccctccacatccgggagaaccgcagtgcggccctgaagaaggcggangtcattgtcctagcaggtgggcctgagcctcttcctttccctccttcccccaggaaccccctcaccctgttacccagcttcacacgaaggaggaggaagg

SEQ ID NO: 378150 - DNA, 201 bp, Homo sapiens
ctgtgttccagggacggtgggcgtggcggcagtgacagcaggccctggcctcaccaacacggtgactgcggtgaagaatgctcagatggctcagtccccartcctgcttctgggtggggctgccagcactctgctgcaggtacccagtccttgggggccagtgggggcctaggggggcttgaagggctcatgcgataaccc

SEQ ID NO: 378151 - DNA, 201 bp, Homo sapiens
tcctggcctcaagtgatcctcctgcctcggcctctcaaaagtgctgggattacagaccagagctactgcgcccggcctgatagatgcttctgtaggaacaratggtggggtggacacagagggaggcttgaaaacgtgcatgtgatcacgttccctcccacactgcccactgccctcaggacagagagcacactcgttggc

SEQ ID NO: 378152 - DNA, 201 bp, Homo sapiens
cgcgatggctgccgcccagtcgggcaccccaggtaggtggaggatggtgatgctgagcagtgctggggccgaggggctggggacatgttatggactcagcrtcctccctgtccctgcaggtccggtgtttgtggagctgcccgttgacgtgctgtacccctacttcatggtccagaaggagatggtgccagccaagccacc

SEQ ID NO: 378153 - DNA, 201 bp, Homo sapiens
acatcacggggctgtttgttagttcacttcagtaacgttcgctgtgcgcttccacgtgcctggatttgagagatgtgcttggtggatgtagctcttttcaytgagtgtttcccaggcagaaggaggtggagggaggggacgaggccagcttgggtttgtcacctgccttgtgctccttaacccttgtttcttgggccttgt

SEQ ID NO: 378154 - DNA, 201 bp, Homo sapiens
ggagagagctgaccccacaggcgtccccctaaactccttgcacctctgtttgaaatttaccccttccccagaccccctcctcaaccctttctctcctagcrgggaccaagcttgacctctccctccccaaacccttctctactgcttcctctgctagccaggagtgatgccactgaccttcaggacttaggagatttaaag

SEQ ID NO: 378155 - DNA, 201 bp, Homo sapiens
atggtccagaaggagatggtgccagccaagccacccaagggcctcgtgggccgagtggtctcctggtgaatagccccacccctgccattccctcctttatyccccgttctctcctgcagcttccagcccacacccatcctcctttgattcacatgtggactgggaggagacagctggggggagagcattccaggtagaagg

SEQ ID NO: 378156 - DNA, 201 bp, Homo sapiens
tggtttgccctaggtgacatgtttggagagagctgaccccacaggcgtccccctaaactccttgcacctctgtttgaaatttaccccttccccagaccccytcctcaaccctttctctcctagcagggaccaagcttgacctctccctccccaaacccttctctactgcttcctctgctagccaggagtgatgccactgac

SEQ ID NO: 378157 - DNA, 201 bp, Homo sapiens
gattgtgtggtggtttgccctaggtgacatgtttggagagagctgaccccacaggcgtccccctaaactccttgcacctctgtttgaaatttaccccttcyccagaccccctcctcaaccctttctctcctagcagggaccaagcttgacctctccctccccaaacccttctctactgcttcctctgctagccaggagtga

SEQ ID NO: 378158 - DNA, 201 bp, Homo sapiens; identical to SEQ ID NO: 81819

SEQ ID NO: 378159 - DNA, 201 bp, Homo sapiens
tctttctgtcttcattttctgcaagaggaagctgaggctcagagagattgtgtggtggtttgccctaggtgacatgtttggagagagctgaccccacaggygtccccctaaactccttgcacctctgtttgaaatttaccccttccccagaccccctcctcaaccctttctctcctagcagggaccaagcttgacctctcc

SEQ ID NO: 378160 - DNA, 201 bp, Homo sapiens
ccagctgccctctgccctggcctttaactttattgctccacctgtccttgggcccaggtggacaaggcaagcgtccggcatggcggagagaacgtggccgytgtgctgagggcccatggtgtgcggttcatcttcacgctggtcggtgggcacatttccccgctgctggtggcctgtgagaaactgggcatccgtgtggtg

SEQ ID NO: 378161 - DNA, 201 bp, Homo sapiens
ccaagtgggccacccgggcacggccacgctcccgggtcacgtgacacggagggggccgaattctgctggaggcagcgccatatcctggaggtgaaggtgartagcgtcgggggtcgagctggtgtgggagaaccacatcctgatgcgatgtgacctcgacccagcctggcccggggtcggggatcaggctcgggcccgtgc

SEQ ID NO: 378162 - DNA, 201 bp, Homo sapiens
gtccagggtactatattgaatttagttgtcacagctcctttccctcctctagtctgtggcagtgcctcagtctttgtttttcatgaccttgacagttttgkagaggtctggttaggcattttgtagaatgtgactcaatttgaatttcctttgcttactactatacctattatacaaaaaatatacacatatatatatata

SEQ ID NO: 378163 - DNA, 201 bp, Homo sapiens; identical to SEQ ID NO: 81821

SEQ ID NO: 378164 - DNA, 201 bp, Homo sapiens
gaggctcaggacagccctcctcctcctccttttccctttcttctcctcctccatcatctcttcttcctcctcttcctcctccctcttccttcctcttctcytccctttcccccaccacctttcccatcgtcctctccgttttcctcctcctaaaggatgatccttgaacctcggaagggaggttcattcttacatttacag

SEQ ID NO: 378165 - DNA, 201 bp, Homo sapiens; identical to SEQ ID NO: 81822

SEQ ID NO: 378166 - DNA, 201 bp, Homo sapiens
ttccccgggaaagggtaggggaaaccagctgtttctctataagccccaggctacccctgtgtccatgctggaacccaggataggggctgccccccacaaasagtgcctcatgctagtctttgtgtcgtccaagggagggagaaacagtgcagtgctcaaagctaatactgatttggttggcagcagcaagagggccgacta

SEQ ID NO: 378167 - DNA, 201 bp, Homo sapiens
aggaaacgctacctgacaactcaattctggtggtggatggtggggacttcgtgggcactgctgcccatctggtacagccccgcggccccctgcgctggctygatcctggtaaggaagggcccccgcctggggcagtgggcaccatccatcaggacgccttcacacccacctgctcttggtcctcttaggggcctttgggac

SEQ ID NO: 378168 - DNA, 201 bp, Homo sapiens
aggcccttactgtatccctctaactcaataatttgttgcacttctctttaaatttcgatcaatttagatacatggtatttgtttcctcccctgccccacamccacccctttttttttagagacagggtcttgctctgttgccccagctggagtgcagtggcacgatcacagctcactgtagacacaacctcttgggttcaa

SEQ ID NO: 378169 - DNA, 201 bp, Homo sapiens
taaaccctgaccttcctgtccctgccttcgacctcctgcctgggtcttcagctcagtgctactctgaatacaatactgctgaccacatttggctacttcarcttaaatgtatgttaattgaaatgaaatacaatgaaaatgcagtgctcagtcccaccagctgtatttcatttttttccccttgagacagagtcttgctgt

SEQ ID NO: 378170 - DNA, 201 bp, Homo sapiens
cccccatgtcggtgtaccaaggtgtgtgtgggagtccgggacactgggatgtacttatgtgcaagggggcagggacatgtgtctgtgttttcaattctctrtatacctgtcaacacatcaggggctgagggtgcagcaatcaacccaggtcccttcggttgtggaactcctcattcggaaattaatgacacgccagaccca

SEQ ID NO: 378171 - DNA, 201 bp, Homo sapiens; identical to SEQ ID NO: 81861

SEQ ID NO: 378172 - DNA, 201 bp, Homo sapiens
tggcatttctccatctactacccatccctggtcgagcggatggttgtggtcagtggtgcccccatgtcggtgtaccaaggtgtgtgtgggagtccgggacrctgggatgtacttatgtgcaagggggcagggacatgtgtctgtgttttcaattctctgtatacctgtcaacacatcaggggctgagggtgcagcaatcaa

SEQ ID NO: 378173 - DNA, 201 bp, Homo sapiens
atgtggactgctacacaatcgacctgctgctggtggacatcaaagatgtcatcctaggcctgggtgcagacatacccccatcctaggcgtggcctccctcmtcctgcacacacgcatacccccgctttctccttgctggaacctacttcccccatccctgcttcagtcctactgggcacctcacttatgcgagctccttga

SEQ ID NO: 378174 - DNA, 201 bp, Homo sapiens
agtcggacagacgtcccgccacccaccacccctcacaggacgtccgctcagcacacgccttgttacgagcaagtgccggctggacccaagccctgcatccycacatgcggggcagaggcccttctctccgccaaatgtctacacagtatacacaggacatcgttgctgccgccgtgactggttttctgtccccaagaacgt

SEQ ID NO: 378175 - DNA, 201 bp, Homo sapiens
ctaggtttctgttattatttgaatcatgtttttgtgatttttcactcttctttttttaaaaaaattattttattttaagttctgggatacatgtgcaggaygtgcaggtttgttacataggtaaatgtgtgccatggtgatttgctgcaatgtgactgcagcaatgtgatttgctgcatggtgatacctacccatcaccta

SEQ ID NO: 378176 - DNA, 201 bp, Homo sapiens
tagcagcttcttccagtccttcctaggcatagttcctattatttgctcatgggctggtttctggccaatgggactttctttcctggccatttggaagacckttgccttagatgagctcaatcgcccatgttctgtctttatttttcattttttatagagacagggtctcactatgttgcccaggctggtcttgaactcctg

SEQ ID NO: 378177 - DNA, 201 bp, Homo sapiens
cctgccaccatgcctggctaatttttgtatttttagtagagatggggtttcaccatgttggccaggctggtctcgaactcctgacctgaagtgatccgccmaccccagcctcccaaagtgctggggctacaggcgtgagccaccacacccagctgcatccagctttttaaaaatgctggaattttgatccaaataacttag

SEQ ID NO: 378178 - DNA, 201 bp, Homo sapiens
gctggtgtaatttagaggtcttgtcttgtctccaggatgaaaatggaaagaagttgtcagatgagaacataagagcggaggctgacaccttcatgtctggkggtgagggtcccagggtgtgatgtcactaggggtaggagtgtctccattccagggatgtggtgagtggaccctggatcaccccatcccatcttccttccc

SEQ ID NO: 378179 - DNA, 201 bp, Homo sapiens
ttccttctgagggcctcaatacatgggtgctgtccacccttgggtgctgaagcagcccagagacccaagcttacctggctgcccctcaggccatgacaccwcggccagtggtctctcctgggtcctgtacaacctcgcgaggtacccagaataccaggagcactgccgacaggaggtgcaagagctcctgaagaacggtga

SEQ ID NO: 378180 - DNA, 201 bp, Homo sapiens
cacccagaaatcctggactttgagctggctggagggagcagatggaatttggatttgatttggcctcttgattgatctctgttttcagaacagaccccacggtcacgttccagctcctctcactctgctaatgtctttcattactgccaccatctgacttgcacttatgcaacccaactcttccccttctggagccacctt

SEQ ID NO: 378181 - DNA, 201 bp, Homo sapiens
atacttcaatgaacatcactttaagcctgggtaaagttgagcattgttttcacttactgaccatgggtatttcttattctgtgaagtgtttgcacaatttkttccttctagtttgggttttgtagtttttttcttattgatttataagcactgctcacagattaagaaaactagttctttttttctgttttgcaaagttct

SEQ ID NO: 378182 - DNA, 201 bp, Homo sapiens
ctcaggtgatccacctaccttggcctcccagagtgctgggattacaggcgtgagccactgcgcctggccatgtttttgtttttttaaatcatgcatgggamattctttcatgctctaaaattaaaatgtaaaactcatgtttgttttcctctgatgggtttatttgtttttaaaatattttatttattattttagtttaaa

SEQ ID NO: 378183 - DNA, 201 bp, Homo sapiens
ccaaagtgctggaattacaggtgtgagccactgcacctggcctgagcacctcttcttattgtcccacttatgcctagtgttccattattggaatgctaagyatgtgggagttattcatattctactgctccaggtcattgccaaggtctgattttcaaaattcaaaaaattgaaacctcaggcataaatgggttaaatctc

SEQ ID NO: 378184 - DNA, 201 bp, Homo sapiens
ttggccagggtggtcttgaactcttgacctcaagtaatcaacccgcctcagctttccaaagtgctagaattacaggcataagccacagcacctggcctcaktatatattttaaaacattttttaatgcaaataggttaacacttttaaggagaccctctatatgttgtgttttgcttagaaatgcttctaaaaataccata

SEQ ID NO: 378185 - DNA, 201 bp, Homo sapiens
catgcttaaatccttgattcttctggaattcattttgttattggatttagggtcagagggaggttggaattgcctttgcaaaaattataactgaggacatmatgacagtgaaagagaacagacctaatcgactccatcttgcttgtaaccttcaagctgtctttgttcattcctgggcataggctgaactaactttgggaa

SEQ ID NO: 378186 - DNA, 201 bp, Homo sapiens
atggctggatccaggccatcataatgccagtcttcatctcttagctttgtatccctctgtgatggtttcactctcatgctgctaaagataaatcccagaarctcaacccccatggaaaattccctgtagttccaggaaaatttccaggattcccctaaatttgcctggcctgggtcacaggaccaatttcttatccagtca

SEQ ID NO: 378187 - DNA, 201 bp, Homo sapiens
tgtcatcctggctggggtgcagtagaacgatcttggctcactgcaacctccgcctccctggttcaagcaattcgcctcccgagtagttgggactacaggcrcccgccgccacacccagctaatgtttttgtattttttagtagagacggggtttcaccatgttgcccaggctggttttgaactgctgagctcaggcaatcc

SEQ ID NO: 378188 - DNA, 201 bp, Homo sapiens
tatttatttatttattttattttttttttttgagacagaatcttgctctgtcgcccaggctggagtgcagtggtgtgatcttagctcattgtaacctccayctcctgggttcaagcgattctcctgcctcagcctcccgactaactgggactagaggtgcacatcaccacacccggctaatttttgtatttttagtagaga

SEQ ID NO: 378189 - DNA, 201 bp, Homo sapiens
tggttcaagcaattcgcctcccgagtagttgggactacaggcgcccgccgccacacccagctaatgtttttgtattttttagtagagacggggtttcaccrtgttgcccaggctggttttgaactgctgagctcaggcaatccgcccacctcagcctcccaaagtgctagaattacaggcgtgatccaccgtgcccggcta

SEQ ID NO: 378190 - DNA, 201 bp, Homo sapiens
catgaggctgatggaggatctgggccactacttccgtgatgtccaactctggtggcttgggtctttctaccctgtcctgcatctcgtccaccctacgttcrctgcccctgtgctccaggcttcaggtatctttctcaggaggctatgctgcagcatcttccctgcctctgctccctgccttcccaacctttggacaggcca

SEQ ID NO: 378191 - DNA, 201 bp, Homo sapiens
tttgaactgctgagctcaggcaatccgcccacctcagcctcccaaagtgctagaattacaggcgtgatccaccgtgcccggctagggtgtcctaggtcctygtaaaggcattttgtagagcgttgagctatgctcaggtgttgcagaacatgttggaccatgtaggagccatgtcaaggcgtactggggtgtgctgtgcca

SEQ ID NO: 378192 - DNA, 201 bp, Homo sapiens
ctgctgagctcaggcaatccgcccacctcagcctcccaaagtgctagaattacaggcgtgatccaccgtgcccggctagggtgtcctaggtccttgtaaargcattttgtagagcgttgagctatgctcaggtgttgcagaacatgttggaccatgtaggagccatgtcaaggcgtactggggtgtgctgtgccatgttgg

SEQ ID NO: 378193 - DNA, 201 bp, Homo sapiens
cccttgaccctcttcctgctatgctgggcctggagggtggaagtgcaaatccctggctgggagcctccccctacactcaaagtccctcccctgcccctctycataacccctgatggtccttattcatgtcagctgctgttgcactcaaggatatgagtttctatggcttcctgaagccctggctgggtgagtaactagatg

SEQ ID NO: 378194 - DNA, 201 bp, Homo sapiens
atgctcaggtgttgcagaacatgttggaccatgtaggagccatgtcaaggcgtactggggtgtgctgtgccatgttgggctgtgtcattgttctactgcascgctgcagcctggtctggtccccagtctcctcccctgtcctccctccttcctttgcccttgaccctcttcctgctatgctgggcctggagggtggaagtg

SEQ ID NO: 378195 - DNA, 201 bp, Homo sapiens
ctgaatgttcatttggtccatggtatcctgtgttacacataattccttaattttcatgcatatttatcctttttctttttgatcttctactttgtcctttygaggttttaagaattcccacccttaagtcacaaaagtgtttcttctgttatcttctcttaactttatagctttattcatctcatataggaagagattcca

SEQ ID NO: 378196 - DNA, 201 bp, Homo sapiens
cttgaccccaggcctgacccttgcagtgcaggcagcacattctcatgcccttgaccccacatctgacccttgcaatgcaggcaacacattctcatgccctygaccttacatctggcccttgcagtgcaggcagcacattttcatgcccttgatcccatgtctgacccttgcagtgcaggcagcacattctcatgtccttgg

SEQ ID NO: 378197 - DNA, 201 bp, Homo sapiens
gaacatgttggaccatgtaggagccatgtcaaggcgtactggggtgtgctgtgccatgttgggctgtgtcattgttctactgcaccgctgcagcctggtckggtccccagtctcctcccctgtcctccctccttcctttgcccttgaccctcttcctgctatgctgggcctggagggtggaagtgcaaatccctggctggg

SEQ ID NO: 378198 - DNA, 201 bp, Homo sapiens
attgataatagccctttcctgaaaacaccccctgtcttgataaatcggctctttctaggcagcaggcaaggtgaattcactgggcggttacaagttggtgygagggtctctctggactgcaggagggctgtgtttgccccctggataattgttgggtgttaccttagggatgacctggcccagttgcccttcctgaccatg

SEQ ID NO: 378199 - DNA, 201 bp, Homo sapiens
tcagatccatgaacttggacttgatccagagggcactggggagccatggaaggtgcttgaggaaaggagggacaagtaagatatattttagaggtgactckgtagaagagttcctagaaggagcaaacaggaggcaagagactgggaaagagtcctgctaggcaggtctaatgatgataagggaggaatcttgcctggaat

SEQ ID NO: 378200 - DNA, 201 bp, Homo sapiens
cctacgtctgctggtctgggggctggagtctaagccaggctcggaggatatgcaagcccacatgggggtcccaggcacagagtccctctctctgcccctcmatcggatctgggtggggttgggagtcccagacgaggttcccggcgcgatggggccgggatgggggtcctgggcacagtcagagtccccaccccctccccc

SEQ ID NO: 378201 - DNA, 201 bp, Homo sapiens
ttatttatttatttatttattttattttttttttttgagacagaatcttgctctgtcgcccaggctggagtgcagtggtgtgatcttagctcattgtaacytccacctcctgggttcaagcgattctcctgcctcagcctcccgactaactgggactagaggtgcacatcaccacacccggctaatttttgtatttttagt

SEQ ID NO: 378202 - DNA, 201 bp, Homo sapiens; identical to SEQ ID NO: 81872

SEQ ID NO: 378203 - DNA, 201 bp, Homo sapiens
catcggccagacgttcgccatggctgagatgaaggtggtcctggcgctcactctgctgcgcttccgcgtcctgccggaccacgcggagccccgcaggaagytggagctgatcgtgcgcgcggaggatggactttggctacgggtggagcccctgagcgcggatctgcagtgacccaccactgtcaggtctcagagccaccc

SEQ ID NO: 378204 - DNA, 201 bp, Homo sapiens
aggctggagtgcattggcatgatcatagctcactgcagccttgaactcctgggcgcaagggatcctcacacctcagcctcctgagtagctgggaccacagrcatgcaccaccaggcctggtggatcttttattcttaaattgacctagcttttgatgaactttaattcttccaattagaataagatggttaagttcctaca

SEQ ID NO: 378205 - DNA, 201 bp, Homo sapiens
cggccagacgttcgccatggctgagatgaaggtggtcctggcgctcactctgctgcgcttccgcgtcctgccggaccacgcggagccccgcaggaagttgsagctgatcgtgcgcgcggaggatggactttggctacgggtggagcccctgagcgcggatctgcagtgacccaccactgtcaggtctcagagccacccgcg

SEQ ID NO: 378206 - DNA, 201 bp, Homo sapiens
agtttacacagttagaaagtgagctaaaagtggtggagaaggggttctaacctggttatctggcaccaaagcagatcatcttgttttgcttttttttttgtttttttttttttgagatggagtctcactctgtcaccaggctggagtgcagtggcatgatctcagctcactgcaacctccgcttcctgggttcaagcgatt

SEQ ID NO: 378207 - DNA, 201 bp, Homo sapiens
ttgttttgcttttttttttgtttttttttttttgagatggagtctcactctgtcaccaggctggagtgcagtggcatgatctcagctcactgcaacctccrcttcctgggttcaagcgattctcctgcctcagcctcctgagtagctggaattacaggcacctgccatcacatccagccattttttgtattttttggtaga

SEQ ID NO: 378208 - DNA, 201 bp, Homo sapiens
gctgacaccttcatgtctgggggtgagggtcccagggtgtgatgtcactaggggtaggagtgtctccattccagggatgtggtgagtggaccctggatcaccccatcccatcttccttccccacttccttctgagggcctcaatacatgggtgctgtccacccttgggtgctgaagcagcccagagacccaagcttacctg

SEQ ID NO: 378209 - DNA, 201 bp, Homo sapiens
cttttttcttttctttttttttttttttgagacagtctcactgtgtcatccaggctggagtgcagtggcataatctctgctcactgcaacctctgcctccygagttcaggtgattctcctgcctcagcttcctgaggacctgtgattgcaggcatccgccactatgcccagctaatttttgtatttttaatagagacgggg

SEQ ID NO: 378210 - DNA, 201 bp, Homo sapiens
tcagattgtctttgaattaattgttggttttcattcatttattttggcttgattaatttatttgcagtcaaattctttcctttatacgtgccgttttttgtttttttttattatttttattattttttttttgagacagagtcttgctctgtcacccaggctggacagcagtggcaccatctcagctcactgcaacctccg

SEQ ID NO: 378211 - DNA, 201 bp, Homo sapiens
tgtatttgtcttacgattttaaataacagcagattcacaataagtgaaatttatttatatatttgggtctgtttcttgggctttattctgttccacttaattttatttatttatttatttatttatttattttattttttttttttgagacagaatcttgctctgtcgcccaggctggagtgcagtggtgtgatcttagct

SEQ ID NO: 378212 - DNA, 201 bp, Homo sapiens
attttcaatgagagcacgaacatcatgcacgtgagtgccacaaactcggatcccagctgggcccttggaaaaggagaagtgacctcagacagatctggtcygaaatgctggctctgctgggtggctttggtgccatagctcttcctccctaggccttggtttcttcatctgtaaaatgtggataataatttctacttaaag

SEQ ID NO: 378213 - DNA, 201 bp, Homo sapiens
gtatttgtcttacgattttaaataacagcagattcacaataagtgaaatttatttatatatttgggtctgtttcttgggctttattctgttccacttaatwttatttatttatttatttatttatttattttattttttttttttgagacagaatcttgctctgtcgcccaggctggagtgcagtggtgtgatcttagctc

SEQ ID NO: 378214 - DNA, 201 bp, Homo sapiens
attttaaataacagcagattcacaataagtgaaatttatttatatatttgggtctgtttcttgggctttattctgttccacttaattttatttatttattyatttatttatttattttattttttttttttgagacagaatcttgctctgtcgcccaggctggagtgcagtggtgtgatcttagctcattgtaacctccac

SEQ ID NO: 378215 - DNA, 201 bp, Homo sapiens
taaataacagcagattcacaataagtgaaatttatttatatatttgggtctgtttcttgggctttattctgttccacttaattttatttatttatttattyatttatttattttattttttttttttgagacagaatcttgctctgtcgcccaggctggagtgcagtggtgtgatcttagctcattgtaacctccacctcc

SEQ ID NO: 378216 - DNA, 201 bp, Homo sapiens
tagggtgtcctaggtccttgtaaaggcattttgtagagcgttgagctatgctcaggtgttgcagaacatgttggaccatgtaggagccatgtcaaggcgtrctggggtgtgctgtgccatgttgggctgtgtcattgttctactgcaccgctgcagcctggtctggtccccagtctcctcccctgtcctccctccttcctt

SEQ ID NO: 378217 - DNA, 201 bp, Homo sapiens
atagacacagacacagaaagagacaggcagagaccaatatttcaggtgaaagggctgagaagtttgggggtgtgtggtgggtaggggggtgcaatgggcartggtagcatctgaggccccctgccagcctggtgtcagccttgtctatccccagatgcggggcaatgaggaggacatgaggctgatggaggatctgggcca

SEQ ID NO: 378218 - DNA, 201 bp, Homo sapiens
gaggacatgaggctgatggaggatctgggccactacttccgtgatgtccaactctggtggcttgggtctttctaccctgtcctgcatctcgtccaccctaygttcactgcccctgtgctccaggcttcaggtatctttctcaggaggctatgctgcagcatcttccctgcctctgctccctgccttcccaacctttggaca

SEQ ID NO: 378219 - DNA, 201 bp, Homo sapiens
ttaggttagactcaggtgccttcatggctggtgtaatttagaggtcttgtcttgtctccaggatgaaaatggaaagaagttgtcagatgagaacataagarcggaggctgacaccttcatgtctgggggtgagggtcccagggtgtgatgtcactaggggtaggagtgtctccattccagggatgtggtgagtggaccctg

SEQ ID NO: 378220 - DNA, 201 bp, Homo sapiens
gaggaggatggatgctggacgggcagataccaccattcaccagacatccattcaccagcatccctgtgagataggcatttcctgagtcagaaaactgaggygcagagaggtgcaatgacttctcaaggtcacacagcatatcgaggcctccctcttagttctttttgtaatttttttgagacagggtctcactcattaatg

SEQ ID NO: 378221 - DNA, 201 bp, Homo sapiens
caggcatgcaccaccaggcctggtggatcttttattcttaaattgacctagcttttgatgaactttaattcttccaattagaataagatggttaagttccyacaaaataaaatgctagattttttattgaattgctttgaatatgttgattaatttagaaagaaatgagacctttataatattaagtcatctcattctaga

SEQ ID NO: 378222 - DNA, 201 bp, Homo sapiens
aaagagacaggcagagaccaatatttcaggtgaaagggctgagaagtttgggggtgtgtggtgggtaggggggtgcaatgggcagtggtagcatctgaggscccctgccagcctggtgtcagccttgtctatccccagatgcggggcaatgaggaggacatgaggctgatggaggatctgggccactacttccgtgatgtc

SEQ ID NO: 378223 - DNA, 201 bp, Homo sapiens
ttcctacaaaataaaatgctagattttttattgaattgctttgaatatgttgattaatttagaaagaaatgagacctttataatattaagtcatctcattytagagtgttgaggggattttattgaaacaattttgtaatctttatagagattttcccctcgtctttgttagtatattctattattaatttgagacagggt

SEQ ID NO: 378224 - DNA, 201 bp, Homo sapiens
attcactgggcggttacaagttggtgcgagggtctctctggactgcaggagggctgtgtttgccccctggataattgttgggtgttaccttagggatgacytggcccagttgcccttcctgaccatgtgcctgaaggagagcctgcggctgcattccccagtctccaggatccaccgctgctgcccccaggacggggtgct

SEQ ID NO: 378225 - DNA, 201 bp, Homo sapiens
tgggtggatcacttcagatcaggagttggagaccagcccgaccaacatagcgaaaccccatctctactaaaaatgcaaaaatttgctgggcatggtggcaygtgcctgtagttccagctacttgggaggctgaggcagtagaattgcttgaacctgggaggtggagattacagtgagctgagactataccactgcactcca

SEQ ID NO: 378226 - DNA, 201 bp, Homo sapiens
actgcacctcctccccgacagggaacacttgcaccatcagcatctttgggatccatcacaacccttcagtctggccggacccggaggtgctaccccttccsccttctccatcccggggcctggtcaggggaggggtcttttcccagggaagcagatactccctctctactccacccacatgtgtactttttttttgttttg

SEQ ID NO: 378227 - DNA, 201 bp, Homo sapiens
gcttgggtctttctaccctgtcctgcatctcgtccaccctacgttcactgcccctgtgctccaggcttcaggtatctttctcaggaggctatgctgcagcmtcttccctgcctctgctccctgccttcccaacctttggacaggccatgctgagcagaaaaatggacatatccaatagagaccatggctctgccactaacc

SEQ ID NO: 378228 - DNA, 201 bp, Homo sapiens
ttcgcttcgacccagaaaatctccagaagacatcacctctggcttttattcccttctcagcagtgcccaggtgaggctaaggggcttctgaggcgggcatsgggtgagggtgccacaggtggaggcaaggtctgacttgtggggccacgtgtttcagggagtcgagggttttaataagatcccaggaaaagggggtgtgtg

SEQ ID NO: 378229 - DNA, 201 bp, Homo sapiens
ttctcagcagtgcccaggtgaggctaaggggcttctgaggcgggcatggggtgagggtgccacaggtggaggcaaggtctgacttgtggggccacgtgttkcagggagtcgagggttttaataagatcccaggaaaagggggtgtgtgttctcagacttccccactcctacgtctgctggtctgggggctggagtctaagc

SEQ ID NO: 378230 - DNA, 201 bp, Homo sapiens
ggtggagcccctgagcgcggatctgcagtgacccaccactgtcaggtctcagagccacccgcgccctcctcaggcacctttgcagattccggggaatcaayctgtgcctgagtcccacagacagccagcagggggcgtcggagaactgcagggatccagggcctggcgaggggaaggcggagtatttctgagccaagaccc

SEQ ID NO: 378231 - DNA, 201 bp, Homo sapiens
gggtaggggggtgcaatgggcagtggtagcatctgaggccccctgccagcctggtgtcagccttgtctatccccagatgcggggcaatgaggaggacatgmggctgatggaggatctgggccactacttccgtgatgtccaactctggtggcttgggtctttctaccctgtcctgcatctcgtccaccctacgttcactgc

SEQ ID NO: 378232 - DNA, 201 bp, Homo sapiens
ggtgcacatcaccacacccggctaatttttgtatttttagtagagacagggtttcaccatgttggccaggctggtctcaaatttctgatctcaagtgatcygcccaactcggcttcccaaaatgctggggttccaggcgtgagccaccacgcctggcccagttaattatatagtcatacataagcatcaagatgtcttcat

SEQ ID NO: 378233 - DNA, 201 bp, Homo sapiens
accatgttggccaggctggtctcgatctcctgatctcaggtgatctgcctgcctcggcctcccaaagtgctggaattacaggtgtgagccactgcacctgrcctgagcacctcttcttattgtcccacttatgcctagtgttccattattggaatgctaagcatgtgggagttattcatattctactgctccaggtcattg

SEQ ID NO: 378234 - DNA, 201 bp, Homo sapiens
cactttatagcccaggctggagtgcattggcatgatcatagctcactgcagccttgaactcctgggcgcaagggatcctcacacctcagcctcctgagtarctgggaccacaggcatgcaccaccaggcctggtggatcttttattcttaaattgacctagcttttgatgaactttaattcttccaattagaataagatgg

SEQ ID NO: 378235 - DNA, 201 bp, Homo sapiens
gctggcttgaaggagagatggactgtaggacccctgaggggaatcagggtttttgccaatggggcaggcaggcaggcttcctggaggaggggtttgtggamgtgggtctggaatgatgagtaggaatttttttaagcaaagaagagaaagagaaagataatttcatgtggaggttgggccaactcgaagacttggaggtga

SEQ ID NO: 378236 - DNA, 201 bp, Homo sapiens
ctttctcaggaggctatgctgcagcatcttccctgcctctgctccctgccttcccaacctttggacaggccatgctgagcagaaaaatggacatatccaayagagaccatggctctgccactaacctgctgggtgactctgggcaggtccctggtgctctctggctcctgaggcctcttttagttctgaatgaagaaaact

SEQ ID NO: 378237 - DNA, 201 bp, Homo sapiens
attaatttgagacagggtcttgctctgtcacccaggctggagtgcagtggcatgatctccgctcactgcaaactccacctcccagattcaagtgattcttrtgcctcagcctcttgagtagctgggattacaggtgcatgccaccatacccggttaatttttgtattgttaatagagacggagttttgctatgttggccag

SEQ ID NO: 378238 - DNA, 201 bp, Homo sapiens
taatttagaggtcttgtcttgtctccaggatgaaaatggaaagaagttgtcagatgagaacataagagcggaggctgacaccttcatgtctgggggtgagrgtcccagggtgtgatgtcactaggggtaggagtgtctccattccagggatgtggtgagtggaccctggatcaccccatcccatcttccttccccacttcc

SEQ ID NO: 378239 - DNA, 201 bp, Homo sapiens
ctccacctcccagattcaagtgattcttatgcctcagcctcttgagtagctgggattacaggtgcatgccaccatacccggttaatttttgtattgttaayagagacggagttttgctatgttggccagggtggtcttgaactcttgacctcaagtaatcaacccgcctcagctttccaaagtgctagaattacaggcata

SEQ ID NO: 378240 - DNA, 201 bp, Homo sapiens
gccactaacctgctgggtgactctgggcaggtccctggtgctctctggctcctgaggcctcttttagttctgaatgaagaaaactcaaccctgtgtggtcyaagcaaagaaacagaatgcattgactgtaaagtaaaagtcaggaagtaaaagtgaagtccaggaagggtggtcttcaggcatggctggatccaggccatc

SEQ ID NO: 378241 - DNA, 201 bp, Homo sapiens
cactctcatgctgctaaagataaatcccagaagctcaacccccatggaaaattccctgtagttccaggaaaatttccaggattcccctaaatttgcctggmctgggtcacaggaccaatttcttatccagtcactgcagcttgattgcataggtttaaggtcatatgcttagctctggagcaggggatgagaacccactca

SEQ ID NO: 378242 - DNA, 201 bp, Homo sapiens
ggcatgtgccaccacgcccggctaattttgtatttttagcagagacggggtttctccatgttggtcaggttgatctcgaactcccaacctcaggagtttckcccctcagcctcccaaagtgctgggattacaggcatgagtcaccgtgcccggcttcacatctgtcttatatgcgggtggctgggtgtcctgagagacccc

SEQ ID NO: 378243 - DNA, 201 bp, Homo sapiens
aaatttccaggattcccctaaatttgcctggcctgggtcacaggaccaatttcttatccagtcactgcagcttgattgcataggtttaaggtcatatgctyagctctggagcaggggatgagaacccactcaactacttggattgagagtggggaaggcatgaggaggatggatgctggacgggcagataccaccattcac

SEQ ID NO: 378244 - DNA, 201 bp, Homo sapiens
ctgcagaaatgcatcttcagctttgacagcaattgtcaggagtgagttcttccccaggacctgggatcttggccatggacccacaggagtaggttatggasagaggactgatcagggcatctgaagtgtcttcttggagaaaatgagtcagaattgagcatggaagtacagggaaggggagagagaaagatcagttctcca

SEQ ID NO: 378245 - DNA, 201 bp, Homo sapiens
agggcgcagtggctcactcctgtaatcccagcacttttgaggccgaggtggatcacttgaggccaggagattgaggccagcctggccaacgtggtgaaacyccatctctactaacaatacaaaaaaataattagctggtatggtggcgcatgcctgtaatcccagctacttgggaggctgaggcaggagaattgcttgaat

SEQ ID NO: 378246 - DNA, 201 bp, Homo sapiens
ccttgccacctctctcctggatgcctcccacgggcgcctccctggtctccctgttgccgtgcccaatcctttcctccactctctcctcagtcccggacagrctttttccttccttccttccttccttccttccttccttcctctttctttcttcctttctttctttcctttcttcttttctttctttctctttctttcttt

SEQ ID NO: 378247 - DNA, 201 bp, Homo sapiens
agagagtgagcagaaacattttagtacctcctgatgcttagttcagaactagcacactagcatttttaccacattctcctggtgaaagccagtttcaagaycagctcaaatccaggagatggagactcaggctctgcctgcaaatggaaggaggtgccaagtctcatcgccaagggtgaggggcaaaaagttggggacatt

SEQ ID NO: 378248 - DNA, 201 bp, Homo sapiens
tttaatattcacaatcctttgaggtagagatgatcataattgccacattatggatgaagaaattgtgggtcagagagattagggagcttgcctaagtttayacagttagaaagtgagctaaaagtggtggagaaggggttctaacctggttatctggcaccaaagcagatcatcttgttttgcttttttttttgttttttt

SEQ ID NO: 378249 - DNA, 201 bp, Homo sapiens
ttgtttttttttttttgagatggagtctcactctgtcaccaggctggagtgcagtggcatgatctcagctcactgcaacctccgcttcctgggttcaagckattctcctgcctcagcctcctgagtagctggaattacaggcacctgccatcacatccagccattttttgtattttttggtagagacggatttcaccatgt

SEQ ID NO: 378250 - DNA, 201 bp, Homo sapiens
gtgttgggattacacgtgtgagccactgtgcctgacccaaagcagatcatcttaactattactgaagatttgacaggggggacctaaagagggcagtgggytgaccaagggtacatagggcacagaagcagagctggaacttgaacccaggtcacccgaaccccagccttgggccttcatgtcctaatagtaacagcttct

SEQ ID NO: 378251 - DNA, 201 bp, Homo sapiens
ttttttttttttttttttttgtatttttagtagagacagggtttcaccatgttagccaggctggtctcaaactcctgacctcaggtgatccgcctgcctcrgcctcccaaagtgctgggattagaggtgtgagccaccacacccggccaagatgttacttcttgactattacattgataaaggctttttaaaaacatataa

SEQ ID NO: 378252 - DNA, 201 bp, Homo sapiens
tcacccagaaatcctggactttgagctggctggagggagcagatggaatttggatttgatttggcctcttgattgatctctgttttcagaacagaccccayggtcacgttccagctcctctcactctgctaatgtctttcattactgccaccatctgacttgcacttatgcaacccaactcttccccttctggagccacct

SEQ ID NO: 378253 - DNA, 201 bp, Homo sapiens
atctgacttgcacttatgcaacccaactcttccccttctggagccaccttcctcttgctccctttcactaagatgtcccaacgggccatgttgcccaaccyggataaaaggtggccgctcacttcccctttcagaagccgactcttgtccgtttctctccaccataccctgccctctgacttaggcctgctcttacctttg

SEQ ID NO: 378254 - DNA, 201 bp, Homo sapiens
tgctcacacctgccttccacttcaaaatcctgaagccctatgtgaagattttcaatgagagcacgaacatcatgcacgtgagtgccacaaactcggatccsagctgggcccttggaaaaggagaagtgacctcagacagatctggtctgaaatgctggctctgctgggtggctttggtgccatagctcttcctccctaggc

SEQ ID NO: 378255 - DNA, 201 bp, Homo sapiens; identical to SEQ ID NO: 81876

SEQ ID NO: 378256 - DNA, 201 bp, Homo sapiens
actgggatctacaggaagatgatgaaggcaggccgcagccttcagccccatggcttggccagccagaggacagagacagggatagggcctctgccagagargaggctccctccccacctcagcccacccctggtgaaatctcccagaaccccaggccctaagcttccctcaggccagcccagtcaccttgtgtctgacgaa

SEQ ID NO: 378257 - DNA, 201 bp, Homo sapiens
caccagacctagtcgggaggggacccaggatggttagggtggatcaggacctagagagcagcaagtctcccaactccagtgcctcacctcagcatctggcyggcacagcttggccccaagtgcaaatcctgcaccaactcccagagtcccaaaggcccctaagaggaccaagagcaggtgggtgtgaaggcgtcctgatgg

SEQ ID NO: 378258 - DNA, 201 bp, Homo sapiens; identical to SEQ ID NO: 81878

SEQ ID NO: 378259 - DNA, 201 bp, Homo sapiens
tcagcagggtagcaagtaaaaaccttagagaaacagctgcgtgggatagggggacccaggaaggaaggagttaaaggaggaaggccagaccattccatggrcgtaccccttccccccaggccttcccaaagattcccaatgttcccagggaagggagaagggacagagatgcccaaacacaaacacacacaggaaacagcc

SEQ ID NO: 378260 - DNA, 201 bp, Homo sapiens; identical to SEQ ID NO: 81880

SEQ ID NO: 378261 - DNA, 201 bp, Homo sapiens
tgccagatgtggaaagggtgagttgggcctggtgggagtgatgggacttgagagtgggctgataccaatagaatgtttcacccatgcctgggcctgagatrggcatgagctggcagcatcatcatatccccaagaaataggtgctattagcatcccacttcatagatttggaaactgaggcccaaagcaggtgacagttgc

SEQ ID NO: 378262 - DNA, 201 bp, Homo sapiens
ccttcctcctccttcgtgtgaagctgggtaacagggtgagggggttcctgggggaaggagggaaaggaagaggctcaggcccacctgctaggacaatgacrtccgccttcttcagggccgcactgcggttctcccggatgtggagggggtggttgcggcctaacagcccccgtgccatccctccaaggaagcagggaacac

SEQ ID NO: 378263 - DNA, 201 bp, Homo sapiens
gccaacgagtgtgctctctgtcctgagggcagtgggcagtgtgggagggaacgtgatcacatgcacgttttcaagcctccctctgtgtccaccccaccatytgttcctacagaagcatctatcaggccgggcgcagtagctctggtctgtaatcccagcacttttgagaggccgaggcaggaggatcacttgaggccagga

SEQ ID NO: 378264 - DNA, 201 bp, Homo sapiens
cctcagtcctcctatctgaccttgctttcacccacctcctcttcccccttagctgtgccctccttagccttagaagccagtggtgccctgaccagaggggrccctgtgttcacaggcatcctcaaggattatcttcgagagttgcccaccccactcatcacccagcccctgtataaggtggtactggaggccatggcccgg

SEQ ID NO: 378265 - DNA, 201 bp, Homo sapiens
tgcccactgccccaggcgggggcccttccttaccaggatcgagccagcgcagggggccgcggggctgtaccagatgggcagcagtgcccacgaagtccccrccatccaccaccagaattgagttgtcaggtagcgtttcctccaccagctgcagcacctgcactgggttcaggtgctgggccacaggcatcgctgccttct

SEQ ID NO: 378266 - DNA, 201 bp, Homo sapiens; identical to SEQ ID NO: 81875

SEQ ID NO: 378267 - DNA, 201 bp, Homo sapiens
gtctttcaactaattggtctatatgtgtctggggctggttaatccaccaggtaccaaaagcacagcacatcagacctgcagccaatgagaacatttagggraaagaaaacacacacgtggccaggtgcagtggctcacacctgtaatcccagcactttgagaggccaaggaagaaggatcgcttgaggtcaggagtttgag

SEQ ID NO: 378268 - DNA, 201 bp, Homo sapiens; identical to SEQ ID NO: 81877

SEQ ID NO: 378269 - DNA, 201 bp, Homo sapiens
gagaaatcagaaatgcatttttagccattgagtttggggatggttgttacagggcagtagctatctgatacacctattatgcgtctggttgggttcaaagygctttatgtgaaaatgtgtatcaagtacaataggtgcccactagaccttcctcctccttcgtgtgaagctgggtaacagggtgagggggttcctggggga

SEQ ID NO: 378270 - DNA, 201 bp, Homo sapiens
cctgtccaaactgaaccacagcatctgtgagcatcatgtaaaccaaaaggtatctcagataagtctcaataaatttagaaagcttattttgccaaggttawggacatgcctgtgacacagacttagaagctcctgacaacataaactagggtagtcagggccactaccttgattcaggtctgtaatcctagctacttggta

SEQ ID NO: 378271 - DNA, 201 bp, Homo sapiens
gtcttccgaggtaggacatgcggctgcaggggaggaggggcagggacccccaaaccccaccgccaccccccgcagagtgcctagggggctgggctccgggyggaaggtgtggcctggagcagcgaggccagggtacatgaagcttcagagcacacccggctcaggcccccttgtgtcctcagggtgccaggcccaacagct

SEQ ID NO: 378272 - DNA, 201 bp, Homo sapiens
ctagcctgtggctgcctattccaaacaaaacagcaggatccaaggaaccatgacttatcaggggccggccagggccgtacacagcatcccacccactgatcaattgcacagggctgctctgcaggcagtgaggggctgggtgggtctcactccccttgctctctgccaggccacccagcccagcgcccagagcccagccct

SEQ ID NO: 378273 - DNA, 201 bp, Homo sapiens; identical to SEQ ID NO: 81879

SEQ ID NO: 378274 - DNA, 201 bp, Homo sapiens
tacaggcatgatccaggcatgatccacagacctgcccctacccatctttgatgcagtcagaggccctgcctcttgacatgccaatcagaggcctagttgcstaagcaaccagtcctagctctgccagtgaaaacctgaaacggtcgaaggccgctttccacaggccaatcaggagcctagttccctaagcagccaatcaga

SEQ ID NO: 378275 - DNA, 201 bp, Homo sapiens
ggatagagtgtaatggcatgatctcagctcactgcagcctccacctcccaggttcaaacgattctcccgcctcagcctccagagtagctgggattacaggygcgtgccaccatgcctggctaacttttgtattttcagtagagacagggtttcaccatgttggccaggctagtcttgaactcctggcctcaagtgatccgc

SEQ ID NO: 378276 - DNA, 201 bp, Homo sapiens
cccatctttgatgcagtcagaggccctgcctcttgacatgccaatcagaggcctagttgcctaagcaaccagtcctagctctgccagtgaaaacctgaaasggtcgaaggccgctttccacaggccaatcaggagcctagttccctaagcagccaatcagaggtcggctgtcgcctctttctatgacctaccctgtctccc

SEQ ID NO: 378277 - DNA, 201 bp, Homo sapiens; identical to SEQ ID NO: 81881

SEQ ID NO: 378278 - DNA, 201 bp, Homo sapiens
ttccgcctcagcctcccaaagtactgggattataaaccaaatcaccttgccccacagagctgattcatctttttatttttattttttattttttttgagayggagtcttgctctctagcccaggctggggtgtggtggcatgatctcagctcactgcaacctctgcctcccaggttcaagggattctcccacctcagcctc

SEQ ID NO: 378279 - DNA, 201 bp, Homo sapiens
ggctggtcttgaactcctgacctcaagtgatccgcctgcctcaggcctcccaaagtgctgggattacaggcatgatccaggcatgatccacagacctgccsctacccatctttgatgcagtcagaggccctgcctcttgacatgccaatcagaggcctagttgcctaagcaaccagtcctagctctgccagtgaaaacctg

SEQ ID NO: 378280 - DNA, 201 bp, Homo sapiens; identical to SEQ ID NO: 81882

SEQ ID NO: 378281 - DNA, 201 bp, Homo sapiens
gtcccaaaggcccctaagaggaccaagagcaggtgggtgtgaaggcgtcctgatggatggtgcccactgccccaggcgggggcccttccttaccaggatcragccagcgcagggggccgcggggctgtaccagatgggcagcagtgcccacgaagtccccaccatccaccaccagaattgagttgtcaggtagcgtttcct

SEQ ID NO: 378282 - DNA, 201 bp, Homo sapiens; identical to SEQ ID NO: 81900

SEQ ID NO: 378283 - DNA, 201 bp, Homo sapiens
taaaggtgtaatggtcacctgaggccttctcacacagctaaggcacacatgccctgcagcctgctaatgaatcctggcttggcttcattctgagtcttcagaatgaaaagactgatggagactcagtcttttcatctatcatatggggctgctgggctcattcaaagagagcaacgggttaggaagggaatggaatatggt

SEQ ID NO: 378284 - DNA, 201 bp, Homo sapiens
ggacgctgctgtgcaccatattgccccagccctgggctgtgtgtgatcctcaggggagggggttggcggctgggggatagtgcctgtcgcacaggtgcctragctctggctttctggacttagtgaattctgcagattcggacctcccatggcattattttaagtgattcagaccagccagtctcccttttatagttcttt

SEQ ID NO: 378285 - DNA, 201 bp, Homo sapiens
gtaattatatttctatgtcagtacatgtccttctccaacatattgtaaatggctgcctaggatttcatcatatgcttgtattataattgctttttttttttagatagagtctcgctctgtcgcccaggctgcagtgcagtgacgtgatctcggctcactgcaccctccgcctcccaggttcaagtgattcccctgcctcag

SEQ ID NO: 378286 - DNA, 201 bp, Homo sapiens
ctgggacagcctcttcaggcctggccactgtcatagttcccaccctgctttgaggctcttttctcagatgtgacagtggctgtctcccgcctgggaccttkcggtctcccgcagggctggcacctgcctcctctttgctcccatggaagtctctcctcctgccactctctgaggctggtgaggaagccccttcttactctt

SEQ ID NO: 378287 - DNA, 201 bp, Homo sapiens
agttaagcctggagcagctgagggggcgggatcctagagtttaggattgaggggcattaccccctccccatgacctgcaactgccggcgcacccacaagtsttcagatcctcccaactccagagtcttctggaaaaggaacgaatttgaaacagggaggctgccaagaggccattcccctccagaatccccactggaggca

SEQ ID NO: 378288 - DNA, 201 bp, Homo sapiens
cacctctggtagtatgcattctgtgggtttggacaaatgtataatgacatgtatctaccatcgtcgtctcatacacagtagtttcactgccaaaaaaattytctttgctccgctgattcatactctcaacccccaacctctggcaaccgtgtgcatttttttaatgcgcatattttttatgtctgaaaaatgtcagattcc

SEQ ID NO: 378289 - DNA, 201 bp, Homo sapiens; identical to SEQ ID NO: 81912

SEQ ID NO: 378290 - DNA, 201 bp, Homo sapiens
atggccactgtagccttgacctcaggggcccaagtgatcctcctgagtagctgggtctacaggcacatgccctgacacctggctcatttttttttttttttgtagagatgggggtcttgctatattgcccaggctggtcttgaactcctggccttaagtgatcctcctgcctcgacctcccagggtcaggggactgcaggt

SEQ ID NO: 378291 - DNA, 201 bp, Homo sapiens
ccccagccagcattagattttgacttacgatttcaggaaaaggaaacacaaatgttgttgacagttaataaccgtactcactcagaacctggtgcaagtgygttgagaatgccctcccactatgagtaaaggcctgcccgcattgcatgggctcagggctaggaaaggctgctttcctgtgctatgtcacagataagtgac

SEQ ID NO: 378292 - DNA, 201 bp, Homo sapiens; identical to SEQ ID NO: 81919

SEQ ID NO: 378293 - DNA, 201 bp, Homo sapiens
cccgtggagccaacagcctacaagagcagtcacaacccaggcagaggccatctggggacaacagcagcggcagcaacagcagccgcttgtccctccctgtmctttcgggctgagctggcctgggtggggcatcttctccctcttgcctctccctcctatcttttacaattatgtgtattatttctgcttataaaagaagct

SEQ ID NO: 378294 - DNA, 201 bp, Homo sapiens
gtgacgttatctcggctcctgcaacctccgcctcctgggttcaagcaattcttctgcctcagcctcccgaatagctgggattacaggcgcctgccaccacrcctggctaattttgtatttttagtagagacagggtttcaccatgttggtcaggctggttttgaactcctgacctcaggtgatctgcctgcctcagcctcc

SEQ ID NO: 378295 - DNA, 201 bp, Homo sapiens
ggcctggcggacggcagcatagggctggtttcaagagtatgtgatctgtgcagccacacagagccccacgctcagagggagcccattatgtggtttaatgmctgctgttgccttcttgacattcttttttttttgagacggaatctcgctctgtcacccaggctggagtgatcttggctccagtggtgcgatctcggctca

SEQ ID NO: 378296 - DNA, 201 bp, Homo sapiens
  misc_feature (1)...(201): n = A,T,C or G
acccatccatgagggcagcgggtgggtttactggcccacattagaggcagaggtgacccctctgcccccgtggagccaacagcctacaagagcagtcacancccaggcagaggccatctggggacaacagcagcggcagcaacagcagccgcttgtccctccctgtcctttcgggctgagctggcctgggtggggcatctt

SEQ ID NO: 378297 - DNA, 201 bp, Homo sapiens
  misc_feature (1)...(201): n = A,T,C or G
agcccagataactcttccaggcagctcctgggtgggctctggccatgctctcccatccccaggcacaggcccaggttagagggcctcatggcccagtgggnggttctgagctgcctgtgttgctgcaggtaccaatgctgaggacgctggggatgatctgctgctgtcgtatgtgaaggagttctggtggttcccccacat

SEQ ID NO: 378298 - DNA, 201 bp, Homo sapiens
gcctcctctggcacccgaggctctctgccccagggaaggtgggctgccactccgacccctttcatgagctctttcttagcttttgtgacagaggatcaagsaataatcagcattcttgaaagaggtttctgatgaggatgtgggacagggctctgttacagtctttttgctgattaaaaatttttttcttggctgggcctg

SEQ ID NO: 378299 - DNA, 201 bp, Homo sapiens
aaaaaaatatgcctggtgattagccaggtgtggtggtgcatgcctgtagtcccagctacttgcagggctgaggcaggaggatcacttgaacctgggagatygaggctgcagtgagccaagattgcgccactgcactccagcctaggtgacaaagtgagactctgtctcaaaaaaaaaaaaaatttttttttcccctggggc

SEQ ID NO: 378300 - DNA, 201 bp, Homo sapiens
ttttttcactgccctcagtgggaaaagcagggagctcctggctttccctcactcattcctttctcccctgcctgtcctaggccctgtttgacacacagaaygaactacgcgcacacatcccaaacttcaccttcaacctgggctactcagggaaattcttccacacaggtaagtgggcctgcccctgccctcactagcaac

SEQ ID NO: 378301 - DNA, 201 bp, Homo sapiens
gcctgggtgacagagtaagactccatctcaaaacaaaaagaaaaaaaattatttatttttagagacgggacctctctctgtcacccaggcaggagtacagkggtgcaatcacagcttactgcagccttgaactcctgggatcaagcaatcctcctgccttagcctcccaagtagcaggtactacaggtgcatgccactatg

SEQ ID NO: 378302 - DNA, 201 bp, Homo sapiens
agagtatgtgatctgtgcagccacacagagccccacgctcagagggagcccattatgtggtttaatgcctgctgttgccttcttgacattcttttttttttgagacggaatctcgctctgtcacccaggctggagtgatcttggctccagtggtgcgatctcggctcactgcacctccgcctcccgggttcaagcgattct

SEQ ID NO: 378303 - DNA, 201 bp, Homo sapiens
tgtggctcgtgtgtcctaaccccagagtacacctgtgtgtttgtttcacaagtgtcagtgtcccctcattgactcgaagagtactgggtgcacggtgcgcrggaagaccgcattgctgggcacacagtgtcccatccttggaaagggtatggccctttaaagtcagcactgcattccatcagcaaagagaaatcctccaca

SEQ ID NO: 378304 - DNA, 201 bp, Homo sapiens
gcttgggaggttgaggctgcagtgagccatgactgtgcatggcattccagcctgggccacagagcaagaccctgtctcaaaaaaaaaaaaaaaaaaaaaaagtttttactaaacaaaactgtgtaaaagtactttgcagaccacaagattttacacacatgtgaactgtcattgtgagaaacagcctacaaattaagacca

SEQ ID NO: 378305 - DNA, 201 bp, Homo sapiens
gcagcagtcccaagtttccagaaacattcccactctgttactttgaggcctgctcattttgtgcagagaatagcagtgaagtttgtaaaatggcaagggcytgtagttcactggggggaacgctgtgctgtaggctgcacccaagggtaggggctgtgcgaccacatggagactgcctttctgaggagcagctgggccttc

SEQ ID NO: 378306 - DNA, 201 bp, Homo sapiens
taatttaaatatgatttttaactcttaaaaatgtttatgttaatgtcagagcgcctacaaaactcttaaaataaggatgagagcttgaatcatgcatgagrcagattttaactgaggtgtaagtagacagtggaatgcatgtgtttaattcaaaaaaggtttgctggccgggtgtggtggcttgtgcttgtaatcccagca

SEQ ID NO: 378307 - DNA, 201 bp, Homo sapiens
cacacaggtaagtgggcctgcccctgccctcactagcaacttccaggactcctcagcacccaaaccctcaaagcacccatccatgagggcagcgggtgggyttactggcccacattagaggcagaggtgacccctctgcccccgtggagccaacagcctacaagagcagtcacaacccaggcagaggccatctggggacaa

SEQ ID NO: 378308 - DNA, 201 bp, Homo sapiens
aagtgcagtgacccttgaatcatggtgtgacagcgttgtcatagacaggacactcgatgaggaggccctttgcccctttgctctaccgcctgtagtcagaygctgaggtcgaagtccacccctcccttgcttgcagagaaacatcctgagtcttggggaggagaagggtttgcccagggtcccaaggtcggaaatccaaat

SEQ ID NO: 378309 - DNA, 201 bp, Homo sapiens
tctgcccacctcggcctcccaaagtgctgggatgacaggcgtgagccaccacaccattatgacattttctagtgtgtgtgtgtgtgtgtgtgtgtgtgtgtgtgtgtgtgtgtgtatggctttattgtttagatttttagttttacattcacagcaaaattgaaaggaagatacagatatttcccatatgccttcttcccc

SEQ ID NO: 378310 - DNA, 201 bp, Homo sapiens
  misc_feature (1)...(201): n = A,T,C or G
ctcagcacccaaaccctcaaagcacccatccatgagggcagcgggtgggtttactggcccacattagaggcagaggtgacccctctgcccccgtggagccnacagcctacaagagcagtcacaacccaggcagaggccatctggggacaacagcagcggcagcaacagcagccgcttgtccctccctgtcctttcgggctg

SEQ ID NO: 378311 - DNA, 201 bp, Homo sapiens
atctgcccacctcggcctcccaaagtgctgggatgacaggcgtgagccaccacaccattatgacattttctagtgtgtgtgtgtgtgtgtgtgtgtgtgtgtgtgtgtgtgtgtgtatggctttattgtttagatttttagttttacattcacagcaaaattgaaaggaagatacagatatttcccatatgccttcttccc

SEQ ID NO: 378312 - DNA, 201 bp, Homo sapiens
gatctgcccacctcggcctcccaaagtgctgggatgacaggcgtgagccaccacaccattatgacattttctagtgtgtgtgtgtgtgtgtgtgtgtgtgkgtgtgtgtgtgtgtgtatggctttattgtttagatttttagttttacattcacagcaaaattgaaaggaagatacagatatttcccatatgccttcttcc

SEQ ID NO: 378313 - DNA, 201 bp, Homo sapiens
acctgggaggcggaggttgcagtgagccaagatagtgccattgcactccagcctgggtgacagagtgagactccgtctcaaaaaaaaaaaaaaaaaaaaaagtgcttagcacagtgccaggctcatagtatggcagtattcataatgatgataattataatgttgttggtgttatttttattgtaggaacccttgggtttc

SEQ ID NO: 378314 - DNA, 201 bp, Homo sapiens
gtgtctccatctggggtcattggaggattaacagcattcctgtctgcaaagtgcacagcacctagtgcctggctttggtaagtgagtcgtgtgtttgtgartatattattgtgcagggtggagcgcagggccagggtggtgagccctccatgaatgttggtgaatattgataccactgttatggtccacatgtgagagact

SEQ ID NO: 378315 - DNA, 201 bp, Homo sapiens
tctttctcaattcactactaatttgatatgtggccttgggccagttccttcctgagcctcactttccaaatctgttactgagtaatcattttattagcttrtattaccatgtgccaggcactgagctcagtgttttacatgcctcatctctctttgtcttggtagctgccctgcaagatagataagtagtataaaccccat

SEQ ID NO: 378316 - DNA, 201 bp, Homo sapiens
tccagagacctctagaaacccttgtggaaaggtcatggtcgccactgcattttcagtgcctagtggcatgcttggcacctagtggtgctcagtaaatacakgatgaggaaacaggtcgtttgcttgttccgcactcccagaaagatctcgaacctccttcctggatcccattctcttgctccttccctctggcgtcagcct

SEQ ID NO: 378317 - DNA, 201 bp, Homo sapiens
attttccttgctgagctggatgtggtgggtggggcaggctgtggtagggtggctggtggagctgggaagctgtggggtgtggctgggtgggggtgatgatgtgactgtgctgggggtgtgactggctgggaggggctggatcagctatggggagtggccctgggtgcatgtggggctacctgttccccaggcctgcagcca

SEQ ID NO: 378318 - DNA, 201 bp, Homo sapiens
ggatgtgacaaggacacatgtagcatgtaggtatcatgcccattgggctgtaagggccacatatccatgtgcagtgggagtccactgactgggttctgggrcgccccacacatcccttccactgttgttttaggacccctgcgaggacaaacgtcacaaagacatctggtccaaggagaagacgtgtgaccgcttcccaaa

SEQ ID NO: 378319 - DNA, 201 bp, Homo sapiens
caaggagaagacgtgtgaccgcttcccaaagctcctcatcatcggcccccagaaaacaggcaggtctctctgctcttgaccgagcttccccaactgcctgmtgtctcagccacagaattctgaggactgccttgccctggccccactcccggataatttgctccctctttcccaggaagtaggaatgaagttggggtgaac

SEQ ID NO: 378320 - DNA, 201 bp, Homo sapiens
gtgaagagtgctgtgatagattagcgatgtccgtagtaggtacaggagttgcggtgttcacatgcatgccatatatttgccaccctggatttagtaattcyttcattgcacagatgaagaagctaagaccagagaaaggcagagaccttcccaggagcccccagtgggtcgtggggagctaggcccagaacccagactcta

SEQ ID NO: 378321 - DNA, 201 bp, Homo sapiens
ccctcccctgctcaggtccctgcccaagtccaggtacccacccattcacatccttctgaggttgctggcagagctctttctgcactgacctcctctcagcmcccaccccatgtgcatgtggcccagatgcctatgatgatgccatttgagcctgtcatgtgcatgtgaatgtggtgtgtgtgttgggggggcagggagcag

SEQ ID NO: 378322 - DNA, 201 bp, Homo sapiens
ttttttctatttttaaagtgaaaggaatgatagcagtttgaagccatttctatagaacaatagaaatagaaaaataggatacaaaccaaaaatacaaataraggcaccctctttcacacactcagctcagtccagattgcaaagtgcttctccagccacaatcctacttgccttaaacatttttgtgaataagaaagggca

SEQ ID NO: 378323 - DNA, 201 bp, Homo sapiens
gggaaatctcacttcttgtgacttcattactatttaagggagactggtagactgtgtttggggttgctgtttgggatgagacaattggggcctttgtgtcstgtatgtacgtcttcgttaactctttccagtgagatgagtataggaggcgtggcctgggtgcaggcggtgcggggggttcaggctgagggggaggctgga

SEQ ID NO: 378324 - DNA, 201 bp, Homo sapiens
aattcatgtcatttcctgggagaggagagggccgactggagagggtggggggcacactggggaagcaggcagaggtttccttcccttgtaggggggtgggragagtggggagagggggtgctatccagttcgcctgatgagggctctcgaaccagccgttttgggttgtgttaaaggtgagaccttcctccattaatgtac

SEQ ID NO: 378325 - DNA, 201 bp, Homo sapiens
tgctttgggagtgggtgggtgacaggcagtgagcaaataaacacaggatggggcaggtgtgatcagtacaaaaagaaacaaagcagggaaaggacacagasggtagtgggggtgggagcttgacattattttaggaaagtcgtctttgataaagtgacctgaaataaatgaggggaggagccatgtggctttctgtgcaaa

SEQ ID NO: 378326 - DNA, 201 bp, Homo sapiens
tgcaggcgggtgaggagggccttgggtggagggtggcagcctctgagtgggttgcagaggggctgtgctggaagccccctttgccagccggctgagtggcyggcactttgctacaaagcaactggcttccccccacccacccccaccccagggtatttggccttctctgaggacaggggctaccttgctctccctctgccc

SEQ ID NO: 378327 - DNA, 201 bp, Homo sapiens
ggccagtgcagagaagagggtatatgcattgggtgtgaattatgagcaggagtttgtcaggccaagaagacggaatggaattggcacaggaacaaggacamattgtaccatattcaggggcaggtggctgagagggtgaggaaggtcatgaaggaacaggggctgtgagcctaaggaagaggggactggggcacactgtct

SEQ ID NO: 378328 - DNA, 201 bp, Homo sapiens
agccactgtgcccaacccagagtggtaaatttgttgcaacagatgaccctgcattgacacatccttatcacccagagtccatagtttactttcgggttcayctctggtagtatgcattctgtgggtttggacaaatgtataatgacatgtatctaccatcgtcgtctcatacacagtagtttcactgccaaaaaaattttc

SEQ ID NO: 378329 - DNA, 201 bp, Homo sapiens
tccgctgattcatactctcaacccccaacctctggcaaccgtgtgcatttttttaatgcgcatattttttatgtctgaaaaatgtcagattcccacagggkttcgtggctcccacattcctgagactctgagctgcatcattcacactctgaaagattgttaatctgatagagggtcactgaccacagcactcaagcctgc

SEQ ID NO: 378330 - DNA, 201 bp, Homo sapiens
aaatggcaagggcctgtagttcactggggggaacgctgtgctgtaggctgcacccaagggtaggggctgtgcgaccacatggagactgcctttctgaggarcagctgggccttcttcctctgaggaagagtcctcccaccaccctcatgccagaaggcaccatagctcctctcccccaccccctcctcaggttctcccacg

SEQ ID NO: 378331 - DNA, 201 bp, Homo sapiens
ggtgtaatggtcacctgaggccttctcacacagctaaggcacacatgccctgcagcctgctaatgaatcctggcttggcttcattctgagtcttcagaatkaaaagactgatggagactcagtcttttcatctatcatatggggctgctgggctcattcaaagagagcaacgggttaggaagggaatggaatatggtgagg

SEQ ID NO: 378332 - DNA, 201 bp, Homo sapiens; identical to SEQ ID NO: 81916

SEQ ID NO: 378333 - DNA, 201 bp, Homo sapiens
tgtagagcccaggttttgccatattgcccaggccgatctggaactcctggagtcaagtgctgcacccaccttggcctcccaaagtgctgggtttatgagcmtgagccaccgcacctggccctattttttctatttttaaagtgaaaggaatgatagcagtttgaagccatttctatagaacaatagaaatagaaaaatagg

SEQ ID NO: 378334 - DNA, 201 bp, Homo sapiens
aaataaggatgagagcttgaatcatgcatgaggcagattttaactgaggtgtaagtagacagtggaatgcatgtgtttaattcaaaaaaggtttgctggcygggtgtggtggcttgtgcttgtaatcccagcactttgagaagccaagggaggaggattgcttgagcccaggagtttgagaccagcttgagcaacataagg

SEQ ID NO: 378335 - DNA, 201 bp, Homo sapiens
cagagacctctagaaacccttgtggaaaggtcatggtcgccactgcattttcagtgcctagtggcatgcttggcacctagtggtgctcagtaaatacaggwtgaggaaacaggtcgtttgcttgttccgcactcccagaaagatctcgaacctccttcctggatcccattctcttgctccttccctctggcgtcagcctgg

SEQ ID NO: 378336 - DNA, 201 bp, Homo sapiens
tctatgactgtgttagcttttattattagcaagagggctccttttgtaatttgtgcatgaaattcatgtcatttcctgggagaggagagggccgactggaragggtggggggcacactggggaagcaggcagaggtttccttcccttgtaggggggtggggagagtggggagagggggtgctatccagttcgcctgatgag

SEQ ID NO: 378337 - DNA, 201 bp, Homo sapiens
ggaatgaccgcctgggcctgtacaccttcaagcacctggtgcgcttcctgcactcctggaccaacctccggctgcagacactgccccctgtgcagttggcrcagaagtacttccagatcttctccgaggagaaggacccgctctggcaggtggggggctgggcagcctgggcaggttgctacagggatggaacgccaccac

SEQ ID NO: 378338 - DNA, 201 bp, Homo sapiens; identical to SEQ ID NO: 81918

SEQ ID NO: 378339 - DNA, 201 bp, Homo sapiens
gggttcaaaagattctcttgcctcagactcccgagtagctgggattactggcgcccaccacctcaccccgctaatttttgtatttttagtagggttttccyatgttggccaggctggtcttgaactcctgacctcaggtgatccacatgcctcggcctcccaaagtgctgggattacaggcatgagccaccgtgcccggcc

SEQ ID NO: 378340 - DNA, 201 bp, Homo sapiens; identical to SEQ ID NO: 81920

SEQ ID NO: 378341 - DNA, 201 bp, Homo sapiens
aggacaggcacgtttagtgcagcctaggacacatttgatcccacagatggcacatagcttctgacagtccatgtgggttcaagagcagtagattccctggkctctgccattcctggggtccatgaacatggctttaaggtcggaagtgggtggctgagccagctcccatccaaagactttcccacctccacaggtttgatc

SEQ ID NO: 378342 - DNA, 201 bp, Homo sapiens; identical to SEQ ID NO: 81922

SEQ ID NO: 378343 - DNA, 201 bp, Homo sapiens
tgcacaagcttgtcttcgtggatgccgtggccttcctcacggggaagcgcctctccctgccattggaccgctacatcctggtggacattgatgacatcttygtgggcaaggagggcacacgcatgaaggtggaggacgtgaaggtatggccgggggtgctagaccgggcaaggcaggtggggcctggcaagcttcagcctt

SEQ ID NO: 378344 - DNA, 201 bp, Homo sapiens
aaggtgtaatggtcacctgaggccttctcacacagctaaggcacacatgccctgcagcctgctaatgaatcctggcttggcttcattctgagtcttcagaatgaaaagactgatggagactcagtcttttcatctatcatatggggctgctgggctcattcaaagagagcaacgggttaggaagggaatggaatatggtga

SEQ ID NO: 378345 - DNA, 201 bp, Homo sapiens
gggagagggggtgctatccagttcgcctgatgagggctctcgaaccagccgttttgggttgtgttaaaggtgagaccttcctccattaatgtacaatctcraactaactgctaataaagtggggttctgtttgtacaccttggtcctgtctgacctttttgcaaggcccgcagggaagggtggagtaggggtgtttgcatg

SEQ ID NO: 378346 - DNA, 201 bp, Homo sapiens
gtgtaatggtcacctgaggccttctcacacagctaaggcacacatgccctgcagcctgctaatgaatcctggcttggcttcattctgagtcttcagaatgmaaagactgatggagactcagtcttttcatctatcatatggggctgctgggctcattcaaagagagcaacgggttaggaagggaatggaatatggtgagga

SEQ ID NO: 378347 - DNA, 201 bp, Homo sapiens
gtttgctggccgggtgtggtggcttgtgcttgtaatcccagcactttgagaagccaagggaggaggattgcttgagcccaggagtttgagaccagcttgascaacataaggagaccttgtctctacaaaaaataaaacattagctgggtgtggtggtagtagtcctgtagtcctagctatctgggaggctgaggcaggagg

SEQ ID NO: 378348 - DNA, 201 bp, Homo sapiens
tgtaatggtcacctgaggccttctcacacagctaaggcacacatgccctgcagcctgctaatgaatcctggcttggcttcattctgagtcttcagaatgamaagactgatggagactcagtcttttcatctatcatatggggctgctgggctcattcaaagagagcaacgggttaggaagggaatggaatatggtgaggat

SEQ ID NO: 378349 - DNA, 201 bp, Homo sapiens
gttctgagtcccatttaacagaggtgggcactgaggctcagggagttgaggtaacttgcccaaggccacacagctggagcatgcacgtccaccaggcggtkcacggccctggtaagatgctgatggtgactacattgcctggggagggccaggacttttagtttgtaaagtgttctgatagctggctcttacaggtttctt

SEQ ID NO: 378350 - DNA, 201 bp, Homo sapiens
gtaatggtcacctgaggccttctcacacagctaaggcacacatgccctgcagcctgctaatgaatcctggcttggcttcattctgagtcttcagaatgaawagactgatggagactcagtcttttcatctatcatatggggctgctgggctcattcaaagagagcaacgggttaggaagggaatggaatatggtgaggatg

SEQ ID NO: 378351 - DNA, 201 bp, Homo sapiens
taatggtcacctgaggccttctcacacagctaaggcacacatgccctgcagcctgctaatgaatcctggcttggcttcattctgagtcttcagaatgaaawgactgatggagactcagtcttttcatctatcatatggggctgctgggctcattcaaagagagcaacgggttaggaagggaatggaatatggtgaggatgt

SEQ ID NO: 378352 - DNA, 201 bp, Homo sapiens
gagctgctggacaagtactgtgtggcctacggcgtgggcatcattggcttcttcaaggtacacaagaagcagggtccccgagcagttcagagccccctctscagctcagtgcctgaattctcatttgtgaaataggtgtaatggtagcacccgcctcctggggttgttgggagggttaaatgagtgagtatatgtaaagca

SEQ ID NO: 378353 - DNA, 201 bp, Homo sapiens
ggtcacctgaggccttctcacacagctaaggcacacatgccctgcagcctgctaatgaatcctggcttggcttcattctgagtcttcagaatgaaaagactgatggagactcagtcttttcatctatcatatggggctgctgggctcattcaaagagagcaacgggttaggaagggaatggaatatggtgaggatgtggta

SEQ ID NO: 378354 - DNA, 201 bp, Homo sapiens
aagtgcaaaggccctgaagcgggctgtgctggctgtgtttgaaggccaaataggaggccgggatggctggaggggagtgagggatggtggtagatgaggtyggggtgggtgatggaccagatcgatagggccatgtaaggccagccattggatggccatgggcttttaggctgagatgggaaggttttgaatggagcatga

SEQ ID NO: 378355 - DNA, 201 bp, Homo sapiens
aggttttgcagcctgtaagtggagaagccgagatttgaacctagacatagacagtttgggctctctatcccatgctcttccctcttggtggtggtggagtrtggcgttaatatacctcctgacccagagccattttgcatgaggagaaagaggagaatgaaatcccactggcagatggggagctgctctgggctttatggg

SEQ ID NO: 378356 - DNA, 201 bp, Homo sapiens
agcctgatttaagataggaggaaactgaggcaaaggaggataagcaatgtgtccaagcctacgcctctgatgagtataggtctgggatttgaactcaagcrgtccggccccagaggccttagtcttaaccacgatgtgatgagtccaggagcctcacataccacttattcaggagaagtgacatcagaggccacacccagt

SEQ ID NO: 378357 - DNA, 201 bp, Homo sapiens
tgccccaaacctaaaatatttactaaacacttaccaaaagattaattaaactttataggaagcgtttcttgaccccctggttcagacgcagcttgtccagwtaaattcaacaagtgcttatgagttcctgttacgtgctaaggggcattttgcgagctctttgggggacatgaaactgaccagaagtggagcctgcctgtc

SEQ ID NO: 378358 - DNA, 201 bp, Homo sapiens
cagctgctgcctcactggtctgtgttgaaaacaagacagtgggtggggagcactgagcccattgcctggtaccggagccactcaatagatggtagctatcktgctttgtcatctccaggttcagtaaacagcagtggtagcactgtgtccgtcttgtggccctgaccaatgtgtgcccctgtgagatcctggagggtggtg

SEQ ID NO: 378359 - DNA, 201 bp, Homo sapiens
gtcacaaagacatctggtccaaggagaagacgtgtgaccgcttcccaaagctcctcatcatcggcccccagaaaacaggcaggtctctctgctcttgaccsagcttccccaactgcctgctgtctcagccacagaattctgaggactgccttgccctggccccactcccggataatttgctccctctttcccaggaagtag

SEQ ID NO: 378360 - DNA, 201 bp, Homo sapiens
accaccacgccaggctaatttttgtatttttagtagagacagggtttcaccatgttggccaggctggtctcaaactcctgacctcgtgatcttcccgcctyggcctctcaaagtgctggcattacaggcatgagccactgcgcccagctgaaccagagctctctttaatgcctatggcctgacttaatttcctgcctgcca

SEQ ID NO: 378361 - DNA, 201 bp, Homo sapiens
catttcatggctaattctcacagctatcctgtgaagtaggcactttattttcagataaggacctgaggttcaaaaagttaaatggcttgtcccgaatgacrtagctacaggttgagtgtcccttgtctgaaatgctggggaccgtaagtgtctcagattttggaatgcttgcattctacttaccagttgagcatccctagt

SEQ ID NO: 378362 - DNA, 201 bp, Homo sapiens
tttctctatttgccttttttctttctttttaaaaaatgtttcatgtcaggtaggtaatgtgctgagatcataacaaggttcgaggtgggtacacctcacaygtgtgtgaacacccaatcatcacgtgcatggactgcaaagtttgcctttttaaaccttgtccatgtattaccattatttattatttttatgtcagtgggt

SEQ ID NO: 378363 - DNA, 201 bp, Homo sapiens
aaggaagaggggactggggcacactgtcttcagacttccagggagctgagcagccacatgccttgagagaagggaggcagagacttcaccactgatggcartgaccgggcaggcaccatagtgagggagtggcctctggggtgctaggggcatatggggcacccccagcagaaacctcctctttgaacatctgcattggca

SEQ ID NO: 378364 - DNA, 201 bp, Homo sapiens
tctgcaccttactggagagtcacagctggtttctagaaggcagaggaggggtttcacgtttgtgtccccttctcaaagattagaaaaccaagtttcagcamgtttcatgtggtggcatttgaatccaagtcttctaaatctaagaccctattcctttttctgtccatgatcaagaggggtaagggatagaaggagaaggga

SEQ ID NO: 378365 - DNA, 201 bp, Homo sapiens
aggacgctgctgtgcaccatattgccccagccctgggctgtgtgtgatcctcaggggagggggttggcggctgggggatagtgcctgtcgcacaggtgccygagctctggctttctggacttagtgaattctgcagattcggacctcccatggcattattttaagtgattcagaccagccagtctcccttttatagttctt

SEQ ID NO: 378366 - DNA, 201 bp, Homo sapiens
  misc_feature (1)...(201): n = A,T,C or G
acaaccagtccgtgttggccgagcagatggccttgaacaagaagttcgctgtcgtgagtaagattccttgcagggcagagcggggcgggctaagggctggnctggaggtccagactgctggcctcttgctgcttttgcagtctgctctgacggatttttactaacacctctgggccagggccaagggagagctgcctttat

SEQ ID NO: 378367 - DNA, 201 bp, Homo sapiens
catgtgagttgggttactgggcacaattcaccatgaaaggcatggcttgctcagtctccatacctgcttttatggagctcttggtctcattcctggagccyacccattcatcacaggcccaagccggacccccttccctggtcccagtctctggacagcttgctcctgtaagaaggcccttgtacctctgccccttttctc

SEQ ID NO: 378368 - DNA, 201 bp, Homo sapiens
ggtcaggagttcgagaccagcctgggcaacatggcgaaaccccgtctctactaaaaatacaaaaattagctgggcatggtggcaggtgcctgtaatccccrctactcaggaggctgaggctcgaaaatcgctcgaagcttgaacccaggaggggaaggctggagtgatcctgggcaacagagcaagactcttaaaaaaaga

SEQ ID NO: 378369 - DNA, 201 bp, Homo sapiens
ctaccagagtgcagtggtgaggcagattctgaggccacgtcctcgtttagtgaagagtgctgtgatagattagcgatgtccgtagtaggtacaggagttgyggtgttcacatgcatgccatatatttgccaccctggatttagtaattccttcattgcacagatgaagaagctaagaccagagaaaggcagagaccttccc

SEQ ID NO: 378370 - DNA, 201 bp, Homo sapiens
ccagaaggtcacagacttctcctctagtccatacccctcactgcagttgcagaaactgaggctcagagaagggaagggacttgcccagagactcacaggcrgcaatggaggctgtggcaccccctgcctctgtcttcctgccagcattctgcctgaccttacaagctggggaagcttggctcattcaggggacaatgacct

SEQ ID NO: 378371 - DNA, 201 bp, Homo sapiens; identical to SEQ ID NO: 81911

SEQ ID NO: 378372 - DNA, 201 bp, Homo sapiens
catatatttgccaccctggatttagtaattccttcattgcacagatgaagaagctaagaccagagaaaggcagagaccttcccaggagcccccagtgggtygtggggagctaggcccagaacccagactctatcttttggctgggggctgggccctgggtctcaggtgtctaccctccccacaggcaccactgccctctac

SEQ ID NO: 378373 - DNA, 201 bp, Homo sapiens
gatatgtggccttgggccagttccttcctgagcctcactttccaaatctgttactgagtaatcattttattagcttatattaccatgtgccaggcactgasctcagtgttttacatgcctcatctctctttgtcttggtagctgccctgcaagatagataagtagtataaaccccattttagatttagtgaaactgaggtt

SEQ ID NO: 378374 - DNA, 201 bp, Homo sapiens
ttgtccctgccacctcaggcatgcacacgtgcccacatgtatgtacacacctatacacatggtgacttggtcaacgcagatcattttcactgggttataartggaagatttcccagatacagcagaggcctatcctagggcagccacagggggcatctcaggtgatagaagccctcagacaagctggattgctcagaagcc

SEQ ID NO: 378375 - DNA, 201 bp, Homo sapiens; identical to SEQ ID NO: 81915

SEQ ID NO: 378376 - DNA, 201 bp, Homo sapiens; identical to SEQ ID NO: 81917

SEQ ID NO: 378377 - DNA, 201 bp, Homo sapiens
tggagagggtgtggatccaagcccctatctggggcatgtatgaaccagagctgtcttttttttttttttttttttttttgagacagagtcttgctctgtakcccaggctggagtgcagtggcctgatctcaactcactgcaacatccgccttccagtttgaagtgattctcctgcctcagcctcccaagtagctggtatta

SEQ ID NO: 378378 - DNA, 201 bp, Homo sapiens; identical to SEQ ID NO: 81923
  misc_feature (1)...(201): n = A,T,C or G

SEQ ID NO: 378379 - DNA, 201 bp, Homo sapiens; identical to SEQ ID NO: 81924

SEQ ID NO: 378380 - DNA, 201 bp, Homo sapiens
tcagctacagccatgagctacaggggtgctggtgttacagattagctcactgatgctttaaaggtgtaatggtcacctgaggccttctcacacagctaagrcacacatgccctgcagcctgctaatgaatcctggcttggcttcattctgagtcttcagaatgaaaagactgatggagactcagtcttttcatctatcata

SEQ ID NO: 378381 - DNA, 201 bp, Homo sapiens
gggctctctcattatagcatgtaaaccatagacttataccacagaaagtgaatgaactcactgaggaggaggtagggcagggtgcatgagtgagcagaggrtattgggaagaagagacataggaacaagatttcttagttctttaagaatttcacattaacagaactgcagggtgacaaactcccttttccctgagctcct

SEQ ID NO: 378382 - DNA, 201 bp, Homo sapiens
agcagatcagcatcttcatgacgcacctgtccaactatgggaatgaccgcctgggcctgtacaccttcaagcacctggtgcgcttcctgcactcctggacsaacctccggctgcagacactgccccctgtgcagttggcgcagaagtacttccagatcttctccgaggagaaggacccgctctggcaggtggggggctggg

SEQ ID NO: 378383 - DNA, 201 bp, Homo sapiens
ggccaggtgtggtggctcacacctgtaatcccagcactttgggaggctgaggtaggcggatcacttgaggtcaggagtttgagaccagcctggccaacacrgcgaaaccccatctctactaaaaatacaaaaaaaaattagccaggtgtggtggcgtatgcctgtcatcctggctacacaggaggctgaggcaggagaatc

SEQ ID NO: 378384 - DNA, 201 bp, Homo sapiens
gcggatcacttgaggtcaggagtttgagaccagcctggccaacacggcgaaaccccatctctactaaaaatacaaaaaaaaattagccaggtgtggtggcrtatgcctgtcatcctggctacacaggaggctgaggcaggagaatcgcttgaacccaggaggtggaggttgcagtgagccgagattgtgccactgcactcc

SEQ ID NO: 378385 - DNA, 201 bp, Homo sapiens
agggagttgaggtaacttgcccaaggccacacagctggagcatgcacgtccaccaggcggtgcacggccctggtaagatgctgatggtgactacattgccyggggagggccaggacttttagtttgtaaagtgttctgatagctggctcttacaggtttcttttttctttttctctctttttttttttttttttgagatgg

SEQ ID NO: 378386 - DNA, 201 bp, Homo sapiens
tttattttcagataaggacctgaggttcaaaaagttaaatggcttgtcccgaatgacatagctacaggttgagtgtcccttgtctgaaatgctggggaccrtaagtgtctcagattttggaatgcttgcattctacttaccagttgagcatccctagtctgaaaatctgaaatccagaatgctgcaataagcatttccttt

SEQ ID NO: 378387 - DNA, 201 bp, Homo sapiens
tggtcacctgaggccttctcacacagctaaggcacacatgccctgcagcctgctaatgaatcctggcttggcttcattctgagtcttcagaatgaaaagactgatggagactcagtcttttcatctatcatatggggctgctgggctcattcaaagagagcaacgggttaggaagggaatggaatatggtgaggatgtggt

SEQ ID NO: 378388 - DNA, 201 bp, Homo sapiens
atggtcacctgaggccttctcacacagctaaggcacacatgccctgcagcctgctaatgaatcctggcttggcttcattctgagtcttcagaatgaaaagactgatggagactcagtcttttcatctatcatatggggctgctgggctcattcaaagagagcaacgggttaggaagggaatggaatatggtgaggatgtgg

SEQ ID NO: 378389 - DNA, 201 bp, Homo sapiens
aaaggtgtaatggtcacctgaggccttctcacacagctaaggcacacatgccctgcagcctgctaatgaatcctggcttggcttcattctgagtcttcagaatgaaaagactgatggagactcagtcttttcatctatcatatggggctgctgggctcattcaaagagagcaacgggttaggaagggaatggaatatggtg

SEQ ID NO: 378390 - DNA, 201 bp, Homo sapiens
gcacccaagggtaggggctgtgcgaccacatggagactgcctttctgaggagcagctgggccttcttcctctgaggaagagtcctcccaccaccctcatgmcagaaggcaccatagctcctctcccccaccccctcctcaggttctcccacggcagacctgcggcctcttcacacacaccatcttctacaacgagtaccct

SEQ ID NO: 378391 - DNA, 201 bp, Homo sapiens
ttgagaacattgtttttattgccatttgtgagtggttgccttctatatatgacaacagtgcagcagcgtgatcttggctcactgcaacctccaccccccgrgtttaagcgattctcgtgcctcagccttccgagtagctgggaccacaggtgtgcaccaccatgccagctaatttttgtatttttagtagagacggggttt

SEQ ID NO: 378392 - DNA, 201 bp, Homo sapiens
atttgagaaactcgaaccacctaatatttcataaccttcttcattaggtacttgtacagattaatttctaacatttcagcagtttaatatgtgtgcaatamgtgcattctttcattttagttttgtacttggttttctataaagtacgtttttactcagttcatgtgtgaacaatttttaaaaactacagaataaggtaca

SEQ ID NO: 378393 - DNA, 201 bp, Homo sapiens
taccaccatctgacgtttaacaccatattagttttacctttttgaggttcatatatatgaaatcctacaatacacatgcttttgtgtttggcttcttttawttatttatttatttatttatttatttatttattttttgagacggagtctcgctctgtcacccaggctggagtgcagtggcgcaatctcggctcactgcaa

SEQ ID NO: 378394 - DNA, 201 bp, Homo sapiens
tatttatttatttatttatttatttattttttgagacggagtctcgctctgtcacccaggctggagtgcagtggcgcaatctcggctcactgcaagttccrcctcccgggttcacgccattctcctgcctcagtctcccgagtagctgggactacaggcgcccaccaccatgcctggctaatttttttgtatttttagtag

SEQ ID NO: 378395 - DNA, 201 bp, Homo sapiens
gaggttgcagtgagccgagattgtgccactcactgcactccagtttgggtgacagagtgagactccgtctcaaaaaaaaaaaaaaaaaaaaaaaaaaaaawatatatatatatatatatatatatatatagcacatacaattatgagctgtagtacataatgcttgataatagaaaactagaaaactatgttactggttta

SEQ ID NO: 378396 - DNA, 201 bp, Homo sapiens
ttattgtttttctcattcctaggaattttttgatgtgtggccggttctgatgggtgaagttccaccttactctggtcccaggactccggatggaagagtaygttctctctgaccttttcagtatgatttaatatattcaaatgcaaggcacagtaaaccctgttaaaggattttttattagcatataggtatttgtctttg

SEQ ID NO: 378397 - DNA, 201 bp, Homo sapiens
catagaggtgccaggctatagtggatatagtcatggaagctaaagtaagtttcatccagaaagaaaagtgctctgtctccttcctagtgggcaggaagggyattttaatgaagattctggtatttcaagattcactggagttgctagaatgtggaccattgtgtgtatttctttctttccttttctttttttctttttgag

SEQ ID NO: 378398 - DNA, 201 bp, Homo sapiens
agacattctggaagaaagcattgttatcataggagatgggagctccatgcgtgtttttgcccctgaagacgttccagggggacaaagtgtggaggtggaaratggggatattgatgatcctgaccctgtgtaggtctaggctaatgtgtgtgtttgtgtcttagtttttaacaaaaaagtttagaaagtaaaagaaaaaaa

SEQ ID NO: 378399 - DNA, 201 bp, Homo sapiens
ttttgcccctgaagacgttccagggggacaaagtgtggaggtggaagatggggatattgatgatcctgaccctgtgtaggtctaggctaatgtgtgtgttygtgtcttagtttttaacaaaaaagtttagaaagtaaaagaaaaaaaaatttaagagaaaaaaagcttgtaggataaagatataaagcaaatatttttgtt

SEQ ID NO: 378400 - DNA, 201 bp, Homo sapiens
gaaagcatacccggtgggctcccacatgggcgcatggctcccgtcatctcctcttgggcatccaggggccgggcaatggttctccactcaggagactttcsggaggactcatccaactggactggagtctattctcccttcaactcttctaactgtaattgtagccaacaaggattgcctcactcgtttcccctcataacg

SEQ ID NO: 378401 - DNA, 201 bp, Homo sapiens
tgtgtaggtctaggctaatgtgtgtgtttgtgtcttagtttttaacaaaaaagtttagaaagtaaaagaaaaaaaaatttaagagaaaaaaagcttgtagrataaagatataaagcaaatatttttgttctgattcaagcaccaaagacataaaaaaagaaaaaagaataacagaatttgagatttttttaaaaagaaaat

SEQ ID NO: 378402 - DNA, 201 bp, Homo sapiens
gtttgtgtctcttatacttctttgtgtgtttttcatcatttcgttttttgtgctttagtttgaatatttcttcgatctatcttctattaattactaactctttttttttttttttttttgagacagagtctcattctgtcacccatgctggattgcagtggcatgatcttggctcactgcaacctccgcctcctgggttca

SEQ ID NO: 378403 - DNA, 201 bp, Homo sapiens
ggatgttaaatggaatcctctttgagctggtggttctgttgcaaggactttggaggaaggagataaatgggaatggaaacgcggaggcatgttgtaacctrttttttttcccctgccattttgggtcctggcagaaaaccagagaggtgtatgggaaggagccatgggagtgtgaggaagaggagctggctgagatcctgg

SEQ ID NO: 378404 - DNA, 201 bp, Homo sapiens
cagttggcctctcctgaggctgcatgactgtgcagctcctttgctggctctttttcctcttccctctgcctgtgtcttggccacttttatttaggtgttgttgtttgttatgttatgttatgttatgttatgttatgttatgttatgttatgttatgttatgttatttatttgagacagagtctcactctgtcacccaggc

SEQ ID NO: 378405 - DNA, 201 bp, Homo sapiens
ctggtggtacttataggtatgggcgggaggggtctgggcagtatggcttgttgcctggcaggctattgataagatgttctcatgatgaggcggttttgctyttgtctcggtgggatgccattgtggtgtttcttggacttttgcccagcaagatatgataggaatgtttctttagttgggcctttgtctgccttgtggtca

SEQ ID NO: 378406 - DNA, 201 bp, Homo sapiens
ttggcctctcctgaggctgcatgactgtgcagctcctttgctggctctttttcctcttccctctgcctgtgtcttggccacttttatttaggtgttgttgtttgttatgttatgttatgttatgttatgttatgttatgttatgttatgttatgttatgttatttatttgagacagagtctcactctgtcacccaggctgg

SEQ ID NO: 378407 - DNA, 201 bp, Homo sapiens
agatgcactgacagctcttgctgccctcaacaagccttgggactatttcattttggaggccttcaacatatgaaaaaaatgaagttatgccaaattccaawtgcacaagccacatgtttaatctttattttagcactaaaaatgcaagacagtgtattattgttttatttatctgaataaaaaaatatgttatttgaagta

SEQ ID NO: 378408 - DNA, 201 bp, Homo sapiens
gactcaatctgtaaactaccttaaaaagagtttactctcagtatttaggatttaaagaattagtcatgttgcacagatgagtcatttataagaaaagagayacgctgttcctctgtgtcctgtgaagtgtgatgttttgggtgcgttggtttcttgcagtgggttctgaggtactaagccctgaaggctgggaatagatat

SEQ ID NO: 378409 - DNA, 201 bp, Homo sapiens
tgggcaacatagcgagaccttgtctctataaaaaataaaaatttccctgggtgtggtggcacgcacctgtggtcccaactactcaggaggctgaggtggarggactgcttgagcccgagaggttgaggctgcagcgagccctgacggtgccactacactccagcctgggtgacagagcgaggctcctccgactcaaaaaaa

SEQ ID NO: 378410 - DNA, 201 bp, Homo sapiens
gttctaactctttactactgacagcactgcccctcccccaagtcatttcttttactgattgtgtgatctgtttcctcacaggacatggcatcttgtccctscctcaccctgactgccctcctttgcacacccatccctcttcacccatggctcttacacatggaaaatgtcagggcctcagctctgctctgggcagcgtgg

SEQ ID NO: 378411 - DNA, 201 bp, Homo sapiens
ttgactttgtttgcaccttcgtctacaaggtaggcccttggcttcctcagccgcaacaagatgtctttgataaacctgggatttccagacaacagcaggartaataaaccctagcaggtgaccagtgggtgatactttacaaagcgcttctcatctctaatggcattcgattctcaggacagctctatgggtctcatgtga

SEQ ID NO: 378412 - DNA, 201 bp, Homo sapiens
ctgttcttgctcttcatttgcctgtccgtgcttatctctgccttcctttaggatgagcatttctgtgactttgtggacatcctcacagagtacaagaccargaacatcttggcttcccccataatgaatgggaaggatgtggtggccataatcatggctgtgaataaagtggatggatcccacttcaccaagagagatgaa

SEQ ID NO: 378413 - DNA, 201 bp, Homo sapiens
atttttaacgtattcctttacataggacaatatcccacaatatagctgtgctagtcacaaattggttatggttggtatgaaatttacagtgcatggtctgkcatggttggtaatgggactcaaatttaagttgtctggtgaatgtcttttttcagttttctcagtgtgcttccatgattcacctcaattgacaatggggtg

SEQ ID NO: 378414 - DNA, 201 bp, Homo sapiens
aaggggtttttgttttgttttgttttttgttttgagacagagtctcgctctgtcgcccaggctggagtgtagtggtgcgatctcggcttactgcaacttcygcctcccaggttcaagcaattctcctgcctcagcctgcctagtagctgggattacagtcacccaccaccacgcccagctaatttttgtatttttagtcga

SEQ ID NO: 378415 - DNA, 201 bp, Homo sapiens
ataccaaagagcattagtagagataaagagtcacttaatgataaaggggtcaatctacctcaatattacaggaagatattaccattctaaatttgcaagcrcctcataacatgacctcaaaaaatataaaacaaaaactaacagaaatacaaggagatatagatgaatctgtttgctaattgacttaaggagcaaactaaa

SEQ ID NO: 378416 - DNA, 201 bp, Homo sapiens
tctcctgaggctgcatgactgtgcagctcctttgctggctctttttcctcttccctctgcctgtgtcttggccacttttatttaggtgttgttgtttgttatgttatgttatgttatgttatgttatgttatgttatgttatgttatgttatgttatttatttgagacagagtctcactctgtcacccaggctggagggca

SEQ ID NO: 378417 - DNA, 201 bp, Homo sapiens
taatcacctgactctattccttatacagcaagcggagctgccagatgcagataaatacgaaattaataaatttcacttcagtgacttacccctaacagaastggagctggtaaaatgtggaatacagatgtattatgagctcaaagtggtggataaatttcacattccacaagaggtgaggtcaaaacaaatatatatgat

SEQ ID NO: 378418 - DNA, 201 bp, Homo sapiens
aaagttgttattgcctaggtgtgaactcggtcataaccatagtcaaaagacaaagttacaataagtttcatctacagatctcaaatggctttatttgagaytctagaattgggcaatgatttgttgtgtaaaatagagtaagtgttccaatgagttgagcagaaggggttggttttataggaacaaagaacaaaaaagcag

SEQ ID NO: 378419 - DNA, 201 bp, Homo sapiens
cacataccaccacgcccggctaatttttgtatttttggtagagacggggttttgccatgttgctcaggctggtgtcaaactcctgggctcaagtgatccayccgcctcagcctcccaaatggctgggattataggtgtgagccaccgtgcccgaccttggccacttttagacaaaacaaattcaacagagtttatatgagc

SEQ ID NO: 378420 - DNA, 201 bp, Homo sapiens
actgtccagtgcaattaactctttctcccccatgacagcccatgatggacagaaacaaagcagatgaactccctaagcttcaagtcggcttcattgacttygtttgcaccttcgtctacaaggtaggcccttggcttcctcagccgcaacaagatgtctttgataaacctgggatttccagacaacagcaggaataataaa

SEQ ID NO: 378421 - DNA, 201 bp, Homo sapiens
ccaggctggcttcttcaaactcctgagctcaagcaatcctcccaacttagcctcccaaagtgctcagattataggcataagctgatgcaatggccaataakttaaaaaaatataaatcaactagatgttcaagttaaatgacaaagattgccagcctggttaagaaagaaatacattacctttcattaattctaagatgct

SEQ ID NO: 378422 - DNA, 201 bp, Homo sapiens
accttcatatctagtctataatgtacaaattggtagccagaaagccaattccagctgacagatacacttgcttggctacgtaggttttctattttctttctttttctttctttctttctttctttctttctttctttctttctttctttctttctttctttctttctttttctctctttctctctttcttctttctttctt

SEQ ID NO: 378423 - DNA, 201 bp, Homo sapiens
aggtgtgtcctgcctcactgatgtgcatgtgttcacaggccctggtgcggttcatgtactccctgagtaagggctaccgcaagatcacctaccacaactgrcggcacggcttcaacgtggggcagaccatgttctccctgctggtggtatggcggggccggtggggctggtagggtgggcttgcatcacactagacaatct

SEQ ID NO: 378424 - DNA, 201 bp, Homo sapiens; identical to SEQ ID NO: 81950

SEQ ID NO: 378425 - DNA, 201 bp, Homo sapiens
acttgcttggctacgtaggttttctattttctttctttttctttctttctttctttctttctttctttctttctttctttctttctttctttctttctttytttttctctctttctctctttcttctttctttcttttcttctctctctctctctctctgtctctctctttctctctcagatagggtctttgtatgttgcc

SEQ ID NO: 378426 - DNA, 201 bp, Homo sapiens
gtaatgttctttacttgtttctactctaatacagactgcgtctcagagatgtggccagattaaggcaaaacttgcaactccatgagggcacagcctgggcrtgggtttgtgcactgttgtgttccttcctgcctagcacagggatgcagcagccctcaacatttaatgaatgaatgaatgaatgagtgcatgagcagatga

SEQ ID NO: 378427 - DNA, 201 bp, Homo sapiens
caaagaaaaaagagaaggtagacggttttataaaaaagagaaatgaggccgggcatggtggctcatgcctgtcatcccagtgctttgggaagccaaggcargaggatcacgtgagcccaggaattcgaggctacagtgagccatgactgtgccactgcactccagcctgggtgacacagcaagaccctgtgtttaaaagaa

SEQ ID NO: 378428 - DNA, 201 bp, Homo sapiens
gagtgcagtggccgaatctcagctcactacaacttccacctcctgggttaaagcgattctcctgcctcagcctcccgagtagctgggattacaggcacacrccaccacacccagctaatatgtgtatttttagtagagatggggttttgccatgttggtcaggctggtctcaaactcctgacctcaagtgattcacctacc

SEQ ID NO: 378429 - DNA, 201 bp, Homo sapiens
cagctcactacaacttccacctcctgggttaaagcgattctcctgcctcagcctcccgagtagctgggattacaggcacacaccaccacacccagctaatwtgtgtatttttagtagagatggggttttgccatgttggtcaggctggtctcaaactcctgacctcaagtgattcacctaccttggcctcccaaagtgctg

SEQ ID NO: 378430 - DNA, 201 bp, Homo sapiens
ttaaagcgattctcctgcctcagcctcccgagtagctgggattacaggcacacaccaccacacccagctaatatgtgtatttttagtagagatggggtttygccatgttggtcaggctggtctcaaactcctgacctcaagtgattcacctaccttggcctcccaaagtgctgggattactggcatgagccctggcaccca

SEQ ID NO: 378431 - DNA, 201 bp, Homo sapiens
gttttatagagacagtctcactatgttgccaggctggtctcaaatttctgggttcaagcgatcctctcacctctacctcccaaagtgctgggattacaggygtgagccaccttgcctggccaataatttttttttttttttttttttttttggtaatagagatggggtctcaccatgttgcccaggctggcttcttcaaac

SEQ ID NO: 378432 - DNA, 201 bp, Homo sapiens
gaggctgaggcaggagaatcacctcaacctgggaggcggaggttgcagtgagccgaaatcatgccattgcactccagcctgggcaacagagtgagactccrtctcaaaaaaaaataataataaataaaacaaaataaaaaggtcttaggcagatggggtcataaaaggaggttccaggtggaaggaagaacatgggcaaac

SEQ ID NO: 378433 - DNA, 201 bp, Homo sapiens
taaattaataaaataaagcaaaataaaaaatataaaaaaagaaaattggtttgtatgttggaaaaataatatatgagcacagtgaaaagttcactccataygaaattaagtgccaccttcctcctagtcagcccctgtgaagcagctgctgttagcaaactctctttgcaggaacatttaggtatatccagatatccacag

SEQ ID NO: 378434 - DNA, 201 bp, Homo sapiens
aaagaacatgttaatcatttttaagatacttttcttataaggtgggagagggagatagaacaatagaaaaataactgattaatgtcaggttactgctacctttttttttttttttttggtgtaaggattaaagcagaggaacttcattatcatgcctattaaagactggaacaggactttttgggaaattggcgtttacct

SEQ ID NO: 378435 - DNA, 201 bp, Homo sapiens
tgccaggctggtctcaaatttctgggttcaagcgatcctctcacctctacctcccaaagtgctgggattacaggcgtgagccaccttgcctggccaataawttttttttttttttttttttttttggtaatagagatggggtctcaccatgttgcccaggctggcttcttcaaactcctgagctcaagcaatcctcccaac

SEQ ID NO: 378436 - DNA, 201 bp, Homo sapiens
aatagaaagaaaagaaagataactctagcagcttcctgggaagtggatctgaaggactaggactgcaggcaaagtaaccagagcatcattcaagtaagagrtgatgagaatctcagcaaagacaggtggggtaaagaatactatcattcttgctaacagccactgggtgcttaccatgagtcaggcactacctaaatttaa

SEQ ID NO: 378437 - DNA, 201 bp, Homo sapiens
acagtctcactatgttgccaggctggtctcaaatttctgggttcaagcgatcctctcacctctacctcccaaagtgctgggattacaggcgtgagccaccwtgcctggccaataatttttttttttttttttttttttttggtaatagagatggggtctcaccatgttgcccaggctggcttcttcaaactcctgagctca

SEQ ID NO: 378438 - DNA, 201 bp, Homo sapiens
tgtgtatttttagtagagatggggttttgccatgttggtcaggctggtctcaaactcctgacctcaagtgattcacctaccttggcctcccaaagtgctgrgattactggcatgagccctggcacccagcctgattcccttattatcttctaaagttcatctctctttttttttctaccttatcaaaagcatactcttcaa

SEQ ID NO: 378439 - DNA, 201 bp, Homo sapiens
gaggtgggcagatcatggggtcaggagttggaaccctgactctgctaaaaatacaataattagccgggcatggtggtgcgtgcctgtagtcccatttactygggaggctgaggcagaagaatagcttgaacgcaggagatggaggttgcagtgagctgagatcaagccattgcactccagcctgggcgacaaagtgaaact

SEQ ID NO: 378440 - DNA, 201 bp, Homo sapiens
cgagtagctgggattacaggcacacaccaccacacccagctaatatgtgtatttttagtagagatggggttttgccatgttggtcaggctggtctcaaacycctgacctcaagtgattcacctaccttggcctcccaaagtgctgggattactggcatgagccctggcacccagcctgattcccttattatcttctaaagt

SEQ ID NO: 378441 - DNA, 201 bp, Homo sapiens
ttttatagagacagtctcactatgttgccaggctggtctcaaatttctgggttcaagcgatcctctcacctctacctcccaaagtgctgggattacaggcrtgagccaccttgcctggccaataatttttttttttttttttttttttttggtaatagagatggggtctcaccatgttgcccaggctggcttcttcaaact

SEQ ID NO: 378442 - DNA, 201 bp, Homo sapiens
tttagtttggtttgttggagcttggtgcagagctttgtccaaaacaagggcctcctatagtttttattttaacacatctcaaaacatggaaaactgcaggyacattatcaacttccaaaagatactcattccaagatcaacactgaccaaatccaatgagaccccacagttggttagaggcagggagagtgggaaggaggc

SEQ ID NO: 378443 - DNA, 201 bp, Homo sapiens
atagacagagaaggactgaagaaagacaagcaaagatcaaagaacatgttaatcatttttaagatacttttcttataaggtgggagagggagatagaacartagaaaaataactgattaatgtcaggttactgctacctttttttttttttttttggtgtaaggattaaagcagaggaacttcattatcatgcctattaaa

SEQ ID NO: 378444 - DNA, 201 bp, Homo sapiens
tcagcccctgtgaagcagctgctgttagcaaactctctttgcaggaacatttaggtatatccagatatccacagagaagtatacgtattccaccaccaccmctctgcactaacgctatgattctattttgtgccttgcttttttcacttaactgaatattttgtcacctttccctttcagcacaggcacagcaatcttgct

SEQ ID NO: 378445 - DNA, 201 bp, Homo sapiens
ttctaactgtagtgagtcttactgcctttccaagtttaggtttcactgagttcttctcactttctaaatttcagtgttagctgactcatggaggtgggacrtcttaatctcctttccttgatctcttttcaaaacatgtaattattgtttttctcattcctaggaattttttgatgtgtggccggttctgatgggtgaagt

SEQ ID NO: 378446 - DNA, 201 bp, Homo sapiens
cagcccaggggggttctagttatataaacccctctttgaggagttgttgcacagcccagggaccgaccacctataaaacctattttccaagccccaaattygggcagttggatttttgtactccttccggatgtgcaaagcatactgatgaaacagagtatctgaaaagctgtccccaggaatcacgaaggctcagtcact

SEQ ID NO: 378447 - DNA, 201 bp, Homo sapiens
tgacagatactctgtgggtctcttagacatgaccaagcagaaggtgagaaaacttcagcaacagacatttccaagaaaagattaaacagacactgactgayggctagagtcttggcacacattcaattgcacgggggaagaggctgggtgaattgggatggttgtagaaagtcttacataggtctctactgaggagtatca

SEQ ID NO: 378448 - DNA, 201 bp, Homo sapiens
aggggtttgagaccagcctggtcaacatggtgaaactctgtctctactaaaaatacaaaaattagcagagcgtggtagtgggcatctgtaatcccagctayttgggaggctgagacaggagaatcgcttgaacccaggaagcagaggttgcaatgagccgagatagtgccactatactcctgcctgggtgacagagcaaaa

SEQ ID NO: 378449 - DNA, 201 bp, Homo sapiens
ggcacttatattgtctctaatttttcactactataaatgatactgcttgggacattgttttagctaaatctttgagcacatattagcatggtcttaaggtraatttcttagccgtaaagaccctgctttccctctcatgtccaataacactgagggtgccccagttcagctcccatgtttttggctaatgactagacaggc

SEQ ID NO: 378450 - DNA, 201 bp, Homo sapiens
gttcagctcccatgtttttggctaatgactagacaggcccagttcatcaatattttgaagggcaaatgtgactattttctaactgtagtgagtcttactgyctttccaagtttaggtttcactgagttcttctcactttctaaatttcagtgttagctgactcatggaggtgggacatcttaatctcctttccttgatctc

SEQ ID NO: 378451 - DNA, 201 bp, Homo sapiens
tctactaaaaatacaaaaattagcagagcgtggtagtgggcatctgtaatcccagctatttgggaggctgagacaggagaatcgcttgaacccaggaagcrgaggttgcaatgagccgagatagtgccactatactcctgcctgggtgacagagcaaaactccgtctcaacaaaaaacaaaaaacacaggttgaatcaatg

SEQ ID NO: 378452 - DNA, 201 bp, Homo sapiens
tgactagacaggcccagttcatcaatattttgaagggcaaatgtgactattttctaactgtagtgagtcttactgcctttccaagtttaggtttcactgarttcttctcactttctaaatttcagtgttagctgactcatggaggtgggacatcttaatctcctttccttgatctcttttcaaaacatgtaattattgttt

SEQ ID NO: 378453 - DNA, 201 bp, Homo sapiens
tgaacccaggaagcagaggttgcaatgagccgagatagtgccactatactcctgcctgggtgacagagcaaaactccgtctcaacaaaaaacaaaaaacayaggttgaatcaatgatttctttgcttaaaaatctttaatggtgtcctctttcattttcaataaaatctgtctttttatcatggccttcagagggaaggga

SEQ ID NO: 378454 - DNA, 201 bp, Homo sapiens
aaccaatggatatatatatatatatatatatatatatatatacatatatatttttcgagatggagtctctgtctgttgcccaggctggagtgcagtggcaygatctcagctcactgcaacctctgcctcctgggttcaagcgattctcccatctcagcctcccgagtagctgggattacaggagcatgccgccacatccgg

SEQ ID NO: 378455 - DNA, 201 bp, Homo sapiens
catggctgtgaataaagtggatggatcccacttcaccaagagagatgaagaggtaagaatgctttagagactaaggatagccatgctagcacattctcccwgcctatgaagtcccctgaactttgctgtttgacctggcctcagttttcccatctgtaagacagggaattcacctgatgttctctgagggaggcaggataa

SEQ ID NO: 378456 - DNA, 201 bp, Homo sapiens
atcacttgagcccaggaactcaagaccagcctggccaacagggcaatatcctatttctacaaaaagttaaaaaaagattagccaggcatggtagcgcatayctgtggtcctagttactcaggagactgaagcaagaggatcacttgagcccaagaggtcaaagctgcagtgagccatgattgtgccattgcaatccatcct

SEQ ID NO: 378457 - DNA, 201 bp, Homo sapiens
ggagactgaagcaagaggatcacttgagcccaagaggtcaaagctgcagtgagccatgattgtgccattgcaatccatcctgggtgacagagcaagacccygtctcaaaaaaataaaaaataaaaaataattaacaaactttactttttagagtagttttaggttcttagcaaaattgagcaaaaagtacagcgttcctag

SEQ ID NO: 378458 - DNA, 201 bp, Homo sapiens
ctgagatgcttgtgtaaagtcaaacataaacctggcctccgtgcacatcaaggcacagcaccttttcttaaacttatgacacagagacctttgctcacatrttttcccgctgaacctctccccaccattaccctatagtcctgccacatccccctcacctagatagtagagatagtgatcaataaatactgagggaactca

SEQ ID NO: 378459 - DNA, 201 bp, Homo sapiens
agtccttgaaccatgatctcattggatcctcacaaccacccagtgggctgggcagagcaggggctaatgttatccctacttacagatgagaaaactgagtytccgctcagggccgatggcctgtaagtcattaacaagctctgaattcatgctgctgagtcttctcaatactttcatgctgctctggggctagagattggg

SEQ ID NO: 378460 - DNA, 201 bp, Homo sapiens
tagcttacagcagccttgacctcccaggcccaaatgatcctcccacctcagccttctgagtagctgggaccacaggtgcacaccaccacatccagctaaattttttttttttttttttttgagacagaatctcactctgtcacccaggttggagtgcagtggtgcgatctcagctcactgcaacctctacctcccaggttc

SEQ ID NO: 378461 - DNA, 201 bp, Homo sapiens
agtaaaagcaacaatgattatatgtatgcatatatatatatacacacatatatatacatatatacacatatatatacacacatatatacatatatacacayatatacacacatatatatacatatatacacatatatacatatatacacatatatacatatatacacatatatacacatatatacatatatatacacatat

SEQ ID NO: 378462 - DNA, 201 bp, Homo sapiens
acatatatacacatatatacacatatatacatatatatacacatatatatacacatatatctacacatatatatgtgtgtgtgtatatatatatatatatwtattttttttcttttttgagacaggatctcactctgttgcccaggctagagtgcggtggcaccatcacagctcactgcttcctgggctcaagggatcctc

SEQ ID NO: 378463 - DNA, 201 bp, Homo sapiens
ggcctgaaacaagaggaaacctaatctagcccttctcttgtagaaagaacctctggatgagtctggatggatgattaaaaatgtgctttcaatgccgattrtgaacaagaaggaagaaattgttggagtggccacattttacaatcgtaaagatgggaagccctttgatgaaatggatgagacgctcatggaggtatggct

SEQ ID NO: 378464 - DNA, 201 bp, Homo sapiens
cacaaaaggaatgatttgcactctgattgcccttccagacgggaaagctgaagcgctacttcacggacctagaggccttggccatggtcactgctgctttytgccatgacattgaccacagaggcaccaataacctctaccagatgaagtgagtcagcctccctccccacacccaaccctccggattcattatccagctct

SEQ ID NO: 378465 - DNA, 201 bp, Homo sapiens
agtgtgaggaagaggagctggctgagatcctggtgagctgaaccggggcagcacgagccccgatgtataacaagtgcaaagtgctcctgagcatgcagggktttctccttgcaaagcatgttccccatcactctgttctgatccttccagcagacccaggatggggacagggctggacaggaggtgggcacccagaaacac

SEQ ID NO: 378466 - DNA, 201 bp, Homo sapiens
caccttctcccatctggccccacagcatctggaacacactgatcctcataatccttgttcttgagaaatattaatgacttaatctcccaagcttgctcccwctcctgtgcaggccatctcagtatgttttgcagacaagacccagagaagtccagactggacttgttgcagactgcaaaactgccattggaaggcctccgt

SEQ ID NO: 378467 - DNA, 201 bp, Homo sapiens
gttggtttcagggacatactcctgttgaacttctatttgactcttgaaggtataattttttggctgggtgcagtggctcacgcctgtaatcccagcacttygggaggctgaggtgggcagatcatggggtcaggagttggaaccctgactctgctaaaaatacaataattagccgggcatggtggtgcgtgcctgtagtcc

SEQ ID NO: 378468 - DNA, 201 bp, Homo sapiens
taataaataaaacaaaataaaaaggtcttaggcagatggggtcataaaaggaggttccaggtggaaggaagaacatgggcaaacaacatgggcatggaggmctggagcagtgtgctgtgtatggttaagtgtggctggagtattagatttgagacaggaagacagcaaaacatgaggctcaagagggaggaaggggctaaa

SEQ ID NO: 378469 - DNA, 201 bp, Homo sapiens
tgacatttgaggaaatatcaaatacatagataaataatccttaggtagaaaggtgcatagtcttggccgggtacagtggctcacgcctataatcccagaaytttggggggccgaggcaggtggatcacctgaggtcaggagctggagaccagcctggccaacatggcagaactccatctctactaaaaatataaaaatttg

SEQ ID NO: 378470 - DNA, 201 bp, Homo sapiens
acgcctgtaatcccagcacttcgggaggctgaggtgggcagatcatggggtcaggagttggaaccctgactctgctaaaaatacaataattagccgggcayggtggtgcgtgcctgtagtcccatttactcgggaggctgaggcagaagaatagcttgaacgcaggagatggaggttgcagtgagctgagatcaagccatt

SEQ ID NO: 378471 - DNA, 201 bp, Homo sapiens
catttccactcagaacggcgtgagctgagcatgtttgggctggcccgcctcccaagcaatgctgacagtccaaaaacctcacagtgctaccaataaacagraaggaggattcttgtaaatttaagagaacaattcaagctctgtcttttcatcctgaccgcatggtccaccacagcctataatggcttctctgggctgcat

SEQ ID NO: 378472 - DNA, 201 bp, Homo sapiens
atatatacacatatatacacatatatacatatatatacacatatatatacacatatatctacacatatatatgtgtgtgtgtatatatatatatatatatwttttttttcttttttgagacaggatctcactctgttgcccaggctagagtgcggtggcaccatcacagctcactgcttcctgggctcaagggatcctccc

SEQ ID NO: 378473 - DNA, 201 bp, Homo sapiens
acaacatagaggtgccaggctatagtggatatagtcatggaagctaaagtaagtttcatccagaaagaaaagtgctctgtctccttcctagtgggcaggargggcattttaatgaagattctggtatttcaagattcactggagttgctagaatgtggaccattgtgtgtatttctttctttccttttctttttttctttt

SEQ ID NO: 378474 - DNA, 201 bp, Homo sapiens
ttggttgtaggcagagaatggggaagagaggagtcaaagctaatttcaggcttctagactgaatagatagtgctgtcatcatgcttggatgtaagatgacraggtcagtttcagacaaggtaaaactatgacattttttaggagcagctgtccagcaggtagatgaagagacaattctgatgccatggagagagaggagtg

SEQ ID NO: 378475 - DNA, 201 bp, Homo sapiens
acgatcctcacgcaggtagtgagcatagcactcagtatgtggttttctggcccacactctcctccgtctccccttgtgtagtccccagtatctattgttgmcatctttgtgtccatgtatatgtaatgtttatctcacacctgtaagtgagaatatgcagtatttggttttccattcttgtgttaatttgcttaagataat

SEQ ID NO: 378476 - DNA, 201 bp, Homo sapiens
agacaggagaatcgcttgaacccaggaagcagaggttgcaatgagccgagatagtgccactatactcctgcctgggtgacagagcaaaactccgtctcaamaaaaaacaaaaaacacaggttgaatcaatgatttctttgcttaaaaatctttaatggtgtcctctttcattttcaataaaatctgtctttttatcatggc

SEQ ID NO: 378477 - DNA, 201 bp, Homo sapiens
acctaggttgattccatgttttgctattgtgaatagtgctgtgatgaacatgttagggcatgtgtctttttggtagaactctttgttttcttttggatacrcacccagtaatgagatgttgggtcgaatggtaattctacttgaagttctttgaggaaactccaaactgctttccacagtggctgaactagtttacattct

SEQ ID NO: 378478 - DNA, 201 bp, Homo sapiens
tttccttgatctcttttcaaaacatgtaattattgtttttctcattcctaggaattttttgatgtgtggccggttctgatgggtgaagttccaccttactstggtcccaggactccggatggaagagtacgttctctctgaccttttcagtatgatttaatatattcaaatgcaaggcacagtaaaccctgttaaaggatt

SEQ ID NO: 378479 - DNA, 201 bp, Homo sapiens
gctgggcccggtggccatgcctgtaatcccagccctttgggaggccaaggcaggtggatcacttgaggtcaggagttcgagaccagtctggccgacatggsgagtctccatctctactaaaaatacaaaaattagccaggcattgtggtgcgtgcctgtaatcccagctactcgggaggctgaggcaggagaattgcttga

SEQ ID NO: 378480 - DNA, 201 bp, Homo sapiens
ccacgggcttcctgtggtgggaggtccacaccaattgactttgacttttttcttcttctttttttttttttttagagacagggtcttgctctgttgctcaractgaagtgtggtggcatgatcatagctcactgtagcctcaacctcccaggctcaagtgatcctcctgcctcagcctcctaagtagctaggactacttca

SEQ ID NO: 378481 - DNA, 201 bp, Homo sapiens
cttgagcccagaccctgtggcctggcccttgcaccagaggcacatactctctcttctaggaattctcccgtttccacgaggagatcaccccaatgttggaygggatcaccaacaatcgcaaggagtggaaggcgcttgctgatgagtacgatgccaagatgaaggtgcaggaggagaagaagcagaaacagcagtcggcca

SEQ ID NO: 378482 - DNA, 201 bp, Homo sapiens
atctgtctttacaattttttttctttcttttttatttggtcaatagtctctcaacagaatcatattatctatctatctatctatcatctatctatctatghatctatctatctatctatcatctctcatcatctatcatcatctgtctgtctagtctacctacataccctccatgtacctttacctttcttagaattaaaa

SEQ ID NO: 378483 - DNA, 201 bp, Homo sapiens
gcccttgcaccagaggcacatactctctcttctaggaattctcccgtttccacgaggagatcaccccaatgttggacgggatcaccaacaatcgcaaggartggaaggcgcttgctgatgagtacgatgccaagatgaaggtgcaggaggagaagaagcagaaacagcagtcggccaagtcaggtttgtggaagggggaag

SEQ ID NO: 378484 - DNA, 201 bp, Homo sapiens
taactggggtgctctgacccacgggacacagtggctgatgcttgccactatcatcagtaatatttcttttttttcattgaggacatgagttttttgctggttttttttttttctttgagacaggtctcattctgtcacccaggctggagtacagaggcaccatcatagcttacagcagccttgacctcccaggcccaaatg

SEQ ID NO: 378485 - DNA, 201 bp, Homo sapiens
gctgaggcagagaattccttgaacccgggaggcagaggttgcagtgagccaagatcgcgccactgcactccagcctggtgacagagtgagactctgtctcaaaaaaaaaaaaaaaaaaaaattcaacagttcaattggtcatggttatagtctttgcttgggggcataatgacaattaggaacatatttcatttttaaatg

SEQ ID NO: 378486 - DNA, 201 bp, Homo sapiens
gggttgagcccaggagtttgaggctgcagtgagctatgtttgtgccactgcactccagcctggatgacagtgaggccctgtcttggaaagaaaaaaaaaagaaaagagcagcttgtgtgaggctcacagaatggaggacacactccaggaactaagagatttggattgcttggagaatgcaagatggtcaagggcaggagg

SEQ ID NO: 378487 - DNA, 201 bp, Homo sapiens
ttcacttcatgctgaaggacaggggcgccacaggaggcttctaagcaggtgaggcatgggctggtgtagaccggaggccctgcagtatcagcacggtggcrggaggcctgctactccgaagcagctcattccagtgttggacgtttccagctgtgccacccgcttgagcccagaccctgtggcctggcccttgcaccagag

SEQ ID NO: 378488 - DNA, 201 bp, Homo sapiens; identical to SEQ ID NO: 81955

SEQ ID NO: 378489 - DNA, 201 bp, Homo sapiens
tcactgcaacctctacctcccaggttcaagcaattcttccgcctcagcttcctgagtagctgggattacaggcacccagtgccatgcctggctaatttttrtattttagtagagatggcgtttcaccatgttggccaggctggtctcgaactcctgacctcaggtgatccacccgcctcggcctctcaaagtgttgggatt

SEQ ID NO: 378490 - DNA, 201 bp, Homo sapiens
aggactgcctggtgatgcccgaccaagagatcgtcttccctttggacatgggcatcgtgggccatgtcgcacactctaagaagattgctaacgtccccaayacagaggaggtactctcttccccatgagagagagggcatggggcattattacatggagttctggggtacaggtggggtgaggggcattggccaccaagac

SEQ ID NO: 378491 - DNA, 201 bp, Homo sapiens
tttcatttgggcttgtctgatatttcttcataattagatgcaggtcacacatttccggcaggagcagcacagaggtgatgtgtttttctttgtgctttacrtgcggaggcacaatggcagtctgtcccattactggaagtgtaaacactgatcacttggttaaacacttggctctttcttccaggatccactgttccctga

SEQ ID NO: 378492 - DNA, 201 bp, Homo sapiens
gcttcctgagtagctgggattacaggcacccagtgccatgcctggctaatttttgtattttagtagagatggcgtttcaccatgttggccaggctggtctygaactcctgacctcaggtgatccacccgcctcggcctctcaaagtgttgggattacaggcataagccaccgcgtccggacttggaaggaatttgaggccc

SEQ ID NO: 378493 - DNA, 201 bp, Homo sapiens
catttgggcttgtctgatatttcttcataattagatgcaggtcacacatttccggcaggagcagcacagaggtgatgtgtttttctttgtgctttacatgyggaggcacaatggcagtctgtcccattactggaagtgtaaacactgatcacttggttaaacacttggctctttcttccaggatccactgttccctgagat

SEQ ID NO: 378494 - DNA, 201 bp, Homo sapiens
cagtctgtcccattactggaagtgtaaacactgatcacttggttaaacacttggctctttcttccaggatccactgttccctgagattctcctggtggttytgacaaagacttctttgatcaccttgggcaaatcactccccctctctggatgttggtttttaaaggcagtaatgcagttctccacatagccctctgccca

SEQ ID NO: 378495 - DNA, 201 bp, Homo sapiens
attttcttccaatcttagccagcttcatcacacatacaattactttcacaagatttatcttccacaagccttctacaactttcttatccattcaacttttgtcctatactttttcctcttctcattttggagtaaccagttatcctacattaggacaaaagtttctcttttcacccttaacaaaataaaacatcctcatat

SEQ ID NO: 378496 - DNA, 201 bp, Homo sapiens
tagtagagatgaggtttcactatgttggccaggctggtctcagactcctgacctcaagtgctctgcccacctccgcctcccaaagtgctaggattacaggmgcgagccaccgcacccggcctagaaatgtccatttctaacctttctaaagactctcgtgggaatccctgggtaggacagcagccaggcccaggaagccct

SEQ ID NO: 378497 - DNA, 201 bp, Homo sapiens
gagcctgccaggagtacagtgagcagcacaggcccaaggacaggtggccctaaggcaagacaaagatgtcaagaaggtcctggaactctgcctcctccccytcgcaggcagaaacttatctcctaggaaataagtgttctagaaagcagccacctttgctttctagaactgcttatagggtacaacttgactatttaaaaa

SEQ ID NO: 378498 - DNA, 201 bp, Homo sapiens
gggagcattcttcccattggcctgggctgcctctgccatcatctggggtggccattggtaggtgggtgactttactgccagcatcaattctctcccatctsgcttctctttttttctttagagcctgaatatctttcaaaacctcaatcgtcgacagcatgagcatgccatccacatgatggacattgcaatcattgccac

SEQ ID NO: 378499 - DNA, 201 bp, Homo sapiens
tgaggcaggagaatcacttgaacctgggaggcggaggttgcagtgagccgagattgcaccactgcactctagcctggtcaacagagcaaaactcagtttcaaaaaaaaaaaaatcatcttctcaacatcccgatttcactcagaaaatatttactgagtatccttgtgtcccagaccttgtgctaggccagggccacccca

SEQ ID NO: 378500 - DNA, 201 bp, Homo sapiens
ccctcaagaaacaaagttgggaatagtttatgactttttattcctaacacaaaaacatttgacaagattttaaaaatacaaaatacagaaacaaaaaattraacaaaaaaaactatttggctattcggggatcatatcaaagatcatggccaggccccccacaaaatccttacacccaacttcttatcttgccttgagggc

SEQ ID NO: 378501 - DNA, 201 bp, Homo sapiens
gatatgatcttgctctgtcacacaggctggagtgcagtgctgagaacacacggctcactgcagccttgacctcctgggctcaagcgatcctcccacctcascctcccacatgttaggttttgaagggaaggcgagggttaaagaaagacacacacacacacacacacagaaagagggcggctcaagagcaaatgcaggctt

SEQ ID NO: 378502 - DNA, 201 bp, Homo sapiens
aagtgggtcaaaaggaaaggtcgaatcaagggtcaggtttacatctctgggtttcctttctctctgggattttggcccactaactccctgctgccttgccrgctatataagtccttcacataaacaaatgttcatacacatacacacagtccagatggtgtaatttttccagttggaggattggtctgaaacaaacgagtc

SEQ ID NO: 378503 - DNA, 201 bp, Homo sapiens
gggagcgcaaacacccagattttagtctttagtccagcaatccctgcactgagagtcaccgttttgtctttggccttcacaggaatccacctcctgaccaytgggctttagtaagcggtctcccagcttatgttgcccagaatggcctggtaagtaatataactttgaagggggagagttttggatcacgtggaagaaaga

SEQ ID NO: 378504 - DNA, 201 bp, Homo sapiens
gtaattaatttatcctttcccctattgctagacattaaaaattatttctaaatattcttataactaaatatatatatatatctatttctaaatattcttayaactaaatatatatatatctatttctaaatattcttataactaaagacaatgctggccatacaaccccttgtttgacaacttctcttctccttgggacaa

SEQ ID NO: 378505 - DNA, 201 bp, Homo sapiens
gaatccacctcctgaccattgggctttagtaagcggtctcccagcttatgttgcccagaatggcctggtaagtaatataactttgaagggggagagttttrgatcacgtggaagaaagagtggaaggatttcagatcaagaagagagtggaaaagatgatggcaagtgtggatctctaaaagcctaattctcttgtttctc

SEQ ID NO: 378506 - DNA, 201 bp, Homo sapiens
tcaggtagaaggtaacaaaggtactcttgatgactcagttttgactttccagaggctggtgaatttgtacatgaatatggctttaaagactttgactgagmtacagtgagtggaaaaagcctagttacccaaagcacactgatctttttgttaattctgggaaagaaaaactttgcagtttttctcctgtgggattccaaa

SEQ ID NO: 378507 - DNA, 201 bp, Homo sapiens
aaggtaacaaaggtactcttgatgactcagttttgactttccagaggctggtgaatttgtacatgaatatggctttaaagactttgactgagatacagtgwgtggaaaaagcctagttacccaaagcacactgatctttttgttaattctgggaaagaaaaactttgcagtttttctcctgtgggattccaaaaaaaatgt

SEQ ID NO: 378508 - DNA, 201 bp, Homo sapiens
agcacctcgtgtacttaggctaagtgaaagaccactagattttctggatttagaaagacctcctacaacccctcaaaatgaagaaatccgtgcagttggcmgactaaaaagagagcggtctacgagtgaaactgctgttcgccaaaatggacagctggtcagaaatgattctctttatggcatttcaaatacagatacaac

SEQ ID NO: 378509 - DNA, 201 bp, Homo sapiens
atggctttaaagactttgactgagatacagtgagtggaaaaagcctagttacccaaagcacactgatctttttgttaattctgggaaagaaaaactttgcwgtttttctcctgtgggattccaaaaaaaatgtccatttctttttttgagatggactgtcactctgttgcccaggctggagtgcagtggcatgatctcagc

SEQ ID NO: 378510 - DNA, 201 bp, Homo sapiens
tgtgtagagaaattgtggaaaacaaaataagaagtgttggggacaaattctagagagctattaatgccaggattaagaaaaagtgtttaatttactaggcracaggatgttgttgaggggtgggttaagggttagggacagacactgtcattcacactggtaaagccttggagacaaaatttggcattatttatcaaactc

SEQ ID NO: 378511 - DNA, 201 bp, Homo sapiens; identical to SEQ ID NO: 81960

SEQ ID NO: 378512 - DNA, 201 bp, Homo sapiens
cctctcctgtgcaggccatctcagtatgttttgcagacaagacccagagaagtccagactggacttgttgcagactgcaaaactgccattggaaggcctcygtcccagtccttctacagagtagccagtgggattcccagccatgggcgaggtgacagcagaggaggtggagaagttcctggactcgaatattggctttgc

SEQ ID NO: 378513 - DNA, 201 bp, Homo sapiens
cacaatgagacaaagtcacctactagtgggggtggagaaaggtgagagagatggaattaaccagtacatgaagtcttaaatggccctggactgatagaggktgtcctgtgtgcccagggccatgatgatgaccgcctgtgatctctcagccatcaccaaaccctgggaggtgcagagccaggtatgaactcctgctgaccc

SEQ ID NO: 378514 - DNA, 201 bp, Homo sapiens
agatatttgctgatggtaaaagtagccagaggatggatttcttcttctcacctgcctcccctcatgctgtttgatttttagattcttctcaagtacctcarttttgcaaatctaatcatgaaggtgtaccacctgagttacctgcacaactgtgaaactcgacgtggccaggtaaggggcttgggccaagggaatggactt

SEQ ID NO: 378515 - DNA, 201 bp, Homo sapiens
ccctgactgccctcctttgcacacccatccctcttcacccatggctcttacacatggaaaatgtcagggcctcagctctgctctgggcagcgtgggttgaytctaaatgggcagctgcaaatgtaggggccacttagagttttgtagtttatgctttgcacaactccggggagtgtcctgtacatcacagatgtgtatagc

SEQ ID NO: 378516 - DNA, 201 bp, Homo sapiens
tcttctgcaatactatcctgtcttaatttcagtatgtttataaaatatcatgatatctggtaatgaaaagacctctaagtttattattattatatgttagactttttcaccatggtttgtgtctcttatacttctttgtgtgtttttcatcatttcgttttttgtgctttagtttgaatatttcttcgatctatcttctat

SEQ ID NO: 378517 - DNA, 201 bp, Homo sapiens
atctgacaatgtacaaatacaagaaaacattttctcatttagaaggtaagacagagaaatcacaccagaaataaaatagggacgatgacaaccacaatatktaaaagcaaagaaggtttcctccttgcctcttacggataaagtatttatataaataaggacacaacccaacaaaatggaaaaaatatataaaaatcctct

SEQ ID NO: 378518 - DNA, 201 bp, Homo sapiens
aatctgacaatgtacaaatacaagaaaacattttctcatttagaaggtaagacagagaaatcacaccagaaataaaatagggacgatgacaaccacaatawgtaaaagcaaagaaggtttcctccttgcctcttacggataaagtatttatataaataaggacacaacccaacaaaatggaaaaaatatataaaaatcctc

SEQ ID NO: 378519 - DNA, 201 bp, Homo sapiens
tgacaacaattggctgaagccgagtggcaactgccccctttagatgagacagaggctgtctctagtttgtcatgttcacagctcccctggtctcccagacrttggtgccgagtactggttctcacttatcatcatcctcgtgctgctatttttcttagagaaatgttctgtttccgtgattctcctcacacctggtttgcc

SEQ ID NO: 378520 - DNA, 201 bp, Homo sapiens
cgttcctagatatcccctatccccacataggcaaaaacacattctctttttgtgaagttattacacataagaatggtactttctgtatgttagtgctttawgtacagtgtggtcacatccattcctttatcttagccttataagaactccgcaaggtgggcagcacacagcttatcaaacccattttatagctgagaaaac

SEQ ID NO: 378521 - DNA, 201 bp, Homo sapiens
taccttacagattatgagcaacctgaggacaagatctgtgccttggcttcctcagtttctagctcagtttcttgcacattctaaatgtctgatgaaccaayggatatatatatatatatatatatatatatatatacatatatatttttcgagatggagtctctgtctgttgcccaggctggagtgcagtggcacgatctc

SEQ ID NO: 378522 - DNA, 201 bp, Homo sapiens
taattgctggtttaccttacagattatgagcaacctgaggacaagatctgtgccttggcttcctcagtttctagctcagtttcttgcacattctaaatgtytgatgaaccaatggatatatatatatatatatatatatatatatatacatatatatttttcgagatggagtctctgtctgttgcccaggctggagtgcag

SEQ ID NO: 378523 - DNA, 201 bp, Homo sapiens
atgctggaaaggaccatagggaccaccttgcccagttgattaaggctggctacagacaccttctttagaaacctggggttggggagagggctcgtgttggyttcaacattagcagctgcctctggaagaagcagatgctccaagccaatgctaacaacatggcacaaggaggcgagggggtgggtgtgaattccagagcag

SEQ ID NO: 378524 - DNA, 201 bp, Homo sapiens
tcaactccctttaaactcctcgcactaaaaacagcacctcgtgtacttaggctaagtgaaagaccactagattttctggatttagaaagacctcctacaamccctcaaaatgaagaaatccgtgcagttggccgactaaaaagagagcggtctacgagtgaaactgctgttcgccaaaatggacagctggtcagaaatgat

SEQ ID NO: 378525 - DNA, 201 bp, Homo sapiens
gtccagcaggtagatgaagagacaattctgatgccatggagagagaggagtgttggaagcagagatttggaagatatcaggaccagatggtgtttgaaatyatgagtgtggaggaagccacttagggagagggagacaggcagtggacctagggtgcaataatggagggtgttggcatctacagagtgggtggagaaagag

SEQ ID NO: 378526 - DNA, 201 bp, Homo sapiens
attttacatatgttacttgagaatgacttttcacaattaaattttaattcaccagttaagtatgtttattatcctcaacttacagatgaggaaactgaagmtcagaagcattaataacacggctagtaagtggtagagcttgaatttgaatgcaggtctctatggctctaaagcccaggaccttgtgcatcaatggatgtt

SEQ ID NO: 378527 - DNA, 201 bp, Homo sapiens
ggctcatgcatgtaattccagcactttgggaggctgaggcgtgtggaccacttcagtccaggagttcaagaccagcttgggcaacatagtgagacccctakctctatgaaaaatacaaaaattagctgagcatggtagtgcacaccttcagtcccagctactcaggaggctgaggtgggaggatcgcttacgtccccgagg

SEQ ID NO: 378528 - DNA, 201 bp, Homo sapiens
ggtttgctgtgagtctagggtcatgggggacggcagagaaggtatgtgtgggaggcagtgggatatgatatgcagaattgcctgaacttgtttgattttgwttaaagcagtggttctcaaagtgttaccccagaccacatccacaccacctaagaacttatcagaaattcacattcttctttttctctctctctctctcct

SEQ ID NO: 378529 - DNA, 201 bp, Homo sapiens
tgtcctgtgtgcccagggccatgatgatgaccgcctgtgatctctcagccatcaccaaaccctgggaggtgcagagccaggtatgaactcctgctgacccmagaggaggggcatcccagtactgggggcatcaggtcatgaggcttggactctctcagcccagctccagaaccagctcacctgtgtcccatcctcctctac

SEQ ID NO: 378530 - DNA, 201 bp, Homo sapiens
gcagtggttctcaaagtgttaccccagaccacatccacaccacctaagaacttatcagaaattcacattcttctttttctctctctctctctcctctttcyctctctctctcacacacacagacacacacacacacacactcccagctctgataaatcagaaactgttttaacaagtcctccaagtgagtctcatgcacac

SEQ ID NO: 378531 - DNA, 201 bp, Homo sapiens
acagaggcaggatctaaccctgtttgatttcaaagcccaacccctggatgcaatgggggtgagccctttcctcacaatgagacaaagtcacctactagtgrgggtggagaaaggtgagagagatggaattaaccagtacatgaagtcttaaatggccctggactgatagagggtgtcctgtgtgcccagggccatgatgat

SEQ ID NO: 378532 - DNA, 201 bp, Homo sapiens
aaagtgttaccccagaccacatccacaccacctaagaacttatcagaaattcacattcttctttttctctctctctctctcctctttctctctctctctcrcacacacagacacacacacacacacactcccagctctgataaatcagaaactgttttaacaagtcctccaagtgagtctcatgcacacgcaagtttgaga

SEQ ID NO: 378533 - DNA, 201 bp, Homo sapiens
atatgttagactttttcaccatggtttgtgtctcttatacttctttgtgtgtttttcatcatttcgttttttgtgctttagtttgaatatttcttcgatcyatcttctattaattactaactctttttttttttttttttttgagacagagtctcattctgtcacccatgctggattgcagtggcatgatcttggctcact

SEQ ID NO: 378534 - DNA, 201 bp, Homo sapiens
ttatcatcatcctcgtgctgctatttttcttagagaaatgttctgtttccgtgattctcctcacacctggtttgccttctgcatgtgttgttatctgttgrccactgaaagcctttgagtttgcaactcttggtccaaattaggtcaaaggggaagcccactgcagcctcttgtcacctggtgtgttctttttcctgtttc

SEQ ID NO: 378535 - DNA, 201 bp, Homo sapiens
aattgctacaatcattttagaaaacagtttggcctcatctagtaaagttgaagatacaaatatcttatgacttagtacttcttctcctaggaatataccaygtagaactgagagcacatatgcaccaatgttgacagcagcactgtttatattagcccctaagtgaagggatgggggatgtccaccaacagttgaatggat

SEQ ID NO: 378536 - DNA, 201 bp, Homo sapiens
tgaataattcaaaactgtctcgactatgtctacctgatgaaaagaatgtgaatgccttggacaagaacatggtgtttctgaaaatggtatacagtgcttcrctgggcaccctctcaggcctaatcacaccttcattattccccttcactgctctcagatttgcaacatcatgaatgcgcctgcggaggacttttttgcatt

SEQ ID NO: 378537 - DNA, 201 bp, Homo sapiens
cagacactgactgacggctagagtcttggcacacattcaattgcacgggggaagaggctgggtgaattgggatggttgtagaaagtcttacataggtctcyactgaggagtatcagcctttaaaggggaaaagtcaatctagggcacaggtgagtgaaaacaatctgtactttccttagtcatttggaaagaaaaaaagtg

SEQ ID NO: 378538 - DNA, 201 bp, Homo sapiens
ctcagtgaataattcaaaactgtctcgactatgtctacctgatgaaaagaatgtgaatgccttggacaagaacatggtgtttctgaaaatggtatacagtrcttcactgggcaccctctcaggcctaatcacaccttcattattccccttcactgctctcagatttgcaacatcatgaatgcgcctgcggaggactttttt

SEQ ID NO: 378539 - DNA, 201 bp, Homo sapiens
ttcccacactgcagtgtaattgctggtttaccttacagattatgagcaacctgaggacaagatctgtgccttggcttcctcagtttctagctcagtttctwgcacattctaaatgtctgatgaaccaatggatatatatatatatatatatatatatatatatacatatatatttttcgagatggagtctctgtctgttgc

SEQ ID NO: 378540 - DNA, 201 bp, Homo sapiens
gagttttatgctcatgcaacatcttatgagtctgcattctaggatccatctgcccaaattgtctctgatgaagctttgaaaatattcagatatttgctgayggtaaaagtagccagaggatggatttcttcttctcacctgcctcccctcatgctgtttgatttttagattcttctcaagtacctcaattttgcaaatcta

SEQ ID NO: 378541 - DNA, 201 bp, Homo sapiens
tgtttttctttgtgctttacatgcggaggcacaatggcagtctgtcccattactggaagtgtaaacactgatcacttggttaaacacttggctctttcttmcaggatccactgttccctgagattctcctggtggttctgacaaagacttctttgatcaccttgggcaaatcactccccctctctggatgttggtttttaa

SEQ ID NO: 378542 - DNA, 201 bp, Homo sapiens
gcctcaacaaagtgaaaatatgacaggataaaattcctgtaccaatggaaatggggacagagttaactgggtaatttccaaggtcctattcagttttaacrttcacactctttgctttctggcctcaggatctatttttccccccacaagatatacaatatataatatacaatatataatacaacattatacaattataca

SEQ ID NO: 378543 - DNA, 201 bp, Homo sapiens
taactttttcaaagcttagaaatgattcaagagtggagcaaatcataaaaagtaatgtttataaggtgacttttctgtctagtagcctcagtgaataattsaaaactgtctcgactatgtctacctgatgaaaagaatgtgaatgccttggacaagaacatggtgtttctgaaaatggtatacagtgcttcactgggcacc

SEQ ID NO: 378544 - DNA, 201 bp, Homo sapiens
aataagaggaaaaaaattaatagtaaaactgacaaaatcaagaagaaatataacagttttattacaataaaatatgtattacaataaaataaatcaaaacyttctcacaaagacaacccagacccagatttttttcacaggtgaattctacttagtggtttatatttacttatttatattttttagagatggagtccccct

SEQ ID NO: 378545 - DNA, 201 bp, Homo sapiens
aggtataattttttggctgggtgcagtggctcacgcctgtaatcccagcacttcgggaggctgaggtgggcagatcatggggtcaggagttggaaccctgwctctgctaaaaatacaataattagccgggcatggtggtgcgtgcctgtagtcccatttactcgggaggctgaggcagaagaatagcttgaacgcaggaga

SEQ ID NO: 378546 - DNA, 201 bp, Homo sapiens
cgtcccagtccttctacagagtagccagtgggattcccagccatgggcgaggtgacagcagaggaggtggagaagttcctggactcgaatattggctttgccaaacagtactacaacctccactaccgggccaagctcatctccgacctccttggggccaaggaggctgccgtggacttcagcaactaccactccccgagc

SEQ ID NO: 378547 - DNA, 201 bp, Homo sapiens
tgctcctgagcatgcaggggtttctccttgcaaagcatgttccccatcactctgttctgatccttccagcagacccaggatggggacagggctggacaggrggtgggcacccagaaacacttcatgtttcctaatcacctgactctattccttatacagcaagcggagctgccagatgcagataaatacgaaattaataaa

SEQ ID NO: 378548 - DNA, 201 bp, Homo sapiens
tatcatcatcctcgtgctgctatttttcttagagaaatgttctgtttccgtgattctcctcacacctggtttgccttctgcatgtgttgttatctgttggmcactgaaagcctttgagtttgcaactcttggtccaaattaggtcaaaggggaagcccactgcagcctcttgtcacctggtgtgttctttttcctgtttca

SEQ ID NO: 378549 - DNA, 201 bp, Homo sapiens
ggaaggcatctgtctcctgcttgtccctgggaatggaatgtctcggtgtaaaacccaatcatatgttctatttactgagataggagaaaactgccttatgrctggaggtgggacatgctggtggcaatactgctctttactgcactgagatgcttgtgtaaagtcaaacataaacctggcctccgtgcacatcaaggcaca

SEQ ID NO: 378550 - DNA, 201 bp, Homo sapiens
ttgccttctgcatgtgttgttatctgttggccactgaaagcctttgagtttgcaactcttggtccaaattaggtcaaaggggaagcccactgcagcctctwgtcacctggtgtgttctttttcctgtttcattgcagcagccgcaggaaatcagccggggggaaaccccagcccagggggtgcaactacatccaagtcctg

SEQ ID NO: 378551 - DNA, 201 bp, Homo sapiens
cccgctgaacctctccccaccattaccctatagtcctgccacatccccctcacctagatagtagagatagtgatcaataaatactgagggaactcagagaccagtgctggcacgggtcctccatatgctgagtgccagtcccctgggcccactgctctttctctagactttgtctctgtgtcttatttctttcctcagtct

SEQ ID NO: 378552 - DNA, 201 bp, Homo sapiens
gcttttcaatgtccacaaggatgctgtcctcgaggactgcctggtgatgcccgaccaagagatcgtcttccctttggacatgggcatcgtgggccatgtcrcacactctaagaagattgctaacgtccccaacacagaggaggtactctcttccccatgagagagagggcatggggcattattacatggagttctggggta

SEQ ID NO: 378553 - DNA, 201 bp, Homo sapiens
tttcaaatacagatacaacaattgaaggaacatcagatgacctgactgttgtagatgcagcttcactaagacgacagataatcaaactaaatagacgtctrcaacttccggacgaggagaacaaagaacgtgctaaaagagaaatggtcgtgtattcaattactgtagctttctggctgcttaatagctggctctggtttt

SEQ ID NO: 378554 - DNA, 201 bp, Homo sapiens
gtctgtagagaattgatttagaaaaatgtctgtgaaagaaaaacaattattttgtcgtgtttctcaaacactgtaagcagttttgttaatagacatttttscatcaacacttcaacattaacactttcaaagtcatggtctgttgccagatttgagaaactcgaaccacctaatatttcataaccttcttcattaggtact

SEQ ID NO: 378555 - DNA, 201 bp, Homo sapiens
aatccctgggtaggacagcagccaggcccaggaagccctgagcctgccaggagtacagtgagcagcacaggcccaaggacaggtggccctaaggcaagacraagatgtcaagaaggtcctggaactctgcctcctccccctcgcaggcagaaacttatctcctaggaaataagtgttctagaaagcagccacctttgcttt

SEQ ID NO: 378556 - DNA, 201 bp, Homo sapiens
gaagtgggtgtgataggccatgctgattcagtttggtcaccagaccaaactgtaataatcccgtcacccagataaacaagttctcagggttgtctgttacyggtgaggatgagaagctgcctcaagtttctcaatttctaggttatctctattcctttattgctgcctgcataaggactgattaccttattctattctctt

SEQ ID NO: 378557 - DNA, 201 bp, Homo sapiens
ttttgtccaactgaagggatttactgcatgccaacttaatcttcaagaagtgggtgtgataggccatgctgattcagtttggtcaccagaccaaactgtartaatcccgtcacccagataaacaagttctcagggttgtctgttactggtgaggatgagaagctgcctcaagtttctcaatttctaggttatctctattcc

SEQ ID NO: 378558 - DNA, 201 bp, Homo sapiens
tttgagtagtataaatataccgtaattaatttatcctttcccctattgctagacattaaaaattatttctaaatattcttataactaaatatatatatatwtctatttctaaatattcttataactaaatatatatatatctatttctaaatattcttataactaaagacaatgctggccatacaaccccttgtttgacaa

SEQ ID NO: 378559 - DNA, 201 bp, Homo sapiens
tgtctggctctttacagaaagagtttgccaattcctggtctagtgttttacaagtgaggaaagtgaggcccagagagacaatgtgacttagctggcatcaygcaggcatttgtggagcatcaaggacttggactcagccacaccagcccttgcctgcacacccactgctttcttaggctcctccaaggccttccccggcag

SEQ ID NO: 378560 - DNA, 201 bp, Homo sapiens
cctgggctctgcatgggccgcccctgctcctctgtggagcttctcttaccaggtctcccacctgctccctgagctcccccaacctttaagctctttgtgcmgggcttccttctaccaggccctgcacactagatgatccttctgcctggaatgtgtttctcccactcccttctttagcaagtaaatggttacacatcctac

SEQ ID NO: 378561 - DNA, 201 bp, Homo sapiens
ctcatagcttattgcgaagataaaagtaagataacgcaggtaaaatgccatgcacgctgcctgctagcaactgtcgttgtacttcctaaagtctttacccrgcttcctcttagctgtaccctgggtttttattctgggcttaattgtcatcacctcaagaaagccttctctaaccctccttctccaggcaaagtcagtccc

SEQ ID NO: 378562 - DNA, 201 bp, Homo sapiens
tagtagtgggattgcacctgtgaatagacactgcactccagcctgggcaatatagcaagaaccgtaatgaagaggaaaaaatgaaaaaaggctgggtgtgrtggctcacacctgtaatcccagcactttgggaggctgaggtgggaagaccacttgagcccagaaatttgagaccaggctgggcaacacagggaggtccct

SEQ ID NO: 378563 - DNA, 201 bp, Homo sapiens
tgattaatccatactggacccacaatccagcagggcaaatttgattggagctgagtagcagctacctccttgggatgtggcctgagttctctagtttgccrcagtccccgccactttctctttttgagatggagttttgctcttgtcacccaggctggagtgcaatggcgtgatcttggctcactgcaacctctgcctccc

SEQ ID NO: 378564 - DNA, 201 bp, Homo sapiens
acacaagccccaacaaggacaaaaaggaggtctaaagctgcatcatgttccattaggtgtttccatgaatcttctcatccactttttagagagttgcttcyacctgtctgaacactgggaggcctgattgactataaaatccaagatttccctctaatgtataatcagctttaaattccctataactggtacccctctacc

SEQ ID NO: 378565 - DNA, 201 bp, Homo sapiens; identical to SEQ ID NO: 81961

SEQ ID NO: 378566 - DNA, 201 bp, Homo sapiens; identical to SEQ ID NO: 81963

SEQ ID NO: 378567 - DNA, 201 bp, Homo sapiens; identical to SEQ ID NO: 81966

SEQ ID NO: 378568 - DNA, 201 bp, Homo sapiens
caccagtctatcatttttgcatgacaacaattggctgaagccgagtggcaactgccccctttagatgagacagaggctgtctctagtttgtcatgttcacwgctcccctggtctcccagacgttggtgccgagtactggttctcacttatcatcatcctcgtgctgctatttttcttagagaaatgttctgtttccgtgat

SEQ ID NO: 378569 - DNA, 201 bp, Homo sapiens
taagtactacacttgtgtgtattacctagcatgtaagaaataagacaatttattgataagacaaattctaaggactaaacaaacccaatgaccaatgacaygtgaacctcttgtactttactgcattttcattttcaaaaggaattaatataatagtaatactcagcaccatataattaaatgcttatgtcagtagaatac

SEQ ID NO: 378570 - DNA, 201 bp, Homo sapiens
gtgagaggaggacttgaacccaggaggtcaacaccgcagtgagccatgtttgtgccactgcactccagcctgggtaacagaataagaccctaacttaattmaaaaaaaaaaaaaaagattgaggccaggcactgtggtacacacctgtagtgtcccagctacttgggaggctgaggtaggaggactgcttgagcccagaag

SEQ ID NO: 378571 - DNA, 201 bp, Homo sapiens
cttctgtgcaccttacacagggttagaataggcaggatgtatgagaaagagtactacttaatgcttatattcaaatagagtagataaaattaatactcacrtggaaccactaagtgataatctgtgtggcactgactgtaatcaccaggagtctgggaaaacaggatggcattactggagtggttaggaaaggtttcgctg

SEQ ID NO: 378572 - DNA, 201 bp, Homo sapiens
cagctcatttctgaattttggtatgtgtgttattttactgaagagttaaaaaaattacctaaattactcatttacagtataactgattcaactttaaatawgattttaggttgcatgtataggtccttatgtttatattcttttccatgcaatttatctttttatttttaaccttaactacctcttaacatctcacacaga

SEQ ID NO: 378573 - DNA, 201 bp, Homo sapiens
tgcttcggcctcccaaagtgctaggattacaggcgtaagccaccacacccagcctcaactttaatcttatgaatataagacacaagggcgtaaatgtgcargtttgttgcatgcatgccactgaataatcccatcacccaggtagtgagcataatacccaataggtggtttttcagcccttgcccctcttcccctcccatc

SEQ ID NO: 378574 - DNA, 201 bp, Homo sapiens
gtgtctactatgttccaggcattctgtaaggcacttggtatatgatggtgaacagaacagatatgggctctgcctttgtggaatgtaagtttggtgagggrttccaacattaaacaaacaacattaaacaaaatttggttgaccatattcacaaatatatacttaataacacatgataaatgctatgaaggaaaacaaaag

SEQ ID NO: 378575 - DNA, 201 bp, Homo sapiens
tttctctaacaccatctccagcctctcactagggaccatctagtcctacattttcatttactcacaggacacttaaaacacatttcttggctgagcgcagyggctcacgcctgtaatccccacactttgggaggctgaggcaggcggatcacttgaggtcaagagttcaagaccagcctggccaacgtggtaaaaccctgt

SEQ ID NO: 378576 - DNA, 201 bp, Homo sapiens
tgtgattatgccactgcactccagcctgggtaacacagtgagaccatctcaaaaaaaaaaaaaaaaggaagcggaggactaggtgagaacagggtattatytgtagtcaccccgtgtaatttctgttcccctttagggagtttatggacccaaggcttatattgccacccagggtcctttatctacaaccctcctggactt

SEQ ID NO: 378577 - DNA, 201 bp, Homo sapiens
ctcaggtctccttatgctctgcagctctgtcctgaacggagtcagaaccagaagataataaaagggttgaggtagaatgttttgccagtggaaaaggaaarctctttagagatagcttcttacctcatttctctaggaagattaatttttcttggaatcttattacagaagctgaaaaggcaatctaccaagtacaaggca

SEQ ID NO: 378578 - DNA, 201 bp, Homo sapiens
ttttagtcagaatcacaatgccattcttgtccaaggaaatgaaagttctcagccaggtgtactctgggaggccaagaggggtggatagcttgagcctaggsgttctagaccagcctgggcaacattgcaaaaccctgtctctacaaaaaatacaaaaattagctgggagtggtggtgtgtgcctgtagtcccagctactga

SEQ ID NO: 378579 - DNA, 201 bp, Homo sapiens
acttctgccttcaataaagatgatatactgatttttggatgttctcacactgaattaggcacttgggtagacttgtacccattgagaggttatgcaagctsaaatgtggaaagtttttctagaagagcctgcctttcagggccaaaatgccacaggcacagcataacttcctgaaacaaatttatttcctaagacattggt

SEQ ID NO: 378580 - DNA, 201 bp, Homo sapiens
agatcccgccactgcactccagcctgggcgacagagcgagactccgtctcaaaaaaaaaaaaaaaaaaaaaaaaaaaattagagactccaccataaaagtrgaggaaggaagtatggctaacagtttggaaggtggccttagtaaattgaatacagaatatgactggcaaaaattcttggctagaatggaaatggctgtgt

SEQ ID NO: 378581 - DNA, 201 bp, Homo sapiens
gctgggactacaggtgtgtgtcaccatgcccggctaattttttgtgtttttagtagagacaaggtttcactgtgttagccaggatggtctctcgatctccygacctcgtgatctgcccaccttggcctcccaaagtgattataggcgtgagccaccatgcctggcctttttttttttttttttttgagacagggcctcact

SEQ ID NO: 378582 - DNA, 201 bp, Homo sapiens
ccaggttggaagtgatcaaggaagatttagtgaaagaggaaacatttgagctgattcttgaaggatagttaaggcaaaaataaatgtttcatacttaagtwggaagcttgttcactgtagtcatttggtaggctatatcatgtttgctgtgataatatgttatagagaatgacaggtgtgcatattacttaagataaacct

SEQ ID NO: 378583 - DNA, 201 bp, Homo sapiens
aggtggattgcttgagcccaggagtttgagaccagcctgggcaacatggtgaaatcccttctctactgaaaatatgagaactatccaggtgtgatgcttgygcctgtggtcccagctttcaggaggtaaggctgaggtgggaggtgaggctgaggtggaagaatcacctgagcccagaaagttgaggctgcattgagctgt

SEQ ID NO: 378584 - DNA, 201 bp, Homo sapiens
atttttaaacatttaaatgtattttcttttcttataccttaaacttctctgagcatctgcatcattaaaaaacagagcgagactccgtctcaaaaaaaaaattaattaataaaaacatacccttattttcagggattgtaacaatatcgtcatgtgccatctggtggcagtttcttgtaataccatttaaaatgtttaata

SEQ ID NO: 378585 - DNA, 201 bp, Homo sapiens
aaaaagtagcaataatttattaacaaaatattgaaaggaatattttcccctttaatttgatagataattcctgagaacttcagtgttttcagtttgatccrggaaatgcggacacagaggccttcattagttcaaacgcaggtatgaactatagtgaatggatcagaacatgtgtctgagtcttgctccatctgtttaatg

SEQ ID NO: 378586 - DNA, 201 bp, Homo sapiens
aagaaaaacagatataaggatattttgccctgtaagttccatttctctctataaactcatactttctcccaaattcaatcattactatctctttgtacccmttgcttactgatcctgatcttggaacatggcattgacaacttagtttgtactatttatgactgcaaaagaatattcattcattcattcattcattcactc

SEQ ID NO: 378587 - DNA, 201 bp, Homo sapiens
cagctgttttagtagacatatgatttctgttagttcttgtgaaatactaaaaataggtcaaagatttctatttctactttttcagactcccaggaagtctrtaatttatatatcctttaatgtttgttttcccatctttggagattccaataatgtaggggttgaagcccaaaggggttagacgcacctaacctaaggtga

SEQ ID NO: 378588 - DNA, 201 bp, Homo sapiens
cagctctgtcctgaacggagtcagaaccagaagataataaaagggttgaggtagaatgttttgccagtggaaaaggaaagctctttagagatagcttcttmcctcatttctctaggaagattaatttttcttggaatcttattacagaagctgaaaaggcaatctaccaagtacaaggcagacaaaacctatcctacaact

SEQ ID NO: 378589 - DNA, 201 bp, Homo sapiens
agtaatctgcctgcttcggcctcccaaagtgctaggattacaggcgtaagccaccacacccagcctcaactttaatcttatgaatataagacacaagggcrtaaatgtgcaggtttgttgcatgcatgccactgaataatcccatcacccaggtagtgagcataatacccaataggtggtttttcagcccttgcccctctt

SEQ ID NO: 378590 - DNA, 201 bp, Homo sapiens
gctcagatataacaccaatttaccattacgtgctctagagtccattgccattttctctaactctgaatatcccaatatttttcctgtatcccttgtcctgrgtcaaattcctttcattccttattttactgtctgttcagaaaatattaagataccaatgtaatattacttacttccttacaaaggatgttgtaaaagtat

SEQ ID NO: 378591 - DNA, 201 bp, Homo sapiens
gggggtctcaggagaagcgggggcggccgagccaggagccccctctcgctccccctcaccggcggcgtcgcagccgccaacatcctgggccgctgccgccracgaatgcagccccaactgtcccaggccctgttgagcctcttctcctgccgcctccgccgccaccttcgctggcacccgccgggcccgctgtcgctgccc

SEQ ID NO: 378592 - DNA, 201 bp, Homo sapiens
agagtctcgctctgtcacccagtctggagtgtggagtgtgcagtggtgcaatcttggcttactgcaacctgagcctcctgggtccaagcaactcttgtgcygtggcctccccagtagctgggactacaggtgctcaccaccttgcctggctaacttttgtatttttagtagagacagggtttccccatgttggccaggttg

SEQ ID NO: 378593 - DNA, 201 bp, Homo sapiens
aggcccaaagcaagaaaattactaaagaggagtttgccaatgaatttctggtgagtcctgtatgtgaccctctcagggtagttacatacactatttaactractatgggggtccaattttccgagaccaaattgctcttgggataaagtaaatatgagaccttggcggggaagacagaaaaaaaaaagtttgacttctctg

SEQ ID NO: 378594 - DNA, 201 bp, Homo sapiens; identical to SEQ ID NO: 81976

SEQ ID NO: 378595 - DNA, 201 bp, Homo sapiens
ggtccccagacaagaagcatcagcatcacctgagaacttgttagaaatgcaatatatattgggctaagatatgttattaaaattaatttcacctcttttcrgttttgaatgtgtctatttgaaaatttaggccgggcacagtggctcacgcctgtaatcccagcactttgggaggccgaggcaggtggatcacgaggtcag

SEQ ID NO: 378596 - DNA, 201 bp, Homo sapiens; identical to SEQ ID NO: 81978

SEQ ID NO: 378597 - DNA, 201 bp, Homo sapiens
gataatctacagtaataaaagttatgtgaggccaaggaaggtggattgcttgagcccaggagtttgagaccagcctgggcaacatggtgaaatcccttctytactgaaaatatgagaactatccaggtgtgatgcttgcgcctgtggtcccagctttcaggaggtaaggctgaggtgggaggtgaggctgaggtggaagaa

SEQ ID NO: 378598 - DNA, 201 bp, Homo sapiens
atatctattccatggaagagcacatttctgttaggtgttaggaaaacagaaatgtcataaaggataactatttgcccttgaaaatagtatagttaatctgytggaacagaacacctttgagaaacatgaaaattatcaagaagaataaaatgcctgaagcagattaaaaacatacatgctgaagaaatgtggagtaaagaa

SEQ ID NO: 378599 - DNA, 201 bp, Homo sapiens
ttcaacctgtgagggagaaagcttatgtgaaatgaaagcattagctggtttaatgctgtcagacttgaaagaaggctgatccatgtaaatgcataaagatkccagaagtatggaacctagttatataaatagcaatactaatttaataaaactataccccatttcaaaaacgaatttcatttcaggcctacttttaagagt

SEQ ID NO: 378600 - DNA, 201 bp, Homo sapiens
ataaaatgaagtgtgaattaactagattacttctcaggtcctttcaatgttttatgtattatttgctgagcaacatttgatgtctaaaagaatactattcytaagaaccgaactatattcactttcttccaggagaattctcaccaaatgttcccaaatccttatcctcagctgtgaaggtaaaaattggaacatcactgg

SEQ ID NO: 378601 - DNA, 201 bp, Homo sapiens
tttaaagagtcaagcaaagcattgtattcctgagaaaaatcacactctccaagcagactcttattctcctaatttaccaaaaaggtgagtacaattttatwtatctaaatgttgactaattgtgtctgggagatgaatctcatgcttatacatcattgtgatgctaggaagcggcctgtttggggtatggtgtcatcatta

SEQ ID NO: 378602 - DNA, 201 bp, Homo sapiens
agtagctgggattacaggcatgcgccaccatgcctggctaattttgtatttttagtagagacggggtttctccatgttggtcaggctggtctcaaactccygacctcaggtgatccacccgcctcagcctcccaaagtgctgggattacaggcatgagccaccgcacccagcctcaacttcattcttttgcatgtgtatat

SEQ ID NO: 378603 - DNA, 201 bp, Homo sapiens
gggccgagatcacacgactgcactccagcctgggtaacagagtgagactctgtctcaaaaaaaaaaaaaattacaatcacactctatttatgtatcacaaycttttaacctaccccagaatacccatacttgttcactccattaggaatgctcttcccttctcctagcccaaatctctcactgcctacaatattaatttca

SEQ ID NO: 378604 - DNA, 201 bp, Homo sapiens
atttttagtggagatggggtttcaccatgctggccaggctggtcttgaactcctgatttcgtgatctgcctgcctcggcctcccaaagtgctgggattacrggcgtgagccaccatgcccagccctgatttttctttcttaaagaaattagccagatgtggtggctcacccctataatctccgcactttgggaggctgagg

SEQ ID NO: 378605 - DNA, 201 bp, Homo sapiens
agtcttctgcctcagcctcccgagtaggtgggactccaggcacgcatcaccatgcccagctaattttttttgtatttttagtggagatggggtttcaccaygctggccaggctggtcttgaactcctgatttcgtgatctgcctgcctcggcctcccaaagtgctgggattacaggcgtgagccaccatgcccagccctga

SEQ ID NO: 378606 - DNA, 201 bp, Homo sapiens
cctccaccaatttttttttatcatcaccattaacaaatttgaatgtgcttttttttcttgaatcttctttccccttccctactctccttctcttccagttctggcatagttttctaggttggtaattttttcttttttaaattgagatggagtcttgctctgtcacccaggctggagtgcagtggcacgatctcagctcac

SEQ ID NO: 378607 - DNA, 201 bp, Homo sapiens
tcaccatattgcccaggttggtctcgaactcctgggctcaagtgatcctcctgccttggcctcccaaagtgctgggattacaggcataagccactgcaccyggccaatgtttggtactttctacccatcctaagatgctgtcatacaattggattatttaaaatttccagcagtctaacctcagatgtattttctttgaaa

SEQ ID NO: 378608 - DNA, 201 bp, Homo sapiens
acctcaagggatccactcaccttggcctcccaaagtgctgggattacaggcgtgagccactgtgcgcagcctttttttccaatttgaatgcttttttttttcttgcctaagaacaaaattaattaaaaaaattactttggctagaactttagtactatgttgaatagaagtggtaaaagttggcattcttgtcttgttttt

SEQ ID NO: 378609 - DNA, 201 bp, Homo sapiens
aaagaaacaagatataaagagaaccaaatggaaattttagaacttaaaaatacagtaactgaagcaaaatagatgggttcaacagcagaatagagggtacrgaaaaaagaattaatgaattgaaaagtagaacaatagaaattgcccagtctgagcaacagtgataaaatagactgaaaaaaaataaacagagctgcaggg

SEQ ID NO: 378610 - DNA, 201 bp, Homo sapiens
ccaggaggcagaggctgcagtgagccgagatcgcaccactgcactctagcctgggtgacagagtaagactctgtccccctccaccaaaaaaaaaaaaaaaagagttgtttacatgttgttgagttttaggagttctctatgtattctggatattgatcccttatcagatatgtgatttgcaaataccgtcttccattcagt

SEQ ID NO: 378611 - DNA, 201 bp, Homo sapiens
ttcccctttaatttgatagataattcctgagaacttcagtgttttcagtttgatccgggaaatgcggacacagaggccttcattagttcaaacgcaggtakgaactatagtgaatggatcagaacatgtgtctgagtcttgctccatctgtttaatggtgaggcatccaaaaacagctgactgctcagatataacaccaat

SEQ ID NO: 378612 - DNA, 201 bp, Homo sapiens
aaaacacactataggtaaatcaaaatggaattctaaaaaatgcaggaaagagaaagcatcaggaaaaagaaaagagcaatgagaaacagaaagaataaagrgaaaacaaaaaataaaatagcagaatgaaacttgaccatattaataattacattaaacatataagcctaaatacaccaatatttactggtggtagagtga

SEQ ID NO: 378613 - DNA, 201 bp, Homo sapiens
gactaaaagcatgagccatggtgcccagattttgctcattttttaattgaggctgtatgcggtggctcacgcctgtaatcccagcactttgggaggccgargcgggcagatcacttgaggtcaggagtttgagatcagcctggccaacatggtgaaatcccgtctctcctacaaagacaaaaattagccgggtgtggtggc

SEQ ID NO: 378614 - DNA, 201 bp, Homo sapiens
taaatatacaaaaattagccaggtgtggtggtgggcacctgtaatcccagttacgtgggaggctgaggaaggagaatcacttgaacccgaacctggtaggyggaggttgcagtgagctgagatagcatcactgcactccagcctggccaacaaagcgagactctgtctcaaaaaaaaaaaaaacaaaaacaaaaacaaaac

SEQ ID NO: 378615 - DNA, 201 bp, Homo sapiens
ccattaaacaataactccctattctcccctcccactggcccctggcaaccatccttctactttctgtctctatgaatttgactactgtaggtacctgataygggtggaatcatatagtatttgtccttttgtgtctggcttatttcacttagcgtaatgtcctcaaggttcatccatgttgtaacgtgtcacaattttctt

SEQ ID NO: 378616 - DNA, 201 bp, Homo sapiens
caaaacaataaaaagaatgaaaatataaaaaaataaaaaaggtaaaaacatgcttaaatcaaattaaaaaatacaaagcctcatcaaaaaaaaaaaaaaaagagtctcagcaaagaaacaagatataaagagaaccaaatggaaattttagaacttaaaaatacagtaactgaagcaaaatagatgggttcaacagcagaa

SEQ ID NO: 378617 - DNA, 201 bp, Homo sapiens
ggaaatctgattatataatcaggactctaaaagttaagttcaatagtgtaagtataaaataagaatgataaactcaaaagcctatagagatcaggcaagtwaatatagatgtgtgtagctcaggctgggcataagacaatgggaagtggtagggtctttgatgtcatgaatgagtcttcatattcaagagaactttgagcc

SEQ ID NO: 378618 - DNA, 201 bp, Homo sapiens
ctttggattgttctaattaacaattgttacaatatttttgacattttggatagcaactgctccaaggatagatgatgaaatcccccctccacttcctgtayggacacctgaatcatttattgtggttgaggaagctggtgagtacagttcagtaagtataaaataaagtgtgggatgggcatggtggctcatgcctttaat

SEQ ID NO: 378619 - DNA, 201 bp, Homo sapiens
tgtgctattgattatacatggatgttgctaaaagatggggtgagtttctctcagcaggcacttcccatttgcttagtctactgctttcatacttagtaatkgtttggtttttcaaaacatctatcttcatgattcatcttttctagaaaatgtacttgtagacccactctgtcagatgattaaattagttcccaggtaggt

SEQ ID NO: 378620 - DNA, 201 bp, Homo sapiens
tctactgctttcatacttagtaattgtttggtttttcaaaacatctatcttcatgattcatcttttctagaaaatgtacttgtagacccactctgtcagaygattaaattagttcccaggtaggtgggtcttaaagggtggtccccagacaagaagcatcagcatcacctgagaacttgttagaaatgcaatatatattgg

SEQ ID NO: 378621 - DNA, 201 bp, Homo sapiens
atatatatatatatatttattaaatataaaggattcattgaatcctaacagaaagaagatacctagttctgaaggccaggtttaggtgctaacggtttaawctatactagaaatcagactggtactattgcaacttctggagattcattagaagaccagagacatatcaaagatctggctacatcttggttctataaagga

SEQ ID NO: 378622 - DNA, 201 bp, Homo sapiens
tagccaggcatggtggcatgtgcctgtaatcccagctactcaggaggctgaggcaggagaattgcttgaacccgggaggcggaggttgcagtgagctgagwttgagccactgtactccagcctgggtgacagagagagactccgtctcaaaaaaataaaaataaaaataaaatacataaaggaaaagaaggaaatttttgg

SEQ ID NO: 378623 - DNA, 201 bp, Homo sapiens
attaatttcacctcttttcagttttgaatgtgtctatttgaaaatttaggccgggcacagtggctcacgcctgtaatcccagcactttgggaggccgaggsaggtggatcacgaggtcaggagatcgagaccatcttggctaacatggtgaaaccctgtctctactaaaaatacaaaaaaattagccgggcatggtggtgg

SEQ ID NO: 378624 - DNA, 201 bp, Homo sapiens
ggttctagaccagcctgggcaacattgcaaaaccctgtctctacaaaaaatacaaaaattagctgggagtggtggtgtgtgcctgtagtcccagctactgrggaagctgatatgggagaatcgcttgagcccatgaggttgagactgcagtaagctgagattgtgccacagcactccagcctgggtgacagaatgagaccc

SEQ ID NO: 378625 - DNA, 201 bp, Homo sapiens
tgagcccagaaagttgaggctgcattgagctgtggtcaagccactgcactccagcctgggtgacagagtgaaactttatctcaaaaaaaaaaaaaaaaaaagtgactgcttttggaactgaaatctttgaaattttgctagatatagagaaattttattcagcttaagctccacttccacttagaaaaaaaagcgatctga

SEQ ID NO: 378626 - DNA, 201 bp, Homo sapiens
aaattaggcacaataagagattagcaataatagctagtaatacaatagaacaattatgataatctacagtaataaaagttatgtgaggccaaggaaggtgsattgcttgagcccaggagtttgagaccagcctgggcaacatggtgaaatcccttctctactgaaaatatgagaactatccaggtgtgatgcttgcgcctg

SEQ ID NO: 378627 - DNA, 201 bp, Homo sapiens
ggtttctcacacattccaccctatttcagggcccacgagggatgttgagctctctcttcactttattctcttttttatttttatttttattttttttgagrcggagtctcacactgtcacccaggctggagtgcagtggtgtgatctcagcttactgcaatctctgccttccaggttcaagcgattctccttgccttagcc

SEQ ID NO: 378628 - DNA, 201 bp, Homo sapiens
tgagccatggtgcccagattttgctcattttttaattgaggctgtatgcggtggctcacgcctgtaatcccagcactttgggaggccgaggcgggcagatyacttgaggtcaggagtttgagatcagcctggccaacatggtgaaatcccgtctctcctacaaagacaaaaattagccgggtgtggtggcgtgtgcctgta

SEQ ID NO: 378629 - DNA, 201 bp, Homo sapiens
gagtagctgggattgcaggcaaagttgcagtgagccgagatcgcgccactgcactctagcctggatgacagagtgagatcccatgtcaaaaaaaaatatatatatatatatatatatttattaaatataaaggattcattgaatcctaacagaaagaagatacctagttctgaaggccaggtttaggtgctaacggtttaa

SEQ ID NO: 378630 - DNA, 201 bp, Homo sapiens
cacttgtagatcactttgaatgtctatttatttatatcttatttaatttctttcagcaaagctttgtagttttcagtatacaagtcttttgcctccttggktaaatctattcctaagtattttattctttttgatgccattataaatataactgtttccttaatgttcttttcagattgttcattgctaatgtatagaaat

SEQ ID NO: 378631 - DNA, 201 bp, Homo sapiens
ccgagtagctgggattgcaggcaaagttgcagtgagccgagatcgcgccactgcactctagcctggatgacagagtgagatcccatgtcaaaaaaaaatatatatatatatatatatatttattaaatataaaggattcattgaatcctaacagaaagaagatacctagttctgaaggccaggtttaggtgctaacggttt

SEQ ID NO: 378632 - DNA, 201 bp, Homo sapiens
tcccagcattttgggagctcgaggcaggcagatcacctgaggtcaggagttcaagaccagcctggccaacatggtgaaccccatctccaaaaaaaaaaaaatttagccaggagtggtggggcatacctgtagtcccagctactccagaggctgaggcaggaggattgcttgaacctgggaggtggaggtcgcagtgagctg

SEQ ID NO: 378633 - DNA, 201 bp, Homo sapiens
tcccgagtagctgggattgcaggcaaagttgcagtgagccgagatcgcgccactgcactctagcctggatgacagagtgagatcccatgtcaaaaaaaaatatatatatatatatatatatttattaaatataaaggattcattgaatcctaacagaaagaagatacctagttctgaaggccaggtttaggtgctaacggt

SEQ ID NO: 378634 - DNA, 201 bp, Homo sapiens
tattaatcagggggaatagtaagtgtaaaagccttgacttggaaataagtttggcatgctaaagtaatggcaagaaaaccagtatacctagagcatagtgrggaggaaaagagtagaacaagatgaaataggtccagagacctaataagtacctgtaaagggctgagatgctgaaatttctaaaggcagagtgtttttgag

SEQ ID NO: 378635 - DNA, 201 bp, Homo sapiens
cccccacctcctctcccagaaagaactctagagtccttctttcttgccgatgaagattgtaagtggtagcactttctctcaaaaaaatcataaaaatgaamatgttaaaagattaacaataaagtaggacctaaatggaaaggtacaaaaatgattacacaaaagaatacattttaaaagcccctaatatatagtcaaaat

SEQ ID NO: 378636 - DNA, 201 bp, Homo sapiens
gagattacaggtgtgagccaccatgcccgactaataattctttagatctcaatttggtggtcaattcttcaaagaaagctttcttttcttttcttcttttytttttttttttttctggagacagggtcttgctctgtcacccaggctggagtgccgtggcttgatcatagctcactgcagacttgacttcctggactcaag

SEQ ID NO: 378637 - DNA, 201 bp, Homo sapiens
ctcccatctggctactttttataggaaactcgaactatctaccagtttcattacaagaattggccagaccatgatgtaccttcatctatagaccctattcktgagctcatctgggatgtacgttgttaccaagaggatgacagtgttcccatatgcattcactgcaggtatgacactatatataaaccttctacccaaaat

SEQ ID NO: 378638 - DNA, 201 bp, Homo sapiens
tttctaaaggcagagtgtttttgagactaaagttacccaccaaagaacatttttaaaactcccacatttgaaaagatgatgatatacacaaatcctttctrgtttctataatactattaatcctttattctggccatctcagtatatgaacgagttcttgctgagttcaatattttggaagctaatctaactctttcatga

SEQ ID NO: 378639 - DNA, 201 bp, Homo sapiens
gcatgtgtagtcccaactatttggatggtggaggtgagaggatcacttgagcccaggagttgggggctgcagtaagccatgattgtgccactgcactccaktctgggtgacagagcaagaccctgtctcaaaaaataaaatgaagtgtgaattaactagattacttctcaggtcctttcaatgttttatgtattatttgct

SEQ ID NO: 378640 - DNA, 201 bp, Homo sapiens
ttgcttgagcctgcgaggtggaggttgcagagggccgagatcacacgactgcactccagcctgggtaacagagtgagactctgtctcaaaaaaaaaaaaaattacaatcacactctatttatgtatcacaatcttttaacctaccccagaatacccatacttgttcactccattaggaatgctcttcccttctcctagccc

SEQ ID NO: 378641 - DNA, 201 bp, Homo sapiens
tgattgtgccactgcactccagtctgggtgacagagcaagaccctgtctcaaaaaataaaatgaagtgtgaattaactagattacttctcaggtcctttcratgttttatgtattatttgctgagcaacatttgatgtctaaaagaatactattcctaagaaccgaactatattcactttcttccaggagaattctcacca

SEQ ID NO: 378642 - DNA, 201 bp, Homo sapiens
acttgaacctgggaggtggaggttgcagtgagccaagatcatgccattgtactccagcttgggcaacaaaagtgaaagtcctcaaaaaaaaaaaaaaaaaagaaagaaaaagaaaatttaaaatcacatatgtggctcacattatattttactggatatcactgttctactgttgccattctgagttgacaattctaatca

SEQ ID NO: 378643 - DNA, 201 bp, Homo sapiens
gcactttgggaggccaaagctggcggatcacgaggtcaagagatcgagaccatcctggccaacatggtgaaaccctgtctctactaaaaattagctgggcstggtggcgggtgcctgtagtcccagctactggggaggctgaggcaggagaatcgcttgaacctgggaggtggaggttgcagtgagctgagattgcgccac

SEQ ID NO: 378644 - DNA, 201 bp, Homo sapiens
agtgagctgagattgagccactgtactccagcctgggtgacagagagagactccgtctcaaaaaaataaaaataaaaataaaatacataaaggaaaagaargaaatttttggccgggcatggtggctcacacggtaatcccagcactttgggaggccgaggcaggctgatcacctaaagttgggagttcgagaccagcctg

SEQ ID NO: 378645 - DNA, 201 bp, Homo sapiens
acttggttcatttgcccatccctgaaccaattatagtcaatgttctgattaggcaggatagtgtcatgccctaatatttaacacttattacatgtggacaytgtccaatcaggaatgaggtcagacctatacatctggtgtgaccatgccaatataccaactgaaaatcagccctagttataggtcatttccttaatctaa

SEQ ID NO: 378646 - DNA, 201 bp, Homo sapiens
tgtatcttaattagatctgattgaaattcagtatgtagtctagtgattcatactcaggtacctcctcgaaaaggaaggtgtttctagaatcctagtattaygtatgcatgtgcaaatatgcatacctaatatgcatatgcagttcacacagtgcattctgaaaatgttgaaaacaacacaaaaacacttaatatcttccca

SEQ ID NO: 378647 - DNA, 201 bp, Homo sapiens
tggtctctcgatctcccgacctcgtgatctgcccaccttggcctcccaaagtgattataggcgtgagccaccatgcctggcctttttttttttttttttttgagacagggcctcacttggtcatctaggctggagtgcagtagtgtgatcatggcttactgcagcctcaacctctagggttcccatctcagcctcccaaag

SEQ ID NO: 378648 - DNA, 201 bp, Homo sapiens
aaaatgaggaagggtcacaggaagatgataatgggaacgcgccgccagactctgaaagccattaacattgtttcggccgttagggcggttggcggcaactyaccgcccagcggcggttgcgtcgcagccagaagcgtgacttcgcgcacgctccctttccactcctccactcagagccggggacgcggcgggggcgcggcg

SEQ ID NO: 378649 - DNA, 201 bp, Homo sapiens
tttctctaggaagattaatttttcttggaatcttattacagaagctgaaaaggcaatctaccaagtacaaggcagacaaaacctatcctacaactgtggcygagaagcccaagaatatcaagaaaaacagatataaggatattttgccctgtaagttccatttctctctataaactcatactttctcccaaattcaatcat

SEQ ID NO: 378650 - DNA, 201 bp, Homo sapiens
gtttatggacccaaggcttatattgccacccagggtcctttatctacaaccctcctggacttctggaggatgatttgggaatatagtgtccttgtaagtayggtgttgcttttgttactttattctctactttattaaaaacagtgcttttaaaaaattggtcagtggaacttcagggttcaggcatcttttagtcagaat

SEQ ID NO: 378651 - DNA, 201 bp, Homo sapiens
cttccggcatgttcatctctggacgaagaacggccgacaagtggagggcggaggagagactccaatgcccagcgggcagtgcgcgggcggcgcttgcgcgmtgcgcggacgggggggcggtcgggccatttaaatgtgtgtttgtgggtgaaatggctgcgcaggtcggagcggtgcgcgtagtacgggcggtggcggcgc

SEQ ID NO: 378652 - DNA, 201 bp, Homo sapiens
taatgaattgaaaagtagaacaatagaaattgcccagtctgagcaacagtgataaaatagactgaaaaaaaataaacagagctgcagggaactaagggacmaaaaaaaaaaaaaaaaaaatctagcattgggtcatcaaaactccagaaagaaaatagaaagggcagggctgaaaaagtactggaagatacatcataatta

SEQ ID NO: 378653 - DNA, 201 bp, Homo sapiens
aatatatatatatatatatatatttattaaatataaaggattcattgaatcctaacagaaagaagatacctagttctgaaggccaggtttaggtgctaacrgtttaatctatactagaaatcagactggtactattgcaacttctggagattcattagaagaccagagacatatcaaagatctggctacatcttggttcta

SEQ ID NO: 378654 - DNA, 201 bp, Homo sapiens
tgggaggccaaggcaggcagatcacgaggtcaggagtttgagaccagcctggccaacatggtgaaaccccatctctactaaaaatacaaaaaatttacccrggcgtgttggcatgcacctgtagtcccaggtcctcgggaggctgaggcaggagaatcgcttgaacctgggaggcggtggttgtggtgagccgagattgtg

SEQ ID NO: 378655 - DNA, 201 bp, Homo sapiens
gagctagtttgctatcactgccattatagctgatctctgacaccaactcatgatggctgaagtatagttggaaaacataccttttctcctaaaaagagtcraaagagaatttaaacatttcaaatggaaattatggtaggaaacaggggaaataaaacagccaagtgcaaagaaatgagtgacttaaatggttaaccaaag

SEQ ID NO: 378656 - DNA, 201 bp, Homo sapiens
tgccatgcttcctctgccatagggccttgcacacatgttgttacctccgccttgaacattcctcacactcctctttacctagataacatttggtaattttktttttttttttttgagacggagtctcgctctgtcacccaggctggagtgcagtggcacgatctctgctcactgcaacctctgcctcctgggttcaagtta

SEQ ID NO: 378657 - DNA, 201 bp, Homo sapiens
cacctcctctcccagaaagaactctagagtccttctttcttgccgatgaagattgtaagtggtagcactttctctcaaaaaaatcataaaaatgaaaatgytaaaagattaacaataaagtaggacctaaatggaaaggtacaaaaatgattacacaaaagaatacattttaaaagcccctaatatatagtcaaaataatg

SEQ ID NO: 378658 - DNA, 201 bp, Homo sapiens
attatctgtatagtcatcttccccactaggataaaggattgctgaatgatacaatttgttgtatacttctgtaacacccctcctcttcattatctggcatrtacatcgatattaaaaatattcattaaatgaatgaatagctgattgactcagatgagacttcaagtttgattatatttgaaaaggatgctaagctttaag

SEQ ID NO: 378659 - DNA, 201 bp, Homo sapiens
ctgaaattctcctcaattaatgtttattgtaatctaattcctgacctctgtgatactgatatttccccttaaactagcatactcccctcttcttggaacasgtgacatggtgaccagcactcttctctgttgtgttcttccttctgaccaagcactacagccacatgaggcagcagtgagatgtggccttgtcactcctct

SEQ ID NO: 378660 - DNA, 201 bp, Homo sapiens
agggtcctacattctattattaccattattaaatttgtaagtgctcttcaaatttaaagtgttattagtattctgttatcatttaagctttagattactayaatccctttataatctattactaaactggtcaagatgctgcctaacatttaaaaaaagaccatgtatttgcatatattataatatactctaaaatccaag

SEQ ID NO: 378661 - DNA, 201 bp, Homo sapiens
ccatttattgagcacttagtatgtaccaagttcagttctaagcactaaaaatacagcggtgaacaaaaagaaccaaaacctttgcctcctggagctaacaytctggtaccggatagcagatgtgaaaacactctgaaagtcttgagtaattagatattattgagtgattagatattatgataggaactccgatgtcagctc

SEQ ID NO: 378662 - DNA, 201 bp, Homo sapiens; identical to SEQ ID NO: 81977

SEQ ID NO: 378663 - DNA, 201 bp, Homo sapiens
gcctacttactatgtactaggcaatctgctaagtgctttgccgtacgtgatctcgtttaatcgttacaactaccccaagaggaaaatattatgttcattttacccatgaaatggaaaagcccggatttgaaaccagtctgttttttttcaaagcctcttaacctctgtacttaaactgtatcaggtaaaaatcatgacttt

SEQ ID NO: 378664 - DNA, 201 bp, Homo sapiens; identical to SEQ ID NO: 81979

SEQ ID NO: 378665 - DNA, 201 bp, Homo sapiens
gcccaggagttggaggccagcctggtcaacagagcgagaccttgtctcttttttttaagagtcagggtctagatctgtcacccaggccagagtgcagtggygcgaccactcctcccaccttagcctcacgagtacctgggactacaggcgcgtgtcacgacacccagataatttaaaaaatacttttgtagggacagaggc

SEQ ID NO: 378666 - DNA, 201 bp, Homo sapiens
tagtgtgagggagagcatcagcaagagagagagagtgaaagtgagagagatcatcagtgagagagagagaaagagagaaagagagcatgcacaagtgcacrgcacagagcagagacagagtaaaaggcagtatgaggccaacatgcctcatttatatttctcatatatagcctttttaaaaaaaaaccatttgtatctgtt

SEQ ID NO: 378667 - DNA, 201 bp, Homo sapiens; identical to SEQ ID NO: 82000

SEQ ID NO: 378668 - DNA, 201 bp, Homo sapiens
ttaggaacccagagctctccagggaaaaattgcaattgaggttttggatatattgggtggaaaagaaagtcacctcacataaaacttagtgattggagctrtcaccattgaaaatttctaaactttgcaagacagcagtgacgtttcaaatgacactctcagagagttgataatgggctaaaatagatctccctccaggtg

SEQ ID NO: 378669 - DNA, 201 bp, Homo sapiens; identical to SEQ ID NO: 82001

SEQ ID NO: 378670 - DNA, 201 bp, Homo sapiens
aaagagagcatgcacaagtgcacggcacagagcagagacagagtaaaaggcagtatgaggccaacatgcctcatttatatttctcatatatagcctttttwaaaaaaaaccatttgtatctgttgttcaatactccaaataaattgactgcagaatttgctgtagtaactctttgtgcaaataaccctgtgaggaaggtag

SEQ ID NO: 378671 - DNA, 201 bp, Homo sapiens
agacattctggatgagccattcctgaaaagagcctgccaggacgtctcggtcgtcatccacaccgcctgtatcattgatgtctttggtgtcactcacagasagtccatcatgaatgtcaatgtgaaaggtacagtagcctggggaggagataaaacaagttggttaaatgaggatcagaaagaaggacaagaaagggaaga

SEQ ID NO: 378672 - DNA, 201 bp, Homo sapiens
aggcatctgctgagtgtataaccattttacctcttgtttttagccctcttctgggtcacgctagaatcagatctgctctccagcatcttctgtttcctggyaagtgtttcctgctactttggattggccacgatgggctggagctgccttgtgacaggagcaggagggcttctgggtcagaggatcgtccgcctgttggtg

SEQ ID NO: 378673 - DNA, 201 bp, Homo sapiens
gtgacaaagttttattaatccattgcaaaatgagaaaaataccagcaattctatgtatatctaagagtgtatattgcctatattcaactgtgaatttgtgygtgtaacacaaattcttccactgccctttcttgcctaaggactgattgggactgttcatattctcagagtatagcctcctgattttttagattttaaatg

SEQ ID NO: 378674 - DNA, 201 bp, Homo sapiens; identical to SEQ ID NO: 82004

SEQ ID NO: 378675 - DNA, 201 bp, Homo sapiens
ggcaggtacccagctactgttggaggcctgtgtccaagccagtgtgccagtcttcatctacaccagtagcatagaggtagccgggcccaactcctacaagkaaatcatccagaacggccacgaagaagagcctctggaaaacacatggcccactccatacccgtacagcaaaaagcttgctgagaaggctgtgctggcggc

SEQ ID NO: 378676 - DNA, 201 bp, Homo sapiens
ttcctgaaaagagcctgccaggacgtctcggtcgtcatccacaccgcctgtatcattgatgtctttggtgtcactcacagagagtccatcatgaatgtcartgtgaaaggtacagtagcctggggaggagataaaacaagttggttaaatgaggatcagaaagaaggacaagaaagggaagagaagtcactccattgaaca

SEQ ID NO: 378677 - DNA, 201 bp, Homo sapiens; identical to SEQ ID NO: 82007

SEQ ID NO: 378678 - DNA, 201 bp, Homo sapiens
ttctttcaacatgtttctaagtgtttttgggttttatggccatttcttgtactggggctggtggcttggatgctgctcttttagctgtagtgtcagccagytggttacctgactttctatggtgtctaattttgagtgacctgggatttttataattgccaaacgttttggtttcaaaatagcttctaacagctctcataa

SEQ ID NO: 378679 - DNA, 201 bp, Homo sapiens; identical to SEQ ID NO: 82008

SEQ ID NO: 378680 - DNA, 201 bp, Homo sapiens; identical to SEQ ID NO: 82009

SEQ ID NO: 378681 - DNA, 201 bp, Homo sapiens; identical to SEQ ID NO: 82010

SEQ ID NO: 378682 - DNA, 201 bp, Homo sapiens
atatgatttgctgttaccaaatctcagtggctgattctgaacaattgtggtctctcttaacttgaggttctcttttgactaatagagctccatttcccctsttaaatgagaaagcatttcttttctctttaatctcctattccttcacacagttcaacataaagagcaataaatgttttaatgcttaacatggagagaagc

SEQ ID NO: 378683 - DNA, 201 bp, Homo sapiens; identical to SEQ ID NO: 82012

SEQ ID NO: 378684 - DNA, 201 bp, Homo sapiens; identical to SEQ ID NO: 82013

SEQ ID NO: 378685 - DNA, 201 bp, Homo sapiens; identical to SEQ ID NO: 82014

SEQ ID NO: 378686 - DNA, 201 bp, Homo sapiens
ccagcagcctcttccctgcctccaccattccagggccttcttggagttgcctgacagtgggaaggggctgggagtagacaaaacaaggcagaggcatcagragagcaaatggtcctgcctgtaacccaggaaggaatttctccagccttgaatttttcattctgaatttcgctctcactgttctttggcctttgtgggcat

SEQ ID NO: 378687 - DNA, 201 bp, Homo sapiens; identical to SEQ ID NO: 82015

SEQ ID NO: 378688 - DNA, 201 bp, Homo sapiens; identical to SEQ ID NO: 82016

SEQ ID NO: 378689 - DNA, 201 bp, Homo sapiens
ctgcctccaccattccagggccttcttggagttgcctgacagtgggaaggggctgggagtagacaaaacaaggcagaggcatcaggagagcaaatggtccygcctgtaacccaggaaggaatttctccagccttgaatttttcattctgaatttcgctctcactgttctttggcctttgtgggcattttcagttaaactgg

SEQ ID NO: 378690 - DNA, 201 bp, Homo sapiens; identical to SEQ ID NO: 82017

SEQ ID NO: 378691 - DNA, 201 bp, Homo sapiens
tgcctccaccattccagggccttcttggagttgcctgacagtgggaaggggctgggagtagacaaaacaaggcagaggcatcaggagagcaaatggtcctrcctgtaacccaggaaggaatttctccagccttgaatttttcattctgaatttcgctctcactgttctttggcctttgtgggcattttcagttaaactggc

SEQ ID NO: 378692 - DNA, 201 bp, Homo sapiens
accattccagggccttcttggagttgcctgacagtgggaaggggctgggagtagacaaaacaaggcagaggcatcaggagagcaaatggtcctgcctgtawcccaggaaggaatttctccagccttgaatttttcattctgaatttcgctctcactgttctttggcctttgtgggcattttcagttaaactggcttattct

SEQ ID NO: 378693 - DNA, 201 bp, Homo sapiens
atcaggagagcaaatggtcctgcctgtaacccaggaaggaatttctccagccttgaatttttcattctgaatttcgctctcactgttctttggcctttgtkggcattttcagttaaactggcttattcttactctttctcagaaaagttgattctaaacagctattcctgcacctggggtacagggtacaaaaatggcagg

SEQ ID NO: 378694 - DNA, 201 bp, Homo sapiens
gctccagaacaggaccaagctgactgtacttgaaggagacattctggatgagccattcctgaaaagagcctgccaggacgtctcggtcgtcatccacaccrcctgtatcattgatgtctttggtgtcactcacagagagtccatcatgaatgtcaatgtgaaaggtacagtagcctggggaggagataaaacaagttggtt

SEQ ID NO: 378695 - DNA, 201 bp, Homo sapiens
tctccttttcctctcatcccagctccagtaggtaccaggaccttcaaggtgaggtctgaaattcaaacctggagtgcatctctcccctcctctgcttccastgctggaccctggttccagtcctcatctaaactttggcacagacattctgattaatctcttgatcacctggctttctcatttcccctataccagtctgtt

SEQ ID NO: 378696 - DNA, 201 bp, Homo sapiens; identical to SEQ ID NO: 82019

SEQ ID NO: 378697 - DNA, 201 bp, Homo sapiens
gggagtggggcacatggatctgtgcatgtggttgcagctcctttgggatatttcctgacactgtcatcatgctcttcgtgggcaggtacccagctactgtkggaggcctgtgtccaagccagtgtgccagtcttcatctacaccagtagcatagaggtagccgggcccaactcctacaaggaaatcatccagaacggccac

SEQ ID NO: 378698 - DNA, 201 bp, Homo sapiens
attattattattttgagacagggtctttctctgccactgaggctagcatgcagtggcatgatctcaattcactgcaacctccacctcccagactccatccwtcctcctgcttcaggtttgtgattagctgggactataggcacataccatcacgcccagctaatttttgtaattttagtaaagacagggttttgccatgtt

SEQ ID NO: 378699 - DNA, 201 bp, Homo sapiens
tctccagaaactcaaattgcacagagactttaaaagtggctaagaatacaaaataagtaaataaaaatgatcctttgcctaggaaattccttccttcttcragggaagacactccagatacctccatgagctttgcttccacacagctcaggtgatgctgacaggtcttcccagtgcaggtgttatcagcagagggcacac

SEQ ID NO: 378700 - DNA, 201 bp, Homo sapiens; identical to SEQ ID NO: 82021

SEQ ID NO: 378701 - DNA, 201 bp, Homo sapiens; identical to SEQ ID NO: 82022

SEQ ID NO: 378702 - DNA, 201 bp, Homo sapiens
ttgcctaggaaattccttccttcttcaagggaagacactccagatacctccatgagctttgcttccacacagctcaggtgatgctgacaggtcttcccagygcaggtgttatcagcagagggcacactccctccccagtcctccaccaggctccacaggaaatgccagggcaggatttaaaggaaggtttatcacccccac

SEQ ID NO: 378703 - DNA, 201 bp, Homo sapiens; identical to SEQ ID NO: 82023

SEQ ID NO: 378704 - DNA, 201 bp, Homo sapiens; identical to SEQ ID NO: 82024

SEQ ID NO: 378705 - DNA, 201 bp, Homo sapiens; identical to SEQ ID NO: 82025

SEQ ID NO: 378706 - DNA, 201 bp, Homo sapiens
agtacagaaaagatggtgagcatcatcagtcagcagggaaatacaaatcaaaactacaatgtgacaccacttcttacccactagaatgctatactaaaaataaaacaataacaattggaggaagtgaaagcacaatgatgtgggaaaattgaaatactcatgcattgttgatgggacaggcagccatgttcaaaaacattt

SEQ ID NO: 378707 - DNA, 201 bp, Homo sapiens
gctaaagccaagactctttatcacactgtggccttaagattggatttctcttcctgttcctgggaagaattagagatataacctaaaggtcactattattytgagaaaagggattctggaggaggagggagcaatgagtatgtggcaggagttcaaggtaataagggctgagacacaagccacagagcataaagctccagt

SEQ ID NO: 378708 - DNA, 201 bp, Homo sapiens; identical to SEQ ID NO: 82026

SEQ ID NO: 378709 - DNA, 201 bp, Homo sapiens; identical to SEQ ID NO: 82027

SEQ ID NO: 378710 - DNA, 201 bp, Homo sapiens; identical to SEQ ID NO: 82028

SEQ ID NO: 378711 - DNA, 201 bp, Homo sapiens
ctctccagcatcttctgtttcctggcaagtgtttcctgctactttggattggccacgatgggctggagctgccttgtgacaggagcaggagggcttctggrtcagaggatcgtccgcctgttggtggaagagaaggaactgaaggagatcagggccttggacaaggccttcagaccagaattgagagaggaattttctagt

SEQ ID NO: 378712 - DNA, 201 bp, Homo sapiens; identical to SEQ ID NO: 82030

SEQ ID NO: 378713 - DNA, 201 bp, Homo sapiens
gtcatcatgctcttcgtgggcaggtacccagctactgttggaggcctgtgtccaagccagtgtgccagtcttcatctacaccagtagcatagaggtagccrggcccaactcctacaaggaaatcatccagaacggccacgaagaagagcctctggaaaacacatggcccactccatacccgtacagcaaaaagcttgctga

SEQ ID NO: 378714 - DNA, 201 bp, Homo sapiens; identical to SEQ ID NO: 82032

SEQ ID NO: 378715 - DNA, 201 bp, Homo sapiens
ggacttggactcctctgtccagcttttaacaatctaagttacggttagagctttctccttttctttcaactactcctggcagttgtggggtcatggaattbttgtaaaaaatggggtggaggaaaataaggcatctgctgagtgtataaccattttacctcttgtttttagccctcttctgggtcacgctagaatcagatc

SEQ ID NO: 378716 - DNA, 201 bp, Homo sapiens
aagatagtgtgagggagagcatcagcaagagagagagagtgaaagtgagagagatcatcagtgagagagagagaaagagagaaagagagcatgcacaagtrcacggcacagagcagagacagagtaaaaggcagtatgaggccaacatgcctcatttatatttctcatatatagcctttttaaaaaaaaaccatttgtatc

SEQ ID NO: 378717 - DNA, 201 bp, Homo sapiens
gaaacacttgccaagtccacagtgccttggagaaggagggagctaagactccatcaaaaattgcgcttttctggtctctctagatccatggaaactcaccrgggaagagtcattttctatcggctttggacttctgctatgaaatggcaattcctttgagccagtctgtctaaagtcggcagcaaaggagaagcagatgaa

SEQ ID NO: 378718 - DNA, 201 bp, Homo sapiens
ggccagaagcagaccttgcaggtgccactgtagtcaccattttgaaccttgtgtgtaggctgatgagaacattcagagccctcctgcccacctcaaacaaraagtcctctcgagagaactagcaaagctggttcacaaggtctgtcaggacagaattatccagcacatgccttcccacaatatttttttaacagtgagatt

SEQ ID NO: 378719 - DNA, 201 bp, Homo sapiens; identical to SEQ ID NO: 82100

SEQ ID NO: 378720 - DNA, 201 bp, Homo sapiens
cagatgtttgctctttccaagaaattgatacacatgctgatttctgtgccttttttacttgttctttccgtagaatgtacaccctccactctaacaccctwctctaaccatccttgaacacctatgtaacatcacctttatcagaaaacttctcagccagatacagaaatcattccaatgacctgacctgtgttcacacag

SEQ ID NO: 378721 - DNA, 201 bp, Homo sapiens
tgtctacatgtgggctctggctgcccagagggtcctgccctgcccacagagaatcccccacttgacagcactcagggaccacacccaacactctacttttrctcttctctgacctcttgaaatgttcgatttcttccaccctctgttttaatgttgtctttgataaacaaatatgaaatgcttataatccttgcctgtgtc

SEQ ID NO: 378722 - DNA, 201 bp, Homo sapiens
aaaaaaaaaaaaaaatgtgaaaaacgagtgaaaaaaaaaaacaaaattaataaatgtaagccaataataaaaataatgaaaatcatgaaatagaaaaataaacaacagagacaatcaacggtcaatttttctgtactccctgcacaaaacttcatttcaaaataattttatatttaaatatatatccagaaccacagagat

SEQ ID NO: 378723 - DNA, 201 bp, Homo sapiens
aaaaaaaaaaaaaatgtgaaaaacgagtgaaaaaaaaaaacaaaattaataaatgtaagccaataataaaaataatgaaaatcatgaaatagaaaaataaacaacagagacaatcaacggtcaatttttctgtactccctgcacaaaacttcatttcaaaataattttatatttaaatatatatccagaaccacagagatc

SEQ ID NO: 378724 - DNA, 201 bp, Homo sapiens; identical to SEQ ID NO: 82110

SEQ ID NO: 378725 - DNA, 201 bp, Homo sapiens
aaaaaaaaaaaaatgtgaaaaacgagtgaaaaaaaaaaacaaaattaataaatgtaagccaataataaaaataatgaaaatcatgaaatagaaaaataaacaacagagacaatcaacggtcaatttttctgtactccctgcacaaaacttcatttcaaaataattttatatttaaatatatatccagaaccacagagatct

SEQ ID NO: 378726 - DNA, 201 bp, Homo sapiens
aaccagagaacatcccactctcaggctgttacccacatcaccaccagcagcctcttccctgactcccccactccaggaccttcttggagttgcctgacaaygggaagaggttgggagtagacaaaacatggcagaggcatcaggagagcaagtggtcctgcttgtaccccaggaaggaatttctccagcttcgaatttttc

SEQ ID NO: 378727 - DNA, 201 bp, Homo sapiens
gcaaaaaaaatggggtggaggaaaatgaggcatctgtgtgagtatataaccatttgacatctctttttagccctctccagggtcaccctagaatcagatcygctccccagcatcttctgtttcctggtgagtgattcctgctactttggatggccatgacgggctggagctgccttgtgacaggagcaggagggtttctgg

SEQ ID NO: 378728 - DNA, 201 bp, Homo sapiens
catccaaagtcatcaagaaataaatattaaatagtataaaatggcatagtatgaaagatactgggtgggatttccagagactagattctggccctgacccrgaacttgagaagcagccacctcagcctccaggcctcttttcttctcatctagaaaatcccacatcagttctttgtcttgtctgcaactcttttatgttct

SEQ ID NO: 378729 - DNA, 201 bp, Homo sapiens; identical to SEQ ID NO: 82099

SEQ ID NO: 378730 - DNA, 201 bp, Homo sapiens
tccttagtatcctttgtgagggcaaaataaaaggaagttaaggtaaagatgagtgtataagtgggtgtgtgtgacagagagagaggaaaacaataaggggragagagagtcggggagagagagtcggggagagagactcagagagagagacaatgagaaagacagagaaataatgaaaaatatatagtgagagagagagca

SEQ ID NO: 378731 - DNA, 201 bp, Homo sapiens; identical to SEQ ID NO: 82101

SEQ ID NO: 378732 - DNA, 201 bp, Homo sapiens
aaaaaaaaaaaaaaaatgtgaaaaacgagtgaaaaaaaaaaacaaaattaataaatgtaagccaataataaaaataatgaaaatcatgaaatagaaaaataaacaacagagacaatcaacggtcaatttttctgtactccctgcacaaaacttcatttcaaaataattttatatttaaatatatatccagaaccacagaga

SEQ ID NO: 378733 - DNA, 201 bp, Homo sapiens
tccactctaacaccctactctaaccatccttgaacacctatgtaacatcacctttatcagaaaacttctcagccagatacagaaatcattccaatgacctracctgtgttcacacagaactccagaacaagaccaagctgacagtgctggaaggagacattctggatgagccattcctgaagagagcctgccaggacgtct

SEQ ID NO: 378734 - DNA, 201 bp, Homo sapiens
aacacctatgtaacatcacctttatcagaaaacttctcagccagatacagaaatcattccaatgacctgacctgtgttcacacagaactccagaacaagaycaagctgacagtgctggaaggagacattctggatgagccattcctgaagagagcctgccaggacgtctcggtcatcatccacaccgcctgtatcattgat

SEQ ID NO: 378735 - DNA, 201 bp, Homo sapiens; identical to SEQ ID NO: 82102

SEQ ID NO: 378736 - DNA, 201 bp, Homo sapiens
tgacctgtgttcacacagaactccagaacaagaccaagctgacagtgctggaaggagacattctggatgagccattcctgaagagagcctgccaggacgtytcggtcatcatccacaccgcctgtatcattgatgtcttcggtgtcactcacagagagtctatcatgaatgtcaatgtgaaaggtatggtaggctggggag

SEQ ID NO: 378737 - DNA, 201 bp, Homo sapiens
acgaccaaatctcagacagaaccacagaagaatgtaccctgagtctgttacaaccaccatatttgggagtggggggtggggcacatagatctgtgttcgtrgttggcacctcttagggatatatcctgacagtgacaatatgctcttcatggacaggtacccagctcctgttagaggcctgtgtccaagctagtgtgccag

SEQ ID NO: 378738 - DNA, 201 bp, Homo sapiens; identical to SEQ ID NO: 82105

SEQ ID NO: 378739 - DNA, 201 bp, Homo sapiens
  misc_feature (1)...(201): n = A,T,C or G
tacttttctaaaatgagatgggagagaaacagatgtttgctctttccaagaaattgatacacatgctgatttctgtgccttttttacttgttctttccgtngaatgtacaccctccactctaacaccctactctaaccatccttgaacacctatgtaacatcacctttatcagaaaacttctcagccagatacagaaatca

SEQ ID NO: 378740 - DNA, 201 bp, Homo sapiens
agtacgaccaaatctcagacagaaccacagaagaatgtaccctgagtctgttacaaccaccatatttgggagtggggggtggggcacatagatctgtgttygtggttggcacctcttagggatatatcctgacagtgacaatatgctcttcatggacaggtacccagctcctgttagaggcctgtgtccaagctagtgtgc

SEQ ID NO: 378741 - DNA, 201 bp, Homo sapiens
tgttcacacagaactccagaacaagaccaagctgacagtgctggaaggagacattctggatgagccattcctgaagagagcctgccaggacgtctcggtcrtcatccacaccgcctgtatcattgatgtcttcggtgtcactcacagagagtctatcatgaatgtcaatgtgaaaggtatggtaggctggggaggagatgc

SEQ ID NO: 378742 - DNA, 201 bp, Homo sapiens
attttggtatttttcttatggctgtagtacgaccaaatctcagacagaaccacagaagaatgtaccctgagtctgttacaaccaccatatttgggagtggsgggtggggcacatagatctgtgttcgtggttggcacctcttagggatatatcctgacagtgacaatatgctcttcatggacaggtacccagctcctgtta

SEQ ID NO: 378743 - DNA, 201 bp, Homo sapiens
cagtgctggaaggagacattctggatgagccattcctgaagagagcctgccaggacgtctcggtcatcatccacaccgcctgtatcattgatgtcttcggwgtcactcacagagagtctatcatgaatgtcaatgtgaaaggtatggtaggctggggaggagatgcagcaaggtggggaattaaggatcacaaagaagggc

SEQ ID NO: 378744 - DNA, 201 bp, Homo sapiens; identical to SEQ ID NO: 82107

SEQ ID NO: 378745 - DNA, 201 bp, Homo sapiens
ctatgtaacatcacctttatcagaaaacttctcagccagatacagaaatcattccaatgacctgacctgtgttcacacagaactccagaacaagaccaagytgacagtgctggaaggagacattctggatgagccattcctgaagagagcctgccaggacgtctcggtcatcatccacaccgcctgtatcattgatgtctt

SEQ ID NO: 378746 - DNA, 201 bp, Homo sapiens
gtttccagcatctccccacaacccactgcttgctcagtgactccaggatggtccttgtgacaaagttttattagagcccagcaaaatgagaaaagtaccawcaatttcatatatattgaagagtttatattgcctatatacaatggtgtatgtgtgtgtgtgatgtgaattcttcaactgcccattttgcctaaggactgg

SEQ ID NO: 378747 - DNA, 201 bp, Homo sapiens
agactcttgatacccagacaccccttgcctcccaggccagaagcagaccttgcaggtgccactgtagtcaccattttgaaccttgtgtgtaggctgatgaraacattcagagccctcctgcccacctcaaacaagaagtcctctcgagagaactagcaaagctggttcacaaggtctgtcaggacagaattatccagcaca

SEQ ID NO: 378748 - DNA, 201 bp, Homo sapiens
atgtaattagcaaggcttggagccaggatttgagtccaggaagtttggatacagagtctgtgctcataaccagtagctatatatatttccccagtaatgcytgattaaacttcaagcattttacatgttgattttttatatattctagactctaaagcaatgctgtccaatagaatgctctgtgtttatggaaatcttcta

SEQ ID NO: 378749 - DNA, 201 bp, Homo sapiens
gcttcctgcctctcagcactactacctacatacagttgtggtttggtcagtcaccacaacccgtgcagaatacttttattctactctgcattgccccaggkcttgcacagtcttggaagagaaggccagtgtcctggatgtgaatttctgacagaaatagtaaccagattacagatcctgaacaactgaccttacttacct

SEQ ID NO: 378750 - DNA, 201 bp, Homo sapiens
tatatacacacacacatacacataaaggcacacacatacatatataatttttattaaacaacaacaaatagttgctaagtacctacaatgccactgatccrgaaaaagggcactatacatggccttgagggaaaggaaaggaaggacttgacatgtgttgagaattatttgccaggcatctactaactgctacacactcat

SEQ ID NO: 378751 - DNA, 201 bp, Homo sapiens
tgtatatatcccataacatcatgctgtataccttaaatatatacaataacatttattttttagaagtttttataaagagcttcaaagaaaatttaaagacmtatttacttgtttttttaaagtaaaagaaatagtttactgcttatttaaaaaaaaaacaaacacatatctcaaaaccgtttgggctggggtaattatgcc

SEQ ID NO: 378752 - DNA, 201 bp, Homo sapiens
tatcttctagacatctctgtgaatatcttcaaagtctcaagttcagcatatctgaaaccagacctttcctttttgcctcaaaccagcccttccatgtgacktttaaaaacaatttattgaaacaaaactcacataacataaaatttaccattttttccaacttgagaaatacgtttcatctatatttttatataccttttt

SEQ ID NO: 378753 - DNA, 201 bp, Homo sapiens
tataaaccaatgggaatggtaatttttaaacaaacttgctaaatattgagagactaaactactaagttaataaattatatatagcagtgtagctttctctytagatggtgtctcacaatggatttctgttgcttgactattttcttagtgaatatttaaactaaggtagtgactgagatttggtgatctggttaagtattt

SEQ ID NO: 378754 - DNA, 201 bp, Homo sapiens
ttgacttaaagcatatttgcaaaagtagaatatacccatctaaagatataaaatatataaaaataaaatcagaattgaaagtgtattgtttactgcaaaarggatatggtaaatatttcgctggtgaataaagtcaacttgttagagttgttagaaaagcaaaataaaatattaaggagaacattattttgacctttacat

SEQ ID NO: 378755 - DNA, 201 bp, Homo sapiens
tcttcatccatcatggggactctgagtgtcatgggatttaagacgagacttcagctcctgcattctataagcctcatgtagtattcatttctacttcattsacatgcatatattgaatctccgctctgttggtgttagggataacagcatggttctttccctcgaggatttcactggctggcgagggtagtggacatgtag

SEQ ID NO: 378756 - DNA, 201 bp, Homo sapiens
gaaaccctgaccccttgaaccatagcagcagcaggtgagcagaaaaggaactagatttcaaaatattttaagatgtgttttgttgtattgaagtcatcatrcaacatctgatattgattttgagattcttaattcattctttttaaagattgggattaaaaaacctaaacacatttccatgcagttttcccataaatccca

SEQ ID NO: 378757 - DNA, 201 bp, Homo sapiens
atgtcatgatctgacactgcaaactttacatatgggattaaactcatgatgaagtcattccctatattctgatatttttggtttcacatcttcatttcttmataatatgaaatattacagataaaattcaagtctcctttgttcttttcttcagatctatttcctttccaccttctctagaagcagctacaattacaaatt

SEQ ID NO: 378758 - DNA, 201 bp, Homo sapiens
ctccaataagtaacaaatgaaagtataatgaaagtcttaataatacattttctagagaggtaggatatttgcttgtaaaggttctgtgaagaaacttgacyttctcacctgtaaaacgggaataattattaagcacaggattattaaaggattaaaatgaaatataggccaggcagtactgtgactaggagctgttacttg

SEQ ID NO: 378759 - DNA, 201 bp, Homo sapiens
taattgctcaataataagtagcagagtcaggatttaaactcaggtttgatttttaagctatatcattgttttccctataacagagatgaagcacttgaagrtatttttatttgtttttgttttgctttgttccacacatttctggattttgaaaaaggtcattgccagaatgtctatgaatatttgtattataaatgtaga

SEQ ID NO: 378760 - DNA, 201 bp, Homo sapiens
gaatggaaaaacaaatgccacatattctcacttataagtgggagctaaatgatgagaacacatggacacatagaggggaacaacagacactggggcctacwtaagggtgtcgaatgggaggagggagaagggcagaaaaataactaataggtactaggcttagtacctgggtgataaaataatctgtacaccaaacccctg

SEQ ID NO: 378761 - DNA, 201 bp, Homo sapiens
cgctgcactcaatgcggaaagcgcgtgagcgctggagcttcatccgggcacttcataagggatccgcagctgctcccgctctccaggtaaccaaagacggyccttccctccgcggcttcccatcccgcgaggttcttctcatcccactgccctctatttatttctctcctcccgcttcttagggaaagtacatgccttccc

SEQ ID NO: 378762 - DNA, 201 bp, Homo sapiens
tgtaacataccatttatattttgggattacctgatcagatatgtgaactgtcagtttcaagtaagttttctatgcatatcaggatcactgcccaggtctgygactatctctgggattatgcattactatttgtggtatgtcagctctgaaaaaggaaaatgatctggtgtgaaaaaagtcagtgtacccctcatcaaggtt

SEQ ID NO: 378763 - DNA, 201 bp, Homo sapiens
agctccatgatgaacctcactttacagaggaaacgaaggcttagaaagggtaagaaacttgcctatgatggctcgctgcttttttcacaggagcaatattstttctttgattaaaaaaacctcagcgcactgtattacttgtattatcaggtataaactcccagccaagcattgcatgtataaaattgcctgttttttaat

SEQ ID NO: 378764 - DNA, 201 bp, Homo sapiens
attattgttcccagttattcatttttatttattgtaagagcagagattatcaaactttctgtgaaaggatagatagtaaacatgttagactttgcaggcarcacgtagtctctatcgccactgccattgctactatctcttccttgtcttctttttctctttcttcctctcctctttctcctcctccttctccatttttcc

SEQ ID NO: 378765 - DNA, 201 bp, Homo sapiens
tgaatatgctgatgatttttgaattactgttccaactctcccctatgcatcagatttgtctccatttacctaattaacatttgtgtatagaagactaatastaagcatcttaaacttgtccaaaatagaacatttgatgataattttccatttagtcccatcacagaaaatggtcctaggtaccagttttaccaattaatc

SEQ ID NO: 378766 - DNA, 201 bp, Homo sapiens
gggtgattatgatgtgtcagtgtaggttcattgttaacaaatgtaccactatggtgtgggatgccagtagtggggaaggtgatatatatgtggggacagaggatatatgggaactccattttctgctcaattttgccatgaacctaaaacgtctctaaaaaataaatttattaatttaaaaagaactgttaatactttctc

SEQ ID NO: 378767 - DNA, 201 bp, Homo sapiens
gtgaagtgacaagaactttcattcacagatggtgggaatgcaaaatagtacagacaccttggaagacaatctggcagtttcttacaaaactaaatatactyttaccatacaatctggcactcatgctccttggtgttcaccaaaatcaattgaaaactatgttccaaaaaacctgcatgtggatatttgtggcagctttat

SEQ ID NO: 378768 - DNA, 201 bp, Homo sapiens
ctccaaatgctggcaagaatgtgaagtgacaagaactttcattcacagatggtgggaatgcaaaatagtacagacaccttggaagacaatctggcagtttsttacaaaactaaatatactcttaccatacaatctggcactcatgctccttggtgttcaccaaaatcaattgaaaactatgttccaaaaaacctgcatgtg

SEQ ID NO: 378769 - DNA, 201 bp, Homo sapiens
tgggtgattatgatgtgtcagtgtaggttcattgttaacaaatgtaccactatggtgtgggatgccagtagtggggaaggtgatatatatgtggggacagaggatatatgggaactccattttctgctcaattttgccatgaacctaaaacgtctctaaaaaataaatttattaatttaaaaagaactgttaatactttct

SEQ ID NO: 378770 - DNA, 201 bp, Homo sapiens
taaatcaagcttttttaaacttctctcagttcaaaccctggggaaaagaccagagttgaggaattaaaaaagggagacagagatggcagaagaatcattaragtgtagatctaaggattccgagggtgtagagaatgtcaggaagaagaaatgaagagcaagatagtgacatggtaagataaagactaaaaattatccatt

SEQ ID NO: 378771 - DNA, 201 bp, Homo sapiens
ttctgctaaggttagaaacaagacaaggatgtcaccaccccttttcaacattgtgctggaaatcctaactaatctctctctctctctctctctctctctttctttttctatttctccaactataagagtgcattcatctagagagagagagaggcattatataggaaacaggtagaaggagactatatcagttgactgtat

SEQ ID NO: 378772 - DNA, 201 bp, Homo sapiens
tttctgctaaggttagaaacaagacaaggatgtcaccaccccttttcaacattgtgctggaaatcctaactaatctctctctctctctctctctctctctttctttttctatttctccaactataagagtgcattcatctagagagagagagaggcattatataggaaacaggtagaaggagactatatcagttgactgta

SEQ ID NO: 378773 - DNA, 201 bp, Homo sapiens
gctttctgctaaggttagaaacaagacaaggatgtcaccaccccttttcaacattgtgctggaaatcctaactaatctctctctctctctctctctctctctttctttttctatttctccaactataagagtgcattcatctagagagagagagaggcattatataggaaacaggtagaaggagactatatcagttgactg

SEQ ID NO: 378774 - DNA, 201 bp, Homo sapiens
aagctttctgctaaggttagaaacaagacaaggatgtcaccaccccttttcaacattgtgctggaaatcctaactaatctctctctctctctctctctctctctttctttttctatttctccaactataagagtgcattcatctagagagagagagaggcattatataggaaacaggtagaaggagactatatcagttgac

SEQ ID NO: 378775 - DNA, 201 bp, Homo sapiens
tgttgcctaggctagagtgcagtggtgcaatcttggctcactgcagcctccacctcccaggttcaagcaattctcccacctcagcctccggagtagctggsattaaaggtgtaccaccacgcccaggtgatttttgtatttttagtagagacggggtttcaccatgttggccaggctggtcccaaactcctgatctcaggt

SEQ ID NO: 378776 - DNA, 201 bp, Homo sapiens
ggaagaaattgtaccgattctctgtaatccctttcagaagatagaagcagagggaatacttccaaactcattctgtgaacccaggcattaccctataccamtaaaagacaaaatacaaagacattacaagaagagaaaattatagatcagtatgtcttatgaatatggatgcaaaaatcatcaacaaaatactagcaaagt

SEQ ID NO: 378777 - DNA, 201 bp, Homo sapiens
ggtttcaccatgttggccaggctggtcccaaactcctgatctcaggtgatccaccctcttcagcctcccaaagtgtcgggattacaggcacgagccaccaygcccggctgcagatcttttcttatatgtctttgcatttgtccatgtttgagtgcaaaaacatttttaatatcatttttttgtgcctagtagcacctagca

SEQ ID NO: 378778 - DNA, 201 bp, Homo sapiens
aactcacagaagaagaaatagacaatctgaatgggtctaaatctgttaaatcaattgaatcaataatttaaaaccttccaaaatataaagtaccaggcctwgatgggttcgctgatgaactctagtagatgttttaggaagaaattgtaccgattctctgtaatccctttcagaagatagaagcagagggaatacttccaa

SEQ ID NO: 378779 - DNA, 201 bp, Homo sapiens
atataagggaaatgaatgacaccaatgatacaaggatgggaggaaggaattaggcatattttgttattactaggtatttgtaccccctgtgaagcagtagrtgttatttcaaagtcacttggattagtggtaaatgtatggtgcaaagtctagggcaatcatgtagaaaaataaaaaaagtgtaatagatatgctaaaaaa

SEQ ID NO: 378780 - DNA, 201 bp, Homo sapiens
tggaaggtccaaagttattatattctgctccaaactgatactgtcagtactcctatcttctcctcatttagggactttactccagaactttcttgttattmttttcttcttttagatgctggtattgaaaacaaacaaagtctcctccaaactataaaacaagcaaagcagtgttaattcttagcaatattatccctgcta

SEQ ID NO: 378781 - DNA, 201 bp, Homo sapiens
accttttgtctctatgagtttgactactcaaatgtatacctcatacagataaatcatacaatattggtctttttgtggctggtttatttcatttagtatartgtcctccaagttcattcatattgtagcatgtgtcagaattttcttaatttttaaggctgaataatgttacatcatatgtttgtacatttcatttatcta

SEQ ID NO: 378782 - DNA, 201 bp, Homo sapiens
ggcacttgtaaaatttacgtaaatgtcagtgtatttcatgttttctccaacttgcttttttcatcccacatagtttttgatagccatctacattgtacttrtagattttaagttctctgcaacatattaattgtcctgtgattgcaatgtacttgaaaatgaagcttactccaaagaatattgaattactccctatgtgac

SEQ ID NO: 378783 - DNA, 201 bp, Homo sapiens
ctgggttaagggcgtacgggatcactctgtattatttcttacaactgtatgtgaatgtacaattatcttaaaagttaaaacagaagtatttctaaaaattrtaataataaaagccaccatttattgagtagttactatatgctaggttctgtttacatactatcaagtggatattattgttaacctcattttatagagggg

SEQ ID NO: 378784 - DNA, 201 bp, Homo sapiens
tgctacagaaagaaatagataaagctttaaagtgacagtgcctaaatgatatggtctgaatgtgttccctcagaattcatatgttgaaacctaactcccargatgatggtattaggaggtagggcctttgtgaggtgattagatcttgagggtgggaccctcatgagtgagattagtgctcttgttaaagaggccctagag

SEQ ID NO: 378785 - DNA, 201 bp, Homo sapiens
catggcaggcagatcgcttgagctcaggagtttgagaccagcctgggctacatggcaaaacctcgtctgtactaaaattacaaaaaaaaaaaaaaaaaaamaattagccaggcatggtggcacttgcctgtaatcccagctacttggtggggctaaggcaggagaatcgcttgagcctgggaggtcgaggctgcagtgagc

SEQ ID NO: 378786 - DNA, 201 bp, Homo sapiens
ttgaatggcttcaaatccagatcttgtcatcactaacagtagcataacttcacaaatatcaccttttagcattctaatctctaaaccctacctactgaccrtggactcacttagtcaactatgtttcaacctcatcatgtcacttatctattgaccttacttctttctcatgatgtgtcaccctattccttacggtcagtc

SEQ ID NO: 378787 - DNA, 201 bp, Homo sapiens
atccctcaaaattcatatgttgctcccttaacccccagtatgactgtatatagagatagggtctttaggaagtaattaaggttaaatgatgtcctaaggakggagccctaatctgataggcctgtggccttatgagaagagggaaagatctgtctgtttttctctttttctgcctgccatgtggggttatagcatgaaggc

SEQ ID NO: 378788 - DNA, 201 bp, Homo sapiens
aaggcacatgacctgggctcagacaataggtttcacctgcttgggcatatgactcttacagggggcaactaaaagacaaaggatgagattcatggttgtgktctaggccctagcagtatacagtggcagtgtcagcatcctgactgcgttgtttctgctactcagccttttctgctttaggtaggcaaactcaatttgttg

SEQ ID NO: 378789 - DNA, 201 bp, Homo sapiens
tattagatataacttagaatagacaagtttacttatttttacctcaagcaagtatttagcatcttaagccttttattaattattgtaaatgaaaagagctmgaggtgtgctgaaagaattacagagattagcaagcaggagagttgaagcaagagagatccttaaaattatattattgtcttattatagttgaagaaatag

SEQ ID NO: 378790 - DNA, 201 bp, Homo sapiens
tttcttatagacagcacttactgcaagaaggattctaattcatagattgtttcatcccatccccaagtcccaaatttaaaatgtcattaatattgacattwtttaaaattgtattaagtgtttgtaagtgggcctagtatctggctagttaatgaccatactggcagctttccagaaatctgacaaccacatctcattatt

SEQ ID NO: 378791 - DNA, 201 bp, Homo sapiens
gtgggagctgcacattagtcctgtctcttacctgccattctttttttctccctaacaactcctactttaagttgacttatctttgttttacggaagaaccyggaaggtaaacgtatttatttctttcaaatgctgagccctcctcctcattgttgcctcctccacttactaactatacttactccacttactaactacaaa

SEQ ID NO: 378792 - DNA, 201 bp, Homo sapiens
tcagctaggagcttcccttagcctgtggcctctccccagttccactggctgcgtttccttctccaaggacctctgtgagataacgcgaggaatggcttccytggggcttgagctgaggactgggaatgcttacagggctctttctgctacttgtacttttatatttcacttagctccctaaatccatttcagctctaagta

SEQ ID NO: 378793 - DNA, 201 bp, Homo sapiens
gttcgtgctcggttgaaattattacagagttcagctaggagcttcccttagcctgtggcctctccccagttccactggctgcgtttccttctccaaggacmtctgtgagataacgcgaggaatggcttccctggggcttgagctgaggactgggaatgcttacagggctctttctgctacttgtacttttatatttcactt

SEQ ID NO: 378794 - DNA, 201 bp, Homo sapiens
gtataaagcaaaaatttaaaatatgggattaaaaaatgaatataagtaaaagtccttttttttttatttgctgtgcttcaggagatagtcttgcacagccwctgagaatcacaaatctcattttggaaaccactgttttaattgctcatctccagtggccaccatgctatctttgtaggttcaagtaaatattcagaatca

SEQ ID NO: 378795 - DNA, 201 bp, Homo sapiens
tggattctactcggggaagttcgtgctcggttgaaattattacagagttcagctaggagcttcccttagcctgtggcctctccccagttccactggctgcrtttccttctccaaggacctctgtgagataacgcgaggaatggcttccctggggcttgagctgaggactgggaatgcttacagggctctttctgctacttg

SEQ ID NO: 378796 - DNA, 201 bp, Homo sapiens
tcaggtgggtgcagggttaggcaagtctgagctcagactctccttaggtggggcttgctgcagccactatgggggatggaggggtggttctcaggcccatygagttatgttcccagggagattatggctgcctctgctgtatcatacaagtcaccagacaagtgggggaaagctggcagtgacatgcctcactccactccc

SEQ ID NO: 378797 - DNA, 201 bp, Homo sapiens
tacttttcagtgtgttttgcttttctctaaatgtgtcttttatttccagaagttgtgatagtcttttctttaccatatctatttaactgggaactttttcmtccatatcctgtatttttttaaatttatttaagttggttttcacctttttctggtgcctctttgcttagcttaataatcaaccttctgaattatttttct

SEQ ID NO: 378798 - DNA, 201 bp, Homo sapiens
tcaggtgatccaccctcttcagcctcccaaagtgtcgggattacaggcacgagccaccacgcccggctgcagatcttttcttatatgtctttgcatttgtmcatgtttgagtgcaaaaacatttttaatatcatttttttgtgcctagtagcacctagcatagtgatttacagtgtaggcacaaaataaatggatgatgat

SEQ ID NO: 378799 - DNA, 201 bp, Homo sapiens
taagcaataattttttatctttctctttccactttacctctattaggcaaatgcctacaccaaaccagaaccctactgaaaggcagtatgaaaaatgtagwttccaggctgcagcccctgaaaatcaagaggtagcatagaagggagagaatggtgctgagatgtcaacagataatccagtacactctctaaaaagtaaca

SEQ ID NO: 378800 - DNA, 201 bp, Homo sapiens
gttattcatttttatttattgtaagagcagagattatcaaactttctgtgaaaggatagatagtaaacatgttagactttgcaggcagcacgtagtctctmtcgccactgccattgctactatctcttccttgtcttctttttctctttcttcctctcctctttctcctcctccttctccatttttcctcttcttttttaa

SEQ ID NO: 378801 - DNA, 201 bp, Homo sapiens
gatagaagttagtgaccaatagttttatgtaattccaatgttgctttattagatgttctatttagaaggtctgttggatgattcccattgttcattctttwtataatagtttttgagaagatttgatagcacaagttgggaaattggaagacaaagtcccagtgtgttgtgtctaagccaagaaaggcttcatagtaaagc

SEQ ID NO: 378802 - DNA, 201 bp, Homo sapiens; identical to SEQ ID NO: 82125

SEQ ID NO: 378803 - DNA, 201 bp, Homo sapiens
aactaagcccccttcacctgttcttataataaccttaatttggggtattttcagacatttagggtaatacttactacttagttcttcttatatgcaagaaracactggccacctttactaatgttctattttatttctttaggtgtctgaacacacacaattaagttggatcctttcctgcatggtcagactacctcgatt

SEQ ID NO: 378804 - DNA, 201 bp, Homo sapiens; identical to SEQ ID NO: 82127

SEQ ID NO: 378805 - DNA, 201 bp, Homo sapiens; identical to SEQ ID NO: 82129

SEQ ID NO: 378806 - DNA, 201 bp, Homo sapiens
ccaacatagtgaaacacgatctgtactaaaaaatacaaaaattacaggccagtggttgtgggggcctataatcccagcttctcgagaagctgaggtaggakaatagcttgaacccaggaggcggaggttgcagtgagccaagattgcaccactgcactccagcctgggcaacagagcaagactccatctcaaaagaaaaag

SEQ ID NO: 378807 - DNA, 201 bp, Homo sapiens
ctctttctgttaattaaatatttttgaaattaaaaaaatattaaaaattagcccatctcaaatctttaaaaatacagcaagggccgggtgcggtgacttaygcctttaatcccagcactttgggaggctgaggcaggtggatcatttgaggtcaggagttcaagaccagcctggccgatatggtgaaaccccgtctctact

SEQ ID NO: 378808 - DNA, 201 bp, Homo sapiens
ttaatatgtctaataattttggctagtatcttgaatattttaaatgacaaattgaagagattttaaattatgttgtattcctctgaagaatatctttaaawaaaaatctgttgtttttttagcaggctcaagccccaaattgtctttccagtagtaagcaataattgaaatattttgccagttgttttagccattgttgga

SEQ ID NO: 378809 - DNA, 201 bp, Homo sapiens
tgctataaacatgtgtgtctacatatctttttcatataatgacttattttcctctgggcaaatacccagtagtgggattgctggatcgaatggtcattctmcttttaattctttaaggaatcttcatagtgttttccatagtggttgtactagtttacattcctaccagcagtgtaaaactgttccttctcaccacatcca

SEQ ID NO: 378810 - DNA, 201 bp, Homo sapiens
aaatcttcagttctttctttctactcatcactgctgacttgtttgtggatggtcaataggccactttattgtccatgcctttgtttttctgtggctaatcrggttatacagctagtttgtttttggtttcacagcataaatgataaaatattatatttagataccatttttcctttttctcccaagtggaactctgaacct

SEQ ID NO: 378811 - DNA, 201 bp, Homo sapiens
ttatcacagtgttctgggggaggattgatggtgtctcacactggagtgctagcagtagatgtggtgaaaagtggtgagactttgaatatattttgaaggtagaggcaacaagatttgccaatggattagatacagagtgtgagagagtacgaggagtgaagaatgatgccaaggtttttgcctaagcaactgcagagttgg

SEQ ID NO: 378812 - DNA, 201 bp, Homo sapiens
aataaacccaagttaagaactcctacatttttttcctatcctcagagagctgattttttcttctcaatttctcttacttttcttttttttctccatcaccygcctcacacccatttccccaagtccccagagtccattctatcattcttatgccattgtgtcttcgttgcttagttcccacttgtgagaacatactatgtt

SEQ ID NO: 378813 - DNA, 201 bp, Homo sapiens
actcatcactgctgacttgtttgtggatggtcaataggccactttattgtccatgcctttgtttttctgtggctaatcgggttatacagctagtttgtttktggtttcacagcataaatgataaaatattatatttagataccatttttcctttttctcccaagtggaactctgaacctttccatgcaattgtcatgaata

SEQ ID NO: 378814 - DNA, 201 bp, Homo sapiens
tgggagggaagatcaggggttatcaggagttaagttttaggcaaattgagtttagatgcttcgtgaacatataagtggaaatgtcaggtaggcagttagayatgtgagaccaaagctcaggagagaggtatagatggagatgtacatttgagagttctcagtatagactgtgctgaaagccttgagatagggtgtaattat

SEQ ID NO: 378815 - DNA, 201 bp, Homo sapiens
atgtagacaggtagaatggtagattgaagggtggataaaacatctgtgttttttttttcctatcagcaaatctatgtgtgacctcttcataaaattttgaygcaagccaaatattagtgtttccttttgtcaaaatcatcattagaatgagtggcatggtgggtcagaaaacaaacataatagaaaggaatggaagaggag

SEQ ID NO: 378816 - DNA, 201 bp, Homo sapiens
gtacaaagtagacatctgagggaagaggatgccaggaagaggaaagaagaatggaaaagccatgaggtgggggctaaactgtcatgtttgaagaccagcayagaggccagtatggctgcaggagagtgagcattttctgtaacaaatactatatagcacttactatgtgttggatacttttctaaatacttcacaagcatt

SEQ ID NO: 378817 - DNA, 201 bp, Homo sapiens
aaggcttgccaatctatttatcctctctgtgatgtcttcgttagaaaagtaaaaatgctgaggaagccctagtttgaattgggaaaacttacggaggttcktggtgaaggtaatagttttggaaaagccactggggacaagacaggtgctaaagttgaacgaactgatggatatgaaccactagtccaagaatctgtctga

SEQ ID NO: 378818 - DNA, 201 bp, Homo sapiens
agaaaaggcttgccaatctatttatcctctctgtgatgtcttcgttagaaaagtaaaaatgctgaggaagccctagtttgaattgggaaaacttacggagsttcgtggtgaaggtaatagttttggaaaagccactggggacaagacaggtgctaaagttgaacgaactgatggatatgaaccactagtccaagaatctgt

SEQ ID NO: 378819 - DNA, 201 bp, Homo sapiens
ataccactctgactctttatttagaaatttcactgcttattttccaggcattatggtgacccaaactttgttttttcattcttcaagccagtaagaatgcrggtttctatcatatttagatgctttttatgtctgcaactgaggactgccctcagacagaaagtcacaaaacaggacacttactccgtgttatccattttt

SEQ ID NO: 378820 - DNA, 201 bp, Homo sapiens
ctctttatttagaaatttcactgcttattttccaggcattatggtgacccaaactttgttttttcattcttcaagccagtaagaatgcaggtttctatcayatttagatgctttttatgtctgcaactgaggactgccctcagacagaaagtcacaaaacaggacacttactccgtgttatccattttttaaaagagtaaa

SEQ ID NO: 378821 - DNA, 201 bp, Homo sapiens
aaaaactcttgcctgaagaactttctgctgcctttgatttgaagagtggggtggggtgtctttcaagtatgagctgtagttctgaggtaaagagcatctgrtcagggctgggaataatatgtgctgactgggtgagggaatgaggagtagttttaaaacacaattgtgcctagagcatatgctatttaaaatcccattcct

SEQ ID NO: 378822 - DNA, 201 bp, Homo sapiens
gacatagaaaaggcttgccaatctatttatcctctctgtgatgtcttcgttagaaaagtaaaaatgctgaggaagccctagtttgaattgggaaaacttayggaggttcgtggtgaaggtaatagttttggaaaagccactggggacaagacaggtgctaaagttgaacgaactgatggatatgaaccactagtccaagaa

SEQ ID NO: 378823 - DNA, 201 bp, Homo sapiens
ggtgaaaccttgtctctacttaaaatacaaaaaattagccgggcgtggtggtgtgtgcctgtagtcccagctactcgggaggctgaggcacaagaattgcytgaatccgggaggaggaggccgcagtgagctgagagtgcaccactgcactctagcctgggtgacggagtgagactctatctcaaaaaataaaaacaaaaa

SEQ ID NO: 378824 - DNA, 201 bp, Homo sapiens
atgtgaacccgggaggcggagcttgcagtgagccgagatcgcgccactgcactccagcctgggtgacacgagtgagactacgtctcaaaaaaaaaaaaaamaaaaaacaaaaaactttgcacagtccggatccaaaatacctctctagaccattgctatcttacatagatcctttgccctagagttcacaaaatttccaag

SEQ ID NO: 378825 - DNA, 201 bp, Homo sapiens
caaagtgtcgggattacaggcacgagccaccacgcccggctgcagatcttttcttatatgtctttgcatttgtccatgtttgagtgcaaaaacatttttartatcatttttttgtgcctagtagcacctagcatagtgatttacagtgtaggcacaaaataaatggatgatgatgactgtcagattgtagtttacaaaaat

SEQ ID NO: 378826 - DNA, 201 bp, Homo sapiens
tcattgccagaatgtctatgaatatttgtattataaatgtagacaggtagaatggtagattgaagggtggataaaacatctgtgttttttttttcctatcagcaaatctatgtgtgacctcttcataaaattttgacgcaagccaaatattagtgtttccttttgtcaaaatcatcattagaatgagtggcatggtgggtc

SEQ ID NO: 378827 - DNA, 201 bp, Homo sapiens
tcctggggagagagtcagattggcccaccgactggctactagctacctggcaaactttggcttttcccatggctggcaaccttccagctactcccatgccrctaagctatgagacatccagactcaataagttgactggctcttcattaagaggaagtgggggaaagtagaccatgcatgactatttggatcagccaggcc

SEQ ID NO: 378828 - DNA, 201 bp, Homo sapiens
ggtcattgccagaatgtctatgaatatttgtattataaatgtagacaggtagaatggtagattgaagggtggataaaacatctgtgttttttttttcctatcagcaaatctatgtgtgacctcttcataaaattttgacgcaagccaaatattagtgtttccttttgtcaaaatcatcattagaatgagtggcatggtggg

SEQ ID NO: 378829 - DNA, 201 bp, Homo sapiens
acaaaaaaaccccaaaacccatctctctctctctctctatctctctatctcatctatctatctatctatctatctatctatctgtctatctaatctatctrtctctatattccatgtctttcagaaaaggaactaacagctagtgcctgctatgtgctaaagtctcatggtatgtgttttacatactttatcttatttact

SEQ ID NO: 378830 - DNA, 201 bp, Homo sapiens
ctccgcgatctcagctcactgcagcctttgcctcccggattcaagagattcccccgcctcagcctcccgagtagctgggattacaggcacccgccatcatrcccagctaatatttgtatttttagtagagacgggtttcgccatattggccaggctggtcttgaactcctgacgtcaggtaatccgcccacctcggcctcc

SEQ ID NO: 378831 - DNA, 201 bp, Homo sapiens
gcctagagataatttataggcacagagatgatatgctgactccagcttgacttaatttaactctgctcaggcatttagttttctctctctaccatttcttracaatattctatcttttttttctccagttcagaggcttcacagatttcctgaacttctctgcttactgagcatagcaaggtcatttataggtccttgcac

SEQ ID NO: 378832 - DNA, 201 bp, Homo sapiens
ttctgttaggtttctactcattaaccaaaattcatctgtagctttctttttttcttgccacacagtcttctgttttttttctagagctactgctccatttytaattgagaaagttctaattgaaccgacttctggttgactaaagaactgttttttgtttttgtctttgtttttttttttttttttttttttgcccctttg

SEQ ID NO: 378833 - DNA, 201 bp, Homo sapiens
gcactgacccatcacctgagttctgttaggtttctactcattaaccaaaattcatctgtagctttctttttttcttgccacacagtcttctgttttttttytagagctactgctccatttctaattgagaaagttctaattgaaccgacttctggttgactaaagaactgttttttgtttttgtctttgtttttttttttt

SEQ ID NO: 378834 - DNA, 201 bp, Homo sapiens
ccagtagctatatatatttccccagtaatgcctgattaaacttcaagcattttacatgttgattttttatatattctagactctaaagcaatgctgtccartagaatgctctgtgtttatggaaatcttctatgtctgtgctagatcctgtagccagtagccacatgtgtggctattgagcacctgaagtgttgctagtgc

SEQ ID NO: 378835 - DNA, 201 bp, Homo sapiens
acaaggccttgaggcaggtattgccaccttatttcaaacgtgaagaaatagtctttggttaagtaacttgcccaatgtcacacaatggtggaattaggatsgtaagatttaatgtaggcatttcattccatattttgcaattagtatttgttattgtaggtttctggaatgttaatgacattaaattggcatagtgttccc

SEQ ID NO: 378836 - DNA, 201 bp, Homo sapiens
gcagcgattgtgccactacacagttaagatcctgtctgaaaaacaaacaaacaaaaaaaccccaaaacccatctctctctctctctctatctctctatctyatctatctatctatctatctatctatctatctgtctatctaatctatctatctctatattccatgtctttcagaaaaggaactaacagctagtgcctgct

SEQ ID NO: 378837 - DNA, 201 bp, Homo sapiens
aaggctgcagtgagcagcgattgtgccactacacagttaagatcctgtctgaaaaacaaacaaacaaaaaaaccccaaaacccatctctctctctctctctatctctctatctcatctatctatctatctatctatctatctatctgtctatctaatctatctatctctatattccatgtctttcagaaaaggaactaaca

SEQ ID NO: 378838 - DNA, 201 bp, Homo sapiens
tttcttaatctagcagtataattaggttcaagtcagatttcagatttcttcccctcctctcttttcacctctcacaggcaaagactaccaagcagaagcaygatggcacggtgggcctgctcacatacccagtactccaggcagccgacattctgttgtacaagtaagaagagagttcagcccagtcttatacatactcat

SEQ ID NO: 378839 - DNA, 201 bp, Homo sapiens
gaaggctgcagtgagcagcgattgtgccactacacagttaagatcctgtctgaaaaacaaacaaacaaaaaaaccccaaaacccatctctctctctctctctatctctctatctcatctatctatctatctatctatctatctatctgtctatctaatctatctatctctatattccatgtctttcagaaaaggaactaac

SEQ ID NO: 378840 - DNA, 201 bp, Homo sapiens
ttaaaaaaacctcagcgcactgtattacttgtattatcaggtataaactcccagccaagcattgcatgtataaaattgcctgttttttaatcccgccatawtgcttcagtataaaattttcctcatcaagacttctctataatggttcattcttcccttatttgatgtactatgtcatgatctgacactgcaaactttaca

SEQ ID NO: 378841 - DNA, 201 bp, Homo sapiens
ttatatctattccccagaaatactacattatagaagtatgtttctacatgtataatgtactacattatagaagtatgtttctgtgagaaactaataatatyaagagctgacatttaaatagcacttacaatgtgttggaaaccattgtaagtactttatatacatcaacccttacaacaaccttctaaaatttgcactctt

SEQ ID NO: 378842 - DNA, 201 bp, Homo sapiens
ataaaaaattcaaaaaattagctgggcttagtggcatatgcctgtagtcccagctagtcaggagactgaggtaggagaatcacctgagcccaggaaggctkcagtgagcagcgattgtgccactacacagttaagatcctgtctgaaaaacaaacaaacaaaaaaaccccaaaacccatctctctctctctctctatctct

SEQ ID NO: 378843 - DNA, 201 bp, Homo sapiens
aatattgaattactccctatgtgacagggaggaaaaactcttgcctgaagaactttctgctgcctttgatttgaagagtggggtggggtgtctttcaagtrtgagctgtagttctgaggtaaagagcatctggtcagggctgggaataatatgtgctgactgggtgagggaatgaggagtagttttaaaacacaattgtgc

SEQ ID NO: 378844 - DNA, 201 bp, Homo sapiens
taaagtcctcaaaaatatacacctgaggatgctgatccctgcactcgctgtactactggccagggcttctgatttcatccccctctcaattcttccgtgcwaacccctcatcagcctcccttgacccccatttggccttctagagataaagcctcccaattggcatgtgcttagggccatgctactgtgaaagcttctggg

SEQ ID NO: 378845 - DNA, 201 bp, Homo sapiens
aatgcaggtttctatcatatttagatgctttttatgtctgcaactgaggactgccctcagacagaaagtcacaaaacaggacacttactccgtgttatccrttttttaaaagagtaaaccacacccctagtttctgcctgctttcgattgttctccaatgccttcaggccgttgatttttatattttgctcagagttgaaa

SEQ ID NO: 378846 - DNA, 201 bp, Homo sapiens
catcattggccaaacacagaatccatacttctttaagcactaagtcatgattgtattgtgcaaagagtgaaatattgatggttagtagatttttgcaaaartatttgttattcagttgaagtatgataaagtgtccacattttattgcagttgaacatgtttcattattagcggttcctagtctgggtttggccagtattc

SEQ ID NO: 378847 - DNA, 201 bp, Homo sapiens; identical to SEQ ID NO: 82130

SEQ ID NO: 378848 - DNA, 201 bp, Homo sapiens
gacacactgaatctgaaatgtataaggccatgcaaagtgtttagaatactcaaaacagctttgaaaaagaaaacacaactagaggacttatactgcctttygaagcttattatacagctataataattgagagtgtggtatggacatagacttacaggtcactgaaaagaaatgtagaaagctgaaactggatcccttcct

SEQ ID NO: 378849 - DNA, 201 bp, Homo sapiens
atgtctacaatttatatgaaaacggtttattttgccaggtgttgcctgacagaaaactgttgaaatctgacaagatgagcgtagtcataaagtcagaggarttaagatctgacatgttctgtttaaatgttgatggtattaggtaaatttaagcctgtcatcattggccaaacacagaatccatacttctttaagcactaa

SEQ ID NO: 378850 - DNA, 201 bp, Homo sapiens
gggaggtcgaggctgcagtgagccaaggtcacaccactgcactccagcctggacagcagagaaacagagagagacccgtctcaaaaaaaaaaaaaaaaaaagttatggtatgaaattttcatctgatctttgaatcatgtattcacaatgcaaccaagaaacagcctgctcagagttttattccgtaaactaataatttga

SEQ ID NO: 378851 - DNA, 201 bp, Homo sapiens
gctttgaaaaagaaaacacaactagaggacttatactgccttttgaagcttattatacagctataataattgagagtgtggtatggacatagacttacagrtcactgaaaagaaatgtagaaagctgaaactggatcccttccttacaccttatacaaaaatcaattcaagatggattaaagacttaaacgttagacctaa

SEQ ID NO: 378852 - DNA, 201 bp, Homo sapiens
gaaaaacgttttgaaatcataaatctttatacagatctttagtcattaatatcatttgtgatattttaggattctgaggaagatacttgtcccacaatgcygttattaaaatggccttagaaaaggactactaaaaatttatggccacttttcctgtatgtatcttctttttctcttgaaaagcttcctttgaagtcaaag

SEQ ID NO: 378853 - DNA, 201 bp, Homo sapiens
cctcagggatctagaactggaaataccatttgacccagccatcccattactgggtatatacccaaaagactataaatcatgctgctataaagacacatgtrcacgtatgtttattgcggcactattcacaatagcaaagacttggaaccaacccaaatgtccaacaatgatagactggattaagaaaatgtggcacatata

SEQ ID NO: 378854 - DNA, 201 bp, Homo sapiens
aaacttccccttattccaaactaaagaattgaagatgtcttgagaatagagaatcaaagagagagagaaaaaaaagacaaactgcagcctgctaatgactrcccagggaagtttaagacactaagtcattataaatgctaaagaaaaaatttcttaaacctctactattgtttcagtggcatttatgaatagggctattaa

SEQ ID NO: 378855 - DNA, 201 bp, Homo sapiens
cccttccctccgcggcttcccatcccgcgaggttcttctcatcccactgccctctatttatttctctcctcccgcttcttagggaaagtacatgccttccytcgcctaaggtctactcgtctatgactgtcggcctgctcagagcgtagtgacgttgcaaggatacgtgatgacgtaaaggtttcttggtggaaaaagcgc

SEQ ID NO: 378856 - DNA, 201 bp, Homo sapiens
gggacacagccaaaccatatcaatcatacaacttttgtataaagcaaaaatttaaaatatgggattaaaaaatgaatataagtaaaagtccttttttttttatttgctgtgcttcaggagatagtcttgcacagcctctgagaatcacaaatctcattttggaaaccactgttttaattgctcatctccagtggccaccat

SEQ ID NO: 378857 - DNA, 201 bp, Homo sapiens
tgagacttattcacgatcatgagaatagcatgggaaacacgggtccccatgactcaattacctccctttgggtccctcccacaacacgtgggaattctgcragatacaattcaagttgagattatgtggggacacagccaaaccatatcaatcatacaacttttgtataaagcaaaaatttaaaatatgggattaaaaaat

SEQ ID NO: 378858 - DNA, 201 bp, Homo sapiens
cagatctagtgagacttattcacgatcatgagaatagcatgggaaacacgggtccccatgactcaattacctccctttgggtccctcccacaacacgtggraattctgcgagatacaattcaagttgagattatgtggggacacagccaaaccatatcaatcatacaacttttgtataaagcaaaaatttaaaatatggga

SEQ ID NO: 378859 - DNA, 201 bp, Homo sapiens
cccatggtcttgagcagctccactcctgtggctttgcagggtacagcctccctcctggctgctttcacaggccggcattaagtgtctgtggcttttccaggctcacggtgcaagctgtcggtgggtctaccattctgggatctggaggatggtggcctcttctcacagctccactaggcagtgccccagtaggtacactgt

SEQ ID NO: 378860 - DNA, 201 bp, Homo sapiens
ttgatttgtagaggttctttacatattctgagtaccaatcctttgttatacattatcatttttcagtttgtagcttgtcttttttttttttttttttttttgagacagagcctctctctgtcacccatgctggagtgcaatggcatgatctcagctcactgcaagctctgcctcccaggttcacgccattctcctgcctcg

SEQ ID NO: 378861 - DNA, 201 bp, Homo sapiens; identical to SEQ ID NO: 82128

SEQ ID NO: 378862 - DNA, 201 bp, Homo sapiens
caagtgctgtgtgcccctgttactagttaaagggaataattgtgcatgtgacaattcttggtctctttctcttcaacacaaggactctgtctgtgttctcyttgtgtgtcctccctatgtgatcgacattctcttttcagtctgtcaactggatgcatcttttgaaatgttttggctaggaagtcaatccctccctgagat

SEQ ID NO: 378863 - DNA, 201 bp, Homo sapiens
attttctgattcagtgaatttcaaattttttattgtttatgactatcagtaaaagatttttgagactttcctttaagataggtatatactgtacatcattrtattagtctgttttcatgctgctgttaaagatatacccgagactgggaagaaaaagagttttaattggacttagagttttacatggggaggcctcagaat

SEQ ID NO: 378864 - DNA, 201 bp, Homo sapiens
ctatgggcaagtggctcaagctctctgaatcccatttttaatgtctttaatagcaatttaaataagataatatattttgtctagcaaatgttaactttctrtcaccctcctccactatatacaatgctcccaccctaggctccttgatattgagaaggatttatataagggtagagtgggattagaagatggagataaagt

SEQ ID NO: 378865 - DNA, 201 bp, Homo sapiens
gggggaggggataccctttcagttattcaggattttaccaaacgtcttccaagtacagtctcagtggcaagcactttgacatactttatctacgggagatrtattctgggaactagagagaaaggagagaatgtgattttattaggtaatttcccggcatcatttgcatatgtattgccataatgagtaggtgtgaggatg

SEQ ID NO: 378866 - DNA, 201 bp, Homo sapiens
ctcttaataataaggagacaacctaattttttttcttttttttttcttctcagatggagtcttgctctgcatccaggctggagtgcagtggtgggatctcrgctcactgaaacctctgcctcccgggttcaaacaatcctcctgcctcagcctctagagtagctaggattacaggcacctgcaaccatgcctggctaatga

SEQ ID NO: 378867 - DNA, 201 bp, Homo sapiens
aggctggagtgcagtggtgggatctcggctcactgaaacctctgcctcccgggttcaaacaatcctcctgcctcagcctctagagtagctaggattacagrcacctgcaaccatgcctggctaatgattatattgttagtagagacggggtttcaccacattggccaggctggtcttgaactcctgacctcaagtgatcct

SEQ ID NO: 378868 - DNA, 201 bp, Homo sapiens
tatgaatagtgctgcaataaacatgagagtacagatgtgtctttgacatactgattttctttcctttgtatatatacccattagagggattgctggcttayatgatagtcctgtttttaatttttttgaggaaccaccatactgttttccataatggctgtactaacttactttctcaccaacagtgtgcatgggttccct

SEQ ID NO: 378869 - DNA, 201 bp, Homo sapiens
ttttttttttttttgagacggggtctcgctctgttgcctaggctagagtgcagtggtgcaatcttggctcactgcagcctccacctcccaggttcaagcarttctcccacctcagcctccggagtagctgggattaaaggtgtaccaccacgcccaggtgatttttgtatttttagtagagacggggtttcaccatgttgg

SEQ ID NO: 378870 - DNA, 201 bp, Homo sapiens; identical to SEQ ID NO: 82131

SEQ ID NO: 378871 - DNA, 201 bp, Homo sapiens
ttgtaaaatggctaaatcaagctatataacatatatattacctcacatacttagctatctttaagtgattttcaggtatacaatacattattattaactayggtcaccatattgtaccatagatctcttgaacttattcctctcgtctaactttttttgtgtcctttgaccaacatcttcccatttcctcttgccccattc

SEQ ID NO: 378872 - DNA, 201 bp, Homo sapiens
tgattgcagttgttaatgcatctggggaagtccagtgaaatctcactggctgaaatggaatttgactgagacagtgaggtcaagaccctatttttagagaggcagagatatcttttaatcatgtttttataaatatcaagatctaagcattatgttttactttcagtagtcacacctaggatcatagcatcatactagata

SEQ ID NO: 378873 - DNA, 201 bp, Homo sapiens
caaatagttgttatactgtattgttttttaatttgtattatttttctatcgtggtattgttattttttgatgcctaaatacacactgatttcatatatatrtatatatatacactaattttttaaatttttagagattaggaaggtgtatgtgcagttttgtcacatggatatgttgtgtagtggtgaagtctgagctttt

SEQ ID NO: 378874 - DNA, 201 bp, Homo sapiens
ttgattgcagttgttaatgcatctggggaagtccagtgaaatctcactggctgaaatggaatttgactgagacagtgaggtcaagaccctatttttagagaggcagagatatcttttaatcatgtttttataaatatcaagatctaagcattatgttttactttcagtagtcacacctaggatcatagcatcatactagat

SEQ ID NO: 378875 - DNA, 201 bp, Homo sapiens
ataacctaatacaatataaatgctatgcaaatagttgttatactgtattgttttttaatttgtattatttttctatcgtggtattgttattttttgatgcytaaatacacactgatttcatatatatgtatatatatacactaattttttaaatttttagagattaggaaggtgtatgtgcagttttgtcacatggatatg

SEQ ID NO: 378876 - DNA, 201 bp, Homo sapiens
atttttcagcttttcctccactgtattcggtaagtttatgatgcttcatataccaagaattgtgtttcattagtacttctagccctggaattgttttgctmtgctgggttgctttcaaactgattactttgtgttgttgactaatctccttgtgatcaaggatagaagttagtgaccaatagttttatgtaattccaatgt

SEQ ID NO: 378877 - DNA, 201 bp, Homo sapiens
gggtctcgctctgttgcctaggctagagtgcagtggtgcaatcttggctcactgcagcctccacctcccaggttcaagcaattctcccacctcagcctcckgagtagctgggattaaaggtgtaccaccacgcccaggtgatttttgtatttttagtagagacggggtttcaccatgttggccaggctggtcccaaactcc

SEQ ID NO: 378878 - DNA, 201 bp, Homo sapiens
aaatgctttttataatttaaataattatgtagaattaaaatttccttttgaagaattgaaaacccaaatatgattttattaaaagtaaaaggaaaccaagrcatagaaaatgtaaataaccttattaagaagtaatattagaaatagagtgtatgttttctaatttctagcccaagatctcatacaccaaattataatatc

SEQ ID NO: 378879 - DNA, 201 bp, Homo sapiens
gcgcaccatcatgtccagctaacctttttgtaccaccatgcctggctaacttttttgtatttttagtagagatggggttttgccatgttggccaggctggycttgaactcctgacctcagataatccaccttcctcagcctcccaaagtgctgggattacaggcatgagccaccatgcctgaccacttctcagattttttt

SEQ ID NO: 378880 - DNA, 201 bp, Homo sapiens; identical to SEQ ID NO: 82124

SEQ ID NO: 378881 - DNA, 201 bp, Homo sapiens
tcataaaattaagtacttatctttgtcaaaagataatataaatagaagacagccatacaataagacaatatatgccctacatgtaattgacaaaatattarcatctagaatatgtacagattctgaaatcaatacaagacaatccaatctgagaaaaacaggcaaaataatttaaataggctcttcatagaataggaggta

SEQ ID NO: 378882 - DNA, 201 bp, Homo sapiens
cacacacattttgtatatgcatatgtgtgtgtgtgtgtgtctagctatatgtatgtatccatatatgcacacacacacacacacacacacgtgcaccttcrtaactgcagggtattgaaagatttcttctatgatacaataatctgttatcagaagttatatatctgattcataaaattaagtacttatctttgtcaaaag

SEQ ID NO: 378883 - DNA, 201 bp, Homo sapiens
aactccagatggatacagacctaaatgtgaagagtaaagataaaacttcaaagtgcacacacacacacattttgtatatgcatatgtgtgtgtgtgtgtgtctagctatatgtatgtatccatatatgcacacacacacacacacacacacgtgcaccttcataactgcagggtattgaaagatttcttctatgatacaat

SEQ ID NO: 378884 - DNA, 201 bp, Homo sapiens
ttaggaaacatatttgagtgtatttatatttgttaaactctcaaagttgttcgctaccaacaataggtgctctttcagctcacaatggaaagggagcaaaygtctgcgtagattagtggacttggagaatatatttgtaaaattggcatcacctccaaagttcctaggaggagataagaatctaaatggcccatggcataa

SEQ ID NO: 378885 - DNA, 201 bp, Homo sapiens
ttggccttctagagataaagcctcccaattggcatgtgcttagggccatgctactgtgaaagcttctgggaaaagaagacactgcaccagtgtttttgcawccctttcccctaaagctgtgaattgcaattctttgcatggaagtctgataatagcatgaagatgacagtatctgtacctcgtggcatgactccagagccc

SEQ ID NO: 378886 - DNA, 201 bp, Homo sapiens
ctcaccaactgtcccttgtctcagaggtataaaaccaaggccttaaactggacagagagtctagtgcttccattattctggtaatttaggaaacatatttsagtgtatttatatttgttaaactctcaaagttgttcgctaccaacaataggtgctctttcagctcacaatggaaagggagcaaacgtctgcgtagattag

SEQ ID NO: 378887 - DNA, 201 bp, Homo sapiens
tgagcagtacctggtacttagtaaatactcagcatatagaactttttcattagctgcctaaggtcacccagtttgtaggtggcaaagccagggcttttacrgttttcccctaaagcaccacttacggaagatgtactcatgaggcgggaaccttgttctgtcccctgcctacatacccttctccagccctcacgtctctgc

SEQ ID NO: 378888 - DNA, 201 bp, Homo sapiens
taaatagacttatagaaagagattttcatcccaattacctggtaatgttattgaatacttttttattacaatctgtgataaaatgccatttatgtaaccartaagacatagtgtggccattgagccaagtttgtggtttacctttgactgtagttaaaacaagtgtgatgaatgaacaattgctgttacagctggatacaa

SEQ ID NO: 378889 - DNA, 201 bp, Homo sapiens
tcacagaagaagaaatagacaatctgaatgggtctaaatctgttaaatcaattgaatcaataatttaaaaccttccaaaatataaagtaccaggccttgakgggttcgctgatgaactctagtagatgttttaggaagaaattgtaccgattctctgtaatccctttcagaagatagaagcagagggaatacttccaaact

SEQ ID NO: 378890 - DNA, 201 bp, Homo sapiens
gtctgatccatagataaagacttaggtctaaacattccctctatagttggtgaacatttgttgaataccaacagtgaaatattcacaggaaatgcagctgyttgcaatatcatttctgtctctaagaaagagccttgctgttgtttttctgtctgtcttttattaaaggtccacacacgttcctgttggggaggatcaagt

SEQ ID NO: 378891 - DNA, 201 bp, Homo sapiens
aaactccagatggatacagacctaaatgtgaagagtaaagataaaacttcaaagtgcacacacacacacattttgtatatgcatatgtgtgtgtgtgtgtgtctagctatatgtatgtatccatatatgcacacacacacacacacacacacgtgcaccttcataactgcagggtattgaaagatttcttctatgatacaa

SEQ ID NO: 378892 - DNA, 201 bp, Homo sapiens
gttatactgacacagtgacagacagatagactaatgagtcagaattgaaagaccagacccttaccagattcttcatagagggatccttgatttatgatggygatggaatttcaaagcagtgggaagagacagtcttttcaataaatggtgctagaataatcagatattcatataggaaaaaaagaagaaattagatgctta

SEQ ID NO: 378893 - DNA, 201 bp, Homo sapiens
tctgtttctcaccactgtactgaagctgaaagtgtttcaaagctagtaggcagccttcttttgatggatcttattcacttgaaattaaagacagaagctcycctaatcacaaaaattcttttgccataattaataacttgggaattttcaattgcttttgagtacagtaagaaaattaaggaaattacacattttggatgt

SEQ ID NO: 378894 - DNA, 201 bp, Homo sapiens
gatgcctatgattcctaccttcactacatgagatgaagtacatgaaagggccagggcatgtttctgatagctaaatttcatcacaagaaggaaaatacatstgcaaaagcattccatcacatgatagaaggatggtaggtacagcacgtgtaaggaaaatagatgtgtaactcttgaaatttgaaaatggcctaaataagc

SEQ ID NO: 378895 - DNA, 201 bp, Homo sapiens
cagaattcatttattagatctaggacctttttggatgaatctttgggttttctaggtatgtgatcatatcattgccaaagagcaacagtttgacttcctcrttaccaatttggatgccctttatttctttctcttgtctgattgctctggccagggcttccagtattatgttgaatagaattggtgaaagtgggtatcctt

SEQ ID NO: 378896 - DNA, 201 bp, Homo sapiens
tagcgctctgtcacccaggctggagtgcaatggcgctatctcatctcactgcaacctctgcctcccgggttcaagtgattctcctgcctcagcctcccaartagctgggattacagacatccaccactgcgcctggctaatttttgtatttttagtagagacggggtttcaccgttttggccaggttggtctcaaactcct

SEQ ID NO: 378897 - DNA, 201 bp, Homo sapiens
atgtatatgtgttatatatatgtgttgtatacatatatatatacacacacacatacacataaaggcacacacatacatatataatttttattaaacaacarcaaatagttgctaagtacctacaatgccactgatccggaaaaagggcactatacatggccttgagggaaaggaaaggaaggacttgacatgtgttgagaa

SEQ ID NO: 378898 - DNA, 201 bp, Homo sapiens
gacagcttgatgtgaatgaatgggataggatttttaagatcaaccagctccatgcccaaaacctcctgtttaaaaaaatgtttaatgtcttttctttttcmttacaacttttttgtttgattggcctctttccaagttttttccttgcaacgtatttattatttatttgtattgaggtgaaattcacataacataaagtta

SEQ ID NO: 378899 - DNA, 201 bp, Homo sapiens
tccactaaattcattcagatagagatgaaagtgagtatctgggctaatcagattatctttctcaagaatctgaaaaatttgggaagaggataagaagactrgaaactgacgggcacagtggctcacgcctgtaatcccagcactttgggaggccgaggcaggcagatcacctgagctcaggagttcaagaccagcctggcc

SEQ ID NO: 378900 - DNA, 201 bp, Homo sapiens
ccagataattccagaattctagttttgtgtttgatgtttagagctcagcatcgtgggacctttccagttactcggtttggacagcttgatgtgaatgaatrggataggatttttaagatcaaccagctccatgcccaaaacctcctgtttaaaaaaatgtttaatgtcttttctttttcattacaacttttttgtttgatt

SEQ ID NO: 378901 - DNA, 201 bp, Homo sapiens
cggagctcaggcacactttctagcccgtacaacgggcgttctgaagggcgtagtcatagaagtagaggtaggagctgagataaatcccataggcataaaargacccagcgctgccgggagcaggagtctttgaattccagtgactgtaggcgtcactgaagactgttcagctgctcggtagatttggaaataattatgttt

SEQ ID NO: 378902 - DNA, 201 bp, Homo sapiens
agagctcagaagtcagtgcccagggaggggcggaagctccccaaggccaggactgcctactctggttgggcagagaaccgagagagggagctgaagaaggrgaaacccaagcacgagcacaggtcctcaagcaggagggaggcaagagaagaaaagaccagggataaggacagagggcggagctcaggcacactttctagc

SEQ ID NO: 378903 - DNA, 201 bp, Homo sapiens
tacaggcagagcaaccatcctcttcgtcacccagaagcaagacagtaaaggaagaggacaaccctggccctaagaagcacagcagcaagaactaggagagrgctcagaagtcagtgcccagggaggggcggaagctccccaaggccaggactgcctactctggttgggcagagaaccgagagagggagctgaagaagggga

SEQ ID NO: 378904 - DNA, 201 bp, Homo sapiens
attagagattatttatctacatttttaaaaggctttttgctatttcctttatactggtaggtttatagtgtatttaagcatttaattgatcattaaatatrtaacagaaaggataagaatttagaaaacaattttatttaatgttttgggagccaattccagttaacattagttatacccacctccccatcacacaattat

SEQ ID NO: 378905 - DNA, 201 bp, Homo sapiens
gtcattgccagaatgtctatgaatatttgtattataaatgtagacaggtagaatggtagattgaagggtggataaaacatctgtgttttttttttcctatcagcaaatctatgtgtgacctcttcataaaattttgacgcaagccaaatattagtgtttccttttgtcaaaatcatcattagaatgagtggcatggtgggt

SEQ ID NO: 378906 - DNA, 201 bp, Homo sapiens
agctagtcaggagactgaggtaggagaatcacctgagcccaggaaggctgcagtgagcagcgattgtgccactacacagttaagatcctgtctgaaaaacmaacaaacaaaaaaaccccaaaacccatctctctctctctctctatctctctatctcatctatctatctatctatctatctatctatctgtctatctaatc

SEQ ID NO: 378907 - DNA, 201 bp, Homo sapiens; identical to SEQ ID NO: 82132

SEQ ID NO: 378908 - DNA, 201 bp, Homo sapiens
ttccttcattaatactaattaaatactagtgatatcttctgtgagtcttatgtcataataggtgctagagatatagcagtcaataagaagtaacccccttygtgagacttatagtctgtttgggaaaagacaattaaacaagtaataagaaagtgtaagaagtgctctgagtacaggattccagtgctataggaggatctg

SEQ ID NO: 378909 - DNA, 201 bp, Homo sapiens
cctaatccatccagtcagctactgctgccacttaaagtcctcaaaaatatacacctgaggatgctgatccctgcactcgctgtactactggccagggcttytgatttcatccccctctcaattcttccgtgctaacccctcatcagcctcccttgacccccatttggccttctagagataaagcctcccaattggcatgtg

SEQ ID NO: 378910 - DNA, 201 bp, Homo sapiens
cctcccttgacccccatttggccttctagagataaagcctcccaattggcatgtgcttagggccatgctactgtgaaagcttctgggaaaagaagacactkcaccagtgtttttgcatccctttcccctaaagctgtgaattgcaattctttgcatggaagtctgataatagcatgaagatgacagtatctgtacctcgtg

SEQ ID NO: 378911 - DNA, 201 bp, Homo sapiens
ctgtactgctcattgggtcacttgaccctcactgcttcagcatgcttaatcacctaagaatcaagacaggtcattaggattggttagatgaatatttctcycacttacttttattttttaaatgccatgacttttttgttttttgttatttaaatgtgattttaagggaacattccagttttctcagtggcatgctgtgag

SEQ ID NO: 378912 - DNA, 201 bp, Homo sapiens
ttattattgcccaaagtatccacatgtttataaatgattggaaggtcataccaattttatttcaacaattttctgagagggtatgaatttcaaacttgtcrcttaactgacttttattgtcactctggccctaattgtatttttcacaggtaccactaattatactaggatttgccacctctttatattatactgaggttt

SEQ ID NO: 378913 - DNA, 201 bp, Homo sapiens
atagaatccattagatcagtcatgttgctgctcttttgattctctactaccatttctgtacttacagacagagcaataacctgtgaacactttaatgctgkaaaaataactatgaggaattagtttctccctaagggagaaggtagcatccaacttcctgatcctaaatatgtagtttcatgagactatgttcctttattt

SEQ ID NO: 378914 - DNA, 201 bp, Homo sapiens
ataggggatgctgaaggaggactggccagaagaatttaaagcttcattgggtattatctctcctcctggtggccttaaatctttagaaagtaaacccttcrttatatctttcacagtacccagcaccaggactttcacatcgtgggtcttcaataagtaattgctgaattagagagtcattattgcatatcctacaagcaa

SEQ ID NO: 378915 - DNA, 201 bp, Homo sapiens
ggatccgacatcaggcaaagatgcatgcagagtcattatgaaaactaaatgtgttttctgtttagtttggttgctttgtgaatctggaaccattttgacaygtggaaatattcattttgatgtgcttaaagtgtattgattatggtaattgttttttctgtgttggttgcagtccattgtgatttcctatgggctactgta

SEQ ID NO: 378916 - DNA, 201 bp, Homo sapiens
tgtaattgctttctaatctgctctgttggctaatttggcttgggggcgtcaaggtgacctctgcatgtcagcctcactataattacaagacaggtatagcraagtccactcaaagaagagaaagttacaaaggtggggtgtctgcatgtacatcccagagaggagtatcatgtaggaccatgagtgctgaggaaaacataa

SEQ ID NO: 378917 - DNA, 201 bp, Homo sapiens
atctcagctgctggccaaaggatgaatgttctcagataatcagctgaagaggggaatcaggcaggtgtcaatgtggatgtgtgagcagtgataattgttgrtatgataagcctttagttggccacaagagataatgaaaatatcatatacccccagaatgaacacttgaaaatcaatgttagaattttcttatgaaggctg

SEQ ID NO: 378918 - DNA, 201 bp, Homo sapiens
catttataaggggaccacaacatacctggcactgtgctatttactgggtatataaagaaggaaaagatagtccctgccctagaagagctcatattctaggygggaaaatatatctatggagcaaataaaaaaatatttaccaagttatcaatgtgatatgtgcaataatgaagaattgatgaaggaggcatctgttcttct

SEQ ID NO: 378919 - DNA, 201 bp, Homo sapiens
ctgtatcactccaatctctgcctccattgtcatgtggcccttttccctctatgtgtctgtgtgtcttctcttcttttaaggacacaagtcattgtatttawgccacttcatcttaactgattatatctgcgaagatcctatttacaaataaagttacattctgaagttctaggtagacatgaattttggagggacataatt

SEQ ID NO: 378920 - DNA, 201 bp, Homo sapiens; identical to SEQ ID NO: 82133

SEQ ID NO: 378921 - DNA, 201 bp, Homo sapiens
gtaaactaactccatattttctctgccactagactaatttttgaagatgatactgtctctccagaaactcaaattgcacagagactttaaaaggagccaasagtacaaaaataagcaaataaaaatgatcctttgcccatgatttttcttccttcttcaagggaagacgctctggatacctccatgagctttgctttcaca

SEQ ID NO: 378922 - DNA, 201 bp, Homo sapiens
ttccaacctactttaaattcagacacattggcttaaagaatcttgtcatgtagtctcaccctctgattcccagagcccagtctcttcaggaccatagcacmccactgctggcctggccctccacattcagtctactctgatgccttttctaatgcaactaattgcttttgggtctccagcaccatctaaaagaaaaaaaaa

SEQ ID NO: 378923 - DNA, 201 bp, Homo sapiens
tcctaaaaccattatcactggcaggcttagagaatacttcacaacgttggtcatttaccccttgaaggtaaactaactccatattttctctgccactagaytaatttttgaagatgatactgtctctccagaaactcaaattgcacagagactttaaaaggagccaagagtacaaaaataagcaaataaaaatgatccttt

SEQ ID NO: 378924 - DNA, 201 bp, Homo sapiens
tgttcatgcaaagctccaaaacaagaccaagctaacagtgttggaaggagacattctgaatgagtcatgccttaaaagagcctgccaggacatcttggtcrtcatccacactgcctctatcattgacgtcttcggtgtcactcacagacagtctatcatgaaagacaatgtgaaaggtacagtatcctggggaggagatgg

SEQ ID NO: 378925 - DNA, 201 bp, Homo sapiens
aaaaaaaaaaccttgtcagtttctacttgcccataacctgtaagtacccctacagtgcaaggagtatgctaagaaaactagtttttcattttaattcttaytctctacagctcccagcaacaggggatgtgaaatgacaggggaagtgttagaggcatctgtttcctaaaaccattatcactggcaggcttagagaatact

SEQ ID NO: 378926 - DNA, 201 bp, Homo sapiens
gtcctccaccaggctccacaggaaacaccagtgcagggtttggaatactaagtagaaggaaggtttatttattaccaccaccccccctttacataactggrtaaacagagtcacaaccagaattggaagcagcttgcctggagaacacacaatcaggaaaagtgtgtgggtatccagaatctccccaaacacactatttgc

SEQ ID NO: 378927 - DNA, 201 bp, Homo sapiens
ctctgatgccttttctaatgcaactaattgcttttgggtctccagcaccatctaaaagaaaaaaaaaaaaaaaaaaaaaaaaccttgtcagtttctacttrcccataacctgtaagtacccctacagtgcaaggagtatgctaagaaaactagtttttcattttaattcttattctctacagctcccagcaacaggggatg

SEQ ID NO: 378928 - DNA, 201 bp, Homo sapiens
gatgtggaaaaattgaaatactcatgcattgttgatgggacatgcagccatgttggaaagcagtttggcagtttcttaaaacgttgaagatacatttaccrtattacctagcactttcattccttgttgtctactccaaaggaaaaaaacctatgtccacacaacacatgaatgtgaatattagtagcagctttatccata

SEQ ID NO: 378929 - DNA, 201 bp, Homo sapiens
gattcccagagcccagtctcttcaggaccatagcaccccactgctggcctggccctccacattcagtctactctgatgccttttctaatgcaactaattgyttttgggtctccagcaccatctaaaagaaaaaaaaaaaaaaaaaaaaaaaaccttgtcagtttctacttgcccataacctgtaagtacccctacagtgca

SEQ ID NO: 378930 - DNA, 201 bp, Homo sapiens
acagcccttttgtgcctaaggactgggactgtccatattctcagagtgtagcttcctgattttttagattttaaataatctgtctttaatggtatcaatgraaaatcataattttccaatattcttacttgccaaaatataaagtgataaccctaggttcttttccaaaattaaagtatacacttacacacacacacacac

SEQ ID NO: 378931 - DNA, 201 bp, Homo sapiens
gtcaggacagaattatccagcacatgtcttcccacaatattttcttaaccataagattttccctgtatccagaatacaatctcttcagctcaccaccgggyctactattacagagccatttcttgccaggtgcccaaagtgcagcctcattcgatcctcatcccttaaatattgggtggtttttgcaaattgtggctttcc

SEQ ID NO: 378932 - DNA, 201 bp, Homo sapiens
ctttaatggtatcaatgaaaaatcataattttccaatattcttacttgccaaaatataaagtgataaccctaggttcttttccaaaattaaagtatacacktacacacacacacacacacacacacacacacgtccacaaaacccaaaagtctagaaattcttcctctctagagcccaaatgttcatttatttttattttt

SEQ ID NO: 378933 - DNA, 201 bp, Homo sapiens
actttaacagagttaaaagcagccctggaggccaggcacccaatatagccaaacccattgactccaggcttcaccttcactgtggtgccttgggaatgccrctggcgctgcacaagaaaatgtggctgtctgtcgaacgggagaagcagaaatctacagcatattatttaacccataattatcatattgagaaattctttg

SEQ ID NO: 378934 - DNA, 201 bp, Homo sapiens
attcagagccctcctgcccacctcaaagaagaagtcctcttgagagaactagcaaagctggttcacagaggtctgtcaggacagaattatccagcacatgycttcccacaatattttcttaaccataagattttccctgtatccagaatacaatctcttcagctcaccaccgggcctactattacagagccatttcttgcc

SEQ ID NO: 378935 - DNA, 201 bp, Homo sapiens
ttaatggtatcaatgaaaaatcataattttccaatattcttacttgccaaaatataaagtgataaccctaggttcttttccaaaattaaagtatacacttacacacacacacacacacacacacacacacgtccacaaaacccaaaagtctagaaattcttcctctctagagcccaaatgttcatttatttttatttttat

SEQ ID NO: 378936 - DNA, 201 bp, Homo sapiens
cacttgcctcccagcgcaaaaatcataccttccagatgtcaccatagtcatcattttgaaccttgtgtgcaggctgatgagaacattcagagccctcctgyccacctcaaagaagaagtcctcttgagagaactagcaaagctggttcacagaggtctgtcaggacagaattatccagcacatgtcttcccacaatatttt

SEQ ID NO: 378937 - DNA, 201 bp, Homo sapiens
taatggtatcaatgaaaaatcataattttccaatattcttacttgccaaaatataaagtgataaccctaggttcttttccaaaattaaagtatacacttacacacacacacacacacacacacacacacgtccacaaaacccaaaagtctagaaattcttcctctctagagcccaaatgttcatttatttttatttttatg

SEQ ID NO: 378938 - DNA, 201 bp, Homo sapiens
ttttttagatgataaaactagggctaagagatgacaagtaacttgtcctaggttccccaggtaagtaagtaagtaggtgagttaggctttaaattcactcytgtgtgactccaaaggctgtggatgctctttctactgtggctccaataaaagataaactaaactccaacttcagactcttgatgtcaagccaccacttgc

SEQ ID NO: 378939 - DNA, 201 bp, Homo sapiens
aatggtatcaatgaaaaatcataattttccaatattcttacttgccaaaatataaagtgataaccctaggttcttttccaaaattaaagtatacacttacacacacacacacacacacacacacacacgtccacaaaacccaaaagtctagaaattcttcctctctagagcccaaatgttcatttatttttatttttatgt

SEQ ID NO: 378940 - DNA, 201 bp, Homo sapiens
atggtatcaatgaaaaatcataattttccaatattcttacttgccaaaatataaagtgataaccctaggttcttttccaaaattaaagtatacacttacacacacacacacacacacacacacacacgtccacaaaacccaaaagtctagaaattcttcctctctagagcccaaatgttcatttatttttatttttatgtt

SEQ ID NO: 378941 - DNA, 201 bp, Homo sapiens
ttctgggtggcagcgatgtgtggactgtcgccataagtccttccatgacaccaaagttgtcatggatgaacttggccaggggtgctaagcagttagtggtrcaggtgacattgctgatgatcttgaggttgttgtcatacttctcatggttcatgcgcgtctcagatatgggggcgtcagcagaggggcagagataatgac

SEQ ID NO: 378942 - DNA, 201 bp, Homo sapiens
gaatcacaaagagagaatgagaaagacagagtgagagagagagagagagagcattagtgagagggagagagtgcgcactagtgcacagcacagagcagagmcagagtaagaggcagtatgaggccagacatgcctcatttagatttcacatatatgacttttttttaaccatttgtctgttatcaccacaataagttgact

SEQ ID NO: 378943 - DNA, 201 bp, Homo sapiens
gcctgccaggacatcttggtcatcatccacactgcctctatcattgacgtcttcggtgtcactcacagacagtctatcatgaaagacaatgtgaaaggtayagtatcctggggaggagatggagcaatgtgggaaaatgagaatcagaaagaaggacaggatggaaagagaagtttctccactgaacacctgctgtactct

SEQ ID NO: 378944 - DNA, 201 bp, Homo sapiens
ctcttcttagccctctcctgggtcaccttagaatcagatctgttccccagcatcttctgctccctggcgagggtttcctgctactttggattagccatgaygggctggaacttccttgtgacaggagcaggaatgtttctggatcagagaatcatccatctcttggtgaaggagaaggagctgaaggagatcagggctttg

SEQ ID NO: 378945 - DNA, 201 bp, Homo sapiens
tgaggagaggaggccaataaagacaagtttggggacttcagtgatgacatagtcattaatcaaccaaagaagcaacggtcaaaagaaacactttcaggggsattagggacacagttgaactgaagcgggtgaggaggttgctgtgggtccagagtgtgggaagggaagctgtctccctctggacctgggtatatcacagcc

SEQ ID NO: 378946 - DNA, 201 bp, Homo sapiens
ctatgactaccttagttacaccctgagcaaagaatttggcctctgccttgattccagatggagccttcctttagccctgatatgctggattggcttcctgytggaaatagtgagattcctgctcaggccaatttatacctgtcaactccccttcaatcgctacaggagatatcatcaagcttcatcctcctggcttcatac

SEQ ID NO: 378947 - DNA, 201 bp, Homo sapiens
cactcctgtgtgactccaaaggctgtggatgctctttctactgtggctccaataaaagataaactaaactccaacttcagactcttgatgtcaagccaccrcttgcctcccagcgcaaaaatcataccttccagatgtcaccatagtcatcattttgaaccttgtgtgcaggctgatgagaacattcagagccctcctgcc

SEQ ID NO: 378948 - DNA, 201 bp, Homo sapiens
tcatgccttaaaagagcctgccaggacatcttggtcatcatccacactgcctctatcattgacgtcttcggtgtcactcacagacagtctatcatgaaagmcaatgtgaaaggtacagtatcctggggaggagatggagcaatgtgggaaaatgagaatcagaaagaaggacaggatggaaagagaagtttctccactgaa

SEQ ID NO: 378949 - DNA, 201 bp, Homo sapiens
ggcaatgtggcctgggcccacattctggtcttgtggtccctgcaggaccccaagaaggccctaagcatccgaggacagttctactatatctcagatgacaygtcttaccaaagctatgactaccttagttacaccctgagcaaagaatttggcctctgccttgattccagatggagccttcctttagccctgatatgctgg

SEQ ID NO: 378950 - DNA, 201 bp, Homo sapiens
ttgctgatcactaccaactagggagttcaagactgctaactttagttttttagatgataaaactagggctaagagatgacaagtaacttgtcctaggttcyccaggtaagtaagtaagtaggtgagttaggctttaaattcactcctgtgtgactccaaaggctgtggatgctctttctactgtggctccaataaaagata

SEQ ID NO: 378951 - DNA, 201 bp, Homo sapiens
cataactgggtaaacagagtcacaaccagaattggaagcagcttgcctggagaacacacaatcaggaaaagtgtgtgggtatccagaatctccccaaacayactatttgctcagtgacttcagggatttggttttgctagtcaaagttttattagtcttcaataaaatgagaaaaagttttattagtcctcaacaaaatga

SEQ ID NO: 378952 - DNA, 201 bp, Homo sapiens
cacactccctccccagtcctccaccaggctccacaggaaacaccagtgcagggtttggaatactaagtagaaggaaggtttatttattaccaccacccccsctttacataactgggtaaacagagtcacaaccagaattggaagcagcttgcctggagaacacacaatcaggaaaagtgtgtgggtatccagaatctcccc

SEQ ID NO: 378953 - DNA, 201 bp, Homo sapiens
catgagctttgctttcacacagctcaggggaggctgcaaggtcctccccatgcaggtgttaccagcagagggcacactccctccccagtcctccaccaggytccacaggaaacaccagtgcagggtttggaatactaagtagaaggaaggtttatttattaccaccaccccccctttacataactgggtaaacagagtcac

SEQ ID NO: 378954 - DNA, 201 bp, Homo sapiens
tgtctctccagaaactcaaattgcacagagactttaaaaggagccaagagtacaaaaataagcaaataaaaatgatcctttgcccatgatttttcttcctkcttcaagggaagacgctctggatacctccatgagctttgctttcacacagctcaggggaggctgcaaggtcctccccatgcaggtgttaccagcagaggg

SEQ ID NO: 378955 - DNA, 201 bp, Homo sapiens
agactaatttttgaagatgatactgtctctccagaaactcaaattgcacagagactttaaaaggagccaagagtacaaaaataagcaaataaaaatgatcytttgcccatgatttttcttccttcttcaagggaagacgctctggatacctccatgagctttgctttcacacagctcaggggaggctgcaaggtcctcccc

SEQ ID NO: 378956 - DNA, 201 bp, Homo sapiens
aaaaaaaaagatgagtgtgtcagtgtgtgtgtgcatttgtgtgtgacagagagaaatgaggggagagagaatcacaaagagagaatgagaaagacagagtgagagagagagagagagagcattagtgagagggagagagtgcgcactagtgcacagcacagagcagagccagagtaagaggcagtatgaggccagacatgc

SEQ ID NO: 378957 - DNA, 201 bp, Homo sapiens
aaaaaaaagatgagtgtgtcagtgtgtgtgtgcatttgtgtgtgacagagagaaatgaggggagagagaatcacaaagagagaatgagaaagacagagtgagagagagagagagagagcattagtgagagggagagagtgcgcactagtgcacagcacagagcagagccagagtaagaggcagtatgaggccagacatgcc

SEQ ID NO: 378958 - DNA, 201 bp, Homo sapiens
gtgtgtgtgtgcatttgtgtgtgacagagagaaatgaggggagagagaatcacaaagagagaatgagaaagacagagtgagagagagagagagagagcatyagtgagagggagagagtgcgcactagtgcacagcacagagcagagccagagtaagaggcagtatgaggccagacatgcctcatttagatttcacatatat

SEQ ID NO: 378959 - DNA, 201 bp, Homo sapiens
tcctcaccaataaagtgggactcagaatacctacctcttgagatagagatacaaggaaataagcaagctgtgagccgtatgcaaattataaagcacaaatragagtagagtatttatccgagctccatgtagcatggtgctcattttgtgggttaattccaggtgataactttactggcagcataactacctgtggatttc

SEQ ID NO: 378960 - DNA, 201 bp, Homo sapiens
aattccactctcaggctgttagccacctcctccccaacagcctctttcctacctccccccactgcaggaccttcttagagttgcctgacaaagggaagggkctggcagtagacaaaacatggcagaggcatcaggagagcaaacggtcctgcttgtaccccaagaaggaatttctccagccttgaatttttcactctgaat

SEQ ID NO: 378961 - DNA, 201 bp, Homo sapiens
ttgccagtttcagttaaactggcttattcttaccctttctcagaaaagctgattctaaacagccagtcctgcacctggggtacagggtacaaaaatggcasgtgggatgggcaggtttgagccttcactagaagcctggccttagatctctccttaacctcttagcctcagtttcctcaccaataaagtgggactcagaat

SEQ ID NO: 378962 - DNA, 201 bp, Homo sapiens
ctttctaaattaactgagacctgtcttagattttctgggttcacactaggtttggggtccagtaggactaaaaaggattttaataaattaggccacaacartaagaaaaaataagagtttcacatattttcatctttgcaatggataatattatagtgtaaatacattttaataggccccaggtacaaatgtgtaaaaatg

SEQ ID NO: 378963 - DNA, 201 bp, Homo sapiens
cagaagctggaaccagtggaactgtgtacctctgtgatgccaatcctgaacataagacagtgttgggcaggtctgggcgtataatttgaggagtggatggyggatgaaaagaaataataaattgtaatcagcagtaaaggagtgggcactgtttggactctggggaagcagtgtgatgttcaacagcatcgccatggtccc

SEQ ID NO: 378964 - DNA, 201 bp, Homo sapiens
gagtatgaaattatattaaattaaataatagacatttcattatttgggtatcttcccataaaaatatattgtaggaaaatattcttgctaaaaaataaacmaaactgtgtgtgtgttttttaaagaggtgaacaagtttttttccaattcaaagcttatttaaaggttatgtataaaacaaggtaaaagggactaggacta

SEQ ID NO: 378965 - DNA, 201 bp, Homo sapiens; identical to SEQ ID NO: 82144

SEQ ID NO: 378966 - DNA, 201 bp, Homo sapiens
ccaaatactataagttgtcaatgtttggcatacaggttacataactatgaacccagccccaaacaggataatcattgcttgtgtaatttttaataaataakgcattgatatgggtttaatgaaaatagctgcatctttaatttagtaagatcaccataacttctaatcctgtgggtttaggcagtctggtccacagtcaat

SEQ ID NO: 378967 - DNA, 201 bp, Homo sapiens
tcattgcctcatattattacactaggaatgtagcttagtagatgttacctaccgttttttaaatttacctactaggattatcaaaattgctacacaattaygcagcccagaaaacttggttccagtgcagatactgctgttaataacacaatcataactgaatccatccctaagcatgtttttgcttaggtaaaacagaaa

SEQ ID NO: 378968 - DNA, 201 bp, Homo sapiens; identical to SEQ ID NO: 82145

SEQ ID NO: 378969 - DNA, 201 bp, Homo sapiens
  misc_feature (1)...(201): n = A,T,C or G
gaaacagcatttacagattcaaagtaagtaagaggaatgggatgtgtgctgactcacttatgtgtcctgagcaagttttcatatgacttatacctccttcntccaagctccagactcccagcctgctgtcaattttgttactgtgtggtaactatatctgtaaaaggtggtggacagcgtgggaaaccctaaaatttgcaa

SEQ ID NO: 378970 - DNA, 201 bp, Homo sapiens
cactctctgcaacccacagtcccaaaggctggtctcactcccaccatgccccccaacagcaccgagtctatttccaggtagccagttaccaggactcagarcttgccccagaccacaagcctccccattgagaaagcaaacagactcactgtttttcagtgtctcagggagcctgcagaggtaatccagtttcttcaaatg

SEQ ID NO: 378971 - DNA, 201 bp, Homo sapiens
tttcttttattctctccttccttccttccttccttccttccttccttccttccttccttccttctttctttctttctttctttctttctttctttctttcytctttctttcctttttttctttttctttttctttctctctctctctctctcatctctctgtttactctctcaacgaagctccaccttggcctccttaagc

SEQ ID NO: 378972 - DNA, 201 bp, Homo sapiens
aaaaaaagtggggtgatctttataaatctataaaatgtacttccgttggcatgcctaattcatctttatatgtatttatgtattgtatacaaaatatttcwctactaaaaatatataaagtgttctaattaattgacttaaagaaaaaacaaaagtgcttaaatgcgatactaaaaaagaaaagactattaaaatcctttt

SEQ ID NO: 378973 - DNA, 201 bp, Homo sapiens; identical to SEQ ID NO: 82146

SEQ ID NO: 378974 - DNA, 201 bp, Homo sapiens; identical to SEQ ID NO: 82147

SEQ ID NO: 378975 - DNA, 201 bp, Homo sapiens
gaggcctagttaagaaaatgtccatccattcttctgagtgttagatataaaatgcataaagatgtccactacaactgattcaactgataacagctgcctcrctatgttctgttcactagtgtgaaaggaaaatatcttgggcccccaaaatcactaaagaaaactcaagctggaaactgcttagggcaaacttgcctccca

SEQ ID NO: 378976 - DNA, 201 bp, Homo sapiens
ggcccaggcctatcttaatggtattggtcttaacataattggtcttaaccaggagcaaaaacaaagggaaagccccaatggggcaggcacttttaagcctstccttgcattaaatttgctctttccattgatgaaagatggtcaatgtggccaaggtaagttgcagcagaggaggggactatctggggaatggattccagg

SEQ ID NO: 378977 - DNA, 201 bp, Homo sapiens
ctttattctttatttattaacaacacagtatagcttcaagtaaactaatccaaatctaaagttacccaccttgaagctcctactaacattaatcaaaattrcctaatatttaagtggcttcacatgacaatccttaagatataaataacctcccagagagacagaacattttttttggaaggcatattagttagacactgt

SEQ ID NO: 378978 - DNA, 201 bp, Homo sapiens
atgctatttttgtattacttagtaatttctacaaaatgtaccacagatcctagtataaggcttaaagatggaattagcctcaaagtgtgaggcttggtgaragtacaagttttgaatatgatgcagtaataatttttgaaaggttaattgtttatatttagaccatgtcagaatgccctttattaaaatgcctatatcaaa

SEQ ID NO: 378979 - DNA, 201 bp, Homo sapiens
tctactaagcacattgcaggtattcattcctttaatccttacaaaaattctgagtgatatagtgctattatcccaactacctttgaggaaaccaaggtacrgagagactaaataactttcccaaggttacacagctcgttctcagaggagtcaggagaatcactaatagcaactaaaattcaaaagatattatgtgtattt

SEQ ID NO: 378980 - DNA, 201 bp, Homo sapiens
ggagaacaaaggaaggggcaagtaacttgtggaatgctgagaaaggtaaaacatctccaagtaaggaagaggaacaggctatggcctaatgcttgcttggrccagtataagtatgccagggtaaatatttaggctaaactgtgggagctaagaacacaaagtacattgatttctttattatcttctagcagttatctaaga

SEQ ID NO: 378981 - DNA, 201 bp, Homo sapiens
aactatgctctctggagattctctaggatggcatttgcctattacttgctgtataatcttagttaagtgatttaatctctctgagattatgttcctcatayataaaaatgaggaaaataatgttacctaaaacacaaggcactgaaaagattaaatgaaagtgactaggaagtgtttagcataatacttagacatattagt

SEQ ID NO: 378982 - DNA, 201 bp, Homo sapiens
catgggaagaatcaggggagaatggacacaagaccccaaaattatgcctacatataaaacttagtcaaaaggtccaactgcacacttgatctttcaggtcrcccacttggcccccttccaaatgcactttacttcttttccctcctgctctgatgtttttaacaaacatttactgctaccccaaaacttgccttggtctct

SEQ ID NO: 378983 - DNA, 201 bp, Homo sapiens
aggatttatgacatattttgcagctgtatccagaccttttagggtgattggatgctgaagaagagccttccctctggacttctattcctgtaataaaaatratagcttatttggccatagaatacttcccaggtcaccaagaacaactatcatggttccaactatgctctctggagattctctaggatggcatttgcctat

SEQ ID NO: 378984 - DNA, 201 bp, Homo sapiens
cacagtgaaagttttttaaaaagctttagccaggcgcagtggctcacgcctgtaatcccagcactttgtgaggcccaggtgggcagatcacaaggtcaagkgtttgagaccagcctgacaaacatggtgaaaccccatctctactaaaaatacaaaaattacttgggtgtggtgttgcgtgcctgtaatcccagctactca

SEQ ID NO: 378985 - DNA, 201 bp, Homo sapiens
ccaataaaactaccaatattttattacttagaaatatcacagtataaaattatatgtaatcataaaatataaggatgtgttttatttcctttttcctaatrataacaggatatgacagatgaccttgatcactataccaatacttaccaaatctactccaaagatccccaaaactgtcaggaattccttggatcaccagaa

SEQ ID NO: 378986 - DNA, 201 bp, Homo sapiens
cccacccccatgggaagaatcaggggagaatggacacaagaccccaaaattatgcctacatataaaacttagtcaaaaggtccaactgcacacttgatctytcaggtcacccacttggcccccttccaaatgcactttacttcttttccctcctgctctgatgtttttaacaaacatttactgctaccccaaaacttgcct

SEQ ID NO: 378987 - DNA, 201 bp, Homo sapiens
catgctagcaggctgctgaacatgtggacagcccacccccatgggaagaatcaggggagaatggacacaagaccccaaaattatgcctacatataaaactyagtcaaaaggtccaactgcacacttgatctttcaggtcacccacttggcccccttccaaatgcactttacttcttttccctcctgctctgatgtttttaa

SEQ ID NO: 378988 - DNA, 201 bp, Homo sapiens
gcaagcaggcttaagcatgtgcattcagaggcaaaatgacagagtttaattatgatatgaacttctagggacgtttgactggtaagggagaatgccttaarttagcatgcatacaactctatgctcacactacacatgctcacctcccacatgctagcaggctgctgaacatgtggacagcccacccccatgggaagaatc

SEQ ID NO: 378989 - DNA, 201 bp, Homo sapiens
agcttcctgacaagacctcaggagttgggcaagcaggcttaagcatgtgcattcagaggcaaaatgacagagtttaattatgatatgaacttctagggacrtttgactggtaagggagaatgccttaaattagcatgcatacaactctatgctcacactacacatgctcacctcccacatgctagcaggctgctgaacatg

SEQ ID NO: 378990 - DNA, 201 bp, Homo sapiens; identical to SEQ ID NO: 82141

SEQ ID NO: 378991 - DNA, 201 bp, Homo sapiens
ttccccaaataattggggtcttgaactcatggtgggggaaatgttacacaaggtagatagtcaggcatgagtagggcaggagaaggctccatgccccacaycccacacccagatatgtcaggcaaccatcaggtgatggtccagtggttgttaactgtctctctaaaataataattggtcacagccagtgccagccaggtt

SEQ ID NO: 378992 - DNA, 201 bp, Homo sapiens; identical to SEQ ID NO: 82142

SEQ ID NO: 378993 - DNA, 201 bp, Homo sapiens
ctaattaccctgatttagccatttcaaaatgtatacatatttcaacacaacatattgttaataaatatatgcaatcatttatttgccaatcaaaataaaamaataaacaatatatgaaattaataaatttatggtatgaaaactaaactgaaataaaattatttgatcttttattaaatgtggtcttaagcaacaaaatgt

SEQ ID NO: 378994 - DNA, 201 bp, Homo sapiens
acctattttgagccaggcactatttcatgttttctctcatttagtatgccttacctctctacaagatgtttactgtcatgtccatgttgctgttaagaaartgaagactcagttaactgattttctcaatatatcacaaatactgagttgcaatgctatgatatgaacatagttatgccttagtctaaacactgccttttg

SEQ ID NO: 378995 - DNA, 201 bp, Homo sapiens
aagcttatttcaaaacatcagaaaacacaaatatacttttaatgctaataaagttatttaaaaatcactttgttgtgagaacacttaaaatctactctctyagcaattttcaagaatacaatacattgttattaactatagtcaccgagttgtacaatatgtctcttgaacttattcctcctattataactattataactg

SEQ ID NO: 378996 - DNA, 201 bp, Homo sapiens
ctatgctcaaggaaaaggagtaacttccacttaagaaacacatatctgacaactattttgtcaatggcagtttgctagctaccatgaaaatccttagaagwttgtgctctggactaataaatgaataaagaaagatctgagagcttcttggaagcaggtggatgaatagaatactgagtgtgtggagacaccagaaaaatt

SEQ ID NO: 378997 - DNA, 201 bp, Homo sapiens
cagcatggctgggaaggcctcgggaaacttacagtcctgacagaaggggaagcaaacacgaccttcttcacatggtggcaggagaaagaatgacagtcaarcaaatggggaagccccttataaaaccatcagatctcatgaaaacttactatcacaaagacacggtgggggaaaccaccccaatgattcaattgtctccat

SEQ ID NO: 378998 - DNA, 201 bp, Homo sapiens
atgtttaacataggatgactatagttaacagcaatgtattgtatatttcaaagtagattgaaggaggacttgaaatgttctcaacacatggaaataataawtattctggatgatgaaaactatgacttgatcattaaacattctatgcacataacaaaatattacacattttttacaaatattatgtatcaataaaaaaga

SEQ ID NO: 378999 - DNA, 201 bp, Homo sapiens
aatgcctgattttgaaagataaaataagtttcatttctccgtaaattaatcattaatgtcaaaggaacactgatgaaaaaccagcatatagacccctgtgkcagattaacaaggctctcttgaagcattaaccaactctttaataaaggttataagaggcttaaggacgttacattttataatatagattaaattttatag

SEQ ID NO: 379000 - DNA, 201 bp, Homo sapiens
atttgaaattttaacgtgatatgtggataatgaatagtattgttctggaattttccaacataaattgaatatttgatctttatctcattatttaaataatwcagaaataattatatgcatacaaacccacagttagataaaggaaataagttctaatgtttaacataggatgactatagttaacagcaatgtattgtatat

SEQ ID NO: 379001 - DNA, 201 bp, Homo sapiens
tcttgtgtggtaaatttaatcctaaactaaaataagtggttgtttaaaaaagagggatgttcaggacaaaccagaaattccaagcatgtcatgaacagtcrgtgtaagtcacaataagaggatttctatatttaaaaagtttatatgatcaagttatcatattaagttttcatttgcttagaaaaaaactgagataaaatt

SEQ ID NO: 379002 - DNA, 201 bp, Homo sapiens
ttttatttgaaattttaacgtgatatgtggataatgaatagtattgttctggaattttccaacataaattgaatatttgatctttatctcattatttaaakaatacagaaataattatatgcatacaaacccacagttagataaaggaaataagttctaatgtttaacataggatgactatagttaacagcaatgtattgt

SEQ ID NO: 379003 - DNA, 201 bp, Homo sapiens
atgcctaattcatctttatatgtatttatgtattgtatacaaaatatttcactactaaaaatatataaagtgttctaattaattgacttaaagaaaaaacwaaagtgcttaaatgcgatactaaaaaagaaaagactattaaaatcctttttcaagtttatgtaacttaaataaaatctttaataaataagctagctttaa

SEQ ID NO: 379004 - DNA, 201 bp, Homo sapiens
atgaagtttaattttatttttaatttggctaaaagaaaaataaaaacatctccttctatcatcaccagactttttctctctgtaccttatgttgtaaattktactatttgattttcacctgagttgtttcctttaatgtgcaaatttaaggctatttttctgacagctgcctagggttttgaaacaggttaccaagaatct

SEQ ID NO: 379005 - DNA, 201 bp, Homo sapiens
tctgggttcacactaggtttggggtccagtaggactaaaaaggattttaataaattaggccacaacaataagaaaaaataagagtttcacatattttcatytttgcaatggataatattatagtgtaaatacattttaataggccccaggtacaaatgtgtaaaaatgtaaccactatattttgccaaaactgtactaaat

SEQ ID NO: 379006 - DNA, 201 bp, Homo sapiens
acttttgccttggggttttatatgttggcttatttctgggctcttgtgtccattctcccttgattcttcccttgtggtgggttgtccacatgtgcagtggyctgctagaacttgagaggtgagcatgtgcagtgtgtttactggaattgtatgcatgctcacttaaggtgttcttcccttaccaatcaaatatccctagaa

SEQ ID NO: 379007 - DNA, 201 bp, Homo sapiens
ttgttttccttctcagttgactgaattctgttttcacctgatttttttttaactaaaatagttattgcaacaaaggctacgtggttatttaagaaaaaaaatgaagtttaattttatttttaatttggctaaaagaaaaataaaaacatctccttctatcatcaccagactttttctctctgtaccttatgttgtaaattt

SEQ ID NO: 379008 - DNA, 201 bp, Homo sapiens
ttctaaattaactgagacctgtcttagattttctgggttcacactaggtttggggtccagtaggactaaaaaggattttaataaattaggccacaacaatragaaaaaataagagtttcacatattttcatctttgcaatggataatattatagtgtaaatacattttaataggccccaggtacaaatgtgtaaaaatgta

SEQ ID NO: 379009 - DNA, 201 bp, Homo sapiens
ggaaaaggagtaacttccacttaagaaacacatatctgacaactattttgtcaatggcagtttgctagctaccatgaaaatccttagaagtttgtgctctsgactaataaatgaataaagaaagatctgagagcttcttggaagcaggtggatgaatagaatactgagtgtgtggagacaccagaaaaattactattttta

SEQ ID NO: 379010 - DNA, 201 bp, Homo sapiens
agtcttcaaaataatgttttaaatttatttttcttctttttttttcatttttcctaatttgaaataactgaaaactaagctgtgctttcttaaaaccctgmaaactgaagccaaacaacttaaacttcagaaaaaaataacagcaacctgtttacatacataagccactttcatacctgcctattaatgtatggattttag

SEQ ID NO: 379011 - DNA, 201 bp, Homo sapiens
atgtggtcttaagcaacaaaatgtgtcagtggtatcattgctgacttgtgagtgggttttttgtgcaacattttccaactttttaaaaagttttttaattytataatagttgtggtaatattttcatccaccttcttcctgtaaataattgtatctgtcatttactaatttgagaagctctttccgtgtaagtggattgtt

SEQ ID NO: 379012 - DNA, 201 bp, Homo sapiens
atttcaaaatgtatacatatttcaacacaacatattgttaataaatatatgcaatcatttatttgccaatcaaaataaaaaaataaacaatatatgaaatkaataaatttatggtatgaaaactaaactgaaataaaattatttgatcttttattaaatgtggtcttaagcaacaaaatgtgtcagtggtatcattgctga

SEQ ID NO: 379013 - DNA, 201 bp, Homo sapiens
agccagaccaaactgaaagagcaatggctgtacttctgaaaaagcagcatttggtcctaactgaaatatggtaataagatttttttaaaaaaattaaggakctcaattgttaaaagtcagcttaattaaaaggctaacatccaagatgtatgtgtgtatgtgttcatgtgtgcatgtttgtatttgaaggccttcatgttt

SEQ ID NO: 379014 - DNA, 201 bp, Homo sapiens
attaatgtttaacttgtttattacaaaaggacacttgccagtgagaggttaactagaatgagtcttctttgaaattaataacagatcaatttctattttartgtaaatttcccaattgctctgaattgaaggcaggtcgagttactttagggctagctcccagtatctctcttaacctggtattaataattagaggtctaa

SEQ ID NO: 379015 - DNA, 201 bp, Homo sapiens
ctaggctgcccatcagtgagacatgacagaattgaaatcctccccctgtcccccttgaacctggctggctactactgccctgacagctagcaagaggccaratccacagaacaaccactactacccctctgtcagcaggaagcagttatagaagactgacctttgtctatattccccaaataattggggtcttgaactcat

SEQ ID NO: 379016 - DNA, 201 bp, Homo sapiens
gggcctactctgtgccaaatactgtgataagaattactgataaaagaataagtaatatgagcatcctgcctcagaagaattcaacatctagaaaagaaaaygaaattcaactttaaaacatcatgttgaacagcataaatatatacgatatttatcaattgaaagaagaaaactttaacccaacataacaagttatataat

SEQ ID NO: 379017 - DNA, 201 bp, Homo sapiens; identical to SEQ ID NO: 82148

SEQ ID NO: 379018 - DNA, 201 bp, Homo sapiens
atctctctgagattatgttcctcatacataaaaatgaggaaaataatgttacctaaaacacaaggcactgaaaagattaaatgaaagtgactaggaagtgyttagcataatacttagacatattagttaatgtttgctgcatagcaaacctaataattctgtgaatcaaccatttgggctgagctttgcaaggcagttctt

SEQ ID NO: 379019 - DNA, 201 bp, Homo sapiens
gtctgccctctgtgtacagattaaaaaatagcacacagagattctttgacttagattctccatttggctactttgtatcataaaatgtcatgattttataraaataatttttgtcctaatcaagcaagaaactttactgtttttttcaaataaaccaaccctgtcaatttcttgggatcctgcaggtttatggaactgtct

SEQ ID NO: 379020 - DNA, 201 bp, Homo sapiens; identical to SEQ ID NO: 82149

SEQ ID NO: 379021 - DNA, 201 bp, Homo sapiens
atgtaaccactatattttgccaaaactgtactaaatttctatattaagcctccactcatggctgaaaacagaattaattcagataaactcagacttagtckatttagagtttttttcaccttcattccctagtctaacatcagtatttcatgtggggtagggggcagcaggagggaaatatactggtatggttctatcatc

SEQ ID NO: 379022 - DNA, 201 bp, Homo sapiens
cccagtcagtatatctaaggatcaggagaaccatcagagtttagcctttctgatttggactttggggagatatgaagggtcactgaactgcttccagcatrggcttcacctccttctctttccctccctctgctgctgcccgagtgcaggtgctggacatcaaccaggccgacgcagggaccctgcccctggactcctccc

SEQ ID NO: 379023 - DNA, 201 bp, Homo sapiens
aacaagggttttcaaagctcccaagctctcagggtctgcaacaactactggattcgggaggtcagactggggtcagggtcaggggaagatgggtcaaggtsagtctcttcacacaggctgggaaaagcaacaatcccagttcttgagtgttgctgccccaggttcatgggagatgaagggtagaggaaattatccggggac

SEQ ID NO: 379024 - DNA, 201 bp, Homo sapiens
gcccgagtgcaggtgctggacatcaaccaggccgacgcagggaccctgcccctggactcctcccagaaggtgcgggaggccctgacctgcgagctgagcarggccgagtttgccgagtccctgggcctcaagccccaggacatgtttgtggagtccatgttctctctggctgacaaggatggcaatggctacctgtccttc

SEQ ID NO: 379025 - DNA, 201 bp, Homo sapiens
tccaagaggtggaggagaacgaccaccaggacctggtgtctgtgcacatttatgtcacccagctggctgagaagttcgacctcaggaccaccatgctagtrtgtcagggcccgccaggcagggcaacttggcgggcagatggattggcagcgtaaggcaggatggccagggcaggtgggtggacggccaggctgagctggc

SEQ ID NO: 379026 - DNA, 201 bp, Homo sapiens; identical to SEQ ID NO: 82152

SEQ ID NO: 379027 - DNA, 201 bp, Homo sapiens
gagaagtcttagggtccctaggccccacccacatatccttgacatataagcgaccatcctgagtctcattccatttgttcctgacctgactgagaggttayagtgttgaatgacttttcatcctcttccagcctctgcaccccattcttcaggcaagggtcctggctcaacaggatgatagtaaggggtctcctggctcct

SEQ ID NO: 379028 - DNA, 201 bp, Homo sapiens
tgccccggggtgttggcacaaggaagcagcagcattgcagctagttcccctccctggcacctggctgcctggtgcccccactggactatgaaagggggaayccaggggtgatgtgggaggcatcaacagaagagagtggacagagagcctgccacgagagagggccatgcacaccctggacacccctgcactcagtggact

SEQ ID NO: 379029 - DNA, 201 bp, Homo sapiens
ttttggatgcccttggatctttgtgaactattttacggcacgcccaacaccgtgctctacccagtgaaacagtgaatggatgaccttggttgctgctccgmtattcatcaccatgatagtcaggaagagaaacgtggaaggcttctccatattccaaccattctttcttcctgcatcttaagccctttctggttttgttgt

SEQ ID NO: 379030 - DNA, 201 bp, Homo sapiens
gcacacaagctacaccctacagtcaagaaggggtggatggggtagatgccaagagacaggaaatgaatggggactttttgagggagacagtttcagggagrtgggcctggggaagacagatgataccttggtcctttataggatagaggggaaagaggtctggccacatagcgggatcctcagactttgaggtcttccctg

SEQ ID NO: 379031 - DNA, 201 bp, Homo sapiens
gcaccttctgtgttgggctaggaggcctgcatttggctggctcccacagcagggacctcaactagcacacaagctacaccctacagtcaagaaggggtggrtggggtagatgccaagagacaggaaatgaatggggactttttgagggagacagtttcagggaggtgggcctggggaagacagatgataccttggtccttt

SEQ ID NO: 379032 - DNA, 201 bp, Homo sapiens
cacattatcactgttctgtatctctgtttcctcatctataaaacagtgatgaaaactgtatccatcccattgcattgttgtgaggattcggtgagatcgtstacatgagtggtacacagaggttggcctctggacccgagagcatcagcctcacctgggaacatgttagaaatgcacctacccagttagactgaaccagga

SEQ ID NO: 379033 - DNA, 201 bp, Homo sapiens
  misc_feature (1)...(201): n = A,T,C or G
ccatcaccatcattgctctctgctgccttcccttaggtgagctcttaggcagcctctctgcagactggccctgcccctcatttcctgctggcctgaggggntggctatttggtaccgtttgagaccaggctcaaggaacctctggaagggaggggccatagcctaagccacagtggagctctaggtgaggggctccctcct

SEQ ID NO: 379034 - DNA, 201 bp, Homo sapiens
cccaatgtctttgtctggcataaaggtgagtgccgtgggagaacacaagtgagtgacagtggccagagaaggatcaagattgagggtgcgggggaatcacytggtgctgtccagggagccaggcaccttctgtgttgggctaggaggcctgcatttggctggctcccacagcagggacctcaactagcacacaagctacac

SEQ ID NO: 379035 - DNA, 201 bp, Homo sapiens
cccttccgcgtgcaagcccacgggagactccgctgccccatggagctccccatctgtggacaaccgccacccagaaacccctccccagacagccgaggtcyagggaagcccctgtaaatgatagggaggcacgcgctgtttataggagaaatctggctggtgatgattatttatcacctccccaccccccactccctcaaa

SEQ ID NO: 379036 - DNA, 201 bp, Homo sapiens
tttgagaacaccaggaatgggtaaggcttgcctgggcccccacctcagactgctcctcagcctgagccccagaccctctgtctagccttagacagcccctrtgagcccttgattcccagtcagcccaccacacccttcccaacccctctgggtctctctttttttcttctcttctcttttctttttctttttctttttctt

SEQ ID NO: 379037 - DNA, 201 bp, Homo sapiens
aaacatacgctcaccccttatctcctgtggtgccccaggtgctggaggccacagctgccctgtacaaccaggacctatcccagctagagctgctccttggsgggctcctggagagccatggggaccctggacccctgttcagtgccattgtcctcgaccagtttgtacggctgcgggatggtgaccgctactggtttgaga

SEQ ID NO: 379038 - DNA, 201 bp, Homo sapiens
tcccaccccaagggctgtgtgcccctgaagctgctaatcattgaggtcaggcaggctggtgatggtcacaggatatggtcctagggcacctgaccgtggtsttaccgtgggtagggacacactgatccttccaccagacttgtcctgcctgagggggcttgcctaagaagaggaaatcaggcctgagcagcagccaggcag

SEQ ID NO: 379039 - DNA, 201 bp, Homo sapiens
gtactccgcggcgtaattctctttcagacgccaggtgaactgctcgttgtagtcaatggtctcgttcagctgatgcactggggtccctgcggggtgaggcrggctcatcgggctgcccgcggtcggagacctcgcaactaagcggattcagacaggaaagtgggggtgtggcgctctcggcgggagaaatgggttcggtgg

SEQ ID NO: 379040 - DNA, 201 bp, Homo sapiens
ggctggacggcagcgccatctatggctcctcgcactcctggagcgacgcgctgcggagcttctcggggggacagctggcgtcggggcccgaccccgctttyccccgagactcgcagaaccccctgctcatgtgggcggcgcccgaccccgccaccgggcagaacgggccccgggggctgtacggtgaggccacaggggcgg

SEQ ID NO: 379041 - DNA, 201 bp, Homo sapiens
  misc_feature (1)...(201): n = A,T,C or G
ctcaaagccaccggcattgctctaagatatatctggccagaggaagaggcattgtttcttttacacaaaggacctgcagggttgcatccacctaagaggangtcccctttcttgtgcaaagttgccacattgtctgccctgtgtacagtgagtgcttagtctagggaatgagggaaacaggactcgagtcagagatctgga

SEQ ID NO: 379042 - DNA, 201 bp, Homo sapiens
acaaagcccatagtctagtcttctctcctcttcagattactggcctggccctggcaaattctcccgtacagactatgtggccagcagcatccaacgtggcygagatatggggctgcccagctatagccaggccctgctggcctttgggctggacatcccaaggaactggagtgatctcaaccctaatgtggacccccaggt

SEQ ID NO: 379043 - DNA, 201 bp, Homo sapiens
gccaggccccaaggagaggagcagtcccatcatcatccagctgctgtcagacaggtgtctgcaggtcctgaacaggcatctcactgtgctccgtgtggtcyagctgcagcctctgcagcaggtcaacctcatcctgtccaacaaccgaggatgccgcaccctgctgctcaagatccctaaggagtatgacctggtatggct

SEQ ID NO: 379044 - DNA, 201 bp, Homo sapiens
gtcagacaggtgtctgcaggtcctgaacaggcatctcactgtgctccgtgtggtccagctgcagcctctgcagcaggtcaacctcatcctgtccaacaacygaggatgccgcaccctgctgctcaagatccctaaggagtatgacctggtatggctcgtcctgcctccccagcctgggctgccctcacacgactccattat

SEQ ID NO: 379045 - DNA, 201 bp, Homo sapiens
agtgcgttcgcgtactccgcggcgtaattctctttcagacgccaggtgaactgctcgttgtagtcaatggtctcgttcagctgatgcactggggtccctgyggggtgaggcaggctcatcgggctgcccgcggtcggagacctcgcaactaagcggattcagacaggaaagtgggggtgtggcgctctcggcgggagaaat

SEQ ID NO: 379046 - DNA, 201 bp, Homo sapiens
tgtctgagttgcttctcccatgattgacccttcctggtctcatctccacacggaagccgtccttgggctcagacccttccaggccccacaccatccaactygtgcctcccctcgcccctctctgcccctcagaacatcgctgtgtatgagtggctgcccagcttcctgcagaaaacactcccggagtatacaggtgaggga

SEQ ID NO: 379047 - DNA, 201 bp, Homo sapiens; identical to SEQ ID NO: 82156

SEQ ID NO: 379048 - DNA, 201 bp, Homo sapiens
actcacctaaccggggatctcccagctccaggagttcatttagccccagccccctcacctgtgagtgtaatattaatgccctccaggcccacgagcagacsgacacgggctgtaacgcgcgctgcgctgaaggctttgtaggatgtgttggtgttcactgtacccacgaaccattctgcactgaagtgcacagctgtaggg

SEQ ID NO: 379049 - DNA, 201 bp, Homo sapiens
tgccgtcgctccacaaccgcaccgtactgggggtcttctttggtgagggcaaagggggagaccagtggggttgatctggcgctctgctcagcctgggggargggccagatcccgtctgcgagtccacaggagacccatccgactcccaaccacttcctctctacgcagcacttcgagactgccttcatctcggagagattt

SEQ ID NO: 379050 - DNA, 201 bp, Homo sapiens
gctgcctacacagcgcaatcttatgcgctcccggggccaagagacccttgagggaaggttctgtcagtgaagtgggatgggggttgagggaggcttagggmgaggtttgggggatcctaggggatggagtgcttagacagagccccgctccctgcctccgcaggctgccggttgcagcgccgcgtaccagccaattacgcc

SEQ ID NO: 379051 - DNA, 201 bp, Homo sapiens
cccgctcatacggcccagctcctggcacacacacacgtgcacacagccttccctccagcgcttaccatagcgtggccgaggcgtagtgtcccgccaggtgrtactggtggtacaggccgcaagggctactcggtgtgaacttctccgccaggtagagcactgggtccggcagccccttctccagtgcgttcgcgtactccg

SEQ ID NO: 379052 - DNA, 201 bp, Homo sapiens
tgactggatccctgggtccatcgggcaagtatcaggctcctctagcggcggggtgttccccaggatccctgggaggtggggcggggagaggtgcggcaagmggctccctgagactggaaggtcatttcgccgtgcagctcagcgggatgggaaacttcccagtgcggcccgacacttgggtccggttaggggcgctccgcg

SEQ ID NO: 379053 - DNA, 201 bp, Homo sapiens
  misc_feature (1)...(201): n = A,T,C or G
ggggggattcattgtggaagggtgctgcagtccctcactcccaggtcagtaacctttttcccttccctgcctcctggaggagaagcggagcctgacggatngggggcgggtggaggtgaaacattggagacattgggcacaccctgggaggcttgaccagtcctgccctggactgacatgccccagaagactcctgcccag

SEQ ID NO: 379054 - DNA, 201 bp, Homo sapiens
gttccacagggtcatgctgcacgccggccgagtgctgcacgcaggcgggcaggcaagccagcaagctggggctgcctggacgcgggagagcgcgtccttgrcgtctctttgcgtacaaggctgggaccgagtgggctggtgaagtctgagtcctgcacctctccgttaaggaagcgtggaggtgggctgctctcaacgctc

SEQ ID NO: 379055 - DNA, 201 bp, Homo sapiens
ttctttttctttttctttttctttttttttttttttttttttttgaggcagagtctagctttgtcacccaggctggagtgcagtggcgtgatcttggctcratgcaccctctacctcccaggttcaagtgattctcctgcatcagcctcccaagtagctgggattacaggcatgcaccaacatgcccggctaattttttta

SEQ ID NO: 379056 - DNA, 201 bp, Homo sapiens
gtcctgactccacacgccagtcaggctgtagatgtcagccctaagcatgtattcatgtgatctggctgctctgtctaaccctgcacagagtcccagaaagmcactgaatgacagggataaaagtcaaggacttgcagagaggttaaaagtgtcttcagcctcaacacttgcctagatactaacctggtcctacccttcctg

SEQ ID NO: 379057 - DNA, 201 bp, Homo sapiens
aaatgatagggaggcacgcgctgtttataggagaaatctggctggtgatgattatttatcacctccccaccccccactccctcaaatcccctggttccttrtggggacaggcctcacactgctcctgtctgagttgcttctcccatgattgacccttcctggtctcatctccacacggaagccgtccttgggctcagaccc

SEQ ID NO: 379058 - DNA, 201 bp, Homo sapiens
gtctggctgcagctgctcagtgcctccgaggcctgcatcctcccgctcatacggcccagctcctggcacacacacacgtgcacacagccttccctccagcrcttaccatagcgtggccgaggcgtagtgtcccgccaggtggtactggtggtacaggccgcaagggctactcggtgtgaacttctccgccaggtagagcac

SEQ ID NO: 379059 - DNA, 201 bp, Homo sapiens
tccacccttagcccccggggcccattctctcggtcctcaccggttgccagcgtgacccagaaggcggcgccgtactgagtggtgagcgcggaggagcctakgcggagcgggcagagcggcacgctagagatggaggccaaggcgaagaccccgaagagcgcgaaggctccggtggtcagcagtgccaggcctccgtagagc

SEQ ID NO: 379060 - DNA, 201 bp, Homo sapiens
ttgaagatctgaggggtgagctcagagccagaaggggtggatggtaagggaccaggaagcctgaggatccctctgggttcatcaatagcagacctagggcrctcacgatgcaggaacacagatacaaacacagacttcaaggagccataagaagaaaatgaactttgaactttttttttttttttgcttaatttacacttt

SEQ ID NO: 379061 - DNA, 201 bp, Homo sapiens
tggtcagcagtgccaggcctccgtagagcggggccggcgtggagagcagcacgttggagaggagccagaagcagaacgccaccctgccggggagtgggggracccgctgtgagcgggcttctcccagcccaccggggttcccacagctgcgctcttctttatccctaccccagcgccaaagccagggactgggatggcagc

SEQ ID NO: 379062 - DNA, 201 bp, Homo sapiens
cacactgctcctgtctgagttgcttctcccatgattgacccttcctggtctcatctccacacggaagccgtccttgggctcagacccttccaggccccacmccatccaactcgtgcctcccctcgcccctctctgcccctcagaacatcgctgtgtatgagtggctgcccagcttcctgcagaaaacactcccggagtata

SEQ ID NO: 379063 - DNA, 201 bp, Homo sapiens
tgattatttatcacctccccaccccccactccctcaaatcccctggttccttgtggggacaggcctcacactgctcctgtctgagttgcttctcccatgaytgacccttcctggtctcatctccacacggaagccgtccttgggctcagacccttccaggccccacaccatccaactcgtgcctcccctcgcccctctctg

SEQ ID NO: 379064 - DNA, 201 bp, Homo sapiens
aggagaaatctggctggtgatgattatttatcacctccccaccccccactccctcaaatcccctggttccttgtggggacaggcctcacactgctcctgtytgagttgcttctcccatgattgacccttcctggtctcatctccacacggaagccgtccttgggctcagacccttccaggccccacaccatccaactcgtg

SEQ ID NO: 379065 - DNA, 201 bp, Homo sapiens
ctaccccatgctctgcccagggagttgttctcctggctgcaaagacaaggggagaacagccccatttctttttctcagctcccacccccagggactggggscccctgccccagaagccccagagctgggaggccctggactgaagaagaggtttggcaaaaagtgagtgtctcccaaatccctgggcccaaagagacatgg

SEQ ID NO: 379066 - DNA, 201 bp, Homo sapiens
aggaggagaggggctggaacaggggagcagagaaacccagctcttgcattacctgggaaacagagaaggggaccctcctactcccagccccaggagccccrcttgctcagaccatgtgactactccccaggcctcaggggtgtgaagaggacaggtgcctatcagtcctcaggtaccaggagcaggccttctcatctgtgc

SEQ ID NO: 379067 - DNA, 201 bp, Homo sapiens
ccagacagccgaggtctagggaagcccctgtaaatgatagggaggcacgcgctgtttataggagaaatctggctggtgatgattatttatcacctccccamcccccactccctcaaatcccctggttccttgtggggacaggcctcacactgctcctgtctgagttgcttctcccatgattgacccttcctggtctcatct

SEQ ID NO: 379068 - DNA, 201 bp, Homo sapiens
gccgcgtgccccgcaggccaaccaggtgacgggctggctggacggcagcgccatctatggctcctcgcactcctggagcgacgcgctgcggagcttctcgrggggacagctggcgtcggggcccgaccccgctttcccccgagactcgcagaaccccctgctcatgtgggcggcgcccgaccccgccaccgggcagaacgg

SEQ ID NO: 379069 - DNA, 201 bp, Homo sapiens; identical to SEQ ID NO: 82162

SEQ ID NO: 379070 - DNA, 201 bp, Homo sapiens
aagccccagagctgggaggccctggactgaagaagaggtttggcaaaaagtgagtgtctcccaaatccctgggcccaaagagacatggagagaagtcttarggtccctaggccccacccacatatccttgacatataagcgaccatcctgagtctcattccatttgttcctgacctgactgagaggttacagtgttgaatg

SEQ ID NO: 379071 - DNA, 201 bp, Homo sapiens
ttaccgagtggccacggatccccggcaagatgagcaggaagcttgctgctagagccaaaaacactagaataacgatgagcagtggaacgctgaagcctgcrgcatgccggggctgggggtaaaaaggcagtacgccgttccacagggtcatgctgcacgccggccgagtgctgcacgcaggcgggcaggcaagccagcaag

SEQ ID NO: 379072 - DNA, 201 bp, Homo sapiens
cgccgcgtgccccgcaggccaaccaggtgacgggctggctggacggcagcgccatctatggctcctcgcactcctggagcgacgcgctgcggagcttctcsgggggacagctggcgtcggggcccgaccccgctttcccccgagactcgcagaaccccctgctcatgtgggcggcgcccgaccccgccaccgggcagaacg

SEQ ID NO: 379073 - DNA, 201 bp, Homo sapiens
ggctacctgtccttccgagagttcctggacatcctggtggtcttcatgaaaggtagggggctgggaggtggcaggctatccaagaatccaggggtctttcrgcaaggagatgacctgcattcccttttttcttcccaggctccccagaggataagtcccgtctaatgtttaccatgtatgacctggatgagaatggcttcc

SEQ ID NO: 379074 - DNA, 201 bp, Homo sapiens
cccgccgccgcctctcgacccgggctcacccgccgcgtgccccgcaggccaaccaggtgacgggctggctggacggcagcgccatctatggctcctcgcaytcctggagcgacgcgctgcggagcttctcggggggacagctggcgtcggggcccgaccccgctttcccccgagactcgcagaaccccctgctcatgtggg

SEQ ID NO: 379075 - DNA, 201 bp, Homo sapiens
atccgaaataccaccctgcgggacgtgctggtcgctgttatcaacattgaccccagtgccctgcagcccaatgtctttgtctggcataaaggtgagtgccrtgggagaacacaagtgagtgacagtggccagagaaggatcaagattgagggtgcgggggaatcacctggtgctgtccagggagccaggcaccttctgtgt

SEQ ID NO: 379076 - DNA, 201 bp, Homo sapiens
ggcaggatcaggcagctattgggtgataccttgggttcagaaagcgaggtcattgcataagtgtgtgtcggggagggattagactgaaaaatgtgcaaacragggaggctacaaaaatgtcccagagaaagatggaagatgactcagagggaattcgtggaaatgatcacataaaccgtgtaaaggaaagcaaatcttccc

SEQ ID NO: 379077 - DNA, 201 bp, Homo sapiens
cttccctggcccgccgccgcctctcgacccgggctcacccgccgcgtgccccgcaggccaaccaggtgacgggctggctggacggcagcgccatctatggytcctcgcactcctggagcgacgcgctgcggagcttctcggggggacagctggcgtcggggcccgaccccgctttcccccgagactcgcagaaccccctgc

SEQ ID NO: 379078 - DNA, 201 bp, Homo sapiens; identical to SEQ ID NO: 82170

SEQ ID NO: 379079 - DNA, 201 bp, Homo sapiens
aatgctgtgtaagaaggtgagcatccctccctcattcatcaaatggggcataggtggccgaattgtgacccgcatcaagtggtggagcatgagagaaagcycctggctccaggaactgagtctgaaggggtcattcttacccagtggttgagatgccaaacttggagggaggttggtggtatagccagaagggcctctgct

SEQ ID NO: 379080 - DNA, 201 bp, Homo sapiens
ggccacgcagtcaatgtctacatcttctcagtcagcccactcagcctgctggcctgcatattccccaacgtctttgtgaatgatgggtcagttctggggawggtttctcctgggactcatagggtgggcccaagggtataatagaaaaagaaataggcaggccgggcgcggtggctcacgcctgtaatcccagcactttgg

SEQ ID NO: 379081 - DNA, 201 bp, Homo sapiens
gcctgggcttcgggcctggcagggcctggaggggagaggcgcccactccccagccgcggacacccgccgggccccggccttccctggcccgccgccgcctmtcgacccgggctcacccgccgcgtgccccgcaggccaaccaggtgacgggctggctggacggcagcgccatctatggctcctcgcactcctggagcgacg

SEQ ID NO: 379082 - DNA, 201 bp, Homo sapiens
gaggtcaggcaggctggtgatggtcacaggatatggtcctagggcacctgaccgtggtcttaccgtgggtagggacacactgatccttccaccagacttgycctgcctgagggggcttgcctaagaagaggaaatcaggcctgagcagcagccaggcagcggctgaggttctgtgcccgagggatggggcaacagtggctg

SEQ ID NO: 379083 - DNA, 201 bp, Homo sapiens
gatcctaagagtctgcatgggagagcccagggctcgggaccttggccacctgtgccaagctgatgtaacctcactccggccccagactatggctttgcctygccaccctcggacattgcacagaccaccctcgtgggcatcatcctgtcacgaggcacggcggccagcgtctccttcatgttctcttatatcttgctcacc

SEQ ID NO: 379084 - DNA, 201 bp, Homo sapiens
cccaagggctgtgtgcccctgaagctgctaatcattgaggtcaggcaggctggtgatggtcacaggatatggtcctagggcacctgaccgtggtcttaccrtgggtagggacacactgatccttccaccagacttgtcctgcctgagggggcttgcctaagaagaggaaatcaggcctgagcagcagccaggcagcggctg

SEQ ID NO: 379085 - DNA, 201 bp, Homo sapiens
tgtgcaagttgcctaatgcacaatgatacccactgaggtcaaggagcaggttgaaatctatcctacacactgctcaaagccaccggcattgctctaagatrtatctggccagaggaagaggcattgtttcttttacacaaaggacctgcagggttgcatccacctaagaggatgtcccctttcttgtgcaaagttgccaca

SEQ ID NO: 379086 - DNA, 201 bp, Homo sapiens
gaggacaacatagtggttgaagatctgaggggtgagctcagagccagaaggggtggatggtaagggaccaggaagcctgaggatccctctgggttcatcartagcagacctagggcgctcacgatgcaggaacacagatacaaacacagacttcaaggagccataagaagaaaatgaactttgaacttttttttttttttt

SEQ ID NO: 379087 - DNA, 201 bp, Homo sapiens
gagcctgccacgagagagggccatgcacaccctggacacccctgcactcagtggactatcttctcagttgtagatgccccctgtttgagggctgctttctytgattggtcaaggtcactttcaattctgttctgccttttgagtccatggctaccccacccagcttagtgtcagcggcaggctggatgagcaccttctcag

SEQ ID NO: 379088 - DNA, 201 bp, Homo sapiens
tatcacctccccaccccccactccctcaaatcccctggttccttgtggggacaggcctcacactgctcctgtctgagttgcttctcccatgattgaccctkcctggtctcatctccacacggaagccgtccttgggctcagacccttccaggccccacaccatccaactcgtgcctcccctcgcccctctctgcccctcag

SEQ ID NO: 379089 - DNA, 201 bp, Homo sapiens
gatgagcgagaaggagctatttaggaaggctgtgacaaagcagcagcgggaacgcatcctggagatcttcttcagacacctttttgctcaggtgccatgayctgtgccttttggagatgggtccagccccagaaatggaggaaacctgggctgcatagaacgcccctgtgggtgaactaagcttccgctctatggcctgga

SEQ ID NO: 379090 - DNA, 201 bp, Homo sapiens
cctggacccctgttcagtgccattgtcctcgaccagtttgtacggctgcgggatggtgaccgctactggtttgagaacaccaggaatgggtaaggcttgcstgggcccccacctcagactgctcctcagcctgagccccagaccctctgtctagccttagacagcccctgtgagcccttgattcccagtcagcccaccaca

SEQ ID NO: 379091 - DNA, 201 bp, Homo sapiens
cgggcctctggcactggcagaggatctctgcccttccctatcctgagactagaagctccagccgtcccaaagccagcctgggagaggaccggggtgcctcrgaaaagactaggatgttctgtatcctccctctgcctgtgtctccgtttctggtctcagagctggggcagggtcaggctcatttcatctcccccctctctt

SEQ ID NO: 379092 - DNA, 201 bp, Homo sapiens
ctaagaagaggaaatcaggcctgagcagcagccaggcagcggctgaggttctgtgcccgagggatggggcaacagtggctgccctccgcagcaaacatacrctcaccccttatctcctgtggtgccccaggtgctggaggccacagctgccctgtacaaccaggacctatcccagctagagctgctccttggcgggctcct

SEQ ID NO: 379093 - DNA, 201 bp, Homo sapiens; identical to SEQ ID NO: 82158

SEQ ID NO: 379094 - DNA, 201 bp, Homo sapiens
aggtcacctttcatggagtggcattaagggaaggccagagggcccttaccacactgctgccctgcctccccttgctatagggcagcagtgcccactccccrgctgtacacagaggcgctgcaagagaagatgcagcgaggcttcctagcccaaaagctgcagcagtacaagcgcttcgtggagaactaccggaggcacatc

SEQ ID NO: 379095 - DNA, 201 bp, Homo sapiens
acgccaccctgccggggagtgggggaacccgctgtgagcgggcttctcccagcccaccggggttcccacagctgcgctcttctttatccctaccccagcgycaaagccagggactgggatggcagcggtgcaggggaattccccgggggagaagcgggctcctgaggtccaggcggtggctggagtctctccggattccgt

SEQ ID NO: 379096 - DNA, 201 bp, Homo sapiens
ggcctgggcttcgggcctggcagggcctggaggggagaggcgcccactccccagccgcggacacccgccgggccccggccttccctggcccgccgccgccyctcgacccgggctcacccgccgcgtgccccgcaggccaaccaggtgacgggctggctggacggcagcgccatctatggctcctcgcactcctggagcgac

SEQ ID NO: 379097 - DNA, 201 bp, Homo sapiens
cagccaggtggggcctgggcttcgggcctggcagggcctggaggggagaggcgcccactccccagccgcggacacccgccgggccccggccttccctggcycgccgccgcctctcgacccgggctcacccgccgcgtgccccgcaggccaaccaggtgacgggctggctggacggcagcgccatctatggctcctcgcact

SEQ ID NO: 379098 - DNA, 201 bp, Homo sapiens
ccccagccaggtggggcctgggcttcgggcctggcagggcctggaggggagaggcgcccactccccagccgcggacacccgccgggccccggccttccctrgcccgccgccgcctctcgacccgggctcacccgccgcgtgccccgcaggccaaccaggtgacgggctggctggacggcagcgccatctatggctcctcgc

SEQ ID NO: 379099 - DNA, 201 bp, Homo sapiens
cccatgcccgcaggctaccatgttctttccgacgtggtgagcgtggaaacgcccggttgccccgccgagttcctcaacatccgcatcccacctggagaccycgtgttcgaccccgaccagcgcggggacgtggtgctgcccttccagaggagccgctgggaccccgagaccggacggagtcccagcaacccccgggacctg

SEQ ID NO: 379100 - DNA, 201 bp, Homo sapiens; identical to SEQ ID NO: 82163

SEQ ID NO: 379101 - DNA, 201 bp, Homo sapiens
cctccttctctttccctccctctgctgctgcccgagtgcaggtgctggacatcaaccaggccgacgcagggaccctgcccctggactcctcccagaaggtrcgggaggccctgacctgcgagctgagcagggccgagtttgccgagtccctgggcctcaagccccaggacatgtttgtggagtccatgttctctctggctg

SEQ ID NO: 379102 - DNA, 201 bp, Homo sapiens
  misc_feature (1)...(201): n = A,T,C or G
gcttctctcatgctaaggggctagttacagatctagtataatgtattcctaatactaattaaattccctaattttatccaaattgctccaaaaagaaaaancccaaaacaaaactaaaccctgtatttttctcagatctaggcagtctacatcaaacaataacacctgtgtatgaatgttttcctgaatcaggtgatgcag

SEQ ID NO: 379103 - DNA, 201 bp, Homo sapiens
catgggtaatttttgaaaaacatttcagtggagtgaaatgatcaggaaatgaatgtcaggggtttaggaatgagaggatggtaaagaaatctgatggactrcaagggatcaaagggactttttattaggataaagggagtcctaaggaagctaagggaaaagggcagtagagggagattaagaaaaaaatggagtggaaga

SEQ ID NO: 379104 - DNA, 201 bp, Homo sapiens
cacatttccctgggaatttacatttacaggaaatttgcatatccttgatggctaatcatgttgagcatttttttttcacgtgcttactggccatttgtatrtcttcctttgagaaatgtctgttcaaatcctttagccattttgttttttaaatagagacagggtcttgctttgttgcccaggctggtgtgcagtggagtg

SEQ ID NO: 379105 - DNA, 201 bp, Homo sapiens
gagtgggtagagtattgtctaataaaagagtgaggacctggcacacaagcaataattcagtaaatattcttgcttccttcattccttccttcccattctcracaataagtagctgggttcagacttactctctgtctccagagctgatagattttcttttcaccacgctttagaaagattagtgttagaaattgctaaacc

SEQ ID NO: 379106 - DNA, 201 bp, Homo sapiens
acctcaaggtcttctctagtgtttaggatactttccaggtttgtcaggaacttatagaaaagtagttttactgccaactttcagatttctaattcttattmtttatttgaaaggtctcgtctacagaggactggtctttcaatagcaagttttcacttcatcgacaacatcacgaaggtggtaacaaacaaatgctttatc

SEQ ID NO: 379107 - DNA, 201 bp, Homo sapiens
tagaaatggaatttctgagttatataacaaatttatgtattttttttaagaaactgccaaactgaattttggataatgttttcattttacttttttcattygcctattttagttcatgaacctgtgaccacacttaagactccattaaagtcgctgtttatttacctgctagttttgccatacttgtttaaagttcttaga

SEQ ID NO: 379108 - DNA, 201 bp, Homo sapiens
gatggaggaagaagagagcctgcaaaagggggagctgtgaggagctcagcagggcaaagctaatccaggcagctatctttgaataggttttccccccagtragatgaagcatctttttcatctaccagtgtttgcagattcatcccttgctgacttgaatgtgccctgcctctgaactttcactgccctgctagtccttat

SEQ ID NO: 379109 - DNA, 201 bp, Homo sapiens
gagtagggtgggcaaaggaggggaatgaaagagtgaccattaacattgtgtattatatattaggagtttgtataggcatcatgtaatttaataatcaagcmaatatgtagcattctttgggtatctactaaatgcctgcctggtcctgggtcatgaactgctttgtaaatcttatcatttaattctcacattatctccaga

SEQ ID NO: 379110 - DNA, 201 bp, Homo sapiens
gtacctggtatgcagccattgatttggcaaatgtctttttccccattcctgtccataaggcccaccagaagcaatttgccttcagctagcaaggccagcartatacctttgctgtcctacctcagggacatatcaactctctggttttatgtcataatcttgttcgaagagactttgatctctttcgcttccacaaggtat

SEQ ID NO: 379111 - DNA, 201 bp, Homo sapiens
ataccatctgtctctcataggagactcatttcataagtgtaatcaagcaagctgctgagaataggcatttttttcttttcttcttttttagacagagtctcgctctgttgtccaggctggagtgcagtggcttgatctcggctcactgcaacctctgcctcccaagttcaagccattctcctgcctcagcttcccgagtag

SEQ ID NO: 379112 - DNA, 201 bp, Homo sapiens
acagagatttcttggtggtagctatttgggtaaaggtatatgggtatttttctgtacatgtgaaattatataaaaataaaagttatataaattacattgamaacttgatatttcatctgtggcttatttaaccgttctataaatattcaattttgcccaatactgtgctggaccctaatttccatttagttctcgttatta

SEQ ID NO: 379113 - DNA, 201 bp, Homo sapiens
attgcttgagcaaattaacacatctcctggtacctggtatgcagccattgatttggcaaatgtctttttccccattcctgtccataaggcccaccagaagmaatttgccttcagctagcaaggccagcaatatacctttgctgtcctacctcagggacatatcaactctctggttttatgtcataatcttgttcgaagaga

SEQ ID NO: 379114 - DNA, 201 bp, Homo sapiens
ttttcattagtgccagatggatgactcttacagagaattggatttctaatcaaatttctctgaccaaactctttatcagcaccaaccagataagagagcaytgaatgagaatcaggggtagaattggggggaaaatccttctgggatgctggaaaggtaggcaaagagataactgttcagagactcttggatactgatcct

SEQ ID NO: 379115 - DNA, 201 bp, Homo sapiens
tagacatacgtagcaggtagccaaacccccacactggctccctgacttgtagggtgagagttattatgatgggaaaggccaaatggaaaccattagagctrcccctacctagaaaaatagcaaatcaaaaacaatatcacatccatggagggattgtggagattagtgccaccatcaaggacctgaaagtctcaagggtgg

SEQ ID NO: 379116 - DNA, 201 bp, Homo sapiens
gattcaagaaatgggagagcccaatttttgtaaatattcctttaagtgatcccatgcagattattcctgagttcctcaggaagagtaggtctgtgggaaamaagacactcaaactctaagtggttttttgttttgttttgtttttttgttgagatggtctcactctgcttttgcccaggctggagtgcagtggtgcaatca

SEQ ID NO: 379117 - DNA, 201 bp, Homo sapiens
tccaagttcttcacctttaggaatcagactggcttccttgcttctcagcttgcagatggcgtgttatgggaccttgtgatcatgtgagttaatactccttmgtaaactcccctttatatatatatatatcccattagttctgtccctctagagaaccctgactaatacagattttggtaccagaagtggttctagaggaac

SEQ ID NO: 379118 - DNA, 201 bp, Homo sapiens
tgtgtacttcacatattctatttccacaactacttctgatgacatgttctccagttccatgtgtttgaccaaggacattcgcagaaactggcccttaatarggaaataaaactccatatgtttgtggaactcatttttgtcctttagtaatttattgatgatgttactaaggtcagcaaattcagaggcggcagggattga

SEQ ID NO: 379119 - DNA, 201 bp, Homo sapiens
catttgggttggttacaagtctttgctattgtgaatagtgctgcagtaaacatacatgtgcatgtgtctttatagtagcatgatttataatactttgggtrtatacccagtgatgggatggctgggtcaaatggtatttctagttctaaatccttgaggaattgccacactgtcttccacaatggttgaaatagtttatag

SEQ ID NO: 379120 - DNA, 201 bp, Homo sapiens
gtggggttctcctgctcttgggccagctccttgcatcctgagatttgcatgtgtcccccttggtgctgagtttacctgaggcctgggggaagattggcctsttcccactaaaagcaaacaccaaatgatttctatttcgaatccaggatttgtcagagttgctggtgaccactactcgtttgtcccatcacccctccttag

SEQ ID NO: 379121 - DNA, 201 bp, Homo sapiens
gaggatcgtttgagcccaggaggttgaggctgcagtgagccgtgatctgtactccaacctgggcaacagagtgacaccctctctcaaaaaaaaaaaaaaaagaaaaaaagtaaagaagcaatcatcaacatcagatcagtatcgttattcagtaatgtgagactgttgtccgacctgctttattataacatccctttttgg

SEQ ID NO: 379122 - DNA, 201 bp, Homo sapiens
gcaggggactgtggccttgtggggttctcctgctcttgggccagctccttgcatcctgagatttgcatgtgtcccccttggtgctgagtttacctgaggcytgggggaagattggcctcttcccactaaaagcaaacaccaaatgatttctatttcgaatccaggatttgtcagagttgctggtgaccactactcgtttgt

SEQ ID NO: 379123 - DNA, 201 bp, Homo sapiens
tcagaatgaaggattaaactgaagattaaaagaaaatttccacgaagttttgattatgacagcattgtggagcacgtactgggtttgaagctgctttagtmttaccttcaatgaatcctgagaaatgcagtgataatgcttagcatattatatatatatatatatatttctttttctttttatattttagataagagtgcc

SEQ ID NO: 379124 - DNA, 201 bp, Homo sapiens
tcaagaaatgggagagcccaatttttgtaaatattcctttaagtgatcccatgcagattattcctgagttcctcaggaagagtaggtctgtgggaaacaaracactcaaactctaagtggttttttgttttgttttgtttttttgttgagatggtctcactctgcttttgcccaggctggagtgcagtggtgcaatcatgg

SEQ ID NO: 379125 - DNA, 201 bp, Homo sapiens
tctagaacttctgactgaccagcttcaagctggggttcccatgaccccttctttgggtttaatttgctggaatggctcacagaactcaaggaaacattctractgctgtattacagaggatgttttaaaagacacaaataaacagccgtatgaagagatatatggggtgaagtctggaagggtcctgagtgcaggaacttt

SEQ ID NO: 379126 - DNA, 201 bp, Homo sapiens
ttctttttatattttagataagagtgcccaggagtggaatctggaaatagagtctacatttgatgttgtcagctcaaagccagttggtggtcaagtgatcrtagccatccctaagttgcaaacacaacagacatacagcattgaacttcaacctgggaaaaggattgttgagctatttgtgaacattagcaaggtaaatga

SEQ ID NO: 379127 - DNA, 201 bp, Homo sapiens
ctaactgctgtattacagaggatgttttaaaagacacaaataaacagccgtatgaagagatatatggggtgaagtctggaagggtcctgagtgcaggaacyttatccctgtgaggctggggtgtgccaccctccaggcatgtagatgaatacttgttcctctttctgtcagccttcacatggtcagctatgtggaagttct

SEQ ID NO: 379128 - DNA, 201 bp, Homo sapiens
aatatatcatttttgttattcttcttcagaatgaaggattaaactgaagattaaaagaaaatttccacgaagttttgattatgacagcattgtggagcacrtactgggtttgaagctgctttagtattaccttcaatgaatcctgagaaatgcagtgataatgcttagcatattatatatatatatatatatttctttttc

SEQ ID NO: 379129 - DNA, 201 bp, Homo sapiens
gatgttttaaaagacacaaataaacagccgtatgaagagatatatggggtgaagtctggaagggtcctgagtgcaggaactttatccctgtgaggctgggktgtgccaccctccaggcatgtagatgaatacttgttcctctttctgtcagccttcacatggtcagctatgtggaagttctttgaactctgtcctcttggg

SEQ ID NO: 379130 - DNA, 201 bp, Homo sapiens
cgtatgaagagatatatggggtgaagtctggaagggtcctgagtgcaggaactttatccctgtgaggctggggtgtgccaccctccaggcatgtagatgartacttgttcctctttctgtcagccttcacatggtcagctatgtggaagttctttgaactctgtcctcttgggcgttatagggagacttcattggacagcc

SEQ ID NO: 379131 - DNA, 201 bp, Homo sapiens
gtgccaccctccaggcatgtagatgaatacttgttcctctttctgtcagccttcacatggtcagctatgtggaagttctttgaactctgtcctcttgggcrttatagggagacttcattggacagccatgattgataaccatgtagaaatgtgattggacaaagcgggtatgatctaataccattagactgagtggggaaa

SEQ ID NO: 379132 - DNA, 201 bp, Homo sapiens
tatttcactacaggaagagggtaaatgtgataaataaaccttagtctaatgttgtcatcttaccttttctctcctctttctcctcctattccattaccacygcccaccccccccccaccccactcctctctctccctctttttcatcatgttggtgtgttttattttctgtatggattttcactctctctgttcctaaaga

SEQ ID NO: 379133 - DNA, 201 bp, Homo sapiens
cattcagcttcttggcctctctgtgaagcatttcctcctccagggtatgaggcaggacaccttctgaatgagtgtcttatgacccacaatcggattagagwcctgccttgggctggtgaaaggagggaaggagatcagagagatagattctgttttctgaggcctgcttttgagtcctaaagcttctcaacattataacaa

SEQ ID NO: 379134 - DNA, 201 bp, Homo sapiens
acctcacaatcatggcagaagacgaaggaagagcaaagggacttcttacatggcagtgggtaagagaggacttgtgcaggaaactccttctttataaaacsatcagatctcgtgagacttattcactatcacaagaacagcataggaaagacctgcccccatggttcagttacctcctaccaggtccctcctacaacacat

SEQ ID NO: 379135 - DNA, 201 bp, Homo sapiens
tttaaatgaaagtttgagaagaagatggaggaaaataatttttttaaacctttggggattacttttctatattgcttttactgtgttccttcaggagcacygaaagcactgaatgggacccagtggttgcttaagcctgacttattatcacacacggaaataactcttacttgctacaataactcttgcttgtaaatcata

SEQ ID NO: 379136 - DNA, 201 bp, Homo sapiens
cgggagaagctgtgacaagttttctatatctgcttctgctctgggggcctcacagccccatgttgattggctcaataaatccactgcttctagtgcgtgcrgtaggggaggtatttgttatctcttatcacccgaaatggttatatattaaagcaatcaatagctacctagaatctataagttattatatacagtcatgca

SEQ ID NO: 379137 - DNA, 201 bp, Homo sapiens
ctagtgcgtgcggtaggggaggtatttgttatctcttatcacccgaaatggttatatattaaagcaatcaatagctacctagaatctataagttattatayacagtcatgcaccgtataacatttcagtcaacaacacagttcatatatgatggtggtcccatgagattataatactgtattttcactgtcccatttctat

SEQ ID NO: 379138 - DNA, 201 bp, Homo sapiens
attgctgaggagatgtgggaattgcacacgggaaagctgtgtggtttccttttacctttcagctgaccatgaactcctgagcccgaccaactaccacttcytgtcctcaccgaaggaggccgtggggctctgcaaggcgcagatcactgtaagcacaggtcatggcggagggcaggggactgtggccttgtggggttctcc

SEQ ID NO: 379139 - DNA, 201 bp, Homo sapiens
taggaacaagtgttgagaatgggaaggaaggaatgaaggaagcaagaatatttactgaataattgctgtgtaccacgtactcattctttaattcgacaatratctacccactccactttgagacccagggggaaatcaaagtactgcaagaggtcacagatagatctcccaccctgcagtgctttgatttccttttgggcc

SEQ ID NO: 379140 - DNA, 201 bp, Homo sapiens
attccataccccgttttttaattgctcccaaattgtggggctaatcttttgggaatactgttgtttcagagtgaaggaggatgaagttcagtatcctgackcaggtaggaacaagtgttgagaatgggaaggaaggaatgaaggaagcaagaatatttactgaataattgctgtgtaccacgtactcattctttaattcga

SEQ ID NO: 379141 - DNA, 201 bp, Homo sapiens
gcatgatggcatctcgtgctgtcctgccctgtcttgtccaggacatgaatcatcgctttgttgagcatatccttgctgtatacattatccacctgttagtyactcagcagccttctcctttatcagacagaaaaagtcatagtatatatggggttcggtactatctgcagtttcaggcacctactgggggtcttggagcgt

SEQ ID NO: 379142 - DNA, 201 bp, Homo sapiens
ttattttatctttccatttgtcattttctgtttatgctccataaagtttttatgacttacaatcataacatttttagagtggaagtctatgtaaaatataycatttttgttattcttcttcagaatgaaggattaaactgaagattaaaagaaaatttccacgaagttttgattatgacagcattgtggagcacgtactgg

SEQ ID NO: 379143 - DNA, 201 bp, Homo sapiens
gtcaaataagattggataaaatgtctgccttggccacctgtttcaggggctaaagatcgaactgattgcttttgggcttcacgttcagaaacaaggacttytgaattcatacctgaggttggcaagtttagccagagctttttaaaacctatttataagtgtttgtctttcaatatgtttcctcattcttttttttttttt

SEQ ID NO: 379144 - DNA, 201 bp, Homo sapiens
ggcatatgctattcggctacttaagaggaatggagccaacatgatttaaattgcactgtctctttttgctgctattttgtggaattcacacatgtaaaaaraatgctaataatgtgactttacttaactatgcaataaaagagagaagctctaatggtagagcttttgtaaatttctggcagtggactttctagattgctg

SEQ ID NO: 379145 - DNA, 201 bp, Homo sapiens
atgctttctctgcctactgaaaagatctagaaataatgcccaacgttgtagtgttgagtattcttatattgaagtaatctttcctgttaagagaaaagctyagagaaatggccgactccaggtctggcacaggaaatatataaaatgatcctggatatcttcttttcacaaatggcaatggtgttaatataatattatcaa

SEQ ID NO: 379146 - DNA, 201 bp, Homo sapiens
ctggatatttcactacaggaagagggtaaatgtgataaataaaccttagtctaatgttgtcatcttaccttttctctcctctttctcctcctattccattmccactgcccaccccccccccaccccactcctctctctccctctttttcatcatgttggtgtgttttattttctgtatggattttcactctctctgttcct

SEQ ID NO: 379147 - DNA, 201 bp, Homo sapiens
cacagttcatatatgatggtggtcccatgagattataatactgtattttcactgtcccatttctatgattagaattacctacagtattcagcacagcaatmtgctgtacaggttagtagcctggagcaacaggctataccatatagtctaggtgtgtagtaggctataccatcttggtttgtttaagtacactctatgatc

SEQ ID NO: 379148 - DNA, 201 bp, Homo sapiens
gattagaattacctacagtattcagcacagcaatatgctgtacaggttagtagcctggagcaacaggctataccatatagtctaggtgtgtagtaggctawaccatcttggtttgtttaagtacactctatgatcacacaatgatgaaattgcctaacagcatggttcgttaatgcctgccctggttcgttagtgcctgcc

SEQ ID NO: 379149 - DNA, 201 bp, Homo sapiens
cctaacagcatggttcgttaatgcctgccctggttcgttagtgcctgcccagatgttgtgagggtgacatgacataatgtccagagtgctcagagcgcttsacaaacatgggtgccctccactgttgactctccctcacatgctcactcccttagaaccccgatgagccacaaacagctgggccattggacagtgcctctc

SEQ ID NO: 379150 - DNA, 201 bp, Homo sapiens
agggtgacatgacataatgtccagagtgctcagagcgcttcacaaacatgggtgccctccactgttgactctccctcacatgctcactcccttagaacccygatgagccacaaacagctgggccattggacagtgcctctctgactacttgaccttgccgtctcctgacactcttgattattttcagagtacggaggaaag

SEQ ID NO: 379151 - DNA, 201 bp, Homo sapiens
gagcgcttcacaaacatgggtgccctccactgttgactctccctcacatgctcactcccttagaaccccgatgagccacaaacagctgggccattggacartgcctctctgactacttgaccttgccgtctcctgacactcttgattattttcagagtacggaggaaagtggaaaatgcttcattactttgctcagaattt

SEQ ID NO: 379152 - DNA, 201 bp, Homo sapiens
  misc_feature (1)...(201): n = A,T,C or G
tgattattttcagagtacggaggaaagtggaaaatgcttcattactttgctcagaatttctttgctccactgttgccagtaggctttgagaatgaaaacangttctatatctatggtgtgtcagatcttcactcggattattcgatgacactcagtgtaagttacttggattgttttctaagatcgaaggagacttttaga

SEQ ID NO: 379153 - DNA, 201 bp, Homo sapiens
tttggttacattcttttgggaaaataaaagagaaattaatttagagttagaatacatatattcaggctacaaccctgccattaatcatgtgaccataagcraaacccttcacatcttgttgattcaatttcttctcagtaaaatgataccagtctctcttcttacaggatttctatgagtaggaaataaaataactagatg

SEQ ID NO: 379154 - DNA, 201 bp, Homo sapiens
ctccctgtctccctgaagccagggtgcaagcttgaatcccaggctctgcagtcagacatacagagaggagatttccaatccaacgaagataaccagcatargcatgacaccagcatctctttcggccttggtcttggagcagcagaagctgatgctaccctggcagcttcctgggcaggctggcatgagccgcatgaacct

SEQ ID NO: 379155 - DNA, 201 bp, Homo sapiens
cttgaatcccaggctctgcagtcagacatacagagaggagatttccaatccaacgaagataaccagcataagcatgacaccagcatctctttcggccttgrtcttggagcagcagaagctgatgctaccctggcagcttcctgggcaggctggcatgagccgcatgaaccttgttcctgtggctgctttaggaccttcact

SEQ ID NO: 379156 - DNA, 201 bp, Homo sapiens
cagtttcctcatctgtaaattggggttaatggtagtaaataccttgtgtgtgtgtgtgtgtgtgtgtgtgtgtgtgtgtgtgcatgtagatctgcatatgygcgtgtgtttatgagtaaagattaagttaactaatacattgaagcactcagcactctacctgacacagtgagagcccatgaaatgtaaactatttacctt

SEQ ID NO: 379157 - DNA, 201 bp, Homo sapiens
tcacaactcactgcagcctcaaactcgtgggctcaagcaatcatcccactttagcctcccaagtagctgggactacaggcatgtgccaccacaccaggctrattttttatttttctttttgtagagatggggtctcactacgttgtccaggctggtcttgaactcctgggctcaagcaatcctcccacctcagcctcccaa

SEQ ID NO: 379158 - DNA, 201 bp, Homo sapiens
catcccactttagcctcccaagtagctgggactacaggcatgtgccaccacaccaggctgattttttatttttctttttgtagagatggggtctcactacrttgtccaggctggtcttgaactcctgggctcaagcaatcctcccacctcagcctcccaaagtgctgggattacaggtgtgaaacactgcatccggccggg

SEQ ID NO: 379159 - DNA, 201 bp, Homo sapiens
tcttgaactcctgggctcaagcaatcctcccacctcagcctcccaaagtgctgggattacaggtgtgaaacactgcatccggccgggtttttatgagtacyaaataagttaatattctttttttaaaaaaagttaatattcttaaagtaattagaactttgcctggccatttccagttctttctggtaatattattatagc

SEQ ID NO: 379160 - DNA, 201 bp, Homo sapiens
ggtggaagggttgccagggagggacaatagagttggttaattgatacaaaagtatagctagatgggaagaataagttctggtgttctatagcactttgggrtaactatagttaataataatttattgtatattttcaaatagctagaagagataattttgagtgttcccgacacaaagaaatgataaatgtttgaggtgat

SEQ ID NO: 379161 - DNA, 201 bp, Homo sapiens
tgtatacatgtatcaaattataacatggtaccccataaatgtgtacacttattgtgtcaaaaataataaacataaataaaataaattaagaggaggaagcrtaggaagactattgataaaggatgtgtgtctaaaaagtgtgcgagatgattgtcaatgtgaatctctcctttaaatacataataggagtagttagcatta

SEQ ID NO: 379162 - DNA, 201 bp, Homo sapiens
agtgtgcgagatgattgtcaatgtgaatctctcctttaaatacataataggagtagttagcattatttaattctggtggtggcattttggaaaaacatctrtaattaggaaaaacttccaaatttaatatggctagtgtacatttcttatatttgggtatgaatcagttcctgaaggataaccttttccttttaaggtaat

SEQ ID NO: 379163 - DNA, 201 bp, Homo sapiens
ggtaatgggcccatgtgttgcttgattactgggaatgaaaagtcatactttatgaacagggattaagcttttttaattttcaggtttttgggtggaggggmagagtatgttttttcaaagtctgtgtaacttgaattaaaactctggatattttcagatgtagccagcaattgtcttctttcttaaatgctaacagtgcat

SEQ ID NO: 379164 - DNA, 201 bp, Homo sapiens
acaaaagaaagatcctgtaagttaggggataaaataaagatcctataatttgggcctggcttaaaccataaaaaattgattttttaggggagagaagtaayattatttggtttgtgtcttcaactatataaaaattaaacatatgtatatcagtttcatttagtaatcactgagaaacaagtgaacagtgtaagtgctaaa

SEQ ID NO: 379165 - DNA, 201 bp, Homo sapiens
caactatataaaaattaaacatatgtatatcagtttcatttagtaatcactgagaaacaagtgaacagtgtaagtgctaaagcatctactctcatagtatycctattatagtgtaataggtgttttattcctatttaagaattgtgacagttttaacagtgttgattgcattctattaagttttgacaaacgaatactaga

SEQ ID NO: 379166 - DNA, 201 bp, Homo sapiens
  misc_feature (1)...(201): n = A,T,C or G
tgctgttattttcattctacatatgaagaaatgaagactgagaagttaacttagtcacatagctagtattttgcaggactgggattaaaactcaggtttcntagtctcttaaccatttctgctaacctgactttcagcaattattactactattgttccttaaaaacatagcaaccaagaatgcctgtttttattctgttt

SEQ ID NO: 379167 - DNA, 201 bp, Homo sapiens
tctcaaatttgtgcatattggtcctccagtaatttgtcaattatagtccaggtcttcctactctgtactggttcccactgagatttcagctatgggacaayggttgtggggtagtgtgtgtggtctactcagttaagttgtaattgcctgtatctacctgtctacatctctaattttgggggcagcagtctgccctgtgac

SEQ ID NO: 379168 - DNA, 201 bp, Homo sapiens
aacaaaaagacctgtttgaaaaggtcacttttaaggagaagtgcatttccagcaaagaggaaaaacacaggagtggggaggatagaggccctgaggcaggmacgagcttgacaagtttcaggaatagtcagcaggccagtgtggctggagacctgggaaccagagggtaggagaggagttcaaagtctagggcacatcatg

SEQ ID NO: 379169 - DNA, 201 bp, Homo sapiens
caaccaggggactattgctggtctatgtatgggcaagagatgacttctggcttggacaagcatggtggcagtgaaatggtgagaatggttgtgagaacacrttttacatgtagaaacaagaggatttcttcagttggatttgttaatggattgggagacagaagggggaggtgcaggaaaataccaggattttttttatct

SEQ ID NO: 379170 - DNA, 201 bp, Homo sapiens
atcaaattatgcataatggcgccccagtgatcacactcatcaggctaactggatttttcatttgtgtgaaagataatgcccagagctcagaataaagactytcttctgtgtaataaaacttatggaagtgttgcattcccttttatttgatttgctaggtatggcaggattttatgtttgcctgtgccctttatccaactg

SEQ ID NO: 379171 - DNA, 201 bp, Homo sapiens
taatgcaggatattaaaatgatgcatactgagggttgggatttaatgaaattaatgtttactgctttatcaaggacagtcttaagtgaaactgttttttttcattttcctgctgctaatgcatgaaggtgaaagatgtaatgactactagcagtttggagctactgccttgattcctgctaaggcaccagcagtgttaacc

SEQ ID NO: 379172 - DNA, 201 bp, Homo sapiens
aggtgaggttcagagtgacccttgaggagatgtgctacactagaaaagaactgcttgagttttctaatttatataagcagaaatctggagaagagtcatargaatggatattaagggtgtgagataatggcggaaggaatatagagttggatcaggctggacttattgatttgaacccactaagtagagattctgcttttg

SEQ ID NO: 379173 - DNA, 201 bp, Homo sapiens
gaccttcactggaacagctgggcggtgcgatctgggaatttgccatccaaattcaagcctgagtctctgatcctgaagagcaacctgatacgctttattaagcttcttttctgcttctatcaatataggtttccttgtgtataactcagaaccctgaatgataacatattacacaaatatgtaaggctaaattatatatag

SEQ ID NO: 379174 - DNA, 201 bp, Homo sapiens
gttcctgtggctgctttaggaccttcactggaacagctgggcggtgcgatctgggaatttgccatccaaattcaagcctgagtctctgatcctgaagagcwacctgatacgctttattaagcttcttttctgcttctatcaatataggtttccttgtgtataactcagaaccctgaatgataacatattacacaaatatgt

SEQ ID NO: 379175 - DNA, 201 bp, Homo sapiens
ctgctttaggaccttcactggaacagctgggcggtgcgatctgggaatttgccatccaaattcaagcctgagtctctgatcctgaagagcaacctgatacrctttattaagcttcttttctgcttctatcaatataggtttccttgtgtataactcagaaccctgaatgataacatattacacaaatatgtaaggctaaat

SEQ ID NO: 379176 - DNA, 201 bp, Homo sapiens
ttaggaccttcactggaacagctgggcggtgcgatctgggaatttgccatccaaattcaagcctgagtctctgatcctgaagagcaacctgatacgctttwttaagcttcttttctgcttctatcaatataggtttccttgtgtataactcagaaccctgaatgataacatattacacaaatatgtaaggctaaattatat

SEQ ID NO: 379177 - DNA, 201 bp, Homo sapiens
tcctgaagagcaacctgatacgctttattaagcttcttttctgcttctatcaatataggtttccttgtgtataactcagaaccctgaatgataacatattmcacaaatatgtaaggctaaattatatatagtgaaaatggccctttgaaattctttatgtcacacataacatataatgtaagactgagatgttgcatgaca

SEQ ID NO: 379178 - DNA, 201 bp, Homo sapiens
aattctttatgtcacacataacatataatgtaagactgagatgttgcatgacaaatgcacagattaagaaaccaggttgcactcagctccgtgctcacacwaagacaggtttgcaaaccctcccactctggggagcagcgcatcctcactctgggcatatgctattcggctacttaagaggaatggagccaacatgattta

SEQ ID NO: 379179 - DNA, 201 bp, Homo sapiens
tttatgtcacacataacatataatgtaagactgagatgttgcatgacaaatgcacagattaagaaaccaggttgcactcagctccgtgctcacactaagasaggtttgcaaaccctcccactctggggagcagcgcatcctcactctgggcatatgctattcggctacttaagaggaatggagccaacatgatttaaattg

SEQ ID NO: 379180 - DNA, 201 bp, Homo sapiens
tcacactaagacaggtttgcaaaccctcccactctggggagcagcgcatcctcactctgggcatatgctattcggctacttaagaggaatggagccaacaygatttaaattgcactgtctctttttgctgctattttgtggaattcacacatgtaaaaaaaatgctaataatgtgactttacttaactatgcaataaaaga

SEQ ID NO: 379181 - DNA, 201 bp, Homo sapiens
gccaacatgatttaaattgcactgtctctttttgctgctattttgtggaattcacacatgtaaaaaaaatgctaataatgtgactttacttaactatgcartaaaagagagaagctctaatggtagagcttttgtaaatttctggcagtggactttctagattgctggatcttttcaggagacttgaatgtaagctccaca

SEQ ID NO: 379182 - DNA, 201 bp, Homo sapiens
tttaaattgcactgtctctttttgctgctattttgtggaattcacacatgtaaaaaaaatgctaataatgtgactttacttaactatgcaataaaagagakaagctctaatggtagagcttttgtaaatttctggcagtggactttctagattgctggatcttttcaggagacttgaatgtaagctccacagttgggctct

SEQ ID NO: 379183 - DNA, 201 bp, Homo sapiens
catagatttccttttcaaagggtagaaatggaatttctgagttatataacaaatttatgtattttttttaagaaactgccaaactgaattttggataatgktttcattttacttttttcatttgcctattttagttcatgaacctgtgaccacacttaagactccattaaagtcgctgtttatttacctgctagttttgcc

SEQ ID NO: 379184 - DNA, 201 bp, Homo sapiens
gctgctctgaccatctctgggttctcctcagtggtccattcatgagcccctcctcagcacaactccaggctaagagcatgtgattcatatgtgtcggtaayggcagcgataaaagagactgatttttccatgatggtgtcggtaatcaagggtcctgtgtgaagttctttagtgtctcttaaacaagaactaaattcattt

SEQ ID NO: 379185 - DNA, 201 bp, Homo sapiens
aaagaggttggtctgaaattgatgagcctcccatttcagaagctcaggaagtttgtgtccaggaaatatgcatgccttcagccaaatcccttgcacctgayagagcagaagcaggcactgcctaccctggcctgggctgtctgctggctctcatgtcaggcattttctgggcctggctgtcgcagctagtgggatcactaa

SEQ ID NO: 379186 - DNA, 201 bp, Homo sapiens
tgtgttgtggctgaattgctctcacaccttccttctcatgatatttttaactgtattggactaagtccacagtgtagagttataaataggtcttgggggartgacatggtcatgctaataattaggtgcctcttcaaccctgtgtctgtaaatatgtgttccatgtttgttcattggagaggccgagtcctgtgtgggaga

SEQ ID NO: 379187 - DNA, 201 bp, Homo sapiens
acttgtaattgatctacttgtgggatgcatacattgtccaatcctcataacaactctgtatagtaagtgttcatatctgaattttatggataatatggaaytatggaacacagagaaattaggaaggtgacagcaactaaatggaaagaaatggaattctaacccaggtggtctcaactccatagcctggtctctatacta

SEQ ID NO: 379188 - DNA, 201 bp, Homo sapiens
ccttgacctatactatgtggtgaagccaggaggtgaagcacagatactgttttcagtaatgttctgttattataagcaaatatttccatatgaggtagaaygttacccaaaggtaccaccactactgctaaatgaaaaaaaaaatccttctgtcccttttatgtgattttttttttttggtaattatttactagtctttta

SEQ ID NO: 379189 - DNA, 201 bp, Homo sapiens
aataacaatgtaaatgcactttgcatgttgtaaagtgctatacaaccattcaaaaagtagagtggtgatatctattttggaggcttattactataattacrggtaatgaacaagatgctcagcttaggttatatgaagttagtggggtctttactttaatctcttaatcctgttatcttcataaactgagactgtacatca

SEQ ID NO: 379190 - DNA, 201 bp, Homo sapiens
tccagcctggtaaattctagtcagactgattctctgctctcgaaccctgtttcctgttaagatgcttatcaagacaatgtttgcacagcgggacatagacygtcatcagtaattctaattttgccttgccttgtgatctttattgccctttgaagcatgtgatctttgtgacttactccctgtttgtacaccccctcccct

SEQ ID NO: 379191 - DNA, 201 bp, Homo sapiens
ctcctttttgctgcctctgtagtcacttttagtgtcaaattcttgctttgctcacaccgttagactggctttctgtctctgtacattttcttcataacccrgagcactactctgagggccctgacacaagggccctgacacaacagccttgtgaagagttaaaaataaactggaaggtaaacagggcaaaagaaagatttc

SEQ ID NO: 379192 - DNA, 201 bp, Homo sapiens
tagcttgctattcaattgagccaaatctgtattttctgaaggcagaagatgaaagcaaatgatagatgcttagatttgaggaggttatttggtgctgttgrtatttttaaactttaaaaaggcattaaaagatctaatttaaattgcacatgtaaatgtggctgtgcttataattctctagtttagtgcttcccaaactat

SEQ ID NO: 379193 - DNA, 201 bp, Homo sapiens
gggaagtggactccttgttaagcccacataaatgtttacaggaactgtatacagactatataactcttccctcatccttcacttcattcatttttttttttctttttcaggccatcatctctcagcaaggtgacatatttgtttttgacctggagacctcagctgtcgctccctttgtttggttggatgtaggaagcatcc

SEQ ID NO: 379194 - DNA, 201 bp, Homo sapiens
gttatctgtaacaactaatagagaacagaagaaaatgacagtcttacatatatttttttccaaaaaagaaaaaaaaaaccactatgtactggatgaatttkcagtctctaaacttatgattttgaaaaccaaatttttttctttcctgagttaggccttcattaccttgaggtgggtaattggggtgggagaaaagcaggg

SEQ ID NO: 379195 - DNA, 201 bp, Homo sapiens
cactgttgactctccctcacatgctcactcccttagaaccccgatgagccacaaacagctgggccattggacagtgcctctctgactacttgaccttgccrtctcctgacactcttgattattttcagagtacggaggaaagtggaaaatgcttcattactttgctcagaatttctttgctccactgttgccagtaggctt

SEQ ID NO: 379196 - DNA, 201 bp, Homo sapiens
gaaagctaaaaaagttcagctcaaagaagtagagtggaataatgattactagagggtggaagggttgccagggagggacaatagagttggttaattgatasaaaagtatagctagatgggaagaataagttctggtgttctatagcactttgggataactatagttaataataatttattgtatattttcaaatagctaga

SEQ ID NO: 379197 - DNA, 201 bp, Homo sapiens
ttttcaagacggagtcttgttctgtagcccaggctggagtgcaatggcataatcttggctcgctgcaaactctgcctcccggattcaagtcattctcctgyctcagcctcccaagtagctgggattatgggcatgcaccaccacacccagctaatttttgtatttagtagagataggatttcaccatgttggccaggctgg

SEQ ID NO: 379198 - DNA, 201 bp, Homo sapiens
gtatgtaaaaatgttgctctcttgatgatactctgagaaaaactgtaaaagatgtaaagctttgagcttcttgtgaaatattctccttaatgattggagaygatgtatttccttgatttgtgattataatttggtaacgttccatagcctgtagtcattttccatgtattgttttgtgtttgaaactgcactttagcagtt

SEQ ID NO: 379199 - DNA, 201 bp, Homo sapiens
caagaaatgggagagcccaatttttgtaaatattcctttaagtgatcccatgcagattattcctgagttcctcaggaagagtaggtctgtgggaaacaagacactcaaactctaagtggttttttgttttgttttgtttttttgttgagatggtctcactctgcttttgcccaggctggagtgcagtggtgcaatcatggc

SEQ ID NO: 379200 - DNA, 201 bp, Homo sapiens
attataatttggtaacgttccatagcctgtagtcattttccatgtattgttttgtgtttgaaactgcactttagcagttgtagaaccaaagttgtgggaartggactccttgttaagcccacataaatgtttacaggaactgtatacagactatataactcttccctcatccttcacttcattcatttttttttttctttt

SEQ ID NO: 379201 - DNA, 201 bp, Homo sapiens
gctaatcagggataatgagctatagttttcttttctttccttttatttatttcttgttgcctctctgtgtggttttgatatgagcgtgatgctgacctctrgaatgagttagagagaattatctcctcttcaatttttggaatagtttgtgtggaattggtattagttcttcgttgtaactttggtaaaatttggcagtga

SEQ ID NO: 379202 - DNA, 201 bp, Homo sapiens; identical to SEQ ID NO: 82175

SEQ ID NO: 379203 - DNA, 201 bp, Homo sapiens; identical to SEQ ID NO: 82176

SEQ ID NO: 379204 - DNA, 201 bp, Homo sapiens; identical to SEQ ID NO: 82178

SEQ ID NO: 379205 - DNA, 201 bp, Homo sapiens; identical to SEQ ID NO: 82180

SEQ ID NO: 379206 - DNA, 201 bp, Homo sapiens
tactcaaataaagtgctttgttattatttcagagggaatggcgattgaaatgttacaacagagatttcttggtggtagctatttgggtaaaggtatatggrtatttttctgtacatgtgaaattatataaaaataaaagttatataaattacattgacaacttgatatttcatctgtggcttatttaaccgttctataaat

SEQ ID NO: 379207 - DNA, 201 bp, Homo sapiens
acaatccagtcttcttcagtatctaagagtatcctcattttatatgtacacacacacacacacacacacacacacacacacacacacacaaagccttatcraggggataaggggacttagggctgggactccgtagagtcttacttggtaaatattatgtcatgttcttatgactattgtaaatcctgttttagcaaagca

SEQ ID NO: 379208 - DNA, 201 bp, Homo sapiens
tattcctgaaatgtgcatttccacattatgtgcttcatagtaaataggaaaattagcattaaactactgaatgtagtttttcaaaaaggtctgcttttttwaaaaaaactattttgcttatgtttaaatttgatattcatcatttaattctgttcattgcaggtttattttaggacagtggaacttatagaagagcctata

SEQ ID NO: 379209 - DNA, 201 bp, Homo sapiens
ttggctatttatctttaatggtgattttttttttcttttttttttttttgagacagagtctcactctgtcgcccaggttggagtgaagtggcatcatcttsctcactgcattctctgcctcccaggttcaagcgattctcatggtctcaccgtgttgctcaagctggtctcgatctcctgagctcaggcaatccgcccacc

SEQ ID NO: 379210 - DNA, 201 bp, Homo sapiens
atttgaagaatttctcttttgtccgctgatatattacttttatcatgcactaaattcgcatatactgatataatattgttattccttctcttttaatcttyagaaaggttacatgattaaaattcttttaaaaatacgtatttatgtagtgttcattggataaaagaaatacagaaaatataaagaaggaagaaaaaccaa

SEQ ID NO: 379211 - DNA, 201 bp, Homo sapiens
tagtcacaatcattctttttattttataaacacaaactattataaatacaaaataagaaaaagatagttaaatgttagctgttatgaagagtgaaaacatkatataaatttcaaacggctgctttctgcatctgcatcagtataatttcatgattttctaccaagttcatttgtataaagaatctctatgatcaatttatc

SEQ ID NO: 379212 - DNA, 201 bp, Homo sapiens
actgcacaggtaagcgagaagctgcagtctaagcctggactctgcttttcctccttgggtctgctccacccacaatcattctttctaaggagccatgagtytgtctatggagtctccaatctgcaggttatcactcataagtacattctaacaatatatgtgcatcagtgtacattctacttttgtattctttaagtagca

SEQ ID NO: 379213 - DNA, 201 bp, Homo sapiens
ttcccttttaagttttagtctctttggtcagaaaattaggactctccttaaactgcaacttttttcacttagagctatgttagatgggaagcaatatttaytaatttaaggattttagaaaaagataatgttaaggctgaccaaaacatgttgccagactcgtgggctggggatctcttgtacctgtgtaccctttgaagt

SEQ ID NO: 379214 - DNA, 201 bp, Homo sapiens
taaaataaaatgtattcatttttaaaatttaagtgtgaaatgaggtgggtcaaaactaatgcaaggctgggcgtggtggctcatgcttgtaatctttagcrctttgggagaccaagttcaaaggatcacttgaggccagaagtttgaaccagcctgagcagacattgtctctacaaaaaataaaaaaaattagccatgtgt

SEQ ID NO: 379215 - DNA, 201 bp, Homo sapiens
gtaagtatcaattataaatcactagccgaggcacacacggcatgtttatttcatggctgctgctttataagcactgacattgtaactattggtggtgttgwgatgttaatggtagtactaggtaatgactaagtatatggaccctggagccatctttcctggttctgagtcagtcctccaccacttaatagccatttgagt

SEQ ID NO: 379216 - DNA, 201 bp, Homo sapiens
cctggctctgtctacacagcagcaaaaaaggtgactgattagcaggagatctgtagtgcacaaataatgggagagggtgggcttgtcagcattagataatkactccaaaatgtaatgtaaactcacaaggagggggtgactcaaggctggacacatgactaagtaagaaaatgtgactctgtgagctgacccaacttctaa

SEQ ID NO: 379217 - DNA, 201 bp, Homo sapiens
tagtatgaagttatgattttcagtatgtgtagacagagaaataaatgtctttgtaaatgcatgtgtatgtgtgggtagacacacacacacacacacacacatttcctagttcttttcacacatttcctaatcctttctcagagcgcctgggaagagtggctctctagtagcagtgagtagatttaggacccatatcttgat

SEQ ID NO: 379218 - DNA, 201 bp, Homo sapiens
atagtatgaagttatgattttcagtatgtgtagacagagaaataaatgtctttgtaaatgcatgtgtatgtgtgggtagacacacacacacacacacacacatttcctagttcttttcacacatttcctaatcctttctcagagcgcctgggaagagtggctctctagtagcagtgagtagatttaggacccatatcttga

SEQ ID NO: 379219 - DNA, 201 bp, Homo sapiens
tttttagtagagatggggtttcaccatgttgaccaggctggtcttgaattcctgatatcaagtgatctactgccttggcctcccagagtgctgggattacrggcgtgagccactgcgcccggccttatatttttaaatggatcatactttagatattattttgtcaataagtagtctcctgctatgatttaaaattgtacc

SEQ ID NO: 379220 - DNA, 201 bp, Homo sapiens
cctcagcctcccaagtagatgggattacaggcacccgccaccacgcccagctaacttttgtatttttagtagagatggggtttcaccatgttgaccaggcwggtcttgaattcctgatatcaagtgatctactgccttggcctcccagagtgctgggattacaggcgtgagccactgcgcccggccttatatttttaaatg

SEQ ID NO: 379221 - DNA, 201 bp, Homo sapiens
tcatctttagtaacagcattcaaaagcttctctctctgtgtgtgtatatatacatacatatatatacacacatatatatatatatatatatttttttttttgagacagagtcttgctctgtcactcaggctggagtgcaatggtgcaatcttggctcactgcaacctccacctcctgggttcaagcaattctcctgcctca

SEQ ID NO: 379222 - DNA, 201 bp, Homo sapiens
aaaactcttgtgtccccacccatcagagatcatctttagtaacagcattcaaaagcttctctctctgtgtgtgtatatatacatacatatatatacacacmtatatatatatatatatatttttttttttgagacagagtcttgctctgtcactcaggctggagtgcaatggtgcaatcttggctcactgcaacctccacc

SEQ ID NO: 379223 - DNA, 201 bp, Homo sapiens
ttgtggagaaataggaacacttttacactgttggtgggactgtaaactagttcaaccattgtggaagtcagtgtggcgattcctcagggatctagaactakaaataccatttgacccagccatcccattacagggtatatatccaaaggactataaatcatgctgctctaaagacacatgcacaggtatgtttattgtggc

SEQ ID NO: 379224 - DNA, 201 bp, Homo sapiens
ccatttgctcaggcactgagtgggagtgtagagccagggcaggcctgtcctcagacccctctagtggtgcatgtgggagctggctgtggtaggcaggcatrggatgatatccagaccactggtggaatgcttgggtgggggcagtagtgactgtgctgctgccctgctcctggggaggatggggttgctttcagtggcagt

SEQ ID NO: 379225 - DNA, 201 bp, Homo sapiens
caacctactcgtctgacaaagggctaatatccagaatctacaatgaactcaaacaaatttacaagaaaaagacaaacaaccccatcaaaaagtgggcaaargacatgaacagacacttctcaaaagaagtcatttatgcagccaaaaaacatgaaaaaatgctcatcatcactggccatcagagaaatgcaaatcaaaacc

SEQ ID NO: 379226 - DNA, 201 bp, Homo sapiens
aaaagaggaagtcaaattgtccctgtttgcagacgacatgattgtatatctagaaaaccccattgtctcagcccaaaatctccttaagctgataagcaacktcagcaaagtctcaggatacaaaatcaatgtatataaatcacaagcattcttatacaccaataacagacaaacagagggccaaatcatgagtgaactccc

SEQ ID NO: 379227 - DNA, 201 bp, Homo sapiens
tggcaaaccggatccagcagcacatcaaaaagcttatccaccatgatcaagtgggcttcatccctgggatgcaaggctggttcaatatacgcaaatcaatmaatgtaatacatcatataaacagaaccaaagacaaaaaccacatgattatctctatagatgcagaaaaggcctttgacaaaattcaacaacccttcatgc

SEQ ID NO: 379228 - DNA, 201 bp, Homo sapiens
ttggagaaatgactgattctcgagctggagcctgaaatatcttgctgttccaggaagtaaggaggtactcaataataatgtgacacattgaaaggacacamgggccttcagtcttcagtcttcaatctactataatcttcaaaaatgtcaaggaaagattgaggaactgtcctacagtggaagagactatgtacgaactgg

SEQ ID NO: 379229 - DNA, 201 bp, Homo sapiens
cacacatttcctagttcttttcacacatttcctaatcctttctcagagcgcctgggaagagtggctctctagtagcagtgagtagatttaggacccatatsttgatttggaataccactctgtgctgaaagcaatcagggctctttggagaaatgactgattctcgagctggagcctgaaatatcttgctgttccaggaag

SEQ ID NO: 379230 - DNA, 201 bp, Homo sapiens
ctggtcaccttgatcagcatggaaatcaaattgtagtgggttgaggaatgactcaaggtatggaagtaaagacggtgaatataggcaactcttctgaaagygtctgattggaaactatgcttagaccaggtggtaatggtggccagttgggatcagattggcttcacataggcaactgaacaaataagtaaatatattgaa

SEQ ID NO: 379231 - DNA, 201 bp, Homo sapiens
aggaatggttgacgaggtggagggaaaaccaatttgagtggggagtcacagaaaccagagggaaagagtgttttaagaagcaaagaatgttcagagtgttraatgctgcaagggagttcaagttagaaaagaattgagaaagattctttagatttggtggcaaggagattactggtcaccttgatcagcatggaaatcaaa

SEQ ID NO: 379232 - DNA, 201 bp, Homo sapiens
ggttggtctacagaactgctgaggaaataaatctgaaagagatttaggatataacctcagcaggcttgatgatgtgggggtgggaaaaaagaaggagttargaatggttcctcagctgctggtttgggctgctgaacaggcagcctctgaacaggcagggcaactctgttcattgagttacattactcagaaagaagagaa

SEQ ID NO: 379233 - DNA, 201 bp, Homo sapiens
tgttatttattagctataggctacttacttaatctcaaaatatgtaaaatagggacaataagaacgagatggcttggatctggcttataagagtcatggcwtatagttagtagaaatggtattaaccctcttcaaagatctcctcctctcccagacaccagcttcggtgtttacagttggctggtgtcacctcttacattt

SEQ ID NO: 379234 - DNA, 201 bp, Homo sapiens
tgaaataaattgtgtatgaaaatattctctacttcaagattgctctaaaggtttagtaattaagacagtgccatttcccaaggataaaatagaacaatggracacaatagagtccagaaacagatcactgtataatatggacacctgatttatggctgtgatgccaccacaattgagtatgagaacaatcattttatcaat

SEQ ID NO: 379235 - DNA, 201 bp, Homo sapiens
ttttatcattaaaagcatcctcgtggataaagacatgggtctttgaggtcaaacatatctgggccttggagagggcagtgtgggcacctgggtgtcctgtdgggagatgcgtcacctacttccttgtgctgggatgctgcagtggcagtggtgcctctagtgaggaaggctgttggggacataatttgctgaagtgggctg

SEQ ID NO: 379236 - DNA, 201 bp, Homo sapiens
gaggcatccttctggtctcagctagataccactttctaatgaaagcattccttggccaggcatggtggctcatgcctataatcccagtgctttgggaggtrgaggctggaggattgcttgaggccaggagttcaagactaacctggacaacaaagtgagacctcatctttacaaaaagtaaaaagaaaattagctaggtga

SEQ ID NO: 379237 - DNA, 201 bp, Homo sapiens
agttcatttttggcatttgcctctcttacaaaaacagctcacaaaattctgaaataaattgtgtatgaaaatattctctacttcaagattgctctaaaggkttagtaattaagacagtgccatttcccaaggataaaatagaacaatgggacacaatagagtccagaaacagatcactgtataatatggacacctgattta

SEQ ID NO: 379238 - DNA, 201 bp, Homo sapiens
cttttccaagtggcattttctggggctttttgtacacagagagattttatatctttctgcttctttcatattcatccttgtatatcactgtgctgggaccyttagcaattcttataaaatgcagatctggtcacgctctttgatgaaaaatcttcaatgactccgcattgatctggggtgaaattgccagactccttacct

SEQ ID NO: 379239 - DNA, 201 bp, Homo sapiens
cgagtgagagaaagcaacactgtggggagagggactgagaaagcacagtgctggaggggtcagattagcccaggcagaactatgaccaaaagagtcattcwttaaaaagcctgcctaggaactacagccacccaactcaccttagtagcctttccatgagccttagggtcaacctaattatgggttctgtgctgtgcaaag

SEQ ID NO: 379240 - DNA, 201 bp, Homo sapiens
ttactacccttccaagaagaaataaaacaaataatatgttttagtattgccttttgttaaatcttgcttcattttggtttttgttctctactaaatcccawgaaaaattacacagccaggtaattgacatcctaggtgattgtacccagtgtcatggctttaccatcatctattggctgatgactcccagatttatcccca

SEQ ID NO: 379241 - DNA, 201 bp, Homo sapiens
tactacccttccaagaagaaataaaacaaataatatgttttagtattgccttttgttaaatcttgcttcattttggtttttgttctctactaaatcccatkaaaaattacacagccaggtaattgacatcctaggtgattgtacccagtgtcatggctttaccatcatctattggctgatgactcccagatttatccccag

SEQ ID NO: 379242 - DNA, 201 bp, Homo sapiens
agcaagacctgtttcaaaaaaaaaaaaaaaaaatgcagagaggacttccttactcaggtgaacaggaatctcaagttttcaggaaaaactgccctgtttgyggatctacctccttcgttaaagtttcagtttgattaagtggtacttagcatgagtgactgttttggtttgatctggtctgctgaggcctagtataggagc

SEQ ID NO: 379243 - DNA, 201 bp, Homo sapiens
atctttcgtaatggttctatttcaccttgaactcaacatatccaattgattttcccccttaaaactaactttatattctaacagcttcattgtttttcttratgtaacaccattttccagtctatgtctaaggtgctttgggcttattacatcttttcttcatcttcctgtgttcagtctgttctgggtgggtcttgcaaa

SEQ ID NO: 379244 - DNA, 201 bp, Homo sapiens; identical to SEQ ID NO: 82179

SEQ ID NO: 379245 - DNA, 201 bp, Homo sapiens
ggctgaggtggcaggatcgcttgagctcaggaggtagagctgctgtgagttgtgattgtaccactgcactccagcctgggtgatggagcgagatgctgttwaaaaaaaaaaaaaagtggtccgatttagcaaaaagttatttatttattttgaagcttaatcagtattttgggtggtctgcaaaatgcattataagctctg

SEQ ID NO: 379246 - DNA, 201 bp, Homo sapiens
gcctccaggtgactggcctgcttgggtgctggcagtggcagtggtagaccactggtctggatggctgggtcttcaggcccctggacagcaggtatggcatrggaaatggcagtagcagtggcaggacaatcctctggtttccaagaagtctgcattggtgttgacagtggctgcaacaggctgggcacactagtccccagg

SEQ ID NO: 379247 - DNA, 201 bp, Homo sapiens
tcctagcctctcgtctctattatttcactctctacctccatgagatcaacatttttacctctgacatgtgagtggcaagatgcaaaatttgtctttctctrtctaatttcacttaacataatgacctccagttccatccatgttgctgtggaagacatgattttattcttttttagccattcatctgttgatggacactta

SEQ ID NO: 379248 - DNA, 201 bp, Homo sapiens
tttgtcaatcttttttattcttttaaaaaagttttgtttgactggtttacttccaaaaatctgtcctcaagttctgaaattctttcttctgctttctctarttattgttgaataactagattcttcagttccagaatttatgtttggttcttttttattatatctgtctgttttgtaaatttcttattgatactttgaatt

SEQ ID NO: 379249 - DNA, 201 bp, Homo sapiens
gattcagtgacagcagaagttgcctaccaggtatgttactacccttccaagaagaaataaaacaaataatatgttttagtattgccttttgttaaatcttscttcattttggtttttgttctctactaaatcccatgaaaaattacacagccaggtaattgacatcctaggtgattgtacccagtgtcatggctttaccat

SEQ ID NO: 379250 - DNA, 201 bp, Homo sapiens
catctctatttcatctatgtgagtttctgagcttcttgaatggagaacacattgagagcatcagtggggggcaatcagtgtaatcatgcatcacagcgaargtgaacctataaatatcaatgaggtaacattgccaaaacatgttccaaaagaatttttcttgaccattgactcactctgccattctcagaggaatttaat

SEQ ID NO: 379251 - DNA, 201 bp, Homo sapiens
tctctaattattgttgaataactagattcttcagttccagaatttatgtttggttcttttttattatatctgtctgttttgtaaatttcttattgatactytgaattgtttttctgatttctttttttttctgagttatcttgcatctcaatgaatgtctttaatttccttattttgaattctttatatgggatttcatac

SEQ ID NO: 379252 - DNA, 201 bp, Homo sapiens
caataaaatactggcaaaccggatccagcagcacatcaaaaagcttatccaccatgatcaagtgggcttcatccctgggatgcaaggctggttcaatataygcaaatcaataaatgtaatacatcatataaacagaaccaaagacaaaaaccacatgattatctctatagatgcagaaaaggcctttgacaaaattcaaca

SEQ ID NO: 379253 - DNA, 201 bp, Homo sapiens
gactgccaatgttctgaatgatgcaattgccccagtctcagagctaggaatgatattccatttggggctataggaataaatggcatcttgtaaaccaagarccataggtgatcaactaccataattatttatttttaaatgatagatatcctgtaaattatttatatcccagtatacatatacctacttttaaaataattt

SEQ ID NO: 379254 - DNA, 201 bp, Homo sapiens
agggaatcctccctaactcattttatgaggccagcatcatcctgataccaaagctgggcagagacacaaccaaaaaagagaattttagacccatatccttsatgaacattgatgcaaaaatcctcaataaaatactggcaaaccggatccagcagcacatcaaaaagcttatccaccatgatcaagtgggcttcatccctg

SEQ ID NO: 379255 - DNA, 201 bp, Homo sapiens
tccagacacagccacgggataattggctctatctttttccttttcaaatgctcctctcccctcccagctggggctgggttggctgtggtccttcagcccarctgggccaattggtaagcctgccgtggtgcctgtgctgagcccacagtgctctgggtctgcccagcctgttacttggtttgagcactgttctgggaatgg

SEQ ID NO: 379256 - DNA, 201 bp, Homo sapiens
gccattacataatggtaaagggataaattccacaagaagagctaactatcctaaatatatatgcacccaatacaggagcacccagattcataaagcaagtyctgagtgacctacaaagagacttagactcccacacattaataatgggagactttaacaccccactgtcaacattagacagatcaacgagacagaaagtta

SEQ ID NO: 379257 - DNA, 201 bp, Homo sapiens
catatttacaaatgtataaatgtgcattgtagtatattatttgatgtttagaatgtaaatgtcatcagtaactaaaccctgattttttccaaaagttgtartaatttccttttactttaaaatgtgtatattattttagatttcataagaaaatgaaattcttctccagacacagccacgggataattggctctatctttt

SEQ ID NO: 379258 - DNA, 201 bp, Homo sapiens
gatcgcttgagctcaggaggtagagctgctgtgagttgtgattgtaccactgcactccagcctgggtgatggagcgagatgctgtttaaaaaaaaaaaaaagtggtccgatttagcaaaaagttatttatttattttgaagcttaatcagtattttgggtggtctgcaaaatgcattataagctctgggtaccctgatgcc

SEQ ID NO: 379259 - DNA, 201 bp, Homo sapiens
gaaaggaacaaccggtaccagctgctacaaaatcatgccaaaatgtaaagaccatggagactaggaagaaactgcatcaactaacgagcaaaataaccagytaacatcataatgacaggatcagattcacacataacaatattaactttaaatgtaaatggactaaatgctccaattaaaagacacagactggcaaattgg

SEQ ID NO: 379260 - DNA, 201 bp, Homo sapiens
gatagttttggaatgaaactgttctacctcagatcatcaggaattagattctcataaggagcatgcaacctgtatccttcgcatgcacagttcacaatagkgttcctgctcctatgagaatctaatgctgccgctgatctgataggaggtcaggtagtaatgcttgctcaccagctgcttacctcctgctgtgccacctga

SEQ ID NO: 379261 - DNA, 201 bp, Homo sapiens
ggaaaggaacaaccggtaccagctgctacaaaatcatgccaaaatgtaaagaccatggagactaggaagaaactgcatcaactaacgagcaaaataaccarctaacatcataatgacaggatcagattcacacataacaatattaactttaaatgtaaatggactaaatgctccaattaaaagacacagactggcaaattg

SEQ ID NO: 379262 - DNA, 201 bp, Homo sapiens
gagtgggggccaatattcaacattcttaaagaaaagaattttcaacccagaatttcatatccagccaaactaagcttcataagtgtaggagaaataaaatmctttacagacaagcaaatgctgagagattttgtcaccaccaggcctgccctaaaagagctcctgaaggaagcactcaacatggaaaggaacaaccggtac

SEQ ID NO: 379263 - DNA, 201 bp, Homo sapiens
gaggtttactcatttttactttctttagtctctgggcaaggaactaagaggtagtatagaattctagacgatggaaacttcagaatggacaggattttaaraattatatattccattctcctgggttacaggtggtcttacagctaaactatttgagactgttgaagccattcgatttttagaaaactattatatgtttat

SEQ ID NO: 379264 - DNA, 201 bp, Homo sapiens
taagctttaaaaaattagcttctttgtgccatttcttttttacctctgaaatggagatatgcctttctttttagggacttatttatcttaaaacgagccakgggcaataactgatgtttgtaaattttttcaaagatgaatagtattaaaagctacataaccactactgcttttagtttccatcaaagtattaggcatcat

SEQ ID NO: 379265 - DNA, 201 bp, Homo sapiens
ctactcttttcttttctttctcttttttttttttttttttttgagactgggtcacactctgtcgcccaggctggagtacagtggtgcgatcacaactcacygcagcctccaccttctgggctcaagcgatgctcccacctaggtctcttgagtagctaggactacaggcgaacaccaccatgcccagataatttttgtatt

SEQ ID NO: 379266 - DNA, 201 bp, Homo sapiens
tgatctctctcagtttaatgtagaggaagggatccaaaagtttagggagattggatgctggagtggattggtcactttggacctacccatcccagctgggrgggtccagaagatacacccttgaccaacgctttgcgaaatggatttgtgatggcggcaactgcatctctgaagagtcctgtaattgctcttctctgtatg

SEQ ID NO: 379267 - DNA, 201 bp, Homo sapiens
attatattatcttcagtttttatatagcagagaagagaaaccctatgtatcagtgtttataaaatctagttaaaaagaatctcagagatttcttaaaatgkattcctgcagctaacatgactagccattttcaaattaggtttttggcacataagaatttatgtgcagaaatgcaagggctttaattttatgagtaattat

SEQ ID NO: 379268 - DNA, 201 bp, Homo sapiens
agagcacctctcctcctccaaaggaacgcagctcctcaccagtaatggaacaaagctggacggagaatgactttgacaagttgagagaagaaggcttcagrcgatcaaactacgagctacaggaggaaattcaaaccaaaggcaaagaagttaaaaactttgaaaagaatttagacgaatgtataactagaataaccaata

SEQ ID NO: 379269 - DNA, 201 bp, Homo sapiens
ttagcagtcccgcaaagcttgaggtttactcatttttactttctttagtctctgggcaaggaactaagaggtagtatagaattctagacgatggaaacttyagaatggacaggattttaaaaattatatattccattctcctgggttacaggtggtcttacagctaaactatttgagactgttgaagccattcgattttta

SEQ ID NO: 379270 - DNA, 201 bp, Homo sapiens
acattcttaagctttaaaaaattagcttctttgtgccatttcttttttacctctgaaatggagatatgcctttctttttagggacttatttatcttaaaabgagccatgggcaataactgatgtttgtaaattttttcaaagatgaatagtattaaaagctacataaccactactgcttttagtttccatcaaagtattag

SEQ ID NO: 379271 - DNA, 201 bp, Homo sapiens
tttgggatcaaattttttggtttttttttttcgagatagagttttgctctgttacccaggctggagtgcagtggcgcgatcttggctcactgcaacctccrcctcccaggttcaagtgattctcctgccttagcctcccgagtagctggtactacaggtgttcgacaccacgcctggcttattttttgtatttttggtaga

SEQ ID NO: 379272 - DNA, 201 bp, Homo sapiens
gctcaaacattgagtttaatgtgtaattaggattaaattacccattaaacaaagtgattttatggtaatgtgttattaagattgcaaagttgttaagttayaacatttgattctaagatgcatgtttggctaccttttaacaacactgaaatgagaatgtgtttttcaaagacagcatttttttctatttttttgaaatag

SEQ ID NO: 379273 - DNA, 201 bp, Homo sapiens
aattttaacactacattcttaagctttaaaaaattagcttctttgtgccatttcttttttacctctgaaatggagatatgcctttctttttagggacttabttatcttaaaacgagccatgggcaataactgatgtttgtaaattttttcaaagatgaatagtattaaaagctacataaccactactgcttttagtttcca

SEQ ID NO: 379274 - DNA, 201 bp, Homo sapiens
ggcgtgaacccggaaggtagagcttgcagtgagccgagatcgcgccactgcactccagcctgggcgacagggcgagactccgtctcaaaaaaaaaaaaaaagaatgtatgtttaaagtggataagtttgaatactggtatagtatgttttatgcccctttttagggctgtcttcaacagtatcgtttgaatacagggtatc

SEQ ID NO: 379275 - DNA, 201 bp, Homo sapiens
tatgtttgttatctttgcttttgaggtcttagctataaaaatctttgtctagatcgatgtcttgaaatgcttctcgtatgttttcttctagtagttttatygtttcaggtcttatgtttaagtctttaatccatcttgagtttatttttatttatggtgagagataagagtccagtttcatttttctgcttatggatatcc

SEQ ID NO: 379276 - DNA, 201 bp, Homo sapiens
ttcctcttctctgcatcctctccagcatctattattttttgtcttttcagtaatagtcattctaactggagtaagatagtatttgtggttttgatttacakttccctgatgattagtgatgttgaccatttgtgcatatacctgttggccatttgtatgtcttctttagagaaatgtctattcatgtcctttgcccacttt

SEQ ID NO: 379277 - DNA, 201 bp, Homo sapiens
agttttctaacgtgttctcttagacagggtcagtaaatgtagtttgtgagaacattttatgtctattatttaacttggttctcatttttttttttttttttgagacggaatcttgcaagtgcagtggtgggatatccactcactgcaacctccgcctcctgggttcaagtgtttctcctgcctcagcctccctagtagctt

SEQ ID NO: 379278 - DNA, 201 bp, Homo sapiens
atttttggctaacgcaatggttagctctttgaaaagcagctgcttaagtctgtcccatgattctggcaggagtaccggaaaatatctaatgtttgaatttrtaaattccatggcttgttcatttcatttggtgtcattgctgtttctttaaatgcacataactacctttccctgcagcttttcatactctattaaagatgg

SEQ ID NO: 379279 - DNA, 201 bp, Homo sapiens
ttatcacaaatgcctatttcatgtggaagactacagtagctctttagtggtttctatatttctcttttaaaagagaaataacggatgctagcaataatttrtatgtgtatattcctgaaatgtgcatttccacattatgtgcttcatagtaaataggaaaattagcattaaactactgaatgtagtttttcaaaaaggtct

SEQ ID NO: 379280 - DNA, 201 bp, Homo sapiens
attggcagttgaatgacatctggcaagctccttcctgggcttctcttggtaagcatttcagcgttctttgtgcgagtgagagaaagcaacactgtggggasagggactgagaaagcacagtgctggaggggtcagattagcccaggcagaactatgaccaaaagagtcattctttaaaaagcctgcctaggaactacagcc

SEQ ID NO: 379281 - DNA, 201 bp, Homo sapiens
gtcacctacttccttgtgctgggatgctgcagtggcagtggtgcctctagtgaggaaggctgttggggacataatttgctgaagtgggctgggagcggtgrctcacgcctgtaatccctgcactttgggaggccgaggcgggtggatcatcaggtcaggagatcgagaccatcctggctaacagggtgaaacctcgtctct

SEQ ID NO: 379282 - DNA, 201 bp, Homo sapiens
aagagttagaaagcagggaggtagttgagagggcaaggtctctgggaggtaggagataagaagaggatggattcactttgggatggggggctctgttttcrttgtaatagtggtgaaagataacacatgggaggaaaggatgcagcttgaggatggaggtaattttgaaggtctctaggaccatttaaagtatattttctt

SEQ ID NO: 379283 - DNA, 201 bp, Homo sapiens
tgttattggggcaactgatgaaaacttgaatgggggggtctctggattctttgtattatatataggagttctttgtattattgttgtaactttattacaartttgcaatgatttcaacatagaaaaggataccattaagagaatggaaagcaacagcaaaatcctgatggaaaggggccagtagcgagggaaagactaaaa

SEQ ID NO: 379284 - DNA, 201 bp, Homo sapiens
cttttttgtcataatgttattggggcaactgatgaaaacttgaatgggggggtctctggattctttgtattatatataggagttctttgtattattgttgkaactttattacaaatttgcaatgatttcaacatagaaaaggataccattaagagaatggaaagcaacagcaaaatcctgatggaaaggggccagtagcga

SEQ ID NO: 379285 - DNA, 201 bp, Homo sapiens
aggtggggagacttacattgttttagaacctagagttttgtacttgactatttgagaaattgatgtaatgctttgagccttttttgctgaaaatatgacayattagagtgacttttaaattttcttaaaagaatattactgtagaaacttggtggcctcatggacatggaaaccagactgggtacaacatgactgttcttt

SEQ ID NO: 379286 - DNA, 201 bp, Homo sapiens
tgctgcagtaaacatggggtgcaagtatctttttgttatactgatttctttttctgtggatagttacctattagtgggattcttggattgtatggtaatgrctctactattagtttcttgagaaatatagtatttccattgtggctgtactcactcatattcccacaaccgtgtataaatgtttcctcttctctgcatcct

SEQ ID NO: 379287 - DNA, 201 bp, Homo sapiens
tcctaaagccaaaatacattctatggattatatttaaatagcagtggttatttttgatacttgtcaattattttgattattgatacttattctacatgcayaattttaattctaaactcatgatctttcatatatcaaggtagaacggattatttttatcttttctttttcttttttctattcctctaattgataattgtg

SEQ ID NO: 379288 - DNA, 201 bp, Homo sapiens
gagatggggagtagttagccttaggtgcagacagtaagtgggtgttgcaacacagcctgccatgttgcccaggctggtctcacacccctgtcctcaagcarccctcccgcttcagcctcccaaagtgttgaggttataggcatgagccactgcctggctggaattctttttgacagcactctggatactttaaacagagat

SEQ ID NO: 379289 - DNA, 201 bp, Homo sapiens
ccattcatcagcctttcttcattcctctctgccactcatatacccctcctagcctctcgtctctattatttcactctctacctccatgagatcaacatttytacctctgacatgtgagtggcaagatgcaaaatttgtctttctctgtctaatttcacttaacataatgacctccagttccatccatgttgctgtggaaga

SEQ ID NO: 379290 - DNA, 201 bp, Homo sapiens
attttcttctctattttagtctctcatatattttctgtgagtatgagctaaagaatgattttcccaaactttaagattaagaaaatagagaatatattatwaatttggcaattctttctctcattttatttttatcattgtattttaattttctgtagtatttgtagtatcctaaagccaaaatacattctatggattata

SEQ ID NO: 379291 - DNA, 201 bp, Homo sapiens
tttctcacagtcttggaggctggagtccaaaatcaaggtgtcggcagagctgtgttccttccgaaggctctgggaaagaattcttccttgccccttccagyttctcatcattgctggcaatccttggcttgtagatgcatcactctgatctctgtctccaccatcatatagctttctccttgtgtgtgtctcttgtttcct

SEQ ID NO: 379292 - DNA, 201 bp, Homo sapiens
gacttatctaagttaatgctttacacatcttgttttaaaaatcttttcttttttttagcaaatggcaaaaagtaaatttgattcttgagggagtggatacrgtttcaaaaatcctgttcaatgaagtcactattggggaaacagacaatatgttcaatagatatgtaagtatataatgacattaggttaaaaaaaatttat

SEQ ID NO: 379293 - DNA, 201 bp, Homo sapiens
ctaagagttagagaccgacctagacaacatggcaaaatcctatctctgacaaaaaatacaaaaaatacaaaaattagccaggcctggtggcgttcacctgyagtcccagctactcgagaggctgaggtggcaggatcgcttgagctcaggaggtagagctgctgtgagttgtgattgtaccactgcactccagcctgggtg

SEQ ID NO: 379294 - DNA, 201 bp, Homo sapiens
caggcacctactgggggtcttggagcgtatcccctgcagataaggggggactgctgtttattgttctgtgtaactgtaagtttgtctatttaagttgtatwaaattttattatactacacattttgctgttgcaatttgagtagttgccagttttggctattccaagtaatgctgctgtgaacattactgatataacactc

SEQ ID NO: 379295 - DNA, 201 bp, Homo sapiens
agtggtctgagctgagcgcagtggctcatgcctgtaattccagcactttgggaggccaaagtgggtggattccctgagcctaagagttagagaccgacctrgacaacatggcaaaatcctatctctgacaaaaaatacaaaaaatacaaaaattagccaggcctggtggcgttcacctgcagtcccagctactcgagaggc

SEQ ID NO: 379296 - DNA, 201 bp, Homo sapiens
ttggatatattcccagaaatagtatggttggatcatatggtaattctatttttaattttttgatggattgaatttatttatttatttatttatttatttawgtatttgagatggagtcttgctctgttgctcaagctagagtgcagtagcgagatctcggctcactgcaacctccgcctcccgtgttaaaacaattctctt

SEQ ID NO: 379297 - DNA, 201 bp, Homo sapiens
acacagagagattttatatctttctgcttctttcatattcatccttgtatatcactgtgctgggacccttagcaattcttataaaatgcagatctggtcaygctctttgatgaaaaatcttcaatgactccgcattgatctggggtgaaattgccagactccttacctgttcgaaaagacccagtgtcatttggaccgtgc

SEQ ID NO: 379298 - DNA, 201 bp, Homo sapiens
aacagatgtgagttattgattagagctgacgggaagcgggtaggctgtttatggtaactaggcgcaaggaagaacaagatagttgagtttgaggacaaagkataaggaaattaacaagctaaaccctataagagaaactcagaaagacttattgtgtcttacctgacagttgaagaagcatctatctgtagggaatccaga

SEQ ID NO: 379299 - DNA, 201 bp, Homo sapiens
ttcatgcttgtcgaaaatattacaaagttcagccgggagcttccttcaccctgtgactcccctccagttctgctgggtgccttcccttccccaaagacctytgtgagataggccaggaatggcttccctggactcaagctggggactcgctctttccggtgcttcttttctcggtactattatattttgcttggctcctga

SEQ ID NO: 379300 - DNA, 201 bp, Homo sapiens
aggagaatggtgtgaacccgggaggcggagcttgcagtgagcagagatcgtgccactgcactccagtctgggtgacagagcgagactccatttcaaaaaamaaacaaacaaacaaaaaaaacaccacaggccttacccatcttccatgaagccagcaaggccagtctcactcctactgtgcccccccaacagcactgactt

SEQ ID NO: 379301 - DNA, 201 bp, Homo sapiens
ttggcagaggaggattttaataatcaagtgaataggatgactcgttctgtggacaacactcagcctctttccccagccatccctgtcattgcccaatgggyccatgaacaaagtggccatggtggcagggatgggggttacacatggactcagcaacatggatttccactcagcaaggctgacctggccacggccactgct

SEQ ID NO: 379302 - DNA, 201 bp, Homo sapiens
gtgatggtgattttgcccccatggaacatttggcagtgcctgcagacatttttcaaggttgggggaggggtactgacatctgtttggtagaggccagggawgctactaaatatcctacaatgcataagacacccccaaccccagccaaccccaacaaaaacgtatccagctcaaaatgtcaatagtgtcaaagttaagaaa

SEQ ID NO: 379303 - DNA, 201 bp, Homo sapiens
aaacgagaacatgaattggtggacacctagccattactttcacatgagagttatttactatttataatacctctaaaggaggtactattattatcctcatyttacagataaatctaccaaggcttagacctgtccacaaataataaggttcagatttgagatttaaagtcacgtttgggtccatctgactcagtagcttct

SEQ ID NO: 379304 - DNA, 201 bp, Homo sapiens
cacctggcacagtgctgggcacatggtagattgttcagtcggtagcttttggatgaatagaaaacaaatggccttttagttaaattaatcagccatagtcytttgggatcttcctaaaagcacgtattcttcctaacttctacccaatatattttttaagttatatttattttagctttctggttatttgaaatccaggta

SEQ ID NO: 379305 - DNA, 201 bp, Homo sapiens
aagttttcattctgttccagtgttctgatcaataggtaatggcagctaaagaaactgtttgttttcttaagtaaatcacactatccgttcagcatcctcaaatcaaatgcacaggtatgttttaagttactatttaaagaaatgaatggtgaaggccgtttccggaatatttttttcttttcttttcttttcttttttttt

SEQ ID NO: 379306 - DNA, 201 bp, Homo sapiens
atccaatgtcccatgtgtcatcacggtaagttaatatttgttgtatactatgtagagtttataacttacccaagcattttaattagcaagcatttctgttsccatcctcatcccattcagttcagtaaaacattgcactgggtctagaatgctctactgtctagttcctaatacttgccatctgctttccttgaagctttt

SEQ ID NO: 379307 - DNA, 201 bp, Homo sapiens
agttttcattctgttccagtgttctgatcaataggtaatggcagctaaagaaactgtttgttttcttaagtaaatcacactatccgttcagcatcctcaaatcaaatgcacaggtatgttttaagttactatttaaagaaatgaatggtgaaggccgtttccggaatatttttttcttttcttttcttttctttttttttg

SEQ ID NO: 379308 - DNA, 201 bp, Homo sapiens
tggcgtgatctcagctcactgcaacctccacctcctgggttcaagtgatttctcctgcctcagcctcccaagtagctggaactacaggcatgcaccaacayacccggctaatttttgtatttttagtagagacggggtttcaccatgttagctaggctggtctcaaactcctgacctcaggtgatccacccacctcagcct

SEQ ID NO: 379309 - DNA, 201 bp, Homo sapiens
acaggtgtgagccaccgtgcccggcgcatttctggagtatttttcaacctttctaccataaacaatcctcccttattgtcttcacctttctttcccccactttttttttttttttttttttttttgagatggagtttcactcttattgcccaggctggagtgcagtggcacaatctcggctcaccgcaacctctgcctccc

SEQ ID NO: 379310 - DNA, 201 bp, Homo sapiens
caggtgtgagccaccgtgcccggcgcatttctggagtatttttcaacctttctaccataaacaatcctcccttattgtcttcacctttctttcccccactttttttttttttttttttttttttgagatggagtttcactcttattgcccaggctggagtgcagtggcacaatctcggctcaccgcaacctctgcctccca

SEQ ID NO: 379311 - DNA, 201 bp, Homo sapiens
aacctctgcctcccaggttcaagcgagtctcctgcctcagcctcccaagtagctgggattacaggcatgcgccaccacgcctggctaattttgtatttttrgtacagacagggtttctccatgttggtcagcctggtctcgaactcccgacctcaggtgatctgcccacttcggcctcccaaagtgctgggattacaggcg

SEQ ID NO: 379312 - DNA, 201 bp, Homo sapiens
tatgatttggctgtttccccacccaaatctcatcatgaattcccctgttgtgggagagacctggtgggaggtaattgaatcatgggggcagatctttctcrtactgttctcgtgatagtgaatgagtctcatgagatgtgatggttataaaaaggggagtttccctgcacaagcactctctttgcctgctgctattcacag

SEQ ID NO: 379313 - DNA, 201 bp, Homo sapiens
gtagcatcttctggtagtttcctaagaacatttgcattggaggtactctttttgcttccttgcaggtatgaaaccatcttttttcctacctttacctttgrctgataatttgcctggcaagactgaatattctttctctcagaatttgaaggcatttcttttactgtcttctaccttcttgctccaaaaccattcttaatt

SEQ ID NO: 379314 - DNA, 201 bp, Homo sapiens
tgcaacctcagcctcccgggttcaagcaattctcctgcctcagcctcctgagtagctgggattacagatgcccaccaccatgcctggctaattttttgtawttttttagtagagacggggtttcgtcatgttgggcaggctggtctcgaactcctgacctcaagtgatccgcccacgttggcctcccaaagtgctgggatt

SEQ ID NO: 379315 - DNA, 201 bp, Homo sapiens
ttggtgttcaaaaagtttcagattttggaggccagatgtggtggctcatgactgtaatcccagcactttggggagccaagatgggcgatcacctaaggtcrggagtttgagaccagcttggtcaacatggtgaaaccctctgtctactaaaagtacaaaaattagctgggcatggtggcatgcacctgtagtcccagctac

SEQ ID NO: 379316 - DNA, 201 bp, Homo sapiens
cccgggttcaagcaattctcctgcctcagcctcctgagtagctgggattacagatgcccaccaccatgcctggctaattttttgtatttttttagtagagrcggggtttcgtcatgttgggcaggctggtctcgaactcctgacctcaagtgatccgcccacgttggcctcccaaagtgctgggattacaggcatgagcca

SEQ ID NO: 379317 - DNA, 201 bp, Homo sapiens
ttgaataaggggttaatatccagaatatataacaaactcctacaactcagcaacaacaaaaaaaaacagttaaaaagtgggcaaagaacttgaatagacakctctccagagaagatacacaaatagccaacaagcacaagaaaagatgctcaacaccactaatcattagggaaatgcaaaccaagaccacagtgaaatccc

SEQ ID NO: 379318 - DNA, 201 bp, Homo sapiens
tcctgacatttatctagaaatcaaggtttgaatcatttctgaatcattgttcagcttgtctgccttccttggaattgttcttaagggaacctttgagatcyaggaatgacagaaatgttcctcttgggcactgtgagtgttggtgctcttcaacttgacgttgattactactggagtgaatgctttttgggccatagacag

SEQ ID NO: 379319 - DNA, 201 bp, Homo sapiens
tttagaaataaagagtcagcactatctatcataaatccatgcactgtagagaaaccccgtgcctttctttttttccctttacatcccttgaacacaattcyctgttctctttaagaaccaagagatcactgcaggatatttgccatccttccttgggctatattaggccatcagtgagggacaggctctatcatgatactt

SEQ ID NO: 379320 - DNA, 201 bp, Homo sapiens
ctacttagcattctcagggatcataccttaatgttttcagtatgtctgcgttctcctactagattgtatgtccctcaagagcatgttctgtttctcttctrtctgacagagcactattatacctgactttcagtaactgttagctgtgattagttagctggtggatttaattgattaaaaaattacgattgaatgtatttc

SEQ ID NO: 379321 - DNA, 201 bp, Homo sapiens
tcacttctcaacagaccatgcctctgtcagccaactttcgtgtttatgtaaggtgcccatttcccagctctcacatctgataccttctttacaatgcatcytactgtgaggaccactgttcttgacaggctatctactgttctgcctccacaggtctctcctcttacctggatttcaccaatcccaaggtcagagagtggt

SEQ ID NO: 379322 - DNA, 201 bp, Homo sapiens
tttgacctctattataatagactctatgatatatcaaagtactttatagcagaggtttattatattttcaaattgctatatatattttatataaaattgtrttccataactgttatttaaatatgatgatacatgtgaaaatatcttacaacgtatttgtcattaaaagtgaagtatgatttttaaataatctgataagaa

SEQ ID NO: 379323 - DNA, 201 bp, Homo sapiens
ggttattgttgatctcttatgttggtccattgcttagcctgcagtactctgtgtgaagctatcagctttgcttcactgtgtagcaagacattacaggaaayactactttgttaagtcatatgcgatgatcaatagccatagagaacttctgactaaacaatagtatgagacatgaaaatatctgcatgtttatgtgagctt

SEQ ID NO: 379324 - DNA, 201 bp, Homo sapiens
tgtttttctgctgacaggacctacaccttctgatgtcttcaaacagtactcacaccttacaggtatttgcacgaagaagtgccagtttcttgttctgttayatatccaatgtcccatgtgtcatcacggtaagttaatatttgttgtatactatgtagagtttataacttacccaagcattttaattagcaagcatttctg

SEQ ID NO: 379325 - DNA, 201 bp, Homo sapiens
tcaaagaacataaagtgaaaaagcaacctacagaatgggagaaaatgtttgcagattgtatatctgatatgggtctcttatccagaatacatgaagaactktctacaactgagcaacaaaaagacaggctgagcactgggcccatatccctcatgctcgtctgccactgagggcacatgcagcctctagaccacaaccaaa

SEQ ID NO: 379326 - DNA, 201 bp, Homo sapiens
cagcagctacggttgccggtcccgcactgaaaaacgacagtggtgacgggtgagctcccagaagcagaagaatgacaggcaacacctgaagccacgcagcmgccgccatcttcacagccgtggagtgcctaccgaaagcatttcaccctcttccggttcgtcccgccttcttccggctctgctctaagggcgggattatcc

SEQ ID NO: 379327 - DNA, 201 bp, Homo sapiens
gagaaagtgaatggtaaaaaggtgatgaccccatccattcctggcttagttatctaggtcaccataatgaagaaggggtctagcattttcagttccgtttsttgtggccaccctgtagtaatgtgatccccccactcaaaatttagtttccatgtctcaattggtgacaccacacttgcactaagagtatattaaaaagtt

SEQ ID NO: 379328 - DNA, 201 bp, Homo sapiens
atgtctttttatttagtgttgaagatgaagctgtagataaaaacattttcagagactgtaacaagatcgcattttacaggtaaggaaaataaatatagtarctagatcaaaacatctctgacagtatttcaaaattgatgcttattaaatttttggaactgatagactttccaaggaaaggataatttaataattaaggaa

SEQ ID NO: 379329 - DNA, 201 bp, Homo sapiens
ggtttattttgcatgttcatactgtcgttagagaaggtacaaaagttggattcacaagccctgtgtgaaataaatttctcaaaatgtctttttatttagtsttgaagatgaagctgtagataaaaacattttcagagactgtaacaagatcgcattttacaggtaaggaaaataaatatagtaactagatcaaaacatctc

SEQ ID NO: 379330 - DNA, 201 bp, Homo sapiens
acatatacgtgaacatttgtcttacataaaactgatgagacctccaaaccttcatgtcctgacagcttgtggtcatcagtgatccccacatcaagattgawcctgactactcagtatatgtgaaggccaaagatcagggcttctttgtgaagaatcaggaaggggaagactttgaaggggtgtgttggccaggtatgaaat

SEQ ID NO: 379331 - DNA, 201 bp, Homo sapiens
gatctcagtgattaaagaatgcaataattacagtgatttcaagagaaaggtgaagaaaagctacatgtttaatcaagtttcaataagcttattgagcagcrcggtgaacagggtgctggctgttggggacacagaagataaaaactgctactgctttgtgactaaagtatgaatatttgataggagacagaatagagatat

SEQ ID NO: 379332 - DNA, 201 bp, Homo sapiens
gatcacttgaccccagtggtttaaggctgcagtgaactatgatcgcaccactgcactccagcctgggtgatggagcaagaccctgtctctaaaaaaataarcaattttttttaaaaattgaataacaatatttgggaagagttgggtaattctaaatagtcaaacctcaaaatttcactggccctcccatttcagcagaag

SEQ ID NO: 379333 - DNA, 201 bp, Homo sapiens
cggggtctgttgggggatggggggctaggggagagatagcattaggagtaatacctaatgtagatgatgggttgatgggtgcagcaaaccaccatgtctatttttttttttttttgagacagagtctcgctgtgtcgcccaggctggagtgcagtggtgtgatactggctcactgcaacctccgcctcccaggttcaagca

SEQ ID NO: 379334 - DNA, 201 bp, Homo sapiens
agcactgtaaggtaagccaaggagcgaggtattttagagacacgcttgatatattcttttatcatatcttgagtaataaattttgttatgtgcacttcttmttttggctgctcaaaactacagtcatttaggttggtgtaaaagtaattgtggtttttgccattacttttaatgtattcagttatttggggataagtctat

SEQ ID NO: 379335 - DNA, 201 bp, Homo sapiens
cacagtgctttgtccatgtcaccattataatttcaataaaggttcatgaccattcgatgaagaagaaatagtctcttgagcatatggtgtgagacagttgsatatctacttgcaaaagaatgaagttggactcctatattcaaaaatatgttatatgtgtatcatatacaaaaaaataactcaaaatggttcaactatata

SEQ ID NO: 379336 - DNA, 201 bp, Homo sapiens
agggcatgaaatcaagttgtcagaaagggagccagagccattttcttatcacttccttcctagacgctcttgataactaagtttctcttcctgacagctatcttttcttcttgaaagtgagaaaaatagaactacaaggaatttagcaaatcagaaagtcagccttacagaaattctttttactcagcagatttaaaattc

SEQ ID NO: 379337 - DNA, 201 bp, Homo sapiens
ttaatcaagtttcaataagcttattgagcagcgcggtgaacagggtgctggctgttggggacacagaagataaaaactgctactgctttgtgactaaagtrtgaatatttgataggagacagaatagagatatttcaaagaaaaaggaagtggctttgtaataaaattcattcagtatttaacctatcagtatcttctcat

SEQ ID NO: 379338 - DNA, 201 bp, Homo sapiens
cattttaagcatataatttaatgaagagataggtttgccttcttttgtatcttttataatacctggtactatatgctttgtatgtatttatcaatcaatarttgaatgaatgaaaaataaacaagcaaacctcagtggcatgctgtttctccaagcaaacagagataaaaagtcggggaataagaaaagcagaggaggaga

SEQ ID NO: 379339 - DNA, 201 bp, Homo sapiens
aacataaagtgaaaaagcaacctacagaatgggagaaaatgtttgcagattgtatatctgatatgggtctcttatccagaatacatgaagaactttctacmactgagcaacaaaaagacaggctgagcactgggcccatatccctcatgctcgtctgccactgagggcacatgcagcctctagaccacaaccaaacagtga

SEQ ID NO: 379340 - DNA, 201 bp, Homo sapiens
tgcattgttcctgttttcttggagatccttttctgtttccttatttgagtcactgtctctgattttggagactttgctcaaatgtgagttttgagacacartctcactctgttgcccaggctggagtatagtggtgcaatctcggctcactgcaacctccacctcctgggttcaagcagttctcctgcctcagcctcccaa

SEQ ID NO: 379341 - DNA, 201 bp, Homo sapiens
cttccctcatctataaaattgagtttataatagtgtttatctgataggattgttgtgattattaagtaggataataccagcaaactattcggcataacacytggctcagtatgggttaaataaatgttaattattgttattgctactgttattatgtctcccctttaaggcctgtaacacttctctcaaattttttagggt

SEQ ID NO: 379342 - DNA, 201 bp, Homo sapiens
gaagttttcattctgttccagtgttctgatcaataggtaatggcagctaaagaaactgtttgttttcttaagtaaatcacactatccgttcagcatcctcaaatcaaatgcacaggtatgttttaagttactatttaaagaaatgaatggtgaaggccgtttccggaatatttttttcttttcttttcttttctttttttt

SEQ ID NO: 379343 - DNA, 201 bp, Homo sapiens
tcaaacgccaaaagataagtgattctagaaaagaccagggattctacaataccatgttagctagatgactcaactgtcccttcccactctaaactgaacarttctgtgtaggatacaaactatagatcatgttaacaaacaggtatattggctgtcaagtctttcaaagtattagagagaaggtagaatcttgtcatgttc

SEQ ID NO: 379344 - DNA, 201 bp, Homo sapiens
cttggggcagtaagcaatttatggtggggtgcattagactgacatatatgaactacagtcctacttaatggaatcatcaaaagaactctgtctgggttcartggatagtgagagacagcctctcagctgtctccagagttaatttccagatcctaagcatcttgcttgaagagaaggcatagaatccatggaggactgaaa

SEQ ID NO: 379345 - DNA, 201 bp, Homo sapiens
gtgtgtaactgatggcattctctaccctgcacacccatctataaaagcactctgttgacctgacaaatgttaatgtgaactagcataccttcgtaatttcrcttcactcccttgcaataacacaaattaccctagacttgaatagttgtccaggaattttctgggaccatctgcttgatcaaagctgtttatgtggggtgc

SEQ ID NO: 379346 - DNA, 201 bp, Homo sapiens
aatatgaatgcttttacactgttggtgggagtgtaaattagttcaaccattgtggaagactatggtgattcctcaaggatctagaaccagaaataccatcsgacccagccatcccattactgggtatatttctaaagaattataaatcattctataaagacacattcacacatatgtttattgcagcactgttcacattag

SEQ ID NO: 379347 - DNA, 201 bp, Homo sapiens
ttactggttgagcatcccaatctgaaaatccaaagcccaaaatgctccaatgagcatttcctttgagtgtcatgttggtgttcaaaaagtttcagattttrgaggccagatgtggtggctcatgactgtaatcccagcactttggggagccaagatgggcgatcacctaaggtcaggagtttgagaccagcttggtcaaca

SEQ ID NO: 379348 - DNA, 201 bp, Homo sapiens
tattcattccttacggtttcttttcaaccaatcttgcggtcaaaacaatgaagttttccacgtttctaaaacttcatggaagttcatgggtaaaagtgctrttaatttggagtggggtataaggttttatgatacagtgagaaaacatttcagatttggagaaaagacttttcccttctagagattcatcaaaatttccct

SEQ ID NO: 379349 - DNA, 201 bp, Homo sapiens
aaggtcatttgctttgtgatataatggctattctctactgttcatttctctttgtgtgtcttttctgacaactgcaatgagtcttaggtagtagccaatayaagactttttattatttctccctttgcttcttttcttttcatgatgaacttgatgaacttttaaatattatgaaattaattataacataaagcttctgcc

SEQ ID NO: 379350 - DNA, 201 bp, Homo sapiens
agatcgtgccactgcactccagcctgggcgacagagcgagactctgtctcaaaaaacaaacaaaaaaaaaaatttaagaaaatgtttgagcaatgaagaaytaaactttaatattcaggactgattagaatagagatgaggaaggaggattagatggtgttctggccaaataaagtgttattgaggccctagactggtgga

SEQ ID NO: 379351 - DNA, 201 bp, Homo sapiens
ggacactgtgcactggagaaagggaaatatctagctttgagggattttaagtgctgtgtctgagcttacataattcttgtggatctaaaacatcctaacartgtacctgtgaaattggaggctggtgggaatcaggcaataaataggtaaataaaaatttgacctggttccatctcactgtggagagatggacccaatctg

SEQ ID NO: 379352 - DNA, 201 bp, Homo sapiens
agaggaactcacaaggctggagatgttgagctggtggccacttcaaacccccatccctctccttttaatactgtttgtatctattccagttttgctgaccrgaggggtcattatcccagcaagtgtgtggtggagaagatcttggtcttaggcttcaggaaggagccatcttctgtgactacccactcatctggtgagaaa

SEQ ID NO: 379353 - DNA, 201 bp, Homo sapiens
ttgccttatctatggctatgtcacatgaatattgatttactaattaattacttggaagtacaaatcacatagggccatgtaaacctatagcagcttgtttytctcttcctgttttgttttctaggctgatttcatgctctggggacacaggcagtctgatattggcagatggaaaaggagacctgaagtgccatatcacag

SEQ ID NO: 379354 - DNA, 201 bp, Homo sapiens
acagatgggagaggaactcacaaggctggagatgttgagctggtggccacttcaaacccccatccctctccttttaatactgtttgtatctattccagttytgctgaccagaggggtcattatcccagcaagtgtgtggtggagaagatcttggtcttaggcttcaggaaggagccatcttctgtgactacccactcatct

SEQ ID NO: 379355 - DNA, 201 bp, Homo sapiens
tgttgaattttatcaaaggcctttcccgcatctattgagataatcatgtggtttttgtctttggttctgtttatgtgatggattacgtttattgatttgcrtatgttgaaccggccttgccccagagatgaagctgacttgatcgtggtggataaattttttgatgtgctgctgaattcggtttgccagtattttattgag

SEQ ID NO: 379356 - DNA, 201 bp, Homo sapiens
tcaagccaatggttctcaaccttttctaggcctccccatcattcacatgggtatcacatgcccatctgtcacatttctcaccaggcttagtgatggaattrgggtagaggggcgagtttgtctctttaggagatatctttcaggtacttggggcttatgcagttagaaaaatactcactttcctctttcctcctccctatt

SEQ ID NO: 379357 - DNA, 201 bp, Homo sapiens
ttaaaaagagaaacaaagttgaaaaatttatacttcttatatgatttggctgtttccccacccaaatctcatcatgaattcccctgttgtgggagagaccyggtgggaggtaattgaatcatgggggcagatctttctcatactgttctcgtgatagtgaatgagtctcatgagatgtgatggttataaaaaggggagttt

SEQ ID NO: 379358 - DNA, 201 bp, Homo sapiens
accataccctcctccgtctcccatccaatctagttatatcacaatttttggttaaatcaatattcaatgtttacatttttcacatgctcaagggtgtctgwtactttatccagtctacttctttccctggagactttcttccctaccagagctcttcatcttcctcctcccatctggaccattgttctctaggttccctgc

SEQ ID NO: 379359 - DNA, 201 bp, Homo sapiens
acagacagaaaacttcactcttcagcagggttctggaaataagcatgtatatactacactgataggaaaatttaaaatacaaaataggaaaagccacttayaggatgggcagaaaggaattcatcacttaagaggaaaaaacagcaaagacaggtatagataacaaaccaatgaagggtgggaagtttccctaataattaa

SEQ ID NO: 379360 - DNA, 201 bp, Homo sapiens
tatcacaatttttggttaaatcaatattcaatgtttacatttttcacatgctcaagggtgtctgatactttatccagtctacttctttccctggagacttycttccctaccagagctcttcatcttcctcctcccatctggaccattgttctctaggttccctgcacagctttcatctcagaacttacctttgctgttttc

SEQ ID NO: 379361 - DNA, 201 bp, Homo sapiens
taaaaattagctgggcacgttgggtgtgtacctgtcatcctagctactcagaggctgaggctggaggattacatgagcccaggagttagaggttgcagtargctgtgattgcactgctgcactcccacttggggaacagagtgagaccctgtctcctgtctctaaggaaaaaaaaaaagaaaaagaaaactgcagcctctc

SEQ ID NO: 379362 - DNA, 201 bp, Homo sapiens
ccagggattctacaataccatgttagctagatgactcaactgtcccttcccactctaaactgaacaattctgtgtaggatacaaactatagatcatgttawcaaacaggtatattggctgtcaagtctttcaaagtattagagagaaggtagaatcttgtcatgttcagctatagttgcccttagttaagagttgtagcat

SEQ ID NO: 379363 - DNA, 201 bp, Homo sapiens; identical to SEQ ID NO: 82194

SEQ ID NO: 379364 - DNA, 201 bp, Homo sapiens
aaagcttggttgcctcacttggccttcttttgcttccagctgacataggcgggttcattgggaatccagagacagagctgctagtgcgttggtaccaggcyggagcctaccagcccttcttccgtggccatgccaccatgaacaccaagcgacgagagccctggctctttggggaggaacacacccgactcatccgagaag

SEQ ID NO: 379365 - DNA, 201 bp, Homo sapiens
tgctgggattacaggtgtgagccaccacacctgcctccattcatatttcatggtgaggctctgtgtgcctagatgaggcttccactctagttttgagagtrggcatgtctactggtgtttgggagcagggtgagctcttctgtcaatagcctcctcaataccactctggggagagcttccctggctttggccaacagttac

SEQ ID NO: 379366 - DNA, 201 bp, Homo sapiens
aacagttaccaccctgctcctgcctgccacctgccaaatttttgttgaaattactccactcccattctctttgtttttgtggctttcttccttttttcttytctttactcagattttagtgtgactttaggaggggaaggagatacatgcaagtggttgaccagaagtccttcacgttatcagtaaacattttgataataa

SEQ ID NO: 379367 - DNA, 201 bp, Homo sapiens
catgttggtgttcaaaaagtttcagattttggaggccagatgtggtggctcatgactgtaatcccagcactttggggagccaagatgggcgatcacctaakgtcaggagtttgagaccagcttggtcaacatggtgaaaccctctgtctactaaaagtacaaaaattagctgggcatggtggcatgcacctgtagtcccag

SEQ ID NO: 379368 - DNA, 201 bp, Homo sapiens
tgtgtgacccaccttttggctgaaggtcatttgctttgtgatataatggctattctctactgttcatttctctttgtgtgtcttttctgacaactgcaatkagtcttaggtagtagccaatacaagactttttattatttctccctttgcttcttttcttttcatgatgaacttgatgaacttttaaatattatgaaatta

SEQ ID NO: 379369 - DNA, 201 bp, Homo sapiens
ccttcccacgtggattagccctgaaacccagtctcccataaaacggtacccatgtctatgcaccatttcagagatcccagtcccaaccagtgatttcttaycaggtagctccaacaactaaaacccccttgggcaaagcctgggaggatccagaagtgatgtgtccttttcagattttttaagcctagtgaggcctgtagc

SEQ ID NO: 379370 - DNA, 201 bp, Homo sapiens
agatacatgcaagtggttgaccagaagtccttcacgttatcagtaaacattttgataataatttactgaaacttcttcccaacttcagtttctttaccttyaagtgagtcccagtgctgcaccctgacttaatttttctaaaatataggtctgctaagattacatcttgccagacttttgatggcttctcataagacaaga

SEQ ID NO: 379371 - DNA, 201 bp, Homo sapiens
gcactgaactccattttaatgtcctccttgtcatgtggtgttgagatgactagtaggtacataaggtttcatgccctctgtcagtctgttagagacaacaraggtgatggtgatcactaatgttgcctgcatcttatatgcagctcattgcatagtgaaagagcctctattaggccaggcgtggtggctcacacctataat

SEQ ID NO: 379372 - DNA, 201 bp, Homo sapiens
aagattgcctggctgggcgaggtggctcacacctgtaatcccagcacttcgggaggccaaggcaggcggatcacctgaggctgggagtttgagaccagccygaccaacatgcagaaaccccgtctctactaaaaatacaaaattagccaggcatggtggcgcatgcctgtaatcccagctacttgggaggctgaggcagga

SEQ ID NO: 379373 - DNA, 201 bp, Homo sapiens
tggttgaccagaagtccttcacgttatcagtaaacattttgataataatttactgaaacttcttcccaacttcagtttctttaccttcaagtgagtcccartgctgcaccctgacttaatttttctaaaatataggtctgctaagattacatcttgccagacttttgatggcttctcataagacaagattcagaattccta

SEQ ID NO: 379374 - DNA, 201 bp, Homo sapiens
attagaatagagatgaggaaggaggattagatggtgttctggccaaataaagtgttattgaggccctagactggtggaagtgatggtattgtaaagtcacrgagagatgctagagacacagcgctgtggcttacaacttttctcaaatctccttcctaatatgcctgcaccactgggcttggggactttgtttttaacatg

SEQ ID NO: 379375 - DNA, 201 bp, Homo sapiens
gacatttttcagtgtctgggttatctggtttggggaacatacaggaatattgatcttgaaataaagcctctgacctttcgacaagaaagtaatattctaaragcccattgtcagatccccaaacaggctgaattatgtagtaagggggtcacctgtttgaggccacggctttatcctgtcatttgaagtgcatatactgca

SEQ ID NO: 379376 - DNA, 201 bp, Homo sapiens
aattgcttgaacctgggagtcagaggttgcagtgagccaagattgtgccgctgcaccctcagcctgggcaacacagtgagactctgtctcaaaaaaaaaawtttttaataacaaagaacttctattaaaaatggtttctgggataagatgggtgtttcaaggagattgcacattaagatatggtatgagtgtgatctgaag

SEQ ID NO: 379377 - DNA, 201 bp, Homo sapiens
ttatttttctgtaagcctgtcatgtacttccttgcctctgtgttttttctgttccctgtgcccggaatgctctatctattcttcctgtctggtatattccyactaagtctacaaggtccaaaccaggttttatctcctctgtgaagcctttcaagaccctatacttcaccacaggcagaatttattaacctctctgtgttc

SEQ ID NO: 379378 - DNA, 201 bp, Homo sapiens
ctaaactgtagtttctggcatcaagtattagggcactaataaacaacttagtacagggatagacaagcgttgggccaaatctggccatgcctattcatttscctatttgtggctgcttttgtactactatggcagagttgaataattgaaaaagagacctcatggcctgcaaagttgaaaatatttactatctggaccttt

SEQ ID NO: 379379 - DNA, 201 bp, Homo sapiens
attcacttggtatggtaaatatggtattaattctgcttctgtactgagttctttctagagggcctttggctactgtagtaactggaaagctaaaaactacrtttcttcatttcccagactcccttgtagctacaggttctgatataattcagtttccaccaatcagatgcacttaaaaaaaccttgatttcagaactgagt

SEQ ID NO: 379380 - DNA, 201 bp, Homo sapiens
gggctccggagatctaatacgctagccaaactcccatacttacagtaatttatactattggacggactcacttaattaaggttattctcagaagtctaacrtgtaattttacttagtgtcaaggtaaattaataatcagtgtctaggtgaaaaacaatctttggggactaaagcattttcaagtacctgcaaaactttaat

SEQ ID NO: 379381 - DNA, 201 bp, Homo sapiens
gtgatatttcaactcagttttgccggttggtttccattatattgtcatattatttcactaaaggaatatcagattatgccagatgctttcatttttactawatcattactgtagttttatgtagattattttttccatgaaaatcttataaaaggtcaatacattataatgagaaatgaattcagttatgatagaatcatc

SEQ ID NO: 379382 - DNA, 201 bp, Homo sapiens
tcaaaggcctttcccgcatctattgagataatcatgtggtttttgtctttggttctgtttatgtgatggattacgtttattgatttgcgtatgttgaaccggccttgccccagagatgaagctgacttgatcgtggtggataaattttttgatgtgctgctgaattcggtttgccagtattttattgaggattttcacatt

SEQ ID NO: 379383 - DNA, 201 bp, Homo sapiens
gcatggtgctggtaccaaaacagacatatagaccagtggaacagaacagagacctcagaaataaccaaataacaccacacatctacaaccatctgatcttygagaaacctgacaaaaacaagcaatgtggaaaggatctcctattcaataaatggtgctgagagaactggctagccatatgcagaaaactgaaactggatc

SEQ ID NO: 379384 - DNA, 201 bp, Homo sapiens
atacaagctttatgacaaaaataattcccaaacttttgtaaatgttacactcttaacatgtcctgtgtgtaactgatggcattctctaccctgcacacccwtctataaaagcactctgttgacctgacaaatgttaatgtgaactagcataccttcgtaatttcgcttcactcccttgcaataacacaaattaccctagac

SEQ ID NO: 379385 - DNA, 201 bp, Homo sapiens
ttctgtaagcctgtcatgtacttccttgcctctgtgttttttctgttccctgtgcccggaatgctctatctattcttcctgtctggtatattcctactaastctacaaggtccaaaccaggttttatctcctctgtgaagcctttcaagaccctatacttcaccacaggcagaatttattaacctctctgtgttctggtag

SEQ ID NO: 379386 - DNA, 201 bp, Homo sapiens
ttttctgtttccttatttgagtcactgtctctgattttggagactttgctcaaatgtgagttttgagacacagtctcactctgttgcccaggctggagtayagtggtgcaatctcggctcactgcaacctccacctcctgggttcaagcagttctcctgcctcagcctcccaagtagtggggactacaggtgcccgccacc

SEQ ID NO: 379387 - DNA, 201 bp, Homo sapiens
aatcacatgaacctgggaggtggaggttgcagtgagccaagatgatgccattgcactccagcctgggcaacaagagtgaaactccatctcaaaaaaaaaaraaagaaagaaagaaagaaactgtggtatgctgtggctggcaagatggctgaataggaacagctccggcctgcagctgccagcaagatcaacacagaaggc

SEQ ID NO: 379388 - DNA, 201 bp, Homo sapiens
ctttgtcagcttgtccagatacgggccgaagggtaaggggggagtagcagggcttgaaaacgcttaaaagtcaaatatcaaatatggtatcaaattctttrttacactgtttttcctgcatgcttccctggtggactccacctgtcaatctggccaagaaaagaacagaaatagaaaatggggagggagagaagccactgg

SEQ ID NO: 379389 - DNA, 201 bp, Homo sapiens
ctcttatccagaatacatgaagaactttctacaactgagcaacaaaaagacaggctgagcactgggcccatatccctcatgctcgtctgccactgagggcrcatgcagcctctagaccacaaccaaacagtgacccagactgctacagccaccttctgggcaccatatcacagagcagggaccccaggctgtagggaaaga

SEQ ID NO: 379390 - DNA, 201 bp, Homo sapiens
aaagtcaaatatcaaatatggtatcaaattctttgttacactgtttttcctgcatgcttccctggtggactccacctgtcaatctggccaagaaaagaacrgaaatagaaaatggggagggagagaagccactggaacatgtataatgctgctttccagttccaggagtggtggtggtggtaatagcaataatgaaaagat

SEQ ID NO: 379391 - DNA, 201 bp, Homo sapiens
tggatagaactgtactttagcaatgataggaaggggaacagtgctccaacatcagtttctgtttataatggtgacatgggctgggcacagtggctcacgcstgtaatcccagtgctttgggaagcctccaaagtgcttccttgaattcaagtaatcctctgccttgcttcccagagaaaggctgcagtgagcactgttcat

SEQ ID NO: 379392 - DNA, 201 bp, Homo sapiens
ataaagtgaatccttcaggatagtagaaaataattattgtgactgagaggttatacatatacattgattaaattgccaagctgcaaaagtcttgagaaacrgtctcttttaaattcctgtttaggccaggtgcagtggctcatgcctataatcccagcactttgggaggcccaggcagatggatctcctgaggtcaggggt

SEQ ID NO: 379393 - DNA, 201 bp, Homo sapiens
agtctgatgagcctcttaagttttttgtttttttgtttttaaacaaaaaacactctgttgcccaggctggagtgcagtggcgtgaccatggctcactgcakcctctagctcctgggctcaagcgattcttccgctttagcctcctgagtagctgggactgtgggcatgtgccacatgcccagctaattctttttatttatt

SEQ ID NO: 379394 - DNA, 201 bp, Homo sapiens
tttgtttttttgtttttaaacaaaaaacactctgttgcccaggctggagtgcagtggcgtgaccatggctcactgcatcctctagctcctgggctcaagcrattcttccgctttagcctcctgagtagctgggactgtgggcatgtgccacatgcccagctaattctttttatttattttaatttttttgttgagatgggg

SEQ ID NO: 379395 - DNA, 201 bp, Homo sapiens
gtgcagtggcgtgaccatggctcactgcatcctctagctcctgggctcaagcgattcttccgctttagcctcctgagtagctgggactgtgggcatgtgcyacatgcccagctaattctttttatttattttaatttttttgttgagatggggtcttgctgtgttgcccaggttagtcttgaacccctggtctcaagcaat

SEQ ID NO: 379396 - DNA, 201 bp, Homo sapiens
tccagctactcaggaggctgaggcacaagaatctcttgaacctaggaggcggaggttgcagtgagccaagattgcgccactgcactccagcctgggtgacyaagcaagactccatctcaaaataaataaatttaaagaaagaatgactgtaaatattgctaaatttcagagtgatttttgctaaaattagattgctaaatt

SEQ ID NO: 379397 - DNA, 201 bp, Homo sapiens
cgctttagcctcctgagtagctgggactgtgggcatgtgccacatgcccagctaattctttttatttattttaatttttttgttgagatggggtcttgctstgttgcccaggttagtcttgaacccctggtctcaagcaatcctcctgccttagccttccaaagcactgagatcttctaagtatttttaccccacttctaa

SEQ ID NO: 379398 - DNA, 201 bp, Homo sapiens
gagcccattgtcagatccccaaacaggctgaattatgtagtaagggggtcacctgtttgaggccacggctttatcctgtcatttgaagtgcatatactgcrcttttctcctgtcggtcttcaagaccttaatttccctgtgtgcatcatttatccaaagcttggttgcctcacttggccttcttttgcttccagctgacat

SEQ ID NO: 379399 - DNA, 201 bp, Homo sapiens
gattgtctagtgtggatgtaaaggcatgcttgtgatttttgcacattgattttgtatcctcagactttgctgaagttgcttatcagtttaaggattttttkggggctgagatgatggggttttctaaatataaaatcatgtcgtctacaaacagagacaatttgacttcctctcttcctatttgaatactctttatttctt

SEQ ID NO: 379400 - DNA, 201 bp, Homo sapiens
ctgggactgtgggcatgtgccacatgcccagctaattctttttatttattttaatttttttgttgagatggggtcttgctgtgttgcccaggttagtcttraacccctggtctcaagcaatcctcctgccttagccttccaaagcactgagatcttctaagtatttttaccccacttctaaaacttgatgaggaattcaaa

SEQ ID NO: 379401 - DNA, 201 bp, Homo sapiens
tctttgcctgctgctattcacagaagatgtgacatgctcctccttgccttcggccacaattgtgaggcttccccagacatgtagaactgtaagttctacarttaaacttctttcttttgtagattgcccagtcttgggtatgtcttaagcagagtgaaaatcaaatacaacttctcaatttcaaacttacttcaaagctat

SEQ ID NO: 379402 - DNA, 201 bp, Homo sapiens
gcccttatgcgggcgtgacagagggctcacctcttgccttctaggtcacttctcacaatgtcccttgagtacctgaccctatacccgctggttattctagrttatattagtaatgcaacaaagagtaatattaaaagctaatgattaataatgtttacgctaatgattgataattgtccatgatcatctctatatctaatt

SEQ ID NO: 379403 - DNA, 201 bp, Homo sapiens
aaaatgtctacataattctatcaaaaagccccttgatctctggcacctaaaacaggtgactttaacagaagaacagaaatcccagatcagatttgctatcyttcagtaatgcattgcatcagagaaatagcaattatttgccttttgtaggaagtgtaaaagaaatataggccacacggagcttatggtctcatacagggt

SEQ ID NO: 379404 - DNA, 201 bp, Homo sapiens
gagtgtgatctgaagttttaaaataagctgcatacatccacttattcagaatgatagctttttatttcaggtcaagagggacagcccagagtctaagaggrtcatattcagctcacagctgcagttctcaaattacactgatcaggcagattctgacaaatccaacactcttggtgcctgcctgcccctacacctttaaaa

SEQ ID NO: 379405 - DNA, 201 bp, Homo sapiens; identical to SEQ ID NO: 82199
